United States Patent Application Publication US 2011/0183924 A1 - sequence listing, part 9

SEQ ID NO: 21063 - DNA, 981 bp, Homo sapiens
agtgtgaaaggatgaatgaaaagtccggagccggagcgcgccggggccagagccgcggcagaggcagaggagggagctaggaggtgagacccgctccaccctgctcgcctaggctcggcggaggctaagagcagggcagcctcctctgcccggcgcccgctgagccccggcatctggaactcagggccctggcgctccaggggcgggaactggccgggaggaccgcgcgggagagcacggatgggcaccctgggctcgatcttctcacctggggcgggtgggttctgcaccaccctcccaccctccttcctccgtgtggacgatagagccacatccagcaccacggacagctcccgggcgatcccatgggagtagaagaggtgtgagcaggttgcccagctggttagcggaaatgccaagatccaggctcctgaatttcagcctggccctttctatctgtctgatacctcctttacgagtctctctgcctgcgttgtgtggagcgggcctgctgctggttgggggagtttgcaggttgcccctatgcaaaaaaggacaggatgcatgactggcatgtaaggtgttcaggaaaaccaggaaaaggtggaacagactgctacctctgtctgaagtggtttggagggaaggcctcagggacagggcatacctagcagtagctggcaagcccatgggagaaaaggcaagggggcaaccatctgccagggcacagaggccaggggatgtccacaaggagtctccagaggccagtgggagtcatgcaaactggaacggggcctgggaaaggcccttctgtgtgcccaggcctgcctccccaactccgtgagcctagttactaagagccatccatttcttagtatttagcatgtatccaggcactgaactaagtccgtgtacaaccgtatcgttatcgtatggttcatatgaatcctgggaaggtagtatgactagtagtaccatttc

SEQ ID NO: 21064 - DNA, 1100 bp, Homo sapiens
ggacccggtctatagactctgaccttagccctcagaatccctcattcagagcttagggatcgccaggccagaaggtggctgggaaggcaccagggagaagacagcctcccgcccccagttgagggaggtggtgaagagaggggagactgaaagcagtgggggagggtgagagaggggagccagcagagactcaagtggcctccagacttccaagtgctggccttcatctccccgcaagatgcgccccctccaactctcagccttcatcttcctactgtcactgtctccttcacaaggagagcagcaagagaaagaaagagagaggcaagcgaaattcctgaatggatagacagatgctacgtcatcggagctgcatcctccactccacaagaggctaggagctggggggagagaggcagtccagccgcaggggccacccgaacagtctctcctcctcacagaagcctggagctgggcatccaagaagaagcagcctcatttgttttctggtgtcatcgtaggtggccacctatggcttttgggcttctcacctggggcgggtgggttctgcaccaccctcccaccctccttcctccgtgtggacgatagagccacatccagcaccacggacagctcccgggcgcactggaagctgagggtttgacagcggcaggccacataggcaaggaagctggtgcatgcagtgtctctgggcaaggttatgcaaaccaaaaagaagaatgtacttcatctggttgggctggattccctctgataagccttcccagttgactgaaagatgaggctaggctctagcaagttgaagtcaaaccagctccttcaagaagctttgagcagaatgaagtggggaggacccagcttccagcccaggaagcccactgtacctggagccatctgggataagactttgacccatgactcccatatccacagcctgtccatcctagcccatcccagtttatcctgtatcatttgagctgggattcccacatcctctgagttggaagtcccatctcaagtcttcaataaagactcttgaatattgaatcacaaaaaacaacacaaaattctccagcgct

SEQ ID NO: 21065 - DNA, 802 bp, Homo sapiens
ggacccggtctatagactctgaccttagccctcagaatccctcattcagagcttagggatcgccaggccagaaggtggctgggaaggcaccagggagaagacagcctcccgcccccagttgagggaggtggtgaagagaggggagactgaaagcagtgggggagggtgagagaggggagccagcagagactcaagtggcctccagacttccaagtgctggccttcatctccccgcaagatgcgccccctccaactctcagccttcatcttcctactgtcactgtctccttcacaaggagagcagcaagagaaagaaagagagaggcaagcgaaattcctgaatggatagacagatgctacgtcatcggagctgcatcctccactccacaagaggctaggagctggggggagagaggcagtccagccgcaggggccacccgaacagtctctcctcctcacagaagcctggagctgggcatccaagaagaagcagcctcatttgttttctggtgtcatcgtaggtggccacctatggcttttgggcttctcacctggggcgggtgggttctgcaccaccctcccaccctccttcctccgtgtggacgatagagccacatccagcaccacggacagctcccgggcgaccaaaaagaagaatgtacttcatctggttgggctggattccctctgataagccttcccagttgtttatcctgtatcatttgagctgggattcccacatcctctgagttggaagtcccatctcaagtcttcaataaagactcttgaatattgaatcaca

SEQ ID NO: 21066 - DNA, 910 bp, Homo sapiens
ggacccggtctatagactctgaccttagccctcagaatccctcattcagagcttagggatcgccaggccagaaggtggctgggaaggcaccagggagaagacagcctcccgcccccagttgagggaggtggtgaagagaggggagactgaaagcagtgggggagggtgagagaggggagccagcagagactcaagtggcctccagacttccaagtgctggccttcatctccccgcaagatgcgccccctccaactctcagccttcatcttcctactgtcactgtctccttcacaaggagagcagcaagagaaagaaagagagaggcaagcgaaattcctgaatggatagacagatgctacgtcatcggagctgcatcctccactccacaagaggctaggagctggggggagagaggcagtccagccgcaggggccacccgaacagtctctcctcctcacagaagcctgaccaaaaagaagaatgtacttcatctggttgggctggattccctctgataagccttcccagttgactgaaagatgaggctaggctctagcaagttgaagtcaaaccagctccttcaagaagctttgagcagaatgaagtggggaggacccagcttccagcccaggaagcccactgtacctggagaccgtggactagtactagtccacggttggctagtaaaaaacatgtagtattcgtgactgttcaccgctgtatctgcagtctcattcccaaggcagagcaggcactcagctaatgtttgctggctgaccgaattaaggattagaaactaaaaaatacaaatattgtcatgcattcttcagaaggttgccatgaggcctaagtgttatagtgaaatactatatgggaaaatgggtgcattcttttaaaattttttaaatg

SEQ ID NO: 21067 - DNA, 456 bp, Homo sapiens
gaaggttatatttcaagaatgatttaacctaggtcatgtaagatacggagggtatagatcaggtagagctgaaatgagccttagatatcatcattcctatattcctcattttacagatcccatgggagtagaagaggtgtgagcaggttgcccagctggttagcggaaatgccaagatccaggctcctgaatttcagcctggccctttctatctgtctgatacctcctttacgagtctctctgcctgcgttgtgtggagcgggcctgctgctggttgggggagtttgcaggttgcccctatgcaaaaaaggacaggatgcatgactggcatgtaaggtgttcaggaaaaccaggaaaaggtggaacagactgctacctctgtctgaagtggtttggagggaaggcctcagggacagggcatacctagcagtagctggcaagcccatgggagaaaag

SEQ ID NO: 21068 - DNA, 280 bp, Homo sapiens
ctaaccacaaaggccattagatacagaaataaagactgctacttgcctaaagaacaagtaaaattatctgcctatattctgtaaatcaggcagcaaaatgtgacatatattacataaatgtaatctccaaaaacaatgttaaaaatcagtgttttaggggccgggcatggtggctcacgcctgcaatgccagcactgtgggaggccgagacaggtagattacctgagatcaggagttcaagatcatcctggccaatatggtgaaaccccatctctacttt

SEQ ID NO: 21069 - DNA, 480 bp, Homo sapiens
gtttgtacgaggaggaggaggtacctgaaaaaggaaagcttgacagaagatacgatgtttgttgtggcttttgaatatgagccacagttattgaacctgtgattacctggacaagggtaagcaactacatagagtgaaggctggaaagctctattggagtgagagagataagggtcctgtttgcctggcttaggtgtttagactttagcctgtaggcaactgaaagtcattgaaggctttcaatcaggaggatgacataaccagatttgcatttttaaaagataactggcatcatcagtgagataaatggatctgtaacaagagacaggaggcagggagtctgcttgggagaactctgtgatacactgtgactcatggtaagaacctcaagtaaggtaaaggcactgatatttgagagcaattatctctatgctctccacaaagcctcaacttcacatattcaatgtgttaatttccagg

SEQ ID NO: 21070 - DNA, 154 bp, Homo sapiens
atcatgttgtatagcattagtaattgttaaacagaattaaaatttgatttattgcaataaaaatttaaaattcccaattaaaatattcaccctgagagtataatgcatttaatcatattttaacttcttatttttgcttgtacaatataagtct

SEQ ID NO: 21071 - DNA, 349 bp, Homo sapiens
tttcagctgcagcacatggatctctgccttgttacatggtgttcctcccttgtgtctctatgtctcgtctctttttcttttttctgagacagagccattgcactccagcctgggcgacagtgcgaggctctcaaaacaaacaaacaaaaaaaaatgcacaaaaaacaaaaataagattacatctcttaagtctctaaattgggaactgaaattcacacctgcaacatctttaatgatccaatggaaagaagtccaaactccttgaccagggtttgacaaattatggcccacgggccaaatttggttggctgcctgtttttgttattaaagagtttttggaatactgcca

SEQ ID NO: 21072 - DNA, 2903 bp, Homo sapiens
aagtgctctcctgacccgccgctgtgcagcgcagcgcaccgcgggaagatggcgttggaggtcggcgatatggaagatgggcagctttccgactcggattccgacatgacggtcgcacccagcgacaggccgctgcaattgccaaaagtgctaggtggcgacagtgctatgagggccttccagaacacggcaactgcatgtgcaccagtatcacattatcgagctgttgaaagtgtggattcaagtgaagaaagtttttctgattcagatgatgatagctgtctttggaaacgcaaacgacagaaatgttttaaccctcctcccaaaccagagccttttcagtttggccagagcagtcagaaaccacctgttgctggaggaaagaagattaacaacatatggggtgctgtgctgcaggaacagaatcaagatgcagtggccactgaacttggtatcttgggaatggagggcactattgacagaagcagacaatccgagacctacaattatttgcttgccaagaaacttaggaaggaatctcaagagcatacaaaagatctagacaaggaactagatgaatatatgcatggtggcaaaaaaatgggatcaaaggaagaggaaaatgggcaaggtcatctcaaaaggaaacgacctgtcaaagacaggctagggaacagaccagaaatgaactataaaggtcgatacgagatcacagcggaagattctcaagagaaagtggctgatgaaatttcattcaggttacaggaaccaaagaaagacctgatagcccgagtagtgaggattattggtaacaaaaaggcaattgaacttctgatggaaaccgctgaagttgaacaaaatggtggtctctttataatgaatggtagtcgaagaagaacaccaggtggagtttttctgaatctcttgaaaaacactcctagtatcagcgaggaacaaattaaggacattttctacattgaaaaccaaaaggaatatgaaaataaaaaagctgctaggaagaggagaacacaagtgttggggaaaaagatgaaacaagctattaaaagtctaaattttcaagaagatgatgatacatcacgagaaacttttgcaagtgacacgaatgaggccttggcctctcttgatgagtcacaggaaggacatgcagaagccaagttggaggcagaggaagccattgaagttgatcattctcatgatttggacatcttttaagtacattttcaacagtttgaggactaagcctttctaaaataacattgtaataaaccatttttactgagattgcaacgttttgcactgataaacatgagaatctggaggaaagacaattgttttcttgtttaaaatatgtgtggaaaggaatgcaattgatagaacatttaaagatatatctgacaaaatacttaagagtatatagcacaggatttaatttctcaatctgttgcatgtgctaattatgagtattactagttgataatcagttttgtctaggtcataacataccatttgtaagtttgtttgctttttcaggtttatctttgcagtgaattatgctttgctttaaaacattccgctaaaatcataatgggacatataaattattaagctgttagaaatgcattcaaatttgttttttctgtgttctaagaactcaggcaattttaaggataaaaactaacattggccaggcacggtggctcacgcctgtaatcccaacactttaggagaccaaggcgggcagatcacttgaggtcaggagtttgagaccagccaggccaacatggtgaaacttcatctctactaaaaatacaaaaactagccaggtgtggttctccatgcctataatcccggctactcgggaggctgaggcaggagaatcacctgaacccccaggctggagtacagtggcaggatctcagcttactgcagcttccatctcccaggttcaagcgatcatgtgcctaagcctcctgagtagctgggatcacaggtgtgtaccaccacgcccagctgatttttgtatttttagtaaagactttcgccatgttgtccaggctggtctcgaactcctggcctaatgatctgcccacctctgcctcccaaagtgctgggatcacaggcatgagccaccgaacccagccttattctgcttaaatttaacgtgttttttgacttcttaattaacttggtcatatactaaatgtgatctcctgtggattaccacatgcattaaaaaatttttcaagctgggcctagtggcgcacacctgcaatcccaacactttgggaggccaagagaggaagattgcttgagcccaggagtttgagaccaatctaggcaatgtagtgagaccctgtctctaatttaaaaaagaaaaagaaaaaaacattcccagtggcagcctgcctaagactgtcttaccttatgttaaggaagtcaggtatttaaaatgttacatatgccggcgcagtggctcatgtgtgtaatcccagcactctgggaggctgagacaggtagatcatttgaggtcaggagttcaaaaccaacctggtctacatggtgaaaccccatctcaactaaaaatacaaaaaatacaaaaaattagccgggcgcggtggctcacacctgtaatcccagcactttgggaggtggaggcgggtggatcacaaggtcaagagatcgagaccatcctggccaacatggtgaaaccctgtctctattaaaaatacaaaaattagctgggcgtggtggcgcatgcctgtagtcccaactactagggaggctgaggcaggagaatcacttgaacccaggaggtggaggttgcagtgagccgagatcacgccactgcactccagcctggcgacagagcgagactccctctc

SEQ ID NO: 21073 - DNA, 1825 bp, Homo sapiens
aagtgctctcctgacccgccgctgtgcagcgcagcgcaccgcgggaagatggcgttggaggtcggcgatatggaagatgggcagctttccgactcggattccgacatgacggtcgcacccagcgacaggccgctgcaattgccaaaagtgctaggtggcgacagtgctatgagggccttccagaacacggcaactgcatgtgcaccagtatcacattatcgagctgttgaaagtgtggattcaagtgaagaaagtttttctgattcagatgatgatagctgtctttggaaacgcaaacgacagaaatgttttaaccctcctcccaaaccagagccttttcagtttggccagagcagtcagaaaccacctgttgctggaggaaagaagattaacaacatatggggtgctgtgctgcaggaacagaatcaagatgcagtggccactgaacttggtatcttgggaatggagggcactattgacagaagcagacaatccgagacctacaattatttgcttgccaagaaacttaggaaggaatctcaagagcatacaaaagatctagacaaggaactagatgaatatatgcatggtggcaaaaaaatgggatcaaaggaagaggaaaatgggcaaggtcatctcaaaaggaaacgacctgtcaaagacaggctagggaacagaccagaaatgaactataaaggtcgatacgagatcacagcggaagattctcaagagaaagtggctgatgaaatttcattcaggttacaggaaccaaagaaagacctgatagcccgagtagtgaggattattggtaacaaaaaggcaattgaacttctgatggaaaccgctgaagttgaacaaaatggtggtctctttataatgaatggtagtcgaagaagaacaccaggtggagtttttctgaatctcttgaaaaacactcctagtatcagcgaggaacaaattaaggacattttctacattgaaaaccaaaaggaatatgaaaataaaaaagctgctaggaagaggagaacacaagtgttggggaaaaagatgaaacaagctattaaaagtctaaattttcaagaagatgatgatacatcacgagaaacttttgcaagtgacacgaatgaggccttggcctctcttgatgagtcacaggaaggacatgcagaagccaagttggaggcagaggaagccattgaagttgatcattctcatgatttggacatcttttaagtacattttcaacagtttgaggactaagcctttctaaaataacattgtaataaaccatttttactgagattgcaacgttttgcactgataaacatgagaatctggaggaaagacaattgttttcttgtttaaaatatgtgtggaaaggaatgcaattgatagaacatttaaagatatatctgacaaaatacttaagagtatatagcacaggatttaatttctcaatctgttgcatgtgctaattatgagtattactagttgataatcagttttgtctaggtcataacataccatttgtaagtttgtttgctttttcaggtttatctttgcagtgaattatgctttgctttaaaacattccgctaaaatcataatgggacatataaattattaagctgttagaaatgcattcaaatttgttttttctgtgttctaagaactcaggcaattttaaggataaaaactaacattgagccaccatgcctggtgggactttaacttttaactttggagcacttactccttttctctggagcccatgtttctggatgactattctcagatttttgctggaataaactctcaaaaactgg

SEQ ID NO: 21074 - DNA, 865 bp, Homo sapiens
  misc_feature (11)..(11): n is a, c, g, or t
  misc_feature (18)..(18): n is a, c, g, or t
  misc_feature (837)..(837): n is a, c, g, or t
  misc_feature (839)..(839): n is a, c, g, or t
tcggctaggtncgaggcngggtgtcgtatctttgcagtgaattatgctttgctttaaaacattccgctaaaatcataatgggacatataaattattaagctgttagaaatgcattcaaatttgttttttctgtgttctaagaactcaggcaattttaaggataaaaactaacattggccaggcacggtggctcacgcctgtaatcccaacactttaggagaccaaggcgggcagatcacttgaggtcaggagtttgagaccagccaggccaacatggtgaaacttcatctctactaaaaatacaaaaactagccaggtgtggttctccatgcctataatcccggctactcgggaggctgaggcaggagaatcacctgaacccgggaggctggagtacagtggtgcagtcatagctcgctgcagcctcaacctcccaggctcaaggtatcctcccacctcagccttctaagtagctggtaccacaggcatgcaccaccatgtctcgcttagttgcccaggtttgtctcttaactcctggcctcaagcagtcctcccacctgggcctcccaaagtgctgggatcacaggcatgagccaccgaacccagccttattctgcttaaatttaacgtgttttttgacttcttaattaacttggtcatatactaaatgtgatctcctgtggattaccacatgcattaaaaaatttttcaagctgggcctagtggcgcacacctgcaatcccaacactttgggaggccaagagaggaagattgcttgagcccaggagtttgagaccaatctaggcaatgtagtgagacctggtcttcttaatttananaaaaaaaaaccggggttcttggcggg

SEQ ID NO: 21075 - DNA, 1990 bp, Homo sapiens
aagtgctctcctgacccgccgctgtgcagcgcagcgcaccgcgggaagatggcgttggaggtcggcgatatggaagatgggcagctttccgactcggattccgacatgacggtcgcacccagcgacaggccgctgcaattgccaaaagtgctaggtggcgacagtgctatgagggccttccagaacacggcaactgcatgtgcaccagtatcacattatcgagctgttgaaagtgtggattcaagtgaagaaagtttttctgattcagatgatgatagctgtctttggaaacgcaaacgacagaaatgttttaaccctcctcccaaaccagagccttttcagtttggccagagcagtcagaaaccacctgttgctggaggaaagaagattaacaacatatggggtgctgtgctgcaggaacagaatcaagatgcagtggccactgaacttggtatcttgggaatggagggcactattgacagaagcagacaatccgagacctacaattatttgcttgccaagaaacttaggaaggaatctcaagagcatacaaaagatctagacaaggaactagatgaatatatgcatggtggcaaaaaaatgggatcaaaggaagaggaaaatgggcaaggtcatctcaaaaggaaacgacctgtcaaagacaggctagggaacagaccagaaatgaactataaaggtcgatacgagatcacagcggaagattctcaagagaaagtggctgatgaaatttcattcaggttacaggaaccaaagaaagacctgatagcccgagtagtgaggattattggtaacaaaaaggcaattgaacttctgatggaaaccgctgaagttgaacaaaatggtggtctctttataatgaatggtagtcgaagaagaacaccaggtggagtttttctgaatctcttgaaaaacactcctagtatcagcgaggaacaaattaaggacattttctacattgaaaaccaaaaggaatatgaaaataaaaaagctgctaggaagaggagaacacaagtgttggggaaaaagatgaaacaagctattaaaagtctaaattttcaagaagatgatgatacatcacgagaaacttttgcaagtgacacgaatgaggccttggcctctcttgatgagtcacaggaaggacatgcagaagccaagttggaggcagaggaagccattgaagttgatcattctcatgatttggacatcttttaagtacattttcaacagtttgaggactaagcctttctaaaataacattgtaataaaccatttttactgagattgcaacgttttgcactgataaacatgagaatctggaggaaagacaattgttttcttgtttaaaatatgtgtggaaaggaatgcaattgatagaacatttaaagatatatctgacaaaatacttaagagtatatagcacaggatttaatttctcaatctgttgcatgtgctaattatgagtattactagttgataatcagttttgtctaggtcataacataccatttgtaagtttgtttgctttttcaggtttatctttgcagtgaattatgctttgctttaaaacattccgctaaaatcataatgggacatataaattattaagctgttagaaatgcattcaaatttgttttttctgtgttctaagaactcaggcaattttaaggataaaaactaacattggccaggcacggtggctcacgcctgtaatcccaacactttaggagaccaaggcgggcagatcacttgaggtcaggagtttgagaccagccaggccaacatggtgaaacttcatctctactaaaaatacaaaaactagccaggtgtggttctccatgcctataatcccggctactcgggaggctgaggcaggagaatcacctgaacccgggaggcaaaggttgcagtgagctgagatcgtaccactgtactccagcctgggcgacagagcaagactctgtctcaaaaa

SEQ ID NO: 21076 - DNA, 2393 bp, Homo sapiens
  misc_feature (2365)..(2365): n is a, c, g, or t
  misc_feature (2367)..(2367): n is a, c, g, or t
aagtgctctcctgacccgccgctgtgcagcgcagcgcaccgcgggaagatggcgttggaggtcggcgatatggaagatgggcagctttccgactcggattccgacatgacggtcgcacccagcgacaggccgctgcaattgccaaaagtgctaggtggcgacagtgctatgagggccttccagaacacggcaactgcatgtgcaccagtatcacattatcgagctgttgaaagtgtggattcaagtgaagaaagtttttctgattcagatgatgatagctgtctttggaaacgcaaacgacagaaatgttttaaccctcctcccaaaccagagccttttcagtttggccagagcagtcagaaaccacctgttgctggaggaaagaagattaacaacatatggggtgctgtgctgcaggaacagaatcaagatgcagtggccactgaacttggtatcttgggaatggagggcactattgacagaagcagacaatccgagacctacaattatttgcttgccaagaaacttaggaaggaatctcaagagcatacaaaagatctagacaaggaactagatgaatatatgcatggtggcaaaaaaatgggatcaaaggaagaggaaaatgggcaaggtcatctcaaaaggaaacgacctgtcaaagacaggctagggaacagaccagaaatgaactataaaggtcgatacgagatcacagcggaagattctcaagagaaagtggctgatgaaatttcattcaggttacaggaaccaaagaaagacctgatagcccgagtagtgaggattattggtaacaaaaaggcaattgaacttctgatggaaaccgctgaagttgaacaaaatggtggtctctttataatgaatggtagtcgaagaagaacaccaggtggagtttttctgaatctcttgaaaaacactcctagtatcagcgaggaacaaattaaggacattttctacattgaaaaccaaaaggaatatgaaaataaaaaagctgctaggaagaggagaacacaagtgttggggaaaaagatgaaacaagctattaaaagtctaaattttcaagaagatgatgatacatcacgagaaacttttgcaagtgacacgaatgaggccttggcctctcttgatgagtcacaggaaggacatgcagaagccaagttggaggcagaggaagccattgaagttgatcattctcatgatttggacatcttttaagtacattttcaacagtttgaggactaagcctttctaaaataacattgtaataaaccatttttactgagattgcaacgttttgcactgataaacatgagaatctggaggaaagacaattgttttcttgtttaaaatatgtgtggaaaggaatgcaattgatagaacatttaaagatatatctgacaaaatacttaagagtatatagcacaggatttaatttctcaatctgttgcatgtgctaattatgagtattactagttgataatcagttttgtctaggtcataacataccatttgtaagtttgtttgctttttcaggtttatctttgcagtgaattatgctttgctttaaaacattccgctaaaatcataatgggacatataaattattaagctgttagaaatgcattcaaatttgttttttctgtgttctaagaactcaggcaattttaaggataaaaactaacattggccaggcacggtggctcacgcctgtaatcccaacactttaggagaccaaggcgggcagatcacttgaggtcaggagtttgagaccagccaggccaacatggtgaaacttcatctctactaaaaatacaaaaactagccaggtgtggttctccatgcctataatcccggctactcgggaggctgaggcaggagaatcacctgaacccgggaggctggagtacagtggtgcagtcatagctcgctgcagcctcaacctcccaggctcaaggtatcctcccacctcagccttctaagtagctggtaccacaggcatgcaccaccatgtctcgcttagttgcccaggtttgtctcttaactcctggcctcaagcagtcctcccacctgggcctcccaaagtgctgggatcacaggcatgagccaccgaacccagccttattctgcttaaatttaacgtgttttttgacttcttaattaacttggtcatatactaaatgtgatctcctgtggattaccacatgcattaaaaaatttttcaagctgggcctagtggcgcacacctgcaatcccaacactttgggaggccaagagaggaagattgcttgagcccaggagtttgagaccaatctaggcaatgtagtgagacctggtcttcttaatttananaaaaaaaaaccggggttcttggcggg

SEQ ID NO: 21077 - DNA, 2466 bp, Homo sapiens
aagtgctctcctgacccgccgctgtgcagcgcagcgcaccgcgggaagatggcgttggaggtcggcgatatggaagatgggcagctttccgactcggattccgacatgacggtcgcacccagcgacaggccgctgcaattgccaaaagtgctaggtggcgacagtgctatgagggccttccagaacacggcaactgcatgtgcaccagtatcacattatcgagctgttgaaagtgtggattcaagtgaagaaagtttttctgattcagatgatgatagctgtctttggaaacgcaaacgacagaaatgttttaaccctcctcccaaaccagagccttttcagtttggccagagcagtcagaaaccacctgttgctggaggaaagaagattaacaacatatggggtgctgtgctgcaggaacagaatcaagatgcagtggccactgaacttggtatcttgggaatggagggcactattgacagaagcagacaatccgagacctacaattatttgcttgccaagaaacttaggaaggaatctcaagagcatacaaaagatctagacaaggaactagatgaatatatgcatggtggcaaaaaaatgggatcaaaggaagaggaaaatgggcaaggtcatctcaaaaggaaacgacctgtcaaagacaggctagggaacagaccagaaatgaactataaaggtcgatacgagatcacagcggaagattctcaagagaaagtggctgatgaaatttcattcaggttacaggaaccaaagaaagacctgatagcccgagtagtgaggattattggtaacaaaaaggcaattgaacttctgatggaaaccgctgaagttgaacaaaatggtggtctctttataatgaatggtagtcgaagaagaacaccaggtggagtttttctgaatctcttgaaaaacactcctagtatcagcgaggaacaaattaaggacattttctacattgaaaaccaaaaggaatatgaaaataaaaaagctgctaggaagaggagaacacaagtgttggggaaaaagatgaaacaagctattaaaagtctaaattttcaagaagatgatgatacatcacgagaaacttttgcaagtgacacgaatgaggccttggcctctcttgatgagtcacaggaaggacatgcagaagccaagttggaggcagaggaagccattgaagttgatcattctcatgatttggacatcttttaagtacattttcaacagtttgaggactaagcctttctaaaataacattgtaataaaccatttttactgagattgcaacgttttgcactgataaacatgagaatctggaggaaagacaattgttttcttgtttaaaatatgtgtggaaaggaatgcaattgatagaacatttaaagatatatctgacaaaatacttaagagtatatagcacaggatttaatttctcaatctgttgcatgtgctaattatgagtattactagttgataatcagttttgtctaggtcataacataccatttgtaagtttgtttgctttttcaggtttatctttgcagtgaattatgctttgctttaaaacattccgctaaaatcataatgggacatataaattattaagctgttagaaatgcattcaaatttgttttttctgtgttctaagaactcaggcaattttaaggataaaaactaacattgcatgagccaccgaacccagccttattctgcttaaatttaacgtgttttttgacttcttaattaacttggtcatatactaaatgtgatctcctgtggattaccacatgcattaaaaaatttttcaagctgggcctagtggcgcacacctgcaatcccaacactttgggaggccaagagaggaagattgcttgagcccaggagtttgagaccaatctaggcaatgtagtgagaccctgtctctaatttaaaaaagaaaaagaaaaaaacattcccagtggcagcctgcctaagactgtcttaccttatgttaaggaagtcaggtatttaaaatgttacatatgccggcgcagtggctcatgtgtgtaatcccagcactctgggaggctgagacaggtagatcatttgaggtcaggagttcaaaaccaacctggtctacatggtgaaaccccatctcaactaaaaatacaaaaaatacaaaaaattagccgggcgcggtggctcacacctgtaatcccagcactttgggaggtggaggcgggtggatcacaaggtcaagagatcgagaccatcctggccaacatggtgaaaccctgtctctattaaaaatacaaaaattagctgggcgtggtggcgcatgcctgtagtcccaactactagggaggctgaggcaggagaatcacttgaacccaggaggtggaggttgcagtgagccgagatcacgccactgcactccagcctggcgacagagcgagactccctctc

SEQ ID NO: 21078 - DNA, 2504 bp, Homo sapiens
aagtgctctcctgacccgccgctgtgcagcgcagcgcaccgcgggaagatggcgttggaggtcggcgatatggaagatgggcagctttccgactcggattccgacatgacggtcgcacccagcgacaggccgctgcaattgccaaaagtgctaggtggcgacagtgctatgagggccttccagaacacggcaactgcatgtgcaccagtatcacattatcgagctgttgaaagtgtggattcaagtgaagaaagtttttctgattcagatgatgatagctgtctttggaaacgcaaacgacagaaatgttttaaccctcctcccaaaccagagccttttcagtttggccagagcagtcagaaaccacctgttgctggaggaaagaagattaacaacatatggggtgctgtgctgcaggaacagaatcaagatgcagtggccactgaacttggtatcttgggaatggagggcactattgacagaagcagacaatccgagacctacaattatttgcttgccaagaaacttaggaaggaatctcaagagcatacaaaagatctagacaaggaactagatgaatatatgcatggtggcaaaaaaatgggatcaaaggaagaggaaaatgggcaaggtcatctcaaaaggaaacgacctgtcaaagacaggctagggaacagaccagaaatgaactataaaggtcgatacgagatcacagcggaagattctcaagagaaagtggctgatgaaatttcattcaggttacaggaaccaaagaaagacctgatagcccgagtagtgaggattattggtaacaaaaaggcaattgaacttctgatggaaaccgctgaagttgaacaaaatggtggtctctttataatgaatggtagtcgaagaagaacaccaggtggagtttttctgaatctcttgaaaaacactcctagtatcagcgaggaacaaattaaggacattttctacattgaaaaccaaaaggaatatgaaaataaaaaagctgctaggaagaggagaacacaagtgttggggaaaaagatgaaacaagctattaaaagtctaaattttcaagaagatgatgatacatcacgagaaacttttgcaagtgacacgaatgaggccttggcctctcttgatgagtcacaggaaggacatgcagaagccaagttggaggcagaggaagccattgaagttgatcattctcatgatttggacatcttttaagtacattttcaacagtttgaggactaagcctttctaaaataacattgtaataaaccatttttactgagattgcaacgttttgcactgataaacatgagaatctggaggaaagacaattgttttcttgtttaaaatatgtgtggaaaggaatgcaattgatagaacatttaaagatatatctgacaaaatacttaagagtatatagcacaggatttaatttctcaatctgttgcatgtgctaattatgagtattactagttgataatcagttttgtctaggtcataacataccatttgtaagtttgtttgctttttcaggtttatctttgcagtgaattatgctttgctttaaaacattccgctaaaatcataatgggacatataaattattaagctgttagaaatgcattcaaatttgttttttctgtgttctaagaactcaggctggtctcgaactcctggcctaatgatctgcccacctctgcctcccaaagtgctgggatcacaggcatgagccaccgaacccagccttattctgcttaaatttaacgtgttttttgacttcttaattaacttggtcatatactaaatgtgatctcctgtggattaccacatgcattaaaaaatttttcaagctgggcctagtggcgcacacctgcaatcccaacactttgggaggccaagagaggaagattgcttgagcccaggagtttgagaccaatctaggcaatgtagtgagaccctgtctctaatttaaaaaagaaaaagaaaaaaacattcccagtggcagcctgcctaagactgtcttaccttatgttaaggaagtcaggtatttaaaatgttacatatgccggcgcagtggctcatgtgtgtaatcccagcactctgggaggctgagacaggtagatcatttgaggtcaggagttcaaaaccaacctggtctacatggtgaaaccccatctcaactaaaaatacaaaaaatacaaaaaattagccgggcgcggtggctcacacctgtaatcccagcactttgggaggtggaggcgggtggatcacaaggtcaagagatcgagaccatcctggccaacatggtgaaaccctgtctctattaaaaatacaaaaattagctgggcgtggtggcgcatgcctgtagtcccaactactagggaggctgaggcaggagaatcacttgaacccaggaggtggaggttgcagtgagccgagatcacgccactgcactccagcctggcgacagagcgagactccctctc

SEQ ID NO: 21079 - DNA, 2027 bp, Homo sapiens
aagtgctctcctgacccgccgctgtgcagcgcagcgcaccgcgggaagatggcgttggaggtcggcgatatggaagatgggcagctttccgactcggattccgacatgacggtcgcacccagcgacaggccgctgcaattgccaaaagtgctaggtggcgacagtgctatgagggccttccagaacacggcaactgcatgtgcaccagtatcacattatcgagctgttgaaagtgtggattcaagtgaagaaagtttttctgattcagatgatgatagctgtctttggaaacgcaaacgacagaaatgttttaaccctcctcccaaaccagagccttttcagtttggccagagcagtcagaaaccacctgttgctggaggaaagaagattaacaacatatggggtgctgtgctgcaggaacagaatcaagatgcagtggccactgaacttggtatcttgggaatggagggcactattgacagaagcagacaatccgagacctacaattatttgcttgccaagaaacttaggaaggaatctcaagagcatacaaaagatctagacaaggaactagatgaatatatgcatggtggcaaaaaaatgggatcaaaggaagaggaaaatgggcaaggtcatctcaaaaggaaacgacctgtcaaagacaggctagggaacagaccagaaatgaactataaaggtcgatacgagatcacagcggaagattctcaagagaaagtggctgatgaaatttcattcaggttacaggaaccaaagaaagacctgatagcccgagtagtgaggattattggtaacaaaaaggcaattgaacttctgatggaaaccgctgaagttgaacaaaatggtggtctctttataatgaatggtagtcgaagaagaacaccaggtggagtttttctgaatctcttgaaaaacactcctagtatcagcgaggaacaaattaaggacattttctacattgaaaaccaaaaggaatatgaaaataaaaaagctgctaggaagaggagaacacaagtgttggggaaaaagatgaaacaagctattaaaagtctaaattttcaagaagatgatgatacatcacgagaaacttttgcaagtgacacgaatgaggccttggcctctcttgatgagtcacaggaaggacatgcagaagccaagttggaggcagaggaagccattgaagttgatcattctcatgatttggacatcttttaagtacattttcaacagtttgaggactaagcctttctaaaataacattgtaataaaccatttttactgagattgcaacgttttgcactgataaacatgagaatctggaggaaagacaattgttttcttgtttaaaatatgtgtggaaaggaatgcaattgatagaacatttaaagatatatctgacaaaatacttaagagtatatagcacaggatttaatttctcaatctgttgcatgtgctaattatgagtattactagttgataatcagttttgtctaggtcataacataccatttgtaagtttgtttgctttttcaggtttatctttgcagtgaattatgctttgctttaaaacattccgctaaaatcataatgggacatataaattattaagctgttagaaatgcattcaaatttgttttttctgtgttctaagaactcaggcaattttaaggataaaaactaacattgaggctggtctcgaactcctggcctaatgatctgcccacctctgcctcccaaagtgctgggatcacaggcatgagccaccgaacccagccttattctgcttaaatttaacgtgttttttgacttcttaattaacttggtcatatactaaatgtgatctcctgtggattaccacatgcattaaaaaatttttcaagctgggcctagtggcgcacacctgcaatcccaacactttgggaggccaagagaggaagattgcttgagcccaggagtttgagaccaatctaggcaatgtagtgagaccctgtctctaatttaaaaaaaaa

SEQ ID NO: 21080 - DNA, 1597 bp, Homo sapiens
aagtgctctcctgacccgccgctgtgcagcgcagcgcaccgcgggaagatggcgttggaggtcggcgatatggaagatgggcagctttccgactcggattccgacatgacggtcgcacccagcgacaggccgctgcaattgccaaaagtgctaggtggcgacagtgctatgagggccttccagaacacggcaactgcatgtgcaccagtatcacattatcgagctgttgaaagtgtggattcaagtgaagaaagtttttctgattcagatgatgatagctgtctttggaaacgcaaacgacagaaatgttttaaccctcctcccaaaccagagccttttcagtttggccagagcagtcagaaaccacctgttgctggaggaaagaagattaacaacatatggggtgctgtgctgcaggaacagaatcaagatgcagtggccactgaacttggtatcttgggaatggagggcactattgacagaagcagacaatccgagacctacaattatttgcttgccaagaaacttaggaaggaatctcaagagcatacaaaagatctagacaaggaactagatgaatatatgcatggtggcaaaaaaatgggatcaaaggaagaggaaaatgggcaaggtcatctcaaaaggaaacgacctgtcaaagacaggctagggaacagaccagaaatgaactataaaggtcgatacgagatcacagcggaagattctcaagagaaagtggctgatgaaatttcattcaggttacaggaaccaaagaaagacctgatagcccgagtagtgaggattattggtaacaaaaaggcaattgaacttctgatggaaaccgctgaagttgaacaaaatggtggtctctttataatgaatggtagtcgaagaagaacaccaggtggagtttttctgaatctcttgaaaaacactcctagtatcagcgaggaacaaattaaggacattttctacattgaaaaccaaaaggaatatgaaaataaaaaagctgctaggaagaggagaacacaagtgttggggaaaaagatgaaacaagctattaaaagtctaaattttcaagaagatgatgatacatcacgagaaacttttgcaagtgacacgaatgaggccttggcctctcttgatgagtcacaggaaggacatgcagaagccaagttggaggcagaggaagccattgaagttgatcattctcatgatttggacatcttttaagtacattttcaacagtttgaggactaagcctttctaaaataacattgtaataaaccatttttactgagattgcaacgttttgcactgataaacatgagaatctggaaaaaaaaaaaaaaaaaaaaaaaaaacacaaaaaaaaaaccgggagaagcacaaaaatactcggggcggcgcgagaaacaaaacaagcagtaatcgagacagggcggcgcacagcggcggccacacagccgggtcctcgagaaccccaactttcgtgaggaacaacacggggggaaatacagcggggaccccaaaaaaggagacagcgaaaatcagtgcaaaaaacaccgggaaccccgatagagagcgaaacacgagc

SEQ ID NO: 21081 - DNA, 1981 bp, Homo sapiens
tggttatttcaagtcaccagggacctggcgacttaagtttgtaaatgacatggcctcttggttcgatcaatttgacattccgactcggattccgacatgacggtcgcacccagcgacaggccgctgcaattgccaaaagtgctaggtggcgacagtgctatgagggccttccagaacacggcaactgcatgtgcaccagtatcacattatcgagctgttgaaagtgtggattcaagtgaagaaagtttttctgattcagatgatgatagctgtctttggaaacgcaaacgacagaaatgttttaaccctcctcccaaaccagagccttttcagtttggccagagcagtcagaaaccacctgttgctggaggaaagaagattaacaacatatggggtgctgtgctgcaggaacagaatcaagatgcagtggccactgaacttggtatcttgggaatggagggcactattgacagaagcagacaatccgagacctacaattatttgcttgccaagaaacttaggaaggaatctcaagagcatacaaaagatctagacaaggaactagatgaatatatgcatggtggcaaaaaaatgggatcaaaggaagaggaaaatgggcaaggtcatctcaaaaggaaacgacctgtcaaagacaggctagggaacagaccagaaatgaactataaaggtcgatacgagatcacagcggaagattctcaagagaaagtggctgatgaaatttcattcaggttacaggaaccaaagaaagacctgatagcccgagtagtgaggattattggtaacaaaaaggcaattgaacttctgatggaaaccgctgaagttgaacaaaatggtggtctctttataatgaatggtagtcgaagaagaacaccaggtggagtttttctgaatctcttgaaaaacactcctagtatcagcgaggaacaaattaaggacattttctacattgaaaaccaaaaggaatatgaaaataaaaaagctgctaggaagaggagaacacaagtgttggggaaaaagatgaaacaagctattaaaagtctaaattttcaagaagatgatgatacatcacgagaaacttttgcaagtgacacgaatgaggccttggcctctcttgatgagtcacaggaaggacatgcagaagccaagttggaggcagaggaagccattgaagttgatcattctcatgatttggacatcttttaagtacattttcaacagtttgaggactaagcctttctaaaataacattgtaataaaccatttttactgagattgcaacgttttgcactgataaacatgagaatctggaggaaagacaattgttttcttgtttaaaatatgtgtggaaaggaatgcaattgatagaacatttaaagatatatctgacaaaatacttaagagtatatagcacaggatttaatttctcaatctgttgcatgtgctaattatgagtattactagttgataatcagttttgtctaggtcataacataccatttgtaagtttgtttgctttttcaggtttatctttgcagtgaattatgctttgctttaaaacattccgctaaaatcataatgggacatataaattattaagctgttagaaatgcattcaaatttgttttttctgtgttctaagaactcaggcaattttaaggataaaaactaacattggccaggcacggtggctcacgcctgtaatcccaacactttaggagaccaaggcgggcagatcacttgaggtcaggagtttgagaccagccaggccaacatggtgaaacttcatctctactaaaaatacaaaaactagccaggtgtggttctccatgcctataatcccggctactcgggaggctgaggcaggagaatcacctgaacccgggaggcaaaggttgcagtgagctgagatcgtaccactgtactccagcctgggcgacagagcaagactctgtctcaaaaa

SEQ ID NO: 21082 - DNA, 1937 bp, Homo sapiens
aagtgctctcctgacccgccgctgtgcagcgcagcgcaccgcgggaagatggcgttggaggtcggcgatatggaagatgggcagctttccgactcggattccgacatgacggtcgcacccagcgacaggccgctgcaattgccaaaagtgctaggtggcgacagtgctatgagggccttccagaacacggcaactgcatgtgcaccagtatcacattatcgagctgttgaaagtgtggattcaagtgaagaaagtttttctgattcagatgatgatagctgtctttggaaacgcaaacgacagaaatgttttaaccctcctcccaaaccagagccttttcagtttggccagagcagtcagaaaccacctgttgctggaggaaagaagattaacaacatatggggtgctgtgctgcaggaacagaatcaagatgcagtggccactgaacttggtatcttgggaatggagggcactattgacagaagcagacaatccgagacctacaattatttgcttgccaagaaacttaggaaggaatctcaagagcatacaaaagatctagacaaggaactagatgaatatatgcatggtggcaaaaaaatgggatcaaaggaagaggaaaatgggcaaggtcatctctaaaggtcgatacgagatcacagcggaagattctcaagagaaagtggctgatgaaatttcattcaggttacaggaaccaaagaaagacctgatagcccgagtagtgaggattattggtaacaaaaaggcaattgaacttctgatggaaaccgctgaagttgaacaaaatggtggtctctttataatgaatggtagtcgaagaagaacaccaggtggagtttttctgaatctcttgaaaaacactcctagtatcagcgaggaacaaattaaggacattttctacattgaaaaccaaaaggaatatgaaaataaaaaagctgctaggaagaggagaacacaagtgttggggaaaaagatgaaacaagctattaaaagtctaaattttcaagaagatgatgatacatcacgagaaacttttgcaagtgacacgaatgaggccttggcctctcttgatgagtcacaggaaggacatgcagaagccaagttggaggcagaggaagccattgaagttgatcattctcatgatttggacatcttttaagtacattttcaacagtttgaggactaagcctttctaaaataacattgtaataaaccatttttactgagattgcaacgttttgcactgataaacatgagaatctggaggaaagacaattgttttcttgtttaaaatatgtgtggaaaggaatgcaattgatagaacatttaaagatatatctgacaaaatacttaagagtatatagcacaggatttaatttctcaatctgttgcatgtgctaattatgagtattactagttgataatcagttttgtctaggtcataacataccatttgtaagtttgtttgctttttcaggtttatctttgcagtgaattatgctttgctttaaaacattccgctaaaatcataatgggacatataaattattaagctgttagaaatgcattcaaatttgttttttctgtgttctaagaactcaggcaattttaaggataaaaactaacattggccaggcacggtggctcacgcctgtaatcccaacactttaggagaccaaggcgggcagatcacttgaggtcaggagtttgagaccagccaggccaacatggtgaaacttcatctctactaaaaatacaaaaactagccaggtgtggttctccatgcctataatcccggctactcgggaggctgaggcaggagaatcacctgaacccgggaggcaaaggttgcagtgagctgagatcgtaccactgtactccagcctgggcgacagagcaagactctgtctcaaaaa

SEQ ID NO: 21083 - DNA, 1423 bp, Homo sapiens
gctgaggtgatctcagaggatcccccaggtcttttcccctcaaaggaagaggaaaatgggcaaggtcatctcaaaaggaaacgacctgtcaaagacaggctagggaacagaccagaaatgaactataaaggtcgatacgagatcacagcggaagattctcaagagaaagtggctgatgaaatttcattcaggttacaggaaccaaagaaagacctgatagcccgagtagtgaggattattggtaacaaaaaggcaattgaacttctgatggaaaccgctgaagttgaacaaaatggtggtctctttataatgaatggtagtcgaagaagaacaccaggtggagtttttctgaatctcttgaaaaacactcctagtatcagcgaggaacaaattaaggacattttctacattgaaaaccaaaaggaatatgaaaataaaaaagctgctaggaagaggagaacacaagtgttggggaaaaagatgaaacaagctattaaaagtctaaattttcaagaagatgatgatacatcacgagaaacttttgcaagtgacacgaatgaggccttggcctctcttgatgagtcacaggaaggacatgcagaagccaagttggaggcagaggaagccattgaagttgatcattctcatgatttggacatcttttaagtacattttcaacagtttgaggactaagcctttctaaaataacattgtaataaaccatttttactgagattgcaacgttttgcactgataaacatgagaatctggaggaaagacaattgttttcttgtttaaaatatgtgtggaaaggaatgcaattgatagaacatttaaagatatatctgacaaaatacttaagagtatatagcacaggatttaatttctcaatctgttgcatgtgctaattatgagtattactagttgataatcagttttgtctaggtcataacataccatttgtaagtttgtttgctttttcaggtttatctttgcagtgaattatgctttgctttaaaacattccgctaaaatcataatgggacatataaattattaagctgttagaaatgcattcaaatttgttttttctgtgttctaagaactcaggcaattttaaggataaaaactaacattggccaggcacggtggctcacgcctgtaatcccaacactttaggagaccaaggcgggcagatcacttgaggtcaggagtttgagaccagccaggccaacatggtgaaacttcatctctactaaaaatacaaaaactagccaggtgtggttctccatgcctataatcccggctactcgggaggctgaggcaggagaatcacctgaacccgggaggcaaaggttgcagtgagctgagatcgtaccactgtactccagcctgggcgacagagcaagactctgtctcaaaaa

SEQ ID NO: 21084 - DNA, 867 bp, Homo sapiens
  misc_feature (839)..(839): n is a, c, g, or t
  misc_feature (841)..(841): n is a, c, g, or t
aactaggctaggcacgaggccgggggcgtatctttgcagtgaattatgctttgctttaaaacattccgctaaaatcataatgggacatataaattattaagctgttagaaatgcattcaaatttgttttttctgtgttctaagaactcaggcaattttaaggataaaaactaacattggccaggcacggtggctcacgcctgtaatcccaacactttaggagaccaaggcgggcagatcacttgaggtcaggagtttgagaccagccaggccaacatggtgaaacttcatctctactaaaaatacaaaaactagccaggtgtggttctccatgcctataatcccggctactcgggaggctgaggcaggagaatcacctgaacccgggaggctggagtacagtggtgcagtcatagctcgctgcagcctcaacctcccaggctcaaggtatcctcccacctcagccttctaagtagctggtaccacaggcatgcaccaccatgtctcgcttagttgcccaggtttgtctcttaactcctggcctcaagcagtcctcccacctgggcctcccaaagtgctgggatcacaggcatgagccaccgaacccagccttattctgcttaaatttaacgtgttttttgacttcttaattaacttggtcatatactaaatgtgatctcctgtggattaccacatgcattaaaaaatttttcaagctgggcctagtggcgcacacctgcaatcccaacactttgggaggccaagagaggaagattgcttgagcccaggagtttgagaccaatctaggcaatgtagtgagacctggtcttcttaatttananaaaaaaaaaccggggttcttggcggg

SEQ ID NO: 21085 - DNA, 863 bp, Homo sapiens
  misc_feature (835)..(835): n is a, c, g, or t
  misc_feature (837)..(837): n is a, c, g, or t
agtatgcaggagaggcccgggtgttatctttgcagtgaattatgctttgctttaaaacattccgctaaaatcataatgggacatataaattattaagctgttagaaatgcattcaaatttgttttttctgtgttctaagaactcaggcaattttaaggataaaaactaacattggccaggcacggtggctcacgcctgtaatcccaacactttaggagaccaaggcgggcagatcacttgaggtcaggagtttgagaccagccaggccaacatggtgaaacttcatctctactaaaaatacaaaaactagccaggtgtggttctccatgcctataatcccggctactcgggaggctgaggcaggagaatcacctgaacccgggaggctggagtacagtggtgcagtcatagctcgctgcagcctcaacctcccaggctcaaggtatcctcccacctcagccttctaagtagctggtaccacaggcatgcaccaccatgtctcgcttagttgcccaggtttgtctcttaactcctggcctcaagcagtcctcccacctgggcctcccaaagtgctgggatcacaggcatgagccaccgaacccagccttattctgcttaaatttaacgtgttttttgacttcttaattaacttggtcatatactaaatgtgatctcctgtggattaccacatgcattaaaaaatttttcaagctgggcctagtggcgcacacctgcaatcccaacactttgggaggccaagagaggaagattgcttgagcccaggagtttgagaccaatctaggcaatgtagtgagacctggtcttcttaatttananaaaaaaaaaccggggttcttggcggg

SEQ ID NO: 21086 - DNA, 786 bp, Homo sapiens
ggtcccactttgtaggcacacacacacacacacaccaatctaagcacaaaattatcttgttgtcctcaatagtttgcatggataagtaatgcagaataagcatcatacccaatattaataaatacttaacaagaagcccaagattttaccttgtttcctattttttccttcagccatcacattcaaacctggcccaaaggtttctcacattctggcctccatcaccaccactactgctttggcctggccttttgtcaagctagaaattgccagaatttcctgacaacaggctctgtaagattcagtttagagcttacactttggctggagttcatcttcctaaaaagagactgtgatatgtaaatccacaacctgaaatctcattggctctccattgcctaccaataacccaaaatcctctactcaggaagtcctggatggtgtaactccattgcacacaggttcatcccacaaggcctcttggtaatggggtactttcatgtgcatactattctgctgctcttgtggaaagagtcttcaaccccattctgtataccctggacactcacctgagacccagctgaaacagaccttgtcatctcggaccctgcccttggttctgttgaaagaattagccaccagatccttgaggctgtctcaggacttttgcttcacctttattataacaattggaatgcaggcaaaatagtgtttccagttactaaaataaaacaagatgcggccagttctctctcaaaattatccataatggatgatgctggatcc

SEQ ID NO: 21087 - DNA, 436 bp, Homo sapiens
atttcagaacctttcctggcctcgcacaatggcaaagtttccctatgaataaaaactggtttgaaggatggccaacattcccaataacctatgggtattggggggttctccatgtcctccccagcaagtctgacattctttaagtcttataagaatgtcagccacaataaggatatctagacagctgacagatgcccattaattgatctgatttaaaaatagaggccaagagcctcggaatgatgggatcgattttgagtttgctcctctactcaccgctccaatgaatgttgtaccttggattcccagccaatgcaccaacatgacatggctccattgtctggagaaacacccagggtccttggtcttgcaccgagaaaattagtgacacagacacaggtggagtggatttaaggagcagaaagtgtaataggca

SEQ ID NO: 21088 - DNA, 402 bp, Homo sapiens
tttaatggaattaagacatgacttgagggcctaagtcttactctgcccatagctctgagtaatttcaggatccacaaggaaccatgtttaacaccccagtcactcttttcactcatctcttcatcttcagggatcttctccactcccttctagttctcccacttccgcaggcactccctggaccgcaccatcccctaggactgcttcacctctaaatactaaacttacaggtaggtccccattctctgacaactcacctcctaaccttccaggtcactcactccattattcccaagacacccattcttcaacctatttggaatgtccagttcaccaatcccttggctatttctctacagccttattctgttttacctctctgagttaggtcccaagaaccaa

SEQ ID NO: 21089 - DNA, 377 bp, Homo sapiens
gtattacatatatgtgtagtatatatggcacacaaatatgtacatgcatatacataaatatatttatatattaaattttattaactattgaaaatctttaaaatctatgattattcttgtttacttgatctgataaattctttatttattttttctgagatggagtctcactctgtcacccaggctggattgcaatggggtaatcttagctcgctgcaacctccgcctcccggattcaagtgattcttgtgcctcagctactcgggaggctgatgcacaagaactgactgaacctggaaggtggaggctgcagtgagcccagattgtatcattgcactccagcctgagtgacagagcgcgaccctgtctcaaaaaac

SEQ ID NO: 21090 - DNA, 443 bp, Homo sapiens
gcaccagtcatcttacaaagcttccttctagaaatgctaagtcatcctgtgtgtgcatttgggccaggagagaggtagctgcttttgtgtgtttggagtagggttagcagtctcaagccatagctgctcctctttcctcagaaataaagtcctctgttagttccctgagattttacttcattttgtctatgggggaaaaagtggttaaagagtcatttattctaactataagttgtcagttgagcaagtcttttataaggaatactttctgaaaatactaaatgtcttaatattaaaatactacattgactttttaattcaaatgaagtaaagtggttaaacttgaatgattacggctatactgaaaaccgtaaaatataaaaacctaacatttttttgagaggtgagtccgtaaatgtgacttatcaatgtaaaatcttcaa

SEQ ID NO: 21091 - DNA, 537 bp, Homo sapiens
gctcatttcgaagagtgtgtccagtatgattatagaatatttcttatcagtattttctcaaagtatgggaaactaatccctcaaacaaagggaaatagattatttcaatgctttcaacatgtggtagaggaattgcatcacacagtatttggcctgctttatttatgaatctctattgtacagctgaaatttaaggagtttttttattaattgaaatattttatctttcatatagtttgccacatcagccaggttcagtggctcatacttgtaatctcaacactttgggaggctgaatcaggaggattgcttgaggccaggcctggcaacatagtgagacctcccctctacagaaaatttaaaaatcagccaggcatcgtggcatgcacctctagtcccagctactcagaaggctgaggtaagaggattgcttgagcccaggaatcaagactgcagtgagctatggtcacatcactgtactcccgcctgggtgacagagcaaaaccttgtatctttaaaaaaaaaaaagaaagaaag

SEQ ID NO: 21092 - DNA, 408 bp, Homo sapiens
acaaagatggggaaaaaggaagaggtagggtgtgttcaagaatgaggaacagaccagcatggcagtcaaagcaaaggatttgcacagagcaccagatcataaatgccctgagaatcagccaatggttctccagagaaacagaaccagtaggagatgtatgtgtgtgtttataaagagacttattataaggaagtggcttacgcaattatagaggccaagaagtctcaagatctgcagtcagcaagctggagacccaagagagacaataacataagttatagtttgagtctgaatctgaaggcaggagaagaccgatgtcccaggttgaaaacagtcaaacagagagagagagaggagagtgaattctcccttactcagtctttttgtactactgaagccttcaataga

SEQ ID NO: 21093 - DNA, 250 bp, Homo sapiens
aaaactggctatccatatgcagaagagtgaaactagacccctaattcttgctgtatataaaaataaaaatggattgaagacttaaatatgtgtccacatactatgaaacaactaaaattaaacatcgaggaaactctttagtttttgtttttgttttagtttttgtgttttttttcccacaaaaagcacaggcagccaaagcaaaaatgaacacataggatctcatcaagttaaaaagcttctgcacagc

SEQ ID NO: 21094 - DNA, 789 bp, Homo sapiens
  misc_feature (658)..(658): n is a, c, g, or t
ctccgccatgatgagaagcgcctgcttccccttccccttccgccatgattgtgtttcctgagacctcccagccacgcttcctgtacagcctgcagaactgtgagtcaaccaaacttccttttaaaataaattacccagtctcagctaggtctttctagcagtgtgagaacggacacgtagagggtgtgagagccagaagactttaaggagagggacgagctggggcctggatgcccggggaggtggacctggaccaggacaggtgtcagcgggcagagatggggcagaggtgtggctgtctacctgcgaccggggccatgccctctcgggctcggttgaggagctgctcttcctccagaatgcgctcggacggaacgttaggaaggccctggtgagtggccccgacctcctcccccaggactggcttctccggccctctgccctttcgggcagaacagctcgtggctcttccaggacctggggctccatcttgcagaacagctcgtggctcttccaggacctggggctccatcttgcagaacagctcgtggctcttccaggacctggggctccatcttgcagaacagctcgtggctcttccaggacctggggctccatcttgcagaacagctcgtggctcttccaggacctggggctnccatcttgcagaacagctcgtggctcttccaggacctggggctccatcttgcagaacagctcgtggctcttccaggacctggggctccatcttgcgaacagctcgtggctcttccaggacctgggctcctc

SEQ ID NO: 21095 - DNA, 1045 bp, Homo sapiens
ctccgccatgatgagaagcgcctgcttccccttccccttccgccatgattgtgtttcctgagacctcccagccacgcttcctgtacagcctgcagaactgtgagtcaaccaaacttccttttaaaataaattacccagtctcagctaggtctttctagcagtgtgagaacggacacgtagagggtgtgagagccagaagactttaaggagagggacgagctggggcctggatgcccggggaggtggacctggaccaggacaggtgtcagcgggcagagatggggcagaggtgtggctgtctacctgcgaccggggccatgccctctcgggctcggttgaggagctgctcttcctccagaatgcgctcggacggaacgttaggaaggccctggaccaaaggacacttgatccgccttttcaagcctgacattgaacaattcaaatcaatggatgggattaccggctgatagaaatgggggttctccacgctcagagaatgacaacaggggctgctgggggctccgtccgcccgaagagccgtgctcgggagatgcggaggggaatgaagtggagcaggctcacctttggacgtttttaatgcattatttcagagtaacatattcttattttaattaacttttgatgtttctgagctttcagttatccacagagccgagagaaccactccgccggctggagcaggctctgtgatcctaggatgtgttgtggatacgccttggggctcgtcacaggctgctgagcctcagtttcccttctcacagagcctcctctctgactgattcttgcggtgactccccaaatcgactgtgaaatcagttttgagtaccttgaaaaatttctaagaagttatgattttgacacagaaagttagctaaataatgcagcaggctaaatcacatctggaagaactgagaattcgatccaagagtctaaacactgaatcagcaagcggtttctctggctgttctgtggcctgtgttttgggggcacccggggaggtctcagaggccgcggggacctgtcc

SEQ ID NO: 21096 - DNA, 484 bp, Homo sapiens
cagacaaaagttcctgtaattaagggaacacagatgataacgattggcctggaagaattcttggttgctttgatcttatctgaaatcggactgtcagtgggacttctttctcaattgtggtaaagctaaggagccgatttcctttgtaactgctgagcagagaccaaggtacaggtctgaaggaacttataaagtcagtattttggaactggatgcagcggctcatacctgtaatcccagcactttggaggccatggtgggaaaaatcacttgaggccaggagtttgatgccagcaacatagcgagacccccgtctctgtggaaagtaaaacaattagctgggtgtagtggtgtgtgcctgtagtctcagctattctggaggctgaggcaagaggatggcttgagcccaagagttcgaggctatagtgagttatgattgtgccactgctccagcctgggcgacagaacaagaccacctctcttt

SEQ ID NO: 21097 - DNA, 6411 bp, Homo sapiens
  misc_feature (5623)..(5623): n is a, c, g, or t
aaagcaagaaagactgctctcggcacttgtgcttttgttagttctacagaagaggcagaaaaacaagagataacaaaggctccgtttcctttctgtgagagaaggcttttgtctttcctcctgctacgatgtcagtgtctggcaagaaagagtttgatgtgaaacagatcctaaggctacgctggaggtggtttagtcatccttttcaaggttccaccaacactggaagctgtcttcagcaggaaggatatgagcatagagggaccccggttcagggcaggttgaagagccactctcgggacagaaacggactgaagaaaagcaacagtcctgtccaccacaatatactggcaccagtgccaggaccggcccctgcccatcagagagccgttcagaatttgcagcaacataatctgatagtacattttcaagcaaatgaagatactcctaaatcagttccagagaagaatttattcaaagaagcttgtgagaaacgcgcacaagatttggagatgatggctgatgacaatatagaagattctacagcaagattagatacacaacactctgaagacatgaatgccaccagatctgaagagcagttccatgttataaaccacgcagagcaaactcttcgtaaaatggagaactacttgaaagagaaacaactatgtgatgtgctactgattgcaggacacctccgcatcccagcccataggttggttctcagcgcagtgtctgattattttgctgcaatgtttactaatgatgtgcttgaagccaaacaagaagaggtcaggatggaaggagtagatccaaatgcactaaattccttggtgcagtatgcttacacaggagtcctgcaattgaaagaagataccattgaaagtttgctggctgcagcttgtcttctgcagctgactcaggtcattgatgtttgctccaattttctcataaagcagctccatccttcaaactgcttagggattcgatcatttggagatgcccaaggctgtacagaacttctgaacgtggcacacaaatacactatggaacacttcattgaggtaataaaaaaccaagaattcctcctgcttccagctaatgaaatttcaaaacttctgtgcagtgatgacattaatgtgcctgatgaagagaccatttttcatgctctaatgcagtgggtggggcatgatgtgcagaataggcaaggagaactggggatgctgctttcttacatcagactgccattactcccaccacagttactggcagatcttgaaaccagttccatgtttactggtgatcttgagtgtcagaagctcctgatggaagctatgaagtatcatcttttgcctgagagaagatccatgatgcaaagccctcggacaaagcctagaaaatcaactgtgggggcactttatgctgtaggaggcatggatgctatgaaaggtactactactattgaaaaatatgacctcaggaccaacagttggctacatattggcaccatgaatggccgtaggcttcaatttggagtcgcagttattgataataagctctatgtcgtgggaggaagagacggtttaaaaactttgaatacagtggaatgttttaatccagttggcaaaatctggactgtgatgcctcccatgtcaacacatcggcacggcttaggtgtagccactcttgaaggaccaatgtatgctgtaggtggtcatgatggatggagctatctaaatactgtagaaagatgggaccctgagggacgacagtggaattacgtagccagtatgtcaactcctagaagcacagttggtgttgttgcattaaacaacaaattatatgctattggtggacgtgatggaagttcctgcctcaaatcaatggaatactttgacccacacactaacaagtggagtttgtgtgctccaatgtccaaaagacgtggaggtgtgggagttgccacatacaatggattcttatatgttgtaggggggcatgatgcccctgcttccaaccattgctccaggctttctgactgtgtggaacggtatgatccaaaaggtgattcatggtcaactgtggcacctctgagtgttcctcgagatgctgttgctgtgtgccctcttggagacaaactctacgtggttggaggatatgacggacatacttatttgaacacagttgagtcatatgatgcacagagaaatgaatggaaagaggaagttcctgttaacattggaagagctggtgcatgtgttgtagtggtgaagctaccctaaagctatctatctttatcaaatggaatgaaactagataatttcaagaaactgagtaggacaaagggagaaagaaatacatgttctttttcctgcaattaataatcagactggaaaattgttgtatcattttaatttgtagttacaattgctttcattcgtgaagccgaaacgtttttaaacatgaattacatatgaattattaagcatatgtgctttcgcagctgataatataaaaggaaatcccacagtctagatatagccccattactacaaaatgctaaaatatttaatgaaaattgatggtggccacagtgtgcaggttataaaagcattaatacatttcaaggtaagagccttaaaagttaaaaacattttcagtttttttttaaaaaacgtactcttattatctggaacatagaaatataaaaggtaacatctaaagcttagaatagtgtgatttttagtaagccattattctcctattcaaataatatcccaaagagctaaacaattccttacatttaccaagaggaaagcttttactgtgttgaagctaaaaaaaataatggctctttgacaaaacttgttatgttgatcgcggtatgtcaaaatttttacaggtttgctcatctgccagagcacacatataaatttggtatttcttaacatattatcttgttagatttgttaccagtaaaatattactgtaatttcatatacacagtctatacaatgaaataatgaatatttatcatattgatacaaactgtgacctcagcttcagagtgtcagggcctcacttgtatagaatgtaatgttctcctcaaacatttatgttaactctataaacaaatatcgttaagttaaacaagttttcaaaaacaaaacaatttttaaagtaccttaaaattgaggatgttactcagtgttaacacatgggaacaccaaaatattcaataagcctggtcaattctatagttatcttttttgtaccaacacatgcttttctgttactgttatattatccagtagaaaatgttaggatatgtgtgctatataaaaaaaaaaaaagacttgttaagttttaaaataacaaaaatggctagttgaatagtattttatgtgtaattcttccatttattctgtttaattatacaactaagatgaaatattgaaaaaccctttgtgaaagtaacttttcaagtaaatgcacaactttagaatttctacaaataagttcttttaaacagtctttttattgtggattgtgaaatcaaaatctggagaaatgcttataaaatatactactagcttttaagttttaagaaagaagaacgtaagttgtacaaagatatttgtactttgacaaactgaatttaaataaactttatttcctctcactatagtgtggctttagaatatatcaagtacaacctgaatggactttttgattttacatttcctatatcactaaaatacttaaacacaaaaataaaattccactcctttatttcttcttacacctgccattgtctctaattctaaagagagagctatagatttctgcagttctagaggtgaagatagagacatagagaggctgtgaaacacacatacagccctgttaggtcttttgaattcacaccttattgaaatcagtgtagaagtagagttacctaaacctttatcgccaatgcacagcttggcctgttaagttaaatgtgggtgtcaaccagtggaaaagatcaaaggaccttttgcagcctagcttgccaatcttccagtaacaacgaggtgctaccaataggcagactgtgtctagagtcatgcatggacaagaggaaagtgaaagttgaatactctcttctcaatggcatagctggacttgattaagtattgactcatagaagagacatgtatgtttcccggggctaccccttcatagctgcatttaaaaatggtgttcaggccactatggctgctgtggtttgaatatttttttccctcgaaaactcatgttgaaacttaactcctaatgtagcagtactgagaggcagggcccttaagaggtgattgggccatgaggtctgtgccctcctgaatggattaatccattcatggattaatggattattatgagtgggggactggtgactttatatgaaaaggaaggaagagtgacctaagctagcatgctcagggtgcaccgtatgtcccctggtcatgtgatgctatgtgttaccttgggacttacctgacagctcttaccaacaagaaggccatcccagatatggcctctcaacctcagacttctcagcctgcctaactgtaagaaattaattctttttctttataaattacccaggttctgttttaagcctcagaaaatgaactaagacaatgccctagatgagctgccaaaatctgagcagatatgagccatcagaatagagacctgcagaggcccagggcactcaaacataactgtgcttgtctcagtcaaacttaattgggaaaaggaggagtaagagcaggccctttctgacatgctttagcagagataacttatcagggctagtttaaacaaatgtgtataggaaaggatgttatttatatattcttacaagagtgtaagggctcacacatttactgtactcagatctgaaagacaatgttgcttcttgatttttttctataatcactatgaccgtgttcacgattccctactctgcaactctcagcatgcatcatgatgattctctaacactgtctgtcaccttcctgtatttccacagagcatgcaagaacttctacaaaacttctataccacacagaagctgaaagagactctggggcactaaattcagatcctttctccacacagcaatgacatttatcaatctgactcaggtgtggctgttgcccctttttgatatggagggaacactgaaagacagtttccttctggagttccaaatgcaatatagaaaaaaaaaccctgtgactctggattttattttaagttctctaacaagactcctaccttgagatcttagtctaggtaaagaaaaaaaaaaaaaggtcatgaaacacaaatgtcctcaactgtcatcattctatgtttactttctcccaatcacatcacctgaggtagaagagatttttcagttgctatttctcttcgtaatgaattttctttacatcctgtccacactgctggagatactaagtcccaacctaaatgatggaaggagcatctcccctcttgtctgtggaagatatcacatgaactacctaattttcaagcatggatctccatatttcaaaggaaagttttnaaaatgtttttaaaacttcaaatatctcaccacagtgaattatgggtaaggtgataatatgtttaattagcttgatttaatcatcccacactgtatacatatgccaaaatatcattttgtatgccataatatatatgatttatgaattatagtaatattaataaaagtgttaaagcttaaaaaaaaaaaaaaaaaaaaaaaaaaattgttgggggggtgggccggaaaagttttaacaacaatcccgttgggggccgcacaggccccagtaggtgctagggtgaacgtctgccaagaacgcggtgttctaagaggaaccaccgcgggccatgaatagggggtgggttcccaccccaaataaaaaaaacggcgcggggggaacacagaagcggctttcgggaaacaactcccagacaaggggaagtcgcgaggacacacagcggcatcctacacaggggtcccagacgaagctcgatataaattaagccgcgcgagggggacaaactacacacagaccaaaacaacaaaaacacactaacccagagaaaaacacaccaaacagaacccacaacagagaaaatacagaaaaagacaagaacacaaccaacacgacgagaaccaaacaagaagagcacataacagaggaaacacgacagaacacagaaatccaggacaacacaaagacaaagaaaaagaagagaaaaaaaaagacaaacaacagaaccaaaagaaaagacaaacgcaagagcacacacccacgaagaaaaaagagacgaagaacaagaacc

SEQ ID NO: 21098 - DNA, 3556 bp, Homo sapiens
  misc_feature (2768)..(2768): n is a, c, g, or t
aaagcaagaaagactgctctcggcacttgtgcttttgttagttctacagaagaggcagaaaaacaagagataacaaaggctccgtttcctttctgtgagagaaggcttttgtctttcctcctgctacgatgtcagtgtctggcaagaaagagtttgatgtgaaacagatcctaaggctacgctggaggtggtttagtcatccttttcaaggttccaccaacactggaagctgtcttcagcaggaaggatatgagcatagagggaccccggttcagggcaggttgaagagccactctcgggacagaaacggactgaagaaaagcaacagtcctgtccaccacaatatactggcaccagtgccaggaccggcccctgcccatcagagagccgttcagaatttgcagcaacataatctgatagtacattttcaagcaaatgaagatactcctaaatcagttccagagaagaatttattcaaagaagcttgtgagaaacgcgcacaagatttggagatgatggctgatgacaatatagaagattctacagcaagattagatacacaacactctgaagacatgaatgccaccagatctgaagagcagttccatgttataaaccacgcagagcaaactcttcgtaaaatggagaactacttgaaagagaaacaactatgtgatgtgctactgattgcaggacacctccgcatcccagcccataggttggttctcagcgcagtgtctgattattttgctgcaatgtttactaatgatgtgcttgaagccaaacaagaagaggtcaggatggaaggagtagatccaaatgcactaaattccttggtgcagtatgcttacacaggagtcctgcaattgaaagaagataccattgaaagtttgctggctgcagcttgtcttctgcagctgactcaggtcattgatgtttgctccaattttctcataaagcagctccatccttcaaactgcttagggattcgatcatttggagatgcccaaggctgtacagaacttctgaacgtggcacacaaatacactatggaacacttcattgaggtaataaaaaaccaagaattcctcctgcttccagctaatgaaatttcaaaacttctgtgcagtgatgacattaatgtgcctgatgaagagaccatttttcatgctctaatgcagtgggtggggcatgatgtgcagaataggcaaggagaactggggatgctgctttcttacatcagactgccattactcccaccacagttactggcagatcttgaaaccagttccatgtttactggtgatcttgagtgtcagaagctcctgatggaagctatgaagtatcatcttttgcctgagagaagatccatgatgcaaagccctcggacaaagcctagaaaatcaactgtgggggcactttatgctgtaggaggcatggatgctatgaaaggtactactactattgaaaaatatgacctcaggaccaacagttggctacatattggcaccatgaatggccgtaggcttcaatttggagtcgcagttattgataataagctctatgtcgtgggaggaagagacggtttaaaaactttgaatacagtggaatgttttaatccagttggcaaaatctggactgtgatgcctcccatgtcaacacatcggcacggcttaggtgtagccactcttgaaggaccaatgtatgctgtaggtggtcatgatggatggagctatctaaatactgtagaaagatgggaccctgagggacgacagtggaattacgtagccagtatgtcaactcctagaagcacagttggtgttgttgcattaaacaacaaattatatgctattggtggacgtgatggaagttcctgcctcaaatcaatggaatactttgacccacacactaacaagtggagtttgtgtgctccaatgtccaaaagacgtggaggtgtgggagttgccacatacaatggattcttatatgttgtaggggggcatgatgcccctgcttccaaccattgctccaggctttctgactgtgtggaacggtatgatccaaaaggtgattcatggtcaactgtggcacctctgagtgttcctcgagatgctgttgctgtgtgccctcttggagacaaactctacgtggttggaggatatgacggacatacttatttgaacacagttgagtcatatgatgcacagagaaatgaatggaaagagagcatgcaagaacttctacaaaacttctataccacacagaagctgaaagagactctggggcactaaattcagatcctttctccacacagcaatgacatttatcaatctgactcaggtgtggctgttgcccctttttgatatggagggaacactgaaagacagtttccttctggagttccaaatgcaatatagaaaaaaaaaccctgtgactctggattttattttaagttctctaacaagactcctaccttgagatcttagtctaggtaaagaaaaaaaaaaaaaggtcatgaaacacaaatgtcctcaactgtcatcattctatgtttactttctcccaatcacatcacctgaggtagaagagatttttcagttgctatttctcttcgtaatgaattttctttacatcctgtccacactgctggagatactaagtcccaacctaaatgatggaaggagcatctcccctcttgtctgtggaagatatcacatgaactacctaattttcaagcatggatctccatatttcaaaggaaagttttnaaaatgtttttaaaacttcaaatatctcaccacagtgaattatgggtaaggtgataatatgtttaattagcttgatttaatcatcccacactgtatacatatgccaaaatatcattttgtatgccataatatatatgatttatgaattatagtaatattaataaaagtgttaaagcttaaaaaaaaaaaaaaaaaaaaaaaaaaattgttgggggggtgggccggaaaagttttaacaacaatcccgttgggggccgcacaggccccagtaggtgctagggtgaacgtctgccaagaacgcggtgttctaagaggaaccaccgcgggccatgaatagggggtgggttcccaccccaaataaaaaaaacggcgcggggggaacacagaagcggctttcgggaaacaactcccagacaaggggaagtcgcgaggacacacagcggcatcctacacaggggtcccagacgaagctcgatataaattaagccgcgcgagggggacaaactacacacagaccaaaacaacaaaaacacactaacccagagaaaaacacaccaaacagaacccacaacagagaaaatacagaaaaagacaagaacacaaccaacacgacgagaaccaaacaagaagagcacataacagaggaaacacgacagaacacagaaatccaggacaacacaaagacaaagaaaaagaagagaaaaaaaaagacaaacaacagaaccaaaagaaaagacaaacgcaagagcacacacccacgaagaaaaaagagacgaagaacaagaacc

SEQ ID NO: 21099 - DNA, 267 bp, Homo sapiens
gcttcacccctgcccctctttgtctaggcacagtggagttcctctgatccccaaaccgatgttccttcacattgctgtgcttactattctaatgtccttttatttctctattttcaaaaaatgcattctacttggtagttttctctctatggaagcttcatctgaagacttctatcttaaaacaaatttttctcttttttttaactccagaaaactttgttctagtatttaccatatttcattgaaatgatacaataattcacacag

SEQ ID NO: 21100 - DNA, 358 bp, Homo sapiens
caccacagcggcaggcctggcgtctccgctcttttcccagccttcctctcagtcttgttgctgcatggtcacccgtcgactgccattgctccagccattatgtttgcattcaagatagaaagagaaagaagggggaaggaaaaaagcccacctaatagccactctctctctttaatcagataaagcacgtgttttcccagaagcccccagcagacttctgcttacatcccattggccggagcctgtcacatggccagccccagctgcaagggagcctggggaagcaaatggcagaggagaaggatgttggggtattggctaagttagccagggaacagggtctgccataccaagtctc

SEQ ID NO: 21101 - DNA, 337 bp, Homo sapiens
tcaagatagccctatctaaccttatttccagattatatggacaaatatgctcttactagggtaacaaaaacttatcttctctttagctcatgtcaaaagcagactgagaaggaactctttatccaagttaagtgaaggttggtgtcaccacacctctagtctttatctaaagtgttaagtcatcaggaagttgaatcacacttagtttaacctttattgagttattgaaatggtgcccttggcttttatcaatagaaaagccacataaaaacttcttccaattctccttcaattattttgcccattatattatagagtttgctatgcaaaaaaaaaa

SEQ ID NO: 21102 - DNA, 438 bp, Homo sapiens
aaaatcccattctctcctcagatctgagaatatgagggtaattcttcaaaggttgtacaaaccaaacaaaaaatcctctcatttgagtatctatttgcacccaaatgggcccaatcaccaaccatttaatattatttactaattatgtcaactgtatgccgaggcattgttagggttaaaagagtataagatattatttctcctctaagtctttagtgaaatacattccccaaaagctcagcatagatttatgggtgtcactttgaagcttaaaatccttcaatggctttcagtcattttcatggtgatgttcaaaatctttgcagtgacatacaaggtaccacctgcctttccaacctcatctcctcctgttccccctcctctgggttgtttaagtagattgtcctcatcagcacccacctaatcctggtctattgg

SEQ ID NO: 21103 - DNA, 458 bp, Homo sapiens
gccatcaaactccaaaccatcacgcaaccagactggagcctcaaacaataaccttttttgccaggaaccctttcataggcccctgagggagatcagactgctgttttctgaaaacagtaccctctgtcagcaggaagcagttaagattggtcttcatccttatctttattctaacggcagttagatgtacttctttaggtgcaaaatgatagatgcaggaggcagatgagggaacctacccagggcattgtatgtgtatgcctgcaatggactagggacccacctgcacactggaagggtggggtggagccactggaacatttacactttgcgcagaagggaggagcctggcatcttcagttcctgtgtggttgcctggtgttcaagattccctcttgctttgctgagagttgtttttccttttcacccaataaattctgctgcttatccatcagtgt

SEQ ID NO: 21104 - DNA, 347 bp, Homo sapiens
tcaacccggaagtctgagttagatagaggccaaagtgttggctaaaacctctttgaaaaacaaacgttgagttttgtgctatcttcaagagtccacagaacttctgaaggaatgggttcgagctactctacaagtaatttatacaaagacagaatcactaattttaggggtggtgtgtgtgtgtgtgtgtatgtgtttacctccgccctttggagggagccttctgggtacccgctgatgggtcctgctttgatgtgctttgagctttggttacactgatgaattaaacatttgaatggctttaatcaagttttaaatgtgttaaaaaaatacctttcccccatttt

SEQ ID NO: 21105 - DNA, 408 bp, Homo sapiens
agattcggaacgaggcaaacaaacaagaaacagaactttcaaggcattctttgtccagtcattcttccattatttgccacacccctacagctgtacaaaatgatcagccctaatacagttgttaaaaatattaacctgaaaatactacaggaatttcattataaaaataacataaacctatggtaacaagaaaagcatttagggtctgtcttacaaacttgaaacgtttccagattttcttgtaattataatacctatctctgctaatatatagtagaaccactgagctgttccttgattgaagtaattgacaagagtctaaattgtggtggttctcttctgtacactaattctactaaggctagacatgtaacaatgcatagatttttatacatatgcagcatactc

SEQ ID NO: 21106 - DNA, 849 bp, Homo sapiens
tctcatccacactacccattgcaccaggtgttggcacccatactcagctgttcttaggtcaacagttagagtatttctgagtcttacatattttcttgacttcattttgttgactacctcgtccattgaaattttcttcctgcgcacacctgtaatcccagcactctgggaggccaagacgggcagatcacttaaggtcaggagttcgagaccagcctggccaacatggtgaaaccccgcctctactcaaaatataaaaattagccaggcgtggtggcgggcacctgtaatcccagctacttggggaggctgagacaggagaatcacttgaacccagggaggcagaggttgcagtgagccgagattgtgccactgcactgagccgagattgtgctactgcactgatccagcctgagcaacatagcaagactgtctcaaaaaaagaaaaaaaaaaattttcccattgctggttttcccattttctttttgaccttcccacctaccagtctttgttcccccatccttgaccctcttctccatgtggataccgttgatacacttttaggtttgaatatcaccttccttttagaatgttccatacctttaagcatttgataaaagctatggtggtttccccagaaaaatgttcaacaggaagttttgcctacatttttggattcacagacctcagttcctatggcagtgttcatatacgtaagttcagctgttacgtgtttacaactcaaatccaatggctaccagttttcccactggacctctctggatttagcaatctctaaaattgtattcacttgattcttaaaaaaataaaaaagcttaaatgcagat

SEQ ID NO: 21107 - DNA, 469 bp, Homo sapiens
acctcggctcactgcaacctctgcctcctgggttcaagtgattcttctgcctcagcctaccaagtagctcagactacaggcgtgcgccgccacgcccagctaatttttgtatttttagtagagatggggtttcaccacgttggccaggattgtcttgatctcttgaccttgtgatctgcctgcctcagcctcccaacgtgctgggataacaggcgtatgccactgcgctctgccgtcctttccacttctaaactaaattatattttggaattttcccttatgaaaatagtatttttttgttgttgttattggtagtcactcacctttttatcaatggatgacattttaaaaatgttttcccaggaaaaaatggtaccatttaaataatactttttgtttagtccctaagatctggccctgaaagcatttacaagtttgatagaagtaagaattttagtaaaaatggaaa

SEQ ID NO: 21108 - DNA, 668 bp, Homo sapiens
acttgatcatgcgtgacagggacttaagaaagcccctaattatagccgtgtggggtttgtctcccttctgaagcttggcgcccgtgtgctcaaggcaagggcgtgaccaaggtaagagaccccttctctcccttaggcagaagtcctagcagagtatgcccacgctggttagtgctgctgcaaagatgagccgaagaccatgagagacctccaggtggtccttctggggagaagaaatgggttttggccccaaatccttctgctgcatttttcccctatccctgggaagccatgagacctcaaacctgtgttcccaaggaggcgagctgctgttcccaggtgatgatatgatgtgcttggggaaagtaagtggctgccagacatggctgagagctgttgtcactgccgtcaagtgcatgtctccaagccatatcacacggcgtccctcgatgtgaggccacatggcaagtgggccgtggatctccctctgccctttgcaagcacgtaagacagcagattttgcagataccttgtggcgcaggggaatttcctttggccaggtctgaagaaataaagcagcaggcaccgagaacaaagccaaggctttcaaaagacaaggagccaaaaaacttactcaaaataaaagtagttttaaaatgtctctgcca

SEQ ID NO: 21109 - DNA, 378 bp, Homo sapiens
ataactaatatcacaatctttgtcgctatttgttacatgcctttaattattaagataccatgaataatttatgaactctgatgctaagaaatcctgtcccttctagtttctaccaccttcagattggagtttgcatgagcacaatagcctcagctctagaggtaatgtttttctccctctgcaaaatcaacacaattagattacttccttagtgatattattatggtgttatttcaatatttattataataatagatattgctattttaaaaaagctggtattttctgtttccatctgtgaaataggataatgtaaacaccacattaatacaagcatttatataaagtttgtgactataataaatgccaatcctgaga

SEQ ID NO: 21110 - DNA, 335 bp, Homo sapiens
caattatggaggcaattttaaaaataaatgcagaataaacatttcatttgaaacatttgttaataaatacatgaattaattaagcacaaccattaagatcctaattaccatgtgatgggaaggaaaaagggtcaaatagatctgtaactgctaactctttttttttttttttttttttttgagacggagtctcgctgtcgcccaggctggagtgcagtggcgcaatctcggctcactgcaggctccgccccctggggttcacgccattctcctgcctcagcctcccgagtagctgggactacaggcgcccgccacctcgcccggctaattttttg

SEQ ID NO: 21111 - DNA, 550 bp, Homo sapiens
tgggattctatgttaaataataaatcagtttctcacgttgcagaggcaactctagagaatgtggttggatgaaattttctgaataattcattcaggtctagtttacattgaagaaaaagaggtttagggtacttttccttcattgccatgaatcttatttctctctctttcttacaacacacccaactaggtcttgtcatgccaggaaacaaacagctacaaaagctgattttttagatgtaaaagttagtaatgatgacccaaattaacttcgataaaacactatcttctactggaacgtaactcttaaacatgacttatactgaaccaaactgcctaaaatatggaagagtggtgttgtttggagatttacttatgggtcatgttattatttactcttaagatatagaaaccatgtaagcacaattatgatagaactatcaattagtgttttctaccattgcaaagggaaataaactaattgagaataaaaaataggcatgattattttattatgtgtagaattttaattttgaagggcaatttatga

SEQ ID NO: 21112 - DNA, 465 bp, Homo sapiens
tccgcgctcctgggcagtggggaagctttagtgagcaggcttttctctccgcagcaaacttgtagcccagacccagatgggccgccccagctctctcgggactaggcaggtgcggttgagttaatttttccgcattacaaagaaagatgaccccagcccgcccttggactctcttttccccaaaatctcccaaccaaacccgcggtaacgttatcaaaggacacagagcccaggcatatctgtgtgtttatcttacaggcacacacgcatggttttctcttttatatgctagatttcatccctgacagcagaaaatgattggcaatggttctgacggagaacatgcaatagcgtggtccttaaaaacctgccattccttacaagtgccttagaaaggattcagggcgaaccaactgggttaattgcattcagtaaaataacacgattacaaaaaaaaaaatgtac

SEQ ID NO: 21113 - DNA, 574 bp, Homo sapiens
gctgggactataggcatgtgccaccacgctcagctaattttttgtatttttagtagagacggggtttcattgtgttggccaggctggtctcgaactcctggcctcaagtgatctgctggccttggcctcccaaagtgctgggattacaggtgtgagccaccgagcttggccaagtgcttaaaatagttaatgctaatgccacagtccaatttaaatcttttcttagttctcaactttccttaatcttaaagcagcattcggttctgagcagctacactcagtctccactaatggctgctgagactatgtttcctctctcaattctctgatctatttgctttcttgtcattccttgttttttgtgtgtattccttgacttacctcttctcctgtcttcattaattaggttaattttggggccccatggtgtttcacgtaaaaagatttggctgggcgtgatggctcatgcctgtaatcccagcactttgggaggccatagtggaggatctcttgagcccaggagttccagaccagcctgggcaacatagcaagactctatctacaaaaaataaaa

SEQ ID NO: 21114 - DNA, 371 bp, Homo sapiens
tcattcaacaactatttctcaacctctcactttgtgctgggtaccgttctaggtgattcagcagtgaataaaagaaaaaaagttatttgtccttaggaatcttgcctgctaatggggaatacagatgatttttttaaatcgtgaaaatgctaagagagaagattaagtgggaagggagctctaagatatcatggtgtatgctgaaattttagcaagggtggaccatgcataaattaggaaatttctaagaattagaatacacaaaaggctgtggtatttaataccattcacctagtagagcacaaagaccatttgtggggtatgagggaaactgaaatctaggtctcgctttgtcacaaattcattgggca

SEQ ID NO: 21115 - DNA, 156 bp, Homo sapiens
cacccgatacacaggcagacacactcaggtagaaagcacagatagacagacacagaagacaccaagatgggcatgcaggcacagacacagactcagaagcactggcagaccctctggggacactccagggcagagtcatgcacatacagggagaca

SEQ ID NO: 21116 - DNA, 877 bp, Homo sapiens
cttgttttggttaaaaagctttggatttggtacaacttttgtcatttcaaaatttaaatcaggaccagcactttttcctttttgttctttcttcttccgagatgtttctgagcatcagggagggaaagtgtgaggttttcaggcatgccaacaagcccgtggggaatctggtttgacactggtctgtgagctacaaggctgaagtgtggcctttctgtgcaacctgctggcatctgctgctgaatccctccagctaatataacccagagcctcctctctgtcttcagggactttggccatcatctcttgtttcctgcactccagatgcccttgggtttgattcccactaggaccctcggacaactccagttaaaccttcagacccaagaccacttttctggcaggacctctagcatgtttcccagccagaatctcaacttctttctaggcccttcctgggctacatgggaatctctagattacttccatgctgggcacagtctgttggtgcaaggttatgccaggtggagtggcaattggtccctgatgccaagcagagaacatggcaaaagttcctctgctcccagctttccactgagcctatcaaacacctatcacatctggaatttgaagcatgaatgacagcctcctgactgtgtctcacaatccccagagctgaagaagttgactttatcccccgttccccaattcctctatgacaagaacttacaacattccctctaactatagcatacaataaaactctatgatatacttggcaaagtctcactcttagtatgaaaatagatgattaaaacaattagaatatcatgttcccttatgttccctttctctaaattatggatttgaaaactag

SEQ ID NO: 21117 - DNA, 352 bp, Homo sapiens
attaaaagtaataattaaaatttgaacatctccaaataaaacttgaacttgggaccttattaacaataaaacatcagcagctttctctgcatgttgatctgaccagtcctggccacttttagtggctagtttggggaattagcctgacttcctggcgggtgtggcttcctggaggggtgtggcttcctggaggggtgtgacttcctggagggggcatggctttggagtctgatcaccctggcttgagtcccgccccgccactaactagctggctgaccttgggggaggttatgtgatctgtctctgcttagtttcctcatttgaaaaaaaggaatagtaatgcctactcaga

SEQ ID NO: 21118 - DNA, 324 bp, Homo sapiens
aggtgggaggtactgaacacatcttcctaatcggcttatgtttaattcttacaatattctcatattcattcttatacttcatgcttttgtttatttctcagcagtgaatgccaggcacagtgtcggtcctggaaaaccgcaggtgatttagacgtagaacctgagctgtacaactatctatggctcacagcctatgggggtaccgactgatcaccagccaatcataataaatgtggcacagaaatgacaaagacttggttataatttggttcataaatcattagtatcctatcatcaatttgaagcttcttggaaagtctaatc

SEQ ID NO: 21119 - DNA, 382 bp, Homo sapiens
ttctttttctctaacttcctaagtgattgtgattatacacccctaggagaaatactgatcctcttgaaccccgtaacttctgaaatgtaaaagctcgaggtcacaggctaattggaactaaagctgctaataataggaagtgaaatattttttccattaagccatattgcaaattttctaaagctcttgattaaccaaattcaactgcatccctgactcttacaatatttgcaatgctattgctgtcttattctgaaaagttctttcctggatgggtatagtggctcacacctgtaatcccaacacttcgggaggcagagatgggaggatttcactatgttgcccaggctagtcttaaactcctggccttgagcaatccgtc

SEQ ID NO: 21120 - DNA, 539 bp, Homo sapiens
gaattattatgagccctgatcagcgcactttgccctctcataacgtctatttattcgtctgtataatggaataatagtggctgctgttaaatgaattaaatacgacggcgtttggagggaaacattactactccagttttacagataaggaaactgatgatcaggtgcttgaagtgacttccgaagatcaggaagacagcatatggcagggacaggaacccacgcctacgccccagcctctttttaccgaaccttgttcttcaggaagtggttaaaacacctgggctactcccagcaaaacgccagtcacgcagtcctgaaacaggtcctttaaggtgcccagcccaacacaggctgggcgtgctgagccaacagaatgtttgttcctctgtcccttcctagaaccccaagtcacctttctccagccagttaaaaacgttacttttaactaggatgacgtttcaatttatcggccatatccaagcatttttgagaatgaactgtgagacatgctattaataaattaaccatgaacagca

SEQ ID NO: 21121 - DNA, 669 bp, Homo sapiens
gaattattatgagccctgatcagcgcactttgccctctcataacgtctatttattcgtctgtataatggaataatagtggctgctgttaaatgaattaaatacgacggcgtttggagggaaacattactactccagttttacagataaggaaactgatgatcaggtgcttgaagtgacttccgaagatcaggaagacagcatatggcagggacaggaacccacgcctacgccccagcctctttttaccgaaccttgttcttcaggaagtggttaaaacacctgggctactcccagcaaaacgccagtcacgcagtcctgaaacaggtcctttaaggtgcccagcccaacacaggctgggcgtgctgagccaacagaatgtttgttcctctgtcccttcctagaaccccaagtcacctttctccagccagttaaaaacgttacttttaactaggatgacgtttcaatttatcggccatatccaagcatttttgagaatgaactgtgagacatgctattaataaattaaccatgaacagcaggttcaaacctggatggatagtcatcctacttataactgaaagtatccttaaatatctttagaatccggatgagcccacttagtttgcaaaccgaggtcaataaaactgacttgaaataggaagtaatta

SEQ ID NO: 21122 - DNA, 615 bp, Homo sapiens
gaattattatgagccctgatcagcgcactttgccctctcataacgtctatttattcgtctgtataatggaataatagtggctgctgttaaatgaattaaatacgacggcgtttggagggaaacattactactccagttttacagataaggaaactgatgatcaggtgcttgaagtgacttccgaagatcaggaagacagcatatggcagggacaggaacccacgcctacgccccagcctctttttaccgaaccttgttcttcaggaagtggttaaaacacctgggctactcccagccaggctgggcgtgctgagccaacagaatgtttgttcctctgtcccttcctagaaccccaagtcacctttctccagccagttaaaaacgttacttttaactaggatgacgtttcaatttatcggccatatccaagcatttttgagaatgaactgtgagacatgctattaataaattaaccatgaacagcaggttcaaacctggatggatagtcatcctacttataactgaaagtatccttaaatatctttagaatccggatgagcccacttagtttgcaaaccgaggtcaataaaactgacttgaaataggaagtaatta

SEQ ID NO: 21123 - DNA, 443 bp, Homo sapiens
caattacagttcaggtttttctaccccatactggttcccacaaaggtttctgctcaagggtttctgctgcagtaatttgtgattctaagtattttcttgtcagtctttccaatttaaggggcagtaaacctcacttctctgatggatctaagagttgttaattaatcagtttgttcagccttttatttgttgttaggatgtagtgacaacttccaagctccttacgtactggattgcaaaccagaagtcaaactattccttagaaatgaaggggaagtaaagtcattttcagatgacaggatactaaaagaatatgtcaccagaagacttgcccttaaggaatgactaaagcaagtgctcagaacagaaaggaaataataacaaaagacttcaggacctcaggaagaaagaaagaaaagtggatatgaccataaaatgtaatc

SEQ ID NO: 21124 - DNA, 401 bp, Homo sapiens
gactggggcgcggggaaccgcggtcttggggagaaggatggggaggcggatggagtgctggtcggaagcgggcattccggggtccccttctcagagttccctaaagccagggtgccgcgccccctgccaccaggagggggtagtctccccgaggcgccgccggccctcccactccccggctggctccagaccacccctcccctccggcccccccgcatagtccttcagtcccgtccggggcgcccagactgggggttgcccggggcccccatccccaatctccgggttgagaggcgaagccaggaaaggcgggtggcgggtaaggtcggacaaggggtcagacagaagagggagcagctgggtgggaatgggaaagatgagcccggagagttggacctgac

SEQ ID NO: 21125 - DNA, 170 bp, Homo sapiens
ttatacctcaaattttctattaatacactattttttagaaaatggagacccaagccaccatcactgtagttccaggtaacagggacgctgaatggctggctttgccttatctcattgttggtctctgggtcaattaggataagaaatttgattttttttttagcgtcaca

SEQ ID NO: 21126 - DNA, 927 bp, Homo sapiens
ctatatcttctaaagagtgggaaattcatcctctggttttgctaacttttttggaggtaagcaggaaataattaatgggcctcttttgcagttaggaaaatttaagtcagcattcagatgatctagagatgagctcctgaccttctgaatctcaactattaggaatccttgaggtaaatgtaaactttcaatgatacatttgaacacatttttgccaccattgccttatgttttttttgttccaggtggaggccagttactgcttcaacctaaagtcagccttcaacctaaagtctgttatattttaggcacatgcatatacaggttcaccagcttccttcccctctgtctccaacatggttaccacccctttcaccaccctggttagctcagcaataacagaataagaataaggaaacctaggacagtctggcgtgcttagcgccacttctgatgcagaatgttgcaatcccagggctgttgaaataactccccagcccatatcatatgtaaaaaaaaaaaactgttaaagtcttgacgtttaaagtcccaactcttccacaaaaatgacagttttggtcagacagtggttcctgaaataaataggaagaatggcggcgagagaacaggataggaggtgcctgtgacactctgcagttggcttaggtttgatactctgatgagaacatgctttggagggattcccatgattgaggaaattttactctgcctgttgagaatcattttttccatcgcatgggtggtgactggtaggcacttggatggatgtccagttttgccctaagtactgcatttttgagctggtactattggtgtatataataggagcccccatttggaggtgatgtcaggtggactctactgtatgatagtcactgattcttacctctgtttttctcttttttt

SEQ ID NO: 21127 - DNA, 4887 bp, Homo sapiens
atgttccgcttccctatggggctcctgcttggctctgtgctcctggtggcttcggccccagccactctggagcctcccggctgcagcaacaaggagcaacaggtcactgtcagccacacctacaagatcgatgtgcccaagtctgccttggttcaggttgacgctgaccctcagcccctcagtgacgatggggcttcgctcttggccctgggggaggccagggaggaacagaacatcatcttcaggcacaacatccgccttcagacgccacagaaggactgcgagttggcaggcagtgtccaggacctcctggcccgggtgaagaagctggaggaagagatggtggagatgaaggaacagtgtagtgcccagcgctgctgccagggagtcactgatctaagccgccactgcagcggccacgggaccttctccctggagacctgcagctgccactgcgaagagggcagggagggccccgcctgcgagcggctggcctgccccggggcgtgcagcggccacgggcgttgcgtggacgggcgctgcctgtgccatgagccctacgtgggtgccgactgcggctacccggcctgccctgagaactgcagcggacacggcgagtgcgtgcgcggcgtgtgccagtgccacgaagacttcatgtcggaggactgcagcgagaagcgctgtcccggcgactgcagcggccacggcttctgtgacacgggcgagtgctactgcgaggagggcttcacaggcctggactgtgcccaggtggtcaccccacagggcctgcagctgctcaagaacacggaggattctctgctggtgagctgggagccctccagccaggtggatcactacctcctcagctactaccccctggggaaggagctctctgggaagcagatccaagtgcccaaggagcagcacagctatgagattcttggtttgctgcctggaaccaagtacatagtcaccctgcgtaacgtcaagaatgaagtttctagcagcccacagcatctacttgccaccacagaccttgctgtgcttggcactgcctgggtgacagatgagactgagaactcccttgacgtggagtgggaaaacccctcaactgaggtggactactacaagctgcgatatggccccatgacaggacaggaggtagctgaggtcactgtgcccaagagcagtgaccccaagagccgatatgacatcactggtctgcacccggggactgagtataagatcacggtggtgcccatgagaggagagctggagggcaagccgatcctcctgaatggcaggacagaaattgacagtccaaccaatgttgtcactgatcgagtgactgaagacacagcaactgtctcctgggacccagtgcaggctgtcatagacaagtatgtagtgcgctacacttctgctgatggggacaccaaggaaatggcagtgcacaaggatgagagcagcactgtcctgacgggcctgaagccaggagaggcatacaaggtctacgtgtgggctgaaaggggcaaccaggggagcaagaaagctgacaccaatgccctcacagaaattgacagcccagcaaacctggtgactgaccgggtgactgagaataccgccaccatctcctgggacccggtacaggccaccattgacaagtacgtggtgcgctacacctctgctgacgaccaagagaccagagaggttctggtggggaaggagcagagcagcactgtcctgacaggcctgaggccaggtgtggagtacacagtgcatgtctgggcccagaagggggaccgagagagcaagaaggctgacaccaacgccccgacagatattgacagccccaaaaacctggtgactgaccgggtgacagagaatatggccacggtctcctgggacccggtgcaggccgccattgacaagtacgtggtgcgctacacctctgctggtggagagaccagggaggttccggtggggaaggagcagagcagcacagtcctgacaggcctgagaccgggtatggagtacatggtgcacgtgtgggcccagaagggggaccaggagagcaagaaggccgacaccaaggcccagacagacattgacagcccccaaaacctggtgaccgaccgggtgacagagaatatggccactgtctcctgggacccggtgcgggccaccattgacaggtatgtggtgcgctacacctctgccaaggacggagagaccagggaggttccggtggggaaggagcagagtagcactgtcctgacgggcctgaggccgggtgtggagtacacggtgcacgtgtgggcccagaagggggcccaggagagcaagaaggctgacaccaaggcccagacagacattgacagcccccaaaacctggtcactgactgggtgacagagaatacagccactgtctcctgggacccggtgcaggccaccattgacaggtatgtggtgcactacacgtctgccaacggagagaccagggaggttccagtggggaaggagcagagcagcactgtcctgacgggcctgaggccgggcatggagtacacggtgcacgtgtgggcccagaaggggaaccaggagagcaagaaggctgacaccaaggcccagacagaaattgacggccccaaaaacctagtgactgactgggtgacggagaatatggccactgtctcctgggacccggttcaggccaccattgacaagtacatggtgcgctacacctctgctgacggagagaccagggaggttccggtggggaaggagcacagcagcactgtcctgacgggcctgagaccaggcatggagtacatggtgcacgtgtgggcccagaagggggcccaggagagcaagaaggctgacaccaaggcccagacagaactcgaccctcccagaaaccttcgtccatctgctgtaacgcagtctggtggcatattgacctggacgcccccctctgctcagatccacggctacattctgacttaccagttcccagatggcacagttaaggagatgcagctgggacgggaagaccagaggtttgcgttgcaaggccttgagcaaggcgccacctaccctgtctcccttgttgcctttaagggtggtcgccggagcagaaatgtatccaccaccctctccacagttggtgcccgtttcccacacccttcggactgcagtcaggttcagcagaacagcaatgccgccagtggtctgtacaccatctacctgcatggcgatgccagccggcccctgcaggtgtactgtgacatggaaacggacggaggtggctggattgtcttccagaggcggaacactgggcagctggatttcttcaagcgatggaggagctatgtggaaggctttggggaccccatgaaggagttctggcttggacttgacaagctacacaacctcaccaccggcactccagcgcggtatgaggtgagagtggatttacagactgccaatgaatctgcctatgctatatatgatttcttccaagtggcctccagcaaggagcggtataagctgacagttgggaaatacagaggcacggcaggggatgctcttacttaccacaatggatggaagtttacaacttttgacagagacaatgatatcgcactcagcaactgtgccctgacacatcatggtggctggtggtataagaactgccacttggccaaccctaatggcagatatggggagaccaagcacagtgagggggtgaactgggagccttggaaaggacatgaattctccattccttacgtggagttgaaaatccgccctcatggctacagcagggagcctgtcctgggcagaaagaagcggacgctgagaggaaggctgcgaacgttctgatggcccgtgtgagcagtcctcgcaggagacaccaccagctgtggcagcttggggcggggtgggtagtggtcactgcggtctgggagtgctcagatagcccgcagaacaaatcatgtcaccaagcttcaagccatggaggttccttccctctcacctgcatttttgcccgtctttatgagggtcttgaaaatcaaaatagtagttgcacagtatgtgtaggaaagacagtactggaacggcaaggtttctcagcttatcttcagcaacatatatactggattagggcaagagaaggaatcacccagcacttcaccagttggaaatctctggaaatttacatctatgtatttaaagttctgctaatgcaaatcttttctctggaaagaagcacagaggaggagttctgatgacccaggggttagggctgagacaaccggacgtttgtcacctcctttcccattgggtttttaggaaaacagtgtgaacctcccccttttaatttctggtgttatgaggaagaataaaggggataaaaggggctaagatggactcatgtttagctaagttctgacttgtatccagcatgctggagaccaaagctgccgccttactgctatttttaagtgccctcttttcagtcatttgcataattgcgtccatagagctgcatatgttgtgaataaattctcactcatttcaactttgaataatttgactgtcttgataattggttcctcccaaagactcttctgcaactcccattcatgcccaccaggcctcagactccctcttttccccgccctgcactattggagccctgggttttgtgggagtgctcagcaccgtgagtcttactgtttgatcggacagttagcaagatcagatcctttttgcttattttctatcactttggagggttttctgtagcaaaatcagtgaccaatgaagtaacttaaattcctattgaagaaaaaaaataataaaccacttgatttaaaaaaa

SEQ ID NO: 21128 - DNA, 1300 bp, Homo sapiens
ccttggcctcccaaagtgctgagattacaggcctgagccactgaccctggccaaattttttttctactagctactgaggctgccacatctggatggaactgagtggagggggaaaagaatgaaaaactcaaaagaattcccatgagggtgtcttgctttctctcctgagttacaatactttagcaaaatcatgaggctttagagatatggtgtagtctgcaaacttcttaatgcccttacccacatttaccatgtttcctggccttcctctgtgtcaactcttagctcttcctaatcattatttaatacatgagtgagtttagtagtgatcatatttctcaggtcctttagaagctggaattttaaaagaattagaaggaggagtatgtgaattctttggagctcactgcctgacttgcttatgaccaggaaaatctatcccctgtatctaattttaatttcatggttaaatttgagaattgtggaaaccaagttccacaaggctattctcatatttctcccaatttctttttcagccaactccaaggatatgtatcacctttgacttaatttgctttctctaagggaaaggggaaaaaatgttcacatagctccactgcaatgttttttataatagaggagagatattgtaaatagagactgccagccagtttccacaaaaaaacgaagagttcataaatttgacatgtttgaacccataaagcattttctttgcttggaaccattataaaagtaagtgagttttcaggctctatatacattttaattcctcacgttttatattggagagttcggtacagactgtccattactgcaccaaaagaatgagtgaactgttacctatagggaaagaacacttcttcttcctgctgtttgggaaccatctcagtgtggcgtaatggttaggagtacagattccagatcctgtttcttagatttaaatcttgactctgccacatactagctgtctgactgaaccttggtttttctgtgcttcagtttcctcatctgtaaaacggagataacagtacttacctcatagagctgttgtgaaaagtgatgactgaatatgtaaaagcacctagaacagtgcctggcacatgctaagtgctttgttcattattgttgttattatgtaattttctctcagactgagagcactgttagtgacccaagtaaatttatagtttttaagtacagaggaaaaataaagcctattttttgttaacagtcttaataaataataaaatggaataaagaaaccaagaccccaaaaaaa

SEQ ID NO: 21129 - DNA, 353 bp, Homo sapiens
gcacccctttttcctccccagtaaatcatccagagagcaagtttgctgacagcagatgccaagacaattgtctttgcacctccagggctgctacagagtcagagccaagtccctaagcctaattagatgtctccccatacaaggcttaaacaagcacatggggaagccaggtctctgatgagtaaagaaagagaacacaggctatatcagggtcatgtggacaggcattggtcacagatacagatgactcattttcagtctgagatgttgaaagaaatggaaatgactcccccatctcccaacctccagccccacattcagtgtctattgtcattggtttgggtctgtctggg

SEQ ID NO: 21130 - DNA, 1498 bp, Homo sapiens
cttaaagcgaagtgggaaatggctgaagacatggaaaaagaaatacgtcaccctgtgttccaatggcgtgctcacctattattcaagcttaggtgattatatgaagaatattcataaaaaagagattgaccttcggacatctaccatcaaagtcccaggaaagtggccatccctagccacatcggcctgtgcacccatctccagctctaaaagcaatggcctatccaaggacatggacaccgggctgggtgactccatatgcttcagccccagtatctccagcaccaccagccccaagctcaacccgcccccctctcctcatgccaataaaaagaaacacctaaagaagaaaagcaccaacaactttatgattgtgtctgccactggccaaacatggcactttgaagccacgacgtatgaggagcgggatgcctgggtccaagccatccagagccagatcctggccagcctgcagtcatgcgagagcagtaaaagcaagtcccagctgaccagccagagcgaggccatggccctgcagtcgatccaaaacatgcgtgggaacgcccactgtgtggactatgagacccagaatcctaagtgggccagtttgaacttgggagtcctcatgtgtattgaatgctcaggaatccaccgcagtcttggcacccgcctttcccgtgtgcgatctctggagctggatgactggccagttgagctcaggaaggttatgtcatctattggcaatgacctagccaacagcatctgggaagggagcagccaggggcagacaaaaccctcagtaaagtccacgagggaagagaaggaacggtggatccgttccaaatatgaggagaagctctttctggccccactaccctgcactgagctgtccctgggccagcacctgctgcgggccaccgctgatgaggacctgcagacagccatcctgctgctggcacatggctcccgtgaggaggtgaacgagacctgtggggagggagacggctgcacggcgctccatctggcctgccgcaaggggaatgtggtcctggcacagctcctgatctggtacggggtggacgtcatggcccgagatgcccacgggaacacagcgctgacctacgcccggcaggcctccagccaggagtgcatcaacgtgcttctgcagtacggctgccccgacgagtgcgtgtagtatctgttttatttgactgcagtctccttggtgcaaaaacaaaatgggaaaaataaggataactcagaatttcaaaaggaaatcacaaattcagctagtaatagcattttcagtacttttcataaactaagtaaatacacaaaatgttgatttttctgaccataagacatattttatgtccttttgccaaggtggatgtgttagtctcaggccctcctggccacattgcccaagtcacacaggcttctgtattatgtatttagataaaatgtgtgaaaatatatttgaaaaaaaagttcataa

SEQ ID NO: 21131 - DNA, 302 bp, Homo sapiens
gtcaaggaaggggctttggggttcaactcagccccctcaaaaggacactgtattttcatccccccgcctgatttctcctctgaggagcagctccctgggtggtatgcggcagatggtgggggtacctgttcccaattccctgcataatctgagctgccctggaatgggaagagtccagaattaggagatatataacaagaaggaattagggactcagggtgcaggggaggggtggaggaagtcaataactaaaacctgagttgtgtcctaagttctaaggaagagaagtgaggcaaggagaa

SEQ ID NO: 21132 - DNA, 367 bp, Homo sapiens
agtagagacggggtttcaccatgttggccaggctggtctcgaactcttgatcttatgagccacccacctcagcctcacaaggtgctgggattacaggcgtcagccactatgccaggcccaagagggatggtttttgaggtggttgtttgagatttattctgaacccagggagtctgttcttagctatttcactggtccttgtcctctttggtaacctagttagcctatgggttagctaatatcactgtcaaatctaccggtccttcttttttatggctgtgtggtgggggaaaaaaaaaaggacaaagctatcagtgtttaactccaataaatattcagaaagaaaaaaaaaagctatcaatgtcct

SEQ ID NO: 21133 - DNA, 741 bp, Homo sapiens
gctttctcaaccccttcacgtggcttctgcagcaaattccaaggttcagaatgccagagggagaataagttccagaagcatggtatccggcaacttcagcatctgccagtgacatctgtcccctcttcaaccagacctgaatctcagccccagtatgggaacagccctagagttagtggctacttattaagtctgctcttacagtattcttaaaagttgtctttacttcttacaagtcaatttctatttcttcaatcatgttataactagtaattctgtgtattaaacctccactgttaaaatcactatatggtctctgtctcctagttggacagtatgagatagttttttttttaaatttaattcacacactctaaaattcagcctttcaaagtatataatgcaatggtttttagtatattcacagacttctacaatcatctccactacctatctttgaatatttccatcctccccaaaagaaaactcatgcctccccattctaccctccttccagctccaggcaacatacactttcccgcctctgtttttacctgctctggatacttaatctagaatcttagaatatgtggccttctgcatctggcttctttcacatagcatatgttcaaggttcatctgtgttggagcatgtatcagtatttcattcattttcatagcagaataatattccattgtatgtataccacattatatttatgctgtcatcagctgatgaca

SEQ ID NO: 21134 - DNA, 377 bp, Homo sapiens
atgcacattgccaatcagtgcacttgctggattgaagaatgtgagtgtttgtatcactctttcagtaggctgtaccaatttagacttgctctaccaatttagatttccatcagcagtaaacaaagacattcctgcctggcagtcttgaactcctgctattatctcttaaatttttgccagtgtgtgaaaagtagtatcttactttaacttgtattttcctggtccaatagtgcactaaatgcccgagttctgtatttattctatttggatagccattagatagccattaagtccactcatagagttattttaaatgttttcctttagtttccaaccacattttcaaataaaatttagaattagcttgtcaagtaagt

SEQ ID NO: 21135 - DNA, 823 bp, Homo sapiens
  misc_feature (9)..(9): n is a, c, g, or t
tagtaggtntggggtttcaccgttttagccgggatggtctcgatctcctgacctcgtgatccgcccgcctcggcctcccaaagtgctgggattacaggcgtgacactgcgcctggccatcttttaattcttaaagatatctgaagtggttggcttggtgatggccagtttccgtaggccgcataatgctgagaaggaagatttcaaaggtctgttttctttaggtttttcttttgtccagtcttctttggcttgcatttctttgaatttcttctgttactttatgctccaaagtatttagtacatactgctcacagttttgatacacgtttctttttgttgttcataaaatttctgttcagccaaatagaacatgctttccagtcagttcttcctggtaatttccaaactcttaaaatttttctgggtttagagttttaaaaaatgcgatcaaaatagtttattttctgataaggtttatttgtttgtttatttttgtttttaaacaagggcttaaaaaatggcacccttttatccttggcaaaattacttatagatagcaaagcaatggagatatgaagcaaaattaagaagtcaagaatagggaaattattaagtggacttgggataagcagggttctgaaacagttaaaatagagatgtgtcgtaattgttataaatctcaatgtacttactaaaaaaacaaaaaatcaatcttcatctaaacccctaggtgtccaatcttttggtttccctgggccacagtggaagaaagaattatcttgggccacacataaaatacactaacattagctgatgagctt

SEQ ID NO: 21136 - DNA, 798 bp, Homo sapiens
cttgactatatttgctaaattcaggaaaataattttatattgaacacaaattgtattttaaattaccactatatagatccttattaccaatgtttgaaaaatttgttttggtttattcctgacattgggtggaaggggcattggatttaggtcagaatggctatctaccccttgaactgacctttccactaacttgctttgtgactttagatggagcctctgaagaacttcatcaccattttcttcatcagctttaaaagagagagagagagagaatataggttaaataataactggctaggcgtggtggctcacacttgtaatcccaacacttttggaggccaaggcgggcggatcacgaggtcaggagttcaagaccagcctgacaaacatcgtgaaaccccgtctctactaaaaatacaaaaattagccaggcgtggtggtgcacgcctgtagtcccagctactcgggaggctgaggcaagagaattgcttgaacccgggaggcggaggttgcagtgagtcaggatcatgccactgcactccagcctaggcgacagagcgagactctgtctcaaaaataataataataaccagagtcccctgttacttaacagttctgtgattcataagtaattccttttagtattcagtaggactgtcttcttatcctgtttcttctactgactttgtgaaagctattcttccatcttactagcaaataatgagttaacatttagattaaggttatctcaaaataatttatactaatgcttataattttctatcaagaaaatcc

SEQ ID NO: 21137 - DNA, 619 bp, Homo sapiens
ggacgccaggggtgaggcagaaggaagcgattatatatcctgtgcatctgatgaacctgtctgcccagcggtcccctgagggcaggcagagagctccctgtctcaatttcattcccttccttccttggagaggtagcccaccttctcaaatagaatcgctcgtattaaaccagaggtgaagaactaggcctttcatagcccttcaaccttcttgctccacctcccagctccttgtctggcctgagtgcagcatgatgttggtcccttatcatagcctagactcctgccagacagctggagaacaaagtgaaggaaagtacatttgaaaaacagtaagcaattgggtgtggtggctcacacctgtaatcccagcactgggaggcccaggcgggaggatcacttgagttcaagaattcaagaccagcctaggcaacacagccagaccctgtctcttaaaaaaaaaaaaaatagcctggcatggtggtgtgcagcatccctgtagtgccagctacttgggaggctgaggtaggaagatcccttaagcccaggagttcaaggctgcaacaagctatgattgtactacagtactccagcctgggtgagagagtgagaccctgtc

SEQ ID NO: 21138 - DNA, 149 bp, Homo sapiens
caattttaaatgttgcattttaaaaaaaatatgtaacaaaactattttcagtgtaaccttaatgatttttttaaaaattttatacattttttctcattgaactctgacagcattaatgaaatgtaaacgtgttttgcatctagtaagac

SEQ ID NO: 21139 - DNA, 453 bp, Homo sapiens
gtgaatatggttgaaagtgacctaccattcttagagtcctggctggatttagggagaggcataagaaaggataggttatcatggacttggaaaatgggagttttttactgatccatgtgtgggtaaagaccaagttgtggccgggtgcagtggctcacacctgtaatcccagcatgtcagaaggctgaagcaggcagatggcttgagtccaggagtttaagaccagcctgaccaacatggtgaaacctcatctctaccaaaaatacaaaaacttagctgaccgtggtggcgcgtccctgtagtcccagctacttgggagtctgaggcaagaggatggcttgaaccccggaggtggaggttgcagtgagccgagattgtgccactgcactccagcctgggcaacagagtgagaccctgtctcaaaaataaagtagttgaaaaaaatattgtcca

SEQ ID NO: 21140 - DNA, 314 bp, Homo sapiens
gtgaatatggttgaaagtgacctaccattcttagagtcctggctggatttagggagaggcataagaaaggataggttatcatggacttggaaaatgggagttttttactgatccatgtgtgggtaaagacccggccaagggactaatttctactcactggtcctgcaatgtatacaagtcaaatgccatagtcaaaaatatgaattatttcaggtaatagatgtttaggttactattagtaggttcaaacagatgagcaaatgccaagggtctactgtactaaaaatttctaaggaggtggctagcagacaata

SEQ ID NO: 21141 - DNA, 461 bp, Homo sapiens
tcagctcggtaccggttcgatgccaccgatcagaggcagatgcccaccgctgagtacaccgctccgtagagaccagaggagttcagaggagagttgcctcatacagcctggaggcaggatggggtgagggggtgaaggatggctttgtggatggggagggcatctgagctgagtctggaagttgctccaatcattttctctccttcttcagtggatgtgagggagggtcaccagccctggggactggtgtcgggaagaggtagcttgcatctgtgactgccagacccctccaaatgtgaggtcacatgggcccatgggtgtgaggagaggagccgggtggtgaaggtgtcggcaggcatggtgctgtgggacaggaactgtcacctctgctccgacatgagatcacaggtctatctatcctgttcaagttgggttttaaaataaaattgctccttgttctg

SEQ ID NO: 21142 - DNA, 151 bp, Homo sapiens
ggcatcatgggtcaaaagtctcagaatgcgttcagagtaagaggctgaatcccacggacgcacgctggccatgcaggatcgagatcagcagccccaaacacagacatggtagaaagcacccaggaagctggctggaatgctggttcccagg

SEQ ID NO: 21143 - DNA, 344 bp, Homo sapiens
ctagcagcagaattgtaaagaggagaggtcttaggtgggtagtctagtactttaggattgtatgggtcatctagggcagggtcaggtgtagacaactgccttcttttgtaaatgaagtactgtgaataagtttttgtgaatatagttttacagccactttcatttctttacatgttatctgtggctgctttcaccttacagcagtagagttgtaggacggtcacagcgtgactgtaaggtgagaagataaagaagaatcataagacacaaataaaagaaaagatatctatgttcatgggttggaacaattaatattgtcaaaatatccatactacctaaagcaa

SEQ ID NO: 21144 - DNA, 650 bp, Homo sapiens
tagcaggtaagtccattttatcatgtaatatttacatggatttgctcattgtttaggagagagtggcagtggaactaaaacactcccttctcattaggacctggctgtggataaaaatttctccccaggtccatcccatcttatgcagtgacaatgacctgtaatgctatcctgacaccaactggtaacatactgcagtataattcccgggctaaccacccagagtcagcacagaccacacaagttccagggcatagtcctcaaaaagatgcccttacttcatacgccaactgctttttgggtgaccccaggccactcatactttggaccaaataggtacaaattcaggggttaccatcatcccttcagtttgataattcactagaatgactcacagaattcacaggagcacagtacttgccattacagttttattataaaggacacagatcagcaacagccaaatgaagagacacatggggcaagatctgagtgggttttgaacgcagggcttctgtgccctgttctttgtgggaatctggggtacattcacccttctggtacggtgatgtgtttaccaaccgggaagctccactgagcttcaatgtccaaagttttcacaggggtttcattacgtaggcatgattgac

SEQ ID NO: 21145 - DNA, 429 bp, Homo sapiens
ggagacagaagaaaagagtatgaccacagtgacagagattggagtaatatagatatggtttgatatggtttggcttgatatgatttggctgtgaccccatccaaatctcatcttgaattgtagttcccttaatccccatgcatcgtaggacggaactggtgggaggtaattgaatcatggggggtgatggttttataaggggcttttctccctttgcttggctcttattctctctcctgctgccctgtgaagaggtgtcttccaccatgattgtaaatttcctgaggcctccccagccatgcagaactgtgagtcaattaaacctcttttctttacaaattattcagtctcgggtatttcttcatagcagcatgaaaacggactaatacgcagctataagccaagaaatactgacagccaccagcaggt

SEQ ID NO: 21146 - DNA, 344 bp, Homo sapiens
agcttctgtgttgggtgcggcatctagacaaggggaacacggtggcgcccaaaaactcggagatgctagcaattgcagagtcctaagaggtgttatagctcctgctcagggagtcccaaggtctgagcccccagaaatgttacagctgttcactcctgtagttcaacgagcaggagcatgttacaactctctcctgtagtctagcgagcgggagcgtgttacggctcttttattcccgctgcccatagcttggcgagctgcccaggggtgtcacagccctttcattcccatcacccacagctcagcaagttccgggttcttgtcccatgatgaagaggaatggg

SEQ ID NO: 21147 - DNA, 647 bp, Homo sapiens
ccagctacaaatgaaaatcaatgtgtgtattggcaacagaaaatcacggtgttgtcattggatgtgactttctgaagtggtgggcaattcttgttaatgttttaaacaaaaaaaaaaaaaccttacagtcttgccctgatttacacagcagtcacattcctggaaaattcaagtgtttattaaaactatgcaacagttactgtgtgttatacgttgaaaggtcttcactaatatctcactaagtaatgagaatgcctacatatcagaattttttttttcaggagccaagcacatatactgatttggaaaaaggcacaggtagctcagtttatttgctttctaccctgcctggccacttgctgtttcttcagtttctaatttgagctgtaactacacaaggaaagctaaatagtctggaaaatttttggaaagaatccacaaagccaaaggagactggcctatactcattttatctggggatgtaccttacccttagagactttgaaaaatgtgaagctcttattttgtaacctgggtaaatgttagtttctagattttcggcttaacatctaataataacatttaaaaagtgcttttgtaactattagttatttgcaataaaatgctttccttctacagtcccaagt

SEQ ID NO: 21148 - DNA, 475 bp, Homo sapiens
ccaggccccacgcgagagcaattaaatcaatttctaggagtgggagcccacaaagctcctcaggcaaaggctttcctgaaacttcgtggcccttaccagcttctcttttgagttttacctctgaaatctggaccaatttttattatagtaatcagtttatttgctttctaccctgcctggccacttgctgtttcttcagtttctaatttgagctgtaactacacaaggaaagctaaatagtctggaaaatttttggaaagaatccacaaagccaaaggagactggcctatactcattttatctggggatgtaccttacccttagagactttgaaaaatgtgaagctcttattttgtaacctgggtaaatgttagtttctagattttcggcttaacatctaataataacatttaaaaagtgcttttgtaactattagttatttgcaataaaatgctttccttctacagtcccaagt

SEQ ID NO: 21149 - DNA, 411 bp, Homo sapiens
gccagagtagttgggagtgaggggttacttggagggtaaaatgaccaaataaataggaaatcacaataaaatattatcactgctatggaagtttaacaacacagaagtgaggtgcaaaaaccagcttttcctatcatggattacacagcattaatgctggagttacacatgtgaataagatagttctgccttgatttttagtggttgacaaggcaaagtggagggactggagatagatccatagatagatgtattgtaagacaatatggaagaacaaagtgttagaagagtagagaaggtatgactgcttgggagaatcagggaagcattctcagaggtaagatgatttagctatatcatgaagggcattgtatttaccagcagtataagatgtggaaggcatgtctaaag

SEQ ID NO: 21150 - DNA, 432 bp, Homo sapiens
  misc_feature (328)..(328): n is a, c, g, or t
  misc_feature (340)..(340): n is a, c, g, or t
  misc_feature (383)..(383): n is a, c, g, or t
  misc_feature (418)..(418): n is a, c, g, or t
tttaatgttggttttccccacaacgctagcagctgcaggaaggcagagactgtgtcttatttactggtctagctccagcacctcacagatgttcagtaaacacaagtttatttctacgagtgaccacatggaaaatgtgagtgggctggaggagaggtgcaggcagggtgctgtggagggtcagggatgcaaaggcctgagttggctgaggtggggtcgggctcgtggaagaactgccatttggttgggcttcagagagatgtaagcagaccacacctcacccagaccacaccccatccagtccacaccccatccagtccacaccccntccagaccacantgtatccagttccacgccccttacagaccttaccccattccantgcccaccagctttgttccttattaaatttagttntattcttttaaaaa

SEQ ID NO: 21151 - DNA, 519 bp, Homo sapiens
aatcttttttttttggagggagagggagaacaaaatgtcatttctcaaatgatttgttttaccctaaccataccaaatgaaataaaaatttcaatggatcaaatgcaaatactgaaacaggaacataaaggtgtgaaggctacaaataagtcttctcttccccatcccaacacgtaaaagttgagtttaacctaagttatttgaatcaacctggaaattttttaggagaatatctgagtattaaacagcaattcagaggttgagatttaagtaataatttgatttgtaacactttagcatgtcatcccattggattccagttttctttcctttaaagctgacattagaacgctcttggtggatatatttacatcacgaaatttgcaagcctaaatcactttttttaaaaaagttttaggtgctagaatttcgggcttatttcaaccagttctagacaaaaaccataatatcaagaaataattttctttcacatttataaaatacccaagtgacaactca

SEQ ID NO: 21152 - DNA, 431 bp, Homo sapiens
tctcctgacgtggtgatctgcccgcctcagcctcccaaagtgctgggattacaggcaagaaccactgtgcccagccataggatttttattaatataaattcacatttaattgtttttaaacttaattgcacatttgttagtgaatacatttcacttcacagtaaaatgtcatccaaatgcatttattttacttaataaggcttaaggagaagttgaacagaatgtataatttccacataccccctaactctcctcactatttttctaataataacatctggtattaatttggtgtacttgttatgattgatgagccagtatcaatgcattattgactaatgtccatagtttacattagggttcattctttgtgtagacaaatgaagaatgacaagtatcctcattagagttttatagagaatagtttgatc

SEQ ID NO: 21153 - DNA, 359 bp, Homo sapiens
tactactaaattcgcggccgcgtcgactcatcatctgtaaaatgggaatgtcctgaatgacttctaaggctctttctggcttgaactgtcagagccaagcccacatccctccttgggcagggcagcagctgctgccacagcctccagcggctgccactgtgggctctgggagccggagcgatgctgtgtgagaggcagagtgccaaggatgaagctggcactgaacagtaagcggctccaggcctcctctgggcccagggcccagccaatttctgttctgttcctgtagaacgctctctggattccatagctggaatctcctctcttagctcagtgaaaaataaaaatcccaaatggtg

SEQ ID NO: 21154 - DNA, 2386 bp, Homo sapiens
agctgtccgcgaaacctagtgctgaagtaggcgcggacgtgcccggtgcctggcgcgtggtagcaggcgcccggtgccccggccggcgaagaccatggcgttcatggtgaagaccatggtgggcggccagctgaagaacctcactgggagcctgggaggcggcgaggataagggagatggggacaagtcggcagccgaagctcagggcatgagccgggaggagtacgaggagtatcagaagcaactcgtggaagagaagatggagcgggatgcacagttcacacagaggaaggcagagcgggccacactgcggagccacttccgagacaaataccggctacccaagaacgagacagatgagagccagatccagatggcaggtggagacgtggagctgccccgggagctggccaagatgatcgaggaggacacagaggaggaggaggagaaggcctcagtccttgggcagctggccagccttcctggcttgaacctgggctcactcaaggacaaggcccaggccacactgggggatctcaagcaatcagctgagaagtgtcacgtcatgtgaccacttccccggggttacccactgggctgggcccccatgagggctaagagtgtgtcaacttccagggacccatactccatttggggctttgtttcccttgccccatcctagttccaagacctttcccatccatgccccaagcctatcttctggtttcttcctctccgctgggagtaaagtccccatcttcactctacccttcaggaccctccccaccagctcagcctgtggaggcctcccaagattgtaggaataggcccatccctctctggccatggccccaagttcctgcacacaggagcacccacagagagacacacacaggacacaaaacccctggcacgttcagagacagaagccacagatacatcccggcacagacagacacacacgaggccagctcccttgcgtgtccagcccctccagacaccaccactcagaaactctgagagagagcatgggcagacaccctcagcagacaggaggcctgagttccagtctccacctttattgttcttgaaagcccctgctctctctgagccttatttcatcatctgtaaaatgggaatgtcctgaatgacttctaaggctctttctggcttgaactgtcagagccaagcccacatccctccttgggcagggcagcagctgctgccacagcctccagcggctgccactgtgggctctgggagccggagcgatgctgtgtgagaggcagagtgccaaggatgaagctggcactgaacagtaagcggctccaggcctcctctgggcccagggcccagccaatttctgttctgttcctgtagaacgctctctggattccatagctggaatctcctctcttagctcagtgaaaaataaaaatcccaaatggtgtgcctaccttcccacttcttactggcttccaggagtcttggagttcatagccccccgagcctgccttaaaggggtgtcctccaccccccacctacagcttcacaggaggggagaaggcatccagtgctaggagtagaagtgtctccagctctgttctcttggggccctgggtgaaggtggggtctggggcttatgaaataggtctgggctttgaggaggatggagcagcctcattatgtggggaagatggggcctctggggcgtcactgagaccacaggtggggccggggctggaccgcagctgtcttgggtgcctgtgcctacacccctcctcaccctagagacggaagatgtgcaaaaagaaagaaggaagggcaactgcattccagccccacactgtgatgactttgagcctgtcctttccctccttgagcctgtcttgcttgtcccctgtaaaatgaacagtccccctctcccccaaatagtaataatacatgtttcaaagggtgaccatttataaagcatatgacaaaccatatcaataaatgtaactcattcttttaaaaaaaaaaaaaaactcgtgccgaattcggcacgagggagaaaaccaagcagggggtcaccgaggcggcggagaagaccaaggagggcgtcctctacgtcggaagcaagacccgagaaggtgtggtacaaggtgtggcttcagtggctgaaaaaaccaaggaacaggcctcacatctgggaggagctgtgttctctggggcagggaacatcgcagcagccacaggactggtgaaaaaggaggaattccctactgatctgaagccagagaagtggcccagaagcttgtgaagaccactgattgagccctgatgagccagaaggggagagtatgaggacccacccaggaggaatttcagagtttaacccaaagcg

SEQ ID NO: 21155 - DNA, 2332 bp, Homo sapiens
agctgtccgcgaaacctagtgctgaagtaggcgcggacgtgcccggtgcctggcgcgtggtagcaggcgcccggtgccccggccggcgaagaccatggcgttcatggtgaagaccatggtgggcggccagctgaagaacctcactgggagcctgggaggcggcgaggataagggagatggggacaagtcggcagccgaagctcagggcatgagccgggaggagtacgaggagtatcagaagcaactcgtggaagagaagatggagcgggatgcacagttcacacagaggaaggcagagcgggccacactgcggagccacttccgagacaaataccggctacccaagaacgagacagatgagagccagatccagatggcaggtggagacgtggagctgccccgggagctggccaagatgatcgaggaggacacagaggaggaggaggagaaggcctcagtccttgggcagctggccagccttcctggcttgaacctgggctcactcaaggacaaggcccaggccacactgggggatctcaagcaatcagctgagaagtgtcacgtcatgtgaccacttccccggggttacccactgggctgggcccccatgagggctaagagtgtgtcaacttccagggacccatactccatttggggctttgtttcccttgccccatcctagttccaagacctttcccatccatgccccaagcctatcttctggtttcttcctctccgctgggagtaaagtccccatcttcactctacccttcaggaccctccccaccagctcagcctgtggaggcctcccaagattgtaggaataggcccatccctctctggccatggccccaagttcctgcacacaggagcacccacagagagacacacacaggacacgacacacacgaggccagctcccttgcgtgtccagcccctccagacaccaccactcagaaactctgagagagagcatgggcagacaccctcagcagacaggaggcctgagttccagtctccacctttattgttcttgaaagcccctgctctctctgagccttatttcatcatctgtaaaatgggaatgtcctgaatgacttctaaggctctttctggcttgaactgtcagagccaagcccacatccctccttgggcagggcagcagctgctgccacagcctccagcggctgccactgtgggctctgggagccggagcgatgctgtgtgagaggcagagtgccaaggatgaagctggcactgaacagtaagcggctccaggcctcctctgggcccagggcccagccaatttctgttctgttcctgtagaacgctctctggattccatagctggaatctcctctcttagctcagtgaaaaataaaaatcccaaatggtgtgcctaccttcccacttcttactggcttccaggagtcttggagttcatagccccccgagcctgccttaaaggggtgtcctccaccccccacctacagcttcacaggaggggagaaggcatccagtgctaggagtagaagtgtctccagctctgttctcttggggccctgggtgaaggtggggtctggggcttatgaaataggtctgggctttgaggaggatggagcagcctcattatgtggggaagatggggcctctggggcgtcactgagaccacaggtggggccggggctggaccgcagctgtcttgggtgcctgtgcctacacccctcctcaccctagagacggaagatgtgcaaaaagaaagaaggaagggcaactgcattccagccccacactgtgatgactttgagcctgtcctttccctccttgagcctgtcttgcttgtcccctgtaaaatgaacagtccccctctcccccaaatagtaataatacatgtttcaaagggtgaccatttataaagcatatgacaaaccatatcaataaatgtaactcattcttttaaaaaaaaaaaaaaactcgtgccgaattcggcacgagggagaaaaccaagcagggggtcaccgaggcggcggagaagaccaaggagggcgtcctctacgtcggaagcaagacccgagaaggtgtggtacaaggtgtggcttcagtggctgaaaaaaccaaggaacaggcctcacatctgggaggagctgtgttctctggggcagggaacatcgcagcagccacaggactggtgaaaaaggaggaattccctactgatctgaagccagagaagtggcccagaagcttgtgaagaccactgattgagccctgatgagccagaaggggagagtatgaggacccacccaggaggaatttcagagtttaacccaaagcg

SEQ ID NO: 21156 - DNA, 2468 bp, Homo sapiens
ttgcggcttgtcctgctatactgggactacaggcacacgccacatgcctaattttattttttgtagagacaggctctggctatgttggccaggctggtctcaagtgatctttccacctcagcctcccaaaaacactgggattacagggacaagccagcactccgggtcatgctggtgcacttgggctgccatggtgcacaggaggtatgagctggggggcagaatctgctcctggacctctacccaggcctgcacccagactgacccctgggctacagggaacaggtgtggagagaatgcagcaagcagagcgggctagtcagtgatggagaccctgcaggatggagcgggatgcacagttcacacagaggaaggcagagcgggccacactgcggagccacttccgagacaaataccggctacccaagaacgagacagatgagagccagatccagatggcaggtggagacgtggagctgccccgggagctggccaagatgatcgaggaggacacagaggaggaggaggagaaggcctcagtccttgggcagctggccagccttcctggcttgaacctgggctcactcaaggacaaggcccaggccacactgggggatctcaagcaatcagctgagaagtgtcacgtcatgtgaccacttccccggggttacccactgggctgggcccccatgagggctaagagtgtgtcaacttccagggacccatactccatttggggctttgtttcccttgccccatcctagttccaagacctttcccatccatgccccaagcctatcttctggtttcttcctctccgctgggagtaaagtccccatcttcactctacccttcaggaccctccccaccagctcagcctgtggaggcctcccaagattgtaggaataggcccatccctctctggccatggccccaagttcctgcacacaggagcacccacagagagacacacacaggacacaaaacccctggcacgttcagagacagaagccacagatacatcccggcacagacagacacacacgaggccagctcccttgcgtgtccagcccctccagacaccaccactcagaaactctgagagagagcatgggcagacaccctcagcagacaggaggcctgagttccagtctccacctttattgttcttgaaagcccctgctctctctgagccttatttcatcatctgtaaaatgggaatgtcctgaatgacttctaaggctctttctggcttgaactgtcagagccaagcccacatccctccttgggcagggcagcagctgctgccacagcctccagcggctgccactgtgggctctgggagccggagcgatgctgtgtgagaggcagagtgccaaggatgaagctggcactgaacagtaagcggctccaggcctcctctgggcccagggcccagccaatttctgttctgttcctgtagaacgctctctggattccatagctggaatctcctctcttagctcagtgaaaaataaaaatcccaaatggtgtgcctaccttcccacttcttactggcttccaggagtcttggagttcatagccccccgagcctgccttaaaggggtgtcctccaccccccacctacagcttcacaggaggggagaaggcatccagtgctaggagtagaagtgtctccagctctgttctcttggggccctgggtgaaggtggggtctggggcttatgaaataggtctgggctttgaggaggatggagcagcctcattatgtggggaagatggggcctctggggcgtcactgagaccacaggtggggccggggctggaccgcagctgtcttgggtgcctgtgcctacacccctcctcaccctagagacggaagatgtgcaaaaagaaagaaggaagggcaactgcattccagccccacactgtgatgactttgagcctgtcctttccctccttgagcctgtcttgcttgtcccctgtaaaatgaacagtccccctctcccccaaatagtaataatacatgtttcaaagggtgaccatttataaagcatatgacaaaccatatcaataaatgtaactcattcttttaaaaaaaaaaaaaaactcgtgccgaattcggcacgagggagaaaaccaagcagggggtcaccgaggcggcggagaagaccaaggagggcgtcctctacgtcggaagcaagacccgagaaggtgtggtacaaggtgtggcttcagtggctgaaaaaaccaaggaacaggcctcacatctgggaggagctgtgttctctggggcagggaacatcgcagcagccacaggactggtgaaaaaggaggaattccctactgatctgaagccagagaagtggcccagaagcttgtgaagaccactgattgagccctgatgagccagaaggggagagtatgaggacccacccaggaggaatttcagagtttaacccaaagcg

SEQ ID NO: 21157 - DNA, 1450 bp, Homo sapiens
agctgtccgcgaaacctagtgctgaagtaggcgcggacgtgcccggtgcctggcgcgtggtagcaggcgcccggtgccccggccggcgaagaccatggcgttcatggtgaagaccatggtgggcggccagctgaagaacctcactgggagcctgggaggcggcgaggataagggagatggggacaagtcggcagccgaagctcagggcatgagccgggaggagtacgaggagtatcagaagcaactcgtggaagagaagatggagcgggatgcacagttcacacagaggaaggcagagcgggccacactgcggagccacttccgagacaaataccggctacccaagaacgagacagatgagagccagatccagatggcaggtggagacgtggagctgccccgggagctggccaagatgatcgaggaggacacagaggaggaggaggagaaggcctcagtccttgggcagctggccagccttcctggcttgaacctgggctcactcaaggacaaggcccaggccacactgggggatctcaagcaatcagctgagaagtgtcacgtcatgtgaccacttccccggggttacccactgggctgggcccccatgagggctaagagtgtgtcaacttccagggacccatactccatttggggctttgtttcccttgccccatcctagttccaagacctttcccatccatgccccaagcctatcttctggtttcttcctctccgctgggagtaaagtccccatcttcactctacccttcaggaccctccccaccagctcagcctgtggaggcctcccaagattgtaggaataggcccatccctctctggccatggccccaagttcctgcacacaggagcacccacagagagacacacacaggacacaaaacccctggcacgttcagagacagaagccacagatacatcccggcacagacagacacacacgaggccagctcccttgcgtgtccagcccctccagacaccaccactcagaaactctgagagagagcatgggcagacaccctcagcagacaggaggcctgagttccagtctccacctttattgttcttgaaagcccctgctctctctgagccttatttcatcatctgtaaaatgggaatgtcctgaatgacttctaaggctctttctggcttgaactgtcagagccaagcccacatccctccttgggcagggcagcagctgctgccacagcctccagcggctgccactgtgggctctgggagccggagcgatgctgtgtgagaggcagagtgccaaggatgaagctggcactgaacagtaagcggctccaggcctcctctgggcccagggcccagccaatttctgttctgttcctgtagaacgctctctggattccatagctggaatctcctctcttagctcagtgaaaaataaaaatcccaaatggtg

SEQ ID NO: 21158 - DNA, 542 bp, Homo sapiens
ctgccctcctgcacagcccagcactccctgcctctagtggttgttttgttcttttttcagctgctttattgagatctgatttacatataagattccccagctttaagtgtacagtgcggttttgtacatttttaggaaatttacagagttgtgcatccataaccacaatccaattttggaacatttccatcacccccagaacacctcctgcatccatttgcagttattcttcatgcccactcctgccccagctcaccattcactttctgtctggccatttcatatgtatggaatcatgcggattattttttagagaaattatttgattctaaaagtaatccctgttggaaaacatctggaagaatgggaaccaagttattattggcagttacctttggggagtctctaggtggtgagatcacagggggatgtttcactttctgtaatgctttgaatttcctacagagagcctatgttccatttataatcagaaggaaagggcaaagcggggaaagtgcatgttttactcttggaaaatgcca

SEQ ID NO: 21159 - DNA, 3447 bp, Homo sapiens
aaccacttttcgcgcgaaacctggttgttgctgtagtggcggagaggatcgtggtactgctatggcggaatcatcggaatccttcaccatggcatccagcccggcccagcgtcggcgaggcaatgatcctctcacctccagccctggccgaagctcccggcgtactgatgccctcacctccagccctggccgtgaccttccaccatttgaggatgagtccgaggggctcctaggcacagaggggcccctggaggaagaagaggatggagaggagctcattggagatggcatggaaagggactaccgcgccatcccagagctggacgcctatgaggccgagggactggctctggatgatgaggacgtagaggagctgacggccagtcagagggaggcagcagagcgggccatgcggcagcgtgaccgggaggctggccggggcctgggccgcatgcgccgtgggctcctgtatgacagcgatgaggaggacgaggagcgccctgcccgcaagcgccgccaggtggagcgggccacggaggacggcgaggaggacgaggagatgattgagagcatcgagaacctggaggatctcaaaggccactctgtgcgcgagtgggtgagcatggcgggcccccggctggagatccaccaccgcttcaagaacttcctgcgcactcacgtcgacagccacggccacaacgtcttcaaggagcgcatcagcgacatgtgcaaagagaaccgtgagagcctggtggtgaactatgaggacttggcagccagggagcacgtgctggcctacttcctgcctgaggcaccggcggagctgctgcagatctttgatgaggctgccctggaggtggtactggccatgtaccccaagtacgaccgcatcaccaaccacatccatgtccgcatctcccacctgcctctggtggaggagctgcgctcgctgaggcagctgcatctgaaccagctgatccgcaccagtggggtggtgaccagctgcactggcgtcctgccccagctcagcatggtcaagtacaactgcaacaagtgcaatttcgtcctgggtcctttctgccagtcccagaaccaggaggtgaaaccaggctcctgtcctgagtgccagtcggccggcccctttgaggtcaacatggaggagaccatctatcagaactaccagcgtatccgaatccaggagagtccaggcaaagtggcggctggccggctgccccgctccaaggacgccattctcctcgcagatctggtggacagctgcaagccaggagacgagatagagctgactggcatctatcacaacaactatgatggctccctcaacactgccaatggcttccctgtctttgccactgtcatcctagccaaccacgtggccaagaaggacaacaaggttgctgtaggggaactgaccgatgaagatgtgaagatgatcactagcctctccaaggatcagcagatcggagagaagatctttgccagcattgctccttccatctatggtcatgaagacatcaagagaggcctggctctggccctgttcggaggggagcccaaaaacccaggtggcaagcacaaggtacgtggtgatatcaacgtgctcttgtgcggagaccctggcacagcgaagtcgcagtttctcaagtatattgagaaagtgtccagccgagccatcttcaccactggccagggggcgtcggctgtgggcctcacggcgtatgtccagcggcaccctgtcagcagggagtggaccttggaggctggggccctggttctggctgaccgaggagtgtgtctcattgatgaatttgacaagatgaatgaccaggacagaaccagcatccatgaggccatggagcaacagagcatctccatctcgaaggctggcatcgtcacctccctgcaggctcgctgcacggtcattgctgccgccaaccccataggagggcgctacgacccctcgctgactttctctgagaacgtggacctcacagagcccatcatctcacgctttgacatcctgtgtgtggtgagggacaccgtggacccagtccaggacgagatgctggcccgcttcgtggtgggcagccacgtcagacaccaccccagcaacaaggaggaggaggggctggccaatggcagcgctgctgagcccgccatgcccaacacgtatggcgtggagcccctgccccaggaggtcctgaagaagtacatcatctacgccaaggagagggtccacccgaagctcaaccagatggaccaggacaaggtggccaagatgtacagtgacctgaggaaagaatctatggcgacaggcagcatccccattacggtgcggcacatcgagtccatgatccgcatggcggaggcccacgcgcgcatccatctgcgggactatgtgatcgaagacgacgtcaacatggccatccgcgtgatgctggagagcttcatagacacacagaagttcagcgtcatgcgcagcatgcgcaagacttttgcccgctacctttcattccggcgtgacaacaatgagctgttgctcttcatactgaagcagttagtggcagagcaggtgacatatcagcgcaaccgctttggggcccagcaggacactattgaggtccctgagaaggacttggtggataaggctcgtcagatcaacatccacaacctctctgcattttatgacagtgagctcttcaggatgaacaagttcagccacgacctgaaaaggaaaatgatcctgcagcagttctgaggccctatgccatccataaggattccttgggattctggtttggggtggtcagtgccctctgtgctttatggacacaaaaccagagcacttgatgaactcggggtactagggtcagggcttatagcaggatgtctggctgcacctggcatgactgtttgtttctccaagcctgctttgtgcttctcacctttgggtgggatgccttgccagtgtgtcttacttggttgctgaacatcttgccacctccgagtgctttgtctccactcagtaccttggatcagagctgctgagttcaggatgcctgcgtgtggtttaggtgttagccttcttacatggatgtcaggagagctgctgccctcttggcgtgagttgcgtattcaggctgcttttgctgcctttggccagagagctggttgaagatgtttgtaatcgttttcagtctcctgcaggtttctgtgcccctgtggtggaagagggcacgacagtgccagcgcagcgttctgggctcctcagtcgcaggggtgggatgtgagtcatgcggattatccactcgccacagttatcagctgccattgctccctgtctgtttccccactctcttatttgtgcattcggtttggtttctgtagttttaatttttaataaagttgaataaaatataaaaaaaaaaa

SEQ ID NO: 21160 - DNA, 3433 bp, Homo sapiens
aaaaataacgctaaggtacgaggctgggtgtagggatgtggtatgctatggcggaatcatcggaatccttcaccatggcatccagcccggcccagcgtcggcgaggcaatgatcctctcacctccagccctggccgaagctcccggcgtactgatgccctcacctccagccctggccgtgaccttccaccatttgaggatgagtccgaggggctcctaggcacagaggggcccctggaggaagaagaggatggagaggagctcattggagatggcatggaaagggactaccgcgccatcccagagctggacgcctatgaggccgagggactggctctggatgatgaggacgtagaggagctgacggccagtcagagggaggcagcagagcgggccatgcggcagcgtgaccgggaggctggccggggcctgggccgcatgcgccgtgggctcctgtatgacagcgatgaggaggacgaggagcgccctgcccgcaagcgccgccaggtggagcgggccacggaggacggcgaggaggacgaggagatgattgagagcatcgagaacctggaggatctcaaaggccactctgtgcgcgagtgggtgagcatggcgggcccccggctggagatccaccaccgcttcaagaacttcctgcgcactcacgtcgacagccacggccacaacgtcttcaaggagcgcatcagcgacatgtgcaaagagaaccgtgagagcctggtggtgaactatgaggacttggcagccagggagcacgtgctggcctacttcctgcctgaggcaccggcggagctgctgcagatctttgatgaggctgccctggaggtggtactggccatgtaccccaagtacgaccgcatcaccaaccacatccatgtccgcatctcccacctgcctctggtggaggagctgcgctcgctgaggcagctgcatctgaaccagctgatccgcaccagtggggtggtgaccagctgcactggcgtcctgccccagctcagcatggtcaagtacaactgcaacaagtgcaatttcgtcctgggtcctttctgccagtcccagaaccaggaggtgaaaccaggctcctgtcctgagtgccagtcggccggcccctttgaggtcaacatggaggagaccatctatcagaactaccagcgtatccgaatccaggagagtccaggcaaagtggcggctggccggctgccccgctccaaggacgccattctcctcgcagatctggtggacagctgcaagccaggagacgagatagagctgactggcatctatcacaacaactatgatggctccctcaacactgccaatggcttccctgtctttgccactgtcatcctagccaaccacgtggccaagaaggacaacaaggttgctgtaggggaactgaccgatgaagatgtgaagatgatcactagcctctccaaggatcagcagatcggagagaagatctttgccagcattgctccttccatctatggtcatgaagacatcaagagaggcctggctctggccctgttcggaggggagcccaaaaacccaggtggcaagcacaaggtacgtggtgatatcaacgtgctcttgtgcggagaccctggcacagcgaagtcgcagtttctcaagtatattgagaaagtgtccagccgagccatcttcaccactggccagggggcgtcggctgtgggcctcacggcgtatgtccagcggcaccctgtcagcagggagtggaccttggaggctggggccctggttctggctgaccgaggagtgtgtctcattgatgaatttgacaagatgaatgaccaggacagaaccagcatccatgaggccatggagcaacagagcatctccatctcgaaggctggcatcgtcacctccctgcaggctcgctgcacggtcattgctgccgccaaccccataggagggcgctacgacccctcgctgactttctctgagaacgtggacctcacagagcccatcatctcacgctttgacatcctgtgtgtggtgagggacaccgtggacccagtccaggacgagatgctggcccgcttcgtggtgggcagccacgtcagacaccaccccagcaacaaggaggaggaggggctggccaatggcagcgctgctgagcccgccatgcccaacacgtatggcgtggagcccctgccccaggaggtcctgaagaagtacatcatctacgccaaggagagggtccacccgaagctcaaccagatggaccaggacaaggtggccaagatgtacagtgacctgaggaaagaatctatggcgacaggcagcatccccattacggtgcggcacatcgagtccatgatccgcatggcggaggcccacgcgcgcatccatctgcgggactatgtgatcgaagacgacgtcaacatggccatccgcgtgatgctggagagcttcatagacacacagaagttcagcgtcatgcgcagcatgcgcaagacttttgcccgctacctttcattccggcgtgacaacaatgagctgttgctcttcatactgaagcagttagtggcagagcaggtgacatatcagcgcaaccgctttggggcccagcaggacactattgaggtccctgagaaggacttggtggataaggctcgtcagatcaacatccacaacctctctgcattttatgacagtgagctcttcaggatgaacaagttcagccacgacctgaaaaggaaaatgatcctgcagcagttctgaggccctatgccatccataaggattccttgggattctggtttggggtggtcagtgccctctgtgctttatggacacaaaaccagagcacttgatgaactcggggtactagggtcagggcttatagcaggatgtctggctgcacctggcatgactgtttgtttctccaagcctgctttgtgcttctcacctttgggtgggatgccttgccagtgtgtcttacttggttgctgaacatcttgccacctccgagtgctttgtctccactcagtaccttggatcagagctgctgagttcaggatgcctgcgtgtggtttaggtgttagccttcttacatggatgtcaggagagctgctgccctcttggcgtgagttgcgtattcaggctgcttttgctgcctttggccagagagctggttgaagatgtttgtaatcgttttcagtctcctgcaggtttctgtgcccctgtggtggaagagggcacgacagtgccagcgcagcgttctgggctcctcagtcgcaggggtgggatgtgagtcatgcggattatccactcgccacagttatcagctgccattgctccctgtctgtttccccactctcttatttgtgcattcggtttggtttctgtagttttaatttttaataaagttgaataaaatataaaaaaaaaaa

SEQ ID NO: 21161 - DNA, 3664 bp, Homo sapiens
gtccctttgtctgtatactgtctgttccacatctgagttccagacctctgtttggtggctcttctatgccatctctatcacaataccttgcgcactgtgtgtgctgaaataggtctaatgcttaaggggagataatagacagtaaacaggtaaataggcaaatgacataacctcagtggtttttcatggagaaagcacggtgatgtgggtgaccccgatatttgagctggcttctatttgtttggaagccactgactcagattgctcagctgagagcattccaggaatcatcggaatccttcaccatggcatccagcccggcccagcgtcggcgaggcaatgatcctctcacctccagccctggccgaagctcccggcgtactgatgccctcacctccagccctggccgtgaccttccaccatttgaggatgagtccgaggggctcctaggcacagaggggcccctggaggaagaagaggatggagaggagctcattggagatggcatggaaagggactaccgcgccatcccagagctggacgcctatgaggccgagggactggctctggatgatgaggacgtagaggagctgacggccagtcagagggaggcagcagagcgggccatgcggcagcgtgaccgggaggctggccggggcctgggccgcatgcgccgtgggctcctgtatgacagcgatgaggaggacgaggagcgccctgcccgcaagcgccgccaggtggagcgggccacggaggacggcgaggaggacgaggagatgattgagagcatcgagaacctggaggatctcaaaggccactctgtgcgcgagtgggtgagcatggcgggcccccggctggagatccaccaccgcttcaagaacttcctgcgcactcacgtcgacagccacggccacaacgtcttcaaggagcgcatcagcgacatgtgcaaagagaaccgtgagagcctggtggtgaactatgaggacttggcagccagggagcacgtgctggcctacttcctgcctgaggcaccggcggagctgctgcagatctttgatgaggctgccctggaggtggtactggccatgtaccccaagtacgaccgcatcaccaaccacatccatgtccgcatctcccacctgcctctggtggaggagctgcgctcgctgaggcagctgcatctgaaccagctgatccgcaccagtggggtggtgaccagctgcactggcgtcctgccccagctcagcatggtcaagtacaactgcaacaagtgcaatttcgtcctgggtcctttctgccagtcccagaaccaggaggtgaaaccaggctcctgtcctgagtgccagtcggccggcccctttgaggtcaacatggaggagaccatctatcagaactaccagcgtatccgaatccaggagagtccaggcaaagtggcggctggccggctgccccgctccaaggacgccattctcctcgcagatctggtggacagctgcaagccaggagacgagatagagctgactggcatctatcacaacaactatgatggctccctcaacactgccaatggcttccctgtctttgccactgtcatcctagccaaccacgtggccaagaaggacaacaaggttgctgtaggggaactgaccgatgaagatgtgaagatgatcactagcctctccaaggatcagcagatcggagagaagatctttgccagcattgctccttccatctatggtcatgaagacatcaagagaggcctggctctggccctgttcggaggggagcccaaaaacccaggtggcaagcacaaggtacgtggtgatatcaacgtgctcttgtgcggagaccctggcacagcgaagtcgcagtttctcaagtatattgagaaagtgtccagccgagccatcttcaccactggccagggggcgtcggctgtgggcctcacggcgtatgtccagcggcaccctgtcagcagggagtggaccttggaggctggggccctggttctggctgaccgaggagtgtgtctcattgatgaatttgacaagatgaatgaccaggacagaaccagcatccatgaggccatggagcaacagagcatctccatctcgaaggctggcatcgtcacctccctgcaggctcgctgcacggtcattgctgccgccaaccccataggagggcgctacgacccctcgctgactttctctgagaacgtggacctcacagagcccatcatctcacgctttgacatcctgtgtgtggtgagggacaccgtggacccagtccaggacgagatgctggcccgcttcgtggtgggcagccacgtcagacaccaccccagcaacaaggaggaggaggggctggccaatggcagcgctgctgagcccgccatgcccaacacgtatggcgtggagcccctgccccaggaggtcctgaagaagtacatcatctacgccaaggagagggtccacccgaagctcaaccagatggaccaggacaaggtggccaagatgtacagtgacctgaggaaagaatctatggcgacaggcagcatccccattacggtgcggcacatcgagtccatgatccgcatggcggaggcccacgcgcgcatccatctgcgggactatgtgatcgaagacgacgtcaacatggccatccgcgtgatgctggagagcttcatagacacacagaagttcagcgtcatgcgcagcatgcgcaagacttttgcccgctacctttcattccggcgtgacaacaatgagctgttgctcttcatactgaagcagttagtggcagagcaggtgacatatcagcgcaaccgctttggggcccagcaggacactattgaggtccctgagaaggacttggtggataaggctcgtcagatcaacatccacaacctctctgcattttatgacagtgagctcttcaggatgaacaagttcagccacgacctgaaaaggaaaatgatcctgcagcagttctgaggccctatgccatccataaggattccttgggattctggtttggggtggtcagtgccctctgtgctttatggacacaaaaccagagcacttgatgaactcggggtactagggtcagggcttatagcaggatgtctggctgcacctggcatgactgtttgtttctccaagcctgctttgtgcttctcacctttgggtgggatgccttgccagtgtgtcttacttggttgctgaacatcttgccacctccgagtgctttgtctccactcagtaccttggatcagagctgctgagttcaggatgcctgcgtgtggtttaggtgttagccttcttacatggatgtcaggagagctgctgccctcttggcgtgagttgcgtattcaggctgcttttgctgcctttggccagagagctggttgaagatgtttgtaatcgttttcagtctcctgcaggtttctgtgcccctgtggtggaagagggcacgacagtgccagcgcagcgttctgggctcctcagtcgcaggggtgggatgtgagtcatgcggattatccactcgccacagttatcagctgccattgctccctgtctgtttccccactctcttatttgtgcattcggtttggtttctgtagttttaatttttaataaagttgaataaaatataaaaaaaaaaa

SEQ ID NO: 21162 - DNA, 3407 bp, Homo sapiens
ggaaatcatggatgctgtattatgtcggaatcatcggaatccttcaccatggcatccagcccggcccagcgtcggcgaggcaatgatcctctcacctccagccctggccgaagctcccggcgtactgatgccctcacctccagccctggccgtgaccttccaccatttgaggatgagtccgaggggctcctaggcacagaggggcccctggaggaagaagaggatggagaggagctcattggagatggcatggaaagggactaccgcgccatcccagagctggacgcctatgaggccgagggactggctctggatgatgaggacgtagaggagctgacggccagtcagagggaggcagcagagcgggccatgcggcagcgtgaccgggaggctggccggggcctgggccgcatgcgccgtgggctcctgtatgacagcgatgaggaggacgaggagcgccctgcccgcaagcgccgccaggtggagcgggccacggaggacggcgaggaggacgaggagatgattgagagcatcgagaacctggaggatctcaaaggccactctgtgcgcgagtgggtgagcatggcgggcccccggctggagatccaccaccgcttcaagaacttcctgcgcactcacgtcgacagccacggccacaacgtcttcaaggagcgcatcagcgacatgtgcaaagagaaccgtgagagcctggtggtgaactatgaggacttggcagccagggagcacgtgctggcctacttcctgcctgaggcaccggcggagctgctgcagatctttgatgaggctgccctggaggtggtactggccatgtaccccaagtacgaccgcatcaccaaccacatccatgtccgcatctcccacctgcctctggtggaggagctgcgctcgctgaggcagctgcatctgaaccagctgatccgcaccagtggggtggtgaccagctgcactggcgtcctgccccagctcagcatggtcaagtacaactgcaacaagtgcaatttcgtcctgggtcctttctgccagtcccagaaccaggaggtgaaaccaggctcctgtcctgagtgccagtcggccggcccctttgaggtcaacatggaggagaccatctatcagaactaccagcgtatccgaatccaggagagtccaggcaaagtggcggctggccggctgccccgctccaaggacgccattctcctcgcagatctggtggacagctgcaagccaggagacgagatagagctgactggcatctatcacaacaactatgatggctccctcaacactgccaatggcttccctgtctttgccactgtcatcctagccaaccacgtggccaagaaggacaacaaggttgctgtaggggaactgaccgatgaagatgtgaagatgatcactagcctctccaaggatcagcagatcggagagaagatctttgccagcattgctccttccatctatggtcatgaagacatcaagagaggcctggctctggccctgttcggaggggagcccaaaaacccaggtggcaagcacaaggtacgtggtgatatcaacgtgctcttgtgcggagaccctggcacagcgaagtcgcagtttctcaagtatattgagaaagtgtccagccgagccatcttcaccactggccagggggcgtcggctgtgggcctcacggcgtatgtccagcggcaccctgtcagcagggagtggaccttggaggctggggccctggttctggctgaccgaggagtgtgtctcattgatgaatttgacaagatgaatgaccaggacagaaccagcatccatgaggccatggagcaacagagcatctccatctcgaaggctggcatcgtcacctccctgcaggctcgctgcacggtcattgctgccgccaaccccataggagggcgctacgacccctcgctgactttctctgagaacgtggacctcacagagcccatcatctcacgctttgacatcctgtgtgtggtgagggacaccgtggacccagtccaggacgagatgctggcccgcttcgtggtgggcagccacgtcagacaccaccccagcaacaaggaggaggaggggctggccaatggcagcgctgctgagcccgccatgcccaacacgtatggcgtggagcccctgccccaggaggtcctgaagaagtacatcatctacgccaaggagagggtccacccgaagctcaaccagatggaccaggacaaggtggccaagatgtacagtgacctgaggaaagaatctatggcgacaggcagcatccccattacggtgcggcacatcgagtccatgatccgcatggcggaggcccacgcgcgcatccatctgcgggactatgtgatcgaagacgacgtcaacatggccatccgcgtgatgctggagagcttcatagacacacagaagttcagcgtcatgcgcagcatgcgcaagacttttgcccgctacctttcattccggcgtgacaacaatgagctgttgctcttcatactgaagcagttagtggcagagcaggtgacatatcagcgcaaccgctttggggcccagcaggacactattgaggtccctgagaaggacttggtggataaggctcgtcagatcaacatccacaacctctctgcattttatgacagtgagctcttcaggatgaacaagttcagccacgacctgaaaaggaaaatgatcctgcagcagttctgaggccctatgccatccataaggattccttgggattctggtttggggtggtcagtgccctctgtgctttatggacacaaaaccagagcacttgatgaactcggggtactagggtcagggcttatagcaggatgtctggctgcacctggcatgactgtttgtttctccaagcctgctttgtgcttctcacctttgggtgggatgccttgccagtgtgtcttacttggttgctgaacatcttgccacctccgagtgctttgtctccactcagtaccttggatcagagctgctgagttcaggatgcctgcgtgtggtttaggtgttagccttcttacatggatgtcaggagagctgctgccctcttggcgtgagttgcgtattcaggctgcttttgctgcctttggccagagagctggttgaagatgtttgtaatcgttttcagtctcctgcaggtttctgtgcccctgtggtggaagagggcacgacagtgccagcgcagcgttctgggctcctcagtcgcaggggtgggatgtgagtcatgcggattatccactcgccacagttatcagctgccattgctccctgtctgtttccccactctcttatttgtgcattcggtttggtttctgtagttttaatttttaataaagttgaataaaatataaaaaaaaaaa

SEQ ID NO: 21163 - DNA, 3425 bp, Homo sapiens
attaggcgcgttctgcgtggagaggatcgtggtactgctatggcggaatcatcggaatccttcaccatggcatccagcccggcccagcgtcggcgaggcaatgatcctctcacctccagccctggccgaagctcccggcgtactgatgccctcacctccagccctggccgtgaccttccaccatttgaggatgagtccgaggggctcctaggcacagaggggcccctggaggaagaagaggatggagaggagctcattggagatggcatggaaagggactaccgcgccatcccagagctggacgcctatgaggccgagggactggctctggatgatgaggacgtagaggagctgacggccagtcagagggaggcagcagagcgggccatgcggcagcgtgaccgggaggctggccggggcctgggccgcatgcgccgtgggctcctgtatgacagcgatgaggaggacgaggagcgccctgcccgcaagcgccgccaggtggagcgggccacggaggacggcgaggaggacgaggagatgattgagagcatcgagaacctggaggatctcaaaggccactctgtgcgcgagtgggtgagcatggcgggcccccggctggagatccaccaccgcttcaagaacttcctgcgcactcacgtcgacagccacggccacaacgtcttcaaggagcgcatcagcgacatgtgcaaagagaaccgtgagagcctggtggtgaactatgaggacttggcagccagggagcacgtgctggcctacttcctgcctgaggcaccggcggagctgctgcagatctttgatgaggctgccctggaggtggtactggccatgtaccccaagtacgaccgcatcaccaaccacatccatgtccgcatctcccacctgcctctggtggaggagctgcgctcgctgaggcagctgcatctgaaccagctgatccgcaccagtggggtggtgaccagctgcactggcgtcctgccccagctcagcatggtcaagtacaactgcaacaagtgcaatttcgtcctgggtcctttctgccagtcccagaaccaggaggtgaaaccaggctcctgtcctgagtgccagtcggccggcccctttgaggtcaacatggaggagaccatctatcagaactaccagcgtatccgaatccaggagagtccaggcaaagtggcggctggccggctgccccgctccaaggacgccattctcctcgcagatctggtggacagctgcaagccaggagacgagatagagctgactggcatctatcacaacaactatgatggctccctcaacactgccaatggcttccctgtctttgccactgtcatcctagccaaccacgtggccaagaaggacaacaaggttgctgtaggggaactgaccgatgaagatgtgaagatgatcactagcctctccaaggatcagcagatcggagagaagatctttgccagcattgctccttccatctatggtcatgaagacatcaagagaggcctggctctggccctgttcggaggggagcccaaaaacccaggtggcaagcacaaggtacgtggtgatatcaacgtgctcttgtgcggagaccctggcacagcgaagtcgcagtttctcaagtatattgagaaagtgtccagccgagccatcttcaccactggccagggggcgtcggctgtgggcctcacggcgtatgtccagcggcaccctgtcagcagggagtggaccttggaggctggggccctggttctggctgaccgaggagtgtgtctcattgatgaatttgacaagatgaatgaccaggacagaaccagcatccatgaggccatggagcaacagagcatctccatctcgaaggctggcatcgtcacctccctgcaggctcgctgcacggtcattgctgccgccaaccccataggagggcgctacgacccctcgctgactttctctgagaacgtggacctcacagagcccatcatctcacgctttgacatcctgtgtgtggtgagggacaccgtggacccagtccaggacgagatgctggcccgcttcgtggtgggcagccacgtcagacaccaccccagcaacaaggaggaggaggggctggccaatggcagcgctgctgagcccgccatgcccaacacgtatggcgtggagcccctgccccaggaggtcctgaagaagtacatcatctacgccaaggagagggtccacccgaagctcaaccagatggaccaggacaaggtggccaagatgtacagtgacctgaggaaagaatctatggcgacaggcagcatccccattacggtgcggcacatcgagtccatgatccgcatggcggaggcccacgcgcgcatccatctgcgggactatgtgatcgaagacgacgtcaacatggccatccgcgtgatgctggagagcttcatagacacacagaagttcagcgtcatgcgcagcatgcgcaagacttttgcccgctacctttcattccggcgtgacaacaatgagctgttgctcttcatactgaagcagttagtggcagagcaggtgacatatcagcgcaaccgctttggggcccagcaggacactattgaggtccctgagaaggacttggtggataaggctcgtcagatcaacatccacaacctctctgcattttatgacagtgagctcttcaggatgaacaagttcagccacgacctgaaaaggaaaatgatcctgcagcagttctgaggccctatgccatccataaggattccttgggattctggtttggggtggtcagtgccctctgtgctttatggacacaaaaccagagcacttgatgaactcggggtactagggtcagggcttatagcaggatgtctggctgcacctggcatgactgtttgtttctccaagcctgctttgtgcttctcacctttgggtgggatgccttgccagtgtgtcttacttggttgctgaacatcttgccacctccgagtgctttgtctccactcagtaccttggatcagagctgctgagttcaggatgcctgcgtgtggtttaggtgttagccttcttacatggatgtcaggagagctgctgccctcttggcgtgagttgcgtattcaggctgcttttgctgcctttggccagagagctggttgaagatgtttgtaatcgttttcagtctcctgcaggtttctgtgcccctgtggtggaagagggcacgacagtgccagcgcagcgttctgggctcctcagtcgcaggggtgggatgtgagtcatgcggattatccactcgccacagttatcagctgccattgctccctgtctgtttccccactctcttatttgtgcattcggtttggtttctgtagttttaatttttaataaagttgaataaaatataaaaaaaaaaa

SEQ ID NO: 21164 - DNA, 3930 bp, Homo sapiens
  misc_feature (809)..(809): n is a, c, g, or t
  misc_feature (1372)..(1372): n is a, c, g, or t
ttccgtaccgtcgcggatttcggcggcggaaacatggcggtcgcggccgggccggtaacggagaaagtttacgccgacactggcctgtattagcgcgtatggcctcgggccctcgttccccaaggcgtgccgcctccctgttctcagtcgcaggctgaagccttgtctgctctcctcctttttggtttggttttggaactgactccgagggttgggagagcgcgttggtggcgacggccgagtcagatcactataaacaaaatttccacaagagaaaatgttgaaataggagttgcggatacattggatatactggatgaaatacaagcggttaatttttgtaacgtgagggaaaagcccacattgctggttacatgtgtaaatcactgcgttattgctttagtcattgtctctatttagcaatgacaagactggaagaagtaaatagagaagtgaacatgcattcttcagtgcggtatcttggctatttagccagaatcaatttattggttgctatatgcttaggtctatacgtaagatgggaaaaaacagcaaattccttaattttggtaatttttattcttggtctttttgttcttggaatcgccagcatactctattactatttttcaatggaagcagcaagtttaagtctctccaatctttggtttggattcttgcttggcctcctatgttttcttgataattcatcctttaaaaatgatgtaaaagaagaatcaaccaaatatttgcttctaacatccatagtgttaaggatattgtgctctctggtggagagaatttctggntatgtccgtcatcggcccactttactaaccacagttgaatttctggagcttgttggatttgccattgccagcacaactatgttggtggagaagtctctgagtgtcattttgcttgttgtagctctggctatgctgattattgatctgagaatgaaatctttcttagctattccaaacttagttatttttgcagttttgttatttttttcctcattggaaactcccaaaaatccgattgcttttgcgtgtttttttatttgcctgataactgatcctttccttgacatttattttagtggactttcagtaactgaaagatggaaaccctttttgtaccgtggaagaatttgcagaagactttcagtcgtttttgctggaatgattgagcttacattttttattctttccgcattcaaacttagagacactcacctctggtattttgtaatacctggcttttccatttttggaattttctggatgatttgtcatattatttttcttttaactctttggggattccataccaaattaaatgactgccataaagtatattttactcncaggacagattacaatagccttgatagaatcatggcatccaaagggatgcgccatttttgcttgatttcagagcagttggtgttctttagtcttcttgcaacagcgattttgggagcagtttcctggcagccaacaaatggaattttcttgagcatgtttctaatcgttttgccattggaatccatggctcatgggctcttccatgaattgggtaactgtttaggaggaacatctgttggatatgctattgtgattcccaccaacttctgcagtcctgatggtcagccaacactgcttcccccagaacatgtacaggagttaaatttgaggtctactggcatgctcaatgctatccaaagattttttgcatatcatatgattgagacctatggatgtgactattccacaagtggactgtcatttgatactctgcattccaaactaaaagctttcctcgaacttcggacagtggatggacccagacatgatacgtatattttgtattacagtgggcacacccatggtacaggagagtgggctctagcaggtggagatacactacgccttgacacacttatagaatggtggagagaaaagaatggttccttttgttcccggcttattatcgtattagacagcgaaaattcaaccccttgggtgaaagaagtgaggaaaattaatgaccagtatattgcagtgcaaggagcagagttgataaaaacagtagatattgaagaagctgacccgccacagctaggtgactttacaaaagactgggtagaatataactgcaactccagtaataacatctgctggactgaaaagggacgcacagtgaaagcagtatatggtgtgtcaaaacggtggagtgactacactctgcatttgccaacgggaagcgatgtggccaagcactggatgttacactttcctcgtattacatatcccctagtgcatttggcaaattggttatgcggtctgaaccttttttggatctgcaaaacttgttttaggtgcttgaaaagattaaaaatgagttggtttcttcctactgtgctggacacaggacaaggcttcaaacttgtcaaatcttaatttggaccccaaagcgggatattaataagcactcatactaccaattatcactaacttgccattttttgtatgctgtatttttatttgtggaaaataccttgctacttctgtagctgctctcactttgtcttttcttaagtaattatggtatatataaggcgttgggaaaaaacattttataatgaaagtatgtagggagtcaaatgcttactgtaaatgcataagagacgttaaaaataacactgcactttcaggaatgtttgcttatggtcctgattagaaagaaacagttgtctatgctctgcaatggtcaatgatgaattactaatgccttattttctaggcatataataatagtttagagaatgtagaccagataaatttgtttactgttttaagaaaactaccagtttacttacagaagattcttttttccaaacagtaggtttcatccaagaccatttgaagaactgcaaactctttctcttagaaaagaaagagggcagcctaaaataaacgcaaaatttgcttatactccatcacattcagatgtcttggttgtgacttattaccagtgtggcagagaacccaagttacattttagatcaaaatattctttatgtaggtattgttaaaaggctagagcctacaagttgctcttccatgcgttggtcagggggccctgaaaacactggtaatattaagagtctttctcagggtaacttaatgttttcttaatgaacagtgtttccagctacaaattcttccaataaattgtcttcctttttgaaaagtactctcatagaagaaatttagcaatttctcgttgactgactcagtctattttaagtattcagaaaagattttgatccccattgagttaatgctctgccttgaaaattatttttctgatccttgttagtgataacattttttttctactgaaggtcagaggataggaaacaagtatttctcttctggtatacatgtaatgtattctgtaaaaaagtattcatattggcaattttagttaggcataatattgtggttgtaatttttaaaacttagtgttttgtctgattaaagcaggcactgatcagggtatctcctaagaggtaattcacttcttattcctttccaataattattacattctaaattttcatctatgagaaataacaaacaagaagggaatagaattaaattggggtataatctaatcttcattgtttaaatggtttgccttctcaccattgaagccatttttttatagcctcagaaagaggaaataatgcctccaccattttctacctggtgacttgaaaattgaacttttaagttaggaagaagttagagtcagggaacttgtataccactatctatgcagcattgttatagtctgattatttctgtgttttgaatatgattttcctaatgctctaaataaaattttgttaaaaat

SEQ ID NO: 21165 - DNA, 4262 bp, Homo sapiens
  misc_feature (900)..(900): n is a, c, g, or t
  misc_feature (1463)..(1463): n is a, c, g, or t
ttccgtaccgtcgcggatttcggcggcggaaacatggcggtcgcggccgggccggtaacggagaaagtttacgccgacactggcctgtattagcgcgtatggcctcgggccctcgttccccaaggcgtgccgcctccctgttctcagtcgcaggctgaagccttgtctgctctcctcctttttggtttggttttggaactgactccgagggttgggagagcgcgttggtggcgacggccgagtcaggctgtcttttgaagaagatcagaatggggaagagttttgtaaattagccatttaaaaacaatctgccatgttgattttggtccataggaagatcactataaacaaaatttccacaagagaaaatgttgaaataggagttgcggatacattggatatactggatgaaatacaagcggttaatttttgtaacgtgagggaaaagcccacattgctggttacatgtgtaaatcactgcgttattgctttagtcattgtctctatttagcaatgacaagactggaagaagtaaatagagaagtgaacatgcattcttcagtgcggtatcttggctatttagccagaatcaatttattggttgctatatgcttaggtctatacgtaagatgggaaaaaacagcaaattccttaattttggtaatttttattcttggtctttttgttcttggaatcgccagcatactctattactatttttcaatggaagcagcaagtttaagtctctccaatctttggtttggattcttgcttggcctcctatgttttcttgataattcatcctttaaaaatgatgtaaaagaagaatcaaccaaatatttgcttctaacatccatagtgttaaggatattgtgctctctggtggagagaatttctggntatgtccgtcatcggcccactttactaaccacagttgaatttctggagcttgttggatttgccattgccagcacaactatgttggtggagaagtctctgagtgtcattttgcttgttgtagctctggctatgctgattattgatctgagaatgaaatctttcttagctattccaaacttagttatttttgcagttttgttatttttttcctcattggaaactcccaaaaatccgattgcttttgcgtgtttttttatttgcctgataactgatcctttccttgacatttattttagtggactttcagtaactgaaagatggaaaccctttttgtaccgtggaagaatttgcagaagactttcagtcgtttttgctggaatgattgagcttacattttttattctttccgcattcaaacttagagacactcacctctggtattttgtaatacctggcttttccatttttggaattttctggatgatttgtcatattatttttcttttaactctttggggattccataccaaattaaatgactgccataaagtatattttactcncaggacagattacaatagccttgatagaatcatggcatccaaagggatgcgccatttttgcttgatttcagagcagttggtgttctttagtcttcttgcaacagcgattttgggagcagtttcctggcagccaacaaatggaattttcttgagcatgtttctaatcgttttgccattggaatccatggctcatgggctcttccatgaattgggtaactgtttaggaggaacatctgttggatatgctattgtgattcccaccaacttctgcagtcctgatggtcagccaacactgcttcccccagaacatgtacaggagttaaatttgaggtctactggcatgctcaatgctatccaaagattttttgcatatcatatgattgagacctatggatgtgactattccacaagtggactgtcatttgatactctgcattccaaactaaaagctttcctcgaacttcggacagtggatggacccagacatgatacgtatattttgtattacagtgggcacacccatggtacaggagagtgggctctagcaggtggagatacactacgccttgacacacttatagaatggtggagagaaaagaatggttccttttgttcccggcttattatcgtattagacagcgaaaattcaaccccttgggtgaaagaagtgaggaaaattaatgaccagtatattgcagtgcaaggagcagagttgataaaaacagtagatattgaagaagctgacccgccacagctaggtgactttacaaaagactgggtagaatataactgcaactccagtaataacatctgctggactgaaaagggacgcacagtgaaagcagtatatggtgtgtcaaaacggtggagtgactacactctgcatttgccaacgggaagcgatgtggccaagcactggatgttacactttcctcgtattacatatcccctagtgcatttggcaaattggttatgcggtctgaaccttttttggatctgcaaaacttgttttaggtgcttgaaaagattaaaaatgagttggtttcttcctactgtgctggacacaggacaaggcttcaaacttgtcaaatcttaatttggaccccaaagcgggatattaataagcactcatactaccaattatcactaacttgccattttttgtatgctgtatttttatttgtggaaaataccttgctacttctgtagctgctctcactttgtcttttcttaagtaattatggtatatataaggcgttgggaaaaaacattttataatgaaagtatgtagggagtcaaatgcttactgtaaatgcataagagacgttaaaaataacactgcactttcaggaatgtttgcttatggtcctgattagaaagaaacagttgtctatgctctgcaatggtcaatgatgaattactaatgccttattttctaggcatataataatagtttagagaatgtagaccagataaatttgtttactgttttaagaaaactaccagtttacttacagaagattcttttttccaaacagtaggtttcatccaagaccatttgaagaactgcaaactctttctcttagaaaagaaagagggcagcctaaaataaacgcaaaatttgcttatactccatcacattcagatgtcttggttgtgacttattaccagtgtggcagagaacccaagttacattttagatcaaaatattctttatgtaggtattgttaaaaggctagagcctacaagttgctcttccatgcgttggtcagggggccctgaaaacactggtaatattaagagtctttctcagggtaacttaatgttttcttaatgaacagtgtttccagctacaaattcttccaataaattgtcttcctttttgaaaagtactctcatagaagaaatttagcaatttctcgttgactgactcagtctattttaagtattcagaaaagattttgatccccattgagttaatgctctgccttgaaaattatttttctgatccttgttagtgataacattttttttctactgaaggtcagaggataggaaacaagtatttctcttctggtatacatgtaatgtattctgtaaaaaagtattcatattggcaattttagttaggcataatattgtggttgtaatttttaaaacttagtgttttgtctgattaaagcaggcactgatcagggtatctcctaagaggtaattcacttcttattcctttccaataattattacattctaaattttcatctatgagaaataacaaacaagaagggaatagaattaaattggggtataatctaatcttcattgtttaaatggtttgccttctcaccattgaagccatttttttatagcctcagaaagaggaaataatgcctccaccattttctacctggtgacttgaaaattgaacttttaagttaggaagaagttagagtcagggaacttgtataccactatctatgcagcattgttatagtctgattatttctgtgttttgaatatgattttcctaatgctctaaataaaattttgttaaaaattaattttttatttaatgatgtgcaaatattgaatattttagtatatttattaaaagtggtagtcattaaaaatgcccatgttttagagttcatgtttggaagtttccattataggttaaggatttatattagtattgtccaaataaaatagtatagttttttttattgctctgttcagcagtagggtagtagaaaagccaaatgtaaaattatgagcttttagcttaaaaaaagttaatgt

SEQ ID NO: 21166 - DNA, 4171 bp, Homo sapiens
  misc_feature (809)..(809): n is a, c, g, or t
  misc_feature (1372)..(1372): n is a, c, g, or t
ttccgtaccgtcgcggatttcggcggcggaaacatggcggtcgcggccgggccggtaacggagaaagtttacgccgacactggcctgtattagcgcgtatggcctcgggccctcgttccccaaggcgtgccgcctccctgttctcagtcgcaggctgaagccttgtctgctctcctcctttttggtttggttttggaactgactccgagggttgggagagcgcgttggtggcgacggccgagtcagatcactataaacaaaatttccacaagagaaaatgttgaaataggagttgcggatacattggatatactggatgaaatacaagcggttaatttttgtaacgtgagggaaaagcccacattgctggttacatgtgtaaatcactgcgttattgctttagtcattgtctctatttagcaatgacaagactggaagaagtaaatagagaagtgaacatgcattcttcagtgcggtatcttggctatttagccagaatcaatttattggttgctatatgcttaggtctatacgtaagatgggaaaaaacagcaaattccttaattttggtaatttttattcttggtctttttgttcttggaatcgccagcatactctattactatttttcaatggaagcagcaagtttaagtctctccaatctttggtttggattcttgcttggcctcctatgttttcttgataattcatcctttaaaaatgatgtaaaagaagaatcaaccaaatatttgcttctaacatccatagtgttaaggatattgtgctctctggtggagagaatttctggntatgtccgtcatcggcccactttactaaccacagttgaatttctggagcttgttggatttgccattgccagcacaactatgttggtggagaagtctctgagtgtcattttgcttgttgtagctctggctatgctgattattgatctgagaatgaaatctttcttagctattccaaacttagttatttttgcagttttgttatttttttcctcattggaaactcccaaaaatccgattgcttttgcgtgtttttttatttgcctgataactgatcctttccttgacatttattttagtggactttcagtaactgaaagatggaaaccctttttgtaccgtggaagaatttgcagaagactttcagtcgtttttgctggaatgattgagcttacattttttattctttccgcattcaaacttagagacactcacctctggtattttgtaatacctggcttttccatttttggaattttctggatgatttgtcatattatttttcttttaactctttggggattccataccaaattaaatgactgccataaagtatattttactcncaggacagattacaatagccttgatagaatcatggcatccaaagggatgcgccatttttgcttgatttcagagcagttggtgttctttagtcttcttgcaacagcgattttgggagcagtttcctggcagccaacaaatggaattttcttgagcatgtttctaatcgttttgccattggaatccatggctcatgggctcttccatgaattgggtaactgtttaggaggaacatctgttggatatgctattgtgattcccaccaacttctgcagtcctgatggtcagccaacactgcttcccccagaacatgtacaggagttaaatttgaggtctactggcatgctcaatgctatccaaagattttttgcatatcatatgattgagacctatggatgtgactattccacaagtggactgtcatttgatactctgcattccaaactaaaagctttcctcgaacttcggacagtggatggacccagacatgatacgtatattttgtattacagtgggcacacccatggtacaggagagtgggctctagcaggtggagatacactacgccttgacacacttatagaatggtggagagaaaagaatggttccttttgttcccggcttattatcgtattagacagcgaaaattcaaccccttgggtgaaagaagtgaggaaaattaatgaccagtatattgcagtgcaaggagcagagttgataaaaacagtagatattgaagaagctgacccgccacagctaggtgactttacaaaagactgggtagaatataactgcaactccagtaataacatctgctggactgaaaagggacgcacagtgaaagcagtatatggtgtgtcaaaacggtggagtgactacactctgcatttgccaacgggaagcgatgtggccaagcactggatgttacactttcctcgtattacatatcccctagtgcatttggcaaattggttatgcggtctgaaccttttttggatctgcaaaacttgttttaggtgcttgaaaagattaaaaatgagttggtttcttcctactgtgctggacacaggacaaggcttcaaacttgtcaaatcttaatttggaccccaaagcgggatattaataagcactcatactaccaattatcactaacttgccattttttgtatgctgtatttttatttgtggaaaataccttgctacttctgtagctgctctcactttgtcttttcttaagtaattatggtatatataaggcgttgggaaaaaacattttataatgaaagtatgtagggagtcaaatgcttactgtaaatgcataagagacgttaaaaataacactgcactttcaggaatgtttgcttatggtcctgattagaaagaaacagttgtctatgctctgcaatggtcaatgatgaattactaatgccttattttctaggcatataataatagtttagagaatgtagaccagataaatttgtttactgttttaagaaaactaccagtttacttacagaagattcttttttccaaacagtaggtttcatccaagaccatttgaagaactgcaaactctttctcttagaaaagaaagagggcagcctaaaataaacgcaaaatttgcttatactccatcacattcagatgtcttggttgtgacttattaccagtgtggcagagaacccaagttacattttagatcaaaatattctttatgtaggtattgttaaaaggctagagcctacaagttgctcttccatgcgttggtcagggggccctgaaaacactggtaatattaagagtctttctcagggtaacttaatgttttcttaatgaacagtgtttccagctacaaattcttccaataaattgtcttcctttttgaaaagtactctcatagaagaaatttagcaatttctcgttgactgactcagtctattttaagtattcagaaaagattttgatccccattgagttaatgctctgccttgaaaattatttttctgatccttgttagtgataacattttttttctactgaaggtcagaggataggaaacaagtatttctcttctggtatacatgtaatgtattctgtaaaaaagtattcatattggcaattttagttaggcataatattgtggttgtaatttttaaaacttagtgttttgtctgattaaagcaggcactgatcagggtatctcctaagaggtaattcacttcttattcctttccaataattattacattctaaattttcatctatgagaaataacaaacaagaagggaatagaattaaattggggtataatctaatcttcattgtttaaatggtttgccttctcaccattgaagccatttttttatagcctcagaaagaggaaataatgcctccaccattttctacctggtgacttgaaaattgaacttttaagttaggaagaagttagagtcagggaacttgtataccactatctatgcagcattgttatagtctgattatttctgtgttttgaatatgattttcctaatgctctaaataaaattttgttaaaaattaattttttatttaatgatgtgcaaatattgaatattttagtatatttattaaaagtggtagtcattaaaaatgcccatgttttagagttcatgtttggaagtttccattataggttaaggatttatattagtattgtccaaataaaatagtatagttttttttattgctctgttcagcagtagggtagtagaaaagccaaatgtaaaattatgagcttttagcttaaaaaaagttaatgt

SEQ ID NO: 21167 - DNA, 2915 bp, Homo sapiens
ttccgtaccgtcgcggatttcggcggcggaaacatggcggtcgcggccgggccggtaacggagaaagtttacgccgacactggcctgtattagcgcgtatggcctcgggccctcgttccccaaggcgtgccgcctccctgttctcagtcgcaggctgaagccttgtctgctctcctcctttttggtttggttttggaactgactccgagggttgggagagcgcgttggtggcgacggccgagtcagccaacaaatggaattttcttgagcatgtttctaatcgttttgccattggaatccatggctcatgggctcttccatgaattgggtaactgtttaggaggaacatctgttggatatgctattgtgattcccaccaacttctgcagtcctgatggtcagccaacactgcttcccccagaacatgtacaggagttaaatttgaggtctactggcatgctcaatgctatccaaagattttttgcatatcatatgattgagacctatggatgtgactattccacaagtggactgtcatttgatactctgcattccaaactaaaagctttcctcgaacttcggacagtggatggacccagacatgatacgtatattttgtattacagtgggcacacccatggtacaggagagtgggctctagcaggtggagatacactacgccttgacacacttatagaatggtggagagaaaagaatggttccttttgttcccggcttattatcgtattagacagcgaaaattcaaccccttgggtgaaagaagtgaggaaaattaatgaccagtatattgcagtgcaaggagcagagttgataaaaacagtagatattgaagaagctgacccgccacagctaggtgactttacaaaagactgggtagaatataactgcaactccagtaataacatctgctggactgaaaagggacgcacagtgaaagcagtatatggtgtgtcaaaacggtggagtgactacactctgcatttgccaacgggaagcgatgtggccaagcactggatgttacactttcctcgtattacatatcccctagtgcatttggcaaattggttatgcggtctgaaccttttttggatctgcaaaacttgttttaggtgcttgaaaagattaaaaatgagttggtttcttcctactgtgctggacacaggacaaggcttcaaacttgtcaaatcttaatttggaccccaaagcgggatattaataagcactcatactaccaattatcactaacttgccattttttgtatgctgtatttttatttgtggaaaataccttgctacttctgtagctgctctcactttgtcttttcttaagtaattatggtatatataaggcgttgggaaaaaacattttataatgaaagtatgtagggagtcaaatgcttactgtaaatgcataagagacgttaaaaataacactgcactttcaggaatgtttgcttatggtcctgattagaaagaaacagttgtctatgctctgcaatggtcaatgatgaattactaatgccttattttctaggcatataataatagtttagagaatgtagaccagataaatttgtttactgttttaagaaaactaccagtttacttacagaagattcttttttccaaacagtaggtttcatccaagaccatttgaagaactgcaaactctttctcttagaaaagaaagagggcagcctaaaataaacgcaaaatttgcttatactccatcacattcagatgtcttggttgtgacttattaccagtgtggcagagaacccaagttacattttagatcaaaatattctttatgtaggtattgttaaaaggctagagcctacaagttgctcttccatgcgttggtcagggggccctgaaaacactggtaatattaagagtctttctcagggtaacttaatgttttcttaatgaacagtgtttccagctacaaattcttccaataaattgtcttcctttttgaaaagtactctcatagaagaaatttagcaatttctcgttgactgactcagtctattttaagtattcagaaaagattttgatccccattgagttaatgctctgccttgaaaattatttttctgatccttgttagtgataacattttttttctactgaaggtcagaggataggaaacaagtatttctcttctggtatacatgtaatgtattctgtaaaaaagtattcatattggcaattttagttaggcataatattgtggttgtaatttttaaaacttagtgttttgtctgattaaagcaggcactgatcagggtatctcctaagaggtaattcacttcttattcctttccaataattattacattctaaattttcatctatgagaaataacaaacaagaagggaatagaattaaattggggtataatctaatcttcattgtttaaatggtttgccttctcaccattgaagccatttttttatagcctcagaaagaggaaataatgcctccaccattttctacctggtgacttgaaaattgaacttttaagttaggaagaagttagagtcagggaacttgtataccactatctatgcagcattgttatagtctgattatttctgtgttttgaatatgattttcctaatgctctaaataaaattttgttaaaaattaattttttatttaatgatgtgcaaatattgaatattttagtatatttattaaaagtggtagtcattaaaaatgcccatgttttagagttcatgtttggaagtttccattataggttaaggatttatattagtattgtccaaataaaatagtatagttttttttattgctctgttcagcagtagggtagtagaaaagccaaatgtaaaattatgagcttttagcttaaaaaaagttaatgt

SEQ ID NO: 21168 - DNA, 4032 bp, Homo sapiens
  misc_feature (900)..(900): n is a, c, g, or t
  misc_feature (1463)..(1463): n is a, c, g, or t
ttccgtaccgtcgcggatttcggcggcggaaacatggcggtcgcggccgggccggtaacggagaaagtttacgccgacactggcctgtattagcgcgtatggcctcgggccctcgttccccaaggcgtgccgcctccctgttctcagtcgcaggctgaagccttgtctgctctcctcctttttggtttggttttggaactgactccgagggttgggagagcgcgttggtggcgacggccgagtcaggctgtcttttgaagaagatcagaatggggaagagttttgtaaattagccatttaaaaacaatctgccatgttgattttggtccataggaagatcactataaacaaaatttccacaagagaaaatgttgaaataggagttgcggatacattggatatactggatgaaatacaagcggttaatttttgtaacgtgagggaaaagcccacattgctggttacatgtgtaaatcactgcgttattgctttagtcattgtctctatttagcaatgacaagactggaagaagtaaatagagaagtgaacatgcattcttcagtgcggtatcttggctatttagccagaatcaatttattggttgctatatgcttaggtctatacgtaagatgggaaaaaacagcaaattccttaattttggtaatttttattcttggtctttttgttcttggaatcgccagcatactctattactatttttcaatggaagcagcaagtttaagtctctccaatctttggtttggattcttgcttggcctcctatgttttcttgataattcatcctttaaaaatgatgtaaaagaagaatcaaccaaatatttgcttctaacatccatagtgttaaggatattgtgctctctggtggagagaatttctggntatgtccgtcatcggcccactttactaaccacagttgaatttctggagcttgttggatttgccattgccagcacaactatgttggtggagaagtctctgagtgtcattttgcttgttgtagctctggctatgctgattattgatctgagaatgaaatctttcttagctattccaaacttagttatttttgcagttttgttatttttttcctcattggaaactcccaaaaatccgattgcttttgcgtgtttttttatttgcctgataactgatcctttccttgacatttattttagtggactttcagtaactgaaagatggaaaccctttttgtaccgtggaagaatttgcagaagactttcagtcgtttttgctggaatgattgagcttacattttttattctttccgcattcaaacttagagacactcacctctggtattttgtaatacctggcttttccatttttggaattttctggatgatttgtcatattatttttcttttaactctttggggattccataccaaattaaatgactgccataaagtatattttactcncaggacagattacaatagccttgatagaatcatggcatccaaagggatgcgccatttttgcttgatttcagagcagttggtgttctttagtcttcttgcaacagcgattttgggagcagtttcctggcagccaacaaatggaattttcttgagcatgtttctaatcgttttgccattggaatccatggctcatgggctcttccatgaattgggtaactgtttaggaggaacatctgttggatatgctattgtgattcccaccaacttctgcagtcctgatggtcagccaacactgcttcccccagaacatgtacaggagttaaatttgaggtctactggcatgctcaatgctatccaaagattttttgcatatcatatgattgagacctatggatgtgactattccacaagtggactgtcatttgatactctgcattccaaactaaaagctttcctcgaacttcggacagtggatggacccagacatgatacgtatattttgtattacagtgggcacacccatggtacaggagagtgggctctagcaggtggagatacactacgccttgacacacttatagaatggtggagagaaaagaatggttccttttgttcccggcttattatcgtattagacagcgaaaattcaaccccttgggtgaaagaagtgaggaaaattaatgaccagtatattgcagtgcaaggagcagagttgataaaaacagtagatattgaagaagctgacccgccacagctaggtgactttacaaaagactgggtagaatataactgcaactccagtaataacatctgctggactgaaaagggacgcacagtgaaagcagtatatggtgtgtcaaaacggtggagtgactacactctgcatttgccaacgggaagcgatgtggccaagcactggatgttacactttcctcgtattacatatcccctagtgcatttggcaaattggttatgcggtctgaaccttttttggatctgcaaaacttgttttaggtgcttgaaaagattaaaaatgagttggtttcttcctactgtgctggacacaggacaaggcttcaaacttgtcaaatcttaatttggaccccaaagcgggatattaataagcactcatactaccaattatcactaacttgccattttttgtatgctgtatttttatttgtggaaaataccttgctacttctgtagctgctctcactttgtcttttcttaagtaattatggtatatataaggcgttgggaaaaaacattttataatgaaagtatgtagggagtcaaatgcttactgtaaatgcataagagacgttaaaaataacactgcactttcaggaatgtttgcttatggtcctgattagaaagaaacagttgtctatgctctgcaatggtcaatgatgaattactaatgccttattttctaggcatataataatagtttagagaatgtagaccagataaatttgtttactgttttaagaaaactaccagtttacttacagaagattcttttttccaaacagtaggtttcatccaagaccatttgaagaactgcaaactctttctcttagaaaagaaagagggcagcctaaaataaacgcaaaatttgcttatactccatcacattcagatgtcttggttgtgacttattaccagtgtggcagagaacccaagttacattttagatcaaaatattctttatgtaggtattgttaaaaggctagagcctacaagttgctcttccatgcgttggtcagggggccctgaaaacactggtaatattaagagtctttctcagggtaacttaatgttttcttaatgaacagtgtttccagctacaaattcttccaataaattgtcttcctttttgaaaagtactctcatagaagaaatttagcaatttctcgttgactgactcagtctattttaagtattcagaaaagattttgatccccattgagttaatgctctgccttgaaaattatttttctgatccttgttagtgataacattttttttctactgaaggtcagaggataggaaacaagtatttctcttctggtatacatgtaatgtattctgtaaaaaagtattcatattggcaattttagttaggcataatattgtggttgtaatttttaaaacttagtgttttgtctgattaaagcaggcactgatcagggtatctcctaagaggtaattcacttcttattcctttccaataattattacattctaaattttcatctatgagaaataacaaacaagaagggaatagaattaaattggggtataatctaatcttcattgtttaaatggtttgccttctcaccattgaagccatttttttatagcctcagaaagaggaaataatgcctccaccattttctacctggtgacttgaaaattgaacttttaagttaggaagaagttagagtcagggaacttgtataccactatctatgcagcattgttatagtctgattgtctaaggcctaacaagctgatctccctaacgctctccatagggttttgttaaaaccttaaaacaaac

SEQ ID NO: 21169 - DNA, 3958 bp, Homo sapiens
  misc_feature (900)..(900): n is a, c, g, or t
  misc_feature (1463)..(1463): n is a, c, g, or t
ttccgtaccgtcgcggatttcggcggcggaaacatggcggtcgcggccgggccggtaacggagaaagtttacgccgacactggcctgtattagcgcgtatggcctcgggccctcgttccccaaggcgtgccgcctccctgttctcagtcgcaggctgaagccttgtctgctctcctcctttttggtttggttttggaactgactccgagggttgggagagcgcgttggtggcgacggccgagtcaggctgtcttttgaagaagatcagaatggggaagagttttgtaaattagccatttaaaaacaatctgccatgttgattttggtccataggaagatcactataaacaaaatttccacaagagaaaatgttgaaataggagttgcggatacattggatatactggatgaaatacaagcggttaatttttgtaacgtgagggaaaagcccacattgctggttacatgtgtaaatcactgcgttattgctttagtcattgtctctatttagcaatgacaagactggaagaagtaaatagagaagtgaacatgcattcttcagtgcggtatcttggctatttagccagaatcaatttattggttgctatatgcttaggtctatacgtaagatgggaaaaaacagcaaattccttaattttggtaatttttattcttggtctttttgttcttggaatcgccagcatactctattactatttttcaatggaagcagcaagtttaagtctctccaatctttggtttggattcttgcttggcctcctatgttttcttgataattcatcctttaaaaatgatgtaaaagaagaatcaaccaaatatttgcttctaacatccatagtgttaaggatattgtgctctctggtggagagaatttctggntatgtccgtcatcggcccactttactaaccacagttgaatttctggagcttgttggatttgccattgccagcacaactatgttggtggagaagtctctgagtgtcattttgcttgttgtagctctggctatgctgattattgatctgagaatgaaatctttcttagctattccaaacttagttatttttgcagttttgttatttttttcctcattggaaactcccaaaaatccgattgcttttgcgtgtttttttatttgcctgataactgatcctttccttgacatttattttagtggactttcagtaactgaaagatggaaaccctttttgtaccgtggaagaatttgcagaagactttcagtcgtttttgctggaatgattgagcttacattttttattctttccgcattcaaacttagagacactcacctctggtattttgtaatacctggcttttccatttttggaattttctggatgatttgtcatattatttttcttttaactctttggggattccataccaaattaaatgactgccataaagtatattttactcncaggacagattacaatagccttgatagaatcatggcatccaaagggatgcgccatttttgcttgatttcagagcagttggtgttctttagtcttcttgcaacagcgattttgggagcagtttcctggcagccaacaaatggaattttcttgagcatgtttctaatcgttttgccattggaatccatggctcatgggctcttccatgaattgggtaactgtttaggaggaacatctgttggatatgctattgtgattcccaccaacttctgcagtcctgatggtcagccaacactgcttcccccagaacatgtacaggagttaaatttgaggtctactggcatgctcaatgctatccaaagattttttgcatatcatatgattgagacctatggatgtgactattccacaagtggactgtcatttgatactctgcattccaaactaaaagctttcctcgaacttcggacagtggatggacccagacatgatacgtatattttgtattacagtgggcacacccatggtacaggagagtgggctctagcaggtggagatacactacgccttgacacacttatagaatggtggagagaaaagaatggttccttttgttcccggcttattatcgtattagacagcgaaaattcaaccccttgggtgaaagaagtgaggaaaattaatgaccagtatattgcagtgcaaggagcagagttgataaaaacagtagatattgaagaagctgacccgccacagctaggtgactttacaaaagactgggtagaatataactgcaactccagtaataacatctgctggactgaaaagggacgcacagtgaaagcagtatatggtgtgtcaaaacggtggagtgactacactctgcatttgccaacgggaagcgatgtggccaagcactggatgttacactttcctcgtattacatatcccctagtgcatttggcaaattggttatgcggtctgaaccttttttggatctgcaaaacttgttttaggtgcttgaaaagattaaaaatgagttggtttcttcctactgtgctggacacaggacaaggcttcaaacttgtcaaatcttaatttggaccccaaagcgggatattaataagcactcatactaccaattatcactaacttgccattttttgtatgctgtatttttatttgtggaaaataccttgctacttctgtagctgctctcactttgtcttttcttaagtaattatggtatatataaggcgttgggaaaaaacattttataatgaaagtatgtagggagtcaaatgcttactgtaaatgcataagagacgttaaaaataacactgcactttcaggaatgtttgcttatggtcctgattagaaagaaacagttgtctatgctctgcaatggtcaatgatgaattactaatgccttattttctaggcatataataatagtttagagaatgtagaccagataaatttgtttactgttttaagaaaactaccagtttacttacagaagattcttttttccaaacagtaggtttcatccaagaccatttgaagaactgcaaactctttctcttagaaaagaaagagggcagcctaaaataaacgcaaaatttgcttatactccatcacattcagatgtcttggttgtgacttattaccagtgtggcagagaacccaagttacattttagatcaaaatattctttatgtaggtattgttaaaaggctagagcctacaagttgctcttccatgcgttggtcagggggccctgaaaacactggtaatattaagagtctttctcagggtaacttaatgttttcttaatgaacagtgtttccagctacaaattcttccaataaattgtcttcctttttgaaaagtactctcatagaagaaatttagcaatttctcgttgactgactcagtctattttaagtattcagaaaagattttgatccccattgagttaatgctctgccttgaaaattatttttctgatccttgttagtgataacattttttttctactgaaggtcagaggataggaaacaagtatttctcttctggtatacatgtaatgtattctgtaaaaaagtattcatattggcaattttagttaggcataatattgtggttgtaatttttaaaacttagtgttttgtctgattaaagcaggcactgatcagggtatctcctaagaggtaattcacttcttattcctttccaataattattacattctaaattttcatctatgagaaataacaaacaagaagggaatagaattaaattggggtataatctaatcttcattgtttaaatggtttgccttctcaccattgaagccatttttttatagcctcagaaagaggaaataatgcctccaccagtcaggggttttgcctaagtcagcaacgctatctttaagggaagcgtgcgataacatcgctgaaattgaggactcttgcaccgacgaaagattcag

SEQ ID NO: 21170 - DNA, 3896 bp, Homo sapiens
  misc_feature (809)..(809): n is a, c, g, or t
  misc_feature (1372)..(1372): n is a, c, g, or t
ttccgtaccgtcgcggatttcggcggcggaaacatggcggtcgcggccgggccggtaacggagaaagtttacgccgacactggcctgtattagcgcgtatggcctcgggccctcgttccccaaggcgtgccgcctccctgttctcagtcgcaggctgaagccttgtctgctctcctcctttttggtttggttttggaactgactccgagggttgggagagcgcgttggtggcgacggccgagtcagatcactataaacaaaatttccacaagagaaaatgttgaaataggagttgcggatacattggatatactggatgaaatacaagcggttaatttttgtaacgtgagggaaaagcccacattgctggttacatgtgtaaatcactgcgttattgctttagtcattgtctctatttagcaatgacaagactggaagaagtaaatagagaagtgaacatgcattcttcagtgcggtatcttggctatttagccagaatcaatttattggttgctatatgcttaggtctatacgtaagatgggaaaaaacagcaaattccttaattttggtaatttttattcttggtctttttgttcttggaatcgccagcatactctattactatttttcaatggaagcagcaagtttaagtctctccaatctttggtttggattcttgcttggcctcctatgttttcttgataattcatcctttaaaaatgatgtaaaagaagaatcaaccaaatatttgcttctaacatccatagtgttaaggatattgtgctctctggtggagagaatttctggntatgtccgtcatcggcccactttactaaccacagttgaatttctggagcttgttggatttgccattgccagcacaactatgttggtggagaagtctctgagtgtcattttgcttgttgtagctctggctatgctgattattgatctgagaatgaaatctttcttagctattccaaacttagttatttttgcagttttgttatttttttcctcattggaaactcccaaaaatccgattgcttttgcgtgtttttttatttgcctgataactgatcctttccttgacatttattttagtggactttcagtaactgaaagatggaaaccctttttgtaccgtggaagaatttgcagaagactttcagtcgtttttgctggaatgattgagcttacattttttattctttccgcattcaaacttagagacactcacctctggtattttgtaatacctggcttttccatttttggaattttctggatgatttgtcatattatttttcttttaactctttggggattccataccaaattaaatgactgccataaagtatattttactcncaggacagattacaatagccttgatagaatcatggcatccaaagggatgcgccatttttgcttgatttcagagcagttggtgttctttagtcttcttgcaacagcgattttgggagcagtttcctggcagccaacaaatggaattttcttgagcatgtttctaatcgttttgccattggaatccatggctcatgggctcttccatgaattgggtaactgtttaggaggaacatctgttggatatgctattgtgattcccaccaacttctgcaggtggagatacactacgccttgacacacttatagaatggtggagagaaaagaatggttccttttgttcccggcttattatcgtattagacagcgaaaattcaaccccttgggtgaaagaagtgaggaaaattaatgaccagtatattgcagtgcaaggagcagagttgataaaaacagtagatattgaagaagctgacccgccacagctaggtgactttacaaaagactgggtagaatataactgcaactccagtaataacatctgctggactgaaaagggacgcacagtgaaagcagtatatggtgtgtcaaaacggtggagtgactacactctgcatttgccaacgggaagcgatgtggccaagcactggatgttacactttcctcgtattacatatcccctagtgcatttggcaaattggttatgcggtctgaaccttttttggatctgcaaaacttgttttaggtgcttgaaaagattaaaaatgagttggtttcttcctactgtgctggacacaggacaaggcttcaaacttgtcaaatcttaatttggaccccaaagcgggatattaataagcactcatactaccaattatcactaacttgccattttttgtatgctgtatttttatttgtggaaaataccttgctacttctgtagctgctctcactttgtcttttcttaagtaattatggtatatataaggcgttgggaaaaaacattttataatgaaagtatgtagggagtcaaatgcttactgtaaatgcataagagacgttaaaaataacactgcactttcaggaatgtttgcttatggtcctgattagaaagaaacagttgtctatgctctgcaatggtcaatgatgaattactaatgccttattttctaggcatataataatagtttagagaatgtagaccagataaatttgtttactgttttaagaaaactaccagtttacttacagaagattcttttttccaaacagtaggtttcatccaagaccatttgaagaactgcaaactctttctcttagaaaagaaagagggcagcctaaaataaacgcaaaatttgcttatactccatcacattcagatgtcttggttgtgacttattaccagtgtggcagagaacccaagttacattttagatcaaaatattctttatgtaggtattgttaaaaggctagagcctacaagttgctcttccatgcgttggtcagggggccctgaaaacactggtaatattaagagtctttctcagggtaacttaatgttttcttaatgaacagtgtttccagctacaaattcttccaataaattgtcttcctttttgaaaagtactctcatagaagaaatttagcaatttctcgttgactgactcagtctattttaagtattcagaaaagattttgatccccattgagttaatgctctgccttgaaaattatttttctgatccttgttagtgataacattttttttctactgaaggtcagaggataggaaacaagtatttctcttctggtatacatgtaatgtattctgtaaaaaagtattcatattggcaattttagttaggcataatattgtggttgtaatttttaaaacttagtgttttgtctgattaaagcaggcactgatcagggtatctcctaagaggtaattcacttcttattcctttccaataattattacattctaaattttcatctatgagaaataacaaacaagaagggaatagaattaaattggggtataatctaatcttcattgtttaaatggtttgccttctcaccattgaagccatttttttatagcctcagaaagaggaaataatgcctccaccattttctacctggtgacttgaaaattgaacttttaagttaggaagaagttagagtcagggaacttgtataccactatctatgcagcattgttatagtctgattatttctgtgttttgaatatgattttcctaatgctctaaataaaattttgttaaaaattaattttttatttaatgatgtgcaaatattgaatattttagtatatttattaaaagtggtagtcattaaaaatgcccatgttttagagttcatgtttggaagtttccattataggttaaggatttatattagtattgtccaaataaaatagtatagttttttttattgctctgttcagcagtagggtagtagaaaagccaaatgtaaaattatgagcttttagcttaaaaaaagttaatgt

SEQ ID NO: 21171 - DNA, 1841 bp, Homo sapiens
atagtttatgctgtaatagtttatgctgtaatagtttatgctgtaatagtttatgctgtaatagtttatgctgtaatagtttatgctacagcataaactattgacacaggacaaggcttcaaacttgtcaaatcttaatttggaccccaaagcgggatattaataagcactcatactaccaattatcactaacttgccattttttgtatgctgtatttttatttgtggaaaataccttgctacttctgtagctgctctcactttgtcttttcttaagtaattatggtatatataaggcgttgggaaaaaacattttataatgaaagtatgtagggagtcaaatgcttactgtaaatgcataagagacgttaaaaataacactgcactttcaggaatgtttgcttatggtcctgattagaaagaaacagttgtctatgctctgcaatggtcaatgatgaattactaatgccttattttctaggcatataataatagtttagagaatgtagaccagataaatttgtttactgttttaagaaaactaccagtttacttacagaagattcttttttccaaacagtaggtttcatccaagaccatttgaagaactgcaaactctttctcttagaaaagaaagagggcagcctaaaataaacgcaaaatttgcttatactccatcacattcagatgtcttggttgtgacttattaccagtgtggcagagaacccaagttacattttagatcaaaatattctttatgtaggtattgttaaaaggctagagcctacaagttgctcttccatgcgttggtcagggggccctgaaaacactggtaatattaagagtctttctcagggtaacttaatgttttcttaatgaacagtgtttccagctacaaattcttccaataaattgtcttcctttttgaaaagtactctcatagaagaaatttagcaatttctcgttgactgactcagtctattttaagtattcagaaaagattttgatccccattgagttaatgctctgccttgaaaattatttttctgatccttgttagtgataacattttttttctactgaaggtcagaggataggaaacaagtatttctcttctggtatacatgtaatgtattctgtaaaaaagtattcatattggcaattttagttaggcataatattgtggttgtaatttttaaaacttagtgttttgtctgattaaagcaggcactgatcagggtatctcctaagaggtaattcacttcttattcctttccaataattattacattctaaattttcatctatgagaaataacaaacaagaagggaatagaattaaattggggtataatctaatcttcattgtttaaatggtttgccttctcaccattgaagccatttttttatagcctcagaaagaggaaataatgcctccaccattttctacctggtgacttgaaaattgaacttttaagttaggaagaagttagagtcagggaacttgtataccactatctatgcagcattgttatagtctgattatttctgtgttttgaatatgattttcctaatgctctaaataaaattttgttaaaaattaattttttatttaatgatgtgcaaatattgaatattttagtatatttattaaaagtggtagtcattaaaaatgcccatgttttagagttcatgtttggaagtttccattataggttaaggatttatattagtattgtccaaataaaatagtatagttttttttattgctctgttcagcagtagggtagtagaaaagccaaatgtaaaattatgagcttttagcttaaaaaaagttaatgt

SEQ ID NO: 21172 - DNA, 883 bp, Homo sapiens
gtttatttactttagaactttctgggtatatatatttttttaatcccttgttcttcagctataaaactgatttaaatgtaaatctgttcttaaactcattcttgtacaggtaggaacagggtttattttcattcaataggtacctacatatgaggaagagaaggaaacaatgatacagaatggggaggcaaactttttctgtaaagggccagatatttttggctttgtgggtttagatgcctgttgcagctattcagctctgctactttagagcaatagcagccatagacggtataaatgaatgaatgtagttgtgttccaataaacttatttatgaaaataattatatgaaacaaattgcatacagtttttactatcacaaaatattctgattttctttcaaccatgtgaaaatataaaatcaattcttagctttcaggccatacaaaaagaggtggcaggctggatctggcccatgagttgtagttgctgcccctggtgtagaatgttagcttttctgtatagttgttttcactaaatacaactgtgtaaaactatttccttaattttatactagcagattcctttttatgtgagtaataaggattttttttacctcaagttgaaaatctgttgtaaaaaatatcttttcaaaagatactttgaaagtgtcatttaaatactttattttttgcttatttaattctaagaacttaaggaaaatacatgtataacaagagtattttctctctagaagaaaatgattaagagggttttcttaatgagaggctgcagaaattattgctccattgaattttctcttgttcacaggtggagatacactacgccttgacacacttatagaatggtggagagaaaagaa

SEQ ID NO: 21173 - DNA, 461 bp, Homo sapiens
ggcataagaaaatttgaattgctaaaaaactaaattgacaagataagtagaatacaattaatacagctttgattgatacattgttgagaaaataacatttaccaaacaatatgtccatttatatctaatgataagataggagtctcagtgatttttcttagtgtttttcctgtaaatttttaaaaaatctttttgacttctaatttcttgtctgctgcagaaactagttcaaaaggtaagctgctttcgtcaaaagttttgaagtaacatttttttgtgctttatatttaccttcttaactttttatcgaagcatactaaggaatacagataaatgaattttcacaaactcagtgcacacatgtttttagcaaaaagcagaatatttctagctcccagaagcatgccatcctggtgctcccttcctggctgttacacactgcacccctgaaagtaatcaac

SEQ ID NO: 21174 - DNA, 355 bp, Homo sapiens
tttcttttctaacctggtgtttggcacataggtacagaagcaagagataagacggtggaaagtgttgcaagaaagtagaatagggtgattaactccacttggagtggggcagtgtcagaggctgcagagaaaattataattgagctgggatgtgaagagtgaacaggagttcatctacagatggaaaagtaacatttcaaataatgagaacagtttaaaggcctaaagatgtgagctcatgaatgtcgaggtaaggtgtgtggatggagagggatgaagaacaaggttcaagtgagtctctctgttctccccagtacccccatcttcattacctttgcccaccgtggtctctgct

SEQ ID NO: 21175 - DNA, 679 bp, Homo sapiens
agtcacagcaacagatttgcctgatgtcctgggaaaccttcaatacaatcttttaaaaaacacactacaatgtacagcacatctgcctgaagtgaaagaactggtatggggggaagacctggacaaaaactttcccaagtcagctttttactatgattacgtcctagcctcagatgtggtctaccatcactacttcctggacaagctgctcaccaccatggtgtacctttcccagccagggacggtgctgctttgggcaaacaaattcaggttcagcaccgactatgaatttttagataaattcaagcaagtttttgacacaacactgttggctgaatatccagagtcatcagtcaaactttttaaggggatactaaaatgggactaaatccaacaaaatgcctttcacaacgttactgtgtcttttgagcaatgtgttagaaattgctttggtaatagacttctttcacaggattgagaaggtagtgcatagaaacaacttgtatacttggaacaaatgtaacaatactgcagaaactttctaatttctaagataatttaagattatctggttaatctaaatatctaaaaagaacaacataaaaacatgaaagtagctttgttggttccaacgaagttacatgtttaataaatcttacatggataaagtaaaaaaaaa

SEQ ID NO: 21176 - DNA, 400 bp, Homo sapiens
  misc_feature (102)..(102): n is a, c, g, or t
agaaggaggaatttagaagaggtagagaaaagggaacattaacccctacactcggaaaccccgaagcaacactgcccagaagtgtgttttggtatgcacggntcccttaagtggctgtgattattattgaaagtggggtgttgaagaccccaactactattgtagagtggtctatttctcccttcaatcctgtcaatgtttgctttatgtattttggggaactgttgtttgatgtgtatgtgtttataattgttatacatttttaattgagccttttattaacatatattgttatttttgtctcgaaataattttttagttaaaatctattttgtctgatattggtgtgaatgctgtacctttctgacaataaataatattcgaccatgaatgaataaac

SEQ ID NO: 21177 - DNA, 172 bp, Homo sapiens
ggaatacaggagcacggctcatgactacttcttgtcaattgttcccataagagaaactcactcagacttttacagcaaaactggggagctttattggtgactataggttatcccctggaactgtacattcaagagtacagctggataccaggaggtcagatgatgagaaagt

SEQ ID NO: 21178 - DNA, 416 bp, Homo sapiens
ataagaaagagtagtgattttcccttaaatcggaggagacaaacatggaatttttataaaatgtaatatttgctggtatttaagtatactttgggtggtatcttggctggcgttcagagactgttgaaatcatcttgattgtgaaaagtcgctaaatggagctgttaaatttgcttcgcaaattacatttagctgcaaagtattggttcagtctaggcctcctgaatgataacacctattatatagatgttctctgtccacatcccacctgaggaaaaaaaaatcacatcaggtttgaagttcagttgaggcaaattttatattagtaatatcgttcattattgagagagatctcggctgctgacctgcgtatgaagcacttgccccatggaagttgtgcaagccaagtgccagaa

SEQ ID NO: 21179 - DNA, 404 bp, Homo sapiens
gcgtcgacgcctgtagtcccagctgatcgggaggcctaggcaggagaatggtgtgaacccaggaggcggcgtgtgtgagccactgtgcccaattcagttctcagtaaaaacttgatcaggccaaatgaaagtgacatgggccaatttcataatagattgatttggaaaccagatgtcaatttacttactttaagtgagatctgtatcttcagtaaccagacctcttgagtctcccacccagaacactatcttcctctagtcaagatacctggcaaaggccgggcacagtggctcacgcctataattccagcactttgggaggccaaggtgggtgggtcacctgaggttgggagttcgagaccagcctgaccaacagggagaaaccccatctctactgaaaatac

SEQ ID NO: 21180 - DNA, 312 bp, Homo sapiens
ctgggtgacagagcaagatgctgtatcaaaaaaaaaaagaaaagaaaagaaaagggaagaaaaagaaatgcaaattcttactcatacccaccattaaatccaaatctctagggggatggcctaggaatctgagtttcgacaagctctccaggaatttctgatgcctgctcaaattcaagaagcagttttctcacactgtcttctgggcactgctggtcggaaggttctcacctggacccaccaccccaggggcatctactggcatttgggcttgccacccaaaaaggagagaacttgcccatatctcccaac

SEQ ID NO: 21181 - DNA, 509 bp, Homo sapiens
tgttggatccagagcctgtgtgaaccctgtatatgacatgcaggcacctggccaaccaggaagaggtggctggaatattcctccggatctgcctgccaagctgtgtgccccggctcagttctgcagtgcttctgagggccatgcttttctaacacacacaaaggcactctataagctaaaggagctctgggtctgaaggcacatcatgtgggactgtgcaggctagcgacaagggtttgcaatggagggttttaagcaaaagtgacatgaccctatttaagtttaaataagatccctctgggaccagtttcggtggctcacgcctgtaatcccagcactttgggaggccgaggcgggtggatgacctgaggtcaggagtttgtgaccagcctggccaacatggtgaaaccccgtctctattaaaattacaaaaaaattagctgggtgtggtggcgggcgcctgtaatcccagctacttaggaggctgaggtaggagaatcgcttgaacc

SEQ ID NO: 21182 - DNA, 414 bp, Homo sapiens
ctcaaatcaatttctaattctccattctatttctctgcctttccccatctcctagccacctgcatactgataaagctgttaggaattctacttacaccacttcaggctacagcctcaaaccttcctgtaagtcatttactcagattgctacactctcggttaatgattcccaagtctccatctccagacaagatctcattcctgagcagcagaaacttagctgcaaatgtttactgggccttgagcgcatcaaatgtgctatgtcccaggccgtactcactattttgtcctatccctgccaccccaaactgttcatcccccatcccagttaatatgctcccattcactcatttccttccatgttttttctctttttaaaaaaactctaatcccataacagattacacccgcatt

SEQ ID NO: 21183 - DNA, 819 bp, Homo sapiens
tctcccccatgtcctcctcacacaattttctcatctttatagtctgacataaatcacaactgtgttaaactgttactttcttttttgaactcctgtagtctcatgaaatttagaaattgatcatagttgtcttgtatagggctattttgtttgttaatcttacctaatgagaattccttgagggctaagcataattctagacatcagtgttcagtattacttattgattggtgtgaatgattatctcccctttccccattcctttgttttttccctttctttctctgaattagttgatcatacctatctggtatagggctatcttgtttgttaatcatacctaatgagaattccttgtgggctaaacataataattctagacatcatgttcaataatgctcattaattattgtgaatgattatctcccctatttccattctcttgttctttccctttctttctctgaattagttaggactctttcagttgtaagtgatagaacccaacataaatatttgtagacaggctgggcatggtggctcacgcctgtaatcccagcactttgggaggctgaggcaggcagatcacctgaggtcaggagttcaagaccagcctggccaatgtggtgaaaccctgtctctactaaaaatacaaaagttagctgggcatagtggcaggcgcctgtaatcccagccactcgggaggctgagacaggagaattgcttgaacccgggggggcagaggttgcagtgagccaagattgtgccactgcacttcagcctgtgtgacagagtgagactccatctcaaaaaaaaaaa

SEQ ID NO: 21184 - DNA, 1312 bp, Homo sapiens
  misc_feature (6)..(6): n is a, c, g, or t
  misc_feature (8)..(10): n is a, c, g, or t
  misc_feature (17)..(17): n is a, c, g, or t
  misc_feature (21)..(23): n is a, c, g, or t
  misc_feature (25)..(26): n is a, c, g, or t
  misc_feature (40)..(40): n is a, c, g, or t
  misc_feature (73)..(73): n is a, c, g, or t
tcgctntnnncggaatncgtnnngnngtactgtccgcggnctcatggtctccctgtcactgatgatccttgcngttccacttcaccaaggagccgctgatggaggagtacagcatcgccacccaggtgtggaagctcagctcctgcgattatgtgtgagctggcccgcaacagcgtgctcatgagcggcttctcgcacaaggtaaagagccactggctgggacccaactataccaaggaaggccctgaggggaatgacatccgccggaccaatgtgccagacatccgcgtgggctaccgctacgagaccctgtgccaggagctggcgctcatcacgcaggcagtccagagtgagatgctggagaccattccagaggaggcgggtatcaccatgagcccagggcctcaatgatcctggtccatgaagtgcccaccacatcgcagcacttttaccacgttttgtcctcagaccccgcccatgctgtgtggtctctgcatgtctccattcttctctgtctctgtcttgcatgtctcctaccatgtcactgtccctgggccacccagtgaaagcaaagcctgggaatctgctcattgttgtttgggctcaggtattgagcctgatggcccaggtattgagggcctcccctgctggtggccctgtcctgggatcctcagaagcctgactgtcctatgggcttctccagtgtccacaggggcttgggatggttgtggggggctggcccctctagcctttccggtccttcctgggcaaatctaagccttggccagggccgaagtttaggcccctgtcttgttcatgtagccgaggggcaggcgggggatctctacacctctgctgtgggcacggggctgctgagggtctgtggaactccagcagctctgcactgggtagagctgggcctagagctcagtcacaggcctgggcttcctggcctgagtgggtagacgcaggcggcagaggtgctggaccacatctccgccaagtcactgcccagcagccttctccgtcctgtccccagcccacgtgctccttgggtgtcagcttcctgtgcctctgtgggagagggcagctgccttgtgttatgtctggggccacagttgctgcaaagtcctggatctgccactcaaccccgggagtggtgttcccagtgtggctcccagagctttgaccagattgtgatcccagctggcccctatgttgtgttctggactgaggcctttgctgtgaactgcagtgtttcatacgaaccatctttcctagtgcatgagaaataaagattatttaagtaatg

SEQ ID NO: 21185 - DNA, 408 bp, Homo sapiens
atagaaccagaattgacggaatctgtgtctggctttgtcataggtaaacaaggaagcatctgtgaggctaatgtaagtcctatggggatgggaggtttgtgtggtaagctatttcagaaaacagaaaagtgggaaatttctcaaccattgctgtatcccagaatcacaggactctggtaaactttaacaattccactcttcgggttgtaaacatttttcctgataagaaaatccactgaagtcctgagatataacagtcttcccatgctctctggcatttatgagagcttcctattaataaatgtatcgcacacagtggtatatccactcataaagtctcctaatgcatgtcagggtaggatcagcatttataaaaaaaaagtaaagtcggggaaatttgaacaaatc

SEQ ID NO: 21186 - DNA, 405 bp, Homo sapiens
gccattaaagtaattcacaaagctcttgggcatttttggacataagcacttgcatgccttttggtagaatatcatttctttattaaaattctattaagatgacagagaaaaaaaaagtaagttagttacactcatcttggcaatgacttatcctgagagaaagctcagcatgttaggtcttcagatgctttatgaaattgaaagaaaaaaaatagccctcattgatcttcttactgtaagatatcagatttagtataaagctttccttccttctttatgacaattggcaagaactatctgtatcctactttactgtttacatagctttacacaactggaattagagtcaaaatttataggcagaaaaagtgacaactcttatagataactattcctctatccctc

SEQ ID NO: 21187 - DNA, 325 bp, Homo sapiens
ctttgtgtacatttattatctctccagtgacataaactcctcaggggcagtgtcccataaggggcacactagtcatttggagggaagccattgtaaaccttgataagcatgaagaaatctacaaatgaggagtattccagaaaaagcctcggctttggggaagtaaataataccaggagttactgagctggacacagcacacatacactgagtctttacaacagtcctgcctggaagatgttatcaccaccatttcatggataaggaaattgaaactcaaaaagatgtgaaaattgtctgaaaccactcagacctgtctgatttc

SEQ ID NO: 21188 - DNA, 433 bp, Homo sapiens
tcatcatgtataagctggttatagggcaaatatgtattcattactcattacatcctggacactttgccttggacttcgtgccacaatgatgaatgtggcatgatccctgtcttcaacagaaaatactatgaaagaaacatgtagagcttcactgagagagatccccaagggacttcgggaagctgagttatgtgaactgtattttatcaaatgaatgaaaagttagtcagcagatactatcgtctgaatgtctgtgtcagctcaaaatccatattttgaaatcctaacccccagtgtgaaggcattagaaggtgaggcccttgggaggtgactaggttaccaggaagaaccagcatgaatggaggctgaggcaggagaatggcgtgaacccgggaggcgaagcttgcagtgagccgagatcgcgccactgcgc

SEQ ID NO: 21189 - DNA, 366 bp, Homo sapiens
ctggggatggcctgtatctgctccacattccaagccaacaccatggccatcgggcaggaccaacctcaagctcaaacatggtgagaagccactgcccccaacccatgtggtgattccaaggaggctgagaaggttttggcatctttcctcatccttctgtaccccatggcaccattcccacattccagcaggtcttcagtcctgtagatgaagtctggaatgctctcactgaatagaaaagtcctcaggaaaatcccacattgcagagacgcatgtggtctgatggcaaagctgaaggaatagcctagcacccccacccatgtgcctctcaccgagtgacaggtaaaagatacaaagaaaactttt

SEQ ID NO: 21190 - DNA, 686 bp, Homo sapiens
ggaaaatgtaggctaccagtagaaaatgacattctctattaataagatctgaggtgcgacacacataattgtcccaatttttaagattgatggggagcatgaagcatttttttaatgtgttggcaggccccattaaatgcataaactgcataggactcatgtggtctgaatgtattttagggctttctgggaattgtcttgacagagaacctcagctggacaaagcagccttgatctgagtgagctaactgacacaatgaaactgtcaggcatgtttctgctcctctctctggctcttttctgctttttaacaggtgtcttcagtcagggaggacaggttgactgtggtgagttccaggacaccaaggtctactgcactcgggaatctaacccacactgtggctctgatggccagacatatggcaataaatgtgccttctgtaaggccatagtgaaaagtggtggaaagattagcctaaagcatcctggaaaatgctgagttaaagccaatgtttcttggtgacttgccagcttttgcagccttcttttctcacttctgcttatacttttgctggtggattcctttaattcataaagacatacctactctgcctgggtcttgaggagttcaatgtatgtctatttctcttgattcacttgtcaataaagtacattctgcaaaagca

SEQ ID NO: 21191 - DNA, 514 bp, Homo sapiens
  misc_feature (26)..(26): n is a, c, g, or t
cgcttttccaatcgttttttccccangctaagtatacactcagctggacaaagcagccttgatctgagtgagctaactgacacaatgaaactgtcaggcatgtttctgctcctctctctggctcttttctgctttttaacaggtgtcttcagtcagggaggacaggttgactgtggtgagttccaggacaccaaggtctactgcactcgggaatctaacccacactgtggctctgatggccagacatatggcaataaatgtgccttctgtaaggccatagtgaaaagtggtggaaagattagcctaaagcatcctggaaaatgctgagttaaagccaatgtttcttggtgacttgccagcttttgcagccttcttttctcacttctgcttatacttttgctggtggattcctttaattcataaagacatacctactctgcctgggtcttgaggagttcaatgtatgtctatttctcttgattcacttgtcaataaagtacattctgcaaaagca

SEQ ID NO: 21192 - DNA, 430 bp, Homo sapiens
  misc_feature (53)..(53): n is a, c, g, or t
  misc_feature (58)..(58): n is a, c, g, or t
ggggaggggtggcgacagcaaccaaacacaaaaaaaaaacccttgtgtcttantcagngagccttcagtcagggaggacaggttgactgtggtgagttccaggacaccaaggtctactgcactcgggaatctaacccacactgtggctctgatggccagacatatggcaataaatgtgccttctgtaaggccatagtgaaaagtggtggaaagattagcctaaagcatcctggaaaatgctgagttaaagccaatgtttcttggtgacttgccagcttttgcagccttcttttctcacttctgcttatacttttgctggtggattcctttaattcataaagacatacctactctgcctgggtcttgaggagttcaatgtatgtctatttctcttgattcacttgtcaataaagtacattctgcaaaagca

SEQ ID NO: 21193 - DNA, 416 bp, Homo sapiens
ataaataaccattcaagaaccatgaaccgacatagattaccccccttgcttcagtcagggaggacaggttgactgtggtgagttccaggacaccaaggtctactgcactcgggaatctaacccacactgtggctctgatggccagacatatggcaataaatgtgccttctgtaaggccatagtgaaaagtggtggaaagattagcctaaagcatcctggaaaatgctgagttaaagccaatgtttcttggtgacttgccagcttttgcagccttcttttctcacttctgcttatacttttgctggtggattcctttaattcataaagacatacctactctgcctgggtcttgaggagttcaatgtatgtctatttctcttgattcacttgtcaataaagtacattctgcaaaagca

SEQ ID NO: 21194 - DNA, 726 bp, Homo sapiens
ggaaaatgtaggctaccagtagaaaatgacattctctattaataagatctgaggtgcgacacacataattgtcccaatttttaagattgatggggagcatgaagcatttttttaatgtgttggcaggccccattaaatgcataaactgcataggactcatgtggtctgaatgtattttagggctttctgggaattgtcttgacagagaacctcagctggacaaagcagccttgatctgagtgagctaactgacacaatgaaactgtcaggcatgtttctgctcctctctctggctcttttctgctttttaacaggtgtcttcagtcagggaggacaggttgactgtggtgagttccaggacaccaaggtctactgcactcgggaatctaacccacactgtggctctgatggccagacatatggcaataaatgtgccttctgtaaggccatagtgaaaagtggtggaaagattagcctaaagcatcctggaaaatgctgagttaaagccaatgtttcttggtgacttgccagcttttgcagccttcttttctcacttctgcttatacttttgctggtggattcctttaattcataaagacatacctactctgcctgggtcttgaggagttcaatgtatgtctatttctcttgattcacttgtcaataaagtacattctgcaaaagcagtcaactttaaaaaacacattctggtctatttggactcat

SEQ ID NO: 21195 - DNA, 878 bp, Homo sapiens
  misc_feature (53)..(53): n is a, c, g, or t
  misc_feature (58)..(58): n is a, c, g, or t
ggggaggggtggcgacagcaaccaaacacaaaaaaaaaacccttgtgtcttantcagngagccttcagtcagggaggacaggttgactgtggtgagttccaggacaccaaggtctactgcactcgggaatctaacccacactgtggctctgatggccagacatatggcaataaatgtgccttctgtaaggccatagtgaaaagtggtggaaagattagcctaaagcatcctggaaaatgctgagttaaagccaatgtttcttggtgacttgccagcttttgcagccttcttttctcacttctgcttatacttttgctggtggattcctttaattcataaagacatacctactctgcctgggtcttgaggagttcaatgtatgtctatttctcttgattcacttgtcaataaagtacattctgcaaaagcaaaaaagaaaacaaaaaaaaaacgtaacctataaaaactacactatttatctaaagaggaaaaacagacaaacgccaacttgggccctcgaggccccccaccgggggaacttttgcggccgctcccctttaaggggggtaaatcaatgatccctacttcactaaattcgctgccctcggccgctcggtttgagatgagggggatcattttactcccaggcgtgtatacggttatacaccagttcttgggattttaccgtgaatgaaactttcggaccaatggccgccagaaggtcctggccccgataaagggccgcggtttgggggttttacacctacgcctcgcctcctaaacaatcttacgagatttgagcctaaagcgcaaaggggaaaacccgtccgtattcgaatttcccggcatgtccctttgaaattctctccccccttctg

SEQ ID NO: 21196 - DNA, 330 bp, Homo sapiens
  misc_feature (25)..(25): n is a, c, g, or t
tcatattagaaataattaaaagaanaaaaaaaaaccttcagggctttctgggaattgtcttgacagagaacctcagctggacaaagcagccttgatctgagtgagctaactgacacaatgaaactgtcaggcatgtttctgctcctctctctggctcttttctgctttttaacaggtgtcttcagtcagggaggacaggttgactgtggtgagttccaggacaccaaggtctactgcactcgggaatctaacccacactgtggctctgatggccagacatatggcaataaatgtgccttctgtaaggccatagtgtaagtattatattca

SEQ ID NO: 21197 - DNA, 553 bp, Homo sapiens
tacatctcccccctccccctaccaaatcccacaaaaaaagaaccctgggctttctgggaattgtcttgacagagaacctcagctggacaaagcagccttgatctgagtgagctaactgacacaatgaaactgtcaggcatgtttctgctcctctctctggctcttttctgctttttaacaggtgtcttcagtcagggaggacaggttgactgtggtgagttccaggacaccaaggtctactgcactcgggaatctaacccacactgtggctctgatggccagacatatggcaataaatgtgccttctgtaaggccatagtgaaaagtggtggaaagattagcctaaagcatcctggaaaatgctgagttaaagccaatgtttcttggtgacttgccagcttttgcagccttcttttctcacttctgcttatacttttgctggtggattcctttaattcataaagacatacctactctgcctgggtcttgaggagttcaatgtatgtctatttctcttgattcacttgtcaataaagtacattctgcaaaagca

SEQ ID NO: 21198 - DNA, 535 bp, Homo sapiens
acctatcccaactttttcttccccgttcaggctttctgggaattgtcttgacagagaacctcagctggacaaagcagccttgatctgagtgagctaactgacacaatgaaactgtcaggcatgtttctgctcctctctctggctcttttctgctttttaacaggtgtcttcagtcagggaggacaggttgactgtggtgagttccaggacaccaaggtctactgcactcgggaatctaacccacactgtggctctgatggccagacatatggcaataaatgtgccttctgtaaggccatagtgaaaagtggtggaaagattagcctaaagcatcctggaaaatgctgagttaaagccaatgtttcttggtgacttgccagcttttgcagccttcttttctcacttctgcttatacttttgctggtggattcctttaattcataaagacatacctactctgcctgggtcttgaggagttcaatgtatgtctatttctcttgattcacttgtcaataaagtacattctgcaaaagca

SEQ ID NO: 21199 - DNA, 1001 bp, Homo sapiens
tacatctcccccctccccctaccaaatcccacaaaaaaagaaccctgggctttctgggaattgtcttgacagagaacctcagctggacaaagcagccttgatctgagtgagctaactgacacaatgaaactgtcaggcatgtttctgctcctctctctggctcttttctgctttttaacaggtgtcttcagtcagggaggacaggttgactgtggtgagttccaggacaccaaggtctactgcactcgggaatctaacccacactgtggctctgatggccagacatatggcaataaatgtgccttctgtaaggccatagtgaaaagtggtggaaagattagcctaaagcatcctggaaaatgctgagttaaagccaatgtttcttggtgacttgccagcttttgcagccttcttttctcacttctgcttatacttttgctggtggattcctttaattcataaagacatacctactctgcctgggtcttgaggagttcaatgtatgtctatttctcttgattcacttgtcaataaagtacattctgcaaaagcaaaaaagaaaacaaaaaaaaaacgtaacctataaaaactacactatttatctaaagaggaaaaacagacaaacgccaacttgggccctcgaggccccccaccgggggaacttttgcggccgctcccctttaaggggggtaaatcaatgatccctacttcactaaattcgctgccctcggccgctcggtttgagatgagggggatcattttactcccaggcgtgtatacggttatacaccagttcttgggattttaccgtgaatgaaactttcggaccaatggccgccagaaggtcctggccccgataaagggccgcggtttgggggttttacacctacgcctcgcctcctaaacaatcttacgagatttgagcctaaagcgcaaaggggaaaacccgtccgtattcgaatttcccggcatgtccctttgaaattctctccccccttctg

SEQ ID NO: 21200 - DNA, 473 bp, Homo sapiens
aagacaggtaattttgagaatatcttaggccccccttctatcaaagagagggatcgaatttaaaatttatctggaatgccaactctgattaactccctggagagagtccctggaggactggttgagaagaaccctgaggatgcatcagtgttcatcaggaaagggcgccaacacccagcgtgcccactcatgagcagggaggagatgatgcatgggaatccacaactctatctcaagtttcccagacacacactaaagctctgcagaagattttggtgcccctgagctacttttacacagcaaagaagacttctgatgtgattcctggtggcagtgcgtagtatgcgatgatttccatcagagtggctgggtttgtcaaagctttattagagattcctatgatttgaagaaaaagccagggtcctattttggcaacttttctgatataagtaataaaaacaaaatgccatgaa

SEQ ID NO: 21201 - DNA, 323 bp, Homo sapiens
taaatacctatgttaatgtttattattgtacaattataaaatagaaatataatgtatagttctgcacttaatagaaaaaaaaacgaaaaaagcacttagattactaaaagacaagcagggagaaaaaattaggacaagtttcaacttttgtactttctagtacaaaataagatagaaaagaatccaaatgtatgtaaaacaacaaaatataaatagacaaactgcttgtcttaatagcaaaatttatcagactatatgaaaaatatagtccagctacatttgatttgtaagataaatgtaaaacataagaaaacagaatattg

SEQ ID NO: 21202 - DNA, 123 bp, Homo sapiens
acgcagttcagggaagaggtgggctctggagcccagcagcctgggctcatgtcctggcttagctactaattttaacaagtgaagtgctctatgctccagcttctcacctgttaaaaaaaaaaa

SEQ ID NO: 21203 - DNA, 842 bp, Homo sapiens
gggatataattgggaattagagtaataaaataaatattttaagtacttactacatattactcattaacacaaaagtaactttacgtataaaatgcatgacaagactccattataaagaagtgtctgaaagctatagggcagaaaggtatagaacacagtatagactagaaggagataaagacaatcagaagattttattcattcatttattcaacaaaaatttacagagtacctccaattatcagcagctgtgctgaagattaggtatattacctacacagttacaaattttgctttcatgtagtctgcaggaagagagacattaatcaaagaatggcactattgacacttgtgcaggaaagggttacgtcaacaggcctgggctgctcaaaccttgcgtattcccagagtctcaagactggtcttggcctggctcctgggaagattacttctgagcccttggctgagataggagtttatgccaacagtgtgatttatggcaaacacctgtttttgtatgcctgaggctttggatcatgctgtaccaatttgatctgaggcctgaagactggtagctaaggtgctgcatgcctacatgactgacctccagtaaaaaccctggacacatgcctcaagtgagtttcgttggttggcaacactttacatatgttgtcacacgttgttgctgagaaaattaagtgtactccatgtaatggcactgggagaggacaactggaagctggtgcttaatttctcctctactccacgctatccaccttttcacttcgctgagttttttctgtatcctttcaatgtaataaactttaaccatgagtataaca

SEQ ID NO: 21204 - DNA, 430 bp, Homo sapiens
tcaatttggacttgttcacaattgaacgttaacatagccttatagattagcctgttttcattggtccagagtattctccaaataaagcagggtctgtgcattttaagcaactcccctgaacaatttcatgggcattctcaaatttgagaactacctgaaaagctgtgttggagaaaagaacaaccaatgaatgtggcaggacagaatattgaacattaacttcccttttcctcttctcccatctgttctcttccattatccctacccgtccgctcagtctcgttattcaggcaacagttattttgccattatttcctcaagaaaggaacaaaagtaaacacaattgctttctgattttttttttttttttgcattttaaaatggactttgaaaccataagcaaagaggtgtttaagagtctttccaaagc

SEQ ID NO: 21205 - DNA, 531 bp, Homo sapiens
ttgatctccttctccagaaactcagagagactgtttttagaaccctcatctcccaatataggggtgggagtggtcagagagttataaatatcctgtcttccaaggcatggcttaccacaagtctccagtttgaatagttttagtacaaatctaatagctttgtttcaaacctttcctgaaacatgcttgggaacttagaggtgcggttcataagccaagttttgttgagccaaataatctaaatgattctgggcaaggtaatcaaattcttaacaggcagagaggctccaggacaaataagggtatctatccaatatttggggctttactgggtactaatgtctgtctgtcacctgcatttatcctccaagtactcctttgttctagagaagtgaatcccggtgatttttagcagttcccccaaagagaagatgttaggtattaaaaaaaaaaaagtaacatagacaataattacttttcattccttgtattcccagcatgtataaacaaccttctcccattcatatgatg

SEQ ID NO: 21206 - DNA, 154 bp, Homo sapiens
ttcagttcaggcaccacttcctccaggtaaattagatgcccttttactgtcatctcattctacctatgtttctttttttaaatctatcatctcctttatcatcctggaatggcctgtctgcccctcttgacaatatagttcctaaaagaaaaaa

SEQ ID NO: 21207 - DNA, 907 bp, Homo sapiens
tatctctgaagagcacactgctagcaacctgattgtaaatgaccagaaggacttatatccaacctatgtgacttaaacatacacttaagtactctaaaccactatttaaaaaatacttctagagagattctgaaatcttaatttggttgcactttctggtaatatattttttgaaaactattttgatatttctttcatataacattattggatctgtatcactaagttaattgtctaaaaggtaactgatttcatcaaaccttccagtattaataatttttaagccattttgaaactgaggcctaaaatactgaaatgcttatgtcgttgtacttactcctttctgaaatgatcagatttttaaaaaatggatttctcatataaataatattatcaaaaaaggatttctcatataaataatattatcaaaaaagctgattttaaaagtttctcccaaagtcttattctagtaattatagagacctaggtaatgagtggcagatatatctgcctttcagatatgccgtaatgtgaaaaataacacagtcatgtgatattctttattaactaaaactgtgttgtttttattttggagtagttctcataattcattggtagggaactatccagtatttatattcctatgtatgtatatcagattaattttgaggcttggtattcctaaaagatttggatgtgtgtatttctttaacttgacgtaaacatgtatcacaaacatatcttttaattccaattaaaggggtgctttggcacatgctgaaatctgggatttttttttttgactttgataaatttatcaaaaagattggaaccaaatgttaattagggtaagttgtctttgaaagtaaagtgaactgttttatttaatggaattgtgtgttttttg

SEQ ID NO: 21208 - DNA, 471 bp, Homo sapiens
cacctaaccttgacaatcttcctgtctgcccctcccctcctctgtggtctttggcaggctccgctcttgaggcgatgcaattctgctaactcttttctttattcagaatattgcaaaatatgtatttcttctgtggtctgcaaggaaatttaccttcactgagttaaaaataatccttaggctgggcacggtgactcatgtctataatcccagcactttgggaggccaaggtgggtggatcacttgaggtcaggagttcaagaccagcctggtcaacatagtgaaaccctttctttactgaaaatacaaaaaaattagccgggtgtggtggtacatgcctgtagtctcagctacttgggaggctgaggtgggagaatcgcttgacctgggagggggaggttgcagtgagcagagatggcgccactgcactccagcctgagtgacagagctagactctgtctcaaaaaaaaa

SEQ ID NO: 21209 - DNA, 341 bp, Homo sapiens
gtctccaaatcagatcatttttacttaagttcactgatttagctcatgtgaatttttcattcatctgttgtacttttcagctccagaatttccatttagttctctttgtactttagatttttctgttgagagcctatatatgttcagttgctattagtatatttttattgaattatttcagcatatttagagtaactgctttgaagtcttaggctgctaaattcagtatctggacccattcagaatcagttttagttggctgccttctttcccaagttatgtgtcacactttcctgtttttttatatgtcttactttcttattaaaagctagacattttta

SEQ ID NO: 21210 - DNA, 441 bp, Homo sapiens
aagtagaaatagatcagggatttcctagagctgggatgggggaagggatggagaatgacttgtaatgaatatgggttttttgggatgataacaacattataaaattacaatagtgatgtgatggttgcataactctgagtatgctacaaaccattgaattatacattttaaatgggatacttttatgatatgcaaattatatctcaataatgctgttataaaaactaattctttaatatgagtgacctggagataaccaacttcttgtggatcctggtggtggtgggagaaatattggaagctattgcttctaggtcatttggtgaaccaactaatttgtaccatggttgtgtatgagatgtgtgagaaatagagactgaatagtcttaccatggaatatatagaaagtagttcattatttactatatttaattcaaccac

SEQ ID NO: 21211 - DNA, 343 bp, Homo sapiens
tttgatatagtgtcttgctgtattgcccattctggaatcttgaaagcaatgatacaaatgtgaagtattcatttcctttatattgcttattctgcagatcaaacttatgcaaatagctgagtaaattttgtgtatcaagtcaaattttacagaaaatacagttttcatagccagaactcacaaggtaagaaaaccagaaccctcattgttacctagagaattatggagaaacctaccacatatctctttgaaaaaggtttcagtgtttgacaatgtacaatgtaaaaaatagccgtcgaagagttcaaaatagctagatacacctggtagtggtttctacatg

SEQ ID NO: 21212 - DNA, 388 bp, Homo sapiens
tagctgattatttaaggagtaaaacaatgtctttgtgtatactttattcgaaataatagatgaagggaacatcgctgcctggataaaatgaggaatgctaattctagtatttctagaggatttgtgtttgaattgactattattataatgattagagtttaaaggaatcttaaagatgatcagattcacccccttcctttcatctctcttgttgccctgagagattagctacttgtctgttacggtgctggtccattaggactgtagtccagatctcggtcactaggccagctgcctgtctgctgtgtgatgctgatgcatttcagccttttttcttttttaaaaaccctaattggaagcattttataagaggttttaatatttagtc

SEQ ID NO: 21213 - DNA, 422 bp, Homo sapiens
gacactttgtttctttattattttatttaattcttaaatttaatcctcacaatttatttagtcttcacaattagcctacaaaggaggcgtgattacacacattttacaaacaaaatttattcaaaggaacacagcaggccaggcgcggtggctcatgcctgtaatcccagcactttgggaggctgaggcgggcagatcacaaggtcaggagttcgagaccaacctggccaacatggtgaaaccctgtctctactaaaaatacagaaattagccgggcgtggtggtgcgcacctgtaatcgcagctacttgggaggccaaggcaggagaatcaattgaactcaggaggcggaggttgcagtgagctgattgtgccattgcactccatcctgggtgacagagcgagactgtctcaaaaaaaaaa

SEQ ID NO: 21214 - DNA, 452 bp, Homo sapiens
ggtgtcggcaggatacagtggagatgagggggaagttagtgaattggtggggctggagctcagagccagaccatcacaggagatggaggcctgcgagtcttcaggatctgtcactgaccaaagtcttgctcacggatgagcctatcatctgtggaagaaagtgtggaatgagatgagaacaggcctgggtggaggccagggaatcagcagagacagccaagaaggccagaggctaggaggcaaaccccacagtgtgcccctcctccccaggagccaagaccagagatggtttcaagagagggggccaggcacaatggctcccgcctgtgatcacagcactttaggaggctgaggctaaaggatggcttgaaaccaggagtttaagaccagcctagttaacaaagtgagatcccatctctacaaaacaaaaaatgaactgggtgtagtggtgc

SEQ ID NO: 21215 - DNA, 261 bp, Homo sapiens
ataacaaataagaagattaaatcagtaacaaaaagtctctcaaaaaagaaaagtccaagaccagatggattcactaatgaattctagcaaacttttaaataactaacaccattttttctcaaactacactgtgctcgccatgtatgtgtaccaaaactattgaggattagaattctccctcattcattctgtgagctagcgttacctgatataacgagacaggcacaacaaacaggaactgatggccaattgctgatgaag

SEQ ID NO: 21216 - DNA, 245 bp, Homo sapiens
ggcaggcgcctgtaatcccagctgcttgagaggccaaggtacaagaatcgcctgaacctaggaggtggaggttgcagtgagccaagatagcgccactgcattccagcctgggtaacagagcgagactcttgtctccaaaaaaaaaaatagacagctgtaccctgtgaatgacctgtgcatttgtgcttcttccttgcctgagtttttccctccttctgaaacactgtttcctctcttcctgatga

SEQ ID NO: 21217 - DNA, 441 bp, Homo sapiens
tatctcttaaatgtgagatgggaatgaagaataacctgggtctataaagctaattagtttgtggaagaaaataggaggtaatgggggccaggggagtattgataaaatactgttattttgccctttcaattgatcttgtgagtttttttttttaaagaaaatcttcataagcattcaaataaatttgaatattatgccatgaaatggaaaggatgtgaatgacgggagttcgtaacgccattctttttattcaccacaggaagtttctatcctgcagcccacttcagaatgtaaaggacattaagtaaatgtcagaattggtgccccatgtcccttttttggagatagacacctatgggagacaatcactaactgatttcaggattagataaatagataaataaaaacagcaacattgagatcccatctctactttttaaa

SEQ ID NO: 21218 - DNA, 521 bp, Homo sapiens
tcagctggacacaactgagcaaccctaactgtggccactatggaataaatttgccctgctgaaccatgctagaattattgattaccaaaatgatgagatacaataaattgcttattgtgctaagttttggagtagtttactaagtaacaatagataactggaactaaatttggtatctgaaagtggactttcactataacaaaaactgaaaacaaatggcaatgactttgtacctggttgccacagaagttagaaaggcctcgagaaaaatgttagtgaatactggaaggacatcgaggagactgctggagagactgaaggacagtaaagaaaatactatggggggtggctgaagaaatgacctgtgttatgtaatggcagaaagttttcgtctttgataatgtgggaaaatagaaaaggtgcccaatgaatgggaggatctggctaaggagattttcagcagaatttcaaaactacaaagaggtttcttttagccacattattatcagatattgattaaa

SEQ ID NO: 21219 - DNA, 420 bp, Homo sapiens
gcggccgcctactactactaaattcgcggccgcgtcgaggtggccggcacgggcattgggaaacagcctcctcctttcccaaccttgcttcttaggggcccccgtgtcccgtctgctctcagcctcctcctcctgcaggataaagtcatccccaaggctccagctactctaaattatgtctccttataagttattgctgctccaggagattgtccttcatcgtccaggggcctggctcccacgtggttgcagatacctcagacctggtgctctaggctgtgctgagcccactctcccgagggcgcatccaagcgggggccacttgagaagtgaataaatggggcggtttcggaagcgtcagtgtttccatgttatggatctctctgcgtttgaataaagactatctctgttgctcacaaa

SEQ ID NO: 21220 - DNA, 542 bp, Homo sapiens
gaaagggtggccgagcgcgggcggaggactgatagcggtggccggcacgggcattgggaaacagcctcctcctttcccaaccttgcttcttaggggcccccgtgtcccgtctgctctcagcctcctcctcctgcaggataaagtcatccccaaggctccagctactctaaattatgtctccttataagttattgctgctccaggagattgtccttcatcgtccaggggcctggctcccacgtggttgcagatacctcagacctggtgctctaggctgtgctgagcccactctcccgagggcgcatccaagcgggggccacttgagaagtgaataaatggggcggtttcggaagcgtcagtgtttccatgttatggatctctctgcgtttgaataaagactatctctgttgctcacaaacgaattttatgtttgcttgttaccacagggtttattctgattttgacacagctccgttatagataataactcgttgtgcctaatttggtccgagcttttttttagcccgtgcgcccgccctctt

SEQ ID NO: 21221 - DNA, 5019 bp, Homo sapiens
  misc_feature (1190)..(1190): n is a, c, g, or t
  misc_feature (1281)..(1281): n is a, c, g, or t
  misc_feature (1680)..(1680): n is a, c, g, or t
  misc_feature (2007)..(2007): n is a, c, g, or t
  misc_feature (2070)..(2070): n is a, c, g, or t
  misc_feature (2089)..(2089): n is a, c, g, or t
gggagggataggacagacagacaaagaaaggggtgcggcagcactgccaggggaagagggtgatccgacccggggaaggtcgctgggcagggcgagttgggaaagcggcagcccccgccgcccccgcagccccttctcctcctttctcccacgtcctatctgcctctcgctggaggccaggccgtgcagcatcgaagacaggaggaactggagcctcattggccggcccggggcgccggcctcgggcttaaataggagctccgggctctggctgggacccgaccgctgccggccgcgctcccgctgctcctgccgggtgatggaaaaccccagcccggccgccgccctgggcaaggccctctgcgctctcctcctggccactctcggcgccgccggccagcctcttgggggagagtccatctgttccgccagagccccggccaaatacagcatcaccttcacgggcaagtggagccagacggccttccccaagcagtaccccctgttccgcccccctgcgcagtggtcttcgctgctgggggccgcgcatagctccgactacagcatgtggaggaagaaccagtacgtcagtaacgggctgcgcgactttgcggagcgcggcgaggcctgggcgctgatgaaggagatcgaggcggcgggggaggcgctgcagagcgtgcacgaggtgttttcggcgcccgccgtccccagcggcaccgggcagacgtcggcggagctggaggtgcagcgcaggcactcgctggtctcgtttgtggtgcgcatcgtgcccagccccgactggttcgtgggcgtggacagcctggacctgtgcgacggggaccgttggcgggaacaggcggcgctggacctgtacccctacgacgccgggacggacagcggcttcaccttctcctcccccaacttcgccaccatcccgcaggacacggtgaccgaggtgagtgggcaccccgcgtgcgcaagggccgctatggcccccgcggtggggacggggctggggcctggctgcaccctcgcctcccagcccaggacagccgcttgcggcttttgtgtggaagaggctctgcttctagcgccagcagtgagcaagggggtgcagccctcccatactctcccaacccggggtcacagcaccgcagggaggacagcgggacgcgcgtcccgaggaggcngccccttcctggcctcggtttccagcccgtgttccgtgggatggctgagaggagtacatgggaccctgtccccaacagtggtgcagagggnacgctggacgctgggcagtggccccagtgaggccatacgcataccagaaggtgggcttctcggaccccaggccaacctcttcttcctccccagataacgtcctcctctcccagccacccggccaactccttctactacccgcggctgaaggccctgcctcccatcgccagggtgacactggtgcggctgcgacagagccccagggccttcatccctcccgccccagtcctgcccagcagggacaatgagattgtagacagcgcctcaggtaacggacatacaggtcacatgggacacacagcagccccgaaccctgccacagggcgaccaccaaacccgaacctaaggctctgagaaattccaagtagggattcgtagtgcgtactgcaagatggtgcntagaagatttaggattctgttgattcacacactgaagatgtgactcttgcacattatttgcagttgaaagcatcttacagggccacagcccagaggaaagaatgaaaggaggctccagacagtacctgagagactctgtcctgtcagacacgcacccacaggtgacctgtgtgtcacagctgacaaggaagcttgctaggatggccctgtgtggccaccgggtgacagctatgctgcagggcacctgtgggggtctcgggacccagccaccacacagctcggggctctgctcacaggcgccttggcctggggcggggcaggtgctgntgagcattctcctagctcttccaggcacctgctggacagggcaggctgggaacgctggggccnagtggcagttccctccctnctcagctgggtggcagccactggcctcacggagcgcctgtggtctggagcgcattgctgggtcgtgggtcagggcctgttggctctgggtctctgggtctcacctgatatgggtgtgggacagtcagtgtaggccccagacaacagcggacttcagactttcccgaggaggaactggagcccaccaacctggccatgggccccgtcgtcctccaccctccatgttgctggctggagttgaggcaggtacggggccgccccacacctgccccccaagccatgtggtagggacagatgtcgtcttgaggagcagcagtaattacaagcttactgtcagccgtccctggaagcaagggccaggtcaggtcagacaggaggccgcctggctggcgggaaccactccccagacagagactgtgcccagtcctgggtccctcctcatttgggatgaactgggcctccctgtgccagcctcggtgctgcccctgcccagtgcaggcttgggctcctcactcatttgtccacgcggatgccccattccaagcagatgtccccgagccacttacccaacaggcagacgtgccagcactgtccgtggtgtgcaactggtctggcgggaagagcccctcgtgggcagagggtccagagaggtgcggtttgccccacatttgggggcactgggccacagtgggcaggggagcacgtggccagtgccctgggctaggagagggataaagtcagctgtggccaagcagaagcagtattgcaggggaagggtggggagagactgtgctatgagctctgagcaggaggcaggacatggagagaagggtgggagacggacagagccagctgtgccagccgagggaccagagtgggcagtggggacggagcacagaccaccgcccacaagggtctctcctgtgacttctggcttcccgagggcagaggctgggatgggcatgtggcggctggcacccaggaggctccgccaggtccacgccaagccagcctggctcagctctggcttcctgctcacacgctggatgcctgtccccaggcctcctgacagggctctgcagcattggagaggcttgtggtggggccctcgctgtagaacaggcactgccagtgctcactgactcctcattgcagccagggcaggggcgctcccaccacctcggtttcagtcaggaagctggggggtgctgggatctgccagcagctctgtgtgctccccaggtgggctgcccggggccctggctctctggcttctacaccagtgcccctgcgaagcctcagcgcccaaggtctttgcaagccctgttcctgcatctctggagagggctgctccaggtgtgggcctggccagggcttccagaccagtccaggcactgcacctgcacattgacccccttctccactctctctcatccttcagtagccacaaagctggcagcagggtactcgcagatttgtgaggagagccgagcccttgctgactgtcctcccgtgcacggcagagtgaggcggggctcctggcctccttaggggctgcccgctctgggccacacagccagagaaacactgtccatctggctggcttggcctgtggggtgcaaaagaggtgttttcactttgctttggaaacatggaaattaccaagtgacttaaccataacaccaaatgatgatttttaaatttatgaaaattatggaaccagatgggacacagggaaacgagaacgatactgaaaaggtctgagtcctgtggggggtccaggtcccgcaagacagctaatcaggtgcccctgtctgttattcgggtaaatgtagcagctgggtccaggctcgggcagagcagctttctacagcaggggtgtccgccctctcccggggttcccacggggttcccaggggcctcttactctgccacgatgtgggagttccaccaccacagggacttgagcggcagctccggctcttacgtagaaacgcgcaactccagtccctaggttgtgtccgaggttgctatggtgccatcccatcttgccgctcactctgcgactgtgcggagaaacgcaagtgcccccgaagggtgggcgtggcctctgatgaatgcacacgttggtgggaggtggcttccgtttgtacgaagcgcctcttcacgcgagcgttcacctcggtctcccctttgcttggtccagttccagaaacgccgctggactgcgaggtctccctgtggtcgtcctggggactgtgcggaggccactgtgggaggctcgggaccaagagcaggactcgctacgtccgggtccagcccgccaacaacgggagcccctgccccgagctcgaagaagaggctgagtgcgtccctgataactgcgtctaagaccagagccccgcagcccctggggccccccggagccatggggtgtcgggggctcctgtgcaggctcatgctgcaggcggccgagggcacagggggtttcgcgctgctcctgaccgcggtgaggccgcgccgaccatctctgcactgaagggccctctggtggccggcacgggcattgggaaacagcctcctcctttcccaaccttgcttcttaggggcccccgtgtcccgtctgctctcagcctcctcctcctgcaggataaagtcatccccaaggctccagctactctaaattatgtctccttataagttattgctgctccaggagattgtccttcatcgtccaggggcctggctcccacgtggttgcagatacctcagacctggtgctctaggctgtgctgagcccactctcccgagggcgcatccaagcgggggccacttgagaagtgaataaatggggcggtttcggaagcgtcagtgtttccatgttatggatctctctgcgtttgaataaagactatctctgttgctcacaaa

SEQ ID NO: 21222 - DNA, 1971 bp, Homo sapiens
gggagggataggacagacagacaaagaaaggggtgcggcagcactgccaggggaagagggtgatccgacccggggaaggtcgctgggcagggcgagttgggaaagcggcagcccccgccgcccccgcagccccttctcctcctttctcccacgtcctatctgcctctcgctggaggccaggccgtgcagcatcgaagacaggaggaactggagcctcattggccggcccggggcgccggcctcgggcttaaataggagctccgggctctggctgggacccgaccgctgccggccgcgctcccgctgctcctgccgggtgatggaaaaccccagcccggccgccgccctgggcaaggccctctgcgctctcctcctggccactctcggcgccgccggccagcctcttgggggagagtccatctgttccgccagagccccggccaaatacagcatcaccttcacgggcaagtggagccagacggccttccccaagcagtaccccctgttccgcccccctgcgcagtggtcttcgctgctgggggccgcgcatagctccgactacagcatgtggaggaagaaccagtacgtcagtaacgggctgcgcgactttgcggagcgcggcgaggcctgggcgctgatgaaggagatcgaggcggcgggggaggcgctgcagagcgtgcacgaggtgttttcggcgcccgccgtccccagcggcaccgggcagacgtcggcggagctggaggtgcagcgcaggcactcgctggtctcgtttgtggtgcgcatcgtgcccagccccgactggttcgtgggcgtggacagcctggacctgtgcgacggggaccgttggcgggaacaggcggcgctggacctgtacccctacgacgccgggacggacagcggcttcaccttctcctcccccaacttcgccaccatcccgcaggacacggtgaccgagataacgtcctcctctcccagccacccggccaactccttctactacccgcggctgaaggccctgcctcccatcgccagggtgacactggtgcggctgcgacagagccccagggccttcatccctcccgccccagtcctgcccagcagggacaatgagattgtagacagcgcctcagttccagaaacgccgctggactgcgaggtctccctgtggtcgtcctggggactgtgcggaggccactgtgggaggctcgggaccaagagcaggactcgctacgtccgggtccagcccgccaacaacgggagcccctgccccgagctcgaagaagaggctgagtgcgtccctgataactgcgtctaagaccagagccccgcagcccctggggccccccggagccatggggtgtcgggggctcctgtgcaggctcatgctgcaggcggccgagggcacagggggtttcgcgctgctcctgaccgcggtgaggccgcgccgaccatctctgcactgaagggccctctggtggccggcacgggcattgggaaacagcctcctcctttcccaaccttgcttcttaggggcccccgtgtcccgtctgctctcagcctcctcctcctgcaggataaagtcatccccaaggctccagctactctaaattatgtctccttataagttattgctgctccaggagattgtccttcatcgtccaggggcctggctcccacgtggttgcagatacctcagacctggtgctctaggctgtgctgagcccactctcccgagggcgcatccaagcgggggccacttgagaagtgaataaatggggcggtttcggaagcgtcagtgtttccatgttatggatctctctgcgtttgaataaagactatctctgttgctcacaaaaaaaaaaatactgaacttttaaaataaagtactaatttagatgtaatgtttaaagtatgtaaaaaaaaaacttcctcgtgccaaatttgggacgagcctttgttgaagcccgtgca

SEQ ID NO: 21223 - DNA, 4310 bp, Homo sapiens
  misc_feature (1261)..(1261): n is a, c, g, or t
  misc_feature (1588)..(1588): n is a, c, g, or t
  misc_feature (1651)..(1651): n is a, c, g, or t
  misc_feature (1670)..(1670): n is a, c, g, or t
gggagggataggacagacagacaaagaaaggggtgcggcagcactgccaggggaagagggtgatccgacccggggaaggtcgctgggcagggcgagttgggaaagcggcagcccccgccgcccccgcagccccttctcctcctttctcccacgtcctatctgcctctcgctggaggccaggccgtgcagcatcgaagacaggaggaactggagcctcattggccggcccggggcgccggcctcgggcttaaataggagctccgggctctggctgggacccgaccgctgccggccgcgctcccgctgctcctgccgggtgatggaaaaccccagcccggccgccgccctgggcaaggccctctgcgctctcctcctggccactctcggcgccgccggccagcctcttgggggagagtccatctgttccgccagagccccggccaaatacagcatcaccttcacgggcaagtggagccagacggccttccccaagcagtaccccctgttccgcccccctgcgcagtggtcttcgctgctgggggccgcgcatagctccgactacagcatgtggaggaagaaccagtacgtcagtaacgggctgcgcgactttgcggagcgcggcgaggcctgggcgctgatgaaggagatcgaggcggcgggggaggcgctgcagagcgtgcacgaggtgttttcggcgcccgccgtccccagcggcaccgggcagacgtcggcggagctggaggtgcagcgcaggcactcgctggtctcgtttgtggtgcgcatcgtgcccagccccgactggttcgtgggcgtggacagcctggacctgtgcgacggggaccgttggcgggaacaggcggcgctggacctgtacccctacgacgccgggacggacagcggcttcaccttctcctcccccaacttcgccaccatcccgcaggacacggtgaccgagataacgtcctcctctcccagccacccggccaactccttctactacccgcggctgaaggccctgcctcccatcgccagggtgacactggtgcggctgcgacagagccccagggccttcatccctcccgccccagtcctgcccagcagggacaatgagattgtagacagcgcctcaggtaacggacatacaggtcacatgggacacacagcagccccgaaccctgccacagggcgaccaccaaacccgaacctaaggctctgagaaattccaagtagggattcgtagtgcgtactgcaagatggtgcntagaagatttaggattctgttgattcacacactgaagatgtgactcttgcacattatttgcagttgaaagcatcttacagggccacagcccagaggaaagaatgaaaggaggctccagacagtacctgagagactctgtcctgtcagacacgcacccacaggtgacctgtgtgtcacagctgacaaggaagcttgctaggatggccctgtgtggccaccgggtgacagctatgctgcagggcacctgtgggggtctcgggacccagccaccacacagctcggggctctgctcacaggcgccttggcctggggcggggcaggtgctgntgagcattctcctagctcttccaggcacctgctggacagggcaggctgggaacgctggggccnagtggcagttccctccctnctcagctgggtggcagccactggcctcacggagcgcctgtggtctggagcgcattgctgggtcgtgggtcagggcctgttggctctgggtctctgggtctcacctgatatgggtgtgggacagtcagtgtaggccccagacaacagcggacttcagactttcccgaggaggaactggagcccaccaacctggccatgggccccgtcgtcctccaccctccatgttgctggctggagttgaggcaggtacggggccgccccacacctgccccccaagccatgtggtagggacagatgtcgtcttgaggagcagcagtaattacaagcttactgtcagccgtccctggaagcaagggccaggtcaggtcagacaggaggccgcctggctggcgggaaccactccccagacagagactgtgcccagtcctgggtccctcctcatttgggatgaactgggcctccctgtgccagcctcggtgctgcccctgcccagtgcaggcttgggctcctcactcatttgtccacgcggatgccccattccaagcagatgtccccgagccacttacccaacaggcagacgtgccagcactgtccgtggtgtgcaactggtctggcgggaagagcccctcgtgggcagagggtccagagaggtgcggtttgccccacatttgggggcactgggccacagtgggcaggggagcacgtggccagtgccctgggctaggagagggataaagtcagctgtggccaagcagaagcagtattgcaggggaagggtggggagagactgtgctatgagctctgagcaggaggcaggacatggagagaagggtgggagacggacagagccagctgtgccagccgagggaccagagtgggcagtggggacggagcacagaccaccgcccacaagggtctctcctgtgacttctggcttcccgagggcagaggctgggatgggcatgtggcggctggcacccaggaggctccgccaggtccacgccaagccagcctggctcagctctggcttcctgctcacacgctggatgcctgtccccaggcctcctgacagggctctgcagcattggagaggcttgtggtggggccctcgctgtagaacaggcactgccagtgctcactgactcctcattgcagccagggcaggggcgctcccaccacctcggtttcagtcaggaagctggggggtgctgggatctgccagcagctctgtgtgctccccaggtgggctgcccggggccctggctctctggcttctacaccagtgcccctgcgaagcctcagcgcccaaggtctttgcaagccctgttcctgcatctctggagagggctgctccaggtgtgggcctggccagggcttccagaccagtccaggcactgcacctgcacattgacccccttctccactctctctcatccttcagtagccacaaagctggcagcagggtactcgcagatttgtgaggagagccgagcccttgctgactgtcctcccgtgcacggcagagtgaggcggggctcctggcctccttaggggctgcccgctctgggccacacagccagagaaacactgtccatctggctggcttggcctgtggggtgcaaaagaggtgttttcactttgctttggaaacatggaaattaccaagtgacttaaccataacaccaaatgatgatttttaaatttatgaaaattatggaaccagatgggacacagggaaacgagaacgatactgaaaaggtctgagtcctgtggggggtccaggtcccgcaagacagctaatcaggtgcccctgtctgttattcgggtaaatgtagcagctgggtccaggctcgggcagagcagctttctacagcaggggtgtccgccctctcccggggttcccacggggttcccaggggcctcttactctgccacgatgtgggagttccaccaccacagggacttgagcggcagctccggctcttacgtagaaacgcgcaactccagtccctaggttgtgtccgaggttgctatggtgccatcccatcttgccgctcactctgcgactgtgcggagaaacgcaagtgcccccgaagggtgggcgtggcctctgatgaatgcacacgttggtgggaggtggcttccgtttgtacgaagcgcctcttcacgcgagcgttcacctcggtctcccctttgcttggtccagttccagaaacgccgctggactgcgaggtctccctgtggtcgtcctggggactgtgcggaggccactgtgggaggctcgggaccaagagcaggactcgctacgtccgggtccagcccccgtgtcccgtctgctctcagcctcctcctcctgcaggataaagtcatccccaaggctccagctactctaaattatgtctccttataagttattgctgctccaggagattgtccttcatcgtccaggggcctggctcccacgtggttgcagatacctcagacctggtgctctaggctgtgctgagcccactctcccgagggcgcatccaagcgggggccacttgagaagtgaataaatggggcggtttcggaagcgtcagtgtttccatgttatggatctctctgcgtttgaataaagactatctctgttgctcacaaa

SEQ ID NO: 21224 - DNA, 1246 bp, Homo sapiens
  misc_feature (13)..(13): n is a, c, g, or t
atctcgtgaccgncgattatatctgaatatggaaccagatgggacacagggaaacgagaacgatactgaaaaggtctgagtcctgtggggggtccaggtcccgcaagacagctaatcaggtgcccctgtctgttattcgggtaaatgtagcagctgggtccaggctcgggcagagcagctttctacagcaggggtgtccgccctctcccggggttcccacggggttcccaggggcctcttactctgccacgatgtgggagttccaccaccacagggacttgagcggcagctccggctcttacgtagaaacgcgcaactccagtccctaggttgtgtccgaggttgctatggtgccatcccatcttgccgctcactctgcgactgtgcggagaaacgcaagtgcccccgaagggtgggcgtggcctctgatgaatgcacacgttggtgggaggtggcttccgtttgtacgaagcgcctcttcacgcgagcgttcacctcggtctcccctttgcttggtccagttccagaaacgccgctggactgcgaggtctccctgtggtcgtcctggggactgtgcggaggccactgtgggaggctcgggaccaagagcaggactcgctacgtccgggtccagcccgccaacaacgggagcccctgccccgagctcgaagaagaggctgagtgcgtccctgataactgcgtctaagaccagagccccgcagcccctggggccccccggagccatggggtgtcgggggctcctgtgcaggctcatgctgcaggcggccgagggcacagggggtttcgcgctgctcctgaccgcggtgaggccgcgccgaccatctctgcactgaagggccctctggtggccggcacgggcattgggaaacagcctcctcctttcccaaccttgcttcttaggggcccccgtgtcccgtctgctctcagcctcctcctcctgcaggataaagtcatccccaaggctccagctactctaaattatgtctccttataagttattgctgctccaggagattgtccttcatcgtccaggggcctggctcccacgtggttgcagatacctcagacctggtgctctaggctgtgctgagcccactctcccgagggcgcatccaagcgggggccacttgagaagtgaataaatggggcggtttcggaagcgtcagtgtttccatgttatggatctctctgcgtttgaataaagactatctctgttgctcacaaa

SEQ ID NO: 21225 - DNA, 1855 bp, Homo sapiens
gggagggataggacagacagacaaagaaaggggtgcggcagcactgccaggggaagagggtgatccgacccggggaaggtcgctgggcagggcgagttgggaaagcggcagcccccgccgcccccgcagccccttctcctcctttctcccacgtcctatctgcctctcgctggaggccaggccgtgcagcatcgaagacaggaggaactggagcctcattggccggcccggggcgccggcctcgggcttaaataggagctccgggctctggctgggacccgaccgctgccggccgcgctcccgctgctcctgccgggtgatggaaaaccccagcccggccgccgccctgggcaaggccctctgcgctctcctcctggccactctcggcgccgccggccagcctcttgggggagagtccatctgttccgccagagccccggccaaatacagcatcaccttcacgggcaagtggagccagacggccttccccaagcagtaccccctgttccgcccccctgcgcagtggtcttcgctgctgggggccgcgcatagctccgactacagcatgtggaggaagaaccagtacgtcagtaacgggctgcgcgactttgcggagcgcggcgaggcctgggcgctgatgaaggagatcgaggcggcgggggaggcgctgcagagcgtgcacgaggtgttttcggcgcccgccgtccccagcggcaccgggcagacgtcggcggagctggaggtgcagcgcaggcactcgctggtctcgtttgtggtgcgcatcgtgcccagccccgactggttcgtgggcgtggacagcctggacctgtgcgacggggaccgttggcgggaacaggcggcgctggacctgtacccctacgacgccgggacggacagcggcttcaccttctcctcccccaacttcgccaccatcccgcaggacacggtgaccgagataacgtcctcctctcccagccacccggccaactccttctactacccgcggctgaaggccctgcctcccatcgccagggtgacactggtgcggctgcgacagagccccagggccttcatccctcccgccccagtcctgcccagcagggacaatgagattgtagacagcgcctcagttccagaaacgccgctggactgcgaggtctccctgtggtcgtcctggggactgtgcggaggccactgtgggaggctcgggaccaagagcaggactcgctacgtccgggtccagcccgccaacaacgggagcccctgccccgagctcgaagaagaggctgagtgcgtccctgataactgcgtctaagaccagagccccgcagcccctggggccccccggagccatggggtgtcgggggctcctgtgcaggctcatgctgcaggcggccgagggcacagggggtttcgcgctgctcctgaccgcggtgaggccgcgccgaccatctctgcactgaagggccctctggtggccggcacgggcattgggaaacagcctcctcctttcccaaccttgcttcttaggggcccccgtgtcccgtctgctctcagcctcctcctcctgcaggataaagtcatccccaaggctccagctactctaaattatgtctccttataagttattgctgctccaggagattgtccttcatcgtccaggggcctggctcccacgtggttgcagatacctcagacctggtgctctaggctgtgctgagcccactctcccgagggcgcatccaagcgggggccacttgagaagtgaataaatggggcggtttcggaagcgtcagtgtttccatgttatggatctctctgcgtttgaataaagactatctctgttgctcacaaa

SEQ ID NO: 21226 - DNA, 5093 bp, Homo sapiens
  misc_feature (1264)..(1264): n is a, c, g, or t
  misc_feature (1355)..(1355): n is a, c, g, or t
  misc_feature (1754)..(1754): n is a, c, g, or t
  misc_feature (2081)..(2081): n is a, c, g, or t
  misc_feature (2144)..(2144): n is a, c, g, or t
  misc_feature (2163)..(2163): n is a, c, g, or t
cggctgctcccctctgtgctcccaggtgatggaaaaccccagcccggccgccgccctgggcaaggccctctgcgctctcctcctggccactctcggcgccgccggccagcctcttgggggagagtccatctgttccgccagagccccggccaaatacagcatcaccttcacgggcaagtggagccagacggccttccccaagcagtaccccctgttccgcccccctgcgcagtggtcttcgctgctgggtaagtacagccccctcctcgcctcctgctccaccaggagggctgcggcgccggagccccccgcacagctgcacggcggcgcttcccagtctggggcgtgctgacgtcgggagactctaacaccagaatgtttgccgagcgcctgcggtgtgcggttccggggatgcggtgggggcagggggcgctcacggggagggcgcaggtgggtcgcggcaggggcagccacagggtgtcacggtccgacgtgactgggggccatggttccctgcgggcggcggggagggatttcctggggcgccccctggaatccaagcccgaccgcagtgtctgaccatggtccgcggcgcggccgggtggtcctgcaggggccgcgcatagctccgactacagcatgtggaggaagaaccagtacgtcagtaacgggctgcgcgactttgcggagcgcggcgaggcctgggcgctgatgaaggagatcgaggcggcgggggaggcgctgcagagcgtgcacgaggtgttttcggcgcccgccgtccccagcggcaccgggcagacgtcggcggagctggaggtgcagcgcaggcactcgctggtctcgtttgtggtgcgcatcgtgcccagccccgactggttcgtgggcgtggacagcctggacctgtgcgacggggaccgttggcgggaacaggcggcgctggacctgtacccctacgacgccgggacggacagcggcttcaccttctcctcccccaacttcgccaccatcccgcaggacacggtgaccgaggtgagtgggcaccccgcgtgcgcaagggccgctatggcccccgcggtggggacggggctggggcctggctgcaccctcgcctcccagcccaggacagccgcttgcggcttttgtgtggaagaggctctgcttctagcgccagcagtgagcaagggggtgcagccctcccatactctcccaacccggggtcacagcaccgcagggaggacagcgggacgcgcgtcccgaggaggcngccccttcctggcctcggtttccagcccgtgttccgtgggatggctgagaggagtacatgggaccctgtccccaacagtggtgcagagggnacgctggacgctgggcagtggccccagtgaggccatacgcataccagaaggtgggcttctcggaccccaggccaacctcttcttcctccccagataacgtcctcctctcccagccacccggccaactccttctactacccgcggctgaaggccctgcctcccatcgccagggtgacactggtgcggctgcgacagagccccagggccttcatccctcccgccccagtcctgcccagcagggacaatgagattgtagacagcgcctcaggtaacggacatacaggtcacatgggacacacagcagccccgaaccctgccacagggcgaccaccaaacccgaacctaaggctctgagaaattccaagtagggattcgtagtgcgtactgcaagatggtgcntagaagatttaggattctgttgattcacacactgaagatgtgactcttgcacattatttgcagttgaaagcatcttacagggccacagcccagaggaaagaatgaaaggaggctccagacagtacctgagagactctgtcctgtcagacacgcacccacaggtgacctgtgtgtcacagctgacaaggaagcttgctaggatggccctgtgtggccaccgggtgacagctatgctgcagggcacctgtgggggtctcgggacccagccaccacacagctcggggctctgctcacaggcgccttggcctggggcggggcaggtgctgntgagcattctcctagctcttccaggcacctgctggacagggcaggctgggaacgctggggccnagtggcagttccctccctnctcagctgggtggcagccactggcctcacggagcgcctgtggtctggagcgcattgctgggtcgtgggtcagggcctgttggctctgggtctctgggtctcacctgatatgggtgtgggacagtcagtgtaggccccagacaacagcggacttcagactttcccgaggaggaactggagcccaccaacctggccatgggccccgtcgtcctccaccctccatgttgctggctggagttgaggcaggtacggggccgccccacacctgccccccaagccatgtggtagggacagatgtcgtcttgaggagcagcagtaattacaagcttactgtcagccgtccctggaagcaagggccaggtcaggtcagacaggaggccgcctggctggcgggaaccactccccagacagagactgtgcccagtcctgggtccctcctcatttgggatgaactgggcctccctgtgccagcctcggtgctgcccctgcccagtgcaggcttgggctcctcactcatttgtccacgcggatgccccattccaagcagatgtccccgagccacttacccaacaggcagacgtgccagcactgtccgtggtgtgcaactggtctggcgggaagagcccctcgtgggcagagggtccagagaggtgcggtttgccccacatttgggggcactgggccacagtgggcaggggagcacgtggccagtgccctgggctaggagagggataaagtcagctgtggccaagcagaagcagtattgcaggggaagggtggggagagactgtgctatgagctctgagcaggaggcaggacatggagagaagggtgggagacggacagagccagctgtgccagccgagggaccagagtgggcagtggggacggagcacagaccaccgcccacaagggtctctcctgtgacttctggcttcccgagggcagaggctgggatgggcatgtggcggctggcacccaggaggctccgccaggtccacgccaagccagcctggctcagctctggcttcctgctcacacgctggatgcctgtccccaggcctcctgacagggctctgcagcattggagaggcttgtggtggggccctcgctgtagaacaggcactgccagtgctcactgactcctcattgcagccagggcaggggcgctcccaccacctcggtttcagtcaggaagctggggggtgctgggatctgccagcagctctgtgtgctccccaggtgggctgcccggggccctggctctctggcttctacaccagtgcccctgcgaagcctcagcgcccaaggtctttgcaagccctgttcctgcatctctggagagggctgctccaggtgtgggcctggccagggcttccagaccagtccaggcactgcacctgcacattgacccccttctccactctctctcatccttcagtagccacaaagctggcagcagggtactcgcagatttgtgaggagagccgagcccttgctgactgtcctcccgtgcacggcagagtgaggcggggctcctggcctccttaggggctgcccgctctgggccacacagccagagaaacactgtccatctggctggcttggcctgtggggtgcaaaagaggtgttttcactttgctttggaaacatggaaattaccaagtgacttaaccataacaccaaatgatgatttttaaatttatgaaaattatggaaccagatgggacacagggaaacgagaacgatactgaaaaggtctgagtcctgtggggggtccaggtcccgcaagacagctaatcaggtgcccctgtctgttattcgggtaaatgtagcagctgggtccaggctcgggcagagcagctttctacagcaggggtgtccgccctctcccggggttcccacggggttcccaggggcctcttactctgccacgatgtgggagttccaccaccacagggacttgagcggcagctccggctcttacgtagaaacgcgcaactccagtccctaggttgtgtccgaggttgctatggtgccatcccatcttgccgctcactctgcgactgtgcggagaaacgcaagtgcccccgaagggtgggcgtggcctctgatgaatgcacacgttggtgggaggtggcttccgtttgtacgaagcgcctcttcacgcgagcgttcacctcggtctcccctttgcttggtccagttccagaaacgccgctggactgcgaggtctccctgtggtcgtcctggggactgtgcggaggccactgtgggaggctcgggaccaagagcaggactcgctacgtccgggtccagcccgccaacaacgggagcccctgccccgagctcgaagaagaggctgagtgcgtccctgataactgcgtctaagaccagagccccgcagcccctggggccccccggagccatggggtgtcgggggctcctgtgcaggctcatgctgcaggcggccgagggcacagggggtttcgcgctgctcctgaccgcggtgaggccgcgccgaccatctctgcactgaagggccctctggtggccggcacgggcattgggaaacagcctcctcctttcccaaccttgcttcttaggggcccccgtgtcccgtctgctctcagcctcctcctcctgcaggataaagtcatccccaaggctccagctactctaaattatgtctccttataagttattgctgctccaggagattgtccttcatcgtccaggggcctggctcccacgtggttgcagatacctcagacctggtgctctaggctgtgctgagcccactctcccgagggcgcatccaagcgggggccacttgagaagtgaataaatggggcggtttcggaagcgtcagtgtttccatgttatggatctctctgcgtttgaataaagactatctctgttgctcacaaa

SEQ ID NO: 21227 - DNA, 1766 bp, Homo sapiens
gggagggataggacagacagacaaagaaaggggtgcggcagcactgccaggggaagagggtgatccgacccggggaaggtcgctgggcagggcgagttgggaaagcggcagcccccgccgcccccgcagccccttctcctcctttctcccacgtcctatctgcctctcgctggaggccaggccgtgcagcatcgaagacaggaggaactggagcctcattggccggcccggggcgccggcctcgggcttaaataggagctccgggctctggctgggacccgaccgctgccggccgcgctcccgctgctcctgccgggtgatggaaaaccccagcccggccgccgccctgggcaaggccctctgcgctctcctcctggccactctcggcgccgccggccagcctcttgggggagagtccatctgttccgccagagccccggccaaatacagcatcaccttcacgggcaagtggagccagacggccttccccaagcagtaccccctgttccgcccccctgcgcagtggtcttcgctgctgggggccgcgcatagctccgactacagcatgtggaggaagaaccagtacgtcagtaacgggctgcgcgactttgcggagcgcggcgaggcctgggcgctgatgaaggagatcgaggcggcgggggaggcgctgcagagcgtgcacgaggtgttttcggcgcccgccgtccccagcggcaccgggcagacgtcggcggagctggaggtgcagcgcaggcactcgctggtctcgtttgtggtgcgcatcgtgcccagccccgactggttcgtgggcgtggacagcctggacctgtgcgacggggaccgttggcgggaacaggcggcgctggacctgtacccctacgacgccgggacggacagcggcttcaccttctcctcccccaacttcgccaccatcccgcaggacacggtgaccgagataacgtcctcctctcccagccacccggccaactccttctactacccgcggctgaaggccctgcctcccatcgccagggtgacactggtgcggctgcgacagagccccagggccttcatccctcccgccccagtcctgcccagcagggacaatgagattgtagacagcgcctcagttccagaaacgccgctggactgcgaggtctccctgtggtcgtcctggggactgtgcggaggccactgtgggaggctcgggaccaagagcaggactcgctacgtccgggtccagcccgccaacaacgggagcccctgccccgagctcgaagaagaggctgagtgcgtccctgataactgcgtctaagaccagagccccgcagcccctggggccccccggagccatggggtgtcgggggctcctgtgcaggctcatgctgcaggcggccgagggcacagggggtttcgcgctgctcctgaccgcggtgaggccgcgccgaccatctctgcactgaagggccctctggtggccggcacgggcattgggaaacagcgctccagctactctaaattatgtctccttataagttattgctgctccaggagattgtccttcatcgtccaggggcctggctcccacgtggttgcagatacctcagacctggtgctctaggctgtgctgagcccactctcccgagggcgcatccaagcgggggccacttgagaagtgaataaatggggcggtttcggaagcgtcagtgtttccatgttatggatctctctgcgtttgaataaagactatctctgttgctcacaaa

SEQ ID NO: 21228 - DNA, 1743 bp, Homo sapiens
aggatttaggtgtaggagttagttataaaataaacaaatggtaagaaagtacctgaattagacaatccagtgcctataactttgcattttttattagagatgcatttctcgtctgtgtgcctaaagggcaatgggttgaaattgctttaactaccacagcgaaatatttgacaaatccttcagcaatggcctatcattcaacatatattagcacagtgctaggtatttgcagtggtattttgttaccttaaaacggccaaatgcatttagttgaaatgtagttgatagtaagggttttatataactttatccaatctctaaagtttatggaagcattgactttcttctttgctgtcttttctgagtgatgaaaatgatgcattccttttttttccttgaaaactcagcaaatgtttgtaaccagatgttccttgtttcacatgtttactgtgtaacactacagcatatttaatattggtaaatactgtatttcagtcattatgcataagtacattcctgaggtatatttgccatcattttgggattcagttattttatcttctgtttgggtcagaaaaacttgaactatctgaggtggtatgcaggccattttctagaagattgttttttgaatctgtagtttatcaaggacttgttccccccctccctttgtttagaagaggaatcagaaaaggggggtggtgtgtagaaaaggcctttgatttgataggtgtaatttctaagattgaaattttaaaaatgcagatcgtaagatagtaacactcaaacttgataaaatcctttgaattgaaattagtatgaaatttttatggaaccaaatgccttcaggtcaccctggaaatagtctttgtatgtgaaagatcaacacaaacattggtcaggaaccctgacagccaatatatgaaggagcctgggatagtaactaggttacactaaagttattttcaactaagatagctagacgagtgtacaaaccaatagctcctattctggaaggttttctttttattaaaaaaaattcaaacaaggttaaaagtcaagcaagaagggaagagagaaactgggttctgagaaaaaaatgtgccagtataaaataaactcctaaatgcgtgcttgtcatcctctagtttttttttaagttgaatttcttttccactgtaacttaagatttgagattgaggtttgcggtccagaacataccctcagcagatacagtgactaactggaaagtgcagttgttcaaggtctgtcatgctcaatcacctaaagctataatttgtttgatatattaagcatgtagacctagtgcagcatgggagccactcaggaagtttatgcaattaataaactttcagcataatttactatgaagtatgcagaatttcaccctcttctccacacttaacatttagttgtatatgtgaactctcctttcttaattggggaatgtagcattatatagaatgttgttaaagttaattttaatcctttttgacattaacctttttttttttttggtaaaccaagtgatctgcctttcagcaactgtcttattttggttctttgaaactgtgatttttatttcatttgtacccaaccattgtaagtattttgttttgtttcctggaaattctgttttgaaacagaaaataaaggctgtgttaaatgagtatgttatcttattaaaatgctgccatagtcactgcaaaaaaatggctaaaa

SEQ ID NO: 21229 - DNA, 1688 bp, Homo sapiens
aggatttaggtgtaggagttagttataaaataaacaaatggtaagaaagtacctgaattagacaatccagtgcctataactttgcattttttattagagatgcatttctcgtctgtgtgcctaaagggcaatgggttgaaattgctttaactaccacagcgaaatatttgacaaatccttcagcaatggcctatcattcaacatatattagcacagtgctaggtatttgcagtggtattttgttaccttaaaacggccaaatgcatttagttgaaatgtagttgatagtaagggttttatataactttatccaatctctaaagtttatggaagcattgactttcttctttgctgtcttttctgagtgatgaaaatgatgcattccttttttttccttgaaaactcagcaaatgtttgtaaccagatgttccttgtttcacatgtttactgtgtaacactacagcatatttaatattggtaaatactgtatttcagtcattatgcataagtacattcctgaggtatatttgccatcattttgggattcagttattttatcttctgtttgggtcagaaaaacttgaactatctgaggtggtatgcaggccattttctagaagattgttttttgaatctgtagtttatcaaggacttgttccccccctccctttgtttagaagaggaatcagaaaaggggggtggtgtgtagaaaaggcctttgatttgataggtgtaatttctaagattgaaattttaaaaatgcagatcgtaagatagtaacactcaaacttgataaaatcctttgaattgaaattagtatgaaatttttatggaaccaaatgccttcaggtcaccctggaaatagtctttgtatgtgaaagatcaacacaaacattggtcaggaaccctgacagccaatatatgaaggagcctgggatagtaactaggttacactaaagttattttcaactaagatagctagacgagtgtacaaaccaatagctcctattctggaaggttttctttttattaaaaaaaattcaaacaaggttaaaagtcaagcaagaagggaagagagaaactgggttctgagaaaaaaatgtgccagtatatcttttccactgtaacttaagatttgagattgaggtttgcggtccagaacataccctcagcagatacagtgactaactggaaagtgcagttgttcaaggtctgtcatgctcaatcacctaaagctataatttgtttgatatattaagcatgtagacctagtgcagcatgggagccactcaggaagtttatgcaattaataaactttcagcataatttactatgaagtatgcagaatttcaccctcttctccacacttaacatttagttgtatatgtgaactctcctttcttaattggggaatgtagcattatatagaatgttgttaaagttaattttaatcctttttgacattaacctttttttttttttggtaaaccaagtgatctgcctttcagcaactgtcttattttggttctttgaaactgtgatttttatttcatttgtacccaaccattgtaagtattttgttttgtttcctggaaattctgttttgaaacagaaaataaaggctgtgttaaatgagtatgttatcttattaaaatgctgccatagtcactgcaaaaaaatggctaaaa

SEQ ID NO: 21230 - DNA, 195 bp, Homo sapiens
tatttgtcgcctacagtcttctgtaaaatctgactttatctttggtagatgatgtggcccggcggtgagagactgtagaagctgtaacttggcacaaagatctgtttaacgttggtccttaggaagcctggctcctctcacacctagttattcagaagggaccattagacattgctgtggctaaagacactggcc

SEQ ID NO: 21231 - DNA, 390 bp, Homo sapiens
gccattatcttccaccatctgcctctccatctatatcaactgccacctgcccatgccctagtgatgtcacttgcagttccacaactggcctgtgctgtttgatgctttgagatcttcaaactttctgccctgaactattcctcccctcctcttagttagcaagttcatgcacatccttcagaacctctcccaagcatgtcctgtgcatccttccctgacataaatatcctctcctctgtttgctaccaacacatagaactatttatcaaaattatcatagccactattttcagctctcatgtgccaggcatagtattgaacacttagcatgtttgctgggtacaaatattgaaccacagacataattaagggagaaatgttactgtttct

SEQ ID NO: 21232 - DNA, 317 bp, Homo sapiens
gtacttgtgataagccaaaaggaaggataaaacatacacatatgctgagtagggcactctaatcactcaagtttttgctattgccacctcagctggttcatgctggtaatatgcagaatttttttagaaatgttttattactattgaaaaatgaaactcctcggaataacattcagagtccaacattattcttctttaacaactgtattgcctacttcacagcataacatagttacagggagtaactgagtaaacaggtgtcaattgctgagaaaaatacctcattgtggtggtgaggtggagttaatctttacaaa

SEQ ID NO: 21233 - DNA, 100 bp, Homo sapiens
cttgccttcaaatctggactcagggggagatagattaagggcctgcctacatggtatgagttgagataggtgagagtaatgttttctcttatacttggat

SEQ ID NO: 21234 - DNA, 1089 bp, Homo sapiens
gaaacttcctgggcctcaagttccttgtatcagaaaggatggcattcagctgcgtacaacagaaaaccaaatcacagtggcttatccaagaaaagttcaatttttctcaaaactacagcgtcctgggctgatgcggcagccccaggacgacctcagcatctcactcctcctttctttactcggccccatcctcaggctgtgactttcatcctcaggtttgtcatcttttggtggtaagatggttgctctacctcaagctcacaaaaagaaatgggggaaagcaggaaagaagaaaatttgcttccccagagactttgaggctgcacttgcacatcttatggatccaaactgtgtcccatggctgcccctagatgcaaggggcctggggaaatgagcggattcatcaggtacactgcaaccgtacatgaaaggaaagttctgtcaataaagaagagcgaaatctacatttggtcaggaaacagcattgcctgcaatatgcctcatatgaaataaagcctttcttgcccccattctgctactcggtcattcttgcactcaacaaatagatgttgagtgcccactctctccaggccatgttctaggtgctgcggatgcaatcctgaatctatgaacacgattggcagaacaataaatattgattgtcttggccactcaccaaataaagtgctcctgggaaggctgagatctaatgcaaagcagcagcttgactttctcactccctggcaacaatgccaagcaagagaaagcgatgggtaaggcctggctcaagagtctcactgcaacctgcactgtagattctacctgctaatttcctcagccttctctggttttgggcttcagaatgccctaactctgggcccggcgcggtggctcacgcctgtaaacccatcactttgggaggccaaggcgggtggatcacaagatcaagaccatcctggccaacatggtgaaaccctgtctctactgaaaatacaaaaattagctgggcatggtggcttgtgcttgtaatccagctacttggaaggctgaggctggaggatcgcttgaacccagaaggcagaggttgca

SEQ ID NO: 21235 - DNA, 322 bp, Homo sapiens
cctgtggaaaaaggtgacttctgagtgagctgtaaggccaggatgatcaaagaaattttaggaggagattcacctcatttgataatacattgattgcttggctataattcacactcccttcattacctcaagtcttcagacaagactttacaaaaggtttggaggtaagaaaagcttagtataaggtttgaggttaggcatggtagctcatgcctataatcctagtgctttgggaagctgaggcaggaagattgcttgaagccaggagttcaagactggcctgggcaacatagcaagatcccatctctacaaaaaaaaattg

SEQ ID NO: 21236 - DNA, 1512 bp, Homo sapiens
actcacttggattattgcaataatttcctaactgggttccatgtttccagcttttctgtctgcagtctgttttgttttcaacatgtggccagagggatcctgttaacatctaagtgaaatatatcatttctctgcagtggctccctagctgctcagagtaaaatctaatgtttttacaatggcctgaaaggctctccataaccttatcccctcccacttacctccctgtctcctctcctccctccgacactcagcccctgtgtattttagctattgaaagaatatgtgggcacactgctaatttattgtctttgtggaggcttggtttgtgcattccttatttcaaacacttatgggtggactctggtaatgggcagtcatatttatgagtccccctccaagtgaggagatgtactaggtggaatgtgcgccctccctcacgtggtatactcttgatacagagccaagcaggtagtaccgttggtcctgctttgtaggtgagggaaagcagacccaaaatgaaggaagttgtccagggttacatgctgggaagtggtggaggtagaattcaaacccggagcgcaggcgttgtctgcacctcggagaggcaccgctcttcctgaaatgctcctccctggttatctatgaggctgaagtcctcacctctttcaggtctttgctgaattagaaccttctccataaggcaaggctgatgctgagcaccccactgaaaattttcctctctcccaagaccctcttctcagtccctctacttggctcatttcaggtgtctagcacgtcacgccctttaatacattttgcaagtatttctccacgagtgtgagaaagtggttttctttggtgggggttgatttttcatggcacataaagggcagcagggtttctttgggtcctgtctggaggcctgaaggtcacgctgggcttctggggagcgggtccccttcctgcagcctccctctccacttgcgtgtttctcactcctctctctccctgggaagtgttgcttgataaagatgcagcttttaattaatgtaactgttcaagattacagccggtcatcagctttctaaccagtgcctcacagctctgctggaagagccttgctccggtgatggttgatttgccattctctgtcccagcccagagaagctcccctcactgtcaacgtgccatctgtcaggtgcatgttataaagctgtcatcatgatcagctcattcacgcaccagctttagctttgaggaactgccggccatggcgttgaagacctgctgaagcctccagccagacatctgatgttcaggtctcagggggtccttgctgcttgtgtagcctgacaggtgtggccacggcaggcacaccatggtttggagtttggaaagaagagaccctgtgttattgtagagtgaccactggattgggcttctggaaatccaattctaatcagacttgggttatgcatttactatttcaataaaacatttatggatgga

SEQ ID NO: 21237 - DNA, 1590 bp, Homo sapiens
actcacttggattattgcaataatttcctaactgggttccatgtttccagcttttctgtctgcagtctgttttgttttcaacatgtggccagagggatcctgttaacatctaagtgaaatatatcatttctctgcagtggctccctagctgctcagagtaaaatctaatgtttttacaatggcctgaaaggctctccataaccttatcccctcccacttacctccctgtctcctctcctccctccgacactcagcccctgtgtattttagctattgaaagaatatgtgggcacactgctaatttattgtctttgtggaggcttggtttgtgcattccttatttcaaacacttatgggtggactctggtaatgggcagtcatatttatgagtccccctccaagtgaggagatgtactaggtggaatgtgcgccctccctcacgtggtatactcttgatacagagccaagcaggtagtaccgttggtcctgctttgtaggtgagggaaagcagacccaaaatgaaggaagttgtccagggttacatgctgggaagtggtggaggtagaattcaaacccggagcgcaggcgttgtctgcacctcggagaggcaccgctcttcctgaaatgctcctccctggttatctatgaggctgaagtcctcacctctttcaggtctttgctgaattagaaccttctccataaggcaaggctgatgctgagcaccccactgaaaattttcctctctcccaagaccctcttctcagtccctctacttggctcatttcaggtgtctagcacgtcacgccctttaatacattttgcaagtatttctccacgagtgtgagaaagtggttttctttggtgggggttgatttttcatggcacataaagggcagcagggtttctttgggtcctgtctggaggcctgaaggtcacgctgggcttctggggagcgggtccccttcctgcagcctccctctccacttgcgtgtttctcactcctctctctccctgggaagtgttgcttgataaagatgcagcttttaattaatgtaactgttcaagattacagccggtcatcagctttctaaccagtgcctcacagctctgctggaagagccttgctccggtgatggttgatttgccattctctgtcccagcccagagaagctcccctcactgtcaacgtgccatctgtcaggtgcatgttataaagctgtcatcatgatcagctcattcacgcaccagctttagctttgaggaactgccggccatggcgttgaagacctgctgaagcctccagccagacatctgatgttcaggtctcagggggtccttgctgcttgtgtagcctgacaggtgtggccacggcaggcacaccatggtttggagtttggaaagaagagaccctgtgttattgtagagtgaccactggattgggcttctggaaatccaattctaatcagacttgggttatgcatttactatttcaataaaacatttatggatggactctggtaatcaacagccatatttttgagtacccactgcaggtgaggaaataaatgtactaggtgcgatatacatcct

SEQ ID NO: 21238 - DNA, 365 bp, Homo sapiens
gtgttgtatacaattactactgctttattttttcagagtacaagcaatgtaaggctcacagaggaaactttggaacaattatatattgttttaacttcaggaataagttcatactacttttatttcctattacaatttttagcaaaattgtataaagttactgggaaggcaaattactgcatgtaagataaaaatatgtttctgagaggacaaaatatcttgaactgaaaagaatgcctctgtgtattttagtcagaaacagtattaataactacatgacacaaaaacatgtgaacactttggaaaaatatttagtatagattaaccatttctatgattgcaatgctaacatataggaactcaat

SEQ ID NO: 21239 - DNA, 770 bp, Homo sapiens
ggtgcgacaagaacaaaacaagatgttaatctgtcataggaaagtcttaaaaggcgccgggaccgttggtaaaactgatggcactcagttgaaagagttagctcttcagtggacgcaagcaaacaggtgactccagcactttgggaggccgaggtgggaagattacttgagcccaggagttcaagacctgcctgagcatagcgagaccctgtctctacaaaaaaatttaaaattacccaggtgtggtggcatgcacctgtagtcccagctactcaggaggctgaggtgggaggatcacttgagcccagaatgtcgaggctgcaatgagccatggtcatgccattgcactccaacctgggcaagagaacgagaccctgtctcaaaaaaagagagaaaaaaaaaaagaaaaaatactccatttgagatgactgcaagttcagtatgtgtagcatggattaggtgtgattgctaatgaaagctaatttggtcttgagtgctggagggaggagtagcctgtttgccaagagatgtgctggtccctgctatgcattggttaacacttagttggggcattgttttctgttcttttatgaaggacattgacaagctggagtatgttcagaaggataaacaaggtattgagtcgtatgaggaattacaaggaggagaaggccagaaaagagaaatcttggtgtaagccagttttaaatgtttgaaaggactatgcaaggaaagggcatgaagtccttgtttttttgtgattctggaag

SEQ ID NO: 21240 - DNA, 428 bp, Homo sapiens
gattattatcctacctcctaagccatccctggagtggtggcttggagaagttttccagagaaaccgatcagttcataaagtttctgtaaaggattaacacagtgtagtccagaaatgtttgttcatgaagtcttggtttttgggtttaagaaagtgttctcctgtctgggcgtggtggctcacgcttgtaatcccagcactttgggaggctgaggtaggcggatcacgtggtcaggagatcgagaccatcctggctaacacggtgaaaccccgtctctactaaaaatacaaaaaattagctgggcatggcggcgggcgcctgtagtcccagctacttgggaggctgaagcaggagaatggcgtgaacgcaggaggtggagcttgcagggagccgagatggcaccactgcactccagcctgggcgacag

SEQ ID NO: 21241 - DNA, 3317 bp, Homo sapiens
cggccggataggcgcgagggggccgcgtgaggcggtgccggcgttctggcccccaaagccggtctagcgcgccgggcgtcttccttacttccgctgccgccgccgccacatcccgggacccgacgggccgcggcgcggaggcctcggggcaaggtggggcgggcctcccgagctcccaggaccccgcgcgcttcgcccacaggcccggcgaagcccgacccgcgcggcgcccccagggccaggggaggagcctaaggacccggacgagcgccgctccagtagggtgagctcggggacgcgcaggcgggtgggtttcagcgcctgggcccctctccccgccgcggggcgcacggaaaaaccggggaacccgcgggttttgtcctggcgagccacatcccgatggagagaggaagaaagggttcagcttgggtccaaggagcatgcagaggaaggcagggaagaaggagcatgtgcagcttcggtgcgaggggagtcaggggtgggaatgcacgttccctgcctgaggggccccggggtgccctgagcctctgatcttcgctgtcaggaggcctgtccgaagttggaggttgaggcatgcagttctgcacttctggctgggaaggtgaaccaggttttccaaaatgtcatttttgctttccaagtctgcaaggcaggaaagggttgggcagtgaatggaaagtagtgcagccaggttctggttagctcagcggcaggactgtcataacgtgacaagaggaaacaagaacctcagttcaggggaaacacagcaaggaaatgtgagccccaggctgcagaaggaagagtcagtgaatggctgcggtgtgacaacatgcaccaccagtggcttctgctggccgcatgcttttgggtgattttcatgttcatggtggctagcaagttcatcacgttgacctttaaagacccagatgtgtacagtgccaaacaggagtttctgttcctgacaaccatgccggaagtgaggaagttgccagaagagaagcacattcctgaggaactgaagccaactgggaaggagcttccagacagccagctcgttcagcccctggtctacatggagcgcctggaactcatcagaaacgtctgcagggatgatgccctgaagaatctctcgcacactcctgtctccaagtttgtcctggaccgaatatttgtctgtgacaagcacaagattcttttctgccagactcccaaagtgggcaacacccagtggaagaaagtgctgattgttctaaatggagcattttcttccattgaggagatccccgaaaacgtggtgcacgaccacgagaagaacggccttcctcggctctcttccttcagtgatgcagaaattcagaagcgattgaaaacatacttcaagttttttattgtaagagatcccttcgaaagacttatttctgcatttaaggataaatttgttcacaatccccggtttgagccttggtacaggcatgagattgctcctggcatcatcagaaaatacaggaggaaccggacagagacccgggggatccagtttgaagatttcgtgcgctacctcggcgatccgaaccacagatggctagaccttcagtttggggaccacatcattcactgggtgacgtatgtagagctctgtgctccctgtgagataatgtacagtgtgattggacaccacgagaccctggaggacgatgccccatacatcttaaaagaggctggcattgaccacctggtgtcatacccgactatccctccgggcattaccgtgtataacagaaccaaggtggagcactatttcctgggcatcagcaaacgagacatccgacgcctgtatgcccgtttcgaaggggactttaagctctttgggtaccagaaaccagactttttgctaaactaatgcataagacctatgaattcaaatatctttattagacctggggctaaccaggtgaagatctgagcccagaaatgacccttcctccaccacacccctcctttgaggacgcccggggtctcccacaggcctgtgagttgcctcggcatatgacgcagaaccccaactgttacaacttagtttggatgtaagatgctctgaggaccctgcccacacccctgcgtgcattaggatgtcgctggcctttgctcacctcagaggggagaaaaggctaaagatttgcagtttgacagcccagcagggaggaagcatcacacagcgttaggagccgtttccttcaggtgttaaggaaggggatgcccctgaggttctcctggctagtcagggtggcttcacccatcactggtgggttgcaggaacagcacccaggactctgaggagggacagagaagcaagggggctgctgaaatcgcagagacttttgcagcatcagatctgaggagtaaaacggcacctctggccttcatcttggtgctgcgacaattgtggaggcaaagcattctttctgtgactattttgttcctgtagacagtcagcgatggccagagggtggtgtggtgtccaggggtccatctttccagaatccatgcctgtgtaatgctggtccatgcttctgaacctgtgtctgccaagcgcctatttcattcagcacaagacatacgattttagaaggtgaggggaggggaggctttttctacctgagaaggggagtgtctttgagggccttaaaaggaccatggcccaggaatgggggcgctggttgggcttggagctcaggctgctgtggatcccggcgcatcagttctgacttgccttacctgggtggacagcagtgaatctccacctgtcttctccagggagctcccatgttggggctgaagacgagcaggggcaacctgccagcatcacagaattcagtgtagtttatacatttcgattcctttcatctcagcaaaatgggcactgccagagccatttctgatcacaccaccatcctggaccatgtgactggaaggtgggtaaccaagttcaccagcaataaaacccagcgcccaggtagcctccagcagtgcggcttcctggcaacaaggtaggccctggtgcagggcaagccgcagcgaccatttcagataccgtccacagccaggaccgctgagaactgggacagtttcctgggatgagtgccagcctgagcctgcatggtgccgccgagcccggggtggaggagggagccaggcttcgcttcaaggcggcctctaccttttctcagaatggtttcctgattgtgtcaatgtgaaagttaaataaaatttatgtgccaaacctgaaaaaaaaaacg

SEQ ID NO: 21242 - DNA, 2808 bp, Homo sapiens
cggccggataggcgcgagggggccgcgtgaggcggtgccggcgttctggcccccaaagccggtctagcgcgccgggcgtcttccttacttccgctgccgccgccgccacatcccgggacccgacgggccgcggcgcggaggcctcggggcaaggtggggcgggcctcccgagctcccaggaccccgcgcgcttcgcccacaggcccggcgaagcccgacccgcgcggcgcccccagggccaggggaggagcctaaggacccggacgagcgccgctccagtaggtgacaagaggaaacaagaacctcagttcaggggaaacacagcaaggaaatgtgagccccaggctgcagaaggaagagtcagtgaatggctgcggtgtgacaacatgcaccaccagtggcttctgctggccgcatgcttttgggtgattttcatgttcatggtggctagcaagttcatcacgttgacctttaaagacccagatgtgtacagtgccaaacaggagtttctgttcctgacaaccatgccggaagtgaggaagttgccagaagagaagcacattcctgaggaactgaagccaactgggaaggagcttccagacagccagctcgttcagcccctggtctacatggagcgcctggaactcatcagaaacgtctgcagggatgatgccctgaagaatctctcgcacactcctgtctccaagtttgtcctggaccgaatatttgtctgtgacaagcacaagattcttttctgccagactcccaaagtgggcaacacccagtggaagaaagtgctgattgttctaaatggagcattttcttccattgaggagatccccgaaaacgtggtgcacgaccacgagaagaacggccttcctcggctctcttccttcagtgatgcagaaattcagaagcgattgaaaacatacttcaagttttttattgtaagagatcccttcgaaagacttatttctgcatttaaggataaatttgttcacaatccccggtttgagccttggtacaggcatgagattgctcctggcatcatcagaaaatacaggaggaaccggacagagacccgggggatccagtttgaagatttcgtgcgctacctcggcgatccgaaccacagatggctagaccttcagtttggggaccacatcattcactgggtgacgtatgtagagctctgtgctccctgtgagataatgtacagtgtgattggacaccacgagaccctggaggacgatgccccatacatcttaaaagaggctggcattgaccacctggtgtcatacccgactatccctccgggcattaccgtgtataacagaaccaaggtggagcactatttcctgggcatcagcaaacgagacatccgacgcctgtatgcccgtttcgaaggggactttaagctctttgggtaccagaaaccagactttttgctaaactaatgcataagacctatgaattcaaatatctttattagacctggggctaaccaggtgaagatctgagcccagaaatgacccttcctccaccacacccctcctttgaggacgcccggggtctcccacaggcctgtgagttgcctcggcatatgacgcagaaccccaactgttacaacttagtttggatgtaagatgctctgaggaccctgcccacacccctgcgtgcattaggatgtcgctggcctttgctcacctcagaggggagaaaaggctaaagatttgcagtttgacagcccagcagggaggaagcatcacacagcgttaggagccgtttccttcaggtgttaaggaaggggatgcccctgaggttctcctggctagtcagggtggcttcacccatcactggtgggttgcaggaacagcacccaggactctgaggagggacagagaagcaagggggctgctgaaatcgcagagacttttgcagcatcagatctgaggagtaaaacggcacctctggccttcatcttggtgctgcgacaattgtggaggcaaagcattctttctgtgactattttgttcctgtagacagtcagcgatggccagagggtggtgtggtgtccaggggtccatctttccagaatccatgcctgtgtaatgctggtccatgcttctgaacctgtgtctgccaagcgcctatttcattcagcacaagacatacgattttagaaggtgaggggaggggaggctttttctacctgagaaggggagtgtctttgagggccttaaaaggaccatggcccaggaatgggggcgctggttgggcttggagctcaggctgctgtggatcccggcgcatcagttctgacttgccttacctgggtggacagcagtgaatctccacctgtcttctccagggagctcccatgttggggctgaagacgagcaggggcaacctgccagcatcacagaattcagtgtagtttatacatttcgattcctttcatctcagcaaaatgggcactgccagagccatttctgatcacaccaccatcctggaccatgtgactggaaggtgggtaaccaagttcaccagcaataaaacccagcgcccaggtagcctccagcagtgcggcttcctggcaacaaggtaggccctggtgcagggcaagccgcagcgaccatttcagataccgtccacagccaggaccgctgagaactgggacagtttcctggaacccgtttcagcatccccctgcatggagcaacaaagcccaggttgtaattttgggccgggcttcacccccagccaacgaaatcaaaatccctggttggttttcaaattcaggcaccc

SEQ ID NO: 21243 - DNA, 1837 bp, Homo sapiens
cggccggataggcgcgagggggccgcgtgaggcggtgccggcgttctggcccccaaagccggtctagcgcgccgggcgtcttccttacttccgctgccgccgccgccacatcccgggacccgacgggccgcggcgcggaggcctcggggcaaggtggggcgggcctcccgagctcccaggaccccgcgcgcttcgcccacaggcccggcgaagcccgacccgcgcggcgcccccagggccaggggaggagcctaaggacccggacgagcgccgctccagtaggtgacaagaggaaacaagaacctcagttcaggggaaacacagcaaggaaatgtgagccccaggctgcagaaggaagagtcagtgaatggctgcggtgtgacaacatgcaccaccagtggcttctgctggccgcatgcttttgggtgattttcatgttcatggtggctagcaagttcatcacgttgacctttaaagacccagatgtgtacagtgccaaacaggagtttctgttcctgacaaccatgccggaagtgaggaagttgccagaagagaagcacattcctgaggaactgaagccaactgggaaggagcttccagacagccagctcgttcagcccctggtctacatggagcgcctggaactcatcagaaacgtctgcagggatgatgccctgaagaatctctcgcacactcctgtctccaagtttgtcctggaccgaatatttgtctgtgacaagcacaagattcttttctgccagactcccaaagtgggcaacacccagtggaagaaagtgctgattgttctaaatggagcattttcttccattgaggagatccccgaaaacgtggtgcacgaccacgagaagaacggccttcctcggctctcttccttcagtgatgcagaaattcagaagcgattgaaaacatacttcaagttttttattgtaagagatcccttcgaaagacttatttctgcatttaaggataaatttgttcacaatccccggtttgagccttggtacaggcatgagattgctcctggcatcatcagaaaatacaggaggaaccggacagagacccgggggatccagtttgaagatttcgtgcgctacctcggcgatccgaaccacagatggctagaccttcagtttggggaccacatcattcactgggtgacgtatgtagagctctgtgctccctgtgagataatgtacagtgtgattggacaccacgagaccctggaggacgatgccccatacatcttaaaagaggctggcattgaccacctggtgtcatacccgactatccctccgggcattaccgtgtataacagaaccaaggtggagcactatttcctgggcatcagcaaacgagacatccgacgcctgtatgcccgtttcgaaggggactttaagctctttgggtaccagaaaccagactttttgctaaactaatgcataagacctatgaattcaaatatctttattagacctggggctaaccaggtgaagatctgagcccagaaatgacccttcctccaccacacccctcctttgaggacgcccggggtctcccacaggcctgtgagttgcctcggcatatgacgcagaaccccaactgttacaacttagtttggatgtaagatgctctgaggaccctgcccacacccctgcgtgcattaggatgtcgctggcctttgctcacctcagaggggagaaaaggctaaagatttgcagtttgacagcccagcagggaggaagcatcacacagcgttaggagccgtttccttcccactgagagccccttccacctctaaataaaatcctctgaatac

SEQ ID NO: 21244 - DNA, 1621 bp, Homo sapiens
cggccggataggcgcgagggggccgcgtgaggcggtgccggcgttctggcccccaaagccggtctagcgcgccgggcgtcttccttacttccgctgccgccgccgccacatcccgggacccgacgggccgcggcgcggaggcctcggggcaaggtggggcgggcctcccgagctcccaggaccccgcgcgcttcgcccacaggcccggcgaagcccgacccgcgcggcgcccccagggccaggggaggagcctaaggacccggacgagcgccgctccagtagggtgagctcggggacgcgcaggcgggtgggtttcagcgcctgggcccctctccccgccgcggggcgcacggaaaaaccggggaacccgcgggttttgtcctggcgagccacatcccgatggagagaggaagaaagggttcagcttgggtccaaggagcatgcagaggaaggcagggaagaaggagcatgtgcagcttcggtgcgaggggagtcaggggtgggaatgcacgttccctgcctgaggggccccggggtgccctgagcctctgatcttcgctgtcaggaggcctgtccgaagttggaggttgaggcatgcagttctgcacttctggctgggaaggtgaaccaggttttccaaaatgtcatttttgctttccaagtctgcaaggcaggaaagggttgggcagtgaatggaaagtagtgcagccaggttctggttagctcagcggcaggactgtcataacgtgacaagaggaaacaagaacctcagttcaggggaaacacagcaaggaaatgtgagccccaggctgcagaaggaagagtcagtgaatggctgcggtgtgacaacatgcaccaccagtggcttctgctggccgcatgcttttgggtgattttcatgttcatggtggctagcaagttcatcacgttgacctttaaagacccagatgtgtacagtgccaaacaggagtttctgttcctgacaaccatgccggaagtgaggaagttgccagaagagaagcacattcctgaggaactgaaggtgggcacagccaggccgtggtccttgtcctcttgaacacggcacccttgtcgcggggagctggccttcccctgtggctggttccgcttgtcatcacgtctgcgttagagccttttcctgtgttacttctccatgttagttcaccttgttaatttccatttgggagaggcacaggtcacgtctatttttgtgcccctcacagagctctgtgcatcagggctgctctgtcactgttggttgtgcagcattcctgaccagctgaacatgagccttgcctggggagccgagagtattgggcagggtcaggaggaaaccagaagtgggagaagacatctcacccagtcatggggttttagagtgaaagggggccctggacagcagaacaactaattcagcctccaaattgtatggatgagagaactgagcctagaaaaaaggtggatcctccacagtcccatggagttcctggcggaccaaaggctgctgactttccacccagcccttgctggcttgacattctggctccatggctctctgcaggcttcttgtgcacctaaattcctgatcattccctagctg

SEQ ID NO: 21245 - DNA, 2853 bp, Homo sapiens
cggccggataggcgcgagggggccgcgtgaggcggtgccggcgttctggcccccaaagccggtctagcgcgccgggcgtcttccttacttccgctgccgccgccgccacatcccgggacccgacgggccgcggcgcggaggcctcggggcaaggtggggcgggcctcccgagctcccaggaccccgcgcgcttcgcccacaggcccggcgaagcccgacccgcgcggcgcccccagggccaggggaggagcctaaggacccggacgagcgccgctccagtaggtgacaagaggaaacaagaacctcagttcaggggaaacacagcaaggaaatgtgagccccaggctgcagaaggaagagtcagtgaatggctgcggtgtgacaacatgcaccaccagtggcttctgctggccgcatgcttttgggtgattttcatgttcatggtggctagcaagttcatcacgttgacctttaaagacccagatgtgtacagtgccaaacaggagtttctgttcctgacaaccatgccggaagtgaggaagttgccagaagagaagcacattcctgaggaactgaagccaactgggaaggagcttccagacagccagctcgttcagcccctggtctacatggagcgcctggaactcatcagaaacgtctgcagggatgatgccctgaagaatctctcgcacactcctgtctccaagtttgtcctggaccgaatatttgtctgtgacaagcacaagattcttttctgccagactcccaaagtgggcaacacccagtggaagaaagtgctgattgttctaaatggagcattttcttccattgaggagatccccgaaaacgtggtgcacgaccacgagaagaacggccttcctcggctctcttccttcagtgatgcagaaattcagaagcgattgaaaacatacttcaagttttttattgtaagagatcccttcgaaagacttatttctgcatttaaggataaatttgttcacaatccccggtttgagccttggtacaggcatgagattgctcctggcatcatcagaaaatacaggaggaaccggacagagacccgggggatccagtttgaagatttcgtgcgctacctcggcgatccgaaccacagatggctagaccttcagtttggggaccacatcattcactgggtgacgtatgtagagctctgtgctccctgtgagataatgtacagtgtgattggacaccacgagaccctggaggacgatgccccatacatcttaaaagaggctggcattgaccacctggtgtcatacccgactatccctccgggcattaccgtgtataacagaaccaaggtggagcactatttcctgggcatcagcaaacgagacatccgacgcctgtatgcccgtttcgaaggggactttaagctctttgggtaccagaaaccagactttttgctaaactaatgcataagacctatgaattcaaatatctttattagacctggggctaaccaggtgaagatctgagcccagaaatgacccttcctccaccacacccctcctttgaggacgcccggggtctcccacaggcctgtgagttgcctcggcatatgacgcagaaccccaactgttacaacttagtttggatgtaagatgctctgaggaccctgcccacacccctgcgtgcattaggatgtcgctggcctttgctcacctcagaggggagaaaaggctaaagatttgcagtttgacagcccagcagggaggaagcatcacacagcgttaggagccgtttccttcaggtgttaaggaaggggatgcccctgaggttctcctggctagtcagggtggcttcacccatcactggtgggttgcaggaacagcacccaggactctgaggagggacagagaagcaagggggctgctgaaatcgcagagacttttgcagcatcagatctgaggagtaaaacggcacctctggccttcatcttggtgctgcgacaattgtggaggcaaagcattctttctgtgactattttgttcctgtagacagtcagcgatggccagagggtggtgtggtgtccaggggtccatctttccagaatccatgcctgtgtaatgctggtccatgcttctgaacctgtgtctgccaagcgcctatttcattcagcacaagacatacgattttagaaggtgaggggaggggaggctttttctacctgagaaggggagtgtctttgagggccttaaaaggaccatggcccaggaatgggggcgctggttgggcttggagctcaggctgctgtggatcccggcgcatcagttctgacttgccttacctgggtggacagcagtgaatctccacctgtcttctccagggagctcccatgttggggctgaagacgagcaggggcaacctgccagcatcacagaattcagtgtagtttatacatttcgattcctttcatctcagcaaaatgggcactgccagagccatttctgatcacaccaccatcctggaccatgtgactggaaggtgggtaaccaagttcaccagcaataaaacccagcgcccaggtagcctccagcagtgcggcttcctggcaacaaggtaggccctggtgcagggcaagccgcagcgaccatttcagataccgtccacagccaggaccgctgagaactgggacagtttcctgggatgagtgccagcctgagcctgcatggtgccgccgagcccggggtggaggagggagccaggcttcgcttcaaggcggcctctaccttttctcagaatggtttcctgattgtgtcaatgtgaaagttaaataaaatttatgtgccaaacctgaaaaaaaaaacg

SEQ ID NO: 21246 - DNA, 2358 bp, Homo sapiens
agaccagcaggagcggctctgcttggcccggtcctgcctcctttaatggtccctgggcctcttctgctctgtgtcacctgcagccaactgggaaggagcttccagacagccagctcgttcagcccctggtctacatggagcgcctggaactcatcagaaacgtctgcagggatgatgccctgaagaatctctcgcacactcctgtctccaagtttgtcctggaccgaatatttgtctgtgacaagcacaagattcttttctgccagactcccaaagtgggcaacacccagtggaagaaagtgctgattgttctaaatggagcattttcttccattgaggagatccccgaaaacgtggtgcacgaccacgagaagaacggccttcctcggctctcttccttcagtgatgcagaaattcagaagcgattgaaaacatacttcaagttttttattgtaagagatcccttcgaaagacttatttctgcatttaaggataaatttgttcacaatccccggtttgagccttggtacaggcatgagattgctcctggcatcatcagaaaatacaggaggaaccggacagagacccgggggatccagtttgaagatttcgtgcgctacctcggcgatccgaaccacagatggctagaccttcagtttggggaccacatcattcactgggtgacgtatgtagagctctgtgctccctgtgagataatgtacagtgtgattggacaccacgagaccctggaggacgatgccccatacatcttaaaagaggctggcattgaccacctggtgtcatacccgactatccctccgggcattaccgtgtataacagaaccaaggtggagcactatttcctgggcatcagcaaacgagacatccgacgcctgtatgcccgtttcgaaggggactttaagctctttgggtaccagaaaccagactttttgctaaactaatgcataagacctatgaattcaaatatctttattagacctggggctaaccaggtgaagatctgagcccagaaatgacccttcctccaccacacccctcctttgaggacgcccggggtctcccacaggcctgtgagttgcctcggcatatgacgcagaaccccaactgttacaacttagtttggatgtaagatgctctgaggaccctgcccacacccctgcgtgcattaggatgtcgctggcctttgctcacctcagaggggagaaaaggctaaagatttgcagtttgacagcccagcagggaggaagcatcacacagcgttaggagccgtttccttcaggtgttaaggaaggggatgcccctgaggttctcctggctagtcagggtggcttcacccatcactggtgggttgcaggaacagcacccaggactctgaggagggacagagaagcaagggggctgctgaaatcgcagagacttttgcagcatcagatctgaggagtaaaacggcacctctggccttcatcttggtgctgcgacaattgtggaggcaaagcattctttctgtgactattttgttcctgtagacagtcagcgatggccagagggtggtgtggtgtccaggggtccatctttccagaatccatgcctgtgtaatgctggtccatgcttctgaacctgtgtctgccaagcgcctatttcattcagcacaagacatacgattttagaaggtgaggggaggggaggctttttctacctgagaaggggagtgtctttgagggccttaaaaggaccatggcccaggaatgggggcgctggttgggcttggagctcaggctgctgtggatcccggcgcatcagttctgacttgccttacctgggtggacagcagtgaatctccacctgtcttctccagggagctcccatgttggggctgaagacgagcaggggcaacctgccagcatcacagaattcagtgtagtttatacatttcgattcctttcatctcagcaaaatgggcactgccagagccatttctgatcacaccaccatcctggaccatgtgactggaaggtgggtaaccaagttcaccagcaataaaacccagcgcccaggtagcctccagcagtgcggcttcctggcaacaaggtaggccctggtgcagggcaagccgcagcgaccatttcagataccgtccacagccaggaccgctgagaactgggacagtttcctgggatgagtgccagcctgagcctgcatggtgccgccgagcccggggtggaggagggagccaggcttcgcttcaaggcggcctctaccttttctcagaatggtttcctgattgtgtcaatgtgaaagttaaataaaatttatgtgccaaacctgaaaaaaaaaacg

SEQ ID NO: 21247 - DNA, 2571 bp, Homo sapiens
cggccggataggcgcgagggggccgcgtgaggcggtgccggcgttctggcccccaaagccggtctagcgcgccgggcgtcttccttacttccgctgccgccgccgccacatcccgggacccgacgggccgcggcgcggaggcctcggggcaaggtggggcgggcctcccgagctcccaggaccccgcgcgcttcgcccacaggcccggcgaagcccgacccgcgcggcgcccccagggccaggggaggagcctaaggacccggacgagcgccgctccagtaggtgacaagaggaaacaagaacctcagttcaggggaaacacagcaaggaaatgtgagccccaggctgcagaaggaagagtcagtgaatggctgcggtgtgacaacatgcaccaccagtggcttctgctggccgcatgcttttgggtgattttcatgttcatggtggctagcaagttcatcacgttgacctttaaagacccagatgtgtacagtgccaaacaggagtttctgttcctgacaaccatgccggaagtgaggaagttgccagaagagaagcacattcctgaggaactgaagccaactgggaaggagcttccagacagccagctcgttcagcccctggtctacatggagcgcctggaactcatcagaaacgtctgcagggatgatgccctgaagaatctctcgcacactcctgtctccaagtttgtcctggaccgaatatttgtctgtgacaagcacaagattcttttctgccagactcccaaagtgggcaacacccagtggaagaaagtgctgattgttctaaatggagcattttcttccattgaggagatccccgaaaacgtggtgcacgaccacgagaagaacggccttcctcggctctcttccttcagtgatgcagaaattcagaagcgattgaaaacatacttcaagttttttattgtaagagatcccttcgaaagacttatttctgcatttaaggataaatttgttcacaatccccggtttgagccttggtacaggcatgagattgctcctggcatcatcagaaaatacaggaggaaccggacagagacccgggggatccagtttgaagatttcgtgcgctacctcggcgatccgaaccacagatggctagaccttcagtttggggaccacatcattcactgggtgacgtatgtagagctctgtgctccctgtgagataatgtacagtgtgattggacaccacgagaccctggaggacgatgccccatacatcttaaaagaggctggcattgaccacctggtgtcatacccgactatccctccgggcattaccgtgtataacagaaccaaggtggagcactatttcctgggcatcagcaaacgagacatccgacgcctgtatgcccgtttcgaaggggactttaagctctttgggtaccagaaaccagactttttgctaaactaatgcataagacctatgaattcaaatatctttattagacctggggctaaccaggtgaagatctgagcccagaaatgacccttcctccaccacacccctcctttgaggacgcccggggtctcccacaggcctgtgagttgcctcggcatatgacgcagaaccccaactgttacaacttagtttggatgtaagatgctctgaggaccctgcccacacccctgcgtgcattaggatgtcgctggcctttgctcacctcagaggggagaaaaggctaaagatttgcagtttgacagcccagcagggaggaagcatcacacagcgttaggagccgtttccttcaggtgttaaggaaggggatgcccctgaggttctcctggctagtcagggtggcttcacccatcactggtgggttgcaggaacagcacccaggactctgaggagggacagagaagcaagggggctgctgaaatcgcagagacttttgcagcatcagatctgaggagtaaaacggcacctctggccttcatcttggtgctgcgacaattgtggaggcaaagcattctttctgtgactattttgttcctgtagacagtcagcgatggccagagggtggtgtggtgtccaggggtccatctttccagaatccatgcctgtgtaatgctggtccatgcttctgaacctgtgtctgccaagcgcctatttcattcagcacaagacatacgattttagaaggtgaggggaggggaggctttttctacctgagaaggggagtgtctttgagggccttaaaaggaccatggcccaggaatgggggcgctggttgggcttggagctcaggctgctgtggatcccggcgcatcagttctgacttgccttacctgggtggacagcagtgaatctccacctgtcttctccagggagctcccatgttggggctgaagacgagcaggggcaacctgccagcatcacagaattcagtgtagtttatacatttcgattcctttcatctcagcaaaatgggcactgccagagccatttctgatcacaccaccatcctggaccatgtgactggaaggtgggtaaccaagcaaccatggtaccgagctgattcactgcc

SEQ ID NO: 21248 - DNA, 776 bp, Homo sapiens
cagaacttaaagtataaatatataaatctacccaaggagaaacagaatgcacattccaggtgaaatggaatcaattactgacaaatatgaaaacataaaatatgccctgtgatgaagatgggtgtcattattgcacacagtttatttgagaatgggaaagaatgacttaacctaggtgggtttcctgcattcctgcaaattgaaataggccataaaatatttgcagtgagagtcagaggaggggtttcagataggttggaatgctctacatggaggtgcagaggtgggtgatgggaaagagtaggtggatggaagagggaaaggaagcctttattgagtgagaacaaaaatgatttgtacagataacagttggaatttagtgtctatcagataaggcgtaaacatcaatgccgttgtcatcgcaccattgttgaaaacgctattttttcccctattgaattgccttggcaaccttgtcaaaatccaattgactataaatgtgtgaaaggtttttttctgtgtgctctcaattgtactccattgatctatatgtctgtcgtaatccctatagtacaccatcttaattactgtagtattgtattaatatcaagttattatatcaaatcaaggagtgtgagtctttgttgttctttttcaatacgttttcactattctgggtcccttgaatcttcatatgaaatttagaatacacttgtcaattttctcaaaggagccaatggggattttgacacgattgcattaaatcagtagatcag

SEQ ID NO: 21249 - DNA, 280 bp, Homo sapiens
gtgccactgcactccagcctgggcgacagagcaagactccgtctcaaaaataaaataaaattaaattaaaaaaaagaactaggagctaagaaattaggtaaaaatactataccatttaaagtgaattagaaatacgaatatggactcatgatttttaaaaatacattaaaaatgtattttttaaatgctctgcaatttaaaatggccttaaaacaatgttacccctgggcaatgagcacacccttgatcttgtctctaataccattctccaataaaagga

SEQ ID NO: 21250 - DNA, 421 bp, Homo sapiens
aatcgagtccaaatggactcctggcaacgttttctctcttttggtcaataatgatgtaattcttccctgaagcagctagagatcctattggatatttgcatggaggaagagactatctaaccctttttccccaactttgaaagtgctagaaatgtgagggtaaatgaatacaaataggaacgtgctgggaagatacagtagggaagccttctgtggctctgcaagctgatacaaatgctggcttaattagaaaatcaatcttgctgtccggctgattgattgcaatcctctgctggaggtacgaaagagagtcgagtcatgacgagataattttttcctattactaaaagaaggcttaatgtacatctctaagcaattcagcgtgaagaacttgttaaaaacacgaccacattttccctct

SEQ ID NO: 21251 - DNA, 313 bp, Homo sapiens
actcaaacttgaaattattgaagttaagtgatagttgcatggggttcattatactatcctttgctggtggttaaagaaaatcatccttttattctttgacctgattgaaccaaattcaatttgctatcatagttcatttgtgttaacaacacagtactaataacccacgtactgtgtatattcatgctgaactcttttaagaattactaaatgttgggaggctgaggcgggcggatcacgaggtcaggagatcgaggccatcctgactaacacggtgaaaccccgtctccactaaaaaatacaaaaaattagc

SEQ ID NO: 21252 - DNA, 1557 bp, Homo sapiens
gccctcgaggcccaggatttgggcactaggggtccaatttttttatttttttttgaacttttttaaaaattaaatttttattttgagatcactgtttgtgttcagttgtaagaaacaagagagattctgtgtaccctttacccattcctccatgttgcaaaactagcacaatatcaccgccacggtagacgcagtgaggccataagacatttccgtcagcaaaagggtcacttcttgtgcccctttagaaccacacccacccctgccttccaactattaatgctggcaggacttagccagaccgcaagggcgcctactccgaacaaggaagagggtcaggcgctgggagggcgactgcaagcggacaggcagcacctgcgaccacggtacttggggacaccacaaaagtccgcagagcaggcaccgcggcacttccgcgagcgccgcaggccctgcccctttcgccgtcgccgaccaattgccgcccgaagaccgagccgcttcagcggagggccggaagtgagccgcagcttttcctttctgccaccgccttgtccaagatggcggacctccaccgccagctgcaggagtacctggcgcaggggaaagctggcggcccggcggccgcggagccgctgctcgccgcggagaaggcggaggagcccggggaccggccggcggaggagtggctgggccgcgcgggcttgcgctggacgtgggcgcggagccctgcggagtcggcagcggccggcctgacgtgcctcccgagcgtgacgcgcgggcagcggctggcggcgggcggcgggtgcctgctgctggctgcactgtgtttcggcctagccgcgctctacgcaccggtgttgctgctgcgcgcgcgcaagttcgcgctgctctggtcactgggctcggcgctggcgttggcgggaagcgcgctgctgcggggcggcgcggcgtgcggacgcctgctgcgctgcgaagaagcgccgtcccggcccgcgctgctctacatggcagcgctgggcgccacgctgttcgccgcgctgggccttcgcagcacgctgctcacggtgctgggcgcgggcgcgcaggtggccgcgctgctggccgcgctggttgggctgctgccctggggcggcggcaccgcgctgcgcctcgcactgggtcgcctgggccgcggcgccggcctcgccaaggtgctgcccgtgtgaggacctcgcgccctcgccgctggggaagtacgcggagccagcgccgtcggagaccgcgccggccgagctgaggactgcacgccgctgtgcggaagccgtggcgaaggccctgccctaacagcctgcgagtctaatccgggagcggctgctgccagcggaggcgacagcagcgttgggagctcctcgatgtcagctttttgtgctggacttggcacacgctctgaaaactgagattttgtcattgaactggtgacaggatgtgagacggttattagaagttgctttcgaagtaactgtggtcttaggttcggctgagtaaagaaaaaggatttttcttcgaaaaaactgc

SEQ ID NO: 21253 - DNA, 213 bp, Homo sapiens
ccgagtcttggacaaggggcgcgaaggagtcaaggatgttgccaggcctgtggccgaaactgagaacagaatagagaagcaggttgagggtgctgggtgtcaacccttcctttatcaaccccatggtaaatgatcaggatggtcactattactacaagtgaggtaactaatcagaacgcaactttccccaaaaaacccacctgagttacacag

SEQ ID NO: 21254 - DNA, 2197 bp, Homo sapiens
tagaagaactcgaccagtgagcaggcgaggaaggggcgggagccggggtcccggtagcttctagtaggttccagaaggcggcgcgtgcggttgggaacgcggagcggacggattcgattcaacggggttccggaccgcgctgcgctatggagcaggtcaatgagctgaaggagaaaggcaacaaggccctgagcgtgggtaacatcgatgatgccttacagtgctactccgaagctattaagctggatccccacaaccacgtgctgtacagcaaccgttctgctgcctatgccaagaaaggagactaccagaaggcttatgaggatggctgcaagactgtcgacctaaagcctgactggggcaagggctattcacgaaaagcagcagctctagagttcttaaaccgctttgaagaagccaagcgaacctatgaggagggcttaaaacacgaggcaaataaccctcaactgaaagagggtttacagaatatggaggccaggttggcagagagaaaattcatgaaccctttcaacatgcctaatctgtatcagaagttggagagtgatcccaggacaaggacactactcagtgatcctacctaccgggagctgatagagcagctacgaaacaagccttctgacctgggcacgaaactacaagatccccggatcatgaccactctcagcgtcctccttggggtcgatctgggcagtatggatgaggaggaagagattgcaacacctccaccaccaccccctcccaaaaaggagaccaagccagagccaatggaagaagatcttccagagaataagaagcaggcactgaaagaaaaagagctggggaacgatgcctacaagaagaaagactttgacacagccttgaagcattacgacaaagccaaggagctggaccccactaacatgacttacattaccaatcaagcagcggtatactttgaaaagggcgactacaataagtgccgggagctttgtgagaaggccattgaagtggggagagaaaaccgagaagactatcgacagattgccaaagcatatgctcgaattggcaactcctacttcaaagaagaaaagtacaaggatgccatccatttctataacaagtctctggcagagcaccgaaccccagatgtgctcaagaaatgccagcaggcagagaaaatcctgaaggagcaagagcggctggcctacataaaccccgacctggctttggaggagaagaacaaaggcaacgagtgttttcagaaaggggactatccccaggccatgaagcattatacagaagccatcaaaaggaacccgaaagatgccaaattatacagcaatcgagctgcctgctacaccaaactcctggagttccagctggcactcaaggactgtgaggaatgtatccagctggagccgaccttcatcaagggttatacacggaaagccgctgcgctggaagcgatgaaggactacaccaaagccatggatgtgtaccagaaggcgctagacctggactccagctgtaaggaggcggcagacggctaccagcgctgtatgatggcgcagtacaaccggcacgacagccccgaagatgtgaagcgacgagccatggccgaccctgaggtgcagcagatcatgagtgacccagccatgcgccttatcctggaacagatgcagaaggacccccaggcactcagcgaacacttaaagaatcctgtaatagcacagaagatccagaagctgatggatgtgggtctgattgcaattcggtgatgacttgttcatccccccttcccttcgccctcatgtggaaagaggagctgggaccgcggcgagcagcacggagcggaagggagagcaggggagagaaggcctcatctctctatatttatacataaccccggggaagacacagagactcgtacctgcgctgtttgtgccgccgctgcctctgggccctcccagcacacgcatggtctcttcaccgctgccctcgagttccatgtctctttcccctgcccctagttgctgtctcggctgctctcccatagttggttttttttttatttggggcagtgggcatgttatggggaggggagggggttcttccagcctcaggtcccagctgtctcacgttgtttattctgcgtccccttctccaataaaacaagccagttgggcgtggttataac

SEQ ID NO: 21255 - DNA, 2139 bp, Homo sapiens
  misc_feature (4)..(4): n is a, c, g, or t
aaantaggctagtacgaggcctggtttgaatcggccgagggcggagcggacggattcgattcaacggggttccggaccgcgctgcgctatggagcaggtcaatgagctgaaggagaaaggcaacaaggccctgagcgtgggtaacatcgatgatgccttacagtgctactccgaagctattaagctggatccccacaaccacgtgctgtacagcaaccgttctgctgcctatgccaagaaaggagactaccagaaggcttatgaggatggctgcaagactgtcgacctaaagcctgactggggcaagggctattcacgaaaagcagcagctctagagttcttaaaccgctttgaagaagccaagcgaacctatgaggagggcttaaaacacgaggcaaataaccctcaactgaaagagggtttacagaatatggaggccaggttggcagagagaaaattcatgaaccctttcaacatgcctaatctgtatcagaagttggagagtgatcccaggacaaggacactactcagtgatcctacctaccgggagctgatagagcagctacgaaacaagccttctgacctgggcacgaaactacaagatccccggatcatgaccactctcagcgtcctccttggggtcgatctgggcagtatggatgaggaggaagagattgcaacacctccaccaccaccccctcccaaaaaggagaccaagccagagccaatggaagaagatcttccagagaataagaagcaggcactgaaagaaaaagagctggggaacgatgcctacaagaagaaagactttgacacagccttgaagcattacgacaaagccaaggagctggaccccactaacatgacttacattaccaatcaagcagcggtatactttgaaaagggcgactacaataagtgccgggagctttgtgagaaggccattgaagtggggagagaaaaccgagaagactatcgacagattgccaaagcatatgctcgaattggcaactcctacttcaaagaagaaaagtacaaggatgccatccatttctataacaagtctctggcagagcaccgaaccccagatgtgctcaagaaatgccagcaggcagagaaaatcctgaaggagcaagagcggctggcctacataaaccccgacctggctttggaggagaagaacaaaggcaacgagtgttttcagaaaggggactatccccaggccatgaagcattatacagaagccatcaaaaggaacccgaaagatgccaaattatacagcaatcgagctgcctgctacaccaaactcctggagttccagctggcactcaaggactgtgaggaatgtatccagctggagccgaccttcatcaagggttatacacggaaagccgctgcgctggaagcgatgaaggactacaccaaagccatggatgtgtaccagaaggcgctagacctggactccagctgtaaggaggcggcagacggctaccagcgctgtatgatggcgcagtacaaccggcacgacagccccgaagatgtgaagcgacgagccatggccgaccctgaggtgcagcagatcatgagtgacccagccatgcgccttatcctggaacagatgcagaaggacccccaggcactcagcgaacacttaaagaatcctgtaatagcacagaagatccagaagctgatggatgtgggtctgattgcaattcggtgatgacttgttcatccccccttcccttcgccctcatgtggaaagaggagctgggaccgcggcgagcagcacggagcggaagggagagcaggggagagaaggcctcatctctctatatttatacataaccccggggaagacacagagactcgtacctgcgctgtttgtgccgccgctgcctctgggccctcccagcacacgcatggtctcttcaccgctgccctcgagttccatgtctctttcccctgcccctagttgctgtctcggctgctctcccatagttggttttttttttatttggggcagtgggcatgttatggggaggggagggggttcttccagcctcaggtcccagctgtctcacgttgtttattctgcgtccccttctccaataaaacaagccagttgggcgtggttataac

SEQ ID NO: 21256 - DNA, 1496 bp, Homo sapiens
tagaagaactcgaccagtgagcaggcgaggaaggggcgggagccggggtcccggtagcttctagtaggttccagaaggcggcgcgtgcggttgggaacgcggagcggacggattcgattcaacggggttccggaccgcgctgcgctatggagcaggtcaatgagctgaaggagaaaggcaacaaggccctgagcgtgggtaacatcgatgatgccttacagtgctactccgaagctattaagctggatccccacaaccacgtgctgtacagcaaccgttctgctgcctatgccaagaaaggagactaccagaaggcttatgaggatggctgcaagactgtcgacctaaagcctgactggggcaagggctattcacgaaaagcagcagctctagagttcttaaaccgctttgaagaagccaagcgaacctatgaggagggcttaaaacacgaggcaaataaccctcaactgaaagagggtttacagaatatggaggccaggttggcagagagaaaattcatgaaccctttcaacatgcctaatctgtatcagaagttggagagtgatcccaggacaaggacactactcagtgatcctacctaccgggagctgatagagcagctacgaaacaagccttctgacctgggcacgaaactacaagatccccggatcatgaccactctcagcgtcctccttggggtcgatctgggcagtatggatgaggaggaagagattgcaacacctccaccaccaccccctcccaaaaaggagaccaagccagagccaatggaatgtgtaccagaaggcgctagacctggactccagctgtaaggaggcggcagacggctaccagcgctgtatgatggcgcagtacaaccggcacgacagccccgaagatgtgaagcgacgagccatggccgaccctgaggtgcagcagatcatgagtgacccagccatgcgccttatcctggaacagatgcagaaggacccccaggcactcagcgaacacttaaagaatcctgtaatagcacagaagatccagaagctgatggatgtgggtctgattgcaattcggtgatgacttgttcatccccccttcccttcgccctcatgtggaaagaggagctgggaccgcggcgagcagcacggagcggaagggagagcaggggagagaaggcctcatctctctatatttatacataaccccggggaagacacagagactcgtacctgcgctgtttgtgccgccgctgcctctgggccctcccagcacacgcatggtctcttcaccgctgccctcgagttccatgtctctttcccctgcccctagttgctgtctcggctgctctcccatagttggttttttttttatttggggcagtgggcatgttatggggaggggagggggttcttccagcctcaggtcccagctgtctcacgttgtttattctgcgtccccttctccaataaaacaagccagttgggcgtggttataac

SEQ ID NO: 21257 - DNA, 1968 bp, Homo sapiens
  misc_feature (4)..(4): n is a, c, g, or t
aaantaggctagtacgaggcctggtttgaatcggccgaggagcaaccgttctgctgcctatgccaagaaaggagactaccagaaggcttatgaggatggctgcaagactgtcgacctaaagcctgactggggcaagggctattcacgaaaagcagcagctctagagttcttaaaccgctttgaagaagccaagcgaacctatgaggagggcttaaaacacgaggcaaataaccctcaactgaaagagggtttacagaatatggaggccaggttggcagagagaaaattcatgaaccctttcaacatgcctaatctgtatcagaagttggagagtgatcccaggacaaggacactactcagtgatcctacctaccgggagctgatagagcagctacgaaacaagccttctgacctgggcacgaaactacaagatccccggatcatgaccactctcagcgtcctccttggggtcgatctgggcagtatggatgaggaggaagagattgcaacacctccaccaccaccccctcccaaaaaggagaccaagccagagccaatggaagaagatcttccagagaataagaagcaggcactgaaagaaaaagagctggggaacgatgcctacaagaagaaagactttgacacagccttgaagcattacgacaaagccaaggagctggaccccactaacatgacttacattaccaatcaagcagcggtatactttgaaaagggcgactacaataagtgccgggagctttgtgagaaggccattgaagtggggagagaaaaccgagaagactatcgacagattgccaaagcatatgctcgaattggcaactcctacttcaaagaagaaaagtacaaggatgccatccatttctataacaagtctctggcagagcaccgaaccccagatgtgctcaagaaatgccagcaggcagagaaaatcctgaaggagcaagagcggctggcctacataaaccccgacctggctttggaggagaagaacaaaggcaacgagtgttttcagaaaggggactatccccaggccatgaagcattatacagaagccatcaaaaggaacccgaaagatgccaaattatacagcaatcgagctgcctgctacaccaaactcctggagttccagctggcactcaaggactgtgaggaatgtatccagctggagccgaccttcatcaagggttatacacggaaagccgctgcgctggaagcgatgaaggactacaccaaagccatggatgtgtaccagaaggcgctagacctggactccagctgtaaggaggcggcagacggctaccagcgctgtatgatggcgcagtacaaccggcacgacagccccgaagatgtgaagcgacgagccatggccgaccctgaggtgcagcagatcatgagtgacccagccatgcgccttatcctggaacagatgcagaaggacccccaggcactcagcgaacacttaaagaatcctgtaatagcacagaagatccagaagctgatggatgtgggtctgattgcaattcggtgatgacttgttcatccccccttcccttcgccctcatgtggaaagaggagctgggaccgcggcgagcagcacggagcggaagggagagcaggggagagaaggcctcatctctctatatttatacataaccccggggaagacacagagactcgtacctgcgctgtttgtgccgccgctgcctctgggccctcccagcacacgcatggtctcttcaccgctgccctcgagttccatgtctctttcccctgcccctagttgctgtctcggctgctctcccatagttggttttttttttatttggggcagtgggcatgttatggggaggggagggggttcttccagcctcaggtcccagctgtctcacgttgtttattctgcgtccccttctccaataaaacaagccagttgggcgtggttataac

SEQ ID NO: 21258 - DNA, 1796 bp, Homo sapiens
gctaggtgaaggcggggtggaatcggacgaggggagggcttaaaacacgaggcaaataaccctcaactgaaagagggtttacagaatatggaggccaggttggcagagagaaaattcatgaaccctttcaacatgcctaatctgtatcagaagttggagagtgatcccaggacaaggacactactcagtgatcctacctaccgggagctgatagagcagctacgaaacaagccttctgacctgggcacgaaactacaagatccccggatcatgaccactctcagcgtcctccttggggtcgatctgggcagtatggatgaggaggaagagattgcaacacctccaccaccaccccctcccaaaaaggagaccaagccagagccaatggaagaagatcttccagagaataagaagcaggcactgaaagaaaaagagctggggaacgatgcctacaagaagaaagactttgacacagccttgaagcattacgacaaagccaaggagctggaccccactaacatgacttacattaccaatcaagcagcggtatactttgaaaagggcgactacaataagtgccgggagctttgtgagaaggccattgaagtggggagagaaaaccgagaagactatcgacagattgccaaagcatatgctcgaattggcaactcctacttcaaagaagaaaagtacaaggatgccatccatttctataacaagtctctggcagagcaccgaaccccagatgtgctcaagaaatgccagcaggcagagaaaatcctgaaggagcaagagcggctggcctacataaaccccgacctggctttggaggagaagaacaaaggcaacgagtgttttcagaaaggggactatccccaggccatgaagcattatacagaagccatcaaaaggaacccgaaagatgccaaattatacagcaatcgagctgcctgctacaccaaactcctggagttccagctggcactcaaggactgtgaggaatgtatccagctggagccgaccttcatcaagggttatacacggaaagccgctgcgctggaagcgatgaaggactacaccaaagccatggatgtgtaccagaaggcgctagacctggactccagctgtaaggaggcggcagacggctaccagcgctgtatgatggcgcagtacaaccggcacgacagccccgaagatgtgaagcgacgagccatggccgaccctgaggtgcagcagatcatgagtgacccagccatgcgccttatcctggaacagatgcagaaggacccccaggcactcagcgaacacttaaagaatcctgtaatagcacagaagatccagaagctgatggatgtgggtctgattgcaattcggtgatgacttgttcatccccccttcccttcgccctcatgtggaaagaggagctgggaccgcggcgagcagcacggagcggaagggagagcaggggagagaaggcctcatctctctatatttatacataaccccggggaagacacagagactcgtacctgcgctgtttgtgccgccgctgcctctgggccctcccagcacacgcatggtctcttcaccgctgccctcgagttccatgtctctttcccctgcccctagttgctgtctcggctgctctcccatagttggttttttttttatttggggcagtgggcatgttatggggaggggagggggttcttccagcctcaggtcccagctgtctcacgttgtttattctgcgtccccttctccaataaaacaagccagttgggcgtggttataac

SEQ ID NO: 21259 - DNA, 1024 bp, Homo sapiens
tagaagaactcgaccagtgagcaggcgaggaaggggcgggagccggggtcccggtagcttctagtaggttccagaaggcggcgcgtgcggttgggaacgcggagcggacggattcgattcaacggggttccggaccgcgctgcgctatggagcaggtcaatgagctgaaggagaaaggcaacaaggccctgagcgtgggtaacatcgatgatgccttacagtgctactccgaagctattaagctggatccccacaaccacgtgctgtacagcaaccgttctgctgcctatgccaagaaaggagactaccagaaggcttatgaggatggctgcaagactgtcgacctaaagcctgactggggcaagggctattcacgaaaagcagcagctctagagttctacaaccggcacgacagccccgaagatgtgaagcgacgagccatggccgaccctgaggtgcagcagatcatgagtgacccagccatgcgccttatcctggaacagatgcagaaggacccccaggcactcagcgaacacttaaagaatcctgtaatagcacagaagatccagaagctgatggatgtgggtctgattgcaattcggtgatgacttgttcatccccccttcccttcgccctcatgtggaaagaggagctgggaccgcggcgagcagcacggagcggaagggagagcaggggagagaaggcctcatctctctatatttatacataaccccggggaagacacagagactcgtacctgcgctgtttgtgccgccgctgcctctgggccctcccagcacacgcatggtctcttcaccgctgccctcgagttccatgtctctttcccctgcccctagttgctgtctcggctgctctcccatagttggttttttttttatttggggcagtgggcatgttatggggaggggagggggttcttccagcctcaggtcccagctgtctcacgttgtttattctgcgtccccttctccaataaaacaagccagttgggcgtggttataac

SEQ ID NO: 21260 - DNA, 1186 bp, Homo sapiens
tcaggatcttctctacgagcgcactgacagattgccaagcatatgctcgaattggcaactcctacttcaaagaagaaaagtacaaggatgccatccatttctataacaagtctctggcagagcaccgaaccccagatgtgctcaagaaatgccagcaggcagagaaaatcctgaaggagcaagagcggctggcctacataaaccccgacctggctttggaggagaagaacaaaggcaacgagtgttttcagaaaggggactatccccaggccatgaagcattatacagaagccatcaaaaggaacccgaaagatgccaaattatacagcaatcgagctgcctgctacaccaaactcctggagttccagctggcactcaaggactgtgaggaatgtatccagctggagccgaccttcatcaagggttatacacggaaagccgctgcgctggaagcgatgaaggactacaccaaagccatggatgtgtaccagaaggcgctagacctggactccagctgtaaggaggcggcagacggctaccagcgctgtatgatggcgcagtacaaccggcacgacagccccgaagatgtgaagcgacgagccatggccgaccctgaggtgcagcagatcatgagtgacccagccatgcgccttatcctggaacagatgcagaaggacccccaggcactcagcgaacacttaaagaatcctgtaatagcacagaagatccagaagctgatggatgtgggtctgattgcaattcggtgatgacttgttcatccccccttcccttcgccctcatgtggaaagaggagctgggaccgcggcgagcagcacggagcggaagggagagcaggggagagaaggcctcatctctctatatttatacataaccccggggaagacacagagactcgtacctgcgctgtttgtgccgccgctgcctctgggccctcccagcacacgcatggtctcttcaccgctgccctcgagttccatgtctctttcccctgcccctagttgctgtctcggctgctctcccatagttggttttttttttatttggggcagtgggcatgttatggggaggggagggggttcttccagcctcaggtcccagctgtctcacgttgtttattctgcgtccccttctccaataaaacaagccagttgggcgtggttataac

SEQ ID NO: 21261 - DNA, 1024 bp, Homo sapiens
  misc_feature (951)..(952): n is a, c, g, or t
tagaagaactcgaccagtgagcaggcgaggaaggggcgggagccggggtcccggtagcttctagtaggttccagaaggcggcgcgtgcggttgggaacgcggagcggacggattcgattcaacggggttccggaccgcgctgcgctatggagcaggtcaatgagctgaaggagaaaggcaacaaggccctgagcgtgggtaacatcgatgatgccttacagtgctactccgaagctattaagctggatccccacaaccacgtgctgtacagcaaccgttctgctgcctatgccaagaaaggagactaccagaaggcttatgaggatggctgcaagactgtcgacctaaagcctgactggggcaagggctattcacgaaaagcagcagctctagagttcttaaaccgctttgaagaagccaagcgaacctatgaggagggcttaaaacacgaggcaaataaccctcaactgaaagagggtttacagaatatggaggccaggttggcagagagaaaattcatgaaccctttcaacatgcctaatctgtatcagaagttggagagtgatcccaggacaaggacactactcagtgatcctacctaccgggagctgatagagcagctacgaaacaagccttctgacctgggcacgaaactacaagatccccggatcatgaccactctcagcgtcctccttggggtcgatctgggcagtatggatgaggaggaagagattgcaacacctccaccaccaccccctcccaaaaaggagaccaagccagagccaatggaagaagatcttccagagaataagaagcaggcactgaaagaaaaagagctggggaacgatgcctacaagaagaaagactttgacacagccttgaagcattacgacaaagccaaggagctggaccccactaacatgacttacattaccaatcaagcaggggtanntggaaggggggcacatagtgcggggctggggaggcatgaggggggagacgcagagaaagggatgcaagttcg

SEQ ID NO: 21262 - DNA, 2149 bp, Homo sapiens
tacggtctaggtacgaggctgggtgttgagcggcgcgtgcggttgggaacgcggagcggacggattcgattcaacggggttccggaccgcgctgcgctatggagcaggtcaatgagctgaaggagaaaggcaacaaggccctgagcgtgggtaacatcgatgatgccttacagtgctactccgaagctattaagctggatccccacaaccacgtgctgtacagcaaccgttctgctgcctatgccaagaaaggagactaccagaaggcttatgaggatggctgcaagactgtcgacctaaagcctgactggggcaagggctattcacgaaaagcagcagctctagagttcttaaaccgctttgaagaagccaagcgaacctatgaggagggcttaaaacacgaggcaaataaccctcaactgaaagagggtttacagaatatggaggccaggttggcagagagaaaattcatgaaccctttcaacatgcctaatctgtatcagaagttggagagtgatcccaggacaaggacactactcagtgatcctacctaccgggagctgatagagcagctacgaaacaagccttctgacctgggcacgaaactacaagatccccggatcatgaccactctcagcgtcctccttggggtcgatctgggcagtatggatgaggaggaagagattgcaacacctccaccaccaccccctcccaaaaaggagaccaagccagagccaatggaagaagatcttccagagaataagaagcaggcactgaaagaaaaagagctggggaacgatgcctacaagaagaaagactttgacacagccttgaagcattacgacaaagccaaggagctggaccccactaacatgacttacattaccaatcaagcagcggtatactttgaaaagggcgactacaataagtgccgggagctttgtgagaaggccattgaagtggggagagaaaaccgagaagactatcgacagattgccaaagcatatgctcgaattggcaactcctacttcaaagaagaaaagtacaaggatgccatccatttctataacaagtctctggcagagcaccgaaccccagatgtgctcaagaaatgccagcaggcagagaaaatcctgaaggagcaagagcggctggcctacataaaccccgacctggctttggaggagaagaacaaaggcaacgagtgttttcagaaaggggactatccccaggccatgaagcattatacagaagccatcaaaaggaacccgaaagatgccaaattatacagcaatcgagctgcctgctacaccaaactcctggagttccagctggcactcaaggactgtgaggaatgtatccagctggagccgaccttcatcaagggttatacacggaaagccgctgcgctggaagcgatgaaggactacaccaaagccatggatgtgtaccagaaggcgctagacctggactccagctgtaaggaggcggcagacggctaccagcgctgtatgatggcgcagtacaaccggcacgacagccccgaagatgtgaagcgacgagccatggccgaccctgaggtgcagcagatcatgagtgacccagccatgcgccttatcctggaacagatgcagaaggacccccaggcactcagcgaacacttaaagaatcctgtaatagcacagaagatccagaagctgatggatgtgggtctgattgcaattcggtgatgacttgttcatccccccttcccttcgccctcatgtggaaagaggagctgggaccgcggcgagcagcacggagcggaagggagagcaggggagagaaggcctcatctctctatatttatacataaccccggggaagacacagagactcgtacctgcgctgtttgtgccgccgctgcctctgggccctcccagcacacgcatggtctcttcaccgctgccctcgagttccatgtctctttcccctgcccctagttgctgtctcggctgctctcccatagttggttttttttttatttggggcagtgggcatgttatggggaggggagggggttcttccagcctcaggtcccagctgtctcacgttgtttattctgcgtccccttctccaataaaacaagccagttgggcgtggttataac

SEQ ID NO: 21263 - DNA, 965 bp, Homo sapiens
  misc_feature (933)..(933): n is a, c, g, or t
  misc_feature (942)..(942): n is a, c, g, or t
tagaagaactcgaccagtgagcaggcgaggaaggggcgggagccggggtcccggtagcttctagtaggttccagaaggcggcgcgtgcggttgggaacgcggagcggacggattcgattcaacggggttccggaccgcgctgcgctatggagcaggtcaatgagctgaaggagaaaggcaacaaggccctgagcgtgggtaacatcgatgatgccttacagtgctactccgaagctattaagctggatccccacaaccacgtgctgtacagcaaccgttctgctgcctatgccaagaaaggagactaccagaaggcttatgaggatggctgcaagactgtcgacctaaagcctgactggggcaagggctattcacgaaaagcagcagctctagagttcttaaaccgctttgaagaagccaagcgaacctatgaggagggcttaaaacacgaggcaaataaccctcaactgaaagagggtttacagaatatggaggccaggttggcagagagaaaattcatgaaccctttcaacatgcctaatctgtatcagaagttggagagtgatcccaggacaaggacactactcagtgatcctacctaccgggagctgatagagcagctacgaaacaagccttctgacctgggcacgaaactacaagatccccggatcatgaccactctcagcgtcctccttggggtcgatctgggcagtatggatgaggaggaagagattgcaacacctccaccaccaccccctcccaaaaaggagaccaagccagagccaatggaagaagatcttccagagaataagaagcaggcactgaaagaaaaagagctggggaacgatgcctacaagaagaaagactttgacacagccttgaagcattacgacaaagccaaggagctggacccctacttgattacttaccatnaaccgcggntcttgaaaggcgattcataaggc

SEQ ID NO: 21264 - DNA, 957 bp, Homo sapiens
tagaagaactcgaccagtgagcaggcgaggaaggggcgggagccggggtcccggtagcttctagtaggttccagaaggcggcgcgtgcggttgggaacgcggagcggacggattcgattcaacggggttccggaccgcgctgcgctatggagcaggtcaatgagctgaaggagaaaggcaacaaggccctgagcgtgggtaacatcgatgatgccttacagtgctactccgaagctattaagctggatccccacaaccacgtgctgtacagcaaccgttctgctgcctatgccaagaaaggagactaccagaaggcttatgaggatggctgcaagactgtcgacctaaagcctgactggggcaagggctattcacgaaaagcagcagctctagagttcttaaaccgctttgaagaagccaagcgaacctatgaggagggcttaaaacacgaggcaaataaccctcaactgaaagagggtttacagaatatggaggccaggttggcagagagaaaattcatgaaccctttcaacatgcctaatctgtatcagaagttggagagtgatcccaggacaaggacactactcagtgatcctacctaccgggagctgatagagcagctacgaaacaagccttctgacctgggcacgaaactacaagatccccggatcatgaccactctcagcgtcctccttggggtcgatctgggcagtatggatgaggaggaagagattgcaacacctccaccaccgctgccctcgagttccatgtctctttcccctgcccctagttgctgtctcggctgctctcccatagttggttttttttttatttggggcagtgggcatgttatggggaggggagggggttcttccagcctcaggtcccagctgtctcacgttgtttattctgcgtccccttctccaataaaacaagccagttgggcgtggttataac

SEQ ID NO: 21265 - DNA, 1444 bp, Homo sapiens
tttatgtaggccagccgctcttgttccttcaggattttctctgcctgctggcatttcttgagcacgcactgaaagaaaaagagctggggaacgatgcctacaagaagaaagactttgacacagccttgaagcattacgacaaagccaaggagctggaccccactaacatgacttacattaccaatcaagcagcggtatactttgaaaagggcgactacaataagtgccgggagctttgtgagaaggccattgaagtggggagagaaaaccgagaagactatcgacagattgccaaagcatatgctcgaattggcaactcctacttcaaagaagaaaagtacaaggatgccatccatttctataacaagtctctggcagagcaccgaaccccagatgtgctcaagaaatgccagcaggcagagaaaatcctgaaggagcaagagcggctggcctacataaaccccgacctggctttggaggagaagaacaaaggcaacgagtgttttcagaaaggggactatccccaggccatgaagcattatacagaagccatcaaaaggaacccgaaagatgccaaattatacagcaatcgagctgcctgctacaccaaactcctggagttccagctggcactcaaggactgtgaggaatgtatccagctggagccgaccttcatcaagggttatacacggaaagccgctgcgctggaagcgatgaaggactacaccaaagccatggatgtgtaccagaaggcgctagacctggactccagctgtaaggaggcggcagacggctaccagcgctgtatgatggcgcagtacaaccggcacgacagccccgaagatgtgaagcgacgagccatggccgaccctgaggtgcagcagatcatgagtgacccagccatgcgccttatcctggaacagatgcagaaggacccccaggcactcagcgaacacttaaagaatcctgtaatagcacagaagatccagaagctgatggatgtgggtctgattgcaattcggtgatgacttgttcatccccccttcccttcgccctcatgtggaaagaggagctgggaccgcggcgagcagcacggagcggaagggagagcaggggagagaaggcctcatctctctatatttatacataaccccggggaagacacagagactcgtacctgcgctgtttgtgccgccgctgcctctgggccctcccagcacacgcatggtctcttcaccgctgccctcgagttccatgtctctttcccctgcccctagttgctgtctcggctgctctcccatagttggttttttttttatttggggcagtgggcatgttatggggaggggagggggttcttccagcctcaggtcccagctgtctcacgttgtttattctgcgtccccttctccaataaaacaagccagttgggcgtggttataac

SEQ ID NO: 21266 - DNA, 425 bp, Homo sapiens
tagaagaactcgaccagtgagcaggcgaggaaggggcgggagccggggtcccggtagcttctagtaggttccagaaggcggcgcgtgcggttgggaacgcggagcggacggattcgattcaacggggttccggaccgcgctgcgctatggagcaggtcaatgagctgaaggagaaaggcaacaaggccctgagcgtgggtaacatcgatgatgccttacagtgctactccgaagctattaagctggatccccacaaccacgtgctgtacagcaaccgttctgctgcctatgccaagaaaggagactaccagaaggcttatgaggatggctgcaagactgtcgacctaaagcctgactggggcaaggtcagctgtgggcagtggagggagagaggcccttcagacccttccagaaatgccttttgg

SEQ ID NO: 21267 - DNA, 405 bp, Homo sapiens
ggagatctggttgttggttcttgccatgtgagatgcttgttccccctttgcttccaccatgagcaaaagctccctgaggcctccccagaagcagacgtcagtgttatgcttcttgtacagcttgcagaaccacgagccaattaaacctcttttctttataaatttcccactctcaggtatttctttgtagcagtgcaagaacagcctaataatggttattctgtacaactccaagtccagtagttctgggtgagatccattccttctctaattctgtcccactcctgtctcaatattctgcaacaatgtatacaatagtggattaaagggaaagacaaaatacatttattaaaatatataaatatacccatggcacagcaaggaagaacatacaggctctgtatg

SEQ ID NO: 21268 - DNA, 337 bp, Homo sapiens
aaatgctgggattacaggcatgagccaccgcttccggcccctggctaatttttaaattttttgtagagacaatgtcttgcttcattgcccagcctggtgttgaactcctggtttcaagtgatctgccaaagtgttggaattacaggcatgaaccactgtgcctgacttaccctttgttttttattatggaaaaatgtacataacatcaaatttactttttttgttgttgttgttgagatggagtcttgctctgtcacccaagctagagtgcagtggtgcgctctcggctgactgcaacctctgcctccccagttcaagtgattcttttgcttcagcc

SEQ ID NO: 21269 - DNA, 382 bp, Homo sapiens
aagtcaggtagtgtgatgcccccccagccttgttccttttggccttagtattgaccttggcgatgcgggctcttttttggttcccatatgaactttaaagtagttttttcccaattctgtgaagaaagtcattggtagcttgatggggatggcattgaatctataaattaccttgggcagtatggccattttcatgatattgattcttcctacccgtgagcatggaatgttcttccatttgttgtaaactttactaatttttaagtgctctttctgtattaagaccacaagccttatgtccaatcaaaatttcatgacatttcttttgatgctaggggtaatattataaaactattctaaaactcatctagaacaataccac

SEQ ID NO: 21270 - DNA, 686 bp, Homo sapiens
tgagacggagtctcgctctgtcgcccaggcttgaaagcaatggagtgatcttggctcactgcaacctcggcctcccaggttcaaaagattctcctgctacaggcacacaccaccacgcccagctaatttttgtagttttagtagagatggagtttcaccatgttggcctggctggtcttgaactcctggcctcaagtgatcagcccacctcggcctcccaaagtgctgggatcacaggcatgagccacctcaccaggctcggtttcaaattttaaaattgcatgtttgttttcttactatgcatttccctaattctactcttaaaatgtattattttttgtttgttttttcctatatatttcaaactataaaatcagcttaaaaaccaagggctccccaatgatttgctactgaccaggagatcaggcccagtctctacaatgacctctcctgcactaaagcaaaagcgaggtgcttacttaaggccagctacttattcaatcccggggccaacctttctcagctggaacttaaccagccccagtactcacaaagcccagctcacattcactgcatgtcttcacttacagatataaatgcctgcacacacatgccctttacttacattgtgaccattatgtggagccactttatgggtcgacgcggccgcgaatttagtagtagag

SEQ ID NO: 21271 - DNA, 302 bp, Homo sapiens
attcaatcccggggccaacctttctcagctggaacttaaccagccccagtactcacaaagcccagctcacattcactgcatgtcttcacttacagatataaatgcctgcacacacatgccctttacttacattgtgaccattatgtggagccactttatggatgtaactgcattttgatgttttattttttaagacagggtctcactgttgcccaaggtggagcgcagtagcatgatcataacactgcagccttgacctcctgggctcaagcaatcctcgctccttagcgtcccaagtagct

SEQ ID NO: 21272 - DNA, 497 bp, Homo sapiens
cactacaatttcacaatggacaggttggtgattctcaactaggagctattttgccccccatcccccacccggcagtgtctggagacagttttgattgtcacaactgcgagaagtgggtgctactggaatcactgggtagaggccagcaatgctgctaaacatcctacattgcacaggacacccccacagcaaagaattatctagcccgaaatgttaactgtgctgaggctgagaaaccctgatttaaaaactgtgctcatataataaaaccgtgtatcctcttttgatttaatgtaagtatttccatgtcattataaattttctacaaattatcattttaaaaacaatacaatattcctgctgattgctaacttacccatcttcctgctggtagacaatttaggatattttcaggattttgatctcataaatagatgctaggctttgatttaaagagacttttctaaggtatccaaaagcttattcattcaacaaac

SEQ ID NO: 21273 - DNA, 329 bp, Homo sapiens
gaatgtcttaagccaacactgatacagggggactgtcattcattttataagcaaggaaaatgaagttcaaagagaataagagaattgcccaatgtgagatggagggtgagtgccggagctgagactctaacccaggtgccctgactgcagcttgttttctcgcctggtcttcttacagttaacagttgatttctccagactttctcatgttgaagagagtataatcctgtaaaagttgacttgtgttcaggggtttggccacaaggcatagattttttggagcaagtaaatactatatgttggaataaaatgagagagcccacataata

SEQ ID NO: 21274 - DNA, 796 bp, Homo sapiens
taacaggggcaatccaccaagaagatacaattattctgattgtatgcacttaacactcaaaataggcaaagcaaaaatttactgatgcccaataaattcacaatcataatcagagatcttaaaatatatcccttagtaactgatagaatatcagacaaaaaagagaaaaccaataattatatagaagagttggacagtaatattaacaaacttgacctaattgacatatatagacaaccacatgcaacaattgcagaatacatattcttttctgcacatagaaaaatacgtgatgtgttgagccataaagcaaatctcaaaaactttaaacaattatagtattttttggccacactgacattaagttagaaaacaagaaataaattagaaaatctccctaaaattcgtagtatactttaaaataacctgtgggccaaatttttaaaaattgcaatgtaaaatagaaaatattttgagctgactgagaaatggaaatatagcatcttaaaatttaaagggatactgtttaaccattactgtaagggaaatttgtgtccttaaaatgcatattccacaaaagaggaaaggctaaaaaatcaatgacatatggatccatctcagggaattggaaaaacaatagaaaattaatcctaaagaatgtagaaggaagcaaagataagaacagaatttcctgtaagaaagacatatttgacagacagcattattgaaaccgaaagtttcttttatgaaaagactaataaaattgataataccactagaaatatggataaagaaa

SEQ ID NO: 21275 - DNA, 444 bp, Homo sapiens
tagcaacacacatgtaaatgtccataagataaattgtttataatttatcagaaagaatgtaacaacaactattacaaatcaatgtctaattttattatggcagtgtccaataacctatcaaataactcttaagatgccaaaaaaaaattttaagcaccatttcactaaaaattaacttaaggccaggcacagtggctacccctgtaatcccaacactttgggaggccaaggcagccagaccgcttgagcccaggagttggagaccagtttggccaacatggcgcaaccctgtttctacgaaaaatacaaaagtaagccaggtgtggtggcacatgcctgtaatcccagctactcaggaggctgaggcaggagaatcgcttgaacctgggaggcagaggtcgcagtgagccgagatcatgccattgcactccagcctgggcaaca

SEQ ID NO: 21276 - DNA, 249 bp, Homo sapiens
ctagtatcttctctttggaaggaaacacatgtgggtgtgtgtgcacatacacaatcctaaggtgtaaataagtacataatgaagccttgtcctctatgtttactctttgtttttggtaatgatgttgaaacagtttgtcttgtaagtgccttattaaataattaataggtatatagatgcattttaaaaatatgtattaatctattccccttctagtgcccttctctccctgaaattgacattgaaaca

SEQ ID NO: 21277 - DNA, 1871 bp, Homo sapiens
aaataaaatgatctagatacaaacaagtatagcaaaaatatgctcttctccttaggtttttgagacactacatacacttctcgttgtcttgtgaattcagtagatccttgccaaactactccactaacttgtcctctttatcagaccttgaaacaccagatctcattcttgtctcatctgaggttcccattcttcctttctgactttgcactaaggaacctcatcaggttccatggccttcattaccacctacatgttggtgatggtcctgtgtgtgtcagcggcccagcccactccccgagctccagacccctcacgtttctccatgaggcaccatagttatgattcacaggattcagcatccagcaagaaactactgatgagaccccatattcccaaataggaaaaaagaaaagaaaaaacagaaaaatcttgcatcctgattccccagtctagtaatcacaaagttgaagagaataccatggtctcaccatggaggcagaccagccggctgcagtcccaactccaccacttacagccttgaggggccctggacaagttcatgttcgtgtgctttgattttccccatctgtaaaacgggggtgataatagcacttcctcataaggttgttgactaaatcagttaatatttgtaaagggaacagaaccgtgcttgtcataaagcactatggaagattactttttcataaaatagaacaggtttaggttctaacattatgttgctgatgctcttagcagagtgttcttgtctgcagcctgcctgagcactccacttagctcagagtgcataacgacacaaattattcttccagctgtggagatgttcaaaagttcttcaaatgcattttgtgttctgggactggtgaagccattggtagaacatgatcctcgctgtgaactttctggattgctcatatgatccatttgttaggatgaatgtgtttgtttcctccaaggtctcaggtaacccaggaaagcagggcaccaactgagtcagaccaagtcctgcaaatctgaaaagtgacgtccacagcctgtataccagggacaaggaggagaggaaatgttcctgactctcccttcccatgtatcagctttttccccactacacaaaaagggtcaatgttgacttctggggtctagacttctgagaggtcagaggtgagcatgtgctcaaggggccactcatcaaacaagtatgaattgggcttcagctgctatcaggcactatgctaggtaaggcagaaagcaagagagatcctacctagtcctagggacacacaacctcagagacaaatgcagaaggcagttaccaagcaattacggtccaacatgtctggtccaaccttttcctttactggtgaagaaactgaaactttagagggaatgagcttgtttacatgcaagaagtgaatttgagatcaagttgggactcaaatcctatttcacaattagaattctgtcctaacattcaacccaattcaataaacatttgttgaaaaatctatgatgtgcattaaaaattttcagtgctttatttctgaaactttctctgttcaaaaagcctttatacctccctcattcctactgcatcaagtgcaaacttcttcctggccttcctgaccttctaagatgggccatgaggctatctcatcagtctgggtccccatcactgcccaggggccgccccctctgctgcagtctgtgtgtctcagctccagttcttctcatcctcaggccccacctcactcagtcataccacaggcacactctttgccccttctgatgtgctttgaggcttgggcccaggggcaagacaccagaggactgctctcagctgcccacaggga

SEQ ID NO: 21278 - DNA, 1034 bp, Homo sapiens
agcgggtcttactgctaacctgtgtggatgtttctggtactcagaaaaatcaggaacatcattttcaatctgaagaattaaataagaaattcaataaagcaggataagaaaatggctggcatgttttcccattacctagaatagctctgtggagaccaaccattccatgaaaacaactgcaaaacaggataatccagtaaaaacatctgctgaaaggcatcagaaaactagcaaggcagcaagactgagaagccaagatagcagaaagaagggtgtgcagagaggtcagctcagtattcggtgccacttttccttgaggcatttgtcaactcctaaacagcagcctaaagatgaaggagctgagcagatattctaagagtttcacggggataaggaataacatggaagcttaagacccaataagaagcagacaaaatatcccagcatttcagttggaaccctggatgggattcatttcaggagtaatagggaaccagaaacaaaggacggtcatgaagattcaagcccactgagattagactagctgatctgcctctaccctaactttcaaccagaaagaaaataaacccgctagcagtaacacccatcctagagtctggaattatctctgaaaattttcacatacccatatccctgatttcaataaaaaattatcagtcatattaagaagcaaaataaatgatcaaaagccaagaggaaaaaaatcaagtaaaagaaacgagccaacaggagacaggacacgggtggcacgcctgtaatcccagcaccacaaggtgggtggatcacttgaggtcaagagtttgagatctgcccggccaaaatggtgaaaccccatctctactaaaaatacaaaaattagccgggcatagtggtgggtgcctgtaatcccagctacttgggaagttgaggcatgagaattgcttcaacccgggaggcggaggttccagtgagctgaggttggcctctgcactccagcttggctgacagagcaagactctgtcaaaaaaagaaaa

SEQ ID NO: 21279 - DNA, 1483 bp, Homo sapiens
agaaatggagcaaagcaactatacctcatgggtcagaaaatgattttcatgagttaataaaaaattgtatcttctaaaatttttcaaataacacaaaactagactttcttgcttagggtaaaaggatggattctgataagaaccatctttttgtttcctaatatttaaacatcctcttttgtccctcatgggaattaacaaagaattcttgagtctgtctggtagataaaaacgtcaacagtgaaaacacagtttcaagaaaagtatttctttcttgatggggtgactttcacccatggaagagcatgctctatgaagttgtctatttcacaaatatgataattttatattaaagataattttaaatataaaatatattttaaaatatttaaatatgaaatgctcttagcatattactctacataataaaggttccaaaacatattctttccaacatttatatttttctttctcagatgtttctggtactcagaaaaatcaggaacatcattttcaatctgaagaattaaataagaaattcaataaagcaggataagaaaatggctggcatgttttcccattacctagaatagctctgtggagaccaaccattccatgaaaacaactgcaaaacaggataatccagtaaaaacatctgctgaaaggcatcagaaaactagcaaggcagcaagactgagaagccaagatagcagaaagaagggtgtgcagagaggtcagctcagtattcggtgccacttttccttgaggcatttgtcaactcctaaacagcagcctaaagatgaaggagctgagcagatattctaagagtttcacggggataaggaataacatggaagcttaagacccaataagaagcagacaaaatatcccagcatttcagttggaaccctggatgggattcatttcaggagtaatagggaaccagaaacaaaggacggtcatgaagattcaagcccactgagattagactagctgatctgcctctaccctaactttcaaccagaaagaaaataaacccgctagcagtaacacccatcctagagtctggaattatctctgaaaattttcacatacccatatccctgatttcaataaaaaattatcagtcatattaagaagcaaaataaatgatcaaaagccaagaggaaaaaaatcaagtaaaagaaacgagccaacaggagacaggacacgggtggcacgcctgtaatcccagcaccacaaggtgggtggatcacttgaggtcaagagtttgagatctgcccggccaaaatggtgaaaccccatctctactaaaaatacaaaaattagccgggcatagtggtgggtgcctgtaatcccagctacttgggaagttgaggcatgagaattgcttcaacccgggaggcggaggttccagtgagctgaggttggcctctgcactccagcttggctgacagagcaagactctgtcaaaaaaagaaaa

SEQ ID NO: 21280 - DNA, 702 bp, Homo sapiens
  misc_feature (683)..(683): n is a, c, g, or t
acagtgtccagggagcacaaggcctgggggcccacaaacctgggtctgtatgcccactcttcattagcagctccaggaccaagtgcggtcagttttctggaactcgtttccatatctccactgtgatgtaaggatgtgcatggatcctaaatgtgagaagctggcaatcaccaggtccctggcaagtgctcagagtctgagctaccatcaaaatcaagggcacagggggaggctaactgcttctctgaatactctaagggaggcagatctaggccaggtgaccagggtttacaagtcccaggacagcaggttgggcttggtgcacggaagaactgatgagcagcttcactcatgcagcaggacagatcaggacaaagccatgctggagttggggccacacatctgctgaaaacccccaacactctttttcccagcagcagcttccaagcaattcctgaggccctcccaccggctaaccagaaaggaacccaccattggtctccttagtaacgacttccaaggccccttgcacatctgaaaagcgcacagtgtgatttccagacccaagttagacagcgatttcttcaaagtgcaacgccctcaattaatgaaccctctgggaatgaagtaccttctaacaaaaacattgttcaaaataaagctggaaaaaaacctcaaaaaanaaaaaaaaatctccaggct

SEQ ID NO: 21281 - DNA, 565 bp, Homo sapiens
ttgtactgtttatacaaaagtatgtgggaactggagaactttcactgaaacatagtgtaccctaaaagttaaagaaagaattaaatggtcctttctaacaaatataatcctattttttttttcttttttgagacggagtcttgctctgctgcccaggctggagtgcaggggcgtgatctcagctcactgcaagctctgcctcctgggtttgcaccattctcctgcgtcagcctcctgagtagctgggaatacaggcgcccaccaccacgcccagctaatttttgtatttttagtagagatggggcttctagtttccatgaaagagcttttatttatataagatggaattcatgcttatataaacatgaatgacatctaaaacaagcaataaatatctaaaatgtaagaaagtattataaaacaaataaagagtgaaagaaataaacaggcacagtgtggtggctcatgcctataatcccagcacttgggaggccaaagcaggtggatggcttgagctcacaagttcgagaccagtccgggcaacatggagaaaccctgtctctac

SEQ ID NO: 21282 - DNA, 401 bp, Homo sapiens
catataacgctttgtaaatgttttagactttggctttaatgggaaagaaatggggagccattcgtgggtttttgagcagcaggtggacattgcttttcataatgaccacgccagctgctgtttggagaatagactgtaggggtcactgcgcaaattggaggccgcgatccaggtgagaaccaggtgaaacagagctcgggccatggagtggcgctggaggtaaggagaaacactcagactctgggtatgttttttgaaagtaggataaaaggccgggcgcggtggctcacgcctgtaatcccagcactttgggaggccaaggtgagcggatcaagaggtcaggagatcgagaccatcctggctaacacggtgaaaccccgtctctactaaaaaaaaaaaaa

SEQ ID NO: 21283 - DNA, 197 bp, Homo sapiens
tttttgattttttcaatttttggttgggtgcagtggctcacacctgtaatcccagcactttgggaatcctgacctcaagtgatgcgcccacctcagtttcccaaagtcctgggattacaggtgtgagccaccgcgcctggccgaaacttgtctttttcaattggatcatttttcacatgctgcagtctccttagttt

SEQ ID NO: 21284 - DNA, 1008 bp, Homo sapiens
gcggttctgagctggcattacctgcagcagatggatcactggacagcgagtccggaaatcatccttctccaccaagctttcccacttaatagcttggtaacctttgacagatgatttctttctttcctaatttgtagcatggggacagtgagggatacaacagcagtttctgaaacagcagtgaccaccatttactgcatttaccccaggccaggcactgtgtgtgggcatggcatttaatcccggtaacactctataagataggggctgttatgacctcatttctccgatgaggaagccagggctcagagaagtgaaggcatgagcccgttgttatgaagtcattagatagtagagctgggatttgaacccagagccccactctacctttgagccatgctgctactttgacaaacttttggatgactttgggagatggggaccttggggaaaaatgcactttgaaagaattggatcatttcagtagaaacctgtaaacgtgtgtcttaaaaaaaaatgtcagtgacagtttgcttctcggtgagatgaatgcagataaacctattttgactgttaacttattttgttgcttaaaagccagtgacatgtagtgttgaatttatttttcttcacaacatttaagtgtttgccacttcttgagtgacgtgtgtgaatttgggaattgcctgtactttgggaatggaggccgttgcttgtatgtaaggcttttgccttaagagggacttttgggaaggcttgttctggctcggggccttgctaagaagcgactcgagtgcagcaagggtacctgtgtctgaggatattgatagagctgaagctcactctgaagttggggtcatggtggagagccgatcgcaggagtctttgtgactggaagcctaaatatttattctgttctgtccctaatgaaaacaaattgtcaacagttgttcggtaactgactaaattaaaatctgtaattagtcaattagattaaagagttggcac

SEQ ID NO: 21285 - DNA, 183 bp, Homo sapiens
attataatggctatggctatggatttgggtcagatagatttggaagagacctcaattattgtttttcaggaatgtctgatcacaaatatggggatggtggctctaccttccagagcacaacaggacactgtatatacgtgtggattaccttacagagctactgagaatgacatttgtaatttt

SEQ ID NO: 21286 - DNA, 395 bp, Homo sapiens
tgttagaaaaaaaaactgacagcaggaggaggatgaatgagaggaaggtaagtcaggaggataagggaaacaggaggctttttgtatagtcgtgcaccatatgatgacattttggtcaataacagaacatatcaaccatggtggtcccatacgattataatggagctagaaaattcctttcacttggtgacgtcgtagctgttgtaatgtcatagtgcaaatactttatttttcataaatttagggtagcctaagtgtatagtatttataaagtctacagtaggtacagtaatatcctaggtcttcagattcattcactactcactgactcacccagagcaacgtctagtcttgcaagctctgtttatggtaagtgctctatacgcgactactat

SEQ ID NO: 21287 - DNA, 271 bp, Homo sapiens
aaactgaaaaatgcatcagtgtctcaataacagaatttatcaagcagaagaataaattagtgagtttgaaaacatgaaaatatagaggagaaaaagaaagaagaataaaaaggatgaagtatgcctacaagatctaaaaaataacttcaaaaggacaaatctataacttattggccttgaagaagatgtaaagaaagagatcaggatataaagtttgttcaaagaaataataacagagaacttgcctagcatagagaaagataagaatatc

SEQ ID NO: 21288 - DNA, 442 bp, Homo sapiens
ctagaatgtaaaattaaattttaaaaaattaagaaataaaaaaattgccttctgaaggagagaattgctaagtgagtacaggatttccttttgggttgttgaaaatgggaactagatggaggtagtggttatacagcattgtgcaacaatgtaggtaacgtttactttaagttaaaattgtcaattttttgttatgtgaaattcacctaaataaaaaagttattttccatattatgtgctattatactggggtcagaacaaatttagtcacaccttcacaaaaccatgcaacagtggttgtgataatatttgcaagaggagacatggcaagaatgagcatcattaatgggagataagtatctgtcacactctcctaagatagaaaaaccagctgaaacattttaaatagaagattagtatctgtcacactctcttaagacag

SEQ ID NO: 21289 - DNA, 466 bp, Homo sapiens
tggaggtataattactgtaattagaaataggtgacattttccttgagatatttatatacagagctcaaatccaaaggaaaagcactcgttttgtaccatctctcttctcaatatctctctctgtctttctgtcttgtccaattaggaaattcagtggtagctaaaacacaactttgcctactttagaattctgtctgtgtctaagccccagaatacaacttttaataactccaagcctccttgaaaaggtgacaacaagacagctttgacattttgtgcacattcatccttactgctgggaaaaccacaaaacctggagtctgccaatggagcatcaataatctttgtgtcataggtgaagaccagtaaaattagcacttaagacaattcttcctggctttcctaaacaaattcgtgaaaagaagtggattcgtctttctctactcttagctcgtctatttgagta

SEQ ID NO: 21290 - DNA, 423 bp, Homo sapiens
ccaggctggtctcgaactcctgacatcaggtgatccgcccacctcatcctcccaaaatgctgggattacaggtgtgagccaccacacccggcctctttaacatttttaatgaaacagtatgtttataatattccagattttaacctaaatatctgaaattgtccgaggttaggaaagattccacagccaggtgacacaggaacagataagggcaagagagctgacatttactgcatgctgacaatgtgctgggaggcacatgagttaacccacctcacctcacagcagcctcatggcaactaggactgcggttttacagacgaggatcctgagatacagagaggctgagcaactgcccaaagtcccacagctaaagggggcaaggccagggtcccaacactggcagtcactcacccgcagtgc

SEQ ID NO: 21291 - DNA, 397 bp, Homo sapiens
ggatcctaaacttttgctttcagctggcagtaatgagtcggcacactttcttcctctgccataatggtgccagaaaacacacacacacacacacacacacacacacacacacacagctaaaataaaagatttaaataagattcagagtcttgtaatacaaaaatttccaactttcattagatatcaaactcaataaaaagaactatcaatagatgccaacagcaagattgtagagatgttaaaagtatatcacaaatattttaaagtagccatgataaaaatatttcaatgagaagtacatgcatgcttgaaacaagtaaaatgtctcagcaaaatttcaagccttagtaatgaaataaaagagatgaagacacaaatggaaattttaaaactaaga

SEQ ID NO: 21292 - DNA, 2357 bp, Homo sapiens
atccgggcccttccagaagcaacccaggagccccgagacctgcagggatgtgtgcaccctgacccctgacgcatagccctgcacctgcagccagctggcctcgggcttgaaaacatggcgggtgcgctccaattcacggtggtttccaagcgcattctggaggagaaaacacatgagtgtgtggtcagggttctctgccgacagacctaccgtggggaagaaagagaagttctgaagatggatcatggccgtgactgcatgtcaaggagaatctccatgatgacacggaggcctacgtcgagatagagtaaatatggtccaattaaaaggtgacccgacaatcaacccctgaaaaaggcggtcataaaacccccaggagacgaagatgatggcacgtcgtgaccccaaacctggggcaaagagactggtgagagcccagaccctccagaagcagcggagggccccagttgggccaagggctcccccgcccgatgaagaagatcccaggctcaagtgcaaaaactgtgaggcctttggccacacggccagaagtaccaggtgccccatgaagtgctggaaggcagccctggttccaccgaactttggggaaaaggaagggaaggaaaacctgaaaccatggaagccccaggttgaagcgaaccctgggcccttgaacaaggataagggagagaaggaagagagaccaaggccacaagacccgcagaggaaggctctcctccacatattttccgggaaacctccagagaagccgctgccaaatcaaaaaggatccacggaatcttctgattatctgagggttgcaagcgggccaatgccggtccacacaaccagtaagaggccgcgtgtggaccctgtcctctctgatcgctcagctaccgaaatgtctgacaggggctccgtcttagcttcactgtctcccctcagaaaagccagtctgagctcctcctcaagtcttggaccaaaggaaagacagacaggggctgcggccgacatccctcagactgcagtcaggcaccagggccccgagcctctcctcgtggtgaagccgacacacagcagccctgcgggtggctgtcgagaagttccccaggctgcctccaaaacccacggcctgctccaggccgtcagcccccaggcacaagacaaacgtcctgcggtgacctcacagccctgcccaccagccgccacacacagcttgggcctaggctccaatctcagcttcgggccaggagccaagagatctgccccggctccgattcaggcttgcctgaacttccccaagaaaccgagactgggtcccttccagatccccgaaagcgccatccagggaggtgagctgggggccccggagaatctccaacctccgccagccgcaaccgaacttggaccacgtaccgtgtcaccccagataggcacgaggacacccgcccaggtgcttagcggcgaccggcagcctccgcacagcagaccttgcctgcctactgcccaggcctgcaccatgtcccatcacccagcggccagccatgatggggcccagcctctcagagtgctctttcggagactggaaaacggacgctggagctccagcctgctgacggccccctcatttcactctcctgagaagccgggagccttcctcgctcagagccctcatgtctcagagaagtctgagggtccctgtgttcgtgtcccaccaagcgtcctctatgaggaccttcaggttccctcctcctcagaggacagcgattctgacctggagtgagactgcaggtggcaggggctccttggcctccagctcccgtgacttggaggggactgtgggactgaggagcacagagcagagagcagactctgtgcggtgactccgaagctccccggctgtggcccttctgtggatgtgggagcccaggccaggcagggagcagatgcagggactctgccacgttgaattctggtgagggacattgtagttcgcatggttctctggaaacgcgccaggaaaagcttccgtgccagtgattcgttgcctcagaaactgcatgacgcgcaggagtcagacttccgctgggacgtcaataggaaacgggggaattactgtgtatttgctctctagacgactgaataagggaaaagttagggaaccctgagaggtgcagcccttccgctgtgccccgccctgagagcagtgtttccgacgctgggaagcgcgctgtgcaaagcgctctcggggtctttcctcagcctcgaaaagtgggctctggaatccctttgtaaataggtgtgttgaatttgttttgaagtgaataaaattctcaaaaagatgaaaaaaaaaaaag

SEQ ID NO: 21293 - DNA, 813 bp, Homo sapiens
atccgggcccttccagaagcaacccaggagccccgagacctgcagggatgtgtgcaccctgacccctgacgcatagccctgcacctgcagccagctggcctcgggcttgaaaacatggcgggtgcgctccaattcacggtggtttccaagcgcattctggaggagaaaacacatgagtgtgtggtcagggttctctgccgacagacctaccgtggggaagaaagagaagttctgaagatggatcatggccgtgactgcatgtcaaggagaatctccatgatgacacggaggcctacgtcgagatagagtaaatatggtccaattaaaaggtgaccagaggcagtataaaaggcagcctggaaagcagaggtccctctccgccccttcctccgtcttcctggatgctgcatcgcttccagcggggctgctccagcacctgcccatctcagcgccagccggggaaagaaagtagacgtgtaatttcaggttagtttcactgaacagttgtttgtttcacgcaatccctgaggggtgggggggaaaagagacaaaggaggccgaaagaaagcgatcacactggggcttgctgatgcggtagggtgtgctctcgttactagtaattcttggaacagaaaacgagaaagcatttccgtctccatgtgtgggataagaccaaggtgggaatgcgaaaagaaatgtactgcagcatgctgaattggtgggtaaatggaaaaaggactttggaaaaaagggtggtttgcccttcagccgtgtaagacattgatacgatatggcacttgttcaccgttcgtt

SEQ ID NO: 21294 - DNA, 582 bp, Homo sapiens
aagacatcaatgaagaaacaagaaaaaaaaaaagatgcttggaaactactgaaaaattagaaagcttggtatgtacagattcacatctgggctccctgccctgctgtgaaaccctctgagcttcagtttcccacatgtaaagcagtataagaccctatggcagagagctgcagtggggattaaggagacaagatcgtgggaagcacaaggtaaaggcggcgtgcccctccctggactccaatgcctggagtctcaagaccagctgaaaagggagccaggcactgaaggacaaagcggtgttgactttcttcatctgtgtttcccagtgcgctccaattcacggtggtttccaagcgcattctggaggagaaaacacatgagtgtgtggtcagggttctctgccgacagacctaccgtggggaagaaagagaagttctgaagatggatcatggccgtgactgcatgtcaaggagaatctccatgatgacacggaggcctacgtcgagatagagtaaatatggtccaattaaaaggtgtctattttaccacattttttaaaacaaaacaaaacacaaaaacaaa

SEQ ID NO: 21295 - DNA, 505 bp, Homo sapiens
ttaaaaggtgtctattttaccacattttttaaaacaaaacaaaacacaaaaacaaaaaagatggaaaagaagacaggggtacaggcaccagtgttacatatctgacggggaacatctattcttcaaagcttgcagctgtacacgtaggttttagaatgtctgtcagcagtggacatgatcttagagtgggctgtgcagatagacctttccgagtcatgtaattggattaagttaattgtaattaacctacatgtaactgattaggttagggtacgttccacgtcaggtgaccagaggcagtataaaaggcagcctggaaagcagaggtccctctccgccccttcctccgtcttcctggatgctgcatcgcttccagcggggctgctccagcacctgcccatctcagcgccagccggggaaagaaagtagacgtgtaatttcaggttagtttcactgaacagttgtttgtttcacgcaatccctgaggggtgggggggaaaagaga

SEQ ID NO: 21296 - DNA, 2514 bp, Homo sapiens
atccgggcccttccagaagcaacccaggagccccgagacctgcagggatgtgtgcaccctgacccctgacgcatagccctgcacctgcagccagctggcctcgggcttgaaaacatggcgggtgcgctccaattcacggtggtttccaagcgcattctggaggagaaaacacatgagtgtgtggtcagggttctctgccgacagacctaccgtggggaagaaagagaagttctgaagatggatcatggccgtgactgcatgtcaaggagaatctccatgatgacacggaggcctacgtcgagatagagtaaatatggtccaattaaaaggtgaccagaggcagtataaaaggcagcctggaaagcagaggtccctctccgccccttcctccgtcttcctggatgctgcatcgcttccagcggggctgctccagcacctgcccatctcagcgccagccggggaaagaaagtagacgtgtaatttcaggtgacccgacaatcaacccctgaaaaaggcggtcataaaacccccaggagacgaagatgatggcacgtcgtgaccccaaacctggggcaaagagactggtgagagcccagaccctccagaagcagcggagggccccagttgggccaagggctcccccgcccgatgaagaagatcccaggctcaagtgcaaaaactgtgaggcctttggccacacggccagaagtaccaggtgccccatgaagtgctggaaggcagccctggttccaccgaactttggggaaaaggaagggaaggaaaacctgaaaccatggaagccccaggttgaagcgaaccctgggcccttgaacaaggataagggagagaaggaagagagaccaaggccacaagacccgcagaggaaggctctcctccacatattttccgggaaacctccagagaagccgctgccaaatcaaaaaggatccacggaatcttctgattatctgagggttgcaagcgggccaatgccggtccacacaaccagtaagaggccgcgtgtggaccctgtcctctctgatcgctcagctaccgaaatgtctgacaggggctccgtcttagcttcactgtctcccctcagaaaagccagtctgagctcctcctcaagtcttggaccaaaggaaagacagacaggggctgcggccgacatccctcagactgcagtcaggcaccagggccccgagcctctcctcgtggtgaagccgacacacagcagccctgcgggtggctgtcgagaagttccccaggctgcctccaaaacccacggcctgctccaggccgtcagcccccaggcacaagacaaacgtcctgcggtgacctcacagccctgcccaccagccgccacacacagcttgggcctaggctccaatctcagcttcgggccaggagccaagagatctgccccggctccgattcaggcttgcctgaacttccccaagaaaccgagactgggtcccttccagatccccgaaagcgccatccagggaggtgagctgggggccccggagaatctccaacctccgccagccgcaaccgaacttggaccacgtaccgtgtcaccccagataggcacgaggacacccgcccaggtgcttagcggcgaccggcagcctccgcacagcagaccttgcctgcctactgcccaggcctgcaccatgtcccatcacccagcggccagccatgatggggcccagcctctcagagtgctctttcggagactggaaaacggacgctggagctccagcctgctgacggccccctcatttcactctcctgagaagccgggagccttcctcgctcagagccctcatgtctcagagaagtctgagggtccctgtgttcgtgtcccaccaagcgtcctctatgaggaccttcaggttccctcctcctcagaggacagcgattctgacctggagtgagactgcaggtggcaggggctccttggcctccagctcccgtgacttggaggggactgtgggactgaggagcacagagcagagagcagactctgtgcggtgactccgaagctccccggctgtggcccttctgtggatgtgggagcccaggccaggcagggagcagatgcagggactctgccacgttgaattctggtgagggacattgtagttcgcatggttctctggaaacgcgccaggaaaagcttccgtgccagtgattcgttgcctcagaaactgcatgacgcgcaggagtcagacttccgctgggacgtcaataggaaacgggggaattactgtgtatttgctctctagacgactgaataagggaaaagttagggaaccctgagaggtgcagcccttccgctgtgccccgccctgagagcagtgtttccgacgctgggaagcgcgctgtgcaaagcgctctcggggtctttcctcagcctcgaaaagtgggctctggaatccctttgtaaataggtgtgttgaatttgttttgaagtgaataaaattctcaaaaagatgaaaaaaaaaaaag

SEQ ID NO: 21297 - DNA, 526 bp, Homo sapiens
gcctgtcaccattatttataacaattaaattgattatttgctcctggtcttggtgagaccaactccactaagaacgtcctgctattgaggctagttgtggcaggaatatgcctatgtgacaagcaaagtatgagaaacacctgagatgctatgttggaccctgattccaagatgctgtatacacacatcactggttcttgctctgggtggggatagtgtgtccagccacagcccttacaaaagggaggattgtgggagactgcgcctagttctccagagcctttgctctgaaataccggttggccgggacacatattcttaatttaatgccattgctgtattgaatccttttcttgtaataaacgaggtttgtaagcattgtcattttgggtcttgtgacactcctttaggcactgaaccctgttgaaactgccactgttaatgcacatattgtaaaaaacaaaaaaagatgaaaaaaatatatatattgtctgcctctggtcctttatccaggataattttaata

SEQ ID NO: 21298 - DNA, 395 bp, Homo sapiens
catgttatataagtacttcactgatttagttctttctactaggtgatcacattttcctttttctgagtctaccgatttctgcaatttatggactgagcatctcacactactctctgggtggtttatgtaaataacaataataaaagcccctgaagctgcatccctgttcccagtggtttcccactgacctctttcagcttgaaaaggttctatctattgctgatttttttttccttcctactggcaattttcagcctactgtgcttcttcatctcatttcttgactctttcttgacttaagaattaattattgaaatgtatcagatgcactctgaaaatgtcagtgtatttagttggatttacaaaaaagcacagcttttcagccaacatgatat

SEQ ID NO: 21299 - DNA, 378 bp, Homo sapiens
ggacctgttggatagatatgagactgcagggcaatcatatgaagcaaactgtgatatgtttgcttaagatacttaaagttttatgatttagatgatagtacattaggatagtttctgagtcagctttgcaagataagactgttcacattactagtgtggaaaacaaattcactagtagtgaacctggtgatagctggtttctccattgaccaaacctaagcagagaaagccagaatatgtgggagctcactgtaataatccctataagtcatcttcttagggcacagagcaagaagtggagagggtcaggaatgggtctggaaggtcaagtggaagatattcatcatagaaggacccagggagggctgactcaggcag

SEQ ID NO: 21300 - DNA, 608 bp, Homo sapiens
cagcagatgcagtgattgcaaatcctccttgtacaaatggaacaggcacgtgcatttgtggcacactcagagctgctggccactagtgtgctttggagaatcagttgtctcccaggcggggaaggtccctcagacataaaatactcacccatttagaggaatgacaacagcaaaggaaactatattctgctaatttactggtaagagaggaaaaactctgtcatgcatacacagacagaggctctgccaaaagagagaggcagcagatacagatattagcaaatgactcctctccagaagaaacacaccagccaggaacggcactcacacctgtaatcccagcactttcggaggccaggcggtaggatggcttcagaccaggagtttgagactagcctgggcaacatggcagactccatctctacaaaaaatgaaacaaacaaacaaacaaacaaaagatcagtgtggtgacacacacctgtagtcccagatattccagaggctaggcaggaggatctcttgagcccaggagatggaggctgcagtgagctatgatcctaccactacactccagccggggcaacaaagcaagaccccatctctttttt

SEQ ID NO: 21301 - DNA, 413 bp, Homo sapiens
gaaatgccagccctgagagatgcaactgatgtatgacttttttcctctctggatcaaaccatgacaaccgtaaaaggcaggccttgctgttaaggcgctgcagcctctgaagcacagttggcctcagggagctctgactcagtctacttattctggggatctggagaaagtcagaaatcatgtgtggtagatagtttgcataactttgggattttccagagagaggatgaaaacggtggccctccttgtaatgtctaggcacatgggacatccagtggaactgttgagggaggagatgggagggagaccactcaccacaccacttgatgtacgtctcatagactcaccactcaactcgtgcttcggagaaagctgcttcaaatcttcttgatacatctacaaagataaataaa

SEQ ID NO: 21302 - DNA, 406 bp, Homo sapiens
accttggcctcccaaagtgctgggataacaggcatgagccactgtgcccagcctcattatatctaagaaacagtgacacatggctaaagtctatagatggccacactgaagcattataaaatgttttgttcaaaatcacagaataaaagaacatataaagccaccatttttcaacagtaaaatttatattatgcttttttaagttactttggatcttgctttgttaattcatgacacatgcttgatagaatgtattcaacagatactgattgagtgcctgctatatacaaggctgtgtctgaggtactggagatacagtagtgaaacaaaaaatttctgtcttcatggtgcttacactgtagtggaaggagacagatagtaaacaaataagtaaacatgcaatgtc

SEQ ID NO: 21303 - DNA, 368 bp, Homo sapiens
attccctaccatgtatcatgaaaagtcatctttataatcgtgacaagaagcacaatcacattttacacagggcagcctggagtatgcatggtccctatctagaagtgtaatgttcatttttttcttgttttaaatgagagatattctgaaggaggagacttatttttgtaatgtgtctgtcaactcgtttctgcacacaaatgctctttctctttccctttatgtgtctgccctactaaataaaaggattgatgtaggtgataaatctgacctacttcctagatttaacgctgcgtctgtcggtaccttgctaaagagtctgatctctgatgagctaatcaaggcttacactgtcaccccaatagggc

SEQ ID NO: 21304 - DNA, 546 bp, Homo sapiens
agcgtggagtcgccaggaaggagagatgcggccggactggatgccacattccaccacccaggccggctcacctctgcgcggccgcgttccaaatcattgttcacacagaatttggctgcagcgggtgtccttgagtctctcacacttgagtaatcatccaggtctcctcctccggcttcctttgaggccctggccccccaggggctccggcgtgtgtccccagcagacactgcctggcctgcctggctcagccttgcatctacccccagggtgtgtttgcccctcctccacgagatgcgctcttgtcctccctctcctcccctccagggaccctccagaggctcgttcactgcctggagacacagcgacagccctcgccactagctggaggctggtgctggtgtggggcctcagacccctagaaacaccgggaagtcaggtggagctgcgggagctgagacctggagcaggtggctggccgagccggcactgccctcacttggcatggaccagtcttactgtgccttggagcaccccccgcagagc

SEQ ID NO: 21305 - DNA, 328 bp, Homo sapiens
tagatttttaaaagtgaaatttgaaagtactgggctggtaaatgttttttaataaggggccacttaaaagtggctcattttttgggaggccaaggcacgcggatcacctgtcaggagtttgagactagcctggccaacatggcaaacccccgtctctactaaaaatacaaaaattagctgggtgtggtggtgcatgcctgtaatcccaactacttgggaggctgaggtaagacaattgcttcaactcaggaggtggagattgcagtgagtcaagattgcaccactgcactccagcctaggtggcagaacaagactccttctcaaagaa

SEQ ID NO: 21306 - DNA, 707 bp, Homo sapiens
cccgccaccacatccagctaatttttgtgtttttagtagagacggagtttctccatgttggccaggctggtctcgaactcctgacctcaaccgatctgcctaccttggcctcccaaagtgctaggattacaggcatgatcctctgtgcctggccgaggcttggcatttttaatttgaattggtagagagtgggtgccatcatcgttttgatgatcattcaaccccaggaatatgcatccctttcctgagaggcactctcatcctctacgcagagcagccagtgagctgctggagggaccttgggtcccagcacagtatcccaggctggctccctttaaatactcgttgtttttataaaagggatatgtaagtatggttggcgtgtgaactacaaatgtccctgcatcctgcgaccctgaaatggcctgtcttggtgttggcgctcctggtcgccgcggtgtcacgcgtagatctttgcttctcagtggctctgcagtcctttattttggtacagatatgtgtaatttacttacccattctcctactaatgagcacttacttttctctctctctttctttctttttagacagtgtctcgctctgtcgcccaggctggcctgcagtggtgtgatctcagctcaccgcagcctcctcctcccagttcaagtgattctcctgcctcagactcctgagtagctgggattaca

SEQ ID NO: 21307 - DNA, 2353 bp, Homo sapiens
tgagatgaagtcttactctgttgcccaggctggagtgtagtggtgtgatctcggctcgctgcagccactgcctcctgggttcaggtgattctcctgacttagcctcctgagtggctgggactgcaggagcatgccatcatgcccagctgatttttgtatttttagtagagatggggtttcaccgtgttggccagaatggtttgcattcctgacctcaagtgatctgcctgcctcagcctcccaaaatgttgggtacaggggtgagccaccgtgccttgctattaatgccatctatttcactgaagattccgcctctcatttcttgagtcattttttttaaatttccttaaattggacttcacattttctgatgcctccttgtttagcttaataactgaccttctgaattcttttttaggaaaatcaggaatttcttcttggtttggagccattgctggacatcctttgccattcaacctctgatttgcacaaggtgactaaaggaccagcagcaaacaaaagcaaaggtcttctagagtgcactaaagcagaagataacgtaacatttttatcttaccatgaaagtattatctgaaggacagttaaagctttgtgttgttcaaccagtacatctcacttcatggctccttatattttttattctaaagtctatctcttgtctaaaacctgctcgacttccaatttatcaaaggaaaccttttatagctgcttggaatgctccaacagatcagtgtttgataaaatataatttaagactaaatttgaaaatgtttcctgtgattggaagcccactggccaaggccagggggcaaaatgtcactatattttatgtcaacagattgggatactatccgtggtatacatcacagggggtccccattaatggaggtctcccacagaacataagtttacaagtacatctggaaaaagctgaccaagatattaattattacatccctgctgaagatttcagtggacttgctgttatagattgggaatattggagaccacagtgggcccggaactggaactcaaaagatgtttacagacagaagtcaagaaagcttatttccgatatgggaaagaatgtatcagctaccgatattgaatatttagccaaagtgacctttgaagaaagtgcaaaagctttcatgaaggaaaccatcaaattgggaattaagagccgacccaaaggcctttggggttattatttatatcctgattgccacaattataacgtttatgccccaaactactctgggtcatgcccagaagacgaagtcttgaggaacaatgagctctcttggctctggaacagcagtgctgctttatatccttctatctgtgtctggaaatcccttggagacagtgaaaacattttgcgcttctccaaatttcgggtgcatgaatccatgaggatctccaccatgacatctcatgattatgctctgcctgtatttgtctacacaaggctagggtacagagatgaacctttatttttcctttctaagcaagatctagtcagcaccataggagaaagtgctgccttgggagctgcaggcattgttatttggggagacatgaatttaactgcatccaaggccaactgtacaaaggtgaagcagtttgtgagttctgatttagggagctacatagccaatgtgaccagagctgctgaggtatgcagccttcacctctgcaggaacaatggcaggtgcataaggaagatgtggaacgcgcccagttaccttcacttgaaccctgcaagttaccacatagaggcctctgaggacggggagtttactgtgaaaggaaaagcatctgatacagacctggcagtgatggcagatacattttcctgtcattgttatcagggatatgaaggagctgattgcagagaaataaagacggctgatggctgctctggggtttccccttctcctggttcactaatgacactttgtctactgcttttagcaagttatcgaagcattcagttgtgagataattgagtttaaagggaattgtgtggcctctagcctagtcatttaaagaaggatgtaacttataacattttttttctcttatgaattctattgagagatattataagtagacattatgtatgtcacttaacataaacagaaacattattttatttgcctccagtctggctaggaaaccagatctggggtaaagtcaatgtacacttcctccttattggaatatttaagttgcatttaaactaaaactagtataatttagtcttttcatgaatgtacatacataaaattatacataaaaatattaaattattcatttcaaagactgt

SEQ ID NO: 21308 - DNA, 465 bp, Homo sapiens
tcctccattccaggctgggctgtagctgctcccataaagggatcacagtttgtgttccacgcagaaggagcacagaacacttccaggcatatccttggagctcaagacaggttgctcagctaggccagagaagagagggatctgttcatttccagccctgcaggcctgttggctgttttgtgcatttatgtagcttttaagtgcagactaatagctatcatttattgcatgcccactatgtgccaggcactgtgccaggcattctatgtgagctttcttatttactcctcccaacaatcctatacattaggtatcattattgtcctcattttacctgagaatggaagtgaggcacagagatgaaccacagagtttgttctgggtccatggtcctgttgtttctatgttctgtctgctctactacactgcctttcagaggcaggtctggaagttcagagaccaagt

SEQ ID NO: 21309 - DNA, 330 bp, Homo sapiens
acaaagaatagttaggttttaagataagggctggaggttgaacctacttcagataatcatcattaattattgttctttgaaatggtgattcacatgttcatagctattcatctatgctttgaggtaactacattttctagtccatatggaaggtgcttttttggagacacaataatagtaaccagagcagttctaccctgagaaacaaatataccttttcacattctacctcctatccttacatttattcactttagatcattcatccatccatttgtttattcatgcattcagtaattattgacagtaaattaactgctagttgtcgga

SEQ ID NO: 21310 - DNA, 900 bp, Homo sapiens
gaggaacctggaccaaacactggcctggtaacgtcatgcagcctcctgcctggatgctgccaaagcagcccctgtgggccccagggagagcaggggctgtggacaggggaggtcagctggaggggaggctggcaccttccaagcccctctccttgtgcacctgctctgggggacactaaggctcccaatcagcccctgcctggggggtctcaccctgacatttaggtctgaaggccttgagggccacctccccactgttatctgctgctgctgtccccgtcacagctgcctggcccccgtacactgtcattttgccccaggcaggctcgcacagggccggcgctctgggagggtggaaggattgctgggcccatgactggacacctctgtcacccaacttctgatctatctgcacattgagaccagcctggccaacacagcaagatccctgtctcaacagaataaaaacaaaaataaaatgatcttctgtctgcacactggggacaaaaacacccacctcagaaagctgagggttaccagcggcgccaggccggagccgccccagtgccaggctcactgcttgccataggcagccctgccctctggatctcatatctgcagttctgaccttgcctgtggagggaaagtgtaggggaaagaaagagatcagactgctactgtgtctatgtagaaagaagtggacataagaaactccattttgttctgtactaagaaaaattcttctgccttgagatgctgttaatctgtaaccctagccccaaccctgtgctcgcagaaacatgtgctgtgttgactcaaggtttaatgggtttagggctgtgcaggacgtgctgtgttaaaatgtgtttgcaggcagtgtgcttggtgaaagccatcgcc

SEQ ID NO: 21311 - DNA, 933 bp, Homo sapiens
ccactctcttttccttgctccgacctctgctccagtcccgcttcttcccccgtctcctctttctagtcctctatatgctatcagccctttttcctggtccatccctgtcgttccttctctctctgtctctggttctactgtcaagggccctagttccctttgttttactgcttccccaaccctccctcaagtcccttctctggcacctgggactttgtagccttcactcctctgagcccaccagccctaatggaggggggctcaaacctaggaagtggacagaaaagccacagcctttattttgtattttttttgtaataacaaaccctaaaaaaccctccatgaactgtcctctcccgtcgatccccgcagcatattgtctggaaatctgttttctttctcagagcccagtggccgccgggcttctcttcccttctgagatgatgtcaccccaaagaagactggggtaggagtagggagcacaggggttgttggtgttttcagtgcttagaaaactgggttgtcctgcaggtgtctcctcccacccctccactcgcaacacttgctagggaatccgaccagtggtaaacacatcagcactttttggtgttcaggggtcagcacatttgttaatttaaaccacagactgcttccaggtacaaaggttcatttggacttctggtttgcaagggatgagggttaaaaaaaacaaaacaaaacaaacaacaacaacaacaaaaacaacccagaaagtatcttctagagccagccgcaagagctgtgagctgcttccaagttaggcgagctggtggtggtaccctggacataatgcaattctgtagtcagagcaatatccctggcgagagcctgacatcgcctgttaaaggtggctgcctctgaataaaggaaagcgtctgaaaggtgaaaaaaaaa

SEQ ID NO: 21312 - DNA, 965 bp, Homo sapiens
ccactctcttttccttgctccgacctctgctccagtcccgcttcttcccccgtctcctctttctagtcctctatatgctatcagccctttttcctggtccatccctgtcgttccttctctctctgtctctggttctactgtcaagggccctagttccctttgttttactgcttccccaaccctccctcagtccctgagagccctagagccatctcggtgacagtcccttctctggcacctgggactttgtagccttcactcctctgagcccaccagccctaatggaggggggctcaaacctaggaagtggacagaaaagccacagcctttattttgtattttttttgtaataacaaaccctaaaaaaccctccatgaactgtcctctcccgtcgatccccgcagcatattgtctggaaatctgttttctttctcagagcccagtggccgccgggcttctcttcccttctgagatgatgtcaccccaaagaagactggggtaggagtagggagcacaggggttgttggtgttttcagtgcttagaaaactgggttgtcctgcaggtgtctcctcccacccctccactcgcaacacttgctagggaatccgaccagtggtaaacacatcagcactttttggtgttcaggggtcagcacatttgttaatttaaaccacagactgcttccaggtacaaaggttcatttggacttctggtttgcaagggatgagggttaaaaaaaacaaaacaaaacaaacaacaacaacaacaaaaacaacccagaaagtatcttctagagccagccgcaagagctgtgagctgcttccaagttaggcgagctggtggtggtaccctggacataatgcaattctgtagtcagagcaatatccctggcgagagcctgacatcgcctgttaaaggtggctgcctctgaataaaggaaagcgtctgaaaggtgaaaaaaaaa

SEQ ID NO: 21313 - DNA, 448 bp, Homo sapiens
acacctggtgccattttactcataatatgtaaaaggaagagctgctagaaaaacttacgtcacctgtgttaagtttatagatatacacttgaattaacaatatttttggccaagattcataaatacactttatgttttatgaagcccaattcagttagaacttgaggtcaagcaaagaaatcaagtgtaagagctgacataaaaacaggtttccttttcaatacactttcagctatcttagaaattaactgttcggagtgtttttctattcatactccagaacctctcgcccaataaaattatctcctcccagggctttcactagtgtcaattcactaaagatgcccgtgtcaacatttcaaggtcgcgcctcctcaagagtttaaatattcatctagatatccaccttgaattcaaaaaccccacaacagaattccttctcttgttc

SEQ ID NO: 21314 - DNA, 397 bp, Homo sapiens
gatgcaaaaatcctcagctaaatatcatcaaattcaattccataatgtagaaagagaattacacaccaagaccacatgggacttaccccaggtgtgcaaatctggttcaacatttggaaatgaataatgtaatccatcacgtcaacattcttgggaagaaaaattgcattatcgcatcaagagatgcagaaaaatcacttgacaaaaaaccagcacccatccatgataaaaactcagtgaactaggaatatagaacttcttcaacttgccatagaatatctacaataataatggtgagatactcaaagctttcctaccaagatcaggaacaaggcaaggatgtcctctctcacctcttttcaatatcacacgagaaatcctaactaatgcaataaga

SEQ ID NO: 21315 - DNA, 2172 bp, Homo sapiens
  misc_feature (830)..(830): n is a, c, g, or t
gtaacatggctactggtcactcagtgtctgtgagaccctgagggccagaggcaaggctggcggggtggagctgctgtgtgagcccaggcaaagcccttccttctttggactttggcccctggcagaagaaaatgattctcagcccctgggatccttagagatggtgggtcatgattcccctcctccctccactcactcagcttggtattgaggcctcactgctagaagaagaggaacagatgacctgttctgggaactgaggcttcacaagaagaacaaagctccagagattgagccatagtccctgacaggaagcctcgggggtgctggctgctccctgctggccgggatgccagtggtgtctgaaaccaggggtagagtttacaggaggccgggctgctcaggagagctagaatgaagttctctgtcctcatggtctcagatctgagctcttccccaaagggtggtgacttccatcaccctgcttctttggggtcacagtctggtctgggtaatgtgaaccccccaggctttggacctgggactaagaggctctaggaggctccagcctcatctgcctcctatcccctgccttgttcagaggcccagagctggggccggaagtgatcatgaagatggaaactgtggtctggctcatgatggtgcatcactgctgtgtctgtttgcagtcgttgtgcactctgtgccccacacccccacaccctcctgtctggaggagggctgaaaaaaagctgagtttgcagctggtggaggaggagccaaaagaagcttccctgcccccaagactcaggctggggaggagagggganggtgggatcaaccttgcttctattagcccagatgcccctcagtaatcaagcatagtcatctcctctgagacctgaggtttaggattattgtcccatttcatgggtgagaaacctgagattcaaagataggaagtcacttgcctatggtacccattaggtggagctgggactagaactcagggctttgggtcccagaccttctgctggagggacgaagccctgtctcttacattctggttaggaaactaagacccagagtgggcaaaggcacagcccaagttgcactccgggtgctggcctcctccccgctgcctctctgcctgtctcccacagtgatgtttgcttcgtggttggtcaagaacggcaggaggtatttgcccatcggtgcttgttggcctgtagatgcaacttcttccagcgacttctgggcacagagccaggccccggggtgcccagtcctgtggtgctaagcactgtgccaactgaggccttcctggcagtgctggagttcctatataccaacagtgtcaagctgtaccgccactctgtgagcctgctgaccaggggcctgggtgggagaggtggggggtgccagaggcaggagtttgcccattacactgtgggcacagggcaggggaaactcccttccactcccccaaccacccactctacaggtgctggaagtgctgacagcggctgtggagtatgggctggaggaactgagagaggtgggtttttgtgccaggtccctgtctcatttcccttgcttctcacgggctcacttcccgccctgcctcacacacactctggcctggagaggaacgtgtgcccacacagagagaagtatgtatatctctcccaagtaagtagggcatgtatgtgtgcctgtgtgcaaaaggatccatgcatgcctgccctgtgtgtgctgtgggaagagggggtgattatggctggtgctgtagatacaaagatatcagccttgatccgtgttctccagagagggagaggagacagacacatgaaaatgcttacctgggtggcataagaagtgtgatagaggccgggcgcagtggctcacgcctgtaatcccagcactttgggaagctgaagcaggtggatcacttgagcccagaagttccagaccagcctgggcaacatggtgacaccccatctctactaaaagcacaaaaattagccaggcatggtggcacacacctgttaattgcagctacttgagaggctgaggcacaagaatcgcttgaacctgggaggcagaggttgcagtgagctgaaatcgtgccactgcattccagcctgggtgacagagcaagacttgccctca

SEQ ID NO: 21316 - DNA, 739 bp, Homo sapiens
  misc_feature (738)..(738): n is a, c, g, or t
gcgaattcactagtgattgtgagctgagccctggagatcgctccctgaatgcccctcagacaccacaggctcggcgagaaattgatctccccagcttttccccagctctgcccccatcgtgtttctcatttccgtggacacccacgccagaaacctggatctcatccttgccttatcgctcttcacacctgccttaggtctctttttaccttgtaagagaccttaagagacctttccagttggttcagttctctcagccccaggttcaacctgtcctgtctgacacgtctcacagccttcctgccttcactccagcgccccctcaatccatttcccacagtgcagccagacctgtttttgattgtcagtcctatggggcttaagtcctggaacatcccattgacctccaggacaaaattcaatctatttcactttcagggcactcaaaactactagtgagtggttcctcacctcttctctcaaatacaatctttgtataaattcatttatcctggaggtattagtcctctagctccataccttactcagttactgcagacccctctgctacctccttcattcactatacatcttgttttcccgaggatgtgaatctccctcaagaaagatccctggggcctggagtggtgtcttactcgtttctgcttcctcagtctctgtcagataatcagtgctatgtaaatgttaagtaaatgactttatttatttaaaaaaaana

SEQ ID NO: 21317 - DNA, 1011 bp, Homo sapiens
  misc_feature (1010)..(1010): n is a, c, g, or t
gctctgtcgtcgaggctggagtgtagtggtgcgatttcggctcacttcaaactccgcctcccgggttcaagcgattctcgtgcctcagcctcctgagtagctgggattacagacatgcaccacaacgcccggctaattgttgtatttttagtagagacgggggtttcaccatgttggccaggttggtctcgaactcctgacttcatgtgatccgccagcctcggcctcccaaagtgctgggattacaggtgtgcgccaccatgcccggcctcagctccttctttcattccagacctgcccccctggagatcgctccctgaatgcccctcagacaccacaggctcggcgagaaattgatctccccagcttttccccagctctgcccccatcgtgtttctcatttccgtggacacccacgccagaaacctggatctcatccttgccttatcgctcttcacacctgccttaggtctctttttaccttgtaagagaccttaagagacctttccagttggttcagttctctcagccccaggttcaacctgtcctgtctgacacgtctcacagccttcctgccttcactccagcgccccctcaatccatttcccacagtgcagccagacctgtttttgattgtcagtcctatggggcttaagtcctggaacatcccattgacctccaggacaaaattcaatctatttcactttcagggcactcaaaactactagtgagtggttcctcacctcttctctcaaatacaatctttgtataaattcatttatcctggaggtattagtcctctagctccataccttactcagttactgcagacccctctgctacctccttcattcactatacatcttgttttcccgaggatgtgaatctccctcaagaaagatccctggggcctggagtggtgtcttactcgtttctgcttcctcagtctctgtcagataatcagtgctatgtaaatgttaagtaaatgactttatttatttaaaaaaaana

SEQ ID NO: 21318 - DNA, 934 bp, Homo sapiens
  misc_feature (933)..(933): n is a, c, g, or t
gctctgtcgtcgaggctggagtgtagtggtgcgatttcggctcacttcaaactccgcctcccgggttcaagcgattctcgtgcctcagcctcctgagtagctgggattacagacatgcaccacaacgcccggctaattgttgtatttttagtagagacgggggtttcaccatgttggccaggttggtctcgaactcctgacttcatgtgatccgccagcctcggcctcccaaagtgctgggattacaggtgtgcgccaccatgcccggcctcagctccttctttcattccagacctgcccctctgcccccatcgtgtttctcatttccgtggacacccacgccagaaacctggatctcatccttgccttatcgctcttcacacctgccttaggtctctttttaccttgtaagagaccttaagagacctttccagttggttcagttctctcagccccaggttcaacctgtcctgtctgacacgtctcacagccttcctgccttcactccagcgccccctcaatccatttcccacagtgcagccagacctgtttttgattgtcagtcctatggggcttaagtcctggaacatcccattgacctccaggacaaaattcaatctatttcactttcagggcactcaaaactactagtgagtggttcctcacctcttctctcaaatacaatctttgtataaattcatttatcctggaggtattagtcctctagctccataccttactcagttactgcagacccctctgctacctccttcattcactatacatcttgttttcccgaggatgtgaatctccctcaagaaagatccctggggcctggagtggtgtcttactcgtttctgcttcctcagtctctgtcagataatcagtgctatgtaaatgttaagtaaatgactttatttatttaaaaaaaana

SEQ ID NO: 21319 - DNA, 2773 bp, Homo sapiens
  misc_feature (830)..(830): n is a, c, g, or t
  misc_feature (2772)..(2772): n is a, c, g, or t
gtaacatggctactggtcactcagtgtctgtgagaccctgagggccagaggcaaggctggcggggtggagctgctgtgtgagcccaggcaaagcccttccttctttggactttggcccctggcagaagaaaatgattctcagcccctgggatccttagagatggtgggtcatgattcccctcctccctccactcactcagcttggtattgaggcctcactgctagaagaagaggaacagatgacctgttctgggaactgaggcttcacaagaagaacaaagctccagagattgagccatagtccctgacaggaagcctcgggggtgctggctgctccctgctggccgggatgccagtggtgtctgaaaccaggggtagagtttacaggaggccgggctgctcaggagagctagaatgaagttctctgtcctcatggtctcagatctgagctcttccccaaagggtggtgacttccatcaccctgcttctttggggtcacagtctggtctgggtaatgtgaaccccccaggctttggacctgggactaagaggctctaggaggctccagcctcatctgcctcctatcccctgccttgttcagaggcccagagctggggccggaagtgatcatgaagatggaaactgtggtctggctcatgatggtgcatcactgctgtgtctgtttgcagtcgttgtgcactctgtgccccacacccccacaccctcctgtctggaggagggctgaaaaaaagctgagtttgcagctggtggaggaggagccaaaagaagcttccctgcccccaagactcaggctggggaggagagggganggtgggatcaaccttgcttctattagcccagatgcccctcagtaatcaagcatagtcatctcctctgagacctgaggtttaggattattgtcccatttcatgggtgagaaacctgagattcaaagataggaagtcacttgcctatggtacccattaggtggagctgggactagaactcagggctttgggtcccagaccttctgctggagggacgaagccctgtctcttacattctggttaggaaactaagacccagagtgggcaaaggcacagcccaagttgcactccgggtgctggcctcctccccgctgcctctctgcctgtctcccacagtgatgtttgcttcgtggttggtcaagaacggcaggaggtatttgcccatcggtgcttgttggcctgtagatgcaacttcttccagcgacttctgggcacagagccaggccccggggtgcccagtcctgtggtgctaagcactgtgccaactgaggccttcctggcagtgctggagttcctatataccaacagtgtcaagctgtaccgccactctgtgagcctgctgaccaggggcctgggtgggagaggtggggggtgccagaggcaggagtttgcccattacactgtgggcacagggcaggggaaactcccttccactcccccaaccacccactctacaggtgctggaagtgctgacagcggctgtggagtatgggctggaggaactgagagaggtgggtttttgtgccaggtccctgtctcatttcccttgcttctcacgggctcacttcccgccctgcctcacacacactctggcctggagaggaacgtgtgcccacacagagagaagtatgtatatctctcccaagtaagtagggcatgtatgtgtgcctgtgtgcaaaaggatccatgcatgcctgccctgtgtgtgctgtgggaagagggggtgattatggctggtgctgtagatacaaagatatcagccttgatccgtgttctccagagagggagaggagacagacacatgaaaatgcttacctgggtggcataagaagtgtgatagaggccgggcgcagtggctcacgcctgtaatcccagcactttgggaagctgaagcaggtggatcacttgagcccagaagttccagaccagcctgggcaacatggtgacaccccatctctactaaaagcacaaaaattagcccggcctcagctccttctttcattccagacctgcccccctggagatcgctccctgaatgcccctcagacaccacaggctcggcgagaaattgatctccccagcttttccccagctctgcccccatcgtgtttctcatttccgtggacacccacgccagaaacctggatctcatccttgccttatcgctcttcacacctgccttaggtctctttttaccttgtaagagaccttaagagacctttccagttggttcagttctctcagccccaggttcaacctgtcctgtctgacacgtctcacagccttcctgccttcactccagcgccccctcaatccatttcccacagtgcagccagacctgtttttgattgtcagtcctatggggcttaagtcctggaacatcccattgacctccaggacaaaattcaatctatttcactttcagggcactcaaaactactagtgagtggttcctcacctcttctctcaaatacaatctttgtataaattcatttatcctggaggtattagtcctctagctccataccttactcagttactgcagacccctctgctacctccttcattcactatacatcttgttttcccgaggatgtgaatctccctcaagaaagatccctggggcctggagtggtgtcttactcgtttctgcttcctcagtctctgtcagataatcagtgctatgtaaatgttaagtaaatgactttatttatttaaaaaaaana

SEQ ID NO: 21320 - DNA, 2246 bp, Homo sapiens
  misc_feature (830)..(830): n is a, c, g, or t
gtaacatggctactggtcactcagtgtctgtgagaccctgagggccagaggcaaggctggcggggtggagctgctgtgtgagcccaggcaaagcccttccttctttggactttggcccctggcagaagaaaatgattctcagcccctgggatccttagagatggtgggtcatgattcccctcctccctccactcactcagcttggtattgaggcctcactgctagaagaagaggaacagatgacctgttctgggaactgaggcttcacaagaagaacaaagctccagagattgagccatagtccctgacaggaagcctcgggggtgctggctgctccctgctggccgggatgccagtggtgtctgaaaccaggggtagagtttacaggaggccgggctgctcaggagagctagaatgaagttctctgtcctcatggtctcagatctgagctcttccccaaagggtggtgacttccatcaccctgcttctttggggtcacagtctggtctgggtaatgtgaaccccccaggctttggacctgggactaagaggctctaggaggctccagcctcatctgcctcctatcccctgccttgttcagaggcccagagctggggccggaagtgatcatgaagatggaaactgtggtctggctcatgatggtgcatcactgctgtgtctgtttgcagtcgttgtgcactctgtgccccacacccccacaccctcctgtctggaggagggctgaaaaaaagctgagtttgcagctggtggaggaggagccaaaagaagcttccctgcccccaagactcaggctggggaggagagggganggtgggatcaaccttgcttctattagcccagatgcccctcagtaatcaagcatagtcatctcctctgagacctgaggtttaggattattgtcccatttcatgggtgagaaacctgagattcaaagataggaagtcacttgcctatggtacccattaggtggagctgggactagaactcagggctttgggtcccagaccttctgctggagggacgaagccctgtctcttacattctggttaggaaactaagacccagagtgggcaaaggcacagcccaagttgcactccgggtgctggcctcctccccgctgcctctctgcctgtctcccacagtgatgtttgcttcgtggttggtcaagaacggcaggaggtatttgcccatcggtgcttgttggcctgtagatgcaacttcttccagcgacttctgggcacagagccaggccccggggtgcccagtcctgtggtgctaagcactgtgccaactgaggccttcctggcagtgctggagttcctatataccaacagtgtcaagctgtaccgccactctgtgagcctgctgaccaggggcctgggtgggagaggtggggggtgccagaggcaggagtttgcccattacactgtgggcacagggcaggggaaactcccttccactcccccaaccacccactctacaggtgctggaagtgctgacagcggctgtggagtatgggctggaggaactgagagaggtgggtttttgtgccaggtccctgtctcatttcccttgcttctcacgggctcacttcccgccctgcctcacacacactctggcctggagaggaacgtgtgcccacacagagagaagtatgtatatctctcccaagtaagtagggcatgtatgtgtgcctgtgtgcaaaaggatccatgcatgcctgccctgtgtgtgctgtgggaagagggggtgattatggctggtgctgtagatacaaagatatcagccttgatccgtgttctccagagagggagaggagacagacacatgaaaatgcttacctgggtggcataagaagtgtgatagaggccgggcgcagtggctcacgcctgtaatcccagcactttgggaagctgaagcaggtggatcacttgagcccagaagttccagaccagcctgggcaacatggtgacaccccatctctactaaaagcacaaaaattagcccggcctcagctccttctttcattccagacctgcccccctggagatcgctccctgaatgcccctcagacaccacaggctcggcgagaaattgatctccccagcttttccccagctctgcccccatcgtgtttctcatttccgtggacacccacgccagaaacctggatctcatccttgccttattcaaatgcaggtggaccttcagggaggctgaggcag

SEQ ID NO: 21321 - DNA, 483 bp, Homo sapiens
tcacagtactgggaaatgggagcacagtattcggaaatgggagcacagtactgggaaatgggagctcacagcactgggaaatggagcatagcattgggaaatgggagcacagtactgggaaatggaagctcacagtcctgggaaatgggagcatagtgctgggaaatgggagcacagtactgagaaatgggagcacagtactgggaaatgggagcccagtactgagaaatgggagcacacagtactgtgaaatgggagcacagtactgggaaatgggagcatagtactgagaaaccccagacctggattctgagtttttcagtctagcccagacttcttatcttagtagacaaaaagagtcaataccagagaaccagaggcatcctctgtattttaatgaactctgcgttttagtctgtttagtagtcatattttaaaagataatcagttttctaaatatatctataagttactacatgcatt

SEQ ID NO: 21322 - DNA, 255 bp, Homo sapiens
gtcagagataaagacagaagcaaagtcccacaaggtcatggacctggctgagtacaaacctgggacaggtgtcagaaagaggaggcctctgggcatctgactgtgcactctgggcaccatttggccaccagtcctaacaaaggcagtcactgaggactcccgtggcaagcggcacctcctgctcaggctcctcggagttatttgttaaatgaatgtgcaatgcagagacaatcccctgactaattcactgctgat

SEQ ID NO: 21323 - DNA, 726 bp, Homo sapiens
taccatgtcagcgataagttgagccttgtgttttttgtttgtttcacatattgataatggtctatcaccttctaacagttcaaatagatgttgtttttagccactaagttttggtagcaagctgttagccagcaaaagttaactgatatactggcaaatagcagatccttcagaagtcattctgtttttcatcctcaaaagaatggaagctcagctcatttggcatggaaattgggaaatatagattgtcagccattaatgggaataatggcttataaaagtgggtaagagttaaagttattattgtcctgaattcagattaatttgtgattcaagacattctgtcactccttttaaaacctaattatagatgtcttaagtgtttctggaaaaatctgttaaattccttcagtggacttgacttttcctcttaaaatactaaagatgttggtgctgacattgtgaaggcacatactctcacgtaactgcaaaataatttctgagaagctggtatctgtaaggtaacttttaaaggctctgatttatttctgtggttaagaaaagaggaattattaagaaattgttggaaatgtgccgtggctaggtttttcctcctcatatttgtaggctttcatgtgaagctcccttagctcagcattggtcaaaacatgtttgttccatagtatcttgtgctaattttctagaagaacagtacattaaaaaaaa

SEQ ID NO: 21324 - DNA, 673 bp, Homo sapiens
ctaaggactacacgcctcccttgatgccatgttggcacatgaaccccaaacatagatgctaccttatagtgaaggaagggcaggggacaatccccaatgactgaacctatgacgactacttataagagaacatctggtatttgacttataaatgagaacacatggtatttgactttctgtttatgagttgtctcacttaagatagcagcctccaattccatccatattgctgcaaaagacatgaattgattctttttatggctgaatagtactgcatttgtatatgcaatactattgcatattttattaatctaatcatctgttgatgaacacttaggttgattttatatctttactatttttcacagaattagaaaaaaatcataaaattaatatggaaccaataaagagcctgaatagccaaagcaatcctaagcaaaaagaacaagctggaggcatcatattacccaacttcaaattacactacaacactatagtaaccaaaacagaatggtactagtacaaaaatagatacatagatcaagggaacggaacagagaatctgaaataaagccacatatctacagccaactgatctttgacaaggtcaacaaaaacatacactggggaaaggatacccttttcaataaactgtgctgggaaaattagattg

SEQ ID NO: 21325 - DNA, 585 bp, Homo sapiens
taccatgtcagcgataagttgagccttgtgttttttgtttgtttcacatattgataatggtctatcaccttctaacagttcaaatagatgttgtttttagccactaagttttggtagcaagctgttagccagcaaaagttaactgatatactggcaaatagcagatccttcagaagtcattctgtttttcatcctcaaaagaatggaagctcagctcatttggcatggaaattgggaaatatagattgtcagccattaatgggaataatggcttataaaaaattagaaaaaaatcataaaattaatatggaaccaataaagagcctgaatagccaaagcaatcctaagcaaaaagaacaagctggaggcatcatattacccaacttcaaattacactacaacactatagtaaccaaaacagaatggtactagtacaaaaatagatacatagatcaagggaacggaacagagaatctgaaataaagccacatatctacagccaactgatctttgacaaggtcaacaaaaacatacactggggaaaggatacccttttcaataaactgtgctgggaaaattagattg

SEQ ID NO: 21326 - DNA, 3989 bp, Homo sapiens
cgctctttgtgacgtggaagacagggcgggacaagcggcttcgtggctgcattgggaccttctcagccatgaatcttcattcaggactcagggaatacacgttaaccagtgcacttaaggacagccgatttccccccctgacccgagaggagctgcctaaacttttctgctctgtctccctccttactaactttgaggatgccagtgattacctggactgggaggtaggggtccatgggattcgaattgaattcattaatgaaaaaggtgtcaaacgcacagccacatatttacctgaggttgctaaggaacaagactgggatcagatccagacaatagactccttgctcaggaaaggtggctttaaagctccaattaccagtgaattcagaaaaacgatcaaactcaccaggtaccgaagtgagaaggtgacaatcagttacgcagagtatattgcttcccgacagcactgtttccagaacggcactcttcatgccccgcccctctacaatcattactcctgacacacggctgcatgaccagtcccacccccccgtggccaccaatggctatgacatcattggagcagatgcctcctcttcctggtccagttacttctattactgcaccattttatgatgctagcttccgttgccaagtctgcctcccgctgactgagggagggtagggttaccttgaacgaaacagaacttgaggggcccaagccttatctcagcctttcctcaatatggggttccgttggattggggctcctccatgactagtgggaattactgtgggttcagaagacccttgtctggtatttgccacatggggtattggccacacgctggaagctgaaattgatgatccctgaaggttgaacccacacacacccctgcagcctccccagatgaagtaggtgtattcccctggcagtctgggcaacggagaccaagaaacatttttaggttgttttaaattcctttttttaaacttccagtttattgcgtaccaagagttgattacaacctccatgcttcataagcggacgccacgttagggttggacgtgggcaccacgagtcctttgaggctcctggacagagacccacatcaagatcggaagccctttgggtggcgttgcagatctcattgctcagtaggccgtgaagattttcatcctcatcccactctcagttggattttctggcactcttcctgcattgagtctcctgattactgaacagagctccgtcatgtagcctgctgaggaatggaatggaatggagatgcccacaggaggtcctgatgtcatcactgcacgcaggtgtgagaggagagacctcttctgcaccgcctggctacctcactcctctgctggtagcagtgcctatagctggacctaagttctcagaagcgtagatgtgcaaacaagcgattgagttgggctttaggaggacacatcataggagagaatccagggtctgtaagctggttttcttttcaggtgacatcctgaggggcctgtaagcaggggagctcctttttctagtttgcctgtagaggtgggaagactgttggtgtttctgtcctttacaggacattaggaaacagttgtgtaattacacaaggtggacctttatcttgcctgacatgctgggaatcttcaccccaccagggcaaatttccaaatagctcattttattctaggtctttcaaactttcatgtgacatatttccctttcccattgttgctgatttccaaatcgctgtcagcaattttttcctctctccttgcctattcttcactcatttggtggcaaagttcatagaactaggggacttggaagatgctttgaaaatattgttacaaaggcactgctaaaatgattcacagggagagtggccagttggaagaaggatcctaaggatgtgacactggttttcaacaacatgcttagagaactcatgaagtggattgggtgtcaacccagtgaacatgtttttatttaatttattttttgaagtttatgtggtgatggtgtggctttccgaaatgggcaaatattcagaagatcttttgcattttcttctgtcaggaatggggaaggggagtgggggcacaatctgagaaaggacacctgtgctgttctaggcatcgctggcaagtttgtgggaagggatgggcaagggtgagtgggtttgctccacaccgtcctgtgctgctcgagaggacctgggacgtgcgagggaaacgtgggtgacggtgcctaggctgcggcccttcactgctgtgctgggttcctgcagcctgctacgtttcccttggcaatgtaaatgaagatggaggggtcgtttcgtgatttcctgctgctgagaataaatgtcttgttaaaaacgtggcaacggttactcttaggtgccatggatcgatgtcagggtggtcagctctggactaagccacccacctccaatttgtacaacagtattgatacatagggctacactcattactgttcaagtgttctatgttaagagttgtgtttaatttctaaagattaaaaaaagcaaaaaaattggtgctaaaccttcacccctgagcacgctcagtgagactggtcatgcaagcatttacagtgccatgctcctcaagccgattttttcttgtagaaatgttgccctatttgtcttctccaatgtatggtatgttattttattttattattttattttattttattttattttatcgagggggggtacgatacctgccatttaagaaaatgaatagaaaattttaaaacccgagaaatggggaaaaaaaaaatcagtgcacaagaattgggctggttaggcccagcaccacactgaagtgggctcagtggtttttggagtgaagaagccttactccctgcacattccctcatgctcccacacaagtccagcaatggaaatgcttgggttcctcttgctttgtcaggggactcaggagtcgaccaagggaaaccatttggccccgtgaggaatgggcattgtcagtatccgtcctgaacggggcctagtcaggaagcggtctagaagtgtacggtcacggtcgcctcatgaaagtgtgtagcaggtggctctcaggaaaaataccaagtctggatcatccatgtggcagctttgcatagggagaggatagctccgaactggaactgaactgccttctctgcacgcttgaccaaagcagtgatgagggcggccagtacctgcggtgtgcgtggtaggtttaaagaaaagggaatgttttctgctgagtgtttcctttgtccttgggctgctcgagctggacagtaggtaaccactgttttcaaggaccagcccaatttctctggcttggttcggagttcgtttcatccctagctgtgagtgccttttggtctggaaagttggcttgtctcataatacccacagctaggacattctctctgtaattatgaattgtccttgttttacattaaaagagaatgtctttgatcactagagtctgtcggtgttggattatttccactgtgagattcttaaaacttttttgcttcataataataaaacaactcatgttagagaccctttcaacatgaaaggtttgtagttgagacattacatatattttattgtttataataaaaatcatctatacaaaagaagtcctgggtgttaatattttgcacaagatctgttttccatgatgtgttgacatctacaatttcactaactgttgacgttattttctattgagattctggagcctagggagctatgtgttctttttgttcatttcgttcttacttccctgaagcaagagactatatggccttcagtgcaaagacttcagaccaattctttgtattacacttggttgcctcttggctatataacttctgagtgcaaatcattgaacactttaacgaagtattgtagagaataaatcataatggataaaaa

SEQ ID NO: 21327 - DNA, 4461 bp, Homo sapiens
cgctctttgtgacgtggaagacagggcgggacaagcggcttcgtggctgcattgggaccttctcagccatgaatcttcattcaggactcagggaatacacgttaaccagtgcacttaaggacagccgatttccccccctgacccgagaggagctgcctaaacttttctgctctgtctccctccttactaactttgaggatgccagtgattacctggactgggaggtaggggtccatgggattcgaattgaattcattaatgaaaaaggtgtcaaacgcacagccacatatttacctgaggttgctaaggaacaagataattatactggggtaacatctgacaggaaggacgcaggagcagggagcctggggacagccattatggcatgtgtcgggctatcatctcatgtctcagagtctccacgggactggcagacagactgggcgccagactgggatcagatccagacaatagactccttgctcaggaaaggtggctttaaagctccaattaccagtgaattcagaaaaacgatcaaactcaccaggtaccgaagtgagaaggtgacaatcagttacgcagagtatattgcttcccgacagcactgtttccagaacggcactcttcatgccccgcccctctacaatcattactcctgacacacggctgcatgaccagtcccacccccccgtggccaccaatggctatgacatcattggagcagatgcctcctcttcctggtccagttacttctattactgcaccattttatgatgctagcttccgttgccaagtctgcctcccgctgactgagggagggtagggttaccttgaacgaaacagaacttgaggggcccaagccttatctcagcctttcctcaatatggggttccgttggattggggctcctccatgactagtgggaattactgtgggttcagaagacccttgtctggtatttgccacatggggtattggccacacgctggaagctgaaattgatgatccctgaaggttgaacccacacacacccctgcagcctccccagatgaagtaggtgtattcccctggcagtctgggcaacggagaccaagaaacatttttaggttgttttaaattcctttttttaaacttccagtttattgcgtaccaagagttgattacaacctccatgcttcataagcggacgccacgttagggttggacgtgggcaccacgagtcctttgaggctcctggacagagacccacatcaagatcggaagccctttgggtggcgttgcagatctcattgctcagtaggccgtgaagattttcatcctcatcccactctcagttggattttctggcactcttcctgcattgagtctcctgattactgaacagagctccgtcatgtagcctgctgaggaatggaatggaatggagatgcccacaggaggtcctgatgtcatcactgcacgcaggtgtgagaggagagacctcttctgcaccgcctggctacctcactcctctgctggtagcagtgcctatagctggacctaagttctcagaagcgtagatgtgcaaacaagcgattgagttgggctttaggaggacacatcataggagagaatccagggtctgtaagctggttttcttttcaggtgacatcctgaggggcctgtaagcaggggagctcctttttctagtttgcctgtagaggtgggaagactgttggtgtttctgtcctttacaggacattaggaaacagttgtgtaattacacaaggtggacctttatcttgcctgacatgctgggaatcttcaccccaccagggcaaatttccaaatagctcattttattctaggtctttcaaactttcatgtgacatatttccctttcccattgttgctgatttccaaatcgctgtcagcaattttttcctctctccttgcctattcttcactcatttggtggcaaagttcatagaactaggggacttggaagatgctttgaaaatattgttacaaaggcactgctaaaatgattcacagggagagtggccagttggaagaaggatcctaaggatgtgacactggttttcaacaacatgcttagagaactcatgaagtggattgggtgtcaacccagtgaacatgtttttatttaatttattttttgaagtttatgtggtgatggtgtggctttccgaaatgggcaaatattcagaagatcttttgcattttcttctgtcaggaatggggaaggggagtgggggcacaatctgagaaaggacacctgtgctgttctaggcatcgctggcaagtttgtgggaagggatgggcaagggtgagtgggtttgctccacaccgtcctgtgctgctcgagaggacctgggacgtgcgagggaaacgtgggtgacggtgcctaggctgcggcccttcactgctgtgctgggttcctgcagcctgctacgtttcccttggcaatgtaaatgaagatggaggggtcgtttcgtgatttcctgctgctgagaataaatgtcttgttaaaaacgtggcaacggttactcttaggtgccatggatcgatgtcagggtggtcagctctggactaagccacccacctccaatttgtacaacagtattgatacatagggctacactcattactgttcaagtgttctatgttaagagttgtgtttaatttctaaagattaaaaaaagcaaaaaaattggtgctaaaccttcacccctgagcacgctcagtgagactggtcatgcaagcatttacagtgccatgctcctcaagccgattttttcttgtagaaatgttgccctatttgtcttctccaatgtatggtatgttattttattttattattttattttattttattttattttatcgagggggggtacgatacctgccatttaagaaaatgaatagaaaattttaaaacccgagaaatggggaaaaaaaaaatcagtgcacaagaattgggctggttaggcccagcaccacactgaagtgggctcagtggtttttggagtgaagaagccttactccctgcacattccctcatgctcccacacaagtccagcaatggaaatgcttgggttcctcttgctttgtcaggggactcaggagtcgaccaagggaaaccatttggccccgtgaggaatgggcattgtcagtatccgtcctgaacggggcctagtcaggaagcggtctagaagtgtacggtcacggtcgcctcatgaaagtgtgtagcaggtggctctcaggaaaaataccaagtctggatcatccatgtggcagctttgcatagggagaggatagctccgaactggaactgaactgccttctctgcacgcttgaccaaagcagtgatgagggcggccagtacctgcggtgtgcgtggtaggtttaaagaaaagggaatgttttctgctgagtgtttcctttgtccttgggctgctcgagctggacagtaggtaaccactgttttcaaggaccagcccaatttctctggcttggttcggagttcgtttcatccctagctgtgagtgccttttggtctggaaagttggcttgtctcataatacccacagctaggacattctctctgtaattatgaattgtccttgttttacattaaaagagaatgtctttgatcactagagtctgtcggtgttggattatttccactgtgagattcttaaaacttttttgcttcataataataaaacaactcatgttagagaccctttcaacatgaaaggtttgtagttgagacattacatatattttattgtttataataaaaatcatctatacaaaagaagtcctgggtgttaatattttgcacaagatctgttttccatgatgtgttgacatctacaatttcactaactgttgacgttattttctattgagattctggagcctagggagctatgtgttctttttgttcatttcgttcttacttccctgaagcaagagactatatggccttcagtgcaaagacttcagaccaattctttgtattacacttggttgcctcttggctatataacttctgagtgcaaatcattgaacactttaacgaagtattgtagagaataaatcataatggataaaaaaaaaaaaaaaaaaaaaaaaaaaaaaaaaaaaaaaaaaaaaaaaaaagaaaaaaaaaagaaaaaaaaaaaaaaaaaaggaggaagtaagccaacgaagagaaaacacgaaagacggggggagcagtactaataaccgagaaaaagacaaaggaaaagagagcacaaaacgcgaaaaggagacgagcagagataaagtaaaaaaagagcagggaaaaaaataaaaagaaagaaaaacgggactcgttggaccagaaacatacgcggctagatgaacaaaaccacaaacaaagcaggcgaaaaaaacggagggaccaacaggggagaagggaaataaaag

SEQ ID NO: 21328 - DNA, 4124 bp, Homo sapiens
cgctctttgtgacgtggaagacagggcgggacaagcggcttcgtggctgcattgggaccttctcagccatgaatcttcattcaggactcagggaatacacgttaaccagtgcacttaaggacagccgatttccccccctgacccgagaggagctgcctaaacttttctgctctgtctccctccttactaactttgaggatgccagtgattacctggactgggaggtaggggtccatgggattcgaattgaattcattaatgaaaaaggtgtcaaacgcacagccacatatttacctgaggttgctaaggaacaagataattatactggggtaacatctgacaggaaggacgcaggagcagggagcctggggacagccattatggcatgtgtcgggctatcatctcatgtctcagagtctccacgggactggcagacagactgggcgccagactgggatcagatccagacaatagactccttgctcaggaaaggtggctttaaagctccaattaccagtgaattcagaaaaacgatcaaactcaccaggtaccgaagtgagaaggtgacaatcagttacgcagagtatattgcttcccgacagcactgtttccagaacggcactcttcatgccccgcccctctacaatcattactcctgacacacggctgcatgaccagtcccacccccccgtggccaccaatggctatgacatcattggagcagatgcctcctcttcctggtccagttacttctattactgcaccattttatgatgctagcttccgttgccaagtctgcctcccgctgactgagggagggtagggttaccttgaacgaaacagaacttgaggggcccaagccttatctcagcctttcctcaatatggggttccgttggattggggctcctccatgactagtgggaattactgtgggttcagaagacccttgtctggtatttgccacatggggtattggccacacgctggaagctgaaattgatgatccctgaaggttgaacccacacacacccctgcagcctccccagatgaagtaggtgtattcccctggcagtctgggcaacggagaccaagaaacatttttaggttgttttaaattcctttttttaaacttccagtttattgcgtaccaagagttgattacaacctccatgcttcataagcggacgccacgttagggttggacgtgggcaccacgagtcctttgaggctcctggacagagacccacatcaagatcggaagccctttgggtggcgttgcagatctcattgctcagtaggccgtgaagattttcatcctcatcccactctcagttggattttctggcactcttcctgcattgagtctcctgattactgaacagagctccgtcatgtagcctgctgaggaatggaatggaatggagatgcccacaggaggtcctgatgtcatcactgcacgcaggtgtgagaggagagacctcttctgcaccgcctggctacctcactcctctgctggtagcagtgcctatagctggacctaagttctcagaagcgtagatgtgcaaacaagcgattgagttgggctttaggaggacacatcataggagagaatccagggtctgtaagctggttttcttttcaggtgacatcctgaggggcctgtaagcaggggagctcctttttctagtttgcctgtagaggtgggaagactgttggtgtttctgtcctttacaggacattaggaaacagttgtgtaattacacaaggtggacctttatcttgcctgacatgctgggaatcttcaccccaccagggcaaatttccaaatagctcattttattctaggtctttcaaactttcatgtgacatatttccctttcccattgttgctgatttccaaatcgctgtcagcaattttttcctctctccttgcctattcttcactcatttggtggcaaagttcatagaactaggggacttggaagatgctttgaaaatattgttacaaaggcactgctaaaatgattcacagggagagtggccagttggaagaaggatcctaaggatgtgacactggttttcaacaacatgcttagagaactcatgaagtggattgggtgtcaacccagtgaacatgtttttatttaatttattttttgaagtttatgtggtgatggtgtggctttccgaaatgggcaaatattcagaagatcttttgcattttcttctgtcaggaatggggaaggggagtgggggcacaatctgagaaaggacacctgtgctgttctaggcatcgctggcaagtttgtgggaagggatgggcaagggtgagtgggtttgctccacaccgtcctgtgctgctcgagaggacctgggacgtgcgagggaaacgtgggtgacggtgcctaggctgcggcccttcactgctgtgctgggttcctgcagcctgctacgtttcccttggcaatgtaaatgaagatggaggggtcgtttcgtgatttcctgctgctgagaataaatgtcttgttaaaaacgtggcaacggttactcttaggtgccatggatcgatgtcagggtggtcagctctggactaagccacccacctccaatttgtacaacagtattgatacatagggctacactcattactgttcaagtgttctatgttaagagttgtgtttaatttctaaagattaaaaaaagcaaaaaaattggtgctaaaccttcacccctgagcacgctcagtgagactggtcatgcaagcatttacagtgccatgctcctcaagccgattttttcttgtagaaatgttgccctatttgtcttctccaatgtatggtatgttattttattttattattttattttattttattttattttatcgagggggggtacgatacctgccatttaagaaaatgaatagaaaattttaaaacccgagaaatggggaaaaaaaaaatcagtgcacaagaattgggctggttaggcccagcaccacactgaagtgggctcagtggtttttggagtgaagaagccttactccctgcacattccctcatgctcccacacaagtccagcaatggaaatgcttgggttcctcttgctttgtcaggggactcaggagtcgaccaagggaaaccatttggccccgtgaggaatgggcattgtcagtatccgtcctgaacggggcctagtcaggaagcggtctagaagtgtacggtcacggtcgcctcatgaaagtgtgtagcaggtggctctcaggaaaaataccaagtctggatcatccatgtggcagctttgcatagggagaggatagctccgaactggaactgaactgccttctctgcacgcttgaccaaagcagtgatgagggcggccagtacctgcggtgtgcgtggtaggtttaaagaaaagggaatgttttctgctgagtgtttcctttgtccttgggctgctcgagctggacagtaggtaaccactgttttcaaggaccagcccaatttctctggcttggttcggagttcgtttcatccctagctgtgagtgccttttggtctggaaagttggcttgtctcataatacccacagctaggacattctctctgtaattatgaattgtccttgttttacattaaaagagaatgtctttgatcactagagtctgtcggtgttggattatttccactgtgagattcttaaaacttttttgcttcataataataaaacaactcatgttagagaccctttcaacatgaaaggtttgtagttgagacattacatatattttattgtttataataaaaatcatctatacaaaagaagtcctgggtgttaatattttgcacaagatctgttttccatgatgtgttgacatctacaatttcactaactgttgacgttattttctattgagattctggagcctagggagctatgtgttctttttgttcatttcgttcttacttccctgaagcaagagactatatggccttcagtgcaaagacttcagaccaattctttgtattacacttggttgcctcttggctatataacttctgagtgcaaatcattgaacactttaacgaagtattgtagagaataaatcataatggataaaaa

SEQ ID NO: 21329 - DNA, 3819 bp, Homo sapiens
cgctctttgtgacgtggaagacagggcgggacaagcggcttcgtggctgcattgggaccttctcagccatgaatcttcattcaggactcagggaatacacgttaaccagtgcacttaaggacagccgatttccccccctgacccgagaggagctgcctaaacttttctgctctgtctccctccttactaactttgaggatgccagtgattacctggactgggaggtaggggtccatgggattcgaattgaattcattaatgaaaaaggtgtcaaacgcacagccacatatttacctgaggttgctaaggaacaagataattatactggggtaacatctgacaggaaggacgcaggagcagggagcctggggacagccattatggcatgtgtcgggctatcatctcatgtctcagagtctccacgggactggcagacagactgggcgccagactgggatcagatccagacaatagactccttgctcaggaaaggtggctttaaagctccaattaccagtgaattcagaaaaacgatcaaactcaccaggtaccgaagtgagaaggtgacaatcagttacgcagagtatattgcttcccgacagcactgtttccagaacggcactcttcatgccccgcccctctacaatcattactcctgacacacggctgcatgaccagtcccacccccccgtggccaccaatggctatgacatcattggagcagatgcctcctcttcctggtccagttacttctattactgcaccattttatgatgctagcttccgttgccaagtctgcctcccgctgactgagggagggtagggttaccttgaacgaaacagaacttgaggggcccaagccttatctcagcctttcctcaatatggggttccgttggattggggctcctccatgactagtgggaattactgtgggttcagaagacccttgtctggtatttgccacatggggtattggccacacgctggaagctgaaattgatgatccctgaaggttgaacccacacacacccctgcagcctccccagatgaagtaggtgtattcccctggcagtctgggcaacggagaccaagaaacatttttaggttgttttaaattcctttttttaaacttccagtttattgcgtaccaagagttgattacaacctccatgcttcataagcggacgccacgttagggttggacgtgggcaccacgagtcctttgaggctcctggacagagacccacatcaagatcggaagccctttgggtggcgttgcagatctcattgctcagtaggccgtgaagattttcatcctcatcccactctcagttggattttctggcactcttcctgcattgagtctcctgattactgaacagagctccgtcatgtagcctgctgaggaatggaatggaatggagatgcccacaggaggtcctgatgtcatcactgcacgcaggtgtgagaggagagacctcttctgcaccgcctggctacctcactcctctgctggtagcagtgcctatagctggacctaagttctcagaagcgtagatgtgcaaacaagcgattgagttgggctttaggaggacacatcataggagagaatccagggtctgtaagctggttttcttttcaggtgacatcctgaggggcctgtaagcaggggagctcctttttctagtttgcctgtagaggtgggaagactgttggtgtttctgtcctttacaggacattaggaaacagttgtgtaattacacaaggtggacctttatcttgcctgacatgctgggaatcttcaccccaccagggcaaatttccaaatagctcattttattctaggtctttcaaactttcatgtgacatatttccctttcccattgttgctgatttccaaatcgctgtcagcaattttttcctctctccttgcctattcttcactcatttggtggcaaagttcatagaactaggggacttggaagatgctttgaaaatattgttacaaaggcactgctaaaatgattcacagggagagtggccagttggaagaaggatcctaaggatgtgacactggttttcaacaacatgcttagagaactcatgaagtggattgggtgtcaacccagtgaacatgtttttatttaatttattttttgaagtttatgtggtgatggtgtggctttccgaaatgggcaaatattcagaagatcttttgcattttcttctgtcaggaatggggaaggggagtgggggcacaatctgagaaaggacacctgtgctgttctaggcatcgctggcaagtttgtgggaagggatgggcaagggtgagtgggtttgctccacaccgtcctgtgctgctcgagaggacctgggacgtgcgagggaaacgtgggtgacggtgcctaggctgcggcccttcactgctgtgctgggttcctgcagcctgctacgtttcccttggcaatgtaaatgaagatggaggggtcgtttcgtgatttcctgctgctgagaataaatgtcttgttaaaaacgtggcaacggttactcttaggtgccatggatcgatgtcagggtggtcagctctggactaagccacccacctccaatttgtacaacagtattgatacatagggctacactcattactgttcaagtgttctatgttaagagttgtgtttaatttctaaagattaaaaaaagcaaaaaaattggtgctaaaccttcacccctgagcacgctcagtgagactggtcatgcaagcatttacagtgccatgctcctcaagccgattttttcttgtagaaatgttgccctatttgtcttctccaatgtatggtatgttattttattttattattttattttattttattttattttatcgagggggggtacgatacctgccatttaagaaaatgaatagaaaattttaaaacccgagaaatggggaaaaaaaaaatcagtgcacaagaattgggctggttaggcccagcaccacactgaagtgggctcagtggtttttggagtgaagaagccttactccctgcacattccctcatgctcccacacaagtccagcaatggaaatgcttgggttcctcttgctttgtcaggggactcaggagtcgaccaagggaaaccatttggccccgtgaggaatgggcattgtcagtatccgtcctgaacggggcctagtcaggaagcggtctagaagtgtacggtcacggtcgcctcatgaaagtgtgtagcaggtggctctcaggaaaaataccaagtctggatcatccatgtggcagctttgcatagggagaggatagctccgaactggaactgaactgccttctctgcacgcttgaccaaagcagtgatgagggcggccagtacctgcggtgtgcgtggtaggtttaaagaaaagggaatgttttctgctgagtgtttcctttgtccttgggctgctcgagctggacagtaggtaaccactgttttcaaggaccagcccaatttctctggcttggttcggagttcgtttcatccctagctgtgagtgccttttggtctggaaagttggcttgtctcataatacccacagctaggacattctctctgtaattatgaattgtccttgttttacattaaaagagaatgtctttgatcactagagtctgtcggtgttggattatttccactgtgagattcttaaaacttttttgcttcataataataaaacaactcatgttagagaccctttcaacatgaaaggtttgtagttgagacattacatatattttattgtttataataaaaatcatctatac

SEQ ID NO: 21330 - DNA, 651 bp, Homo sapiens
cgctctttgtgacgtggaagacagggcgggacaagcggcttcgtggctgcattgggaccttctcagccatgaatcttcattcaggactcagggaatacacgttaaccagtgcacttaaggacagccgatttccccccctgacccgagaggagctgcctaaacttttctgctctgtctccctccttactaactttgaggatgccagtgattacctggactgggaggtaggggtccatgggattcgaattgaattcattaatgaaaaaggtgtcaaacgcacagccacatatttacctgaggttgctaaggaacaaggtgagttggatgaatgggattttaatgacaagtatcattcacagtggtgccagttaaagggcaagaaagtgaagtgtgtcatcttgcagcccaactgcagctgagaatgagggcctttctgcctcttaatacctgtcaaattcctatagaaccaagggtaaacttccaaaaaggtttaggagctgggaaaagcaaaagggtaaatcgttcacttactcgcctgatatttcaaacacttcttttcaatgaatagttttatttcttagccccttaaactacagtggcaattgtagcaaaataccaccaatcaacctgaccatattgtagaattcagta

SEQ ID NO: 21331 - DNA, 1815 bp, Homo sapiens
gtccaaaccaaactcacagctgcccctgtgcagccttcagagttgagctggggtctcagtctccaacctgtcctttctgaccctcccatggctgcccagggaggcggggttcactgtgccacgtgctgggtgcccccctctgcagacagccagtccaggagatggaccaacagaggtcaaggggcagctggccaggccgcaccggggtccccgagttctgagctgtgctatgcaaacaagaatgctcctgtgtgggggggcatggccgttggaggtatagctgggcgggtagtggaaggactggaaatctctgttgttgtttggggaagtccatgcttcagtccttcggagtatgcgtggattgttcgaagtgtgactatggcccgggagccagggcagcatgaactcctttctctgaaatttcgaggcctccttgggttccctgaactccgggctgatgttcccaggacccagcaccaggagaccccagtcccgccagcagccgccgctacccaggagggctgggcgacattggccgcctcccaccagctccccctcctcgcccacagcctcttgtcactgccaagcccccgttccttttgcccaaatcacgcaggcggaagctgcagtgccagctggagggatgttcatagggcttcctgtgcccatccctgctccaaacagctggacagcttcccctctacccccaccctggtgagcccctgggggccagagaaagatggggttcctgcaccttcccagctccacctctgaacttgagttagcgttagctaagcatacaatcagtgtcgaacgtctctcttccttaagcttgtagatacgactgcctataatcaggggactcccactggaggccgggaggccaatgctggccaggtgcgagggcatggtttggttcctttagggaatttttgttttgcaaacaggagaaacctgtgctgcaggttggagtggcaggaacgactggccttggtcagcaggcagcccccagcctagggccacagtcctcttcagggcctgggcagccccaatttctggcccagcaggtttctctttgtagtgtctttcagcacatccaaaatgctaggcctcctgccaccaacgtgtcagagcaatgtccaactgtcaggctctcagagatgcctcagtttccctagcatgagcaccagccgacacacacagtccactgagatgataattctgttctctccaaagcaaaaagctgggcgaggggtagtctcaatttctgtcagtgctcaaaggaataacaccaaaagaatcaacacagaatctcccagacacacgtgacccagctcgtggcgccgtgggtccgtaggagggacagtacctcacaacaggcccagcgggggaccacctctctgtacaattggaacgcgttttacttttcttttctctccttttttcattccgattttttttgcatgtttctttttgaaatgggcaaaatgtgtagcagcctgcatgagcacagttgttttggggaaagatactggagtatgatgtactcacacctgcaaatctgagcatcgcgaggttaaacgttccacctttttttgtaatcgtcaacagcacaactattttgtattgttgtttgtatcattttgtaccaaaaaaaaaaaggaaaaaaaaagggaagagagttgatgttttcagtgtgtttccagtgccagacagtcttggtcctgaactcagtagacccttgcggagcggttgtgcgcgggcaggcggggcgcgctgctccagagaatgaataaagtcccccttttccgtagt

SEQ ID NO: 21332 - DNA, 453 bp, Homo sapiens
gatggtgcaaagcattgtggctggaggcctccaagccaaggaagggccacagggagccctgaggtgggctggttcctgtccagccggctccctgggcagctccccaaatgggtaaaactgtgcagctggccagcccctaaccctccttccacccttcccccacccgccctctccagcacacactctcctctttaaccccacaaagagcctggctctgccaggttaatcattcttacaaatgcagacgctgggggacacgggtgcagccttcacatatctgtggggctgtcatgtggaagagggagctgcgccgtggggggcaggccagggaagctgtgggggcaggtgcagctctgtttggaccacctcagagagaaccagctatgctggggggatgttaatctccctgagcctaaaagtggacaatcccatgaataaaacatttgccaatgc

SEQ ID NO: 21333 - DNA, 412 bp, Homo sapiens
agtggtgcgatctcagctcactgcaacctccgcctccctggttcaatcaagtctcctgcctcagcctcccgagtagctgggattacaggctcctgccaccatacccagctaatttttgtatttttaatagagatggggtttcaccatgttgcccaggctggtctcaaacttctgacttcaagtaattcgcccacccgggcctcccaaagtgctgggattgcaggtataagccaccgcgcctggcctgtgttctaatgagaacggtaatagttctcaagcctacagaaccagaaccacttgagaagcttttaaaaagaaaacaaaactgaagcctgcgctccacgtaatactaactgaatcagaatctctggaggggaggtctaggctttggcactttaaaaaaacaaacaaa

SEQ ID NO: 21334 - DNA, 358 bp, Homo sapiens
ctgcctagtcttggagcaattcctgacccaggtggacaaatatcagttggctcagtacctacatgttggggtctagaattagtctggcttccctgagcccagagtccacatgccagggatgaactcttggcatctcacagccatcactgtgcaatcacctgcccttcccaagccatgtcccaggccatacacctgagcctcttctgccttggtttcctgaactgcattttgttttccttcttggggtttaattatgctgttaatgtaagccatcttggcatgtgacatagctattcactgtcatcctctgagggaataggcttgtacccaatattccagcccctgactggtgtcctgc

SEQ ID NO: 21335 - DNA, 583 bp, Homo sapiens
gaaaggtaaagaaaaattttaggatagttttggtttggtttggttttcctttctgaacaggaaaagggattatataggggacacccaggaggcctcagagcacaggtaaatttgtatttcttaaactagttagtaagtggacagatatttgttttgttattttgtctacactagatgtaatgaatgttatttatatctatttattattccgtaacaactatgtgtgtgcgtcctttgacccagcaaattctatttctaaaattttggttcacggaaataaaagcactcgtacatagactaaatgtacaaattaatggtataatttgtggtgggagaaatgaagtgaatgctcataaataagggaatgggtgaatatattttggaacatccatacagaggagtattatactgtcattaaaaagaattgagtttgccagacatggtggctgacaactgtaatcccagaactttgggaggctgatgtaggaggatcacttgagctcaggagttcaaagttacggtgagcaatgatcttgccactgtacaccagcctagatcacaaagcaagactgtctctttaaaa

SEQ ID NO: 21336 - DNA, 193 bp, Homo sapiens
gaccatgcatagactgatctctaaggagttttctaacggccgtatataaaggaaatgcttgataacaagataatattttctgttaagtaaaaggatttaatttgccgcatctttataagccatgcttaacattaagcaacattagctaccatttatgagcacctgctatataccagtaacagtgctttttgta

SEQ ID NO: 21337 - DNA, 168 bp, Homo sapiens
agaggaggggagaacaggaggaagaagggaagcaggcagggaggaagaacgcaggtaatgagaagaatgcaagtcatgctccaggctgacaagcttccaaagtaacaaaaaacccaactgtaatttgatatggacaaaaattattttaatcttctgttcataaatttt

SEQ ID NO: 21338 - DNA, 260 bp, Homo sapiens
ccaagatgtgctagatcaactgtgtatggtgctgctaatgagttcacagaaacctagaggtttttacttgcccaaggtcacaccactagctggggacacaaccaaaactggaaaattatagtggtaattcatagtttgttgccttgattatttaggtcaagttctgtaaactttttctgtgaagggccagattgtaaacattttaggctttgcaggccatatggtccctgttgcaactactcaactctactaacatagta

SEQ ID NO: 21339 - DNA, 229 bp, Homo sapiens
gagaaggaattgaatacattaaatggtgcatatcatggagaactttaatttttggcatgaagctttgtttggatttgatgcaacaaatgacaagaagccatttgtggtcaccgagtaagagaagaatggaggaaactgttttagtaagacagattgggcagtgtatggaaaatggaacagagaaagaagagactggaggatgaaatagtaatttggaaaaaggtaacat

SEQ ID NO: 21340 - DNA, 841 bp, Homo sapiens
tgcggaagggaaagtcgaggagggcagagccagccccggggcttggcaaggcctcctttctgccacgtaccttgtctctgcggaactccatcagcaggatcatgtcggaggcgggcagtgggaccctggaggacgagtggcaggccatctcggagattgcctctacttgcaacaccattctggagtcgctgtcccgagagggacagcccatcccagagagtggagaccctaagggaactccaaaatctgatgctgagccagagcctgggaacctctcagagaaggtctctcacttggagtccatgctcaggaagctgcaggaggacctgcagaaggagaaggcggacagggcggccctggaggaggaggtgcggagcctgagacacaacaaccggcggctgcaggcggagtctgagagtgcagccacacgcctcctcctggcctccaagcagctgggctcacccaccgccgacctggcctgagccgtctggaaccacctgggcccctgagggcactgtggtcacactgggccctcctcaggaactctccctgcgcagaggcgtgtcttagcactgcccccctccctagccccttatttggtggcggaagtggcctccaccccttccctgtttgtaaatattctgtggagaaaagaggacttcagggagtaaaaaagccactgatgtctgtgtctgaaaaacaaaaaaaaaaaagtcagaggacaacaatgacggggaggggaaaaagggcatgaagcgccatggtcaaccaggtccgtgaccagttctgccaaggggaaccagcgggaccaagggagagaaaagaaagcacgtacggtaga

SEQ ID NO: 21341 - DNA, 336 bp, Homo sapiens
  misc_feature (8)..(8): n is a, c, g, or t
ggaggcgnctggagccattactgcccacactggggatctggccgaggagaggactgagttcctgcacagccagaactcgctgtcaccacgcagctctctgtcggatgaggccccagtcctgcccaacaccaccccggacctcctcctggccaccacagccaagccatcagtacccagtgctgacagtgagacacccctgacccaggacaggccaggcagtcccagtggctctgaggacaagggcaacccggcgccggagctgagggcctcctttctgccacgtaccttgtctctgcggaactccatcagcaggagtgagtctggacccaggagagc

SEQ ID NO: 21342 - DNA, 3638 bp, Homo sapiens
cgggagagcggcagcgggaccccagcgcgggcggcggcggctgggcgggagccccagagggcaggaactgctgccacaacctcaggctgggcaccaaacacccgtgcccgccaatgcggcccagcccccggagagtcaggcccacagagcatgcccatgtgggccggcggtgtggggagccctcggcggggcatggcccctgcgtccacagatgacctctttgcccgcaagctgcgccagccagcaaggcccccgctgacaccgcacaccttcgagccgaggccagtccggggcccactcctgcgcagcggcagcgatgcaggcgaggccaggccccccacgccagccagcccccgtgcccgtgcccacagccacgaagaggccagccgacctgcagccacttccacccggctcttcactgacccgctggcactgctggggctgccagcagaggaaccagagcctgccttcccaccagtgcttgagcctcgatggtttgcccactatgacgtgcaaagcctgctctttgattgggctccgaggtctcaggggatggggagccactcagaggccagctctgggaccctggcttcagccgaggaccaggctgccagctcggacctgctgcatggggcacctggctttgtgtgtgagctcgggggtgagggtgagctaggcctgggtggaccagcatccccacctgtgccccctgcactgcccaacgcggccgtgtccatcctggaggagccacagaaccgaacctcggcctacagcctggagcacgcagacctgggtgctggctactaccgcaaatacttctatggcaaagaacatcagaacttcttcgggatggacgagtcgctgggcccggtggcagtgagcctgcggcgggaggagaaggagggcagcggagggggcaccctgcacagctaccgcgtcatcgtgcggaccacgcagctccggacactccgtggcaccatctcggaggacgcgctgccgccggggcccccacggggtctgtccccaaggaaacttctggagcacgtggcgccgcagctgagccccagctgcctgcgcctgggctcagcttcacccaaggtaccacggacgctgctcacactggatgagcaagtgctgagcttccaacgcaaggtgggcatcctgtactgccgggcgggccagggctcggaggaggagatgtacaacaaccaggaggcgggaccggccttcatgcagtttctcaccttgctgggcgatgtggtgcggctcaaaggctttgagagttaccgggcccagctagacaccaaaacggattccacaggcacgcactccctctacaccacataccaggaccacgagatcatgttccacgtgtccacgatgctgccttacacccctaataaccagcagcagctcctccggaagcgccacattggcaacgacattgtgaccatcgtgttccaggagcctggcagcaagcccttctgccccaccaccatccgctcgcacttccagcacgtgttcctagtggtgcgggcacacacaccctgcacgccacacaccacctacagggtggccgtgagccgcacccaggacacccctgccttcgggccagctctgcctgctggcggaggccccttcgcagccaacgccgacttccgggccttcctgctggccaaagcgctgaatggtgagcaggcggccggccacgcgcgccagttccacgccatggccacgcgcacccgccagcagtacctgcaagacctggccaccaacgaggtgaccactacgtcgctggactcggcttcacgcttcggcctgccctccctgggtgggaggcgccgggcggcccctcggggcccaggcgccgagctgcaggcagcgggctcactggtgtggggagtgcgcgcggcgcccggggcgcgggtcgccgccggggctcaggcgagcggccccgaaggcatcgaggtgccctgcctgctgggcatctcggccgaggctctggtgctggtggcgccgcgcgacggccgcgtagtgttcaattgcgcctgtcgcgacgtgctggcctggaccttctccgagcagcagctggacctgtaccacggccgcggggaggcgatcacgctgcgcttcgacgggtcccccggccaagccgtgggcgaggtggtggcgcgcctgcagctggtgagccgtggctgcgagacccgcgagctggcgctgccccgcgacggtcaaggccgcctgggcttcgaggtggacgccgagggattcgtcacgcacgtggagcgcttcacattcgccgagacggcggggctgcggcccggggcgcgcctcctgcgcgtgtgcggccagacgctgcccagcctccggcccgaggccgctgcccagctcctgcgctcggcgcccaaggtctgcgtcaccgtcctgccccccgacgagagcggccggccccgcaggagtttttcggagctgtacacgctgtcgctgcaggagcctagccggcggggggccccagatcctgtgcaggatgaggtccagggggtgaccctgctgcccaccacaaagcagctgctgcacctgtgcctgcaagatggtggcagtcctccagggcctggggatctggccgaggagaggactgagttcctgcacagccagaactcgctgtcaccacgcagctctctgtcggatgaggccccagtcctgcccaacaccaccccggacctcctcctggccaccacagccaagccatcagtacccagtgctgacagtgagacacccctgacccaggacaggccaggcagtcccagtggctctgaggacaagggcaacccggcgccggagctgagggcctcctttctgccacgtaccttgtctctgcggaactccatcagcaggatcatgtcggaggcgggcagtgggaccctggaggacgagtggcaggccatctcggagattgcctctacttgcaacaccattctggagtcgctgtcccgagagggacagcccatcccagagagtggagaccctaagggaactccaaaatctgatgctgagccagagcctgggaacctctcagagaaggtctctcacttggagtccatgctcaggaagctgcaggaggacctgcagaaggagaaggcggacagggcggccctggaggaggaggtgcggagcctgagacacaacaaccggcggctgcaggcggagtctgagagtgcagccacacgcctcctcctggcctccaagcagctgggctcacccaccgccgacctggcctgagccgtctggaaccacctgggcccctgagggcactgtggtcacactgggccctcctcaggaactctccctgcgcagaggcgtgtcttagcactgcccccctccctagccccttatttggtggcggaagtggcctccaccccttccctgtttgtaaatattctgtggagaaaagaggacttcagggagtaaaaaagccactgatgtctgtgtctgaaaaacaaaaaaaaaaaagtcagaggacaacaatgacggggaggggaaaaagggcatgaagcgccatggtcaaccaggtccgtgaccagttctgccaaggggaaccagcgggaccaagggagagaaaagaaagcacgtacggtaga

SEQ ID NO: 21343 - DNA, 4775 bp, Homo sapiens
cgggagagcggcagcgggaccccagcgcgggcggcggcggctgggcgggagccccagagggcaggaactgctgccacaacctcaggctgggcaccaaacacccgtgcccgccaatgcggcccagcccccggagagtcaggcccacagagcatgcccatgtgggccggcggtgtggggagccctcggcggggcatggcccctgcgtccacagatgacctctttgcccgcaagctgcgccagccagcaaggcccccgctgacaccgcacaccttcgagccgaggccagtccggggcccactcctgcgcagcggcagcgatgcaggcgaggccaggccccccacgccagccagcccccgtgcccgtgcccacagccacgaagaggccagccgacctgcagccacttccacccggctcttcactgacccgctggcactgctggggctgccagcagaggaaccagagcctgccttcccaccagtgcttgagcctcgatggtttgcccactatgacgtgcaaagcctgctctttgattgggctccgaggtctcaggggatggggagccactcagaggccagctctgggaccctggcttcagccgaggaccaggctgccagctcggacctgctgcatggggcacctggctttgtgtgtgagctcgggggtgagggtgagctaggcctgggtggaccagcatccccacctgtgccccctgcactgcccaacgcggccgtgtccatcctggaggagccacagaaccgaacctcggcctacagcctggagcacgcagacctgggtgctggctactaccgcaaatacttctatggcaaagaacatcagaacttcttcgggatggacgagtcgctgggcccggtggcagtgagcctgcggcgggaggagaaggagggcagcggagggggcaccctgcacagctaccgcgtcatcgtgcggaccacgcagctccggacactccgtggcaccatctcggaggacgcgctgccgccggggcccccacggggtctgtccccaaggaaacttctggagcacgtggcgccgcagctgagccccagctgcctgcgcctgggctcagcttcacccaaggtaccacggacgctgctcacactggatgagcaagtgctgagcttccaacgcaaggtgggcatcctgtactgccgggcgggccagggctcggaggaggagatgtacaacaaccaggaggcgggaccggccttcatgcagtttctcaccttgctgggcgatgtggtgcggctcaaaggctttgagagttaccgggcccagctagacaccaaaacggattccacaggcacgcactccctctacaccacataccaggaccacgagatcatgttccacgtgtccacgatgctgccttacacccctaataaccagcagcagctcctccggaagcgccacattggcaacgacattgtgaccatcgtgttccaggagcctggcagcaagcccttctgccccaccaccatccgctcgcacttccagcacgtgttcctagtggtgcgggcacacacaccctgcacgccacacaccacctacagggtggccgtgagccgcacccaggacacccctgccttcgggccagctctgcctgctggcggaggccccttcgcagccaacgccgacttccgggccttcctgctggccaaagcgctgaatggtgagcaggcggccggccacgcgcgccagttccacgccatggccacgcgcacccgccagcagtacctgcaagacctggccaccaacgaggtgaccactacgtcgctggactcggcttcacgcttcggcctgccctccctgggtgggaggcgccgggcggcccctcggggcccaggcgccgagctgcaggcagcgggctcactggtgtggggagtgcgcgcggcgcccggggcgcgggtcgccgccggggctcaggcgagcggccccgaaggcatcgaggtgccctgcctgctgggcatctcggccgaggctctggtgctggtggcgccgcgcgacggccgcgtagtgttcaattgcgcctgtcgcgacgtgctggcctggaccttctccgagcagcagctggacctgtaccacggccgcggggaggcgatcacgctgcgcttcgacgggtcccccggccaagccgtgggcgaggtggtggcgcgcctgcagctggtgagccgtggctgcgagacccgcgagctggcgctgccccgcgacggtcaaggccgcctgggcttcgaggtggacgccgagggattcgtcacgcacgtggagcgcttcacattcgccgagacggcggggctgcggcccggggcgcgcctcctgcgcgtgtgcggccagacgctgcccagcctccggcccgaggccgctgcccagctcctgcgctcggcgcccaaggtctgcgtcaccgtcctgccccccgacgagagcggccggccccgcaggagtttttcggagctgtacacgctgtcgctgcaggagcctagccggcggggggccccagatcctgtgcaggatgaggtccagggggtgaccctgctgcccaccacaaagcagctgctgcacctgtgcctgcaagatggtggcagtcctccagggcctggggatctggccgaggagaggactgagttcctgcacagccagaactcgctgtcaccacgcagctctctgtcggatgaggccccagtcctgcccaacaccaccccggacctcctcctggccaccacagccaagccatcagtacccagtgctgacagtgagacacccctgacccaggacaggccaggcagtcccagtggctctgaggacaagggcaacccggcgccggagctgagggcctcctttctgccacgtaccttgtctctgcggaactccatcagcaggatcatgtcggaggcgggcagtgggaccctggaggacgagtggcaggccatctcggagattgcctctacttgcaacaccattctggagtcgctgtcccgagagggacagcccatcccagagagtggagaccctaagggaactccaaaatctgatgctgagccagagcctgggaacctctcagagaaggtctctcacttggagtccatgctcaggaagctgcaggaggacctgcagaaggagaaggcggacagggcggccctggaggaggaggtgcggagcctgagacacaacaaccggcggctgcaggcggagtctgagagtgcagccacacgcctcctcctggcctccaagcagctgggctcacccaccgccgacctggcctgagccgtctggaaccacctgggcccctgagggcactgtggtcacactgggccctcctcaggaactctccctgcgcagaggcgtgtcttagcactgcccccctccctagccccttatttggtggcggaagtggcctccaccccttccctgtttgtaaatattctgtggagaaaagaggacttcagggagtaaaaaagccaaaaaaaaaaaaaaaaaaaaaaaaaaaaaaaaaaaaaaaaaaaaaaaaaaaaaacacaaacccaaaaaacaaaaaaagaaagaaccaaaaaaaaaaaaaaaaaaaaaaaaaaaaaaaaacaccggagcgggagcggcaaccaccacacacccaccgcacccaccacgacgagggcggagggaacacgggctcagacgacgcggaggccggcggccagccgcacgcccggcagccctagcgcaaccaggggagccgggccaccggaccaccggcgacacgaagcggacgacgagaggagcaaggaagaggaagaggaggcagggaggacaaagaaataaggaagagaaaacaacacaccatccccccgatgggggcaaagcgaaggcagccagggcgcgacgacgcagtccacagaacacacaaaagcagagaccgaaaccgatgaaggcgcggacagcagcacaacagccacgcaagcgaaacacacacaccaagaggggagaggagagaagaaaagaatcgagggaaccgcccgggagacacgcggcggcggcaggagggagcaggacacgaagaagagaagagagaaggaagcgacagaaaatcagaacgaggaggggacgggaacaccagcaaagcaggagagcggagcagccagaggccgcgcacagacgcgggcacaaaaccggagggcaaaccaaaccacagagaagccacacgaaggaagcgacagaacagcgcgcggagagaagggaggagggacaagaggagagaagaacggcgggggggacggggaaaaggagacgccgacgagagagggcggagcgggcgaagagacgaagaaaggggagagaaaggagggaggcagggggagcgagaagagagagcaagcgagaaaggcacaacggacgaacgaccgaagagaggaagaaggcggagggaagaacaggcgaacggcgaacacggaggcagcagagccacgaggagaggacgcagacggcagaacagagcagacacggagaggagggtcgagagaggcgacgtgaacagaacgggcgagacagaaggcagaagagacgccgagccaaaccggagaagaagcgggagcaccaaaagagccaccggcgcagaccgcagcagagcgccacaaacacgaagagggagccgaggcccaggcggcagaaggagacacacaggacagaggagccaccagccgaccaggcagcgcggacagccgaccatgcacgaacgacggggaggaagcagaaggacagcagaagcagcaggcacaccacaagaa

SEQ ID NO: 21344 - DNA, 4050 bp, Homo sapiens
cagcagtgggcaggtgcagccctgcttagggcctggagatgggcagacccaggctcacatcctagctctgacacggaattgcttcaggcaagagcatctcctctggacctcatctgaccatctgtcacatggggttcagacctccctgtctgcatcagtgagaccaggtaggcagaggtccctatgggtccctgtcattgtgactcctcttgcccccaagcctgggcacagtagcctgcaagaaggtgagttggcctgtccttcagggcagggtgactggggtcccatgacagctgctgtgaccccagcaccttcctcaggatgtgggggcctggcagagggctgggcccacagttggggctacttcctgtgctgaaggaagtcctcttgccattcctgctgccctgccgctgcctccctgggaacccatgtgtccttgtggcccctctgagcagccccctcctccttcagggcaggaactgctgccacaacctcaggctgggcaccaaacacccgtgcccgccaatgcggcccagcccccggagagtcaggcccacagagcatgcccatgtgggccggcggtgtggggagccctcggcggggcatggcccctgcgtccacagatgacctctttgcccgcaagctgcgccagccagcaaggcccccgctgacaccgcacaccttcgagccgaggccagtccggggcccactcctgcgcagcggcagcgatgcaggcgaggccaggccccccacgccagccagcccccgtgcccgtgcccacagccacgaagaggccagccgacctgcagccacttccacccggctcttcactgacccgctggcactgctggggctgccagcagaggaaccagagcctgccttcccaccagtgcttgagcctcgatggtttgcccactatgacgtgcaaagcctgctctttgattgggctccgaggtctcaggggatggggagccactcagaggccagctctgggaccctggcttcagccgaggaccaggctgccagctcggacctgctgcatggggcacctggctttgtgtgtgagctcgggggtgagggtgagctaggcctgggtggaccagcatccccacctgtgccccctgcactgcccaacgcggccgtgtccatcctggaggagccacagaaccgaacctcggcctacagcctggagcacgcagacctgggtgctggctactaccgcaaatacttctatggcaaagaacatcagaacttcttcgggatggacgagtcgctgggcccggtggcagtgagcctgcggcgggaggagaaggagggcagcggagggggcaccctgcacagctaccgcgtcatcgtgcggaccacgcagctccggacactccgtggcaccatctcggaggacgcgctgccgccggggcccccacggggtctgtccccaaggaaacttctggagcacgtggcgccgcagctgagccccagctgcctgcgcctgggctcagcttcacccaaggtaccacggacgctgctcacactggatgagcaagtgctgagcttccaacgcaaggtgggcatcctgtactgccgggcgggccagggctcggaggaggagatgtacaacaaccaggaggcgggaccggccttcatgcagtttctcaccttgctgggcgatgtggtgcggctcaaaggctttgagagttaccgggcccagctagacaccaaaacggattccacaggcacgcactccctctacaccacataccaggaccacgagatcatgttccacgtgtccacgatgctgccttacacccctaataaccagcagcagctcctccggaagcgccacattggcaacgacattgtgaccatcgtgttccaggagcctggcagcaagcccttctgccccaccaccatccgctcgcacttccagcacgtgttcctagtggtgcgggcacacacaccctgcacgccacacaccacctacagggtggccgtgagccgcacccaggacacccctgccttcgggccagctctgcctgctggcggaggccccttcgcagccaacgccgacttccgggccttcctgctggccaaagcgctgaatggtgagcaggcggccggccacgcgcgccagttccacgccatggccacgcgcacccgccagcagtacctgcaagacctggccaccaacgaggtgaccactacgtcgctggactcggcttcacgcttcggcctgccctccctgggtgggaggcgccgggcggcccctcggggcccaggcgccgagctgcaggcagcgggctcactggtgtggggagtgcgcgcggcgcccggggcgcgggtcgccgccggggctcaggcgagcggccccgaaggcatcgaggtgccctgcctgctgggcatctcggccgaggctctggtgctggtggcgccgcgcgacggccgcgtagtgttcaattgcgcctgtcgcgacgtgctggcctggaccttctccgagcagcagctggacctgtaccacggccgcggggaggcgatcacgctgcgcttcgacgggtcccccggccaagccgtgggcgaggtggtggcgcgcctgcagctggtgagccgtggctgcgagacccgcgagctggcgctgccccgcgacggtcaaggccgcctgggcttcgaggtggacgccgagggattcgtcacgcacgtggagcgcttcacattcgccgagacggcggggctgcggcccggggcgcgcctcctgcgcgtgtgcggccagacgctgcccagcctccggcccgaggccgctgcccagctcctgcgctcggcgcccaaggtctgcgtcaccgtcctgccccccgacgagagcggccggccccgcaggagtttttcggagctgtacacgctgtcgctgcaggagcctagccggcggggggccccagatcctgtgcaggatgaggtccagggggtgaccctgctgcccaccacaaagcagctgctgcacctgtgcctgcaagatggtggcagtcctccagggcctggggatctggccgaggagaggactgagttcctgcacagccagaactcgctgtcaccacgcagctctctgtcggatgaggccccagtcctgcccaacaccaccccggacctcctcctggccaccacagccaagccatcagtacccagtgctgacagtgagacacccctgacccaggacaggccaggcagtcccagtggctctgaggacaagggcaacccggcgccggagctgagggcctcctttctgccacgtaccttgtctctgcggaactccatcagcaggatcatgtcggaggcgggcagtgggaccctggaggacgagtggcaggccatctcggagattgcctctacttgcaacaccattctggagtcgctgtcccgagagggacagcccatcccagagagtggagaccctaagggaactccaaaatctgatgctgagccagagcctgggaacctctcagagaaggtctctcacttggagtccatgctcaggaagctgcaggaggacctgcagaaggagaaggcggacagggcggccctggaggaggaggtgcggagcctgagacacaacaaccggcggctgcaggcggagtctgagagtgcagccacacgcctcctcctggcctccaagcagctgggctcacccaccgccgacctggcctgagccgtctggaaccacctgggcccctgagggcactgtggtcacactgggccctcctcaggaactctccctgcgcagaggcgtgtcttagcactgcccccctccctagccccttatttggtggcggaagtggcctccaccccttccctgtttgtaaatattctgtggagaaaagaggacttcagggagtaaaaaagccactgatgtctgtgtctgaaaaacaaaaaaaaaaaagtcagaggacaacaatgacggggaggggaaaaagggcatgaagcgccatggtcaaccaggtccgtgaccagttctgccaaggggaaccagcgggaccaagggagagaaaagaaagcacgtacggtaga

SEQ ID NO: 21345 - DNA, 3869 bp, Homo sapiens
ctaaggtgtgtgggtggcgactgggggaccctgcagtcccagggctgcccaggctccaggaccctcaggaccaagacccaacagcccagcctctagccttgcccagctaagctggggagggggctggaaactttagccctaggcagacaaggaagtggcctggaaagcggaagcagctttgatggtctcggagggggccggaagccaacacgggtggtggaggaccaggctgggggcctgggttcctgttttctgcccaggcccctctgagcagccccctcctccttcagggcaggaactgctgccacaacctcaggctgggcaccaaacacccgtgcccgccaatgcggcccagcccccggagagtcaggcccacagagcatgcccatgtgggccggcggtgtggggagccctcggcggggcatggcccctgcgtccacagatgacctctttgcccgcaagctgcgccagccagcaaggcccccgctgacaccgcacaccttcgagccgaggccagtccggggcccactcctgcgcagcggcagcgatgcaggcgaggccaggccccccacgccagccagcccccgtgcccgtgcccacagccacgaagaggccagccgacctgcagccacttccacccggctcttcactgacccgctggcactgctggggctgccagcagaggaaccagagcctgccttcccaccagtgcttgagcctcgatggtttgcccactatgacgtgcaaagcctgctctttgattgggctccgaggtctcaggggatggggagccactcagaggccagctctgggaccctggcttcagccgaggaccaggctgccagctcggacctgctgcatggggcacctggctttgtgtgtgagctcgggggtgagggtgagctaggcctgggtggaccagcatccccacctgtgccccctgcactgcccaacgcggccgtgtccatcctggaggagccacagaaccgaacctcggcctacagcctggagcacgcagacctgggtgctggctactaccgcaaatacttctatggcaaagaacatcagaacttcttcgggatggacgagtcgctgggcccggtggcagtgagcctgcggcgggaggagaaggagggcagcggagggggcaccctgcacagctaccgcgtcatcgtgcggaccacgcagctccggacactccgtggcaccatctcggaggacgcgctgccgccggggcccccacggggtctgtccccaaggaaacttctggagcacgtggcgccgcagctgagccccagctgcctgcgcctgggctcagcttcacccaaggtaccacggacgctgctcacactggatgagcaagtgctgagcttccaacgcaaggtgggcatcctgtactgccgggcgggccagggctcggaggaggagatgtacaacaaccaggaggcgggaccggccttcatgcagtttctcaccttgctgggcgatgtggtgcggctcaaaggctttgagagttaccgggcccagctagacaccaaaacggattccacaggcacgcactccctctacaccacataccaggaccacgagatcatgttccacgtgtccacgatgctgccttacacccctaataaccagcagcagctcctccggaagcgccacattggcaacgacattgtgaccatcgtgttccaggagcctggcagcaagcccttctgccccaccaccatccgctcgcacttccagcacgtgttcctagtggtgcgggcacacacaccctgcacgccacacaccacctacagggtggccgtgagccgcacccaggacacccctgccttcgggccagctctgcctgctggcggaggccccttcgcagccaacgccgacttccgggccttcctgctggccaaagcgctgaatggtgagcaggcggccggccacgcgcgccagttccacgccatggccacgcgcacccgccagcagtacctgcaagacctggccaccaacgaggtgaccactacgtcgctggactcggcttcacgcttcggcctgccctccctgggtgggaggcgccgggcggcccctcggggcccaggcgccgagctgcaggcagcgggctcactggtgtggggagtgcgcgcggcgcccggggcgcgggtcgccgccggggctcaggcgagcggccccgaaggcatcgaggtgccctgcctgctgggcatctcggccgaggctctggtgctggtggcgccgcgcgacggccgcgtagtgttcaattgcgcctgtcgcgacgtgctggcctggaccttctccgagcagcagctggacctgtaccacggccgcggggaggcgatcacgctgcgcttcgacgggtcccccggccaagccgtgggcgaggtggtggcgcgcctgcagctggtgagccgtggctgcgagacccgcgagctggcgctgccccgcgacggtcaaggccgcctgggcttcgaggtggacgccgagggattcgtcacgcacgtggagcgcttcacattcgccgagacggcggggctgcggcccggggcgcgcctcctgcgcgtgtgcggccagacgctgcccagcctccggcccgaggccgctgcccagctcctgcgctcggcgcccaaggtctgcgtcaccgtcctgccccccgacgagagcggccggccccgcaggagtttttcggagctgtacacgctgtcgctgcaggagcctagccggcggggggccccagatcctgtgcaggatgaggtccagggggtgaccctgctgcccaccacaaagcagctgctgcacctgtgcctgcaagatggtggcagtcctccagggcctggggatctggccgaggagaggactgagttcctgcacagccagaactcgctgtcaccacgcagctctctgtcggatgaggccccagtcctgcccaacaccaccccggacctcctcctggccaccacagccaagccatcagtacccagtgctgacagtgagacacccctgacccaggacaggccaggcagtcccagtggctctgaggacaagggcaacccggcgccggagctgagggcctcctttctgccacgtaccttgtctctgcggaactccatcagcaggatcatgtcggaggcgggcagtgggaccctggaggacgagtggcaggccatctcggagattgcctctacttgcaacaccattctggagtcgctgtcccgagagggacagcccatcccagagagtggagaccctaagggaactccaaaatctgatgctgagccagagcctgggaacctctcagagaaggtctctcacttggagtccatgctcaggaagctgcaggaggacctgcagaaggagaaggcggacagggcggccctggaggaggaggtgcggagcctgagacacaacaaccggcggctgcaggcggagtctgagagtgcagccacacgcctcctcctggcctccaagcagctgggctcacccaccgccgacctggcctgagccgtctggaaccacctgggcccctgagggcactgtggtcacactgggccctcctcaggaactctccctgcgcagaggcgtgtcttagcactgcccccctccctagccccttatttggtggcggaagtggcctccaccccttccctgtttgtaaatattctgtggagaaaagaggacttcagggagtaaaaaagccactgatgtctgtgtctgaaaaacaaaaaaaaaaaagtcagaggacaacaatgacggggaggggaaaaagggcatgaagcgccatggtcaaccaggtccgtgaccagttctgccaaggggaaccagcgggaccaagggagagaaaagaaagcacgtacggtaga

SEQ ID NO: 21346 - DNA, 2941 bp, Homo sapiens
ggcgggacttagtctagggtcaacatttggtggtgagatgaagcctaggcggggcttagtgatgcgcgtggtcgagcgggggcggggctgccagagggcgggaccaatcgttttcttcggcgcggtccccagaacatcagaacttcttcgggatggacgagtcgctgggcccggtggcagtgagcctgcggcgggaggagaaggagggcagcggagggggcaccctgcacagctaccgcgtcatcgtgcggaccacgcagctccggacactccgtggcaccatctcggaggacgcgctgccgccggggcccccacggggtctgtccccaaggaaacttctggagcacgtggcgccgcagctgagccccagctgcctgcgcctgggctcagcttcacccaaggtaccacggacgctgctcacactggatgagcaagtgctgagcttccaacgcaaggtgggcatcctgtactgccgggcgggccagggctcggaggaggagatgtacaacaaccaggaggcgggaccggccttcatgcagtttctcaccttgctgggcgatgtggtgcggctcaaaggctttgagagttaccgggcccagctagacaccaaaacggattccacaggcacgcactccctctacaccacataccaggaccacgagatcatgttccacgtgtccacgatgctgccttacacccctaataaccagcagcagctcctccggaagcgccacattggcaacgacattgtgaccatcgtgttccaggagcctggcagcaagcccttctgccccaccaccatccgctcgcacttccagcacgtgttcctagtggtgcgggcacacacaccctgcacgccacacaccacctacagggtggccgtgagccgcacccaggacacccctgccttcgggccagctctgcctgctggcggaggccccttcgcagccaacgccgacttccgggccttcctgctggccaaagcgctgaatggtgagcaggcggccggccacgcgcgccagttccacgccatggccacgcgcacccgccagcagtacctgcaagacctggccaccaacgaggtgaccactacgtcgctggactcggcttcacgcttcggcctgccctccctgggtgggaggcgccgggcggcccctcggggcccaggcgccgagctgcaggcagcgggctcactggtgtggggagtgcgcgcggcgcccggggcgcgggtcgccgccggggctcaggcgagcggccccgaaggcatcgaggtgccctgcctgctgggcatctcggccgaggctctggtgctggtggcgccgcgcgacggccgcgtagtgttcaattgcgcctgtcgcgacgtgctggcctggaccttctccgagcagcagctggacctgtaccacggccgcggggaggcgatcacgctgcgcttcgacgggtcccccggccaagccgtgggcgaggtggtggcgcgcctgcagctggtgagccgtggctgcgagacccgcgagctggcgctgccccgcgacggtcaaggccgcctgggcttcgaggtggacgccgagggattcgtcacgcacgtggagcgcttcacattcgccgagacggcggggctgcggcccggggcgcgcctcctgcgcgtgtgcggccagacgctgcccagcctccggcccgaggccgctgcccagctcctgcgctcggcgcccaaggtctgcgtcaccgtcctgccccccgacgagagcggccggccccgcaggagtttttcggagctgtacacgctgtcgctgcaggagcctagccggcggggggccccagatcctgtgcaggatgaggtccagggggtgaccctgctgcccaccacaaagcagctgctgcacctgtgcctgcaagatggtggcagtcctccagggcctggggatctggccgaggagaggactgagttcctgcacagccagaactcgctgtcaccacgcagctctctgtcggatgaggccccagtcctgcccaacaccaccccggacctcctcctggccaccacagccaagccatcagtacccagtgctgacagtgagacacccctgacccaggacaggccaggcagtcccagtggctctgaggacaagggcaacccggcgccggagctgagggcctcctttctgccacgtaccttgtctctgcggaactccatcagcaggatcatgtcggaggcgggcagtgggaccctggaggacgagtggcaggccatctcggagattgcctctacttgcaacaccattctggagtcgctgtcccgagagggacagcccatcccagagagtggagaccctaagggaactccaaaatctgatgctgagccagagcctgggaacctctcagagaaggtctctcacttggagtccatgctcaggaagctgcaggaggacctgcagaaggagaaggcggacagggcggccctggaggaggaggtgcggagcctgagacacaacaaccggcggctgcaggcggagtctgagagtgcagccacacgcctcctcctggcctccaagcagctgggctcacccaccgccgacctggcctgagccgtctggaaccacctgggcccctgagggcactgtggtcacactgggccctcctcaggaactctccctgcgcagaggcgtgtcttagcactgcccccctccctagccccttatttggtggcggaagtggcctccaccccttccctgtttgtaaatattctgtggagaaaagaggacttcagggagtaaaaaagccactgatgtctgtgtctgaaaaacaaaaaaaaaaaagtcagaggacaacaatgacggggaggggaaaaagggcatgaagcgccatggtcaaccaggtccgtgaccagttctgccaaggggaaccagcgggaccaagggagagaaaagaaagcacgtacggtaga

SEQ ID NO: 21347 - DNA, 3375 bp, Homo sapiens
cgggagagcggcagcgggaccccagcgcgggcggcggcggctgggcgggagccccagagggcaggaactgctgccacaacctcaggctgggcaccaaacacccgtgcccgccaatgcggcccagcccccggagagtcaggcccacagagcatgcccatgtgggccggcggtgtggggagccctcggcggggcatggcccctgcgtccacagatgacctctttgcccgcaagctgcgccagccagcaaggcccccgctgacaccgcacaccttcgagccgaggccagtccggggcccactcctgcgcagcggcagcgatgcaggcgaggccaggccccccacgccagccagcccccgtgcccgtgcccacagccacgaagaggccagccgacctgcagccacttccacccggctcttcactgacccgctggcactgctggggctgccagcagaggaaccagagcctgccttcccaccagtgcttgagcctcgatggtttgcccactatgacgtgcaaagcctgctctttgattgggctccgaggtctcaggggatggggagccactcagaggccagctctgggaccctggcttcagccgaggaccaggctgccagctcggacctgctgcatggggcacctggctttgtgtgtgagctcgggggtgagggtgagctaggcctgggtggaccagcatccccacctgtgccccctgcactgcccaacgcggccgtgtccatcctggaggagccacagaaccgaacctcggcctacagcctggagcacgcagacctgggtgctggctactaccgcaaatacttctatggcaaagaacatcagaacttcttcgggatggacgagtcgctgggcccggtggcagtgagcctgcggcgggaggagaaggagggcagcggagggggcaccctgcacagctaccgcgtcatcgtgcggaccacgcagctccggacactccgtggcaccatctcggaggacgcgctgccgccggggcccccacggggtctgtccccaaggaaacttctggagcacgtggcgccgcagctgagccccagctgcctgcgcctgggctcagcttcacccaaggtaccacggacgctgctcacactggatgagcaagtgctgagcttccaacgcaaggtgggcatcctgtactgccgggcgggccagggctcggaggaggagatgtacaacaaccaggaggcgggaccggccttcatgcagtttctcaccttgctgggcgatgtggtgcggctcaaaggctttgagagttaccgggcccagctagacaccaaaacggattccacaggcacgcactccctctacaccacataccaggaccacgagatcatgttccacgtgtccacgatgctgccttacacccctaataaccagcagcagctcctccggaagcgccacattggcaacgacattgtgaccatcgtgttccaggagcctggcagcaagcccttctgccccaccaccatccgctcgcacttccagcacgtgttcctagtggtgcgggcacacacaccctgcacgccacacaccacctacagggtggccgtgagccgcacccaggacacccctgccttcgggccagctctgcctgctggcggaggccccttcgcagccaacgccgacttccgggccttcctgctggccaaagcgctgaatggtgagcaggcggccggccacgcgcgccagttccacgccatggccacgcgcacccgccagcagtacctgcaagacctggccactgttcaattgcgcctgtcgcgacgtgctggcctggaccttctccgagcagcagctggacctgtaccacggccgcggggaggcgatcacgctgcgcttcgacgggtcccccggccaagccgtgggcgaggtggtggcgcgcctgcagctggtgagccgtggctgcgagacccgcgagctggcgctgccccgcgacggtcaaggccgcctgggcttcgaggtggacgccgagggattcgtcacgcacgtggagcgcttcacattcgccgagacggcggggctgcggcccggggcgcgcctcctgcgcgtgtgcggccagacgctgcccagcctccggcccgaggccgctgcccagctcctgcgctcggcgcccaaggtctgcgtcaccgtcctgccccccgacgagagcggccggccccgcaggagtttttcggagctgtacacgctgtcgctgcaggagcctagccggcggggggccccagatcctgtgcaggatgaggtccagggggtgaccctgctgcccaccacaaagcagctgctgcacctgtgcctgcaagatggtggcagtcctccagggcctggggatctggccgaggagaggactgagttcctgcacagccagaactcgctgtcaccacgcagctctctgtcggatgaggccccagtcctgcccaacaccaccccggacctcctcctggccaccacagccaagccatcagtacccagtgctgacagtgagacacccctgacccaggacaggccaggcagtcccagtggctctgaggacaagggcaacccggcgccggagctgagggcctcctttctgccacgtaccttgtctctgcggaactccatcagcaggatcatgtcggaggcgggcagtgggaccctggaggacgagtggcaggccatctcggagattgcctctacttgcaacaccattctggagtcgctgtcccgagagggacagcccatcccagagagtggagaccctaagggaactccaaaatctgatgctgagccagagcctgggaacctctcagagaaggtctctcacttggagtccatgctcaggaagctgcaggaggacctgcagaaggagaaggcggacagggcggccctggaggaggaggtgcggagcctgagacacaacaaccggcggctgcaggcggagtctgagagtgcagccacacgcctcctcctggcctccaagcagctgggctcacccaccgccgacctggcctgagccgtctggaaccacctgggcccctgagggcactgtggtcacactgggccctcctcaggaactctccctgcgcagaggcgtgtcttagcactgcccccctccctagccccttatttggtggcggaagtggcctccaccccttccctgtttgtaaatattctgtggagaaaagaggacttcagggagtaaaaaagccactgatgtctgtgtctgaaaaacaaaaaaaaaaaagtcagaggacaacaatgacggggaggggaaaaagggcatgaagcgccatggtcaaccaggtccgtgaccagttctgccaaggggaaccagcgggaccaagggagagaaaagaaagcacgtacggtaga

SEQ ID NO: 21348 - DNA, 3468 bp, Homo sapiens
cgggagagcggcagcgggaccccagcgcgggcggcggcggctgggcgggagccccagagggcaggaactgctgccacaacctcaggctgggcaccaaacacccgtgcccgccaatgcggcccagcccccggagagtcaggcccacagagcatgcccatgtgggccggcggtgtggggagccctcggcggggcatggcccctgcgtccacagatgacctctttgcccgcaagctgcgccagccagcaaggcccccgctgacaccgcacaccttcgagccgaggccagtccggggcccactcctgcgcagcggcagcgatgcaggcgaggccaggccccccacgccagccagcccccgtgcccgtgcccacagccacgaagaggccagccgacctgcagccacttccacccggctcttcactgacccgctggcactgctggggctgccagcagaggaaccagagcctgccttcccaccagtgcttgagcctcgatggtttgcccactatgacgtgcaaagcctgctctttgattgggctccgaggtctcaggggatggggagccactcagaggccagctctgggaccctggcttcagccgaggaccaggctgccagctcggacctgctgcatggggcacctggctttgtgtgtgagctcgggggtgagggtgagctaggcctgggtggaccagcatccccacctgtgccccctgcactgcccaacgcggccgtgtccatcctggaggagccacagaaccgaacctcggcctacagcctggagcacgcagacctgggtgctggctactaccgcaaatacttctatggcaaagaacatcagaacttcttcgggatggacgagtcgctgggcccggtggcagtgagcctgcggcgggaggagaaggagggcagcggagggggcaccctgcacagctaccgcgtcatcgtgcggaccacgcagctccggacactccgtggcaccatctcggaggacgcgctgccgccggggcccccacggggtctgtccccaaggaaacttctggagcacgtggcgccgcagctgagccccagctgcctgcgcctgggctcagcttcacccaaggtaccacggacgctgctcacactggatgagcaagtgctgagcttccaacgcaaggtgggcatcctgtactgccgggcgggccagggctcggaggaggagatgtacaacaaccaggaggcgggaccggccttcatgcagtttctcaccttgctgggcgatgtggtgcggctcaaaggctttgagagttaccgggcccagctagacaccaaaacggattccacaggcacgcactccctctacaccacataccaggaccacgagatcatgttccacgtgtccacgatgctgccttacacccctaataaccagcagcagctcctccggaagcgccacattggcaacgacattgtgaccatcgtgttccaggagcctggcagcaagcccttctgccccaccaccatccgctcgcacttccagcacgtgttcctagtggtgcgggcacacacaccctgcacgccacacaccacctacagggtggccgtgagccgcacccaggacacccctgccttcgggccagctctgcctgctggcggaggccccttcgcagccaacgccgacttccgggccttcctgctggccaaagcgctgaatggtgagcaggcggccggccacgcgcgccagttccacgccatggccacgcgcacccgccagcagtacctgcaagacctggccaccaacgaggtgaccactacgtcgctggactcggcttcacgcttcggcctgccctccctgggtgggaggcgccgggcggcccctcggggcccaggcgccgagctgcaggcagcgggctcactggtgtggggagtgcgcgcggcgcccggggcgcgggtcgccgccggggctcaggcgagcggccccgaaggcatcgaggtgccctgcctgctgggcatctcggccgaggctctggtgctggtggcgccgcgcgacggccgcgtagtgttcaattgcgcctgtcgcgacgtgctggcctggaccttctccgagcagcagctggacctgtaccacggccgcggggaggcgatcacgctgcgcttcgacgggtcccccggccaagccgtgggcgaggtggtggcgcgcctgcagctggtgagccgtggctgcgagacccgcgagctggcgctgccccgcgacggtcaaggccgcctgggcttcgaggtggacgccgagggattcgtcacgcacgtggagcgcttcacattcgccgagacggcggggctgcggcccggggcgcgcctcctgcgcgtgtgcggccagacgctgcccagcctccggcccgaggccgctgcccagctcctgcgctcggcgcccaaggtctgcgtcaccgtcctgccccccgacgagagcggccggccccgcaggcctctgggaaagcggcttccctttctgagccacccctgctctccccagctctctgtcggatgaggccccagtcctgcccaacaccaccccggacctcctcctggccaccacagccaagccatcagtacccagtgctgacagtgagacacccctgacccaggacaggccaggcagtcccagtggctctgaggacaagggcaacccggcgccggagctgagggcctcctttctgccacgtaccttgtctctgcggaactccatcagcaggatcatgtcggaggcgggcagtgggaccctggaggacgagtggcaggccatctcggagattgcctctacttgcaacaccattctggagtcgctgtcccgagagggacagcccatcccagagagtggagaccctaagggaactccaaaatctgatgctgagccagagcctgggaacctctcagagaaggtctctcacttggagtccatgctcaggaagctgcaggaggacctgcagaaggagaaggcggacagggcggccctggaggaggaggtgcggagcctgagacacaacaaccggcggctgcaggcggagtctgagagtgcagccacacgcctcctcctggcctccaagcagctgggctcacccaccgccgacctggcctgagccgtctggaaccacctgggcccctgagggcactgtggtcacactgggccctcctcaggaactctccctgcgcagaggcgtgtcttagcactgcccccctccctagccccttatttggtggcggaagtggcctccaccccttccctgtttgtaaatattctgtggagaaaagaggacttcagggagtaaaaaagccactgatgtctgtgtctgaaaaacaaaaaaaaaaaagtcagaggacaacaatgacggggaggggaaaaagggcatgaagcgccatggtcaaccaggtccgtgaccagttctgccaaggggaaccagcgggaccaagggagagaaaagaaagcacgtacggtaga

SEQ ID NO: 21349 - DNA, 2849 bp, Homo sapiens
cgggagagcggcagcgggaccccagcgcgggcggcggcggctgggcgggagccccagagggcaggaactgctgccacaacctcaggctgggcaccaaacacccgtgcccgccaatgcggcccagcccccggagagtcaggcccacagagcatgcccatgtgggccggcggtgtggggagccctcggcggggcatggcccctgcgtccacagatgacctctttgcccgcaagctgcgccagccagcaaggcccccgctgacaccgcacaccttcgagccgaggccagtccggggcccactcctgcgcagcggcagcgatgcaggcgaggccaggccccccacgccagccagcccccgtgcccgtgcccacagccacgaagaggccagccgacctgcagccacttccacccggctcttcactgacccgctggcactgctggggctgccagcagaggaaccagagcctgccttcccaccagtgcttgagcctcgatggtttgcccactatgacgtgcaaagcctgctctttgattgggctccgaggtctcaggggatggggagccactcagaggccagctctgggaccctggcttcagccgaggaccaggctgccagctcggacctgctgcatggggcacctggctttgtgtgtgagctcgggggtgagggtgagctaggcctgggtggaccagcatccccacctgtgccccctgcactgcccaacgcggccgtgtccatcctggaggagccacagaaccgaacctcggcctacagcctggagcacgcagacctgggtgctggctactaccgcaaatacttctatggcaaagaacatcagaacttcttcgggatggacgagtcgctgggcccggtggcagtgagcctgcggcgggaggagaaggagggcagcggagggggcaccctgcacagctaccgcgtcatcgtgcggaccacgcagctccggacactccgtggcaccatctcggaggacgcgctgccgccggggcccccacggggtctgtccccaaggaaacttctggagcacgtggcgccgcagctgagccccagctgcctgcgcctgggctcagcttcacccaaggtaccacggacgctgctcacactggatgagcaagtgctgagcttccaacgcaaggtgggcatcctgtactgccgggcgggccagggctcggaggaggagatgtacaacaaccaggaggcgggaccggccttcatgcagtttctcaccttgctgggcgatgtggtgcggctcaaaggctttgagagttaccgggcccagctagacaccaaaacggattccacaggcacgcactccctctacaccacataccaggaccacgagatcatgttccacgtgtccacgatgctgccttacacccctaataaccagcagcagctcctccggaagcgccacattggcaacgacattgtgaccatcgtgttccaggagcctggcagcaagcccttctgccccaccaccatccgctcgcacttccagcacgtgttcctagtggtgcgggcacacacaccctgcacgccacacaccacctacagggtggccgtgagccgcacccaggacacccctgccttcgggccagctctgcctgctggcggaggccccttcgcagccaacgccgacttccgggccttcctgctggccaaagcgctgaatggtgagcaggcggccggccacgcgcgccagttccacgccatggccacgcgcacccgccagcagtacctgcaagacctggccacaaagcagctgctgcacctgtgcctgcaagatggtggcagtcctccagggcctggggatctggccgaggagaggactgagttcctgcacagccagaactcgctgtcaccacgcagctctctgtcggatgaggccccagtcctgcccaacaccaccccggacctcctcctggccaccacagccaagccatcagtacccagtgctgacagtgagacacccctgacccaggacaggccaggcagtcccagtggctctgaggacaagggcaacccggcgccggagctgagggcctcctttctgccacgtaccttgtctctgcggaactccatcagcaggatcatgtcggaggcgggcagtgggaccctggaggacgagtggcaggccatctcggagattgcctctacttgcaacaccattctggagtcgctgtcccgagagggacagcccatcccagagagtggagaccctaagggaactccaaaatctgatgctgagccagagcctgggaacctctcagagaaggtctctcacttggagtccatgctcaggaagctgcaggaggacctgcagaaggagaaggcggacagggcggccctggaggaggaggtgcggagcctgagacacaacaaccggcggctgcaggcggagtctgagagtgcagccacacgcctcctcctggcctccaagcagctgggctcacccaccgccgacctggcctgagccgtctggaaccacctgggcccctgagggcactgtggtcacactgggccctcctcaggaactctccctgcgcagaggcgtgtcttagcactgcccccctccctagccccttatttggtggcggaagtggcctccaccccttccctgtttgtaaatattctgtggagaaaagaggacttcagggagtaaaaaagccactgatgtctgtgtctgaaaaacaaaaaaaaaaaagtcagaggacaacaatgacggggaggggaaaaagggcatgaagcgccatggtcaaccaggtccgtgaccagttctgccaaggggaaccagcgggaccaagggagagaaaagaaagcacgtacggtaga

SEQ ID NO: 21350 - DNA, 3845 bp, Homo sapiens
cgggagagcggcagcgggaccccagcgcgggcggcggcggctgggcgggagccccagagggcaggaactgctgccacaacctcaggctgggcaccaaacacccgtgcccgccaatgcggcccagcccccggagagtcaggcccacagagcatgcccatgtgggccggcggtgtggggagccctcggcggggcatggcccctgcgtccacagatgacctctttgcccgcaagctgcgccagccagcaaggcccccgctgacaccgcacaccttcgagccgaggccagtccggggcccactcctgcgcagcggcagcgatgcaggcgaggccaggccccccacgccagccagcccccgtgcccgtgcccacagccacgaagaggccagccgacctgcagccacttccacccggctcttcactgacccgctggcactgctggggctgccagcagaggaaccagagcctgccttcccaccagtgcttgagcctcgatggtttgcccactatgacgtgcaaagcctgctctttgattgggctccgaggtctcaggggatggggagccactcagaggccagctctgggaccctggcttcagccgaggaccaggctgccagctcggacctgctgcatggggcacctggctttgtgtgtgagctcgggggtgagggtgagctaggcctgggtggaccagcatccccacctgtgccccctgcactgcccaacgcggccgtgtccatcctggaggagccacagaaccgaacctcggcctacagcctggagcacgcagacctgggtgctggctactaccgcaaatacttctatggcaaagaacatcagaacttcttcgggatggacgagtcgctgggcccggtggcagtgagcctgcggcgggaggagaaggagggcagcggagggggcaccctgcacagctaccgcgtcatcgtgcggaccacgcagctccggacactccgtggcaccatctcggaggacgcgctgccgccggggcccccacggggtctgtccccaaggaaacttctggagcacgtggcgccgcagctgagccccagctgcctgcgcctgggctcagcttcacccaaggtaccacggacgctgctcacactggatgagcaagtgctgagcttccaacgcaaggtgggcatcctgtactgccgggcgggccagggctcggaggaggagatgtacaacaaccaggaggcgggaccggccttcatgcagtttctcaccttgctgggcgatgtggtgcggctcaaaggctttgagagttaccgggcccagctagacaccaaaacggattccacaggcacgcactccctctacaccacataccaggaccacgagatcatgttccacgtgtccacgatgctgccttacacccctaataaccagcagcagctcctccggaagcgccacattggcaacgacattgtgaccatcgtgttccaggagcctggcagcaagcccttctgccccaccaccatccgctcgcacttccagcacgtgttcctagtggtgcgggcacacacaccctgcacgccacacaccacctacagggtggccgtgagccgcacccaggacacccctgccttcgggccagctctgcctgctggcggaggccccttcgcagccaacgccgacttccgggccttcctgctggccaaagcgctgaatggtgagcaggcggccggccacgcgcgccagttccacgccatggccacgcgcacccgccagcagtacctgcaagacctggccaccaacgaggtgaccactacgtcgctggactcggcttcacgcttcggcctgccctccctgggtgggaggcgccgggcggcccctcggggcccaggcgccgagctgcaggcagcgggctcactggtgtggggagtgcgcgcggcgcccggggcgcgggtcgccgccggggctcaggcgagcggccccgaaggcatcgaggtgccctgcctgctgggcatctcggccgaggctctggtgctggtggcgccgcgcgacggccgcgtagtgttcaattgcgcctgtcgcgacgtgctggcctggaccttctccgagcagcagctggacctgtaccacggccgcggggaggcgatcacgctgcgcttcgacgggtcccccggccaagccgtgggcgaggtggtggcgcgcctgcagctggtgagccgtggctgcgagacccgcgagctggcgctgccccgcgacggtcaaggccgcctgggcttcgaggtggacgccgagggattcgtcacgcacgtggagcgcttcacattcgccgagacggcggggctgcggcccggggcgcgcctcctgcgcgtgtgcggccagacgctgcccagcctccggcccgaggccgctgcccagctcctgcgctcggcgcccaaggtctgcgtcaccgtcctgccccccgacgagagcggccggccccgcaggagtttttcggagctgtacacgctgtcgctgcaggagcctagccggcggggggccccagatcctgtgcaggatgaggtccagggggtgaccctgctgcccaccacaaagcagctgctgcacctgtgcctgcaagatggtggcagtcctccagggcctggggatctggccgaggagaggactgagttcctgcacagccagaactcgctgtcaccacgcagctctctgtcggatgaggccccagtcctgcccaacaccaccccggacctcctcctggccaccacagccaagccatcagtacccagtgctgacagtgagacacccctgacccaggacaggccaggcagtcccagtggctctgaggacaagggcaacccggcgccggagctgagggcctcctttctgccacgtaccttgtctctgcggaactccatcagcaggatcatgtcggaggcgggcagtgggaccctggaggacgagtggcaggccatctcggagattgcctctacttgcaacaccattctggagtcgctgtcccgagagggacagcccatcccagagagtggagaccctaagggaactccaaaatctgatgctgagtaagctccccaactccccacagccgctttacctgcccacatgaccccccttcgtgcctgtctgctggggtggagctctgtcctgggctctgctgccacatatgcctagaagaccagcggggcccctctcattagctggggctgggagtcagctggtgcactgccccctgccttggtcctgctgagtcttgacccccatgtcttcaggccagagcctgggaacctctcagagaaggtctctcacttggagtccatgctcaggaagctgcaggaggacctgcagaaggagaaggcggacagggcggccctggaggaggaggtgcggagcctgagacacaacaaccggcggctgcaggcggagtctgagagtgcagccacacgcctcctcctggcctccaagcagctgggctcacccaccgccgacctggcctgagccgtctggaaccacctgggcccctgagggcactgtggtcacactgggccctcctcaggaactctccctgcgcagaggcgtgtcttagcactgcccccctccctagccccttatttggtggcggaagtggcctccaccccttccctgtttgtaaatattctgtggagaaaagaggacttcagggagtaaaaaagccactgatgtctgtgtctgaaaaacaaaaaaaaaaaagtcagaggacaacaatgacggggaggggaaaaagggcatgaagcgccatggtcaaccaggtccgtgaccagttctgccaaggggaaccagcgggaccaagggagagaaaagaaagcacgtacggtaga

SEQ ID NO: 21351 - DNA, 1056 bp, Homo sapiens
  misc_feature (8)..(8): n is a, c, g, or t
ggaggcgnctggagccattactgcccacactggggatctggccgaggagaggactgagttcctgcacagccagaactcgctgtcaccacgcagctctctgtcggatgaggccccagtcctgcccaacaccaccccggacctcctcctggccaccacagccaagccatcagtacccagtgctgacagtgagacacccctgacccaggacaggccaggcagtcccagtggctctgaggacaagggcaacccggcgccggagctgagggcctcctttctgccacgtaccttgtctctgcggaactccatcagcaggatcatgtcggaggcgggcagtgggaccctggaggacgagtggcaggccatctcggagattgcctctacttgcaacaccattctggagtcgctgtcccgagagggacagcccatcccagagagtggagaccctaagggaactccaaaatctgatgctgagccagagcctgggaacctctcagagaaggtctctcacttggagtccatgctcaggaagctgcaggaggacctgcagaaggagaaggcggacagggcggccctggaggaggaggtgcggagcctgagacacaacaaccggcggctgcaggcggagtctgagagtgcagccacacgcctcctcctggcctccaagcagctgggctcacccaccgccgacctggcctgagccgtctggaaccacctgggcccctgagggcactgtggtcacactgggccctcctcaggaactctccctgcgcagaggcgtgtcttagcactgcccccctccctagccccttatttggtggcggaagtggcctccaccccttccctgtttgtaaatattctgtggagaaaagaggacttcagggagtaaaaaagccactgatgtctgtgtctgaaaaacaaaaaaaaaaaagtcagaggacaacaatgacggggaggggaaaaagggcatgaagcgccatggtcaaccaggtccgtgaccagttctgccaaggggaaccagcgggaccaagggagagaaaagaaagcacgtacggtaga

SEQ ID NO: 21352 - DNA, 511 bp, Homo sapiens
gctgatctagcaggatcctttagaggcacaaggaggaggtgcggagcctgagacacaacaaccggcggctgcaggcggagtctgagagtgcagccacacgcctcctcctggcctccaagcagctgggctcacccaccgccgacctggcctgagccgtctggaaccacctgggcccctgagggcactgtggtcacactgggccctcctcaggaactctccctgcgcagaggcgtgtcttagcactgcccccctccctagccccttatttggtggcggaagtggcctccaccccttccctgtttgtaaatattctgtggagaaaagaggacttcagggagtaaaaaagccactgatgtctgtgtctgaaaaacaaaaaaaaaaaagtcagaggacaacaatgacggggaggggaaaaagggcatgaagcgccatggtcaaccaggtccgtgaccagttctgccaaggggaaccagcgggaccaagggagagaaaagaaagcacgtacggtaga

SEQ ID NO: 21353 - DNA, 436 bp, Homo sapiens
gccagcttcccgggcatgtccaacactgacttctgctccgcctggtggcagaaccatccaatccttgtaccgtgctcaaggagttgttttccaaatgcccaggtcgccttcccactccctgtggtgtgaattgctgtgccactggacctcagagagctagctccccaatactccagccccataatcctgccccaggaacctgccagccagcattctgtaccacatggcagagtgctcaagcatggcccatagacctgttgacggagcatgagagttgggattcccaaggtatgtgattgttttttctctgttaaaactctggatctacttgtgttcccaagaaggtcctcattccttagattaccatgaaaaagttcaggctatgtggaactgaagtcacaaatttaaaatgataccatgggtggctggcccttgc

SEQ ID NO: 21354 - DNA, 718 bp, Homo sapiens
gttgcccaggctggagagcagtagcgcgatctcagctcactgcaacccccacctcctgggttcaagtgattctcctgcctcagcctccccagtagctgggatttacaggtgcccgctaccatgcctggctaatttttgtatttttagtagagacaggctttcaccatgttggccaggctgatctcaaactcctgacctcaggtgatccacccacctcggcctccgaaagtgctgggattacaggagtgagccaccgcgcctggccccgtattcattttttatactggaaaacattttttttgtaatttttctttgcaaagaaatgagcataaaaatgaatactccaaagaaaaggaattattatggcaaattaaaagggacacggtactatgatttaattactgtcttgtctttttaaaatgtcatctcttgttttaccctttttttaaataaaagctttaaaaacatgtctttgggtattattctggaggtatgtttcttttatataagatttcaagtttaaacatttacaataagtaataatatttaaattcttataacaagtaatgaaatatttggtttagtaattagcttagtctatttttaaaaatcattaaaatttactttgtttttaagaatgccatactacaaatgatgttatttggttttaatggtgttttgtgtttaagatagaataaatagagtttgaagaatgtga

SEQ ID NO: 21355 - DNA, 925 bp, Homo sapiens
catcttatatacccataaattgggttttagtgaaagagccaggatggaacataatttcctaacttccatcctagtttcctttctacttgtttagaatggccagtgaaacacacaaatggcactcagatttgttgatggctcaccaactcaaagaggttccttctctcctttgataagtcccacaaaaacatctactgtaaagacttgaaatacaatgcctttcttttttatgagagccaagtttacccacaactctcaactaccagtactggtctgactgtgcagaaaagggttgcccgcaaaggtcaatgatatcaccctagaacattctagaatgatgaattttgagaatgtgaaaccttagaacctcgtgcggttgtctgccttggaattcctgtgctgtatcctgaaattttagctgaatttggcagagaattcagagaaaatttgcttttctaatccttgctgcctgaaagtgctaattattttccatagctaggatattaccatggagcaatattttctctgcctttgataactcccagcaaattactacattaaccgcctttgaaatccaggagccacaaattttaattcagtggcctgctaaaacatgcactctctggtttaaagtttgccaaaggtggtgctgccccatatgccactgtgcccagctgacatattctcacttaatagaattatagagaaatttttcatgtttttctttttctctcccactttttcatattcctctttttcatttttgcctttccgtttctgtctatgatgtaggcttctgaggagaaccaagaagcttggctttagtggtagaatgacagaacttagggatcccttgcaggctagaacaaagttctgacccttagaccaaatctttatgttaagagttttccagaattcaaaaaaa

SEQ ID NO: 21356 - DNA, 595 bp, Homo sapiens
ccattctctacaatgctgtgaaccattgtgtagtgggtcagagcttggctttgggcctggacagacaggttcaaatcccaattttgccgctttctggtgatttgccattaactgtgcccttaccttgctgggcctcagttttttcatcagtcaagtgtagataataagattatctacctcaaacaagtgttatgaaaattcaacaaaatgatagtctttacgcttttagtacagagcctgacatacagtttgtgcaataattagaagttgttttggccaggtgcggtggctcacacctgtaatcccagcatactgggactacaggcatgagccactgtgcccagctgacatattctcacttaatagaattatagagaaatttttcatgtttttctttttctctcccactttttcatattcctctttttcatttttgcctttccgtttctgtctatgatgtaggcttctgaggagaaccaagaagcttggctttagtggtagaatgacagaacttagggatcccttgcaggctagaacaaagttctgacccttagaccaaatctttatgttaagagttttccagaattcaaaaaaa

SEQ ID NO: 21357 - DNA, 1129 bp, Homo sapiens
catcttatatacccataaattgggttttagtgaaagagccaggatggaacataatttcctaacttccatcctagtttcctttctacttgtttagaatggccagtgaaacacacaaatggcactcagatttgttgatggctcaccaactcaaagaggttccttctctcctttgataagtcccacaaaaacatctactgtaaagacttgaaatacaatgcctttcttttttatgagagccaagtttacccacaactctcaactaccagtactggtctgactgtgcagaaaagggttgcccgcaaaggtcaatgatatcaccctagaacattctagaatgatgaattttgagaatgtgaaaccttagaacctcgtgcggttgtctgccttggaattcctgtgctgtatcctgaaattttagctgaatttggcagagaattcagagaaaatttgcttttctaatccttgctgcctgaaagtgctaattattttccatagctaggatattaccatggagcaatattttctctgcctttgataactcccagcaaattactacattaaccgcctttgaaatccaggagccacaaattttaattcagtggcctgctaaaacatgcactctctggtttaaagtttgccaaaggtggtgctgccccatatgccaccgcgcctggccccgtattcattttttatactggaaaacattttttttgtaatttttctttgcaaagaaatgagcataaaaatgaatactccaaagaaaaggaattattatggcaaattaaaagggacacggtactatgatttaattactgtcttgtctttttaaaatgtcatctcttgttttaccctttttttaaataaaagctttaaaaacatgtctttgggtattattctggaggtatgtttcttttatataagatttcaagtttaaacatttacaataagtaataatatttaaattcttataacaagtaatgaaatatttggtttagtaattagcttagtctatttttaaaaatcattaaaatttactttgtttttaagaatgccatactacaaatgatgttatttggttttaatggtgttttgtgtttaagatagaataaatagagtttgaagaatgtga

SEQ ID NO: 21358 - DNA, 814 bp, Homo sapiens
catcttatatacccataaattgggttttagtgaaagagccaggatggaacataatttcctaacttccatcctagtttcctttctacttgtttagaatggccagtgaaacacacaaatggcactcagatttgttgatggctcaccaactcaaagaggttccttctctcctttgataagtcccacaaaaacatctactgtaaagacttgaaatacaatgcctttcttttttatgagagccaagtttacccacaactctcaactaccagtactggtctgactgtgcagaaaagggttgcccgcaaaggtcaatgatatcaccctagaacattctagaatgatgaattttgagaatgtgaaaccttagaacctcgtgcggttgtctgccttggaattcctgtgctgtatcctgaaattttagctgaatttggcagagaattcagagaaaatttgcttttctaatccttgctgcctgaaagtgctaattattttccatagctaggatattaccatggagcaatattttctctgcctttgataactcccagcaaattactacattaaccgcctttgaaatccaggagccacaaattttaattcagtggcctgctaaaacatgcactctctggtttaaagtttgccaaaggtggtgctgccccatatgccacattgaatactgggaaggccactgcgcccggcctcttttctttctttcttactcttgctctcttgctctctctttctctcactctctttctctctctctctttctctctttccctccctccctctctctctctctctttctttatttcct

SEQ ID NO: 21359 - DNA, 557 bp, Homo sapiens
ccattctctacaatgctgtgaaccattgtgtagtgggtcagagcttggctttgggcctggacagacaggttcaaatcccaattttgccgctttctggtgatttgccattaactgtgcccttaccttgctgggcctcagttttttcatcagtcaagtgtagataataagattatctacctcaaacaagtgttatgaaaattcaacaaaatgatagtctttacgcttttagtacagagcctgacatacagtttgtgcaataattagaagttgttttggccaggtgcggtggctcacacctgtaatcccagcactttgggaggctgaggcaggtggatcacttgaggtcgggagttcgagaacagcgtggccaaaatggcgaaaccctgtctctactaaaaacatgaaaattagccgggcgtggtggcgcatgcctgtaatcccagctacttgggaggctgaggtaggagaatggcttgaaaccgggaggcagaggttacagcaagccaggatcgtgccactgcactccagcctgggcgacagagtgacactccatctaa

SEQ ID NO: 21360 - DNA, 728 bp, Homo sapiens
cttcataggtcaaaactggcaatattctcttgtctgcaagataaagtgtttgtgcttctatcaccatatgcatgaacatgtaagaatcagatacaatttctgcttcatcagtttcacatgttcatgttgtcactgaaaaaatgcatctactgtttatagctcccaaggagaccccaaatccttttttttttcttttgagatggagtcttgctcttgtcgcctaggctggagtgcagtggcacaatctcagctcacggcagcctccgcctcccgggttcaaacgattctcatgcctcaggcttccgagtagctgggactacaggtgtgcaccaccatgcccagctaatttttgaatgtttagtagagatgggatttcaccatgttggccaggctggtctcaaactcctgagctcaagtgatccacctgccttggcctcccaaagtactgggactacaggcatgagccactgtgcccagctgacatattctcacttaatagaattatagagaaatttttcatgtttttctttttctctcccactttttcatattcctctttttcatttttgcctttccgtttctgtctatgatgtaggcttctgaggagaaccaagaagcttggctttagtggtagaatgacagaacttagggatcccttgcaggctagaacaaagttctgacccttagaccaaatctttatgttaagagttttccagaattcaaaaaaa

SEQ ID NO: 21361 - DNA, 310 bp, Homo sapiens
aattcatgttttgaatttgatggtggagtgtagttattgattttattcaaaatggcattttgaggttccaacaagtgaagacttgttgataatggcatcacttttgctgtgatgatttctccttatagtcatgcattcctaaaatgaaattatggtagaagccacccaaaatgtgcttactgtgtaataactacctattttaagagcttatatcatggaaaagagctaaaggctaaaacacaaattttgagacagttacttctaaattgctttacaaacaggatgtgtgctgaacacaatcttaaactgt

SEQ ID NO: 21362 - DNA, 587 bp, Homo sapiens
attttgctcttacttgcagcttgtcctgaagatcactatgggcagaactgtgttcaatggcgttcctgtggctcaggacagtgtgacccagtgactggagtgtgtcagtgtccacctggccgaatgggaaccaggtgtcaggaaggtaacaatgggcagggtcaccttctctgtccaagcactaaattagctatgctgcgaaagcagatttggtgccaacgaagataattatatggacaatatttacaagaatgttttctgttagtgtggctttcaaataacatgaaagtacatgctcccgagccgggcgcggtgactcacgcctgtaatcccagcactttgggaggccgaggagggcggatcacgaggtcaggagatcgagaccatcctggctaagacagtgaaaccccgcctctactaaaaatataaaaaattattggggcgtggtggcgggtgccagtagtcccaactactcagtaggctgaggcaggagaatggcgtgaacccgggagacggagcttgcagtgagctgggatcgccccactgcactgcagcctgggcgacagagcaagactcaatcacaaaaa

SEQ ID NO: 21363 - DNA, 1286 bp, Homo sapiens
  misc_feature (3)..(3): n is a, c, g, or t
gcnagcgggagctgctgtggcggcggcaacatggcggacgtgataaatgtcagtgtgaacctggaggccttttcccaggccattagtgccatccaggcgctgcgctccagcgtgagcagggtgttcgactgcctgaaggatgggatgcggaacaaggagacgctggagggccgggagaaggcctttattgcgcacttccaggacaacttacattcggtcaaccgggacctcaatgagctggaacgtctgagcaatctggtaggcaagccatctgagaaccatcctcttcataacagtgggctgttaagcctggatcctgtgcaggacaaaactcctctctatagtcaactccttcaagcatataagtggtcaaacaagttgcagtaccatgcaggactagcatctggccttttaaatcagcagtcattgaagcgttccgctaatcagatgggagtatctgccaaacgtagaccaaaggctcagcccacaactcttgtcctaccacctcaatatgttgatgatgtgatcagccgcattgacaggatgtttcctgaaatgtccatccacttatccagacccaatggaacatcagcaatgcttctgcttgatatatggtccaaatccaactatcaagtattccagaaggtgacagaccatgccaccactgccctgctccactatcagctgccccagatgccggatgtcgtggtccgatccttcatgacctggttaagaagttacataaagctgttccaggccccgtgccagcgctgcgggaagtttctgcaggacggccttcccccgacatggagggatttccgaaccctcgaagccttccatgacacctgccggcagtagcccccacgctggccccagcctcagaccccacccagcaccttcccagacacgcaggaagcccacagaaggctcagctggttcctcactgcccagatgtgtacagctgctcctccctttcataaagcagcgccatgtgtgcagaggccactcttgaagagcagactccctctgtggctgatgggactaattattcccactagccagcggactgaaggcaaagaagacctttctagaacctggtagaaggaagctgtgcagcatgctcctcgtccatgtgtgtcggcagtgctggtgtctgtcgtctccgcgagctgttactggaatgagcccttgtgttcatgggtatcgtcatgcggggttcttgtgttttgtggggcttgggttttggtaacttatttttataagcaataaaccttttgtatcctgga

SEQ ID NO: 21364 - DNA, 2119 bp, Homo sapiens
  misc_feature (561)..(561): n is a, c, g, or t
  misc_feature (661)..(661): n is a, c, g, or t
  misc_feature (1559)..(1559): n is a, c, g, or t
gttaacagtagttacaatattatttcttgaagtcccgaattctaagaccgatgctgatgatccttctctcctttcccctcagcttgatatatggtccaaatccaactatcaagtattccagaaggtaagttttactttttgcttcttactcaagcggcattaggaaaacgtgaatgctttgaggtttaaacattggtctcaaatcagaggcttttgaaaaagtgaaaaaagccagacagaaaaggatgctcactgtctgattccatatgtatgacattctggaaaaaaactgtattctgaaaacctagttttaaaactcggtttctcagagccctagcggtctccactggtgcccaagggatgggccaagggaagcaggctggcactccctcaccctgccccttccccactttgtgctctggggacactgtatctttttcagatattgggcttccttatgaaaaactgttatgggaaatgtcagacgaaatgaaaagtgaccagagaaaattcatttccccagctcctgacagtgcagggccccttccctggactaactcnggccctgtggctgatgaggattctgtccccaccgccacacccccaccagtccccacagtactcagggccagctccctgcagggcagcagccggcttcttntgttctcatccatcttctgtctctggtctcatccagtagtgaaataagagagttggccatcatctcattcgttccctcatccagctcaacaacaggtgtccactccccagcactttgggaggccaaggtaggcagatcacctgaggtcaggagttcaagaccagcctagccaatatggcaaaaccctgtctgtactaaaaatataaaattagccgggcatggtggcgggcgcctataatcctagctactcaggaggctgaggcagaagaattgcttaaacctgggagacagaggttgcagtgagcccagattgtgccattgcactccagcctgggtgacagatgagactccatctcaaaaaaaaaaaaaaaagtatccactgagcccctttgctctgtgccaggcactgttaggtgccagggccacagaggaaactccaacaggcaaggaagcctaacaaatgactccaggtgattaactgggggctgtggccaggaaacacaagggggcctccttctgattaggctagtcagaggaagcctttgtaggggaaactgaggcaggcagtgtgagaaggaggagccagccccgtgaagtggggatgaagtggaggtagaaggcagggctcaggtcagggaggtgcctctaggccctggtgcagaattcggattttatccttaattcagtgagaaaccactgacgggatttacacagagggggatgtgattttgaaagcttggtccgagttatccccacgatgaagaatggttgtgtccacagtgtgccaggaagcacaggactcttttgtagatcaaggtgaaattcacataacttgaaattaaccgttttaaagtgaatgctccttggcttgatgtgccttcacaatagtgtacatccnctacctctgtctggttctaaaacatttccttaccccacaagaaaatctggtgtgcattgagcagtgagcataggacttagtggatcagaggggcgtcatggaccaccctctagaggtgtttactgtacataatccacagtgccccctgggcccctttttggtgataagggctaggcagaggacaggcgtctaggattaggggagtagtctgaggctgaaaaccacacatttagggaacctatataagcattacagattcatgatctgatcacagctaaatgcaatgtgctaccctggattggatcctgaaacagaaagaggttactaatggggccgggtgcggtggctcatgcctgtaatcccagcactttgggaggctcaggtgggtggattacaaggtcaggagttcgagaccagcctggccaacatggtgaaaccctgtctctactaaaaatacacaaatcagccaggcgtggtggcgggcgcctgtaatcccagctacgcgggaggttgcagtgagccactgcactccagcctgggtgacagagcaagactacatc

SEQ ID NO: 21365 - DNA, 469 bp, Homo sapiens
taaattcgcggtcgcgtcgacgtggtcaaacaagttgcagtaccatgcaggactagcatctggccttttaaatcagcagtcattgaagcgttccgctaatcagatgggagtatctgccaaacgtagaccaaaggctcagcccacaactcttgtcctaccacctcaatatgttgatgatgtgatcagccgcattgacaggatgtttcctgaaatgtccatccacttatccagacccaatggaacatcagcaatgcttctggtgaccttgggaaaggtgttgaaagtgatcgtcgtcatgcggagcctgttcattgatcgaacaatagtaaagggatataacgagaatgtctacacagaagatggcaagcttgatatatggtccaaatccaactatcaagtattccagaaggcctgttttttccaagtcttggatgctgagcaaaaaaacaactttgttgttgaaaaatgt

SEQ ID NO: 21366 - DNA, 316 bp, Homo sapiens
tccctccctttccttgggcttgcatccctttgatgtttttacaagccttttttcaaacctgcactcactggtgggtgaatcgcctccctctccttgggagcattagtgcccttcctggcctccgccaagggggagggcggcttttatctcccagcggaatctcattagctttgccgcacaatgggaccgaacctcggctgccacagagtggatttaaattagttaatagcagattttttttttttttttgccccaggcctgttttttccaagtcttggatgctgagcaaaaaaacaactttgttgttgaaaaatgt

SEQ ID NO: 21367 - DNA, 1394 bp, Homo sapiens
  misc_feature (3)..(3): n is a, c, g, or t
gcnagcgggagctgctgtggcggcggcaacatggcggacgtgataaatgtcagtgtgaacctggaggccttttcccaggccattagtgccatccaggcgctgcgctccagcgtgagcagggtgttcgactgcctgaaggatgggatgcggaacaaggagacgctggagggccgggagaaggcctttattgcgcacttccaggacaacttacattcggtcaaccgggacctcaatgagctggaacgtctgagcaatctggtaggcaagccatctgagaaccatcctcttcataacagtgggctgttaagcctggatcctgtgcaggacaaaactcctctctatagtcaactccttcaagcatataagtggtcaaacaagttgcagtaccatgcaggactagcatctggccttttaaatcagcagtcattgaagcgttccgctaatcagatgggagtatctgccaaacgtagaccaaaggctcagcccacaactcttgtcctaccacctcaatatgttgatgatgtgatcagccgcattgacaggatgtttcctgaaatgtccatccacttatccagacccaatggaacatcagcaatgcttctggtgaccttgggaaaggtgttgaaagtgatcgtcgtcatgcggagcctgttcattgatcgaacaatagtaaagggatataacgagaatgtctacacagaagatggcaagcttgatatatggtccaaatccaactatcaagtattccagaaggtgacagaccatgccaccactgccctgctccactatcagctgccccagatgccggatgtcgtggtccgatccttcatgacctggttaagaagttacataaagctgttccaggccccgtgccagcgctgcgggaagtttctgcaggacggccttcccccgacatggagggatttccgaaccctcgaagccttccatgacacctgccggcagtagcccccacgctggccccagcctcagaccccacccagcaccttcccagacacgcaggaagcccacagaaggctcagctggttcctcactgcccagatgtgtacagctgctcctccctttcataaagcagcgccatgtgtgcagaggccactcttgaagagcagactccctctgtggctgatgggactaattattcccactagccagcggactgaaggcaaagaagacctttctagaacctggtagaaggaagctgtgcagcatgctcctcgtccatgtgtgtcggcagtgctggtgtctgtcgtctccgcgagctgttactggaatgagcccttgtgttcatgggtatcgtcatgcggggttcttgtgttttgtggggcttgggttttggtaacttatttttataagcaataaaccttttgtatcctgga

SEQ ID NO: 21368 - DNA, 1426 bp, Homo sapiens
  misc_feature (3)..(3): n is a, c, g, or t
gcnagcgggagctgctgtggcggcggcaacatggcggacgtgataaatgtcagtgtgaacctggaggccttttcccaggccattagtgccatccaggcgctgcgctccagcgtgagcagggtgttcgactgcctgaaggatgggatgcggaacaaggagacgctggagggccgggagaaggcctttattgcgcacttccaggacaacttacattcggtcaaccgggacctcaatgagctggaacgtctgagcaatctggtaggcaagccatctgagaaccatcctcttcataacagtgggctgttaagcctggatcctgtgcaggacaaaactcctctctatagtcaactccttcaagcatataagtggtcaaacaagttgcagtaccatgcaggactagcatctggccttttaaatcagcagtcattgaagcgttccgctaatcagatgggagtatctgccaaacgtagaccaaaggctcagcccacaactcttgtcctaccacctcaatatgttgatgatgtgatcagccgcattgacaggatgtttcctgaaatgtccatccacttatccagacccaatggaacatcagcaatgcttctggtgaccttgggaaaggtgttgaaagtgatcgtcgtcatgcggagcctgttcattgatcgaacaatagtaaagggatataacgagaatgtctacacagaagatggcaagcttgatatatggtccaaatccaactatcaagtattccagaaggtgacagaccatgccaccactgccctgctccactatcagctgccccagatgccggatgtcgtggtccgatccttcatgacctggttaagaagttacataaagctgttccaggccccgtgccagcgctgcgggaagtttctgcaggacggccttcccccgacatggagggatttccgaaccctcgaagccttccatgacacctgccggcagtagcccccacgctggccccagcctcagaccccacccagcaccttcccagacacgcaggaagcccacagaaggctcagctggttcctcactgcccagatgtgtacagctgctcctccctttcataaagcagcgccatgtgtgcagaggccactcttgaagagcagactccctctgtggctgatgggactaattattcccactagccagcggactgaaggcaaagaagacctttctagaacctggtagaaggaagctgtgcagcatgctcctcgtccatgtgtgtcggcagtgctggtgtctgtcgtctccgcgagctgttactggaatgagcccttgtgttcatgggtatcgtcatgcggggttcttgtgttttgtggggcttgggttttggtaacttatttttataagcaataaaccttttgtatcctggaaaaaaaaaaccaaacccaaccaccccaccaca

SEQ ID NO: 21369 - DNA, 1383 bp, Homo sapiens
tacggctaggtacgaggcctgggtggcggtgataaatgtcagtgtgaacctggaggccttttcccaggccattagtgccatccaggcgctgcgctccagcgtgagcagggtgttcgactgcctgaaggatgggatgcggaacaaggagacgctggagggccgggagaaggcctttattgcgcacttccaggacaacttacattcggtcaaccgggacctcaatgagctggaacgtctgagcaatctggtaggcaagccatctgagaaccatcctcttcataacagtgggctgttaagcctggatcctgtgcaggacaaaactcctctctatagtcaactccttcaagcatataagtggtcaaacaagttgcagtaccatgcaggactagcatctggccttttaaatcagcagtcattgaagcgttccgctaatcagatgggagtatctgccaaacgtagaccaaaggctcagcccacaactcttgtcctaccacctcaatatgttgatgatgtgatcagccgcattgacaggatgtttcctgaaatgtccatccacttatccagacccaatggaacatcagcaatgcttctggtgaccttgggaaaggtgttgaaagtgatcgtcgtcatgcggagcctgttcattgatcgaacaatagtaaagggatataacgagaatgtctacacagaagatggcaagcttgatatatggtccaaatccaactatcaagtattccagaaggtgacagaccatgccaccactgccctgctccactatcagctgccccagatgccggatgtcgtggtccgatccttcatgacctggttaagaagttacataaagctgttccaggccccgtgccagcgctgcgggaagtttctgcaggacggccttcccccgacatggagggatttccgaaccctcgaagccttccatgacacctgccggcagtagcccccacgctggccccagcctcagaccccacccagcaccttcccagacacgcaggaagcccacagaaggctcagctggttcctcactgcccagatgtgtacagctgctcctccctttcataaagcagcgccatgtgtgcagaggccactcttgaagagcagactccctctgtggctgatgggactaattattcccactagccagcggactgaaggcaaagaagacctttctagaacctggtagaaggaagctgtgcagcatgctcctcgtccatgtgtgtcggcagtgctggtgtctgtcgtctccgcgagctgttactggaatgagcccttgtgttcatgggtatcgtcatgcggggttcttgtgttttgtggggcttgggttttggtaacttatttttataagcaataaaccttttgtatcctgga

SEQ ID NO: 21370 - DNA, 1273 bp, Homo sapiens
  misc_feature (3)..(3): n is a, c, g, or t
gcnagcgggagctgctgtggcggcggcaacatggcggacgtgataaatgtcagtgtgaacctggaggccttttcccaggccattagtgccatccaggcgctgcgctccagcgtgagcagggtgttcgactgcctgaaggatgggatgcggaacaaggagacgctggagggccgggagaaggcctttattgcgcacttccaggacaacttacattcggtcaaccgggacctcaatgagctggaacgtctgagcaatctggtaggcaagccatctgagaaccatcctcttcataacagtgggctgttaagcctggatcctgtgcaggacaaaactcctctctatagtcaactccttcaagcatataagtggtcaaacaagttgcagtaccatgcaggactagcatctggccttttaaatcagcagtcattgaagcgttccgctaatcagatgggagtatctgccaaacgtagaccaaaggctcagcccacaactcttgtcctaccacctcaatatgttgatgatgtgatcagccgcattgacaggatgtttcctgaaatgtccatccacttatccagacccaatggaacatcagcaatgcttctggtgaccttgggaaaggtgttgaaagtgatcgtcgtcatgcggagcctgttcattgatcgaacaatagtaaagggatataacgagaatgtctacacagaagatggcaagcttgatatatggtccaaatccaactatcaagtattccagaaggtgacagaccatgccaccactgccctgctccactatcagctgccccagatgccggatgtcgtggtccgatccttcatgacctggttaagaagttacataaagctgttccaggccccgtgccagcgctgcgggaagtttctgcaggacggccttcccccgacatggagggatttccgaaccctcgaagccttccatgacacctgccggcagtagcccccacgctggccccagcctcagaccccacccagcacagactccctctgtggctgatgggactaattattcccactagccagcggactgaaggcaaagaagacctttctagaacctggtagaaggaagctgtgcagcatgctcctcgtccatgtgtgtcggcagtgctggtgtctgtcgtctccgcgagctgttactggaatgagcccttgtgttcatgggtatcgtcatgcggggttcttgtgttttgtggggcttgggttttggtaacttatttttataagcaataaaccttttgtatcctgga

SEQ ID NO: 21371 - DNA, 1307 bp, Homo sapiens
  misc_feature (3)..(3): n is a, c, g, or t
gcnagcgggagctgctgtggcggcggcaacatggcggacgtgataaatgtcagtgtgaacctggaggccttttcccaggccattagtgccatccaggcgctgcgctccagcgtgagcagggtgttcgactgcctgaaggatgggatgcggaacaaggagacgctggagggccgggagaaggcctttattgcgcacttccaggacaacttacattcggtcaaccgggacctcaatgagctggaacgtctgagcaatctggtaggcaagccatctgagaaccatcctcttcataacagtgggctgttaagcctggatcctgtgcaggacaaaactcctctctatagtcaactccttcaagcatataagtggtcaaacaagttgcagtaccatgcaggactagcatctggccttttaaatcagcagtcattgaagcgttccgctaatcagatgggagtatctgccaaacgtagaccaaaggctcagcccacaactcttgtcctaccacctcaatatgttgatgatgtgatcagccgcattgacaggatgtttcctgaaatgtccatccacttatccagacccaatggaacatcagcaatgcttctggtgaccttgggaaaggtgttgaaagtgatcgtcgtcatgcggagcctgttcattgatcgaacaatagtaaagggatataacgagaatgtctacacagaagatggcaagcttgatatatggtccaaatccaactatcaagtattccagaaggtgacagaccatgccaccactgccctgctccactatcagctgccccagatgccggatgtcgtggtccgatccttcatgacctggttaagaagttacataaagctgttccaggccccgtgccagcgctgcgggaagtttctgcaggacggccttcccccgacatggagggatttccgaaccctcgaagccttccatgacacctgccggcagtagcccccacgctggccccagcctcagaccccacccagcacagcgccatgtgtgcagaggccactcttgaagagcagactccctctgtggctgatgggactaattattcccactagccagcggactgaaggcaaagaagacctttctagaacctggtagaaggaagctgtgcagcatgctcctcgtccatgtgtgtcggcagtgctggtgtctgtcgtctccgcgagctgttactggaatgagcccttgtgttcatgggtatcgtcatgcggggttcttgtgttttgtggggcttgggttttggtaacttatttttataagcaataaaccttttgtatcctgga

SEQ ID NO: 21372 - DNA, 1070 bp, Homo sapiens
ttcgcatattctacgaatagttcacgctgtctagaataaaatcgaaaatattgattgcagtaccatgcaggactagcatctggccttttaaatcagcagtcattgaagcgttccgctaatcagatgggagtatctgccaaacgtagaccaaaggctcagcccacaactcttgtcctaccacctcaatatgttgatgatgtgatcagccgcattgacaggatgtttcctgaaatgtccatccacttatccagacccaatggaacatcagcaatgcttctggtgaccttgggaaaggtgttgaaagtgatcgtcgtcatgcggagcctgttcattgatcgaacaatagtaaagggatataacgagaatgtctacacagaagatggcaagcttgatatatggtccaaatccaactatcaagtattccagaaggtgacagaccatgccaccactgccctgctccactatcagctgccccagatgccggatgtcgtggtccgatccttcatgacctggttaagaagttacataaagctgttccaggccccgtgccagcgctgcgggaagtttctgcaggacggccttcccccgacatggagggatttccgaaccctcgaagccttccatgacacctgccggcagtagcccccacgctggccccagcctcagaccccacccagcaccttcccagacacgcaggaagcccacagaaggctcagctggttcctcactgcccagatgtgtacagctgctcctccctttcataaagcagcgccatgtgtgcagaggccactcttgaagagcagactccctctgtggctgatgggactaattattcccactagccagcggactgaaggcaaagaagacctttctagaacctggtagaaggaagctgtgcagcatgctcctcgtccatgtgtgtcggcagtgctggtgtctgtcgtctccgcgagctgttactggaatgagcccttgtgttcatgggtatcgtcatgcggggttcttgtgttttgtggggcttgggttttggtaacttatttttataagcaataaaccttttgtatcctgga

SEQ ID NO: 21373 - DNA, 1075 bp, Homo sapiens
ctcgccattattccacccatacattatatcccaacaaccccacactatatatctttatcttgcagtaccatgcaggactagcatctggccttttaaatcagcagtcattgaagcgttccgctaatcagatgggagtatctgccaaacgtagaccaaaggctcagcccacaactcttgtcctaccacctcaatatgttgatgatgtgatcagccgcattgacaggatgtttcctgaaatgtccatccacttatccagacccaatggaacatcagcaatgcttctggtgaccttgggaaaggtgttgaaagtgatcgtcgtcatgcggagcctgttcattgatcgaacaatagtaaagggatataacgagaatgtctacacagaagatggcaagcttgatatatggtccaaatccaactatcaagtattccagaaggtgacagaccatgccaccactgccctgctccactatcagctgccccagatgccggatgtcgtggtccgatccttcatgacctggttaagaagttacataaagctgttccaggccccgtgccagcgctgcgggaagtttctgcaggacggccttcccccgacatggagggatttccgaaccctcgaagccttccatgacacctgccggcagtagcccccacgctggccccagcctcagaccccacccagcaccttcccagacacgcaggaagcccacagaaggctcagctggttcctcactgcccagatgtgtacagctgctcctccctttcataaagcagcgccatgtgtgcagaggccactcttgaagagcagactccctctgtggctgatgggactaattattcccactagccagcggactgaaggcaaagaagacctttctagaacctggtagaaggaagctgtgcagcatgctcctcgtccatgtgtgtcggcagtgctggtgtctgtcgtctccgcgagctgttactggaatgagcccttgtgttcatgggtatcgtcatgcggggttcttgtgttttgtggggcttgggttttggtaacttatttttataagcaataaaccttttgtatcctgga

SEQ ID NO: 21374 - DNA, 2748 bp, Homo sapiens
  misc_feature (3)..(3): n is a, c, g, or t
  misc_feature (1190)..(1190): n is a, c, g, or t
  misc_feature (1290)..(1290): n is a, c, g, or t
  misc_feature (2188)..(2188): n is a, c, g, or t
gcnagcgggagctgctgtggcggcggcaacatggcggacgtgataaatgtcagtgtgaacctggaggccttttcccaggccattagtgccatccaggcgctgcgctccagcgtgagcagggtgttcgactgcctgaaggatgggatgcggaacaaggagacgctggagggccgggagaaggcctttattgcgcacttccaggacaacttacattcggtcaaccgggacctcaatgagctggaacgtctgagcaatctggtaggcaagccatctgagaaccatcctcttcataacagtgggctgttaagcctggatcctgtgcaggacaaaactcctctctatagtcaactccttcaagcatataagtggtcaaacaagttgcagtaccatgcaggactagcatctggccttttaaatcagcagtcattgaagcgttccgctaatcagatgggagtatctgccaaacgtagaccaaaggctcagcccacaactcttgtcctaccacctcaatatgttgatgatgtgatcagccgcattgacaggatgtttcctgaaatgtccatccacttatccagacccaatggaacatcagcaatgcttctggtgaccttgggaaaggtgttgaaagtgatcgtcgtcatgcggagcctgttcattgatcgaacaatagtaaagggatataacgagaatgtctacacagaagatggcaagcttgatatatggtccaaatccaactatcaagtattccagaaggtaagttttactttttgcttcttactcaagcggcattaggaaaacgtgaatgctttgaggtttaaacattggtctcaaatcagaggcttttgaaaaagtgaaaaaagccagacagaaaaggatgctcactgtctgattccatatgtatgacattctggaaaaaaactgtattctgaaaacctagttttaaaactcggtttctcagagccctagcggtctccactggtgcccaagggatgggccaagggaagcaggctggcactccctcaccctgccccttccccactttgtgctctggggacactgtatctttttcagatattgggcttccttatgaaaaactgttatgggaaatgtcagacgaaatgaaaagtgaccagagaaaattcatttccccagctcctgacagtgcagggccccttccctggactaactcnggccctgtggctgatgaggattctgtccccaccgccacacccccaccagtccccacagtactcagggccagctccctgcagggcagcagccggcttcttntgttctcatccatcttctgtctctggtctcatccagtagtgaaataagagagttggccatcatctcattcgttccctcatccagctcaacaacaggtgtccactccccagcactttgggaggccaaggtaggcagatcacctgaggtcaggagttcaagaccagcctagccaatatggcaaaaccctgtctgtactaaaaatataaaattagccgggcatggtggcgggcgcctataatcctagctactcaggaggctgaggcagaagaattgcttaaacctgggagacagaggttgcagtgagcccagattgtgccattgcactccagcctgggtgacagatgagactccatctcaaaaaaaaaaaaaaaagtatccactgagcccctttgctctgtgccaggcactgttaggtgccagggccacagaggaaactccaacaggcaaggaagcctaacaaatgactccaggtgattaactgggggctgtggccaggaaacacaagggggcctccttctgattaggctagtcagaggaagcctttgtaggggaaactgaggcaggcagtgtgagaaggaggagccagccccgtgaagtggggatgaagtggaggtagaaggcagggctcaggtcagggaggtgcctctaggccctggtgcagaattcggattttatccttaattcagtgagaaaccactgacgggatttacacagagggggatgtgattttgaaagcttggtccgagttatccccacgatgaagaatggttgtgtccacagtgtgccaggaagcacaggactcttttgtagatcaaggtgaaattcacataacttgaaattaaccgttttaaagtgaatgctccttggcttgatgtgccttcacaatagtgtacatccnctacctctgtctggttctaaaacatttccttaccccacaagaaaatctggtgtgcattgagcagtgagcataggacttagtggatcagaggggcgtcatggaccaccctctagaggtgtttactgtacataatccacagtgccccctgggcccctttttggtgataagggctaggcagaggacaggcgtctaggattaggggagtagtctgaggctgaaaaccacacatttagggaacctatataagcattacagattcatgatctgatcacagctaaatgcaatgtgctaccctggattggatcctgaaacagaaagaggttactaatggggccgggtgcggtggctcatgcctgtaatcccagcactttgggaggctcaggtgggtggattacaaggtcaggagttcgagaccagcctggccaacatggtgaaaccctgtctctactaaaaatacacaaatcagccaggcgtggtggcgggcgcctgtaatcccagctacgcgggaggttgcagtgagccactgcactccagcctgggtgacagagcaagactacatc

SEQ ID NO: 21375 - DNA, 800 bp, Homo sapiens
  misc_feature (3)..(3): n is a, c, g, or t
gcnagcgggagctgctgtggcggcggcaacatggcggacgtgataaatgtcagtgtgaacctggaggccttttcccaggccattagtgccatccaggcgctgcgctccagcgtgagcagggtgttcgactgcctgaaggatgggatgcggaacaaggagacgctggagggccgggagaaggcctttattgcgcacttccaggacaacttacattcggtcaaccgggacctcaatgagctggaacgtctgagcaatctggtaggcaagccatctgagaaccatcctcttcataacagtgggctgttaagcctggatcctgtgcaggacaaaactcctctctatagtcaactccttcaagcatataagtggtcaaacaagttgcagtaccatgcaggactagcatctggccttttaaatcagcagtcattgaagcgttccgctaatcagatgggagtatctgccaaacgtagaccaaaggctcagcccacaactcttgtcctaccacctcaatatgttgatgatgtgatcagccgcattgacaggatgtttcctgaaatgtccatccacttatccagacccaatggaacatcagcaatgcttctggtgaccttgggaaaggtgttgaaagtgatcgtcgtcatgcggagcctgttcattgatcgaacaatagtaaagggatataacgagaatgtctacacagaagatggcaagttcttcctgtgtgtcaagaggtcttttgatgtcttggtgtttgccctgagaacagacgtgtctgtgctgaagcaattggtcatctgcaa

SEQ ID NO: 21376 - DNA, 622 bp, Homo sapiens
  misc_feature (3)..(3): n is a, c, g, or t
gcnagcgggagctgctgtggcggcggcaacatggcggacgtgataaatgtcagtgtgaacctggaggccttttcccaggccattagtgccatccaggcgctgcgctccagcgtgagcagggtgttcgactgcctgaaggatgggatgcggaacaaggagacgctggagggccgggagaaggcctttattgcgcacttccaggacaacttacattcggtcaaccgggacctcaatgagctggaacgtctgagcaatctggtaggcaagccatctgagaaccatcctcttcataacagtgggctgttaagcctggatcctgtgcaggacaaaactcctctctatagtcaactccttcaagcatataagtggtcaaacaagttgcagtaccatgcaggactagcatctggccttttaaatcagcagtcattgaagcgttccgctaatcagatgggagtatctgccaaacgtagaccaaaggctcagcccacaactcttgtcctaccacctcaatatgttgatgatgtgatcagccgcattgacaggatgtttcctgaaatgtccatccacttatttaggggaaaaaaattaaacaacagggtagacagaagaactaaggcaaaga

SEQ ID NO: 21377 - DNA, 662 bp, Homo sapiens
  misc_feature (3)..(3): n is a, c, g, or t
gcnagcgggagctgctgtggcggcggcaacatggcggacgtgataaatgtcagtgtgaacctggaggccttttcccaggccattagtgccatccaggcgctgcgctccagcgtgagcagggtgttcgactgcctgaaggatgggatgcggaacaaggagacgctggagggccgggagaaggcctttattgcgcacttccaggacaacttacattcggtcaaccgggacctcaatgagctggaacgtctgagcaatctggtaggcaagccatctgagaaccatcctcttcataacagtgggctgttaagcctggatcctgtgcaggacaaaactcctctctatagtcaactccttcaagcatataagtggtcaaacaagccaaggtgggctcggctcgtgggcttgtggcagagccgtcccccgtgcccaggctcccatggcatgcagctagcagcggccaagcttagcgcctcgcctaccacatccaccttctgatggcagtgcccaccagtggaacgaactctctccacacctcattatttctacaaccttgagtgaatttgcaaattaattgatgtgtgggagggaaggcatctgctattgtaaaaacctttaactgtggcagtaaaacttgaaataaaattaagtgttactatagtaaa

SEQ ID NO: 21378 - DNA, 702 bp, Homo sapiens
ttttaaaagtgaaaaattcttcgatagatgggctaatgctctctctactgtttctccctctggagatgaacatctgcaacaagccctccaacaagacggcccctgagaagagtgtgtggacggcaccggcacagcccagcggaccctcccctgagctgcagggccagcgatcccgccggaatgggtggagctggccccctcacccgctccagattgtggcctggctgctgtacctcttctttgctgtgatcggctttgggatccttgttcccctcctgcctcaccactgggtgcccgctggctacgctgtatccttgggaaagcgtagggctggtgtgtggaagtggggaggcaaaggatggctggcacagcggaggcccaaagccgggttgagagccttggggagcacagtcaggagagtggagcagggtgggcccagtcctggggacttgctgcttcccagcctgtctccagcctccacctgacctctccacctgatagggtgagtgggcatgcctaaaatacctaggagcatatgaagccccacaaagatgtgaatcctgtccacagaggcaccacaggagcagtcatagaaggaggagcctcaaaccatcctgatgctaattgtgttcagagctgaacaaaggatgaagtagggagtaattagtccatctatcgaagaatttttcacttttcaaagag

SEQ ID NO: 21379 - DNA, 2057 bp, Homo sapiens
cgggcccagcgccggacgaggcccagccagtctgggtctggcctggccgcccctccagcctgctggagccggagccggagccggagccggagccggagccggagccagagccagagctcgaggactcaccggcccagtctccgtccgggatggggccccgctcccgggcgcgttgccgcccagtcccggggaccgtccctaccgcgagggtctgaggcgcggctgccccggggagggtggaaggccaggcgtggggcccgaacctctggctgactttggcagggcccatctggcacggcctccgcggcgcgcagctgttttcaagtcagcaaacatttactgaggatctactatgtacaagatgaacatctgcaacaagccctccaacaagacggcccctgagaagagtgtgtggacggcaccggcacagcccagcggaccctcccctgagctgcagggccagcgatcccgccggaatgggtggagctggccccctcacccgctccagattgtggcctggctgctgtacctcttctttgctgtgatcggctttgggatccttgttcccctcctgcctcaccactgggtgcccgctggctacgcttgcatgggcgccatctttgctggccaccttgtggtgcacctgaccgccgtctccatcgatccagcagatgccaacgtgcgggacaagagctatgcggggcccctgcccatcttcaaccgaagccagcacgcacatgtcattgaagacctgcactgcaacttgtgcaacgtggatgtgagcgctcgctccaagcactgcagcgcctgcaacaagtgcgtgtgcggtttcgaccaccactgcaagtggctcaacaactgtgtgggcgagcggaactaccggctctttctacacagtgttgcatccgctttactgggcgtcctgctcctggtgctggtggccacatatgtcttcgtggagttctttgtcaaccccatgcgtctgcgcaccaaccgacactttgaagtcctgaagaatcacacggatgtgtggttcgtgttcctgcctgccgcccccgtggagacccaggcccctgccatcctggccctggccgccctgctcatccttctgggcctcctgtccacagccctcctggggcacctgctctgcttccacatttatctcatgtggcacaagctcaccacctatgagtacatcgtgcagcaccgcccaccacaggaggccaagggggttcacagggagctcgagtcatgtcctcccaagatgcggcccattcaggagatggagttctacatgcggaccttcagacatatgcgcccagagccccctggccaggccgggccagcagcagtgaatgccaaacactctcgccctgcctccccggatccgaccccaggtaggagggactgtgctgggcctccggtccaggtggagtgggatagaaagaagcctctaccctggcgctcgcctctgcttcttttggcgatgtggggccctcaggctcccccgtgtctctgcagaaaaagaggaagaggcgcgtgtataaagtgcgaacgtctgagacctcggatccggcgtcggggcctagggcccccagccgccgctccagctcgtcgacggattccgcggacgccagccctgtgcacgccgctggccctgccggcgcctaccactcggcgtcggcagagtccgtggacgagattccagtggcgcagacgcgcctgggcagcgccgctctggccgccccgcggggccggggccgacagcccacgctggcgcggcaggcgcgtgcgcccgccgttttcgtgagcccgagcagcggcgagcccagggcgccgggcggccgggaggctggtctggcttagctgggccgagaggccggagggccgagttagagcggccggcctgactctctatgcaacaccccatccttgccgcaccgagtgcactttaggggcccctacggccggcgggatcggcctccctcccccacgactcagcaatacccgccccaccggctgtgatgctccaataaacttttttatgcttttgcgga

SEQ ID NO: 21380 - DNA, 1303 bp, Homo sapiens
gcaggactaggccactcctgcaaccccctggcctcaaggcccctttgctctcaggggtcgcgtctgcaccctcagggttgctgtgaagatcagggcttgcccataagcctggtgctcagtggggctgcggctctgtttgttccaccacctgctaccttcccttttggtgtagtggcagggagaccaccgcatgtgcatttacgcagccccttctcggcagcctggatcgtggctggtcctctgtgagggcgaggggtgtgcccaggactcagctctgcgggagctggtggatgcacactcaggcctgtttctcagccaggggaaaacaattggttcagaggctggatccctggggacaccaggagcaggtgcgggcagctctgagcttcccaccactccctggctgagcctctctaaactgggcctatagacccatgggggctgggagccttcctgcaggaggcagaggctgaatagatgaggagatggagttctacatgcggaccttcagacatatgcgcccagagccccctggccaggccgggccagcagcagtgaatgccaatccctcccagtttcttgccacccgtggccaagcggaacctccaccaccctcttccccagacactctcgccctgcctccccggatccgaccccagaaaaagaggaagaggcgcgtgtataaagtgcgaacgtctgagacctcggatccggcgtcgggtgagcgcctctccctgtccgggtcctgctctgggaactcgagggaggggaaggcagagccacaagcgagccgcagccactgggctcatgttcccttcccttgcgcagggcctagggcccccagccgccgctccagctcgtcgacggattccgcggacgccagccctgtgcacgccgctggccctgccggcgcctaccactcggcgtcggcagagtccgtggacgagattccagtggcgcagacgcgcctgggcagcgccgctctggccgccccgcggggccggggccgacagcccacgctggcgcggcaggcgcgtgcgcccgccgttttcgtgagcccgagcagcggcgagcccagggcgccgggcggccgggaggctggtctggcttagctgggccgagaggccggagggccgagttagagcggccggcctgactctctatgcaacaccccatccttgccgcaccgagtgcactttaggggcccctacggccggcgggatcggcctccctcccccacgactcagcaatacccgccccaccggctgtgatgctccaataaacttttttatgcttttgcgga

SEQ ID NO: 21381 - DNA, 915 bp, Homo sapiens
ttgtaatacttacacatgtgcatggataaattgcagttatgacgtgtaattcatatcttgctgtttttcacttaacatggtattacaggattttttccattttgctccatgatcttattatttttaataattgcataatagttcattgagcggatgtgccctgcttttctaaaccgttcccatattattagacattagattgtttctatagtttctactattagaagtaaccttgcaacggttggcttcctttgcggagcctttcccttcttttgaattatttccttataatacatttccagaagtgaaattatagggcgaagtagggtctaaacttctggatggctcttgacattgcagctaactgccttctgtaaggtgggtgtaccagaatttagctccgccagccatgagtgaggggactggtgttaccatgtaagtaacatcagcctttctttgcagtatttcatgtttaaatattattatatgtacacataaaataaggctaccaagcattgggcacaaatacttgccccattttttttctgacaggctcagctattgcttttaattgcaaatgagcagatttatttctaggagtgcatcactcatggaatttgaggtctgtctgccctttgatagcaggactcttggcctgccaaatagcttaacattttgtctgaaaaaaagacaggttattttcgccaattgcttttgggattgttattcaggtgtaagaataacattcagggtgttaacgtttctttaatgtgggttgttgaaaaagagtcagtgagtcaccaggtgtggtagctcgtgcctgtgatcccagcactttgggaggctgaggcaggtggatcccttgagctcaggagtttgagaacagcctaggcaacatggtgaaaccccatcttt

SEQ ID NO: 21382 - DNA, 253 bp, Homo sapiens
gattacgggagctacaattcaagatgagatttgggtggggacacaaccaaaccatatcagcctgattataggtatgtttgaaaatctaaaaattaaaatttgaagcgtgcttaatggtatggataagaattggaggatcctagcaagaaacagtgccccttggcttcagaaacaagctgcagaattgggaaaaggcctgtggctgtttgtaagccatcaccgagcttgttgtacagacttacatgcagataca

SEQ ID NO: 21383 - DNA, 454 bp, Homo sapiens
ccaatggaaggctctctcacgaggtaattaagtaggagaggagagagaaactattctgcatctggctttggcagtggaagcaccccgtgactgcaggtaattacgggctccagcagcatcagtggagttctaggagccccagcagcactgtcagcagcaagtgcatgctcacagactctaggccaggggtgtccaatcttttggcttccctgagccacattggaaaaagaaaaagtgtcttgggccacacataaaacacacattaataatagctaacgagctaaaaaaaaatcacaaaaatttcataatgttttaagaaagtttacgaatttgtcttgggctgtattcaaagccatcctgggacatatgtggcccatgggccgtgggttggaccagcttgctctagggatattaattttccacatttttgctcctccatccttagagagctgtg

SEQ ID NO: 21384 - DNA, 337 bp, Homo sapiens
tatttgaaagaaatagagtcatatagaacaacaaatagaggtgctgaagcacaaggtcagatgagtttatatttaaagaaaggtcaggaagttagtcttttccttctaaaatcacaaggtacatacctcgtgactggaatccttttcctaatgaaatattaacatccattagatgttgggtttgcattaaaaatgtctccacatttgtatttttagcatggacacagtggtatcagttaaaataattagcccttgcctgtaatataaaagccttatctctttactcttacttttttagaaggcagatgttttaaaactgatttgaaaatcaaatttg

SEQ ID NO: 21385 - DNA, 344 bp, Homo sapiens
ccaccacgcccggctaatttttgtatttttgctagcgatggggtttcgccatgttggacaggctggtcttgaactgctgacctcaaataatccgcctgcctcagcctcccaaagtgctaggattacaggcatgagccaccgtgcccagcctcaaatgccttttgaatgaatgaatgaacaaaccctcacaacagtactataagaactagatattatttgagtctgtttgtggataaggctcagaaagattaaataattttttccaacttgtagaggtagtgattcagagactcagatcttctgacaccagaaactaacttctatatacaggggctaatggcaga

SEQ ID NO: 21386 - DNA, 115 bp, Homo sapiens
gagaactgccatcatgaccgagggccaccatgatgggtgaaggtggccatgatgggtgaaggcagccatgatgggtgaaggccaccatgatgggtgaaggccaccatgatcagac

SEQ ID NO: 21387 - DNA, 272 bp, Homo sapiens
tttgggaagctgaggcgggaggattgcttgaggccaggaattttagatcaggctgggcaacatagcgataccctgtctctacaaaaaaacaaaacaaaaaaaccccacaaaattagtcaggtgaagtggtgtatgcttgtagtctcagctacttaggaggctgagacaggaggatggcttgatcccaggaggtagaggctatagtgagctaagatggcgccactgtattccagcctgcatgacagtgagagacactcagaaaaaagtctcag

SEQ ID NO: 21388 - DNA, 393 bp, Homo sapiens
ggagagcgccagcctctgggaggcccaggccccaggccctggctgctgcccccggtgtactgccttccaagtgtgtttgaggtcgggtggtagcggggggtccctcctcagaacctgtgttgttctgccggagacaaagttcaggctctggctggcccacgaggcagctgcattctgtcctctgccatgggacactcaccctgagagggccagggctgtggtgtggggcagactggatggccgggaggagacgggaaaaggacagcacccctgttttgccctcctccccccggacagcctgcctggagttctctggcagcagctggagacaccaagagggttccatggagcaggctgtgtttgtgcaggcctgtgtttgcctgtttaccatcg

SEQ ID NO: 21389 - DNA, 427 bp, Homo sapiens
tttttgagacaggatcttgctctgtaacccaggctggagtgtagtagccccatcacagatcactgcagccttgacctcccaggctcaagctattctgccccacctcagcctcccaagtagctgtgatgacaggcacatgccaccatgcccagctaatttttgtattttttgtagaggtggagttttgccatgttgccagcgctggtcttgaactcctgggttcaagtggtccattcatctaggcctcccaaagtgctgggattacagatgtgagccacagagcccagcctcaatagctttttacagtgagtggggttgagcaggggtgatattctccatagtgaaattttatgtagccattgtttgagggactttgggaaaccctgggttcaaagggcacagggacattctctcttctaagcagatg

SEQ ID NO: 21390 - DNA, 982 bp, Homo sapiens
  misc_feature (617)..(617): n is a, c, g, or t
  misc_feature (655)..(655): n is a, c, g, or t
  misc_feature (689)..(689): n is a, c, g, or t
  misc_feature (978)..(978): n is a, c, g, or t
ttaagaatgattctactatgaaacagacataaaggaacattcttaaaagcctgtaatttctaaataaaagtcagtgaacctctttctttttttctttttttaatttatttatatatatatatatatttttattatactttaagttctagggtactctgccgttaagaccctatatctatagacaaaacaaatcctaactggcagcgtataaagtactctttaattcacacaatgtgttatatttctggaaaagatagtctcaggagcagtttaatctgacacgtgtacccataaaaatggaattaaactcagccaggtgcggtgactcacggcctgtaatcccagcactttgggaggccaaggcgggccaatcacgaggtcaggagattgagaccatcctggccaacatagtgaaaccccgtctctactaaaaatacaaaaattagctcggcgtggtggcgcatgcctgtaatcccagctacacaggaggctcaaacaggagaatcgcttgaacttgggaggcggatgttgcagtgagccaagatcgtgccactgacttcagctggcagtagagcgagactctgttgctacagggatgactcaactttcaagtctgnaaggactgatgccagctttatagatgatacaacctatntactataatatatgcttattaatatatactgatntagaaggtagaggatgttatatagatttactgatatgtagctagtacttttattaatcaaactagtatactagtagcgctgagttatgacgtttttcggataacttgctcttaagtgcatttaggtgcaattacattagacgtgaagagtaactaggtaactaactagtatagtgctgatcttagccgcatgtgacgaaggatagtgtcttcgggattacaggcgtcatgcagtgtggtactggggttttttacacacttcccttgggggttttttttcctcctttccncctt

SEQ ID NO: 21391 - DNA, 642 bp, Homo sapiens
ttaagaatgattctactatgaaacagacataaaggaacattcttaaaagcctgtaatttctaaataaaagtcagtgaacctctttctttttttctttttttaatttatttatatatatatatatatttttattatactttaagttctagggtactctgccgttaagaccctatatctatagacaaaacaaatcctaactggcagcgtataaagtactctttaattcacacaatgtgttatatttctggaaaagatagtctcaggagcagtttaatctgacacgtgtacccataaaaatggaattaaactcagccaggtgcggtgactcacggcctgtaatcccagcactttgggaggccaaggcgggccaatcacgaggtcaggagattgagaccatcctggccaacatagtgaaaccccgtctctactaaaaatacaaaaattagctcggcgtggtggcgcatgcctgtaatcccagctacacaggaggctcaaacaggagaatcgcttgaacttgggaggcggatgttgcagtgagccaagatcgtgccactgacttcagctggcagtagagcgagactctgtccagaattgactcaacttttcaagttctgataatatgcttattatatattacctgtt

SEQ ID NO: 21392 - DNA, 380 bp, Homo sapiens
aatcaggcatcgtcgacaagaaaagaggcagccatgagccattatcagtcaacacttggaagtccttgagggagggatgcacttactggataaagggcatgtaggcagaatatcattgggtctattttaccacagtggctggtctctaggaacctccgtatgaattcctttaactttgaccacaaaaccgtaaatgttcttttcattaaaatctcttgaatcaatagagatgattctgttttctgtctggaaaagagctaaactagaacagtacagctggaattaaaaattaggagtggtgtggcagacagaggctaagatggccatctcctggtattcatgccccgtagtcgacgcaccctcaccttgagtatgggtga

SEQ ID NO: 21393 - DNA, 178 bp, Homo sapiens
cacacagagcccccagagggtatgaattggatctgaaaaggggagaggcagagggagattcttatccagggagcgtagggaacacgctttgtgcttagggcagaggctgtgtgggatgaaacagagtttgatttatgtaatccaaccttgtcagacaccacagccagctctttagaga

SEQ ID NO: 21394 - DNA, 448 bp, Homo sapiens
tatagagtattaggataatcttgtcatttcagcttgtattctattcagaaaacaacttgagttattgaagttatgcttatttgtttgtttttaagcagaatcctgatattattagagttgctctttaggaggaataatctgatccctttaattaaatccattaatatttgtgttgtggatgctatccagatactgtatggagagcttgaggtttgaaatacaagtaataattgaagccatagatgaagacgaaattttcaactgggagagtgaaagtagggaaaatgtatcttgccttcaaacatcttaatttccttctgagaattagagcatcttagtctggaaaaggctttatagacagcttgattttgttctcacattttacaggtgaagaaactgagaaccagacagtccaacttatttgtcctaccaaactaggtatatgatc

SEQ ID NO: 21395 - DNA, 441 bp, Homo sapiens
agtcatgtccttacatggatggtggcaggcaaagaaagagagcttgtgcagaaaaactccccatttttaagacccatcagatcttgtgagattcattcactatcacaagaactgcatgggaaagacccgcccccgtgattcaatcatttccccaccaggacccctccccacaacacccagaggattatgaaagctacaagatgagatttgggtggggacacagaatcaaaccatatcaatagtcaagttcacataaccacacgtagtcgtttcctaacgtaaaagagaaaaaagagtggtgtcatgaaaacaatgactggttccacttgtagttcatgcagttcaaataactacacaagcttttcctcatgacagccatgatacttcagtttgtagcagatatgctttatgcaaacttcccagtttgtcagataatattaa

SEQ ID NO: 21396 - DNA, 496 bp, Homo sapiens
gagacagggtctcactctgccacccaggctggagtgcaggggcatgatcagggctcactgaagcctctgcctcctgggctcaagcgatcctcccatcccagcctcccgagtagcccggctaatttttgtagttttagagactggtctcaaactcctggactcaagtatctgcccacatactggcctcccaaagtgctgggattacaggtgtgagccaccgggcctggctgtattcatgagcattttacaattattatgtcaagttctggtttataaaactcttaatgccccattaattatcattgcattaaatctatgaattaatatggaaagtgttattatgtcatttatgtaatctttccagttacaagcaaagatggctatgcatccagtctgattacctttattgtgtcattatggttttagagttttctttttagttcttgttaggttgacattaaagtatttaatggggatttagaatttcatttggaga

SEQ ID NO: 21397 - DNA, 246 bp, Homo sapiens
acttgctaaagatcaaccaacttgttcatttttcaattgtttagggccttgctggaatttaacacaaggcagagaataagatttgagtaaaagagagagttatataaaattgatgcttttctctcttttttttaatcattgaaaagtgaatggagagaccatattgttctacatctgtatgtaagagctctgatgtatctagaatttgtaagctgtccagcaaaaatgaaaaagggtctgtcgacg

SEQ ID NO: 21398 - DNA, 483 bp, Homo sapiens
atgagctaactgacttagctactagaggtgttttcagatacactgacaatcctttgggctccacgaagaagtctgctgaagagtgctatcattttccttctacccatacaggaaaaccctggcttgtgaggtagaggagcaggatggaaagagcatgggctctggccagcaaaagacccaagtctgactactcattcagtccctcattatctatgtgggcttgggctagttaccgaacttctccaaatctctgtttctcatttctagaatgggaacaaatctacctccttccacgtcaacaaacactttttagtttattttgtgtcttccggcatctggaatggaataagaatttaatgaaagtttgaatttacaatatgtcaggcattgaactagaagctttacttacatgatgtcatttaattcttacaaaaagcccttgaggtagatgttggtcaaacgaataaatgaatgaatcaatct

SEQ ID NO: 21399 - DNA, 448 bp, Homo sapiens
tgccccacacacattggctaaatgcgtgggaggtggtagggttggttccaggtcctctaattcaaaatctaatgccccaccccatgcttcagcatatcccagccctaattccatgtgcgggtggtgcccaaccaccctgctaccctcctcccaagtatcctacctacatccttccctggcattccacaaggtctcccaactcagcctcctcttggtcacagtggcataccatgtcggtggaggacagtcgtaagggacccagtggcagaggtctattaccattgggcatccaccctagtactttcaatcccgttccccatcatcagtgccatatgctccaccccattcactgggagcagccaccagcaaatatgggaacctaggggaacaagaggaatgtggcagggctgagggttctgggtctcaggcacttaattggaaaatgaac

SEQ ID NO: 21400 - DNA, 165 bp, Homo sapiens
gtcaccagcctggacaagtcatttgcttgtgcaaactgatcaggacagatgtcacttacaaaaatatttgacttggaactcatgtgcttgttggcccagacaccttcaaaactggggttttattaggaaatgctggttaaaagaactcatagaaagaaaacgtta

SEQ ID NO: 21401 - DNA, 304 bp, Homo sapiens
ctcatctgtaaaatggagataatatcaccatgcactcagccctagccactgcattgctgttactgataccattactgctgctacgtcgtttttttgatggctcagcccttagggaagggggatcaagggagaagcccggaccttcccgcaggaggtgggctgggcacagccctgaaccatggaggtcacccaccctgaggtcgggacctgggttcccttcctatccactgggggtcccagcctttgtcttcatctctccaggtcccagcccttcacagtgggcacttccctgcctgtgacggag

SEQ ID NO: 21402 - DNA, 3719 bp, Homo sapiens
cgggcgccggaagtggcgaaggcggggtcggcgctgccgggtgaaatcgtaggacagtgaagatgctgctggaattgtccgaggagcataaggaacacctggccttcctgcctcaagtggacagcgcggtggtcgccgagtttgggcggattgctgtggaattcctgagacgcggcgcaaacccaaaaatctacgaaggcgccgccagaaaactcaatgtgagtagtgacactgtccagcatggtgtggaaggattaacgtatctcctcactgagagctcaaagctcatgatttctgaactggatttccaagactctgtttttgttctgggattctctgaagaattaaacaaattgttgcttcagctttatctggacaacagaaaagagatcagaacgattctgagtgaattggcaccaagccttcccagttatcataaccttgaatggcgactagatgtacagcttgcaagtagaagtctcaggcaacagattaaaccagcagtgactataaagctacaccttaatcaaaatggagatcacaacaccaaagttctgcagacagacccagccaccctgctccatttggttcaacaactggaacaagcattggaagagatgaagacaaaccactgtaggagagttgttcgcaacatcaagtagtaccagttttaaggttttaattcatttgaatcacttatgaattgatgatatacagcaattacttttcaaaattaattttttattaattcatgatgataaatacatagtattcctcagtatctattccaagatactgaggtcataatcagaagctaagctgggtgcagtggctcatgccagttatcccagcactttgggaggccgaggtgggcaaatcatgaggtcaggagattgagaccttcctggctaacatggtgaaaccccatctctactaaaaatataaaaaattagccaggtgtggtggcacgcatctatcagagtcccagctactcaggaggctgaggcaggagaatcgcttgaacctgggaggtggaggttgcagtgagctgagattgtgccactgcactccagcctgggtgacagagtgagactccatctcaaaaataataataataataataaagtaaaaataaaaataaaaaagtaatcagaagctaaagtaaagttcctttcctggtgctaactgtggtcttcttgacacattaagatgtattttgtattttaagagtctcatgctctaccgttggaactagccagatggccattattttgtattttaaatacataaataggattgaatcaactagaaatgaatctatatgttctgtatatatgaatgactatcttgtttttgctacttcttttgactgcttaattttattattttcatctttattgatcaaatttgaaaataaaattcacaatgtaatactactactatgcagaattttctaaacagttcagtatttttgacttttaaaaacaccccacagtgttaatagccacagaatattgaacatcaataggatttttaatgctatattgttataggcagtttattcatttttctttgtatatgaagatgataagtatcatattgcctaagtttgagtgatcatggttaattaattggcttaaatagtactcaaatttgtgtggtcgtatattgtattttatcaaggactaattcttccaccatacccaaagcatctaggagacactctgtcatttacatttacaaataatggatgcagagaaatataatcaattcttgattgtcctggatacaaattatagtcactttttataatttgaataaactatgatgagggaaggaaggccatgtttattacattataggcaactatcccttctcaaaacataacttgatttatgttttgttttattttttagtagggaaccaaaagcttttggtctgaaaaactcaggtgctgatttgtcaggtcagcctgagagagtgcagagatactgaggtcagcttagggagaagaattgtatggaagggtggaaatgagggttcagtcttaactatgtgtccaagaccttatcctgagagtcttcatggaataatctagaaagggctgtagaagcaatcaaactctaaactgcgctctagactttgtcaatactttgcttcgtaagaattagggattttcatatcagagtgataccatgttgcaatctctttagagaagagagagcctagcagggaataggctagtggaagaaaaacatacttgagatggttacccattggtccctgcaggcatctgggccacccttttcctgtaggtatatattctgccgttgtgaaacaactatattattagatgtcagcaaactataatcagaaataatttttaattatagtggcaacttgattaatgaagctctcatatacaacctcacaaacaaaaagaaactttattacgtgaaatagtagcatatgtcattgggtttaaaagcaacatgcctgcaaaacatatgataaaaaatacctctgtaagggtttttatttgtccaccttcgatggaaggtaaacatggctgatcccagccaagatgaaacaatagccctttgtctcctcagaacaacctatctccaactctttgtccactgttcttaccccaattaaaacaagaaagcatgtgctaatccttttttaatttttatcaacctgccttggcctcctttcactgtactccattattccttctgtgatgttctaccttcttcaccttttgagaccagggtgagttgggagcagtttgcctaccttcttttagaatctggggcttatcttttagtacaagccattgaataagcctcttccttttttttgctcaaacattccacatccttgtggattcccctgcattgtttgttttatataacatttgatatttgttgtagcttgtatatgaacataattttctttagaggtagtcactgttctctccagtatgacccaggtttcttgactctgagtaatgcaccttctataactatctaaatttctattgaagctttttggattatgagtatgctgacttttcacgattggctggtgcatgtttagacttaaatgtcatatccttcatgtctcaaagccaaaatagtaacatctcatctcagaacagagctgtgaccacatgccaatatatgtgtcacaaagtctacatatgttacattccttggaagtctccttaaatgtttcacaaaatgtcaacaagcttgttttgttattgatatttccgagattgggcacatttaagacagtaaacgggaaaggtggtgaagatgctataagaagatgctgtatcttgagaattgaaaaatgagaatctgacatggtttgaaaaatcatgaagggtatatataaaggatgcatgtgtaggagccattaaaattcataacagtatgtgccccttcagcgttttaatcttatgaagtggttaagagataagtcttcggagttggacaaaaggatttgaatttaggttctgtggattattatgggtccttgataaattctcaaagcctttttttttgttcatctctaaaataggaatataggattacctaccacattgactcgtaaggactatatgagaccatgtatatagaatgtttaacatagtaccaggctttacaaagaactcaataaatgtttaccattattgaaaaaaaaaaaaa

SEQ ID NO: 21403 - DNA, 3759 bp, Homo sapiens
tgcatggtgaatatagaacagtggtttataaaagccaggctggtaccgcccggaatcccgggatatcccggcgctgccgggtgaaatcgtaggacagtgaagatgctgctggaattgtccgaggagcataaggaacacctggccttcctgcctcaagtggacagcgcggtggtcgccgagtttgggcggattgctgtggaattcctgagacgcggcgcaaacccaaaaatctacgaaggcgccgccagaaaactcaatgtgagtagtgacactgtccagcatggtgtggaaggattaacgtatctcctcactgagagctcaaagctcatgatttctgaactggatttccaagactctgtttttgttctgggattctctgaagaattaaacaaattgttgcttcagctttatctggacaacagaaaagagatcagaacgattctgagtgaattggcaccaagccttcccagttatcataaccttgaatggcgactagatgtacagcttgcaagtagaagtctcaggcaacagattaaaccagcagtgactataaagctacaccttaatcaaaatggagatcacaacaccaaagttctgcagacagacccagccaccctgctccatttggttcaacaactggaacaagcattggaagagatgaagacaaaccactgtaggagagttgttcgcaacatcaagtagtaccagttttaaggttttaattcatttgaatcacttatgaattgatgatatacagcaattacttttcaaaattaattttttattaattcatgatgataaatacatagtattcctcagtatctattccaagatactgaggtcataatcagaagctaagctgggtgcagtggctcatgccagttatcccagcactttgggaggccgaggtgggcaaatcatgaggtcaggagattgagaccttcctggctaacatggtgaaaccccatctctactaaaaatataaaaaattagccaggtgtggtggcacgcatctatcagagtcccagctactcaggaggctgaggcaggagaatcgcttgaacctgggaggtggaggttgcagtgagctgagattgtgccactgcactccagcctgggtgacagagtgagactccatctcaaaaataataataataataataaagtaaaaataaaaataaaaaagtaatcagaagctaaagtaaagttcctttcctggtgctaactgtggtcttcttgacacattaagatgtattttgtattttaagagtctcatgctctaccgttggaactagccagatggccattattttgtattttaaatacataaataggattgaatcaactagaaatgaatctatatgttctgtatatatgaatgactatcttgtttttgctacttcttttgactgcttaattttattattttcatctttattgatcaaatttgaaaataaaattcacaatgtaatactactactatgcagaattttctaaacagttcagtatttttgacttttaaaaacaccccacagtgttaatagccacagaatattgaacatcaataggatttttaatgctatattgttataggcagtttattcatttttctttgtatatgaagatgataagtatcatattgcctaagtttgagtgatcatggttaattaattggcttaaatagtactcaaatttgtgtggtcgtatattgtattttatcaaggactaattcttccaccatacccaaagcatctaggagacactctgtcatttacatttacaaataatggatgcagagaaatataatcaattcttgattgtcctggatacaaattatagtcactttttataatttgaataaactatgatgagggaaggaaggccatgtttattacattataggcaactatcccttctcaaaacataacttgatttatgttttgttttattttttagtagggaaccaaaagcttttggtctgaaaaactcaggtgctgatttgtcaggtcagcctgagagagtgcagagatactgaggtcagcttagggagaagaattgtatggaagggtggaaatgagggttcagtcttaactatgtgtccaagaccttatcctgagagtcttcatggaataatctagaaagggctgtagaagcaatcaaactctaaactgcgctctagactttgtcaatactttgcttcgtaagaattagggattttcatatcagagtgataccatgttgcaatctctttagagaagagagagcctagcagggaataggctagtggaagaaaaacatacttgagatggttacccattggtccctgcaggcatctgggccacccttttcctgtaggtatatattctgccgttgtgaaacaactatattattagatgtcagcaaactataatcagaaataatttttaattatagtggcaacttgattaatgaagctctcatatacaacctcacaaacaaaaagaaactttattacgtgaaatagtagcatatgtcattgggtttaaaagcaacatgcctgcaaaacatatgataaaaaatacctctgtaagggtttttatttgtccaccttcgatggaaggtaaacatggctgatcccagccaagatgaaacaatagccctttgtctcctcagaacaacctatctccaactctttgtccactgttcttaccccaattaaaacaagaaagcatgtgctaatccttttttaatttttatcaacctgccttggcctcctttcactgtactccattattccttctgtgatgttctaccttcttcaccttttgagaccagggtgagttgggagcagtttgcctaccttcttttagaatctggggcttatcttttagtacaagccattgaataagcctcttccttttttttgctcaaacattccacatccttgtggattcccctgcattgtttgttttatataacatttgatatttgttgtagcttgtatatgaacataattttctttagaggtagtcactgttctctccagtatgacccaggtttcttgactctgagtaatgcaccttctataactatctaaatttctattgaagctttttggattatgagtatgctgacttttcacgattggctggtgcatgtttagacttaaatgtcatatccttcatgtctcaaagccaaaatagtaacatctcatctcagaacagagctgtgaccacatgccaatatatgtgtcacaaagtctacatatgttacattccttggaagtctccttaaatgtttcacaaaatgtcaacaagcttgttttgttattgatatttccgagattgggcacatttaagacagtaaacgggaaaggtggtgaagatgctataagaagatgctgtatcttgagaattgaaaaatgagaatctgacatggtttgaaaaatcatgaagggtatatataaaggatgcatgtgtaggagccattaaaattcataacagtatgtgccccttcagcgttttaatcttatgaagtggttaagagataagtcttcggagttggacaaaaggatttgaatttaggttctgtggattattatgggtccttgataaattctcaaagcctttttttttgttcatctctaaaataggaatataggattacctaccacattgactcgtaaggactatatgagaccatgtatatagaatgtttaacatagtaccaggctttacaaagaactcaataaatgtttaccattattgaaaaaaaaaaaaa

SEQ ID NO: 21404 - DNA, 3849 bp, Homo sapiens
tgcatggtgaatatagaacagtggtttataaaagccaggctggtaccgcccggaatcccgggatatcccggcgctgccgggtgaaatcgtaggacagtgaagatgctgctggaattgtccgaggagcataaggaacacctggccttcctgcctcaagtggacagcgcgggtcagcgggcgtgggggcggtgttctgtgggctggggaggaggtcaaaggcagcgcctggcactcaacagccttctgactttcattgcagtggtcgccgagtttgggcggattgctgtggaattcctgagacgcggcgcaaacccaaaaatctacgaaggcgccgccagaaaactcaatgtgagtagtgacactgtccagcatggtgtggaaggattaacgtatctcctcactgagagctcaaagctcatgatttctgaactggatttccaagactctgtttttgttctgggattctctgaagaattaaacaaattgttgcttcagctttatctggacaacagaaaagagatcagaacgattctgagtgaattggcaccaagccttcccagttatcataaccttgaatggcgactagatgtacagcttgcaagtagaagtctcaggcaacagattaaaccagcagtgactataaagctacaccttaatcaaaatggagatcacaacaccaaagttctgcagacagacccagccaccctgctccatttggttcaacaactggaacaagcattggaagagatgaagacaaaccactgtaggagagttgttcgcaacatcaagtagtaccagttttaaggttttaattcatttgaatcacttatgaattgatgatatacagcaattacttttcaaaattaattttttattaattcatgatgataaatacatagtattcctcagtatctattccaagatactgaggtcataatcagaagctaagctgggtgcagtggctcatgccagttatcccagcactttgggaggccgaggtgggcaaatcatgaggtcaggagattgagaccttcctggctaacatggtgaaaccccatctctactaaaaatataaaaaattagccaggtgtggtggcacgcatctatcagagtcccagctactcaggaggctgaggcaggagaatcgcttgaacctgggaggtggaggttgcagtgagctgagattgtgccactgcactccagcctgggtgacagagtgagactccatctcaaaaataataataataataataaagtaaaaataaaaataaaaaagtaatcagaagctaaagtaaagttcctttcctggtgctaactgtggtcttcttgacacattaagatgtattttgtattttaagagtctcatgctctaccgttggaactagccagatggccattattttgtattttaaatacataaataggattgaatcaactagaaatgaatctatatgttctgtatatatgaatgactatcttgtttttgctacttcttttgactgcttaattttattattttcatctttattgatcaaatttgaaaataaaattcacaatgtaatactactactatgcagaattttctaaacagttcagtatttttgacttttaaaaacaccccacagtgttaatagccacagaatattgaacatcaataggatttttaatgctatattgttataggcagtttattcatttttctttgtatatgaagatgataagtatcatattgcctaagtttgagtgatcatggttaattaattggcttaaatagtactcaaatttgtgtggtcgtatattgtattttatcaaggactaattcttccaccatacccaaagcatctaggagacactctgtcatttacatttacaaataatggatgcagagaaatataatcaattcttgattgtcctggatacaaattatagtcactttttataatttgaataaactatgatgagggaaggaaggccatgtttattacattataggcaactatcccttctcaaaacataacttgatttatgttttgttttattttttagtagggaaccaaaagcttttggtctgaaaaactcaggtgctgatttgtcaggtcagcctgagagagtgcagagatactgaggtcagcttagggagaagaattgtatggaagggtggaaatgagggttcagtcttaactatgtgtccaagaccttatcctgagagtcttcatggaataatctagaaagggctgtagaagcaatcaaactctaaactgcgctctagactttgtcaatactttgcttcgtaagaattagggattttcatatcagagtgataccatgttgcaatctctttagagaagagagagcctagcagggaataggctagtggaagaaaaacatacttgagatggttacccattggtccctgcaggcatctgggccacccttttcctgtaggtatatattctgccgttgtgaaacaactatattattagatgtcagcaaactataatcagaaataatttttaattatagtggcaacttgattaatgaagctctcatatacaacctcacaaacaaaaagaaactttattacgtgaaatagtagcatatgtcattgggtttaaaagcaacatgcctgcaaaacatatgataaaaaatacctctgtaagggtttttatttgtccaccttcgatggaaggtaaacatggctgatcccagccaagatgaaacaatagccctttgtctcctcagaacaacctatctccaactctttgtccactgttcttaccccaattaaaacaagaaagcatgtgctaatccttttttaatttttatcaacctgccttggcctcctttcactgtactccattattccttctgtgatgttctaccttcttcaccttttgagaccagggtgagttgggagcagtttgcctaccttcttttagaatctggggcttatcttttagtacaagccattgaataagcctcttccttttttttgctcaaacattccacatccttgtggattcccctgcattgtttgttttatataacatttgatatttgttgtagcttgtatatgaacataattttctttagaggtagtcactgttctctccagtatgacccaggtttcttgactctgagtaatgcaccttctataactatctaaatttctattgaagctttttggattatgagtatgctgacttttcacgattggctggtgcatgtttagacttaaatgtcatatccttcatgtctcaaagccaaaatagtaacatctcatctcagaacagagctgtgaccacatgccaatatatgtgtcacaaagtctacatatgttacattccttggaagtctccttaaatgtttcacaaaatgtcaacaagcttgttttgttattgatatttccgagattgggcacatttaagacagtaaacgggaaaggtggtgaagatgctataagaagatgctgtatcttgagaattgaaaaatgagaatctgacatggtttgaaaaatcatgaagggtatatataaaggatgcatgtgtaggagccattaaaattcataacagtatgtgccccttcagcgttttaatcttatgaagtggttaagagataagtcttcggagttggacaaaaggatttgaatttaggttctgtggattattatgggtccttgataaattctcaaagcctttttttttgttcatctctaaaataggaatataggattacctaccacattgactcgtaaggactatatgagaccatgtatatagaatgtttaacatagtaccaggctttacaaagaactcaataaatgtttaccattattgaaaaaaaaaaaaa

SEQ ID NO: 21405 - DNA, 3397 bp, Homo sapiens
tcgactagatgtacagatgtagaaaagtgcacaggtcaatgtaccgctcaatgaattatcacatggtgcatttaactgtgactcacaccccagaagcatcctccttgcctcctaattactgccccttcactcctttctaaagcttgcaagtagaagtctcaggcaacagattaaaccagcagtgactataaagctacaccttaatcaaaatggagatcacaacaccaaagttctgcagacagacccagccaccctgctccatttggttcaacaactggaacaagcattggaagagatgaagacaaaccactgtaggagagttgttcgcaacatcaagtagtaccagttttaaggttttaattcatttgaatcacttatgaattgatgatatacagcaattacttttcaaaattaattttttattaattcatgatgataaatacatagtattcctcagtatctattccaagatactgaggtcataatcagaagctaagctgggtgcagtggctcatgccagttatcccagcactttgggaggccgaggtgggcaaatcatgaggtcaggagattgagaccttcctggctaacatggtgaaaccccatctctactaaaaatataaaaaattagccaggtgtggtggcacgcatctatcagagtcccagctactcaggaggctgaggcaggagaatcgcttgaacctgggaggtggaggttgcagtgagctgagattgtgccactgcactccagcctgggtgacagagtgagactccatctcaaaaataataataataataataaagtaaaaataaaaataaaaaagtaatcagaagctaaagtaaagttcctttcctggtgctaactgtggtcttcttgacacattaagatgtattttgtattttaagagtctcatgctctaccgttggaactagccagatggccattattttgtattttaaatacataaataggattgaatcaactagaaatgaatctatatgttctgtatatatgaatgactatcttgtttttgctacttcttttgactgcttaattttattattttcatctttattgatcaaatttgaaaataaaattcacaatgtaatactactactatgcagaattttctaaacagttcagtatttttgacttttaaaaacaccccacagtgttaatagccacagaatattgaacatcaataggatttttaatgctatattgttataggcagtttattcatttttctttgtatatgaagatgataagtatcatattgcctaagtttgagtgatcatggttaattaattggcttaaatagtactcaaatttgtgtggtcgtatattgtattttatcaaggactaattcttccaccatacccaaagcatctaggagacactctgtcatttacatttacaaataatggatgcagagaaatataatcaattcttgattgtcctggatacaaattatagtcactttttataatttgaataaactatgatgagggaaggaaggccatgtttattacattataggcaactatcccttctcaaaacataacttgatttatgttttgttttattttttagtagggaaccaaaagcttttggtctgaaaaactcaggtgctgatttgtcaggtcagcctgagagagtgcagagatactgaggtcagcttagggagaagaattgtatggaagggtggaaatgagggttcagtcttaactatgtgtccaagaccttatcctgagagtcttcatggaataatctagaaagggctgtagaagcaatcaaactctaaactgcgctctagactttgtcaatactttgcttcgtaagaattagggattttcatatcagagtgataccatgttgcaatctctttagagaagagagagcctagcagggaataggctagtggaagaaaaacatacttgagatggttacccattggtccctgcaggcatctgggccacccttttcctgtaggtatatattctgccgttgtgaaacaactatattattagatgtcagcaaactataatcagaaataatttttaattatagtggcaacttgattaatgaagctctcatatacaacctcacaaacaaaaagaaactttattacgtgaaatagtagcatatgtcattgggtttaaaagcaacatgcctgcaaaacatatgataaaaaatacctctgtaagggtttttatttgtccaccttcgatggaaggtaaacatggctgatcccagccaagatgaaacaatagccctttgtctcctcagaacaacctatctccaactctttgtccactgttcttaccccaattaaaacaagaaagcatgtgctaatccttttttaatttttatcaacctgccttggcctcctttcactgtactccattattccttctgtgatgttctaccttcttcaccttttgagaccagggtgagttgggagcagtttgcctaccttcttttagaatctggggcttatcttttagtacaagccattgaataagcctcttccttttttttgctcaaacattccacatccttgtggattcccctgcattgtttgttttatataacatttgatatttgttgtagcttgtatatgaacataattttctttagaggtagtcactgttctctccagtatgacccaggtttcttgactctgagtaatgcaccttctataactatctaaatttctattgaagctttttggattatgagtatgctgacttttcacgattggctggtgcatgtttagacttaaatgtcatatccttcatgtctcaaagccaaaatagtaacatctcatctcagaacagagctgtgaccacatgccaatatatgtgtcacaaagtctacatatgttacattccttggaagtctccttaaatgtttcacaaaatgtcaacaagcttgttttgttattgatatttccgagattgggcacatttaagacagtaaacgggaaaggtggtgaagatgctataagaagatgctgtatcttgagaattgaaaaatgagaatctgacatggtttgaaaaatcatgaagggtatatataaaggatgcatgtgtaggagccattaaaattcataacagtatgtgccccttcagcgttttaatcttatgaagtggttaagagataagtcttcggagttggacaaaaggatttgaatttaggttctgtggattattatgggtccttgataaattctcaaagcctttttttttgttcatctctaaaataggaatataggattacctaccacattgactcgtaaggactatatgagaccatgtatatagaatgtttaacatagtaccaggctttacaaagaactcaataaatgtttaccattattgaaaaaaaaaaaaa

SEQ ID NO: 21406 - DNA, 3034 bp, Homo sapiens
gggaatactatgtatctattcctcagtatcttggaatagatactgaggaatactatgtatgtatcatcatgaattaggacatagtattcctcagtatctattccaagatactgaggtcataatcagaagctaagctgggtgcagtggctcatgccagttatcccagcactttgggaggccgaggtgggcaaatcatgaggtcaggagattgagaccttcctggctaacatggtgaaaccccatctctactaaaaatataaaaaattagccaggtgtggtggcacgcatctatcagagtcccagctactcaggaggctgaggcaggagaatcgcttgaacctgggaggtggaggttgcagtgagctgagattgtgccactgcactccagcctgggtgacagagtgagactccatctcaaaaataataataataataataaagtaaaaataaaaataaaaaagtaatcagaagctaaagtaaagttcctttcctggtgctaactgtggtcttcttgacacattaagatgtattttgtattttaagagtctcatgctctaccgttggaactagccagatggccattattttgtattttaaatacataaataggattgaatcaactagaaatgaatctatatgttctgtatatatgaatgactatcttgtttttgctacttcttttgactgcttaattttattattttcatctttattgatcaaatttgaaaataaaattcacaatgtaatactactactatgcagaattttctaaacagttcagtatttttgacttttaaaaacaccccacagtgttaatagccacagaatattgaacatcaataggatttttaatgctatattgttataggcagtttattcatttttctttgtatatgaagatgataagtatcatattgcctaagtttgagtgatcatggttaattaattggcttaaatagtactcaaatttgtgtggtcgtatattgtattttatcaaggactaattcttccaccatacccaaagcatctaggagacactctgtcatttacatttacaaataatggatgcagagaaatataatcaattcttgattgtcctggatacaaattatagtcactttttataatttgaataaactatgatgagggaaggaaggccatgtttattacattataggcaactatcccttctcaaaacataacttgatttatgttttgttttattttttagtagggaaccaaaagcttttggtctgaaaaactcaggtgctgatttgtcaggtcagcctgagagagtgcagagatactgaggtcagcttagggagaagaattgtatggaagggtggaaatgagggttcagtcttaactatgtgtccaagaccttatcctgagagtcttcatggaataatctagaaagggctgtagaagcaatcaaactctaaactgcgctctagactttgtcaatactttgcttcgtaagaattagggattttcatatcagagtgataccatgttgcaatctctttagagaagagagagcctagcagggaataggctagtggaagaaaaacatacttgagatggttacccattggtccctgcaggcatctgggccacccttttcctgtaggtatatattctgccgttgtgaaacaactatattattagatgtcagcaaactataatcagaaataatttttaattatagtggcaacttgattaatgaagctctcatatacaacctcacaaacaaaaagaaactttattacgtgaaatagtagcatatgtcattgggtttaaaagcaacatgcctgcaaaacatatgataaaaaatacctctgtaagggtttttatttgtccaccttcgatggaaggtaaacatggctgatcccagccaagatgaaacaatagccctttgtctcctcagaacaacctatctccaactctttgtccactgttcttaccccaattaaaacaagaaagcatgtgctaatccttttttaatttttatcaacctgccttggcctcctttcactgtactccattattccttctgtgatgttctaccttcttcaccttttgagaccagggtgagttgggagcagtttgcctaccttcttttagaatctggggcttatcttttagtacaagccattgaataagcctcttccttttttttgctcaaacattccacatccttgtggattcccctgcattgtttgttttatataacatttgatatttgttgtagcttgtatatgaacataattttctttagaggtagtcactgttctctccagtatgacccaggtttcttgactctgagtaatgcaccttctataactatctaaatttctattgaagctttttggattatgagtatgctgacttttcacgattggctggtgcatgtttagacttaaatgtcatatccttcatgtctcaaagccaaaatagtaacatctcatctcagaacagagctgtgaccacatgccaatatatgtgtcacaaagtctacatatgttacattccttggaagtctccttaaatgtttcacaaaatgtcaacaagcttgttttgttattgatatttccgagattgggcacatttaagacagtaaacgggaaaggtggtgaagatgctataagaagatgctgtatcttgagaattgaaaaatgagaatctgacatggtttgaaaaatcatgaagggtatatataaaggatgcatgtgtaggagccattaaaattcataacagtatgtgccccttcagcgttttaatcttatgaagtggttaagagataagtcttcggagttggacaaaaggatttgaatttaggttctgtggattattatgggtccttgataaattctcaaagcctttttttttgttcatctctaaaataggaatataggattacctaccacattgactcgtaaggactatatgagaccatgtatatagaatgtttaacatagtaccaggctttacaaagaactcaataaatgtttaccattattgaaaaaaaaaaaaa

SEQ ID NO: 21407 - DNA, 960 bp, Homo sapiens
ggtcctgcgggtctcatactggagagagcagtttgcctaccttcttttagaatctggggcttatcttttagtacaagccattgaataagcctcttccttttttttgctcaaacattccacatccttgtggattcccctgcattgtttgttttatataacatttgatatttgttgtagcttgtatatgaacataattttctttagaggtagtcactgttctctccagtatgacccaggtttcttgactctgagtaatgcaccttctataactatctaaatttctattgaagctttttggattatgagtatgctgacttttcacgattggctggtgcatgtttagacttaaatgtcatatccttcatgtctcaaagccaaaatagtaacatctcatctcagaacagagctgtgaccacatgccaatatatgtgtcacaaagtctacatatgttacattccttggaagtctccttaaatgtttcacaaaatgtcaacaagcttgttttgttattgatatttccgagattgggcacatttaagacagtaaacgggaaaggtggtgaagatgctataagaagatgctgtatcttgagaattgaaaaatgagaatctgacatggtttgaaaaatcatgaagggtatatataaaggatgcatgtgtaggagccattaaaattcataacagtatgtgccccttcagcgttttaatcttatgaagtggttaagagataagtcttcggagttggacaaaaggatttgaatttaggttctgtggattattatgggtccttgataaattctcaaagcctttttttttgttcatctctaaaataggaatataggattacctaccacattgactcgtaaggactatatgagaccatgtatatagaatgtttaacatagtaccaggctttacaaagaactcaataaatgtttaccattattgaaaaaaaaaaaaa

SEQ ID NO: 21408 - DNA, 316 bp, Homo sapiens
ataataataataattagccaggtgtggttgtgggcacctgtaatcccagctactcgggagactgaagcaggagaatagcttgaactcaggaggcggaggttgctgtgagctgagattgtgccattgcattccagcctgaacaacaagaatgaaactccatctcaaataaataaataaatagaagtatgtattgtgttgcttagaaggtgtggtggaaattaacttgctgagtgagatcaaaggattggcactgaattgaaataaagaaatattcatgctgagtctggttcaaatataactgcacctgtaagaattg

SEQ ID NO: 21409 - DNA, 334 bp, Homo sapiens
ttgtgtgggaggtgccagcaaaagcttgcaaactctctcaggtttctttgtgtggtcttccctccttcctcctccacaccctgtggtgccaggccccagcgggaagagatgagggaggagcgggctgcctcgcccctttctcccgcctgggaggagccagctggcgtctccgggggcccgggaccgctgcccgcctgcaccaccaggggtcagcagagtgtcgtggctgcagccagtgcaggggagggggctggcgcggttgaggggcatctaggagtggccgggagcatgcctgtgcatttccttattaaattgtttttcgaacttaaagtga

SEQ ID NO: 21410 - DNA, 289 bp, Homo sapiens
tcggtccactccccttcaaaatgagaatctagatactacctcctggggccccagcgggaagagatgagggaggagcgggctgcctcgcccctttctcccgcctgggaggagccagctggcgtctccgggggcccgggaccgctgcccgcctgcaccaccaggggtcagcagagtgtcgtggctgcagccagtgcaggggagggggctggcgcggttgaggggcatctaggagtggccgggagcatgcctgtgcatttccttattaaattgtttttcgaacttaaagtga

SEQ ID NO: 21411 - DNA, 256 bp, Homo sapiens
aacaaggaaaaataaaggcatagctgatcaaataaataagggattgggcagaagttgagagaaggaagggtcacagatttcctcctcttacgtagtgggagtcaggagataccatcgaaaattgacatatcaataaatagaggcatggccaggcacggtggctcatgcctgtaatcccagcactttgggaggccaaggcgggaggattgcttgaggccaggagtttaagactagcctggtaaatatagtgagaccc

SEQ ID NO: 21412 - DNA, 544 bp, Homo sapiens
ttgctttaatagtctagattttaatctgaggcctcaaattctctgatttgtcttatttcctcctaagataatgccatgggtgctttaggggtgcagtgtgtgagagtatgaattttgaagtcatatagacaaaccatagttcaaagcgaagttttgttaatatcttgatgatgttggaaaagtgtgacatgggaatgattaatattaatagcacttcccacataggattgttacagggattcagtgagatgatatttgtgaaaacattaacataggccgggcgcagtggctcacgcctgtaatcccagcactttgggaggccgaggtgggcggatcgcgaggtcaggagatcgagaccatcctggctaacacggtgaaatcccgtctctactaaaaatacaaaaaaaaattagccaggcgtagcggtgggcgcctgtagtcccagctgctggggaggctaaggcagcagaatggcatgaacccgggaggcggagcttgcagtgagccgagattgcgcccactgcactccagcctgggtgacata

SEQ ID NO: 21413 - DNA, 344 bp, Homo sapiens
atagaagtttgaaaagagaccacgtgtgcccagagcatggacaataaagcgagagcacatccgtactaaaaagaagacgattgataggcaggcaggcaggcaggcaggcaggcaggcaggcaggcaaatgtagaaggagccaggcgcagcgtctcacgcctgtaatagcagcagtgtgggcggccgaggcaggcaggcggattgcttgaggacaggagttcgagaccagcgtgggcaacatgatagaaccccgaaacccatctcactcacatacatacatacatacgtacatacatagatacacacacacacacacacacacacacacacacacacacacacac

SEQ ID NO: 21414 - DNA, 259 bp, Homo sapiens
tatttttagtagagatggttttcactctgttggccaggttcgtctcaaactcctgacctcaagtgatccacctgcctcagcctcccaaagtgctggaattacaagcatgagccactgtgcctggccttgtcttctcttaatgtcttttactctgccccatttataatataattttcttaaatatttcctccacatatacagtgttataatttttgcttcagtaattaagcataattacaaactcaagaggataagtaag

SEQ ID NO: 21415 - DNA, 435 bp, Homo sapiens
atgattttttccgtaaatattataagcatttttctacaacatacctagctttttgtgtatgtaatatgaaagtcattgaaatgagatatagacattttatggcttttgaaatctatcaccaaatttagaaaaaataaaataaaaaaatgaaatctattaccaaattgtttgacagaaatttttaaaagtatattattaagctacaatcaactgtaaagtttgctttgttccagataaagcattttatctcatccagtagagaaaccacttatttatttttttggtatgaaatattgtattgggtactttggtgtttagaagattaactgaaatgtcagaaaaatagacagactcttagaaaagtcagattgaagtgagccgacatcacgccaccgcactccagtctgggtgacagagtgagactccatctcaaaa

SEQ ID NO: 21416 - DNA, 4630 bp, Homo sapiens
  misc_feature (928)..(928): n is a, c, g, or t
tgcaaggcctgcagagttagcaccagctccactagggccatagatgccccctcctttgtgcctagctcctgcgaatccaccgagtgcctgagaccatagcttctactgtgcccacccaggcagggaccctcggccccctctcctccatttctgagcccccatggccagatcctgggcagggaaatgatcctttcaggagacaaccagagcccctcaccaggaacgggggcacccgtggactacgggagggtggcggttgggttctctgctccctcccagctcctgaacctggaacaatcggcagaaaacccaggaaccccggcactcctgcattcagcacgggattcccccacccatgcccagaagccctgaccttgctgtttctggaaaaagcatggggtggggcagggagggctggcatttcccccagaagaccttgccctttgacctgcccactctccacactgcctcacctggaaagccatgtcctgctggcctcattccttcctgaagggcctaggagtggggaggcctgggtagggctgccacaggctgggtagagccgccctggcaggaagcagggggtaaggtggccataccagcacatgctgcactaggagcagagccctgcacctgcctagctgccttcctgggagaaacctccctgggagaccatggccccaagccctggcctctagtgatacgcccctcgggaatctcctgttccggggcctgattctcaggaacaccaggtttcagaccatcttcagcacctaatgttgatgggtgtcaaacatctcctggagtggaccaactcgcacccctgcaaagtcggagctgctgagaaggggcagctctgaatagaggggcatctgcctgaacctcacttttcctggggccctctccttgaccccgtagccaccaccanactgcttccagggggtccagctctgcttcccttcccacctgtcctagagtggacagagctttttccttgggttctctcttgcatcactaagttcagcagggaatttgcggaattttcaggaagaactttccccagtaataagggagaacagaaagaaaatcctagaaaatacagagtatccatgctggcagctttttgtacaacacccatagggacccccccaaatagctattacaaaggggcagcccattcactacacaagaaccccacacctggcttccaccctccccagctcctgcacttctccccagagcgggaccctcttacttccccccatgaaggggggcaccttgtgctaaggccaaggctgagcgaggtcccagctcacctccctgcttgatccagattgcactgtgatgagcacattgctgacctaggccagtcctggggcaggcgtgctctctctcccatacataggagtggcctcaaggccacccagtgctgaccccaacagagccctgaactgtccagaaactgcatcctcagcacaggaagtacccacatggacagagggaagcccagcctcggggccggttgcctcctcttctctgggtgttctccagtggcttcttggagcctaggctggtttatctcccctgcctaaaaggccctggggttgccaatgcaaattcattaaaacgaagaccagatatcccagactgcacagaggccgagagaaatggtatagtgcgtgattagcattgctgccctccaacctcctgggattcatgcagataatcaaaaactgactatgactcccaagttctctgaaggatgagatcacaactgacaactcttacgacagagggagagtggtgagagagagaaagagggtactgggctagagccatgttcttcctgccgaggtgccagggggaggcggcagtgggcagggggtgctggggccttacctgtctgccctggtggggatgaaagacaggtgacaggcaggtgccctgtgcacagccttatcattgaaggcaggcccaggacagcctgccccatctgccccagccccatgggatggtttggtccagcctgactggggcaggattagctgcaattcctgccctgtgtgtcgtccagccagactgcctcttgaaagatggcttgtccaagcggcagacagtggtagaacaacccagggcttggaaatctgacctccttgtccatgccaacagcctgggagatgagacagggttagaggaaacagaggcccaggatacggcaggttctgcctgggagtgtacaatggttggagtccagagccaacgatgtggtccccagcggggtgtgcccctcctgctgacgagggtacagatccatacccaggtcaattcctcccgggcccctgtttggaggctgctacagccttgagttccttggagagagaggacacgcctgtggaatgtcaccttcagtcccgtgcaggcaaaaggcccctgcacaccagggccctaggaaagcagcatcaggtgctgggatcccacccagctggcacgggcacgttcttgccctgcacactccatgctgcccttccctaagctcgcaggggcagacaccaagagaagggcgcgtcccctagtcccctgggtgacctgtgtcaggacagcaggcaagaatgaaacgtggccttggctgacgggttggaatatttgtgaccgttcttgtctttctccctcctgcttccccggcaccctagccccatctccaggagcccctcaggcagagtaagtggggagtgtgtccagggatttttttgtgtttaccaaggtcctgctgtgcacttagaatctgtcaccataaatacttatctcgcagttaccccagcaagagggtgttatttcccccattttataaaaggaaattaaggctgggcaaagttaaagacttgcttgtcagtggtcatggctgttgtcttgccacccccagctggggagaaggaagaaaactgggccgggaacccctcccctcagtgtcccccagttctccatctccataaggagccatcaggctgtcattaaggaacagagtgtcactcagggggcactgtcacaaagcagcacccatggcacatgggccgggggtgcagaagcctggcttatttcaggctgacagctggaccctctgggtgcaggggctcaggcagtggccaagagcccaaagggctaaggcccgtgacgaccacccagcccgtcaccccaggtacaaacactgaccccaaagcaagagcagggactgtccctcagccctcagggccttcatgcagggtgcagaatctcatgtccacatggaggtcacccctcaggtcacacccactcccagagcaaccctgggcagggaggggcaccctggggttgtgttgaccacctccccttcaggtgaggcccttttctgccttctttctagccccctgcatggggcacctgctattgctggggctctggggtggaccctgtgtgatttctgtcagggagcttgtgctgtgcatggccagaggtgtttacatccagaagggcccagcacggccctgtggggtgtggggggaatatggtagatcattgtgatgtgcctcggggccctcttgccttggagccagctttgtttcagaatctgctacttgggccctcttcagggtttgaggctggagaagtgagttgggacagtcactgtcatcaccacccaccctgtcacccacctggaaaacattcttgatatactggccatgctgggccgggctcacatccactgagggtatagtgaccaagcgtctaaaccagtcgttctcaaacttcggtgagtatcagaatcacctggaagggcttttacaaacagattgctggccccaccccccagaatttctcatcaggagtgggcaagaccaatcatttgcatttctgacaagttcccaggagctgcagctgctggccctggaaccacactttgagaaccactgctttagaccaaacaccaaaggaagatgcagccaccctcctttacatgtcacaacgctcagggtccatgagtacctcaggctgtccagctgagctccacctgcagcagccgagattcccgactcgctccaccattgggggctaggagtgaagcgtgtcaccatggtcagctcatggccagccaggaaagcctctctgctgtgcgtctgtgcagttcttgttcttccctggaggactcttggatcgcctgtgatcttggccaggagaccaggtgcctgggtcccttcctggaaggggacaagttacacaccccagccccattttcccaccaacttctacatgccttgggagaacctgctacatgttggctgcccccttcccctatttcagcagtgcccagtcctgcttataaacctgaggcctgctccccataccctgccctgtgcaagtgccagccgttattccaggcagcccaatgttgttgaggccagatggattcctggaagcagctggcccatggatgtgagtcatcacagtattctagaaacagagaagaggtcttaacctaatgcgcatagagaaattgttctcattgtaaacatacccctgtccttagctgatctaggtggaagcccagcttcatgtgctagggggcatgataatgataataaaggaattgtatctagga

SEQ ID NO: 21417 - DNA, 886 bp, Homo sapiens
tgcaaggcctgcagagttagcaccagctccactagggccatagatgccccctcctttgtgcctagctcctgcgaatccaccgagtgcctgagaccatagcttctactgtgcccacccaggcagggaccctcggccccctctcctccatttctgagcccccatggccagatcctgggcagggaaatgatcctttcaggagacaaccagagcccctcaccaggaacgggggcacccgtggactacgggagggtggcggttgggttctctgctccctcccagctcctgaacctggaacaatcggcagaaaacccaggaaccccggcactcctgcattcagcacgggattcccccacccatgcccagaagccctgaccttgctgtttctggaaaaagcatggggtggggcagggagggctggcatttcccccagaagaccttgccctttgacctgcccactctccacactgcctcacctggaaagccatgtcctgctggcctcattccttcctgaagggcctaggagtggggaggcctgggtagggctgccacaggctgggtagagccgccctggcaggaagcagggggtaaggtggccataccagcacatgctgcactaggagcagagccctgcacctgcctagctgccttcctgggagaaacctccctgggagaccatggccccaagccctggcctctagtgatacgcccctcgggaatctcctgttccggggcctgattctcaggaacaccaggtttcagaccatcttcagcacctaatgttgatgggtgtcaaacatctcctggagtggaccaactcgcacccctgcaaagtcggagctgctgagaaggggcagctctgaatagaggggcatctgcctgaacctca

SEQ ID NO: 21418 - DNA, 4607 bp, Homo sapiens
  misc_feature (928)..(928): n is a, c, g, or t
tgcaaggcctgcagagttagcaccagctccactagggccatagatgccccctcctttgtgcctagctcctgcgaatccaccgagtgcctgagaccatagcttctactgtgcccacccaggcagggaccctcggccccctctcctccatttctgagcccccatggccagatcctgggcagggaaatgatcctttcaggagacaaccagagcccctcaccaggaacgggggcacccgtggactacgggagggtggcggttgggttctctgctccctcccagctcctgaacctggaacaatcggcagaaaacccaggaaccccggcactcctgcattcagcacgggattcccccacccatgcccagaagccctgaccttgctgtttctggaaaaagcatggggtggggcagggagggctggcatttcccccagaagaccttgccctttgacctgcccactctccacactgcctcacctggaaagccatgtcctgctggcctcattccttcctgaagggcctaggagtggggaggcctgggtagggctgccacaggctgggtagagccgccctggcaggaagcagggggtaaggtggccataccagcacatgctgcactaggagcagagccctgcacctgcctagctgccttcctgggagaaacctccctgggagaccatggccccaagccctggcctctagtgatacgcccctcgggaatctcctgttccggggcctgattctcaggaacaccaggtttcagaccatcttcagcacctaatgttgatgggtgtcaaacatctcctggagtggaccaactcgcacccctgcaaagtcggagctgctgagaaggggcagctctgaatagaggggcatctgcctgaacctcacttttcctggggccctctccttgaccccgtagccaccaccanactgcttccagggggtccagctctgcttcccttcccacctgtcctagagtggacagagctttttccttgggttctctcttgcatcactaagttcagcagggaatttgcggaattttcaggaagaactttccccagtaataagggagaacagaaagaaaatcctagaaaatacagagtatccatgctggcagctttttgtacaacacccatagggacccccccaaatagctattacaaaggggcagcccattcactacacaagaaccccacacctggcttccaccctccccagctcctgcacttctccccagagcgggaccctcttacttccccccatgaaggggggcaccttgtgctaaggccaaggctgagcgaggtcccagctcacctccctgcttgatccagattgcactgtgatgagcacattgctgacctaggccagtcctggggcaggcgtgctctctctcccatacataggagtggcctcaaggccacccagtgctgaccccaacagagccctgaactgtccagaaactgcatcctcagcacaggaagtacccacatggacagagggaagcccagcctcggggccggttgcctcctcttctctgggtgttctccagtggcttcttggagcctaggctggtttatctcccctgcctaaaaggccctggggttgccaatgcaaattcattaaaacgaagaccagatatcccagactgcacagaggccgagagaaatggtatagtgcgtgattagcattgctgccctccaacctcctgggattcatgcagataatcaaaaactgactatgactcccaagttctctgaaggatgagatcacaactgacaactcttacgacagagggagagtggtgagagagagaaagagggtactgggctagagccatgttcttcctgccgaggtgccagggggaggcggcagtgggcagggggtgctggggccttacctgtctgccctggtggggatgaaagacaggtgacaggcaggtgccctgtgcacagccttatcattgaaggcaggcccaggacagcctgccccatctgccccagccccatgggatggtttggtccagcctgactggggcaggattagctgcaattcctgccctgtgtgtcgtccagccagactgcctcttgaaagatggcttgtccaagcggcagacagtggtagaacaacccagggcttggaaatctgacctccttgtccatgccaacagcctgggagatgagacagggttagaggaaacagaggcccaggatacggcaggttctgcctgggagtgtacaatgtggtccccagcggggtgtgcccctcctgctgacgagggtacagatccatacccaggtcaattcctcccgggcccctgtttggaggctgctacagccttgagttccttggagagagaggacacgcctgtggaatgtcaccttcagtcccgtgcaggcaaaaggcccctgcacaccagggccctaggaaagcagcatcaggtgctgggatcccacccagctggcacgggcacgttcttgccctgcacactccatgctgcccttccctaagctcgcaggggcagacaccaagagaagggcgcgtcccctagtcccctgggtgacctgtgtcaggacagcaggcaagaatgaaacgtggccttggctgacgggttggaatatttgtgaccgttcttgtctttctccctcctgcttccccggcaccctagccccatctccaggagcccctcaggcagagtaagtggggagtgtgtccagggatttttttgtgtttaccaaggtcctgctgtgcacttagaatctgtcaccataaatacttatctcgcagttaccccagcaagagggtgttatttcccccattttataaaaggaaattaaggctgggcaaagttaaagacttgcttgtcagtggtcatggctgttgtcttgccacccccagctggggagaaggaagaaaactgggccgggaacccctcccctcagtgtcccccagttctccatctccataaggagccatcaggctgtcattaaggaacagagtgtcactcagggggcactgtcacaaagcagcacccatggcacatgggccgggggtgcagaagcctggcttatttcaggctgacagctggaccctctgggtgcaggggctcaggcagtggccaagagcccaaagggctaaggcccgtgacgaccacccagcccgtcaccccaggtacaaacactgaccccaaagcaagagcagggactgtccctcagccctcagggccttcatgcagggtgcagaatctcatgtccacatggaggtcacccctcaggtcacacccactcccagagcaaccctgggcagggaggggcaccctggggttgtgttgaccacctccccttcaggtgaggcccttttctgccttctttctagccccctgcatggggcacctgctattgctggggctctggggtggaccctgtgtgatttctgtcagggagcttgtgctgtgcatggccagaggtgtttacatccagaagggcccagcacggccctgtggggtgtggggggaatatggtagatcattgtgatgtgcctcggggccctcttgccttggagccagctttgtttcagaatctgctacttgggccctcttcagggtttgaggctggagaagtgagttgggacagtcactgtcatcaccacccaccctgtcacccacctggaaaacattcttgatatactggccatgctgggccgggctcacatccactgagggtatagtgaccaagcgtctaaaccagtcgttctcaaacttcggtgagtatcagaatcacctggaagggcttttacaaacagattgctggccccaccccccagaatttctcatcaggagtgggcaagaccaatcatttgcatttctgacaagttcccaggagctgcagctgctggccctggaaccacactttgagaaccactgctttagaccaaacaccaaaggaagatgcagccaccctcctttacatgtcacaacgctcagggtccatgagtacctcaggctgtccagctgagctccacctgcagcagccgagattcccgactcgctccaccattgggggctaggagtgaagcgtgtcaccatggtcagctcatggccagccaggaaagcctctctgctgtgcgtctgtgcagttcttgttcttccctggaggactcttggatcgcctgtgatcttggccaggagaccaggtgcctgggtcccttcctggaaggggacaagttacacaccccagccccattttcccaccaacttctacatgccttgggagaacctgctacatgttggctgcccccttcccctatttcagcagtgcccagtcctgcttataaacctgaggcctgctccccataccctgccctgtgcaagtgccagccgttattccaggcagcccaatgttgttgaggccagatggattcctggaagcagctggcccatggatgtgagtcatcacagtattctagaaacagagaagaggtcttaacctaatgcgcatagagaaattgttctcattgtaaacatacccctgtccttagctgatctaggtggaagcccagcttcatgtgctagggggcatgataatgataataaaggaattgtatctagga

SEQ ID NO: 21419 - DNA, 2499 bp, Homo sapiens
  misc_feature (928)..(928): n is a, c, g, or t
tgcaaggcctgcagagttagcaccagctccactagggccatagatgccccctcctttgtgcctagctcctgcgaatccaccgagtgcctgagaccatagcttctactgtgcccacccaggcagggaccctcggccccctctcctccatttctgagcccccatggccagatcctgggcagggaaatgatcctttcaggagacaaccagagcccctcaccaggaacgggggcacccgtggactacgggagggtggcggttgggttctctgctccctcccagctcctgaacctggaacaatcggcagaaaacccaggaaccccggcactcctgcattcagcacgggattcccccacccatgcccagaagccctgaccttgctgtttctggaaaaagcatggggtggggcagggagggctggcatttcccccagaagaccttgccctttgacctgcccactctccacactgcctcacctggaaagccatgtcctgctggcctcattccttcctgaagggcctaggagtggggaggcctgggtagggctgccacaggctgggtagagccgccctggcaggaagcagggggtaaggtggccataccagcacatgctgcactaggagcagagccctgcacctgcctagctgccttcctgggagaaacctccctgggagaccatggccccaagccctggcctctagtgatacgcccctcgggaatctcctgttccggggcctgattctcaggaacaccaggtttcagaccatcttcagcacctaatgttgatgggtgtcaaacatctcctggagtggaccaactcgcacccctgcaaagtcggagctgctgagaaggggcagctctgaatagaggggcatctgcctgaacctcacttttcctggggccctctccttgaccccgtagccaccaccanactgcttccagggggtccagctctgcttcccttcccacctgtcctagagtggacagagctttttccttgggttctctcttgcatcactaagttcagcagggaatttgcggaattttcaggaagaactttccccagtaataagggagaacagaaagaaaatcctagaaaatacagagtatccatgctggcagctttttgtacaacacccatagggacccccccaaatagctattacaaaggggcagcccattcactacacaagaaccccacacctggcttccaccctccccagctcctgcacttctccccagagcgggaccctcttacttccccccatgaaggggggcaccttgtgctaaggccaaggctgagcgaggtcccagctcacctccctgcttgatccagattgcactgtgatgagcacattgctgacctaggccagtcctggggcaggcgtgctctctctcccatacataggagtggcctcaaggccacccagtgctgaccccaacagagccctgaactgtccagaaactgcatcctcagcacaggaagtacccacatggacagagggaagcccagcctcggggccggttgcctcctcttctctgggtgttctccagtggcttcttggagcctaggctggtttatctcccctgcctaaaaggccctggggttgccaatgcaaattcattaaaacgaagaccagatatcccagactgcacagaggccgagagaaatggtatagtgcgtgattagcattgctgccctccaacctcctgggattcatgcagataatcaaaaactgactatgactcccaagttctctgaaggatgagatcacaactgacaactcttacgacagagggagagtggtgagagagagaaagagggtactgggctagagccatgttcttcctgccgaggtgccagggggaggcggcagtgggcagggggtgctggggccttacctgtctgccctggtggggatgaaagacaggtgacaggcaggtgccctgtgcacagccttatcattgaaggcaggcccaggacagcctgccccatctgccccagccccatgggatggtttggtccagcctgactggggcaggattagctgcaattcctgccctgtgtgtcgtccagccagactgcctcttgaaagatggcttgtccaagcggcagacagtggtagaacaacccagggcttggaaatctgacctccttgtccatgccaacagcctgggagatgagacagggttagaggaaacagcagtgcccagtcctgcttataaacctgaggcctgctccccataccctgccctgtgcaagtgccagccgttattccaggcagcccaatgttgttgaggccagatggattcctggaagcagctggcccatggatgtgagtcatcacagtattctagaaacagagaagaggtcttaacctaatgcgcatagagaaattgttctcattgtaaacatacccctgtccttagctgatctaggtggaagcccagcttcatgtgctagggggcatgataatgataataaaggaattgtatctagga

SEQ ID NO: 21420 - DNA, 432 bp, Homo sapiens
tggtgagtcagctgtttattatcagagagattcataatcaaaagagtcatagagtgggaaaactgacatatttcaacaaatctagtccagaatgttaaatagcacaatgggaaaatgtcaatgaggcacaactaaatgaaaattatctcattgcatacaacctcaatttcaaccattagaaaacactgggttgttttcaaatcacagtgtggtgctacaaagaaagcagttgagtgtttatgtaatacaatattgtgaaagcttgtggaaaacttttcttaaaatttttaaggccttggccaggcgcattggttcacgcctgtaattgagcactttgggaggccgagacgggtggatcacgaggtcaggagattgagaccatcctggctaacacggtgaaaccccatctctactaaaaatacaaaaaaaaat

SEQ ID NO: 21421 - DNA, 378 bp, Homo sapiens
gtcaggagatcgagaccatcctggccaacatggtgaaaccctgtctctactgaaaacgcaaaaattagctgggcgtggtggcgcacgcttgtaatcccagctacttgggaggctgacgcaggagagtctcttgaacctgggaggtggaggttgcagtgagccaagatcacgccactgcactccagcctggcaacagagcaagactctgtctcaaaaaaagaaaggaaagaacagtgaagttctctgcccttgtatgattccatgataattacaagtgtgtctatccccaaagtttctatgttaatacctctctacttccagttcttagaagggaagaatgaaacaggaaaacttcggctgcttctacttatccagttt

SEQ ID NO: 21422 - DNA, 117 bp, Homo sapiens
gaaacacagccataaatgttacagatgctccttgactaatgatggggttgcatttcaataatgccatcataagttgaaaataccgtaaatggaaagtgcatttaatacatctaacct

SEQ ID NO: 21423 - DNA, 193 bp, Homo sapiens
taatatataatattatatatacatatgtatgtatgatgcttttcatccccaccctttcccacatctcaggaacctgtcagcaacttatccagtttaaagctgctgttcctctacctcagtggtttgggagaacatggtcattatttcactcattctttacttcctgtctcttctaggattggaatgggggagg

SEQ ID NO: 21424 - DNA, 492 bp, Homo sapiens
ttgagagatcttaccgatgttcttggcttccattacatctatgtgctgatgaatcccaaacctctgcatctctccacctaggatgcctctacttcattgtcttgcccctttaagctgagcccacccagctcaaatctacactgtctgttctcatccctgtcaatgcactctccagcttggggcaggtggagggggcactgtttcatgaggaaagctaatggtatgcagaagggattgaataaaagaaaggaagagaatggagaacatccgcttggctggggctcaatatccaagcatgccaagatgaaagtggagcagggtgcggccttgggaaggagacgtgaatgaactgctgacattccttgaggacaagaggccaaagcctgctggctctaaaactagtatgtttaaagcaaattattagttttgctcaaagtgccactgacatcataaaagaataagatatacctggccaagaccccacctcttaaa

SEQ ID NO: 21425 - DNA, 375 bp, Homo sapiens
caagtttgagaacactggatgcaagcattttccatacagagaagagaggaaggagcattgcacaccattgaaaaagtatcccccaaatcagaggaaaggtcatttgtagcattctgtgaagtttgtcatggcttgaacttaaagtaagttgaacatagtaagctgactatactaggaatttcccccaaattttgctcagatccatgtatttttattgttccggaaagcttaatctttcccttttaggtcattggatcattaattacatttaaagaaaaagctttgtgtttggttgtatttatttatttttctgaaaattaaattatgaagttggctgaacacttttttttataattggaatgttataactagaag

SEQ ID NO: 21426 - DNA, 448 bp, Homo sapiens
gttggctggctgatctttggtctttgttccaccactgaggatgtggagggaaggaattgttgtcttgttttgctccttctgtttggatgcttccaatagtatgtgacatgtactaggtgctcagtaaatatttgatgagtggattatactgcttccttcctgaaccaatatagtgaacctgagtcctccctattacttcctacttttgtattttctaatgtatacaaaaggaaggccaggcatggtggcttacgcctgtaatcccagcactttgggaggtggaggcggatggatcactcaaggtcaggagttcgagaccaacctggccaacatgatgaaaccccatctctactaaaaatacagaaattagccgggcgggcgaaggttgcagtgagctgagatggtgccactgcactccagcctgacaacagagcgagactttgtcaca

SEQ ID NO: 21427 - DNA, 1030 bp, Homo sapiens
gcatatggctatagtttttgttactgtgtttattattaacataccaccactatgtatttcttccatgaaggcatttggatcattctaccttttttgctattttgaacaaagccattatgaacattcttgtgtatatatgtcaggttgtacatgtgtatgatctcttgagaatacatccagcaatggaattggtgggtcataggatatgtatatcttcaaattaactaggtaatacctaacttttccaaagtaattagtgctttcaccagcagcattaaaaggttccacatttggtattgttagactaaaactttggaaaatctaggcttgtaatggtacctcgttgcttaatttgcatttccatgaggttaattattttttctacaaatttatttaccatttggatttcccctttttgcaaagttgctgtttaaatcatttgcccatttttaaaaattttattgactttttggttaataaaattccttcatatactgagactacttaatcatttggtaataactatttcaaatatcttctcacagttatttatcgttctgctcctagtgaaatgtatccatctttttctctattttttggtgtttttgtgtcttatttaaaaaatacttccctctccttaggtcatgaatatcttctgtactgtgttctaaaatatgtgtagttttgtcttccactcaaattgaattttgttttgtgggtgaggtaggtatccaggttctttttttttcccttgtttcttgaaaagtcatctttctcatttggttgaacatgccatttctgtcatctgtgaaatgctcatatttacatgagtctatttctgggctctcttttattccattgatcaatttgcccatatatcagtaacacactgtcttaactactaaagcttttaaaagtcttgatatttggtaaaataagtctttttataccttgttcttcaagattttggctgtgatcagttctttgcacttttatacaaattttagaatttcaacaaaacaaaattgtt

SEQ ID NO: 21428 - DNA, 1020 bp, Homo sapiens
aacttggtgcgagcaacacagaagtttgtctgaaggcggcgccaagcagcgtttcgtgggagaactgggttgatgactgaaattttgaggaagattactttgggaattctcaagtttctcttagtcgcttcttgtctatttgaaatctgtaactttaaacaaaccacgcttactcttccttattctccctgtaaggtacaattagaatagaaaagtttatgaaagtgtatccaaaacttaaatatgtggcgtacaagtgtatggtattattggaatggcattcgcgatcctagagtctacagtgttccctgaataaaactaggggtgagcctggcggtaatcctgcctaggaggtttatagcaaagcagtgtcccctaacggtgcaagaatacccttctgtcgaaaaactgccttataggaatgggtgactgtatgcggtatgtcctgtactgtacatcaataaataactaagccaggccagaaaaagggtgacaaaaggtccacaattatgttaaggaagaccaagacggtatatttgaagttttgtgtatacagaacatttgcccaaatgtaactaatttttttaaagggagattataagcatctcctgtggtccaaacatagttgttaaaatgggttaaaatcggtgaagtgcctaagaacttgactgagacatggtgtttgttaaatacagtatactatctattcagtaaaaatagatcaatatggcatgtatttatcaagtgaatttcatttttctgttggtagacattcaagttattttcaagatatccctataactgacaatactgcagtgattatctcttgctgttataaacagtgcttcaggtggtcatgatagtatttctgtagaattgactccttatgagagtgctggataaccatgttgctaaattgccctgaaatgattgtacctttttatgttcactcgctcaaaagatgtgtttttatctccatgctagccagcactggatgataatggtatttttaaaatatct

SEQ ID NO: 21429 - DNA, 290 bp, Homo sapiens
aaatacaaaaaattagccaggcgaggtggcgggcacctgtaatcccagctactcagaaggccgaggcaggagagtctcttgaacccaggcggcggaggttgcagtgagctaggatcatgccactgcactatagcctgggcaacagagggagacttcgtctcaaaaatcaaacacacaaacaaaacaaaataagggttaatgggctctgcatgagtccttaagagcctctctatgagtaaggagaataaactttctaataagcatttcatgacattttttatggcccttca

SEQ ID NO: 21430 - DNA, 455 bp, Homo sapiens
tcagatcacttacaaaggaaacaccattaggttaatagtaaatgcctcaacaaaaacctcagaagccagaagagatggaggacctattttcagtgatcttaaagaaaagaaattccaaccaagaatttcatatcctaccaaataaaacctcataagcaaaggagatataaaatctttcttagacaagcaatcactaggggaatttatttcctctaacctgccttaaaagaggtccttaagagagtgataagcatggaaatgaaagaacaatacctgccaccacaaacacatttaagtacacagcctactgacaccataagacaacctcataatccagtgaacaaaatatacagttaacaacatgaggaaagtctcaaaatctaggatatcaacattaaccttgaatgtaagtggtctaaacatccaacttaaaaagttatgaagtggtaacttgg

SEQ ID NO: 21431 - DNA, 401 bp, Homo sapiens
tccttgacgctggggaccaggaacttccggaagccactgggcagcatgtgctttgttttttgttgctcccatgaccagtgttgggcatcaagatctggcccttgcaggcgcggtggctcatgtctgtaatcccagcactttgggaggctgaggagggtggatcacctgaggtcaggagtttgagaccagcctggccaacatggtgaaaccccgtctctaataaaaatacaaaaactagccaggcatggtggtgggagcctgtaatcccagctactctggaggctgaggcatgagaattgcttcaacccggaaggcggaggttgcagtgagctgagatcgcaccactgcactgcagcctgcacaacagagtgagactctgtctcaaaaaagaaaaaaaaata

SEQ ID NO: 21432 - DNA, 497 bp, Homo sapiens
tccaaaatcagcacctttgaaatagaagatataatgcataagacagaacagacttcagatacctctaagaaacttgtgtaattggtctttatagctttttacagatgacgaaaattatgaatataaagactgtcttctttgggaaaatacatgtccaacagttgaagtaatccctaaaccttatcttgtctttttctttcctgacctaacttaacaataacaaaccttgagctcttatatcccagcaaagggatgttatgcagaagttactttagatatccacccagttttgctgttggctatgaattgtgacaagtgcttcagtacattgtcctacaccaccaggcgcttgagtcctagatttaaaaaaagcaccataagcaatggataattgtttactctgatggaatggcttcaaaattgtagcctttataatttttagtcatgtagctacaaaataatatccccaaagaatactattcccattccatgtttaa

SEQ ID NO: 21433 - DNA, 2465 bp, Homo sapiens
  misc_feature (80)..(80): n is a, c, g, or t
tgcatctttatgataagtggatcaaagatgctgatccaagagttgaagattggctcctcatgtcctcgcctctgccacanaccatcctcctaggattctatgtctattttgtcacttccttgggaccaaagctcatggaaaatcgcaagccctttgaactcaagaaagcaatgataacgtacaattttttcatagtactcttttctgtgtatatgtgttatgagtttgtgatgtctggctggggtataggttattcatttcgatgtgacattgttgactattcacggtcacccacagctttgaggatggcacgtacctgctggctttattacttctccaaatttattgagctattagatacgatcttttttgttctgcgcaagaaaaatagccaagtgactttccttcatgtattccatcataccatcatgccgtggacctggtggtttggagtcaaatttgctgcaggtggtttgggaacattccatgcccttctaaatacagctgtacatgtagtcatgtattcctactatggactttctgcattggggccagcctaccagaagtatttgtggtggaaaaaatatttgacatcattacagcttgtccagtttgttattgtcgccatccacataagccagttctttttcatggaggattgcaagtatcagtttccagtctttgcgtgcatcattatgagttacagtttcatgtttctgctgctctttctccatttttggtaccgtgcttacaccaaaggtcagaggttgcccaaaactgtgaaaaatggaacttgcaaaaacaaagataattgaagcccaacataagtctatgatcgaaactgatacattgtcttccttgacaatcaagagatatttacctatgcagtgcattttgtatatttttcaaaactaagagcttgtatttttatggtaagttattgggatgtctgatatttgagagcccgaagcttccagataacagtcttctgataattagagcctacagcagccagaatttgtttttgtttttgtttttgtttttttagctgcttttaaacctaatccaaaggttttgtttaaaacattttgttgcagtgaaaaaaagatatgaagcaatacagtactcttcaaagaagtccaataaagatgaaaaatatcattaggtattttgagcacagacggagatccatgtgataaaatagattccttctgctgggtctggaaagtctggaaaccacctgtaggccctggctttgtcatttattgactgtattcagaagatactatatttgctctagagttaactcccattttagcaagctagcacaggtgaaaattgagtgagtttttgataacttgtcatttaaaatcattaatgataattttcaatggatcttttcagtagccatcaccagttttgctgataagacttcctcacaacccatttgttgtacaaactgtttcaaagtagcaatcctttgggttagtacacttgataccaagtttcattcagttgattattttcaaaacaaggtgatttgttttaatgggttaatgaatactttgctattactgttttacaattaactttgtatatctctggaaagaggtgaatttgtcaatgaaaaaagtattgtgtagttcagtgggaaaaacctgttgtctgttatagtatcacatcactttcttacattgtcatggtttaaattattatcttggtgaaatatataggttagatacttaaatgttcatattattagcacactacaggtactacccttaaatcataaataatattacccattgtacacagtttccagatatgagttagagtggctgtgaagcaactagaggcaaattgtggcacagagaatatccaggggaaaattgattatgtaagcaagggctgttctactttgagagagagacagacagactacataatagtaatatattatataattaatgttatagatacactgaacaataaaacattttctggaattatgaattaattaacaacctggatttctgtttccagacctataaaccatgtaatgaaggactgaaattcgtttggcatacactttgtttctttaaaattgctagtttctttctgttatttttacattttcttgtcagagaatcaaaactattagtcagtagagttttgtccatgaaataatatttggacatttgtgaatttttccctattttttttcttcttttatttatactcaattttgaagcactgtttatgtttgtaggactttaaacaattagtacttaaagccccagttaattttgaacacacagagatacttattgtactctgtgtacagtaagtatttttatgtttacacttaccagattcataaggttatttgcctttaagtgatcttttgtgattttacttgattacagcatgagaaggtaaaggttgataaatgggagtaattacat

SEQ ID NO: 21434 - DNA, 3658 bp, Homo sapiens
  misc_feature (80)..(80): n is a, c, g, or t
tgcatctttatgataagtggatcaaagatgctgatccaagagttgaagattggctcctcatgtcctcgcctctgccacanaccatcctcctaggattctatgtctattttgtcacttccttgggaccaaagctcatggaaaatcgcaagccctttgaactcaagaaagcaatgataacgtacaattttttcatagtactcttttctgtgtatatgtgttatgagtttgtgatgtctggctggggtataggttattcatttcgatgtgacattgttgactattcacggtcacccacagctttgaggatggcacgtacctgctggctttattacttctccaaatttattgagctattagatacgatcttttttgttctgcgcaagaaaaatagccaagtgactttccttcatgtattccatcataccatcatgccgtggacctggtggtttggagtcaaatttgctgcaggtggtttgggaacattccatgcccttctaaatacagctgtacatgtagtcatgtattcctactatggactttctgcattggggccagcctaccagaagtatttgtggtggaaaaaatatttgacatcattacagcttgtccagtttgttattgtcgccatccacataagccagttctttttcatggaggattgcaagtatcagtttccagtctttgcgtgcatcattatgagttacagtttcatgtttctgctgctctttctccatttttggtaccgtgcttacaccaaaggtcagaggttgcccaaaactgtgaaaaatggaacttgcaaaaacaaagataattgaagcccaacataagtctatgatcgaaactgatacattgtcttccttgacaatcaagagatatttacctatgcagtgcattttgtatatttttcaaaactaagagcttgtatttttatggtaagttattgggatgtctgatatttgagagcccgaagcttccagataacagtcttctgataattagagcctacagcagccagaatttgtttttgtttttgtttttgtttttttagctgcttttaaacctaatccaaaggttttgtttaaaacattttgttgcagtgaaaaaaagatatgaagcaatacagtactcttcaaagaagtccaataaagatgaaaaatatcattaggtattttgagcacagacggagatccatgtgataaaatagattccttctgctgggtctggaaagtctggaaaccacctgtaggccctggctttgtcatttattgactgtattcagaagatactatatttgctctagagttaactcccattttagcaagctagcacaggtgaaaattgagtgagtttttgataacttgtcatttaaaatcattaatgataattttcaatggatcttttcagtagccatcaccagttttgctgataagacttcctcacaacccatttgttgtacaaactgtttcaaagtagcaatcctttgggttagtacacttgataccaagtttcattcagttgattattttcaaaacaaggtgatttgttttaatgggttaatgaatactttgctattactgttttacaattaactttgtatatctctggaaagaggtgaatttgtcaatgaaaaaagtattgtgtagttcagtgggaaaaacctgttgtctgttatagtatcacatcactttcttacattgtcatggtttaaattattatcttggtgaaatatataggttagatacttaaatgttcatattattagcacactacaggtactacccttaaatcataaataatattacccattgtacacagtttccagatatgagttagagtggctgtgaagcaactagaggcaaattgtggcacagagaatatccaggggaaaattgattatgtaagcaagggctgttctactttgagagagagacagacagactacataatagtaatatattatataattaatgttatagatacactgaacaataaaacattttctggaattatgaattaattaacaacctggatttctgtttccagacctataaaccatgtaatgaaggactgaaattcgtttggcatacactttgtttctttaaaattgctagtttctttctgttatttttacattttcttgtcagagaatcaaaactattagtcagtagagttttgtccatgaaataatatttggacatttgtgaatttttccctattttttttcttcttttatttatactcaattttgaagcactgtttatgtttgtaggactttaaacaattagtacttaaagccccagttaattttgaacacacagagatacttattgtactctgtgtacagtaagtatttttatgtttacacttaccagattcataaggttatttgcctttaagtgatcttttgtgattttacttgattacagcatgagaaggtaaaggttgataaatgggagtaattacatatatatatataatttattatttttttttctgaagcagagttttactcttgttgcccaggctagagtgcaatggcacaatctcggttcactgcaacctctgcctcccaggttcaagtgattctcctgtctcagcctcccaagtagctgggattacaggtgcccgccaccatgctcagctaatttttgtatttttagtagagacagggttggccaggctggtctcgagctcctgacctcaggtgatcctcccacctcggcctcccaaagttctgggattacaggggtgagccactgtgcccggccataattttatatttttagaaaataaagaatgaaggacaaaagagcacagctaaatgaaactgctgctctaatttattccactggaaaggtctcaggactccttaactgttttccaggtttggctcttcatatctaacctgtgctaaaatgagaaggtatgctaggtgctgttagaaatcacaccatttccaaagaacccaagtagtatagagaccaaaatgaggcaaaaataaaagagatgaaacaggagagtttatttcttgcatactttccgaccttcatcatacaacctctcctaacctccctgtagtctttaaaatgtttaacttgcctataagctaacatgtaataaaacacatactcaattatatgaatagaagtggagagccagaatgctacaaaagaaatcacagctgctagaagtatcctccatagaaacatcaacatgattgtggatcaaaatgattttcactggatatggaatttgtatgggccatatttattaaaagagttctgtgtggtcacatagagttcctttgggatttcatcccacttttcaggacttaatttgtttgggtttgcttacctaacaagcaacaacaacaacaaaataaatagttccaaaatctagtttattacataaatctctatgaatccttgagggcctatatctatattataaataaatacaaatatagatttttaaatatctatgggactttgccatttacagccttaagtataaaattacgagattatattctttccattaccctttatttctgctaactttttaaagactggaacattctgtggatgttgtcaaagtttgagtttgtttttccctgtgtattataataaatttgtggtattgcatgtaaaaaaaaaaa

SEQ ID NO: 21435 - DNA, 3362 bp, Homo sapiens
  misc_feature (80)..(80): n is a, c, g, or t
tgcatctttatgataagtggatcaaagatgctgatccaagagttgaagattggctcctcatgtcctcgcctctgccacanaccatcctcctaggattctatgtctattttgtcacttccttgggaccaaagctcatggaaaatcgcaagccctttgaactcaagaaagcaatgataacgtacaattttttcatagtactcttttctgtgtatatgtgttatgagtttgtgatgtctggctggggtataggttattcatttcgatgtgacattgttgactattcacggtcacccacagctttgaggatggcacgtacctgctggctttattacttctccaaatttattgagctattagatacgatcttttttgttctgcgcaagaaaaatagccaagtgactttccttcatgtattccatcataccatcatgccgtggacctggtggtttggagtcaaatttgctgcaggtggtttgggaacattccatgcccttctaaatacagctgtacatgtagtcatgtattcctactatggactttctgcattggggccagcctaccagaagtatttgtggtggaaaaaatatttgacatcattacagcttgtccagtttgttattgtcgccatccacataagccagttctttttcatggaggattgcaagtatcagtttccagtctttgcgtgcatcattatgagttacagtttcatgtttctgctgctctttctccatttttggtaccgtgcttacaccaaaggtcagaggttgcccaaaactgtgaaaaatggaacttgcaaaaacaaagataattgaagcccaacataagtctatgatcgaaactgatacattgtcttccttgacaatcaagagatatttacctatgcagtgcattttgtatatttttcaaaactaagagcttgtatttttatggtaagttattgggatgtctgatatttgagagcccgaagcttccagataacagtcttctgataattagagcctacagcagccagaatttgtttttgtttttgtttttgtttttttagctgcttttaaacctaatccaaaggttttgtttaaaacattttgttgcagtgaaaaaaagatatgaagcaatacagtactcttcaaagaagtccaataaagatgaaaaatatcattaggtattttgagcacagacggagatccatgtgataaaatagattccttctgctgggtctggaaagtctggaaaccacctgtaggccctggctttgtcatttattgactgtattcagaagatactatatttgctctagagttaactcccattttagcaagctagcacaggtgaaaattgagtgagtttttgataacttgtcatttaaaatcattaatgataattttcaatggatcttttcagtagccatcaccagttttgctgataagacttcctcacaacccatttgttgtacaaactgtttcaaagtagcaatcctttgggttagtacacttgataccaagtttcattcagttgattattttcaaaacaaggtgatttgttttaatgggttaatgaatactttgctattactgttttacaattaactttgtatatctctggaaagaggtgaatttgtcaatgaaaaaagtattgtgtagttcagtgggaaaaacctgttgtctgttatagtatcacatcactttcttacattgtcatggtttaaattattatcttggtgaaatatataggttagatacttaaatgttcatattattagcacactacaggtactacccttaaatcataaataatattacccattgtacacagtttccagatatgagttagagtggctgtgaagcaactagaggcaaattgtggcacagagaatatccaggggaaaattgattatgtaagcaagggctgttctactttgagagagagacagacagactacataatagtaatatattatataattaatgttatagatacactgaacaataaaacattttctggaattatgaattaattaacaacctggatttctgtttccagacctataaaccatgtaatgaaggactgaaattcgtttggcatacactttgtttctttaaaattgctagtttctttctgttatttttacattttcttgtcagagaatcaaaactattagtcagtagagttttgtccatgaaataatatttggacatttgtgaatttttccctattttttttcttcttttatttatactcaattttgaagcactgtttatgtttgtaggactttaaacaattagtacttaaagccccagttaattttgaacacacagagatacttattgtactctgtgtacagtaagtatttttatgtttacacttaccagattcataaggttatttgcctttaagtgatcttttgtgattttacttgattacagcatgagaaggtaaaggttgataaatgggagtaattacatatatatatataatttattatttttttttctgaagcagagttttactcttgttgcccaggctagagtgcaatggcacaatctcggttcactgcaacctctgcctcccaggttcaagtgattctcctgtctcagcctcccaagtagctgggattacaggtgcccgccaccatgctcagctaatttttgtatttttagtagagacagggttggccaggctggtctcgagctcctgacctcaggtgatcctcccacctcggcctcccaaagttctgggattacaggggtgagccactgtgcccggccataattttatatttttagaaaataaagaatgaaggacaaaagagcacagctaaatgaaactgctgctctaatttattccactggaaaggtctcaggactccttaactgttttccaggtttggctcttcatatctaacctgtgctaaaatgagaaggtatgctaggtgctgttagaaatcacaccatttccaaagaacccaagtagtatagagaccaaaatgaggcaaaaataaaagagatgaaacaggagagtttatttcttgcatactttccgaccttcatcatacaacctctcctaacctccctgtagtctttaaaatgtttaacttgcctataagctaacatgtaataaaacacatactcaattatatgaatagaagtggagagccagaatgctacaaaagaaatcacagctgctagaagtatcctccatagaaacatcaacatgattgtggatcaaaatgattttcactggatatggaatttgtatgggccatatttattaaaagagttctggctctccacttctattcatataattgagtatgtgttttattacatgttagcttataggcaagttaaacattttaagtc

SEQ ID NO: 21436 - DNA, 453 bp, Homo sapiens
atgaaatttttaagaaatagtttgtggtgatataaattagttttcatctggcagtcattggttttccaccctgccctcttaagagagaacagggttgctttactttgtttgccagagctttacattttgcatttagtaacagaggcattgtgtttttatagtatgaaaacaacgaaagatcactttgtgatctttactttttgattttgaccacttcctgtgtaaccttaagtttcttacaagtatcccctgttaactgttaaaaacgaaatgtatgttcatttcatgtccttgggacttttaaaaatgcgctgtgcattatccggaaaagcctgttcaaaaacaagatgagataatttctgtttaatttgtggtagaaagaatgactgtgcacttttatgtgcaaaggttttaagtataataattaaaatagtacttgtttactcagttacc

SEQ ID NO: 21437 - DNA, 442 bp, Homo sapiens
gagtaagtttgctatgtattaatatatgataaagtactgtacaggctaatgctgtctggtatcaaaaggtactttcaaaagttttttaaagctataaatagatataaatcatagcttaatcaggtctcagctacagattttcattttattggccctttccagaatgatctgaatcccatcttgagagcaagtctttagacttttaagctagttactgtcatatggtattgctctcttgtccaggcttcttcccatcccagccacaggaaatcttttcatttctcttggattgtgagcattagtgagaagaatgggctgtctagtacagtacatcaattgaaaaggtcttgtctggttttgtacggtaacatccattctcccctctgcctcccaagccaagctagcccttctgttttcctctctctcaatatgatgaatatgg

SEQ ID NO: 21438 - DNA, 503 bp, Homo sapiens
gagataagtataggcacagagcaatttatatgagttgattatagtgcattttactataattccatggtaaaaaagcctgattagaatcacatattcactgtagcacctattttctgacacagttcagtatcatgcaggttccttagaaattgtcggagggaatgtaattatccaaaaatgctgaaattacttgttgtaaactagcctatgtgttatggatccatggcttatactaaaagccagttttcaggtagagttgaatgtagctagagctgctgcccccaatgtgacatcaacatttactgaattcatacaaagatgtgtgattttttttttccacaatgttgggattatacttctaatttgccaaagaaatagctaagctttctagagtatggagtctgtccagataatcttggtatagtctccttttttggagggtgtgtggtagcgggggaatcatgtggtccctggaactctgtatgcaattatttgctctgctg

SEQ ID NO: 21439 - DNA, 369 bp, Homo sapiens
ctccagctgcctagttgtagttgacagacaactttataagctctagtcaaccctattgactaagcttctgaaccactagcatagttctagggtcaggcggatgcctactgtgggcaggaaagtgatgcatgcatgtgtgggagcagtgtcttaatgtctgaaatagtagccatgagctacatgtggctatggagcacttgaaatgtgggagtccaaattatcatgtgctgtgagtgtaaaataatatgtttctaagaccgtgtgtgaaagaatataaaatatctcattaaaaaatgtttatattgagtacatgttgaaataattttatatttgtgacacattgtgttaaataaaatattaaaatttaca

SEQ ID NO: 21440 - DNA, 528 bp, Homo sapiens
ggagaatcttgcagagtgctttctttctaggcccctctgcaaacgtcttcattcattcatcctttcccctcactctcttccttttttttaattttttttctttcttcacctatttattgggcgcctactttgtaccaggcatcgtgctaatctctggttagcagaaaacatgctgactcttgctctcttggcgcctaccgtctggtgatggggtccaaggtgcttcactgactggaccaaaagtttaccgaacttctttttttcttatttgtggcaggcactgtgttatgcccagaagggggtgcttggggaacatagaaaataagggaaaaaaaaagagagagaaaagcactgcgaagaggataaaataccctatggatagggatgggaatagggctattttagaaatatttgcattttccgaaatactgttttataataagaataacattaagtgtacctatttgctaattttgtgatgattatataagaaaagcctgggcaacagaaccagaccctatttcaaaa

SEQ ID NO: 21441 - DNA, 395 bp, Homo sapiens
tgacaagctgcacgttttaccaaaaaaaaaaaaaaagcttgcaatagaaagaataatatctgcagggcaggtatggggatccaccatcttaagtccttttatccctaccaaatgtttccttctgagaaactgcatttgtcagctcagctctctcaacctctgggagtaggtttacatatatttgctcacttgatatatggctgataggaactgagcaagtaaaattttcatttcattgaattttaattaatttacatttaaattgctacatgggattagtggttccatactagacagtgaagctagcctgtacttgttaaaaagaacccaatgagtgaaatgaacaaagtaaacatagcacatttctaatgaagcacataaaataatgagtggcc

SEQ ID NO: 21442 - DNA, 1169 bp, Homo sapiens
ttacccacagtgtgttatctaatgcctttcaaactaggggaaaaaaatcagtgaacattatggtagatgctaaaatctgccattttcttgtatatttctgacagtttcagttactttgcatttgtattatacaatgactaacatcagccttttaccattctttcctctggtatttttcagtaacaaatagtgaatgtatttagagataaaaataattttgtgaccaaatgtgttcttgtagagtgcgttattttcccctattttctctgtggtattgcaaacagtcatggtgagtgctgcaggttatatgaggataagtaagacttggtacagaaatgtccagaatactcaaaactggaaaaaagtgatccctgatagttaaatggtcaagataggcttcctgaaggtgatggtgtttagccagtcctggaaggaatgcgcaatacaatttcaacaggtagaaataagatgattaagggtaaaataagaaaggggaagattagtgcatcatatagagcaggactgttgagcaagagtgtagaccacaagttgagggtatgctaggaaataaggctagaaaagaaggttgagatcagattatggagattcttattaatactaaactaagcagtttagcttatttctggtaggcattggggtgccgctggagagagcagggaaggaatatatgatgctaactaaggttattttgacaatgctgtaattgaaagtgaggaagagagacactttactacaggtaataatttaaaggccttccatgtacagtcattgtgccagaaacttagggataaaaagatgaatataatacaatgccacacctttggtcttgtagtctataatggaaaggctaaatggttaaatagattattatactgaaatgtggtaaatacgttgaaaggttttagtgtcttttttttttttttttaagacagagtcttgctctgtctgttggcctggctggaatgcagtggtttgatctcacctcactgcaacctccacctcctgggctcaagctattctcatgcctcagcctcctgagtagctgggattacaggagaattgcttgaatccaggaggcggatgttgcagtgagttgagatcatgctactgcactccagcctgggcaacagagtgagactctgtctcaa

SEQ ID NO: 21443 - DNA, 369 bp, Homo sapiens
ttttttttttgagacagagtctcactctgttgcccagcatggagtgcaatggcacgatctcaggtcactgcaacctctgccccctgggctcatgagagtctcccacctcagcctcccaattagctggggctacaggtgtgtgccaccacacccggctatttttttgtatttttagtaggtatggggtttcaccatgttggccaggctggtcttgaactcttgacctcaagtgatccacccactttggcttcccaaagtgctgggattacaggtgtgagccaccatgcccggccataaatttcttaatgttgaaccaaccttgtaatcacgggaaaaattatacttggtgatagggtttggctgtgtccc

SEQ ID NO: 21444 - DNA, 395 bp, Homo sapiens
caaccagaggagaagtcagaacattaccagtatttccaggaaggtggggccagcgggttggtccctgactgtgtgtgagctgagcatgacagcctcgggaagttgatatggagcatgcattagattcagctcactctcaaaaaaagttgtaagtgccaaaacagatgattaatttgctggcatctgaaaaagaggagcggcatgtttgctgcctggcacatatcacttggacctattccttatttgtgactctgatcctgagagaaatttcaaggaaacgtatgtcttcgggaactttagaaagcttgggaaagaggatgaagatgatgactaacattgactggcacctactattgctggccagcatataaggaactttatcttcattatttcat

SEQ ID NO: 21445 - DNA, 491 bp, Homo sapiens
gtaagcactaacagatgccaagtgaacctgactccagaggttattctgcaatttaggctctttttttagagggctcgtgggttatttcagcaatctaatctctggtctgatgcgtcctttccgttttcaccataattaaactactcattggcaagtgaggaaaagagaattgttggatttatgtcaccaacttctatgttaaagaaggaaaatttcaacatagtatagtggcatgagcactaccatcatcagtgtctatcatatttatctattgtgttctgtttctgtttttatcatatttattgtgttatctattatgttgttccctttccttcaaagatttcagggtgtcatatattatacaagagcaaagtggcaaatttaaacccgttttcaggtagggaaaactgagaatgtaaaaatagaaagtgagtcagtacactaattctgtgaaacagagaattcccttttaatcttttttactacgttgg

SEQ ID NO: 21446 - DNA, 538 bp, Homo sapiens
ggagacacaatctcgttacccaggctggggtgcagtagtgtgatcatagctcactgtaatctcaaattcctggactcaagggatcctcccacctcagcctccttgagtagagagacagagtgagaccctgtctcaaaacaaacaaacaaacaaaatcacactctttatccactgcaaaacagtgtaagaaaataactctggccagaggtaccacagtgtgcagggaaggtgtgcgaaagttctgacccaaatctactcattcctgaaattcttaatagcaatgcagggtagaacacaagaaaattaagtagaatacagggagccatgctagtttttgttctacaaacataagagaaggaaatctctgaaaagtattcacatcaattaagagattttttaaaaaccccaaacttaggccaggcgcagtggctcacgcctgtaatcccagtactctgggaggccaaggcgggaggatcacgaggtcaggagatcaagaccatcctggctaacgctagagtagaaaccctatctctactaa

SEQ ID NO: 21447 - DNA, 405 bp, Homo sapiens
tgttctaggtattagacactattctcacgagaaagtgagttagagaaaagaaaatcataaagaagagaaaatatatttgctcatcatgacatggaagcggatcatcttaaaggtcttcattcttgatgtcttcatgtcaagtaggctgaggaggaggaggaagaggagggattggtcttgccatctcaggggtggcagaggcaaaagaaaatccatgcataagtggaccgtgcagttcaaacttgtgttgttcaaggatcaactgtgtaggctttctccttctctagacgggacttcaagatagaatggaccctctgtcatcatttttgcatctccaacagccacaacagtgctttatatataacaaatgaccaataaatgcctatcaaatgcattgaataatgg

SEQ ID NO: 21448 - DNA, 411 bp, Homo sapiens
  misc_feature (362)..(362): n is a, c, g, or t
  misc_feature (397)..(397): n is a, c, g, or t
ctgaccagaaaagggtagaaggattgacgtttacgaagtttttgaatcaggaggcaaggtcgccttgtgcccccaaaaggatagaaaaaggcctggcaaactggagaatcgcgtccttacggtgcctacatatttatagtacgaattaaactgctcaaggggtgctaggtttgtctgcagtccgtttctccctcatggtggaagacgcgtggggaaacttggtatcctgtgttttccagttgaaagcttgtgaaaattcgctttatccttgaagttcagaattttcaccaggatgtatgaagaccctgtcctcgatggatcagctggcaccacccagatggataaactggcttcatctgatncttgtggcccccatccagggaagtgactcagtgtnaagaagacagcttt

SEQ ID NO: 21449 - DNA, 617 bp, Homo sapiens
tgcccatctcatgtggttcagttctaatagcaggtcttcttcttcctttcattccttcctttattcagcaagcatttgttgagcatctactatgtgccaagcattgtgcttgggcaacaacagtccacaaagcagactccccacctgcccttatgaaactgtatctcctcctcccaaacattatcaccaccccaccatttccacaatgaaaactgaattcagacagcattctccattctgccagagtaacctaggaagaagaacatagcagcagacggatcctcagggaggaggcagcagagtgacagatggtaaactgcatcaggccacatatttgcacctttcagatacagccaactcttccagggcctagactgagctggttggagctccccaaagcagcattcagttgcttttccttgatatccaccctggctacctatattccctttctttatataggcacaaccattcaccactacgctggattatctaacactccaattctattaactcatccaggggacacacagttgagtctgatgaagcctaagaactgccaggtgctgagatattgtaactgggaattaagatttagccaaggacattgtgagact

SEQ ID NO: 21450 - DNA, 366 bp, Homo sapiens
gttccgagaagcacgggtgggctgcgaggaggaggtgggctcctctcccttcccctgcccctcttcctccttgttcgtcttgagctccgtcaagtggccccagaagaaccagcagatgcgatggccctgtgcctgtggagcagggggccaggcagcatggctgtgtcacactcagccttgcgcctagagctctgtgactctgggcatgagccactcacgggaatgcaggtggaccctgcctgtttacaagacagtctggtgcgggtattgcaggtattaaagcagaaacatcgtgtaccctctgacccacccgttctccttctcagtctctatatctcaaggagatgtataggatgactactctga

SEQ ID NO: 21451 - DNA, 451 bp, Homo sapiens
ttttacaggctaatacagtcatggatttagtaaaatccagttgaaagatttttaattatataattgtatctaagctgtcctaatatctgaaagaaatttcattctgaataaagaaattgtattctggataaagctcctttcaaacaagatcaagattaaacaaatacaaagagggatgcatttgggcatgcggataaacttccagtttgaggagttttaaatagcaagtaagaaaagagagattggtctttgtaacctccaaaagaacgtggctatattaaaattttcccaataacaaaactgactttaaatacttgccaaaaacagtgactcttttagtcatgagtgtgcttagtttaatcccacacactgatatcacattaagaactgaaggctgaggatatacaggaatcaagggccaatttgggacaacttggccaccacacatctg

SEQ ID NO: 21452 - DNA, 364 bp, Homo sapiens
aaatatatatatatatatatatgtatttatatgaatgacccccaggttctctggcttgacaattgggtggattatattgttattttgttatttagtaagatggggaagggttggaatgatgagttcaattttcgatttgttgagtttgagggatttacaggaaatccaaatgaagataatccaggaatcgatctatacatacccagaattcaggagtgaggtctacactgaatatacagatttgtgcctcactatgtactgagtgtccctaatccagaagttcaaaatttgaaattttttgagttctagatttgtaatgctcaaccttgtaagtataatgcaaaccttccaaaccaaaaaaaaa

SEQ ID NO: 21453 - DNA, 383 bp, Homo sapiens
aatctcacaaatgtactcaccatcataacaaatgccaatgaagtctttcttccattgctgcacccacaaacaaatgtttaaactgtttcagcttgtttgctaaggttcaaaatccattttccaacatttgtagagctaagaaaacgctaaaggtcacaaagcccgtattatttctatattgcaaaaatttagtcacagtggaagaagggcagaaacaaaagtaaaacaagggaagatgtggagaacagaaaaggaaagagatgaataaaaagaggcattccattcctttattcattaatttattgattcattaaccaattatttgaggattttatatactagcactgttatatgctgaaaaataaagtcaaatgagatgtggt

SEQ ID NO: 21454 - DNA, 766 bp, Homo sapiens
acatctgcctgtaatgccaaggccttgtgatagggagtggcctgaagcccggggtagaggagtggacctccccagcatagctggggaaggagtctcaaggagatgacatttgaccagtcctcatggttgtttgcaagtggcttctctgctgtggaatgggaagaaagggtcttccaggaagaggggttagcctttgtaaaagtgcagagaaacgtttgtatgagcaagagagtaattagggaaccgtgagcaattccatgtgactctgactataggtaggctgcagggaagggaagagacagatgaggactgtcttcctagtgcctagaacagtggctggcccatagtaggtattcggtgcatcttagtggagaaatgtgtgaaagaggaaagagagggctgggaggtagactactactagattggctatgggtggagctgggggctcagcattttcaagctctgaagtttggtctccttgaaggaacaggagcagctctggattttagaaggccaattctgtccacagtgcaccagtgttctaggtgaggttggatgatggggagacttgtattctccactttgttttatctttgacctcacatgccctcttttactcctggcttccactgttgacgtccttaaaccttgctattgctcgctcttttctcaatttgttacatccttctttcaaactcttgccttttctgtaattcccgtgtgacccataatcatccccatgccctcatataccaccgtcgtctcc

SEQ ID NO: 21455 - DNA, 198 bp, Homo sapiens
aaggggaagcaggcaccttctttacaaagcagcagaagagagaagagtgagcgaaggaggaacttgccaaacacttataaaaaccttgagagaattcactcactgtcacgagcacagcatgagggaaccacccccatgatccagtcagctcccaccacattccttcctcaacacctgacacgggggattacaatgcaa

SEQ ID NO: 21456 - DNA, 483 bp, Homo sapiens
gtccccttttgggccagagaattctctgttgttggggactgtcctgtgcactgtaggatgttcacagcattcctcactctacccacgagctgccagtagcaccccctctctagttgtgacaaccaaatttctccagacttagccagacatcccctgggagaagtaacccccacatccccctaccccactgaaaaccagtggcaggccaggcacgctggcttacgcctgtaatcccagcattttgggaggccgaggtgggtggatcacgaggtcaagagattgagaccatcctggccaacatggtgaaaccctgtctctactaaaaacacaaaaattagctgggcatggtggcacgcgcctatagtcccagctacttgggaggctggggcaggagaattgcttgaacccgggaggcagaggttgcagtgagtcgagattgcgccactgcactccagcctggcaacagagcaagaccccgtctca

SEQ ID NO: 21457 - DNA, 453 bp, Homo sapiens
gtgcaacttctgcattcttgcttcaatgttgactaggcacaggcttcgtttttctttttgagacagagttttgctctgttgcccagtctggagtgcagtggtatgatcatagctcactgcagcctcaacctcctgggcttaaactattttcccctgtcaacttcccaagtagctgggactacagacacatgccaccatgcctggcttcagcatccattcttaaactccttttcaccattgatctgggattttactcttagctggaacctgtctgagacccgactattggaggtctcttactgctggaggatggtatctctgggaaaggcccactcccagacccaggaatgtaggatccatctcagtgcagcttttctcagctctctacttgtctggggtaccacacttctcaaccggattctgtacttctcataaaggtattttgatcagtaa

SEQ ID NO: 21458 - DNA, 407 bp, Homo sapiens
caaaaattagccaggcatggtggcgggcacctgtaatcccagctactcgggaggctgaggcaggagaattgcttgaacccgggagacggaggttgctgtaagccaagatcacaccattgcactccagcctgggcgacaagagcaaaactctgtctcaaaaaaaaaaaaaaaagataataccttggctgggcatggtgactcttgcctgtactcccagcactttgagattacggaggcagaggtgggagtattgcttcaggccaggagatcaaaaccagcctaagcaacatagtaagactcttgcctgtactcccagcactttgagattacagaggcagaggtgggagtattgcttcaggccaggagatcaaaaccagcctaagcaacatagtaagactctttctaca

SEQ ID NO: 21459 - DNA, 349 bp, Homo sapiens
ggaaggcagaagttgcagtgagcccagatcgcgccactgcattctagcctgggtgacagagcaagacttcatctaaaaataaataaacaaacagatggtttctaaccaaactggccttaccggatacctccagttctctctttcttaaaataagggagtgatgtctttggcctggataagcagcttgagccatatggttcttctggattcagctctagaaagggcccatgctcagctgtttagctttggacagttattgagccccactgaagctcagacctgtcatctgtgggatagggtgctggacccaccctgagggattatcatgaggcttaaatgaggtagaaca

SEQ ID NO: 21460 - DNA, 269 bp, Homo sapiens
catcaaagcaataacttccctcacattcacatttattcaagtttatttgtagggaggcaatatttcctcttcccctgaggaaggcccaccatcagtacagtagtgcccaggtcactgcaattctctcctgatgaaaaccttaacatcctgactcaatcattcaaaaagcattcttaatgccaggcaggctgctaagtgaaggggatgcatcagccaataagtcgttatctctgctttctaaaagttcatctaatggactggttccagag

SEQ ID NO: 21461 - DNA, 1037 bp, Homo sapiens
ggaatttgctacatatactatatttaaaaagaggtgaagatgaactccagactactatgattgctcatgacattgaatttgataacttttaatttgcggataagaaattcttgtgaaatagctcaatctgtctatgtgttgtagaagtgagtggttggagacagtgagtaccaattcatttgatcacataatcgttcaacaaacacacaatgccaggttctgtactaggtactggggtgacttctatgatggctaacgtgaactgtggactctgctcttgtgggaaaggtagacagttgtaggaagggactcacaaatttctgggtgttacaaattccaaatactttgggatatatgaaagagaccacttacagagtatttactgggtgtcagtcactgtgctaaccacatcacattcattatcacgtttaactgtgagatctctataaaataggaattattattttcccttttaatggatgagaaacataacatcaaagtgtacagatcaggtgacttgttgcgtgtcagtggtaattggctacattggttgctcacagtgaaccatgtcttttatactcacactcgtatagtcactactccttgaatcaaggctggccctgggattcactttaaccactagactgtgtcagaaatgatctcgttccagttccagacctaagcattaagtagacctggcagatttcacttctgtaatcttgaaagccctgtcacctggtaaaaaaaaaaaaaaaaagaaagtctatttatgctgctggagagactgtatgctgagactgtgtagagagacacaggaagagggagagaccctgagattctaggggaggagagagagaggttcaattgagcccagatcccagccaactagccagctgaatgcagccacatgagcaaccaccagtaagatgaacggaacggtgccactgagccccgcccagattatggactcctgagcaaatacaatggtagttgtttataaccactgagttttgggtggtcagttacatagcaaaaaa

SEQ ID NO: 21462 - DNA, 828 bp, Homo sapiens
ggaatttgctacatatactatatttaaaaagaggtgaagatgaactccagactactatgattgctcatgacattgaatttgataacttttaatttgcggataagaaattcttgtgaaatagctcaatctgtctatgtgttgtagaagtgagtggttggagacagtgagtaccaattcatttgatcacataatcgttcaacaaacacacaatgccaggttctgtactaggtactggggtgacttctatgatggctaacgtgaactgtggactctgctcttgtgggaaaggtagacagttgtaggaagggactcacaaatttctgggtgttacaaattccaaatactttgggatatatgaaagagaccacttacagagtatttactgggtgtcagtcactgtgctaaccacatcacattcattatcacgtttaactgtgagatctctataaaataggaattattattttcccttttaatggatgagaaacataacatcaaagtgtacagatcaggtgacttgttgcgtgtcagtggtaattggctacattggttgctcacagtgaaccatgtcttttatactcacactcgtatagtcactactccttgaatcaaggctggcccctgagattctaggggaggagagagagaggttcaattgagcccagatcccagccaactagccagctgaatgcagccacatgagcaaccaccagtaagatgaacggaacggtgccactgagccccgcccagattatggactcctgagcaaatacaatggtagttgtttataaccactgagttttgggtggtcagttacatagcaaaaaa

SEQ ID NO: 21463 - DNA, 574 bp, Homo sapiens
gctgggataacaggcatgagccactgcgcccggcccaaaacaatggtttttagatgttttcttgctggtctgctacacgttcttcttctgttcagtcagtgcatgtagtaataaataaaagctctgctcattgcttttgtttattttaagtactttttcacgtagtgcggtgtcatggcctcagataaatgtctacataatgcagtcaactttcccacaccttgggtgtcctctaagaaatgcagactacagaatcttgatcatatttatatatgattgtcctttggctctaaatttatcccattatcaggttggcttttattttgggaattctgtctgcatcagaaacatggctaaatgacttcaacttcaagttcaaacacttgaagttcaaaaacttcaagttcaaacacttcatttgttggcattttcatttttagcaagtgaatatctggcatgaattaactaaagtttagaagatctttgtttttcttcttccctccccacccccaaaaagaagaaaattcctaaagctttttgtaatttttatcacaaaataatagacttagtacag

SEQ ID NO: 21464 - DNA, 359 bp, Homo sapiens
cagtcaagataccaaaagctctagattaggagtggggaacgaggtccctgacccctctgctattcccttcttggtacaactccttagttctgcattcctgatttaagaaactgtgagcttcgccggccgggcgcggtggctcacgcctctaatcccagcactttgggaggccgaggcgggcggatcacaaggtcaggagattgagaccatcctggctaacacggtgaaaccctgtctctactaaaaatacaaaaaaattagccaggcgtgttggcgggcgcctgtagtcccagctgctggggaggctgaggcaggagaatggcgtgaacccggaaggcagagcttgcggtaagccgaga

SEQ ID NO: 21465 - DNA, 342 bp, Homo sapiens
tttttttatcaaatgtattttttaattgaggcatgcacattgttttttaggcataatgtattgcacacttaatattgactacagtatagtgtaaacataacatttatatgcactaagacacacaaaaaatcatctgactagctttactgcaatattcactttattgcaatggtctggaactgaatctgcaatatctccaaggtgtgcctgtataatctcaaccaagccaaaagcaatattacaaatatacttaaaaaaaaaaaaaacaaaaaaaaactgggcccagcatggtggtggctcacacctgtaatcctagcactttgggaggccaaggcgggtgga

SEQ ID NO: 21466 - DNA, 158 bp, Homo sapiens
cattctcacacagtatgaaactggtggtgtgtcttggagggaggaagccatgggctcgctctttttcccagaccatactcagctgttaaactctaccaattgctggctgattgctttattgttttcaacaatgttttggggcatagattgctgcccaa

SEQ ID NO: 21467 - DNA, 149 bp, Homo sapiens
aaacatttaaaaaatttttattctcataactctgtgaagttgctactattatcctcattttactgatgaggaaactaaggcaaagaggatctaagcgatctgaccaaggtgacataaatgtttacttttatgaccatgctgtgtctgct

SEQ ID NO: 21468 - DNA, 411 bp, Homo sapiens
gcgcctgtagtcccagctactcgggaggctgaggcaggagaatggcgtgaacctgggaggcggagcttgcagtgagccaagattgcgccactgcactccagcctgggcaacacagccagactccgtctcaaaaaaaaaaagaaaagaaaagcaattgataaagaaatttctctcccactatcaaaccttccattccatgtgtttctgtgctcccatattctgcctgccttcccaccacagtggatgaactgcccctttttatccaagaccaactcctctactgctctcctgtatcccatttcttaagcctaccttaaggattttactccttctgctctgtcttgaatggctgtttccctgtctactggatcattcctatcaatatccaacagctgttttctctcttatgtt

SEQ ID NO: 21469 - DNA, 553 bp, Homo sapiens
tttggcccctttccttcatcatctgccactgcagcttgtaatgctactaatcgaattatttctcattttagtcaagatgatcttactgctcttgtgcagatgacagaaaaagaacatggcgatagggttttttttggtaaaaatttagcattttcatttgacatgcatgatttggaccactttgacgaactgccaataaatggtgaaactcagaaaactataagcctagattataagaagtttctgaatgaacatctccaggaggcttgcaccccagaactcaagcctgtggaaaaaacaaatggctcctttttgtggtgtgaagttgaaaagtacctaaattcaactttgaaggaaatgactgaagtgccaagagtagaagatctttgctgtactttatatgatatgcttgcttctattaaaagtggtgatgaacttcaggatgaggtatagttgaaatgatttatttttttatattaatgtgaactatcctaatgaaatagtgttttttaaacatgggtggttagcaaagaaagttctttaatgttctgta

SEQ ID NO: 21470 - DNA, 416 bp, Homo sapiens
aaaaatgttgctgctaccacttattaaatacaagaagctggttaataaattgtataaacattacactttatctgctgcacgtgaatagacagagtactggtggttctcagcctttgttctaacatacttacacaaatctttttgaaagtaattttcttcctagaagaaataatataggtgggattggagagttggaagtttcattgccagttgagtctgcttgctttgataacctcattcccaaatttatttggaatgagagcagtttgatttctttctacacagtaactgcttattctgctccaatctgaaacggagctcttgtcacactgtggaccagaggtagcatcttagatagtgaacattatttcccaggagacagagaaaagcagtggacttgaagatgtcagctggtt

SEQ ID NO: 21471 - DNA, 730 bp, Homo sapiens
gagagagaccctccccaggccacttaggcaaagccatcagcatcatctggggtcccgtcttgacacctctacacactcatgtctgtgacaaaggaacataggtgatggcagggaagcccttaagaggcagaggctggtgggcttgcaatgggggccgcagggaagagggggaagggttaggggaacctcgaggtttccggagctccacggcagggcacagctgggaagaagatgggaccagcaccctccattggaggcagccaggaccctagaagttctcaaagggccaggatgaaaacagccggccaggcaggaggaagcgcaggcaggggccactgccaggccgaggcagatctgacggtcgcctgcctcggcctcaccttccatgcctcctcagggcctgtcaacagctgggaagatcagtgcacaaaggttgggctccatcaccagggaccctgatgcccagagaggccacgggtagagctggacatacctcagaccgcacccactcctccccactgggagacccatttggccctgggactccctgtcaagttcactttcccacctgtcagcaggtttagacaggcgcaccgatccccagacaaccagagcaaccagatcgccgcagacaacggggagccatcaggagctgaactaagcccagggtctgcgcccacagtccatggccgcaggagtcagatccccacccacaggacccccaggggcc

SEQ ID NO: 21472 - DNA, 186 bp, Homo sapiens
attggcatggttacttggagtaaattaaacagacattttggcaaaacctttagaacactcatttcaagcaaaatcttcacaacggtaaaagctaattttgtgtttctaactcttcttatttagactcaattgaaaaatatttagaattgaggatttttcccctcttggggcaagggaaggaaagag

SEQ ID NO: 21473 - DNA, 367 bp, Homo sapiens
atttagagcggttgaatgaaattgtattaaatatgtaaagaaatttaggtgtcattgacattatcttaatattgaattttcccatccagtaatatgaatcttttgaaaaggtggcttgagtaactggatttttctcgaagtttttgttttcttcacaagggttatatacatttcttaaattggtttctagatgtttttatattttttgttgcttttatgattaggatgtttttgttgcttagcaagttaatactggtgtattggaaggcaattgagttttttttgttactattgtttgtttttgatatggagtctctgtcgccactgtactccagcctgggagacagagtaagactcaaaactcaag

SEQ ID NO: 21474 - DNA, 3689 bp, Homo sapiens
aaacagtcacatccggggccgagaggaaccgcgaacgagctgggcgtgcgcccttgcttcgtgccctcaacccgcatggcggagccgctggcgcgccgcggagaggccgggcgagtcgggcggtttcggcgcccgcgctgagccgcggaggaggggcggaggacgcccctgcagccgatacgtgcttttcaacatgccttcagcactaatgactgctccaggaatgtctacattaagaagaatggctttactttacatcgaaaccccattgctcagagcactgatggtgcaaggaccaagattggtttcagtgagggccgccatgcatgggaagtgtggtgggagggccctctgggcactgtggcagtgattggaattgccacaaaacgggcccccatgcagtgccaaggttatgtggcattgctgggcagtgatgaccagagctggggctggaatctggtggacaataatctactacataatggagaagtcaatggcagttttccacagtgcaacaacgcaccaaaatatcagataggagaaagaattcgagtcatcttggacatggaagataagactttagcttttgaacgtggatatgagttcctgggggttgcttttagaggacttccaaaggtctgcttatacccagcagtttctgctgtatatggcaacacagaagtgactttggtttaccttggaaaacctttggacggatgacagtggctttcttgtgatgacagacagaatggaggagagatctgcttatgggaagtagaaccatgaagtgactgtcacacatgcatgtccaagaaacatcctgaaaacacatgaagtcgtaaactggagaagcagctctacagcagagattatcttcgtgtttcctctttctactgggccagaaaaatcctcagggttgcagttggttgagtgggcagttgacatatgcatgttgcacccgatgttgtctctaagttagcaatgtgttatttccagctttaaaggtgagattgtagagatgctgtcaaagggataaggaaatagcaagatttttaagtagtgtgtttgtgaagactgatcccattttacaactgcctgttctttctccagtccttttttttccagccagcttgactattagaaaagtatgaaactggttgggttttatttaatatttttaatatattgagaagcatggtctgcctggactgcacttctctaaaagtgagatataaaattgtgcagctattttaaaagttgtatataatatgtgtgtaaaaaaaaaaaactgtaaaaaagaaaggacaaacaggttgttttgttctagttctaatttcttaaaaaccactacatggttacaaaattggaataacatttggggacaactgggttaactacaaagaagaggattttaagaggagatgtgttgtattgactcattttgtattatttttggcttacagttcccatagctgttagagtctggtttgtttttgtttttactctcaaaatcatagtaaagatctctcagtctcctggctaaagattgaaggaaggcaaatctatttctaattatacatatatcagtaaggatgatctcaacataatagtaatgtgtatcttttggtatccagttttatttttggccttctaagaaagtgtctcataacacagaacattgccatttgctcttgtaggcctcaaatatgaaagctattagtcatagagcctaggaaaaaaagaattgattaatggtccttttattttgtaaccttataaatgctgtagatattatcaaaaaaattttaatttcatattgtttacatcatgcaactaatctaagcctcaaactcgttattggggctataaagaaaacgtttacttacccagctgaaacaggttaagaatattcttaatctcattatagataattgcccccatgggacttgaaatacaacaccttgtgctgaaaacttcaggttggcaatatttgaaggtttcgttgtagaagagtttaacattaactcctattttgacttacaaatcttgtttctcatcactaaaatgcttttgaattaataatccaacccacatgagctgagagtttttcttttgttagaaaagaaacagacatctttctgtatgaaagtataaattgtatggttttagatacataagaattgacaaaagcgagcgaaatctttgtacttctgagttcttgctgtatgtatgttttgttttaaatctgattagggacacccagcagctggccgggattcttggattgctccttgggagttaagattgtcaatactcctgtgaagcaagggatttcagccatagaacaaagatttattgttgccacctgaaaagtttacaagtatttattgtgtatttgatacattgcttgaaaagatgaaatctgttaaagattcttttcgatgtccaggttaagaagaaacctccttgtattgagtgaaattatatgttaaatgtattagagaatgtaggtggtatagaaattgatttttcttggtgtagaacaactcagttcggcaaagtttaaaatttgattaaacaagagaagtggttcaggttgaagatggacttgttaggaagtgatcaagtcctttaagtacttgtttctttttcaggttgtgatgtggccattccgaattttgttgagagtttggtttataattgtctcttttgtcttgttagtaaacattcatttgcaacagttttgaaggtgctgagtggaaaaccgaaacacatggttattgcgtattggacctagaatgaaataattgcctcaatatttaacaacaagccattcttatctcaaagatttaaattcccgaatgtcccattcgcaaatcatatgcaattgaagtgagcagcatgagcatctgggtcatgagggccttcatttacgtaaatttgtcactaaaacccagtagtagctctacaaaatcttaaactgctgcagtgctcaaggagatggaatatctttgtcattggtgctgaggagagcatttcggtagaagacagttgcgcctgaagattgagtgtaaatcattcaaaccagtggttctcagtgttggctgtatacactttgtagtcactttggaatgttggaagacacatcgatgcttgggttccgtatgccaagattctgatgttggtctggaatatgagctggtcataaggatttttaaaaactttctggtcatttcaatatgctgccaaggttgagaaccactgttgtaaaattcaccttgagttttctcatctgcaaaatagaaaaaaaaaaatccttgctccctcccttcactacctcacaaggatattgagggtaaaggagaaaataatgggaaagtgcttgtgccgtggatgaaaagtgctattaaaagtcaaaggagtgttctgtttcaattcatagtatgatcagggaaagtgtaactgagtatactttgttgacttgggaaacctggagcactttctttggttggttaacgaagcatgcagatgtggaagcagacgttactattatccctactatggtcttctgtcatactgagacaggctgttttaattacctggttttacataggaaagaagaaatattaaggcttaaagtttgtaatgatcaatggctcataattcattaaatcttttcatacaaggaa

SEQ ID NO: 21475 - DNA, 3528 bp, Homo sapiens
ttacctaggctggagtgcagtgggcagtggtgcgataccagctttggccaccacgcccagctaattttttgtatttttactagagttggggtttcgccatgttgcccaggctagtcttgaactccgagttcaggcgatttgcccaccttgccttcccaaagtgctgggattgcaggggtgagccaccgcgcccggcccgatcccctcctttttttatagatgtttcttcctgactagaaagcttcccttctgatttttctagatagctttcaggataatattcttaatattttcaacttcttgatttgtgtcttgtttcttctagctacacccttggcagattttcttctaaccttttgatatctgtttgcagataggagaaagaattcgagtcatcttggacatggaagataagactttagcttttgaacgtggatatgagttcctgggggttgcttttagaggacttccaaaggtctgcttatacccagcagtttctgctgtatatggcaacacagaagtgactttggtttaccttggaaaacctttggacggatgacagtggctttcttgtgatgacagacagaatggaggagagatctgcttatgggaagtagaaccatgaagtgactgtcacacatgcatgtccaagaaacatcctgaaaacacatgaagtcgtaaactggagaagcagctctacagcagagattatcttcgtgtttcctctttctactgggccagaaaaatcctcagggttgcagttggttgagtgggcagttgacatatgcatgttgcacccgatgttgtctctaagttagcaatgtgttatttccagctttaaaggtgagattgtagagatgctgtcaaagggataaggaaatagcaagatttttaagtagtgtgtttgtgaagactgatcccattttacaactgcctgttctttctccagtccttttttttccagccagcttgactattagaaaagtatgaaactggttgggttttatttaatatttttaatatattgagaagcatggtctgcctggactgcacttctctaaaagtgagatataaaattgtgcagctattttaaaagttgtatataatatgtgtgtaaaaaaaaaaaactgtaaaaaagaaaggacaaacaggttgttttgttctagttctaatttcttaaaaaccactacatggttacaaaattggaataacatttggggacaactgggttaactacaaagaagaggattttaagaggagatgtgttgtattgactcattttgtattatttttggcttacagttcccatagctgttagagtctggtttgtttttgtttttactctcaaaatcatagtaaagatctctcagtctcctggctaaagattgaaggaaggcaaatctatttctaattatacatatatcagtaaggatgatctcaacataatagtaatgtgtatcttttggtatccagttttatttttggccttctaagaaagtgtctcataacacagaacattgccatttgctcttgtaggcctcaaatatgaaagctattagtcatagagcctaggaaaaaaagaattgattaatggtccttttattttgtaaccttataaatgctgtagatattatcaaaaaaattttaatttcatattgtttacatcatgcaactaatctaagcctcaaactcgttattggggctataaagaaaacgtttacttacccagctgaaacaggttaagaatattcttaatctcattatagataattgcccccatgggacttgaaatacaacaccttgtgctgaaaacttcaggttggcaatatttgaaggtttcgttgtagaagagtttaacattaactcctattttgacttacaaatcttgtttctcatcactaaaatgcttttgaattaataatccaacccacatgagctgagagtttttcttttgttagaaaagaaacagacatctttctgtatgaaagtataaattgtatggttttagatacataagaattgacaaaagcgagcgaaatctttgtacttctgagttcttgctgtatgtatgttttgttttaaatctgattagggacacccagcagctggccgggattcttggattgctccttgggagttaagattgtcaatactcctgtgaagcaagggatttcagccatagaacaaagatttattgttgccacctgaaaagtttacaagtatttattgtgtatttgatacattgcttgaaaagatgaaatctgttaaagattcttttcgatgtccaggttaagaagaaacctccttgtattgagtgaaattatatgttaaatgtattagagaatgtaggtggtatagaaattgatttttcttggtgtagaacaactcagttcggcaaagtttaaaatttgattaaacaagagaagtggttcaggttgaagatggacttgttaggaagtgatcaagtcctttaagtacttgtttctttttcaggttgtgatgtggccattccgaattttgttgagagtttggtttataattgtctcttttgtcttgttagtaaacattcatttgcaacagttttgaaggtgctgagtggaaaaccgaaacacatggttattgcgtattggacctagaatgaaataattgcctcaatatttaacaacaagccattcttatctcaaagatttaaattcccgaatgtcccattcgcaaatcatatgcaattgaagtgagcagcatgagcatctgggtcatgagggccttcatttacgtaaatttgtcactaaaacccagtagtagctctacaaaatcttaaactgctgcagtgctcaaggagatggaatatctttgtcattggtgctgaggagagcatttcggtagaagacagttgcgcctgaagattgagtgtaaatcattcaaaccagtggttctcagtgttggctgtatacactttgtagtcactttggaatgttggaagacacatcgatgcttgggttccgtatgccaagattctgatgttggtctggaatatgagctggtcataaggatttttaaaaactttctggtcatttcaatatgctgccaaggttgagaaccactgttgtaaaattcaccttgagttttctcatctgcaaaatagaaaaaaaaaaatccttgctccctcccttcactacctcacaaggatattgagggtaaaggagaaaataatgggaaagtgcttgtgccgtggatgaaaagtgctattaaaagtcaaaggagtgttctgtttcaattcatagtatgatcagggaaagtgtaactgagtatactttgttgacttgggaaacctggagcactttctttggttggttaacgaagcatgcagatgtggaagcagacgttactattatccctactatggtcttctgtcatactgagacaggctgttttaattacctggttttacataggaaagaagaaatattaaggcttaaagtttgtaatgatcaatggctcataattcattaaatcttttcatacaaggaa

SEQ ID NO: 21476 - DNA, 4680 bp, Homo sapiens
aaacagtcacatccggggccgagaggaaccgcgaacgagctgggcgtgcgcccttgcttcgtgccctcaacccgcatggcggagccgctggcgcgccgcggagaggccgggcgagtcgggcggtttcggcgcccgcgctgagccgcggaggaggggcggaggacgcccctgcagccggtgcgtctgccctcagtgaggcggggcgcgcggcggacgcccccgggcaggggcgggagtggtggaggcgccggcggttggcactgacaggggcggtgagcgagccgctccggtctccgggcgaggcttggccttccgagcagagacggcgggaagcggcggcggcagcggcggccctagggccggctggtgaggcgatggcggcgccggccccgggggctggggcagcctcgggcggcgctggctgtagcggcggcggcgcgggcgcgggcgcgggctcgggctctggggccgcgggggccgggggccggctgcccagccgggtgctggagttggtgttctcttacctggagctgtccgagctgcggagctgcgccctggtgtgcaagcactggtaccgctgcctgcacggcgatgagaacagcgaggtgtggcggagcctgtgcgcccgcagcctggcagaagaggctctgcgcacggacatcctgtgcaacctgcccagctacaaggccaagatacgtgcttttcaacatgccttcagcactaatgactgctccaggaatgtctacattaagaagaatggctttactttacatcgaaaccccattgctcagagcactgatggtgcaaggaccaagattggtttcagtgagggccgccatgcatgggaagtgtggtgggagggccctctgggcactgtggcagtgattggaattgccacaaaacgggcccccatgcagtgccaaggttatgtggcattgctgggcagtgatgaccagagctggggctggaatctggtggacaataatctactacataatggagaagtcaatggcagttttccacagtgcaacaacgcaccaaaatatcagataggagaaagaattcgagtcatcttggacatggaagataagactttagcttttgaacgtggatatgagttcctgggggttgcttttagaggacttccaaaggtctgcttatacccagcagtttctgctgtatatggcaacacagaagtgactttggtttaccttggaaaacctttggacggatgacagtggctttcttgtgatgacagacagaatggaggagagatctgcttatgggaagtagaaccatgaagtgactgtcacacatgcatgtccaagaaacatcctgaaaacacatgaagtcgtaaactggagaagcagctctacagcagagattatcttcgtgtttcctctttctactgggccagaaaaatcctcagggttgcagttggttgagtgggcagttgacatatgcatgttgcacccgatgttgtctctaagttagcaatgtgttatttccagctttaaaggtgagattgtagagatgctgtcaaagggataaggaaatagcaagatttttaagtagtgtgtttgtgaagactgatcccattttacaactgcctgttctttctccagtccttttttttccagccagcttgactattagaaaagtatgaaactggttgggttttatttaatatttttaatatattgagaagcatggtctgcctggactgcacttctctaaaagtgagatataaaattgtgcagctattttaaaagttgtatataatatgtgtgtaaaaaaaaaaaactgtaaaaaagaaaggacaaacaggttgttttgttctagttctaatttcttaaaaaccactacatggttacaaaattggaataacatttggggacaactgggttaactacaaagaagaggattttaagaggagatgtgttgtattgactcattttgtattatttttggcttacagttcccatagctgttagagtctggtttgtttttgtttttactctcaaaatcatagtaaagatctctcagtctcctggctaaagattgaaggaaggcaaatctatttctaattatacatatatcagtaaggatgatctcaacataatagtaatgtgtatcttttggtatccagttttatttttggccttctaagaaagtgtctcataacacagaacattgccatttgctcttgtaggcctcaaatatgaaagctattagtcatagagcctaggaaaaaaagaattgattaatggtccttttattttgtaaccttataaatgctgtagatattatcaaaaaaattttaatttcatattgtttacatcatgcaactaatctaagcctcaaactcgttattggggctataaagaaaacgtttacttacccagctgaaacaggttaagaatattcttaatctcattatagataattgcccccatgggacttgaaatacaacaccttgtgctgaaaacttcaggttggcaatatttgaaggtttcgttgtagaagagtttaacattaactcctattttgacttacaaatcttgtttctcatcactaaaatgcttttgaattaataatccaacccacatgagctgagagtttttcttttgttagaaaagaaacagacatctttctgtatgaaagtataaattgtatggttttagatacataagaattgacaaaagcgagcgaaatctttgtacttctgagttcttgctgtatgtatgttttgttttaaatctgattagggacacccagcagctggccgggattcttggattgctccttgggagttaagattgtcaatactcctgtgaagcaagggatttcagccatagaacaaagatttattgttgccacctgaaaagtttacaagtatttattgtgtatttgatacattgcttgaaaagatgaaatctgttaaagattcttttcgatgtccaggttaagaagaaacctccttgtattgagtgaaattatatgttaaatgtattagagaatgtaggtggtatagaaattgatttttcttggtgtagaacaactcagttcggcaaagtttaaaatttgattaaacaagagaagtggttcaggttgaagatggacttgttaggaagtgatcaagtcctttaagtacttgtttctttttcaggttgtgatgtggccattccgaattttgttgagagtttggtttataattgtctcttttgtcttgttagtaaacattcatttgcaacagttttgaaggtgctgagtggaaaaccgaaacacatggttattgcgtattggacctagaatgaaataattgcctcaatatttaacaacaagccattcttatctcaaagatttaaattcccgaatgtcccattcgcaaatcatatgcaattgaagtgagcagcatgagcatctgggtcatgagggccttcatttacgtaaatttgtcactaaaacccagtagtagctctacaaaatcttaaactgctgcagtgctcaaggagatggaatatctttgtcattggtgctgaggagagcatttcggtagaagacagttgcgcctgaagattgagtgtaaatcattcaaaccagtggttctcagtgttggctgtatacactttgtagtcactttggaatgttggaagacacatcgatgcttgggttccgtatgccaagattctgatgttggtctggaatatgagctggtcataaggatttttaaaaactttctggtcatttcaatatgctgccaaggttgagaaccactgttgtaaaattcaccttgagttttctcatctgcaaaatagaaaaaaaaaaatccttgctccctcccttcactacctcacaaggatattgagggtaaaggagaaaataatgggaaagtgcttgtgccgtggatgaaaagtgctattaaaagtcaaaggagtgttctgtttcaattcatagtatgatcagggaaagtgtaactgagtatactttgttgacttgggaaacctggagcactttctttggttggttaacgaagcatgcagatgtggaagcagacgttactattatccctactatggtcttctgtcatactgagacaggctgttttaattacctggttttacataggaaagaagaaatattaaggcttaaagtttgtaatgatcaatggctcataattcattaaatcttttcatacaaggaaaaaaaaaaaaaaaaaaaaaaaaaaaaaaaaaaaaaaaaaaaaaaaaaaaaaaaaaaaaaaaaaaaaaagaaaacaaaaaaaaaaaaacaaacagaaagagacaaaaacacaaaaccaacccaacaaaaacaaaaacacacaacgagcgcggcgcgccggcccgcacctcccccggcggcgccaccgcccacccccgctacacggcccgcccccctcggctcttgtagactaacacaagtccacatccggttgttagatgcgggtataaagataaacaacaaacgctggggcgacacaagaacgcaagccgccggtcgatctttaatctccttatattgggaaccccaccatcccctcactccagaggcgacgacaacaaacgacccgccaccacccccactgccaatcattgtctacattccttcaagacactccgcgtcgcgcttactccatacgatcctacaaaaatcaaacca

SEQ ID NO: 21477 - DNA, 4204 bp, Homo sapiens
aaacagtcacatccggggccgagaggaaccgcgaacgagctgggcgtgcgcccttgcttcgtgccctcaacccgcatggcggagccgctggcgcgccgcggagaggccgggcgagtcgggcggtttcggcgcccgcgctgagccgcggaggaggggcggaggacgcccctgcagccggtgcgtctgccctcagtgaggcggggcgcgcggcggacgcccccgggcaggggcgggagtggtggaggcgccggcggttggcactgacaggggcggtgagcgagccgctccggtctccgggcgaggcttggccttccgagcagagacggcgggaagcggcggcggcagcggcggccctagggccggctggtgaggcgatggcggcgccggccccgggggctggggcagcctcgggcggcgctggctgtagcggcggcggcgcgggcgcgggcgcgggctcgggctctggggccgcgggggccgggggccggctgcccagccgggtgctggagttggtgttctcttacctggagctgtccgagctgcggagctgcgccctggtgtgcaagcactggtaccgctgcctgcacggcgatgagaacagcgaggtgtggcggagcctgtgcgcccgcagcctggcagaagaggctctgcgcacggacatcctgtgcaacctgcccagctacaaggccaagatacgtgcttttcaacatgccttcagcactaatgactgctccaggaatgtctacattaagaagaatggctttactttacatcgaaaccccattgctcagagcactgatggtgcaaggaccaagattggtttcagtgagggccgccatgcatgggaagtgtggtgggagggccctctgggcactgtggcagtgattggaattgccacaaaacgggcccccatgcagtgccaaggttatgtggcattgctgggcagtgatgaccagagctggggctggaatctggtggacaataatctactacataatggagaagtcaatggcagttttccacagtgcaacaacgcaccaaaatatcagataggagaaagaattcgagtcatcttggacatggaagataagactttagcttttgaacgtggatatgagttcctgggggttgcttttagaggacttccaaaggtctgcttatacccagcagtttctgctgtatatggcaacacagaagtgactttggtttaccttggaaaacctttggacggatgacagtggctttcttgtgatgacagacagaatggaggagagatctgcttatgggaagtagaaccatgaagtgactgtcacacatgcatgtccaagaaacatcctgaaaacacatgaagtcgtaaactggagaagcagctctacagcagagattatcttcgtgtttcctctttctactgggccagaaaaatcctcagggttgcagttggttgagtgggcagttgacatatgcatgttgcacccgatgttgtctctaagttagcaatgtgttatttccagctttaaaggtgagattgtagagatgctgtcaaagggataaggaaatagcaagatttttaagtagtgtgtttgtgaagactgatcccattttacaactgcctgttctttctccagtccttttttttccagccagcttgactattagaaaagtatgaaactggttgggttttatttaatatttttaatatattgagaagcatggtctgcctggactgcacttctctaaaagtgagatataaaattgtgcagctattttaaaagttgtatataatatgtgtgtaaaaaaaaaaaactgtaaaaaagaaaggacaaacaggttgttttgttctagttctaatttcttaaaaaccactacatggttacaaaattggaataacatttggggacaactgggttaactacaaagaagaggattttaagaggagatgtgttgtattgactcattttgtattatttttggcttacagttcccatagctgttagagtctggtttgtttttgtttttactctcaaaatcatagtaaagatctctcagtctcctggctaaagattgaaggaaggcaaatctatttctaattatacatatatcagtaaggatgatctcaacataatagtaatgtgtatcttttggtatccagttttatttttggccttctaagaaagtgtctcataacacagaacattgccatttgctcttgtaggcctcaaatatgaaagctattagtcatagagcctaggaaaaaaagaattgattaatggtccttttattttgtaaccttataaatgctgtagatattatcaaaaaaattttaatttcatattgtttacatcatgcaactaatctaagcctcaaactcgttattggggctataaagaaaacgtttacttacccagctgaaacaggttaagaatattcttaatctcattatagataattgcccccatgggacttgaaatacaacaccttgtgctgaaaacttcaggttggcaatatttgaaggtttcgttgtagaagagtttaacattaactcctattttgacttacaaatcttgtttctcatcactaaaatgcttttgaattaataatccaacccacatgagctgagagtttttcttttgttagaaaagaaacagacatctttctgtatgaaagtataaattgtatggttttagatacataagaattgacaaaagcgagcgaaatctttgtacttctgagttcttgctgtatgtatgttttgttttaaatctgattagggacacccagcagctggccgggattcttggattgctccttgggagttaagattgtcaatactcctgtgaagcaagggatttcagccatagaacaaagatttattgttgccacctgaaaagtttacaagtatttattgtgtatttgatacattgcttgaaaagatgaaatctgttaaagattcttttcgatgtccaggttaagaagaaacctccttgtattgagtgaaattatatgttaaatgtattagagaatgtaggtggtatagaaattgatttttcttggtgtagaacaactcagttcggcaaagtttaaaatttgattaaacaagagaagtggttcaggttgaagatggacttgttaggaagtgatcaagtcctttaagtacttgtttctttttcaggttgtgatgtggccattccgaattttgttgagagtttggtttataattgtctcttttgtcttgttagtaaacattcatttgcaacagttttgaaggtgctgagtggaaaaccgaaacacatggttattgcgtattggacctagaatgaaataattgcctcaatatttaacaacaagccattcttatctcaaagatttaaattcccgaatgtcccattcgcaaatcatatgcaattgaagtgagcagcatgagcatctgggtcatgagggccttcatttacgtaaatttgtcactaaaacccagtagtagctctacaaaatcttaaactgctgcagtgctcaaggagatggaatatctttgtcattggtgctgaggagagcatttcggtagaagacagttgcgcctgaagattgagtgtaaatcattcaaaccagtggttctcagtgttggctgtatacactttgtagtcactttggaatgttggaagacacatcgatgcttgggttccgtatgccaagattctgatgttggtctggaatatgagctggtcataaggatttttaaaaactttctggtcatttcaatatgctgccaaggttgagaaccactgttgtaaaattcaccttgagttttctcatctgcaaaatagaaaaaaaaaaatccttgctccctcccttcactacctcacaaggatattgagggtaaaggagaaaataatgggaaagtgcttgtgccgtggatgaaaagtgctattaaaagtcaaaggagtgttctgtttcaattcatagtatgatcagggaaagtgtaactgagtatactttgttgacttgggaaacctggagcactttctttggttggttaacgaagcatgcagatgtggaagcagacgttactattatccctactatggtcttctgtcatactgagacaggctgttttaattacctggttttacataggaaagaagaaatattaaggcttaaagtttgtaatgatcaatggctcataattcattaaatcttttcatacaaggaa

SEQ ID NO: 21478 - DNA, 4150 bp, Homo sapiens
aaacagtcacatccggggccgagaggaaccgcgaacgagctgggcgtgcgcccttgcttcgtgccctcaacccgcatggcggagccgctggcgcgccgcggagaggccgggcgagtcgggcggtttcggcgcccgcgctgagccgcggaggaggggcggaggacgcccctgcagccggtgcgtctgccctcagtgaggcggggcgcgcggcggacgcccccgggcaggggcgggagtggtggaggcgccggcggttggcactgacaggggcggtgagcgagccgctccggtctccgggcgaggcttggccttccgagcagagacggcgggaagcggcggcggcagcggcggccctagggccggctggtgaggcgatggcggcgccggccccgggggctggggcagcctcgggcggcgctggctgtagcggcggcggcgcgggcgcgggcgcgggctcgggctctggggccgcgggggccgggggccggctgcccagccgggtgctggagttggtgttctcttacctggagctgtccgagctgcggagctgcgccctggtgtgcaagcactggtaccgctgcctgcacggcgatgagaacagcgaggtgtggcggagcctgtgcgcccgcagcctggcagaagaggctctgcgcacggacatcctgtgcaacctgcccagctacaaggccaagatacgtgcttttcaacatgccttcagcactaatgactgctccaggaatgtctacattaagaagaatggctttactttacatcgaaaccccattgctcagagcactgatggtgcaaggaccaagattggtttcagtgagggccgccatgcatgggaagtgtggtgggagggccctctgggcactgtggcagtgattggaattgccacaaaacgggcccccatgcagtgccaaggttatgtggcattgctgggcagtgatgaccagagctggggctggaatctggtggacaataatctactacataatggagaagtcaatggcagttttccacagtgcaacaacgcaccaaaatatcagataggagaaagaattcgagtcatcttggacatggaagataagactttagcttttgaacgtggatatgagttcctgggggttgcttttagaggacttccaaaggtctgcttatacccagcagtttctgctgtatatggcaacacagaagtgactttggtttaccttggaaaacctttggacggatgacagtggctttcttgtgatgacagacagaatggaggagagatctgcttatgggaagtagaaccatgaagtgactgtcacacatgcatgtccaagaaacatcctgaaaacacatgaagtcgtaaactggagaagcagctctacagcagagattatcttcgtgtttcctctttctactgggccagaaaaatcctcagggttgcagttggttgagtgggcagttgacatatgcatgttgcacccgatgttgtctctaagttagcaatgtgttatttccagctttaaaggtgagattgtagagatgctgtcaaagggataaggaaatagcaagatttttaagtagtgtgtttgtgaagactgatcccattttacaactgcctgttctttctccagtccttttttttccagccagcttgactattagaaaagtatgaaactggttgggttttatttaatatttttaatatattgagaagcatggtctgcctggactgcacttctctaaaagtgagatataaaattgtgcagctattttaaaagttgtatataatatgtgtgtaaaaaaaaaaaactgtaaaaaagaaaggacaaacaggttgttttgttctagttctaatttcttaaaaaccactacatggttacaaaattggaataacatttggggacaactgggttaactacaaagaagaggattttaagaggagatgtgttgtattgactcattttgtattatttttggcttacagttcccatagctgttagagtctggtttgtttttgtttttactctcaaaatcatagtaaagatctctcagtctcctggctaaagattgaaggaaggcaaatctatttctaattatacatatatcagtaaggatgatctcaacataatagtaatgtgtatcttttggtatccagttttatttttggccttctaagaaagtgtctcataacacagaacattgccatttgctcttgtaggcctcaaatatgaaagctattagtcatagagcctaggaaaaaaagaattgattaatggtccttttattttgtaaccttataaatgctgtagatattatcaaaaaaattttaatttcatattgtttacatcatgcaactaatctaagcctcaaactcgttattggggctataaagaaaacgtttacttacccagctgaaacaggttaagaatattcttaatctcattatagataattgcccccatgggacttgaaatacaacaccttgtgctgaaaacttcaggttggcaatatttgaaggtttcgttgtagaagagtttaacattaactcctattttgacttacaaatcttgtttctcatcactaaaatgcttttgaattaataatccaacccacatgagctgagagtttttcttttgttagaaaagaaacagacatctttctgtatgaaagtataaattgtatggttttagatacataagaattgacaaaagcgagcgaaatctttgtacttctgagttcttgctgtatgtatgttttgttttaaatctgattagggacacccagcagctggccgggattcttggattgctccttgggagttaagattgtcaatactcctgtgaagcaagggatttcagccatagaacaaagatttattgttgccacctgaaaagtttacaagtatttattgtgtatttgatacattgcttgaaaagatgaaatctgttaaagattcttttcgatgtccaggttaagaagaaacctccttgtattgagtgaaattatatgttaaatgtattagagaatgtaggtggtatagaaattgatttttcttggtgtagaacaactcagttcggcaaagtttaaaatttgattaaacaagagaagtggttcaggttgaagatggacttgttaggaagtgatcaagtcctttaagtacttgtttctttttcaggttgtgatgtggccattccgaattttgttgagagtttggtttataattgtctcttttgtcttgttagtaaacattcatttgcaacagttttgaaggtgctgagtggaaaaccgaaacacatggttattgcgtattggacctagaatgaaataattgcctcaatatttaacaacaagccattcttatctcaaagatttaaattcccgaatgtcccattcgcaaatcatatgcaattgaagtgagcagcatgagcatctgggtcatgagggccttcatttacgtaaatttgtcactaaaacccagtagtagctctacaaaatgagagcatttcggtagaagacagttgcgcctgaagattgagtgtaaatcattcaaaccagtggttctcagtgttggctgtatacactttgtagtcactttggaatgttggaagacacatcgatgcttgggttccgtatgccaagattctgatgttggtctggaatatgagctggtcataaggatttttaaaaactttctggtcatttcaatatgctgccaaggttgagaaccactgttgtaaaattcaccttgagttttctcatctgcaaaatagaaaaaaaaaaatccttgctccctcccttcactacctcacaaggatattgagggtaaaggagaaaataatgggaaagtgcttgtgccgtggatgaaaagtgctattaaaagtcaaaggagtgttctgtttcaattcatagtatgatcagggaaagtgtaactgagtatactttgttgacttgggaaacctggagcactttctttggttggttaacgaagcatgcagatgtggaagcagacgttactattatccctactatggtcttctgtcatactgagacaggctgttttaattacctggttttacataggaaagaagaaatattaaggcttaaagtttgtaatgatcaatggctcataattcattaaatcttttcatacaaggaa

SEQ ID NO: 21479 - DNA, 406 bp, Homo sapiens
gagacggagtcttgctctgtcaccaggctggagtgtagtggcgcaatctcagctcactgcaccctccgcctcctgagttcaagcaattctcctgcctcagcctcccaagtagctgggactacaggcacgcaccactacgcctagctaatttttgtatttttagtagagatgggttttcaccatgttggccaggatggtcttgatctcttgaccttgtgatccacccgcctcagcctcccaaagtgctggaattacattctctgtctttaattagggaggagagggtagagtgtttcacaagctgttatattaagtcagagatctatcatgtgcaagtgtcagaaacccaactcaaaacggctcaatgcccaactcagagtggtttccctaagggggaagtcctatc

SEQ ID NO: 21480 - DNA, 378 bp, Homo sapiens
aagcaagccctttaaaccccatccctatttttttttaggctgttttatatgacaccctatctcccagatgggaatttgaaactcccttcccaaatgttttgtcctatatggcatcaaatatcccattaaactttaaataaaagaaattgggtaaccaacacctaaccagcgattcccattgtgaagaactacctcattgggcatatctatattttgaaatcagatgtggctatgttaatcagactttaagcatgagagccccttatctataaagaaaaaattatggtcatgctgcagttttttattttttgtatcacacagggtaaacttgtttatcacatttactgtataactaataataaagtctaacttcaaatc

SEQ ID NO: 21481 - DNA, 406 bp, Homo sapiens
gccgttcattcttcaaatattttttctctcttcagcgttccctcccttctctcctgcctgcaggctcgtgagtgtgaagactgctcaatcttctgtgggtcactgggctttgtccagtgtttcctttctgttctagttgaatggcccctgccctttctccttccatctccagtcctctgttaagtgaattcattttcaatctggtactttccaattctagtatttgtgtttggctgggatttctttacaggtttcatttctctgctgagattcacctctgttcactcattaagatcacctgtttttaacagcttcatggagatctagtctgcacagcctctccccgtggacagatagtgggttttcatgtattcagggttctgcaaccatctgcacacgtgtggaa

SEQ ID NO: 21482 - DNA, 562 bp, Homo sapiens
gtaactgacagtggttaagttcattagagcaaatgaagttgaccattgatgcctgtggttcagtaatacctgattaagatatttttccacaaaaaaactgcaccagacttcaaacatcctacattttctcagactttgtaaaatagtccaactaagtatttttctactttaccatcatcagttgtgacatatcttagcagattacacttcaggttgtactaaaatagtttttctcagctgctttgagaatattcttgcctctagttgttccacatagattatttatagagggtaacttttcagtcacttcgaatgaggattggctccccaaataacaagtattggtaatacctgtcatcgagagccaaggaacaccactcagaaccatttggcttgttttttaattgtttactaattttgctcccagtgttctcaactcttcaagcaccgtttttacagaaaggctaatggcgtttaaaagtttattgtctcggctggggtggtggctcacgcctgtaatcccagcactttgggaggccaaggcaggcagatcacgaggtca

SEQ ID NO: 21483 - DNA, 264 bp, Homo sapiens
actggggcaggcaggatcgcagccctagtttccctcacaccacgcacttatctgctccatctacttatttccatttacatatatttatattacagcctttcctcacacagtgaaatttacatcggaagcatgtgtttccatgcttttttttttttttttttaattatcattgtgaatcagactttaaaaaatgggcggttggaaggggacctgttggggagatggggctggcagaggtagccctaggcagctggggaggggcct

SEQ ID NO: 21484 - DNA, 494 bp, Homo sapiens
aagataatagtgctttattgtctctcagtcatctttctctcccacctgctggaaggagagacaagtccaatttatccaattacaaaatagcaacattggcatcatgagatcagctaacaaaactttcagaggcaatctatcttcctaccaaaagtaaccaacatctgtggagcacttaccatgactaagggtcaacataagtggtttgcatgctgcatgcatcaggatggactaggttatgctgcagtaacaaattaaccacagagactcagcagcttagcaaccaaggttgatttcttacattccatccccactaaacctagtgggtcacatctggtgtttcactttggggatgttttagtggtcatggtagattgttgtctgactgctggctgtttctaccatgtttcaggaatatagagatgtgtacagatgacccctaaaattaattagtatgcaattctcaaagagacaaactgtatcccagaagctac

SEQ ID NO: 21485 - DNA, 346 bp, Homo sapiens
tgagacagggcttctctgttgcccatgctggagtgcagtggcatgatcacagctcactgcagccttgacctctgcaggttcccaagtagctgggaccacaggtacatgccaccatgtccagctttttgtatttttgtcaagatggggttttgactttgccatgttgcccaggctgttatacaactcctgggttcgagaaatctacctgcttcagcctcccaaagtgctgggattacaagcgtaagccaccgtgcctggccctgtgcaggtttttaacttgatgtaatcccattcgttcatttttgctttggttgcctgtgcttgtagggcattattcaaaaaatct

SEQ ID NO: 21486 - DNA, 813 bp, Homo sapiens
gcgatctagaactagtctgagaaggacttggtggataaggctcgtcagatcaacatccacaacctctctgcattttatgacagtgagctcttcaggatgaacaagttcagccacgacctgaaaaggaaaatgatcctgcagcagttctgaggccctatgccatccataaggattccttgggattctggtttggggtggtcagtgccctctgtgctttatggacacaaaaccagagcacttgatgaactcggggtactagggtcagggcttatagcaggatgtctggctgcacctggcatgactgtttgtttctccaagcctgctttgtgcttctcacctttgggtgggatgccttgccagtgtgtcttacttggttgctgaacatcttgccacctccgagtgctttgtctccactcagtaccttggatcagagctgctgagttcaggatgcctgcgtgtggtttaggtgttagccttcttacatggatgtcaggagagctgctgccctcttggcgtgagttgcgtattcaggctgcttttgctgcctttggccagagagctggttgaagatgtttgtaatcgttttcagtctcctgcaggtttctgtgcccctgtggtggaagagggcacgacagtgccagcgcagcgttctgggctcctcagtcgcaggggtgggatgtgagtcatgcggattatccactcgccacagttatcagctgccattgctccctgtctgtttccccactctcttatttgtgcattcggtttggtttctgtagttttaatttttaataaagttgaataaaatataaa

SEQ ID NO: 21487 - DNA, 468 bp, Homo sapiens
caagtaacttgtctcagtttacacgcacagcttgtacagcagagatttgaagccccttaatcggcctctccacccctggatattttcctcccataaatggaggtgatggtgtctgaaagtgcactgtaactggggcgctctggaaacagcctgttctcacaccactgatggctcactggacacttcctccttgcaggctcgtcagatcaacatccacaacctctctgcattttatgacagtgagctcttcaggatgaacaagttcagccacgacctgaaaaggaaaatgatcctgcagcagttctgaggccctatgccatccataaggattccttgggattctggtttggggtggtcagtgccctctgtgctttatggacacaaaaccagagcacttgatgaactcggggtactagggtcagggcttatagcaggatgtctggctgcacctggcatgactgtttgttt

SEQ ID NO: 21488 - DNA, 1155 bp, Homo sapiens
cggggcgggccgccggctgccagcccagggcggggcggagccctacttctggccgaccgcgtaggcggtgcttgaacttagggctgcttgtggctgggcactcgcgcagaggccggcccgacgagccatggttgctgggagcgacgcggggcgggccctgggggtcctcagcgtggtctgcctgctgcactgctttggtttcatcagctgtttttcccaacaaatatatggtgttgtgtatgggaatgtaactttccatgtaccaagcaatgtgcctttaaaagaggtcctatggaaaaaacaaaaggataaagttgcagaactggaaaattctgaattcagagctttctcatcttttaaaaatagggtttatttagacactgtgtcaggtagcctcactatctacaacttaacatcatcagatgaagatgagtatgaaatggaatcgccaaatattactgataccatgaagttctttctttatgtgcttgagtctcttccatctcccacactaacttgtgcattgactaatggaagcattgaagtccaatgcatgataccagagcattacaacagccatcgaggacttataatgtactcatgggattgtcctatggagcaatgtaaacgtaactcaaccagtatatattttaagatggaaaatgatcttccacaaaaaatacagtgtactcttagcaatccattatttaatacaacatcatcaatcattttgacaacctgtatcccaagcagcggtcattcaagacacagatatgcacttatacccataccattagcagtaattacaacatgtattgtgctgtatatgaatggtattctgaaatgtgacagaaaaccagacagaaccaactccaattgattggtaacagaagatgaagacaacagcataactaaattattttaaaaactaaaaagccatctgatttctcatttgagtattacaatttttgaacaactgttggaaatgtaacttgaagcagctgctttaagaagaaatacccactaacaaagaacaagcattagttttggctgtcatcaacttattatatgactaggtgcttgctttttttgtcagtaaattgtttttactgatgatgtagatacttttgtaaataaatgtaaatatgtacacaa

SEQ ID NO: 21489 - DNA, 3292 bp, Homo sapiens
  misc_feature (1386)..(1386): n is a, c, g, or t
ctctaatgttactttgtctttgtggtgaggagtggttttccaaaaggactttctcagtatttgctccaccctcagatttagatcttctttttgtgcctgtaccacagagacaacttctttttttgtctgtctcccaaattttgcactgttggtgggaatgtaaattagttttgtggttgaacttgattgctgttactttttacttgatgcttttgaggcagagggacattttctgctgttaccttcagttttagagaggcagcgtggctgtgagtctccgaagcaggctgtttcagtgatcctgcctctccccgggactaaaatcacttcttattcttttcccctacctatgatgagttatcactggtgccctaagagccacaagactcactgttattttcctggggctgaagacctttattccaaagggacaatccgggagaagtatatgggcagggcattaagcctttcccagagctgctgctgttccgctcctgaagcctgcaccacaacagatactttatcagtactcttttttgctttttattttattctattttactttaagttccaggatacatgtgcagaacatgcaggtttgttacacaggtatatgtgtgccctggcggtttgctgcacctatcaacccgttgtctagttttaagccccacatacattagctatttgtcctgatggtctccctccctttgcccccatcccccaacaggctcagatgtatgttgtgcttctccctgtgtccatgtgatctcattgttaaaactcccacttataagtgagaacatgcagtgtttggttttctgttcctgtgttagtttgctgaggatgatggcttccagcttcatccatgtcactgcaaaggacatgacctcattcctttttatggctgcatagtattccatggtgtacatgtaccacattttctttatccagtctattattgatggacatttgggttggttccatgtctttgctattgaaaaatagtgctgcagtaaacatacaggtacatgtgtctttatagtagaatgatttatattcctttggatatatatccagtaatgagattattggatcaaatggtatttctggttctagatccttgaggaatcaccacactgtcttccacaatggctgaactaatttacattcccaacaacagtgtaaaaatgttcctatttctccacagcctggccagcatattgttaaaaggttctgtatatggtggagatggaggagatcgggggaggagatgagaaaggggcaagcataagtaggaacaaatgcaatatttccccagctgcgcgagggcaggagcaggaagaactaaacccaattaggaacaacagaggacagatgagtagatancagacatctgacgggaaatggccacgccacacttctcacccaggcagttcaacgtaggcaatttctgagtgccctggtattttttgtgtaagtgtctagaaaacagatcacaaagttagccaaattaaaaaggaagcagggagtcctatttctccgagaagaaagatttacaggtgggatctcaggcaggagccaagctggagaagcaggcttgattccttgtagtgggtgaggagactgctgggagagggcagggaagcagagaccggcaaaaagctgccccaacaagaatcctgtgcctgccaacctggtttacaaacatttcccactttatccccctcagaaagtcacagcacccatttcatgttctgtgaggctcccaaggagggaaacttctagtttgctgtcctttacctcacccctgtgaccacagcactaatttctcatgaattcttgttaccaatgagatacaaatgtttggggagctctggcctggtctgattttgagctctgtggaaatacgcagaccacgggggaggaggccgggaaatggactcggtttgagggcttgctcaaggatgcggttttgtttttcggctgatttactccaagacagccagagattgttctgtcgttgccacagaggtgactaaacaggaaggtaagtttgaggtaggaagaaaaccatccccaggagtttcatgtagcaaagaaggaagtagctgttacaaatgggtgacagtttacatgtgggtctaacagtctcagctctgttgttcaatctttcagttatactcagagagtaagcgggaggagccttggggctgctattgagtgcagcatcctgaaggctgttcttcaagtgttactcagactactatcccaagagcactcaaggcagttcttcctccatccctgctccctagctcccttggctttgatgagtttattacaaaagggctattcactttagaataggagggtaattaagactcctggtctgcagcccagatttactgcattttacaagttaataatatgatttttttttgtagctccaattgattggtaacagaagatgaagacaacagcataactaaattattttaaaaactaaaaagccatctgatttctcatttgagtattacaatttttgaacaactgttggaaatgtaacttgaagcagctgctttaagaagaaatacccactaacaaagaacaagcattagttttggctgtcatcaacttattatatgactaggtgcttgctttttttgtcagtaaattgtttttactgatgatgtagatacttttgtaaataaatgtaaatatgtacacaagtgactaggtggtttggctactgttttcctaagatagaaaaataagggtcacatacccttttaaaatctatactctttctcccttgctttaggggaaaaataattcattgtagggtcattcatggagtgagggagaaaagtactgtccctcactgggttccaactgctgtcagtacgaaggcaagtgaacacatgggtctttacttctagctgcttttgaaaagagcagatcaccaccatccagtgcagttgtataacacaggtggggcagggagacttctctcgctgccattaattagcctacttagtttgttgcattggttagctgtcacattgggaggtcaacagcagacagtagctggaaaaccgtagtcataacaaatacagagtggcagccactcctgaagtggtggatggtgccagttgcctctagcagccatgtaaacccaagtcaatacatagacgctttagcttgtgcctgcactgtccctggaattcctgtcacatgagagtctccaggctgaaggaagaaatcaatatttcttgactccaagatgggcctgtca

SEQ ID NO: 21490 - DNA, 936 bp, Homo sapiens
cggggcgggccgccggctgccagcccagggcggggcggagccctacttctggccgaccgcgtaggcggtgcttgaacttagggctgcttgtggctgggcactcgcgcagaggccggcccgacgagccatggttgctgggagcgacgcggggcgggccctgggggtcctcagcgtggtctgcctgctgcactgctttggtttcatcagctgtttttcccaacaaatatatggtgttgtgtatgggaatgtaactttccatgtaccaagcaatgtgcctttaaaagaggtcctatggaaaaaacaaaaggataaagttgcagaactggaaaattctgaattcagagctttctcatcttttaaaaatagggtttatttagacactgtgtcaggtagcctcactatctacaacttaacatcatcagatgaagatgagtatgaaatggaatcgccaaatattactgataccatgaagttctttctttatgtgcttgagtctcttccatctcccacactaacttgtgcattgactaatggaagcattgaagtccaatgcatgataccagagcattacaacagccatcgaggacttataatgtactcatgggattgtcctatggagcaatgtaaacgtaactcaaccagtatatattttaagatggaaaatgatcttccacaaaaaatacagtgtactcttagcaatccattatttaatacaacatcatcaatcattttgacaacctgtatcccaagcagcggtcattcaagacacagatatgcacttatacccataccattagcagtaattacaacatgtattgtgctgtatatgaatggtatgtatgctttttaaaacaaaatagtttgaaaacttgcattgttttccaaaggtcagaaaatagtttaaggatgaaaataaagtttgaaattttagacatt

SEQ ID NO: 21491 - DNA, 436 bp, Homo sapiens
agagagagaactgccacacacttttaaaccaacagatgtcatgagaactcactctctatcactagaatagcatggggaaaccatcccccatggtacaatcacctcccacccaggtccctctctcgacacatgggaattacaattcaagatgagatttgggtgaggacccagagccaaaccatatcagggtctgaatttattctgttaaatttgaacaggtagatctgacctagcaaaagaaagaattctcgctccttgatgctcaaggagtttgtctgctcatcctttcaagcttgtaaggaggttgcgagctcttcataaatttgcagatgataagtctaaatattactattttccccagctcctttctgaaagaagaaccagtgcggcggcctttactttcaatttctcatcttgggaggggtcctctagacgg

SEQ ID NO: 21492 - DNA, 1450 bp, Homo sapiens
  misc_feature (1261)..(1261): n is a, c, g, or t
  misc_feature (1321)..(1321): n is a, c, g, or t
  misc_feature (1339)..(1339): n is a, c, g, or t
  misc_feature (1354)..(1354): n is a, c, g, or t
  misc_feature (1361)..(1361): n is a, c, g, or t
  misc_feature (1397)..(1397): n is a, c, g, or t
cggggcgggccgccggctgccagcccagggcggggcggagccctacttctggccgaccgcgtaggcggtgcttgaacttagggctgcttgtggctgggcactcgcgcagaggccggcccgacgagccatggttgctgggagcgacgcggggcgggccctgggggtcctcagcgtggtctgcctgctgcactgctttggtttcatcagctgtttttcccaacaaatatatggtgttgtgtatgggaatgtaactttccatgtaccaagcaatgtgcctttaaaagaggtcctatggaaaaaacaaaaggataaagttgcagaactggaaaattctgaattcagagctttctcatcttttaaaaatagggtttatttagacactgtgtcaggtagcctcactatctacaacttaacatcatcagatgaagatgagtatgaaatggaatcgccaaatattactgataccatgaagttctttctttatgtgcttgagtctcttccatctcccacactaacttgtgcattgactaatggaagcattgaagtccaatgcatgataccagagcattacaacagccatcgaggacttataatgtactcatgggattgtcctatggagcaatgtaaacgtaactcaaccagtatatattttaagatggaaaatgatcttccacaaaaaatacagtgtactcttagcaatccattatttaatacaacatcatcaatcattttgacaacctgtatcccaagcagcggtcattcaagacacagatatgcacttatacccataccattagcagtaattacaacatgtattgtgctgtatatgaatggtattctgaaatgtgacagaaaaccagacagaaccaactccaattgattggtaacagaagatgaagacaacagcataactaaattattttaaaaactaaaaagccatctgatttctcatttgagtattacaatttttgaacaactgttggaaatgtaacttgaagcagctgctttaagaagaaatacccactaacaaagaacaagcattagttttggctgtcatcaacttattatatgactaggtgcttgctttttttgtcagtaaattgtttttactgatgatgtagatacttttgtaaataaatgtaaatatgtacacaaaaaaaaaaaaaaaaaaaaaaaaaaaaaaaaaaaaaaaaaaaaaaaaaaaaaaaaaaaaaaaaaaaaaaaaatttatataataaataaaaaaaaaaattttattttnataaattattttttatattttttaaattaaatattttttttttttatttttattaaaaanttattaaaaaaataatanttttagtttttttanatttttnaaaaaaatttttttttatataaatatttttaatttnaaataaattaataaattttttttatttaaatctaataaaatggttataataaa

SEQ ID NO: 21493 - DNA, 1049 bp, Homo sapiens
agagagagaactgccacacacttttaaaccaacagatgtcatgagaactcactctctatcactagaatagcatggggaaaccatcccccatggtacaatcacctcccacccaggtccctctctcgacacatgggaattacaattcaagatgagatttgggtgaggacccagagccaaaccatatcagggtctgaatttattctgttaaatttgaacaggtagatctgacctagcaaaagaaagaattctcgctccttgatgctcaaggagtttgtctgctcatcctttcaagcttgtaaggaggttgcgagctcttcataaatttgcagatgataagtctaaatattactattttctgtactaaatattatacttttttttccagagtctcttccatctcccacactaacttgtgcattgactaatggaagcattgaagtccaatgcatgataccagagcattacaacagccatcgaggacttataatgtactcatgggattgtcctatggagcaatgtaaacgtaactcaaccagtatatattttaagatggaaaatgatcttccacaaaaaatacagtgtactcttagcaatccattatttaatacaacatcatcaatcattttgacaacctgtatcccaagcagcggtcattcaagacacagatatgcacttatacccataccattagcagtaattacaacatgtattgtgctgtatatgaatggtattctgaaatgtgacagaaaaccagacagaaccaactccaattgattggtaacagaagatgaagacaacagcataactaaattattttaaaaactaaaaagccatctgatttctcatttgagtattacaatttttgaacaactgttggaaatgtaacttgaagcagctgctttaagaagaaatacccactaacaaagaacaagcattagttttggctgtcatcaacttattatatgactaggtgcttgctttttttgtcagtaaattgtttttactgatgatgtagatacttttgtaaataaatgtaaatatgtacacaa

SEQ ID NO: 21494 - DNA, 891 bp, Homo sapiens
cggggcgggccgccggctgccagcccagggcggggcggagccctacttctggccgaccgcgtaggcggtgcttgaacttagggctgcttgtggctgggcactcgcgcagaggccggcccgacgagccatggttgctgggagcgacgcggggcgggccctgggggtcctcagcgtggtctgcctgctgcactgctttggtttcatcagctgtttttcccaacaaatatatggtgttgtgtatgggaatgtaactttccatgtaccaagcaatgtgcctttaaaagaggtcctatggaaaaaacaaaaggataaagttgcagaactggaaaattctgaattcagagctttctcatcttttaaaaatagggtttatttagacactgtgtcaggtagcctcactatctacaacttaacatcatcagatgaagatgagtatgaaatggaatcgccaaatattactgataccatgaagttctttctttatgtgcttggtcattcaagacacagatatgcacttatacccataccattagcagtaattacaacatgtattgtgctgtatatgaatggtattctgaaatgtgacagaaaaccagacagaaccaactccaattgattggtaacagaagatgaagacaacagcataactaaattattttaaaaactaaaaagccatctgatttctcatttgagtattacaatttttgaacaactgttggaaatgtaacttgaagcagctgctttaagaagaaatacccactaacaaagaacaagcattagttttggctgtcatcaacttattatatgactaggtgcttgctttttttgtcagtaaattgtttttactgatgatgtagatacttttgtaaataaatgtaaatatgtacacaa

SEQ ID NO: 21495 - DNA, 2726 bp, Homo sapiens
  misc_feature (1386)..(1386): n is a, c, g, or t
ctctaatgttactttgtctttgtggtgaggagtggttttccaaaaggactttctcagtatttgctccaccctcagatttagatcttctttttgtgcctgtaccacagagacaacttctttttttgtctgtctcccaaattttgcactgttggtgggaatgtaaattagttttgtggttgaacttgattgctgttactttttacttgatgcttttgaggcagagggacattttctgctgttaccttcagttttagagaggcagcgtggctgtgagtctccgaagcaggctgtttcagtgatcctgcctctccccgggactaaaatcacttcttattcttttcccctacctatgatgagttatcactggtgccctaagagccacaagactcactgttattttcctggggctgaagacctttattccaaagggacaatccgggagaagtatatgggcagggcattaagcctttcccagagctgctgctgttccgctcctgaagcctgcaccacaacagatactttatcagtactcttttttgctttttattttattctattttactttaagttccaggatacatgtgcagaacatgcaggtttgttacacaggtatatgtgtgccctggcggtttgctgcacctatcaacccgttgtctagttttaagccccacatacattagctatttgtcctgatggtctccctccctttgcccccatcccccaacaggctcagatgtatgttgtgcttctccctgtgtccatgtgatctcattgttaaaactcccacttataagtgagaacatgcagtgtttggttttctgttcctgtgttagtttgctgaggatgatggcttccagcttcatccatgtcactgcaaaggacatgacctcattcctttttatggctgcatagtattccatggtgtacatgtaccacattttctttatccagtctattattgatggacatttgggttggttccatgtctttgctattgaaaaatagtgctgcagtaaacatacaggtacatgtgtctttatagtagaatgatttatattcctttggatatatatccagtaatgagattattggatcaaatggtatttctggttctagatccttgaggaatcaccacactgtcttccacaatggctgaactaatttacattcccaacaacagtgtaaaaatgttcctatttctccacagcctggccagcatattgttaaaaggttctgtatatggtggagatggaggagatcgggggaggagatgagaaaggggcaagcataagtaggaacaaatgcaatatttccccagctgcgcgagggcaggagcaggaagaactaaacccaattaggaacaacagaggacagatgagtagatancagacatctgacgggaaatggccacgccacacttctcacccaggcagttcaacgtaggcaatttctgagtgccctggtattttttgtgtaagtgtctagaaaacagatcacaaagttagccaaattaaaaaggaagcagggagtcctatttctccgagaagaaagatttacaggtgggatctcaggcaggagccaagctggagaagcaggcttgattccttgtagtgggtgaggagactgctgggagagggcagggaagcagagaccggcaaaaagctgccccaacaagaatcctgtgcctgccaacctggtttacaaacatttcccactttatccccctcagaaagtcacagcacccatttcatgttctgtgaggctcccaaggagggaaacttctagtttgctgtcctttacctcacccctgtgaccacagcactaatttctcatgaattcttgttaccaatgagatacaaatgtttggggagctctggcctggtctgattttgagctctgtggaaatacgcagaccacgggggaggaggccgggaaatggactcggtttgagggcttgctcaaggatgcggttttgtttttcggctgatttactccaagacagccagagattgttctgtcgttgccacagaggtgactaaacaggaaggtaagtttgaggtaggaagaaaaccatccccaggagtttcatgtagcaaagaaggaagtagctgttacaaatgggtgacagtttacatgtgggtctaacagtctcagctctgttgttcaatctttcagttatactcagagagtaagcgggaggagccttggggctgctattgagtgcagcatcctgaaggctgttcttcaagtgttactcagactactatcccaagagcactcaaggcagttcttcctccatccctgctccctagctcccttggctttgatgagtttattacaaaagggctattcactttagaataggagggtaattaagactcctggtctgcagcccagatttactgcattttacaagttaataatatgatttttttttgtagctccaattgattggtaacagaagatgaagacaacagcataactaaattattttaaaaactaaaaagccatctgatttctcatttgagtattacaatttttgaacaactgttggaaatgtaacttgaagcagctgctttaagaagaaatacccactaacaaagaacaagcattagttttggctgtcatcaacttattatatgactaggtgcttgctttttttgtcagtaaattgtttttactgatgatgtagatacttttgtaaataaatgtaaatatgtacacaa

SEQ ID NO: 21496 - DNA, 802 bp, Homo sapiens
gcctgggaacacagcctggacctgttgcatagcctccttttacctgtgatctgcttcaaaatatagttaaacttctggtctccaagtcagagtttgctaaagacctctttaggctgccacctctgtaattttcatgtcatataacacgaatggggctcccaggtaggaagggagttttggttgagttaagtgacttacgtaatacaagtaattgtgcttgtattacttcctgagccttctcagtcccctagcaatcttgggcagtcatacagcttggagaactgatgacttggagaatttgttcccagcctgttcattcctggtaatgagtaatccctctcaaatcccaaaggacagggagcaggctgtaattctgaagagtggatattcttgatgccacagcagtttccataccagccttcaccaaaaggaaatatgccagacagggaatgccgaagagtaaactttctacaagtgatagtatctaggatccattgtgtcatgaatcaagtttataaactagatttcagtttccttagacctgcactgtttagtatagtagccaattagccacatatgattatttaaatatatcatttaaaatgaaataccattaaatttaagattcattcctcagttacactaaccacctttcaagtgctcaatacctacatctggctagtggctaccatactggatagcccagataaggaataatcctatcattgcagaaagttttcttggtcagtgcagaactagactattttgcgatatcagtgctaaatataatttcctgatgata

SEQ ID NO: 21497 - DNA, 1756 bp, Homo sapiens
cggggcgggccgccggctgccagcccagggcggggcggagccctacttctggccgaccgcgtaggcggtgcttgaacttagggctgcttgtggctgggcactcgcgcagaggccggcccgacgagccatggttgctgggagcgacgcggggcgggccctgggggtcctcagcgtggtctgcctgctgcactgctttggtttcatcagctgtttttcccaacaaatatatggtgttgtgtatgggaatgtaactttccatgtaccaagcaatgtgcctttaaaagaggtcctatggaaaaaacaaaaggataaagttgcagaactggaaaattctgaattcagagctttctcatcttttaaaaatagggtttatttagacactgtgtcaggtagcctcactatctacaacttaacatcatcagatgaagatgagtatgaaatggaatcgccaaatattactgataccatgaagttctttctttatgtgcttgagtctcttccatctcccacactaacttgtgcattgactaatggaagcattgaagtccaatgcatgataccagagcattacaacagccatcgaggacttataatgtactcatgggattgtcctatggagcaatgtaaacgtaactcaaccagtatatattttaagatggaaaatgatcttccacaaaaaatacagtgtactcttagcaatccattatttaatacaacatcatcaatcattttgacaacctgtatcccaagcagcggtcattcaagacacagatatgcacttatacccataccattagcagtaattacaacatgtattgtgctgtatatgaatgttctttaattgagaagacaatttcttcatttttaggtattctgaaatgtgacagaaaaccagacagaaccaactccaattgattggtaacagaagatgaagacaacagcataactaaattattttaaaaactaaaaagccatctgatttctcatttgagtattacaatttttgaacaactgttggaaatgtaacttgaagcagctgctttaagaagaaatacccactaacaaagaacaagcattagttttggctgtcatcaacttattatatgactaggtgcttgctttttttgtcagtaaattgtttttactgatgatgtagatacttttgtaaataaatgtaaatatgtacacaagtgactaggtggtttggctactgttttcctaagatagaaaaataagggtcacatacccttttaaaatctatactctttctcccttgctttaggggaaaaataattcattgtagggtcattcatggagtgagggagaaaagtactgtccctcactgggttccaactgctgtcagtacgaaggcaagtgaacacatgggtctttacttctagctgcttttgaaaagagcagatcaccaccatccagtgcagttgtataacacaggtggggcagggagacttctctcgctgccattaattagcctacttagtttgttgcattggttagctgtcacattgggaggtcaacagcagacagtagctggaaaaccgtagtcataacaaatacagagtggcagccactcctgaagtggtggatggtgccagttgcctctagcagccatgtaaacccaagtcaatacatagacgctttagcttgtgcctgcactgtccctggaattcctgtcacatgagagtctccaggctgaaggaagaaatcaatatttcttgactccaagatgggcctgtca

SEQ ID NO: 21498 - DNA, 2549 bp, Homo sapiens
cggggcgggccgccggctgccagcccagggcggggcggagccctacttctggccgaccgcgtaggcggtgcttgaacttagggctgcttgtggctgggcactcgcgcagaggccggcccgacgagccatggttgctgggagcgacgcggggcgggccctgggggtcctcagcgtggtctgcctgctgcactgctttggtttcatcagctgtttttcccaacaaatatatggtgttgtgtatgggaatgtaactttccatgtaccaagcaatgtgcctttaaaagaggtcctatggaaaaaacaaaaggataaagttgcagaactggaaaattctgaattcagagctttctcatcttttaaaaatagggtttatttagacactgtgtcaggtagcctcactatctacaacttaacatcatcagatgaagatgagtatgaaatggaatcgccaaatattactgataccatgaagttctttctttatgtgcttgagtctcttccatctcccacactaacttgtgcattgactaatggaagcattgaagtccaatgcatgataccagagcattacaacagccatcgaggacttataatgtactcatgggattgtcctatggagcaatgtaaacgtaactcaaccagtatatattttaagatggaaaatgatcttccacaaaaaatacagtgtactcttagcaatccattatttaatacaacatcatcaatcattttgacaacctgtatcccaagcagcggtcattcaagacacagatatgcacttatacccataccattagcagtaattacaacatgtattgtgctgtatatgaatggtatgtatgctttttaaaacaaaatagtttgaaaacttgcattgttttccaaaggtcagaaaatagtttaaggatgaaaataaagtttgaaattttagacatttgaaaagaaacaaaaacttttttgctttacgtgtgtgggactgctgagcatgctaggttcctccaaagatccacattatctcaaggtagaatgaatccttaggccacagagagctttacaggcctgggaacacagcctggacctgttgcatagcctccttttacctgtgatctgcttcagctgccacctctgtaattttcatgtcatataacacgaatggggctcccaggtaggaagggagttttggttgagttaagtgacttacgtaatacaagtaattgtgcttgtattacttcctgagccttctcagtcccctagcaatcttgggcagtcatacagcttggagaactgatgacttggagaatttgttcccagcctgttcattcctggtaatgagtaatccctctcaaatcccaaaggacagggagcaggctgtaattctgaagagtggatattcttgatgccacagcagtttccataccagccttcaccaaaaggaaatatgccagacagggaatgccgaagagtaaactttctacaagtgatagtatctaggatccattgtgtcatgaatcaagtttataaactagatttcagtttccttagacctgcactgtttagtatagtagccaattagccacatatgattatttaaatatatcatttaaaatgaaataccattaaatttaagattcattcctcagttacactaaccacctttcaagtgctcaatacctacatctggctagtggctaccatactggatagcccagataaggaataatcctatcattgcagaaagttttcttggtcagtgcagaactagactattttgcgatatcagtgctaaatataatttcctgatgataacattttcatattataagttgtaaataccatgaaaatccatccctaagtaatagattatcagtcagttgactctccactaaacagtattataacgatcagctgaagaaagttttcagctattgcccaatgcataaaatattttgggagctcaaattttttaaaaatctattttaatccccaaatagcagtataatagttaatcatctcctgaacaggttggttcccagaaaccaaaatcattttccactcagtgttgttgtagatctcaattaaagaactaacccaggatacctgaactaaagagaggtggcactgagtttccatagaacttcaaaacaattggttgatttcacttaaaaaaaaaaaaaaaagtcattcaatatacagaaaattactcccctggtcagtactgttagccccagataatctgaaaaaatttgttcttaaaaaaaaaaaacaatttggaggccaggcatggtggctcatgcctgtaatcccagcacattgagaggtcgagttgtgtgcatcacttgagcccaggagtttgagaccagcctggacaacatggtgaaacactatctctacaaaaaaatacaaaaattagccaggcatggtggtgcatgcctgtagtcccagctactcaggaggctgaggcgggagggaggcagatgttgcagtgagctgagattgtgccactgcactccagcctgggtgatggagtgagaccctgtctcaaaaaacaa

SEQ ID NO: 21499 - DNA, 479 bp, Homo sapiens
cttagcacagggagaggcatcagggtgatactcgtaagtatgccagaggttaatggtggtgatttttctgctgagaaactcagtgtcccttttaagtgtcttggcttctgttctctttctgtgagggaaataaatttgttttagttgtttgcacactagtcactataaaatgccactatgaggttgtctttccttcacttcctcaagcttctttcctgtctttagttattgtcctttagttactgtttgagatcaagccctacagtctaattttttacatttttatgtcctttttatacagcttatcttggctcttattagccgtgggtactggtggggattattcgccagtgtttcctctatttaaaaaaattaataggactttattttttagagcagcagtaagcgtatagaaaaattgagtgcagagtaggagttcccgtatacctcctcactccacccctactcacaatttcctt

SEQ ID NO: 21500 - DNA, 571 bp, Homo sapiens
acacaggaccccagccaccttatgattctaaaagccttgctcaaagccgctgcagatgagttagctaggtctctaccacctcctcagcatcaactgactttccataatactcctctgcagagaaataaaggtctttcacgcctcccaggaagggatttgcttagcctcaaatgtgcacattcagaaatagctgtcataagaaagagaggatagtttgcagagaaataaccctcctaagtccacatcctattccttttaaataagagagtggtgccaagggaagagccctagaatgtcaaagccaacagggtgctcagataccacccaagtacagttccatctttggccataaggagacaatggtgtcaagaggctaaggccatatgatctgtaggtgaaaaacctgggatgagaatcaaggcctcgaaactttttccactacatcacagatttaggagcagttagagggaaggcttcaatctggagaacactaacaggctctagagattattgggtcatggtggcaggaagacatcctaagtggcccctacactaggatacagtagggaga

SEQ ID NO: 21501 - DNA, 438 bp, Homo sapiens
acttgccccactgttgtttctaggtacaacccacctgtgttcactggagttgctctctctcaggtaggacttcctgcagaaccacgcagcttcaggatctgccgggttgcgtgtttctgttacagtgttgtgactcttggatgtctgcatgtgtttttgtggcatttgtgtgtgtgggggtgtgtatgtatgtgtgcacctgtaagtagagtctacttaaagaaatgtggctaacacactacatggctttattgttttgagtgtcctaacattctggtagcctatatgtgtgactctgcttgggctgcagtgttctatgtttttttcttttctcttttttttctgtggatcataaatcctcagtgaattgggagggggtccaagaacctctggcatcctaatcacctaatactgcaaaaaaataaaaagccataacaa

SEQ ID NO: 21502 - DNA, 662 bp, Homo sapiens
tggaagtgcagcccagccagcagcttgcttttctcaccctgccttgtcgcagccagcctgactcttacttatacatctgagaagtgccagtctctataattcacatggctccaaatcctcataagtggttcaggttatgttctcccaagaatcctccatgccacattccaccctggtggccagatggagatgggtctgtacatttctgagcttaccaagtctctatctagagaatataatgctgaatgaatgtaatgcctctccctcacatgggaacactaaatatctacaaatggttctattggagccctcctcactcagtttagaatgaagggagtgcactactccttttgtcttgcagggagaagttatccctattcctaaagattcccatcaatgaatcttttatttctaatctcacatataatagaaagtgtagtggtctgtggatcagctttactatcttagaataaacttcatgtggatatatctagtacctttatttggaatgtgttggttcctatcacctcttgtcctcagtttcggtatgttatccaaagatcttagataactgaaaaactctaatttaactttctcttttatgcagatattcttattatatgtggtttccttttttgtgtgtgctttatttctgtggagta

SEQ ID NO: 21503 - DNA, 448 bp, Homo sapiens
tgaacgaagcttacctaacacatgtatttctcccataaggcacatcatagcccgcttgcactaaaggacactagacagcactacagcactgatgcttgggggccattttaaagagtgaattcaccaataaaaagcacaaaaatgcaaaaaacacggcagtaaatatactgtgaaaataacacggcttacggtatgagagctgaaacaaggcagcagagcatctccttgatcaacctcacctgggtactgtgcgtgtctgcaaaagatcctgaaagtgctgcgactttattggtaaccttttgaggttaccaatacattttagtgaataggcaaattctcagatacgaataatgaagaatgaagatcaactatacttcctggcaatatcaagggctgcccatatctcactttgcaggattcaatgtccaagtccatgttttccttcttc

SEQ ID NO: 21504 - DNA, 438 bp, Homo sapiens
gctgtaagctggaaatttcaaggcagaaacagcagataccacaactataactgggtctccttgttttttgttttatgtgtatacgtgagattatggggaaagacaaaagtaatgcatagagatttattttttaacattcaattcataagcagtgtttatacctctttgtacttacttgaaaagtgtatattatgtaaatttagtataaaaacacttggactaattcataccatgtggtaaaatttcacattcaaaagaaatacccttctgttattaaaaataaaaaaaaaaaggagccaggagggtggctcatgactgtaatcccagtgctctgggaagccaaggtggagggatcatttgaggccaggactacttgagaacagcctgggcaacatagctagatcccttctctacaaaaagtaaaaaaaaaaaaaaaaa

SEQ ID NO: 21505 - DNA, 738 bp, Homo sapiens
cttgatccagccatcagctctctccaaagagccttaagcagaggcgtacagtcccagaaggtggattgtcagggctgccagcaaattcatagaccccagcagcccaggcctctctctcttacaggcactactgaaatcagggggccaggcgggttttaattcacacacccactctgatcatttgctcgttggctgcctcagcactatgcagagacagatgctggagcctcttttgggcccagtgggaaatgtactgtgatcaattagagatacatgccatgagcctgagctttgccattcctgatttttaacagtattcaggccaggaaataatactcctgtatctttcagaggcaaaaattgatccatctgatagccataaatagaagtagatggaaatatacaaaaatacagtcctgtgagatatatacatacatatatatgtatatacatacagatgtatatgctatttttttaaagattcatagattcctgtcatctgatttctgatttagctaactatttatagttcagttgcctgtgggccaacactgatttgcttcactgatgagcagacaagattttaaaaatgagttttgagaaaagctctctcaagccagatgtggtagctagcatgcacctgtagtcccaggcactcggcaggaatgcttgtgcccaggagttcggtctggcctgggcaacgtactgagaccctgtgtcttaaaaaaagaaaaagag

SEQ ID NO: 21506 - DNA, 206 bp, Homo sapiens
gcgaaagtgaagtgtcaataggctctctctgtgtccttcaaaccacccatatggtcgttacaaacggcggcttgaggaaaggtggttttggaatcggtttctctctggtcttacatgatgcatctatactatactgcattataatacaggaaagggtcacttgctgacataaagcacagcaggcaggaatagaagagtcaacttag

SEQ ID NO: 21507 - DNA, 295 bp, Homo sapiens
cagccacagaagagcatgaagcagtgtgaccacagaggcagattggagtgatatggtcacaagccaaggcatactggcatttgccccaacctgaaagaggtaaggaacagattctcccctagggcctctggaagccaagtgcaatcctgccagtacttttattttggcccagtgatattgaattaggacttctggccttcagaactgtgagagaataacttactgttgttataagccttcaaatttgtgataatgttacagtagccatagaaaactaatatagcaatcattgttc

SEQ ID NO: 21508 - DNA, 239 bp, Homo sapiens
gtgtcttttattgtcctctaatgtttcccggtttcctttctttcctctcaatgagcttgtaaattccttaaggacaaagctctccttcttagtctctttttgatggtccccacagtgcctgcaactaataggaattcactaatcacttgttccttcagatggggaagcatgtccatgagcccccacctgggagcagagagaatgccaattaggtcaacaaacctgccaagaagttggaa

SEQ ID NO: 21509 - DNA, 1378 bp, Homo sapiens
tagtttaaataaatacatttaaatcttgttaaaatttaattgtttctggctgggcacggtggctcacacctgtaaccccaacactttgggtggctgaggcaggaggatcacttgaggtcaggagttcaaagccagcctggccaacatggcaaaacctcatctgtattaaaaatacaaaaattagccaaatgtggtggtacacgcctgtaatcccagctacttgggcatctgattcacaagagtcgtttgaccccaggaggtagaggttgcagtgagctgagatcgcaccactgcactccagcctggacgatagagtgagactctgtctcaaaaaaaaaaaaaaaaaaaaaaaaaattatttccataaagaatagatcaacatgtaggtataatgcctgctgttacttaataggcaagatcacgtctctggataccagcaccatgagagcagccatgaaaccaggctgggaggacctggtaagaaggtgtattcagaagttccatgcgcagcatgaaggagaatctgtgtcctatgctaagaggcatcatcatgaaggtaagcatctctaaatgatttttcttaaattattgcttcctgtgggagctttctgtcaatgattcctggagttcaccttgggaacagagctggtgactgttctcgtgagctgtctcatctggccccagtgttgccatctaaaggaaaatttaacaggagaacctgtaggacagaagagtgatgaaagtagaacaggagatgatagtgtcacagaggcaggcaaaaggaggaagaggtcattttctttgatccaggggcttctagatatgtgacaagattataagtaccatctaatgaaaagaaatattaacgattcagttagaatctgaatataagagtaagtggaattttggagagtgagtgaacccctggtgaaggtaacagtgggaccccaagcccttcttcaaggtggtaaccaacaaagactatccaggtgtttctagagggcccaaaagttgacacgacttgtctcagctcacagacttaagcaataggacagctggaactgagcccaagacttcagtaataacagcagcccttattgagcacctggtctttgtgtggcattatcccttttgcctcctctcactggccctcacagcaagcctgtgatgtgaacatcacgtctctcactctggacaaggggacgaggaggttcaggcaagtgaaatgactgactctctagcattcagtgtcagtgcaggacgtccatctgagctcattttggtcactgtcatgctgcttccgaaggtcttcccaaagaatcactttttctcaagtgcattgttgttttctgttaaagaggtaggaaccaaaaaaaaa

SEQ ID NO: 21510 - DNA, 8599 bp, Homo sapiens
ggcggccgcagcctcggctacagcttcggcggcgaaggtcagcgccgacggcagccggcacctgacggcgtgaccgacccgagccgatttctcttggatttggctacacacttatagatcttctgcactgtttacaggcacagttgctgatatgtgttcaagatgagtgggatgggagaaaatacctctgacccctccagggcagagacaagaaagcgcaaggaatgtcctgaccaacttggacccagccccaaaaggaacactgaaaaacgtaatcgtgaacaggaaaataaatatatagaagaacttgcagagttgatttttgcaaattttaatgatatagacaactttaacttcaaacctgacaaatgtgcaatcttaaaagaaactgtgaagcaaattcgtcagatcaaagaacaagagaaagcagcagctgccaacatagatgaagtgcagaagtcagatgtatcctctacagggcagggtgtcatcgacaaggatgcgctggggcctatgatgcttgaggcccttgatgggttcttctttgtagtgaacctggaaggcaacgttgtgtttgtgtcagagaatgtgacacagtatctaaggtataaccaagaagagctgatgaacaaaagtgtatatagcatcttgcatgttggggaccacacggaatttgtcaaaaacctgctgccaaagtctatagtaaatgggggatcttggtctggcgaacctccgaggcggaacagccataccttcaattgtcggatgctggtaaaacctttacctgattcagaagaggagggtcatgataaccaggaagctcatcagaaatatgaaactatgcagtgcttcgctgtctctcaaccaaagtccatcaaagaagaaggagaagatttgcagtcctgcttgatttgcgtggcaagaagagttcccatgaaggaaagaccagttcttccctcatcagaaagttttactactcgccaggatctccaaggcaagatcacgtctctggataccagcaccatgagagcagccatgaaaccaggctgggaggacctggtaagaaggtgtattcagaagttccatgcgcagcatgaaggagaatctgtgtcctatgctaagaggcatcatcatgaagtactgagacaaggattggcattcagtcaaatctatcgtttttccttgtctgatggcactcttgttgctgcacaaacgaagagcaaactcatccgttctcagactactaatgaacctcaacttgtaatatctttacatatgcttcacagagagcagaatgtgtgtgtgatgaatccggatctgactggacaaacgatggggaagccactgaatccaattagctctaacagccctgcccatcaggccctgtgcagtgggaacccaggtcaggacatgaccctcagtagcaatataaattttcccataaatggcccaaaggaacaaatgggcatgcccatgggcaggtttggtggttctgggggaatgaaccatgtgtcaggcatgcaagcaaccactcctcagggtagtaactatgcactcaaaatgaacagcccctcacaaagcagccctggcatgaatccaggacagcccacctccatgctttcaccaaggcatcgcatgagccctggagtggctggcagccctcgaatcccacccagtcagttttcccctgcaggaagcttgcattcccctgtgggagtttgcagcagcacaggaaatagccatagttataccaacagctccctcaatgcacttcaggccctcagcgaggggcacggggtctcattagggtcatcgttggcttcaccagacctaaaaatgggcaatttgcaaaactccccagttaatatgaatcctcccccactcagcaagatgggaagcttggactcaaaagactgttttggactatatggggagccctctgaaggtacaactggacaagcagagagcagctgccatcctggagagcaaaaggaaacaaatgaccccaacctgcccccggccgtgagcagtgagagagctgacgggcagagcagactgcatgacagcaaagggcagaccaaactcctgcagctgctgaccaccaaatctgatcagatggagccctcgcccttagccagctctttgtcggatacaaacaaagactccacaggtagcttgcctggttctgggtctacacatggaacctcgctcaaggagaagcataaaattttgcacagactcttgcaggacagcagttcccctgtggacttggccaagttaacagcagaagccacaggcaaagacctgagccaggagtccagcagcacagctcctggatcagaagtgactattaaacaagagccggtgagccccaagaagaaagagaatgcactacttcgctatttgctagataaagatgatactaaagatattggtttaccagaaataacccccaaacttgagagactggacagtaagacagatcctgccagtaacacaaaattaatagcaatgaaaactgagaaggaggagatgagctttgagcctggtgaccagcctggcagtgagctggacaacttggaggagattttggatgatttgcagaatagtcaattaccacagcttttcccagacacgaggccaggcgcccctgctggatcagttgacaagcaagccatcatcaatgacctcatgcaactcacagctgaaaacagccctgtcacacctgttggagcccagaaaacagcactgcgaatttcacagagcacttttaataacccacgaccagggcaactgggcaggttattgccaaaccagaatttaccacttgacatcacattgcaaagcccaactggtgctggacctttcccaccaatcagaaacagtagtccctactcagtgatacctcagccaggaatgatgggtaatcaagggatgataggaaaccaaggaaatttagggaacagtagcacaggaatgattggtaacagtgcttctcggcctactatgccatctggagaatgggcaccgcagagttcggctgtgagagtcacctgtgctgctaccaccagtgccatgaaccggccagtccaaggaggtatgattcggaacccagcagccagcatccccatgaggcccagcagccagcctggccaaagacagacgcttcagtctcaggtcatgaatatagggccatctgaattagagatgaacatggggggacctcagtatagccaacaacaagctcctccaaatcagactgccccatggcctgaaagcatcctgcctatagaccaggcgtcttttgccagccaaaacaggcagccatttggcagttctccagatgacttgctatgtccacatcctgcagctgagtctccgagtgatgagggagctctcctggaccagctgtatctggccttgcggaattttgatggcctggaggagattgatagagccttaggaatacccgaactggtcagccagagccaagcagtagatccagaacagttctcaagtcaggattccaacatcatgctggagcagaaggcgcccgttttcccacagcagtatgcatctcaggcacaaatggcccagggtagctattctcccatgcaagatccaaactttcacaccatgggacagcggcctagttatgccacactccgtatgcagcccagaccgggcctcaggcccacgggcctagtgcagaaccagccaaatcaactaagacttcaacttcagcatcgcctccaagcacagcagaatcgccagccacttatgaatcaaatcagcaatgtttccaatgtgaacttgactctgaggcctggagtaccaacacaggcacctattaatgcacagatgctggcccagagacagagggaaatcctgaaccagcatcttcgacagagacaaatgcatcagcaacagcaagttcagcaacgaactttgatgatgagaggacaagggttgaatatgacaccaagcatggtggctcctagtggtatgccagcaactatgagcaaccctcggattccccaggcaaatgcacagcagtttccatttcctccaaactacggaataagtcagcaacctgatccaggctttactggggctacgactccccagagcccacttatgtcaccccgaatggcacatacacagagtcccatgatgcaacagtctcaggccaacccagcctatcaggccccctccgacataaatggatgggcgcaggggaacatgggcggaaacagcatgttttcccagcagtccccaccacactttgggcagcaagcaaacaccagcatgtacagtaacaacatgaacatcaatgtgtccatggcgaccaacacaggtggcatgagcagcatgaaccagatgacaggacagatcagcatgacctcagtgacctccgtgcctacgtcagggctgtcctccatgggtcccgagcaggttaatgatcctgctctgaggggaggcaacctgttcccaaaccagctgcctggaatggatatgattaagcaggagggagacacaacacggaaatattgctgacactgctgaagccagttgcttcttcagctgaccgggctcacttgctcaaaacacttccagtctggagagctgtgtctatttgtttcaacccaactgacctgccagccggttctgctagagcagacaggcctggccctggttcccagggtggcgtccactcggctgtggcaggaggagctgcctcttctcttgacagtctgaagctcgcatccagacagtcgctcagtctgttcactgcattcaccttagtgcaacttagatctctcctgcaaaagtaaatgttgacaggcaaatttcatacccatgtcagattgaatgtatttaaatgtatgtatttaaggagaaccatgctcttgttctgttcctgttcggttccagacactggtttcttgctttgttttccctggctaacagtctagtgcaaaagattaagattttatctgggggaaagaaaagaattttttaaaaaattaaactaaagatgttttaagctaaagcctgaatttgggatggaagcaggacagacaccgtggacagcgctgtatttacagacacacccagtgcgtgaagaccaacaaagtcacagtcgtatctctagaaagctctaaagaccatgttggaaagagtctccagttactgaacagatgaaaaggagcctgtgagagggctgttaacattagcaaatattttttccttgttttttctttgttaaaaccaaactggttcacctgaatcatgaattgagaagaaataattttcatttctaaattaagtcccttttagtttgatcagacagcttgaatcagcatctcttcttccctgtcagcctgactcttcccttcccctctctcattccccatactccctattttcattccttttttaaaaaataatataagctacagaaaccaggtaagccctttatttccttaaatgttttgccagccacttaccaattgctaagtattgaatttcagaaaaaaaaaatgcatttactggcaaggagaagagcaaagttaaggcttgataccaatcgagctaaggatacctgctttggaagcatgtttattctgttccccagcaactctggcctccaaaatgggagaaaacgccagtgtgtttaaattgatagcagatatcacgacagatttaacctctgccatgtgttttttattttgttttttagcagtgctgactaagccgaagttttgtaaggtacataaaatccaatttatatgtaaacaagcaataatttaagttgagaacttatgtgttttaattgtataatttttgtgaggtatacatattgtggaattgactcaaaaatgaggtacttcagtattaaattagatatcttcatagcaatgtctcctaaaggtgttttgtaaaggatatcaatgccttgattagacctaatttgtagacttaagactttttattttctaaaccttgtgattctgcttataagtcatttatctaatctatatgatatgcagccgctgtaggaaccaattcttgatttttatatgtttatattctttcttaatgaaccttagaaagactacatgttactaagcaggccacttatggttgtttttcttgcccactctggtaggggaaaaatcttttattaataggtgtcagtttcagacaactccaataccaagaaactgatgaccttttttgagctatttctccttaacccctaatacctttcttacctaaatttcagaatgatatctttttgatgtctaaaaagcaaagcattttataatatctcattagccaggctttttaggaacagagaagtttttccttgaaatttgattgtttgtttatttgtggcagggtgaaaaatgtacaaactacccctatttatacttatatctctctctatatgtacgcattatggaaatataggaagagatatagcccaaagatagatggtaagtagacagtctgaaaatgttgctccatactaaagaacctttctggaaatttgcatttcgctacttttttccacttgagaggggtctcaatacagggaggtggccaaggaacaacacttctcagtggccaccagttcatatatcccctcaaaaggctctacttttctccaccaaaccattgggttgcccaactgtgatggaaaaaacaagcagatgttggcccagaactccaggacctccccgtgggctgaggctcatgtggcatacaattcagtgtgaccagttttaatgttcagaaatatgtgaattagaatgacttttaacttcacacagcacaaaagagaaatggagtttaaactggatttgttttgttttgagtttcaagtcccttttcactacaacaccgtccaaaactatctacctatctcttcttttttatccatctgcccgctgtattttaatgtcaatcctaattcagacaaatccgcaacttcatgatactggtaatttataataattcgtgatcattgctgttttgaaggaaaagagatgataaattctcttacggtttcaatcaggtaatggattttgttttacatctagttaggagaagaaaagtaagtgaaggaatcctctgatcatattgatcactatagaagcaaaagccaaatcagttcccttcattatcagtatttctcatgctgtacacaataaatttgttagactgagtacttggtttttgtttaatagaacaaataatcagtgtttcacttatattactaaatgtgaaaaacataatgtgaaaagtatacatacattaacttggttgtaaaactcattttaagtgttcatgtaatgtggtaagtttaaaaagtgaagtgagctgttttactacaatgaattcgtttgactcaaagattaaaatgcccctccccctatgtgtatctcttatggcctgtaataattgaaagcaatgtttttgcagtttatataatgcaatttttaatctgtgttcaaaaatggagttcatatgggcttaacacatgaaatgggtggcacagatccacttgcagaacccaaagatacacaatcagttttgaaatgcaacttaagccattaattgttggtgtgaatttaaaattttctagtgtttgtatggtggtatgctgcctaagagcaaagcatcctctgcacaaaagaaaattactgtagtggcttcgattttaattagaattttctccctggtgtttctttatagactaaagcaaaatcttttaagtttcttactacaggtaaaagctatgtgcaagaacctcaaaatgctaaaatctagcataatgccttagatctgtttttaagtcttgtatattcctacatagctgtccgatgtattatatttgtatagtgaattgtgtacaatttttgaataagtgcatcatcacttaacctttatgttgtttgaatagtgatgatgatacatttcttcagacatttaactgtcatttttttcctttgtcatttgtgagttttatttgtacagttcctcatgaagttgcatctgagatgtgtgtatatgaaaagattatacaagggtaaaattaagcaatatattaactatggttcttcaggagaaagcttacagtgtttcaggttgtgatttattttcaaaatggagttgactctgaacatcactttgttcacctgcattgatgtttgtatttctagtgtgagcagtttatgcaaaggtagatatattcagagaaattttaaatacatttatgcaagttaatattgctttgctgatgctatttgcttatttgatgttaaataatgctattgtaaataaagaattctgttgttattgcatcatttaataaattttaatgccttcgggttttacatggctttagagattttaatgtgtttatattgtatcttctttcataattgcatttaaaaagaccttgtaatttaataatttattatatttatatggtagttgacactgttgacagcaccttaacatttaattcttccaataacccattttataaatttttacatttgaaataaaggattatctaataacttaa

SEQ ID NO: 21511 - DNA, 8171 bp, Homo sapiens
ggcggccgcagcctcggctacagcttcggcggcgaaggtcagcgccgacggcagccggcacctgacggcgtgaccgacccgagccgatttctcttggatttggctacacacttatagatcttctgcactgtttacaggcacagttgctgatatgtgttcaagatgagtgggatgggagaaaatacctctgacccctccagggcagagacaagaaagcgcaaggaatgtcctgaccaacttggacccagccccaaaaggaacactgaaaaacgtaatcgtgaacaggaaaataaatatatagaagaacttgcagagttgatttttgcaaattttaatgatatagacaactttaacttcaaacctgacaaatgtgcaatcttaaaagaaactgtgaagcaaattcgtcagatcaaagaacaagagaaagcagcagctgccaacatagatgaagtgcagaagtcagatgtatcctctacagggcagggtgtcatcgacaaggatgcgctggggcctatgatgcttgaggcccttgatgggttcttctttgtagtgaacctggaaggcaacgttgtgtttgtgtcagagaatgtgacacagtatctaaggtataaccaagaagagctgatgaacaaaagtgtatatagcatcttgcatgttggggaccacacggaatttgtcaaaaacctgctgccaaagtctatagtaaatgggggatcttggtctggcgaacctccgaggcggaacagccataccttcaattgtcggatgctggtaaaacctttacctgattcagaagaggagggtcatgataaccaggaagctcatcagaaatatgaaactatgcagtgcttcgctgtctctcaaccaaagtccatcaaagaagaaggagaagatttgcagtcctgcttgatttgcgtggcaagaagagttcccatgaaggaaagaccagttcttccctcatcagaaagttttactactcgccaggatctccaaggcaagatcacgtctctggataccagcaccatgagagcagccatgaaaccaggctgggaggacctggtaagaaggtgtattcagaagttccatgcgcagcatgaaggagaatctgtgtcctatgctaagaggcatcatcatgaagtactgagacaaggattggcattcagtcaaatctatcgtttttccttgtctgatggcactcttgttgctgcacaaacgaagagcaaactcatccgttctcagactactaatgaacctcaacttgtaatatctttacatatgcttcacagagagcagaatgtgtgtgtgatgaatccggatctgactggacaaacgatggggaagccactgaatccaattagctctaacagccctgcccatcaggccctgtgcagtgggaacccaggtcaggacatgaccctcagtagcaatataaattttcccataaatggcccaaaggaacaaatgggcatgcccatgggcaggtttggtggttctgggggaatgaaccatgtgtcaggcatgcaagcaaccactcctcagggtagtaactatgcactcaaaatgaacagcccctcacaaagcagccctggcatgaatccaggacagcccacctccatgctttcaccaaggcatcgcatgagccctggagtggctggcagccctcgaatcccacccagtcagttttcccctgcaggaagcttgcattcccctgtgggagtttgcagcagcacaggaaatagccatagttataccaacagctccctcaatgcacttcaggccctcagcgaggggcacggggtctcattagggtcatcgttggcttcaccagacctaaaaatgggcaatttgcaaaactccccagttaatatgaatcctcccccactcagcaagatgggaagcttggactcaaaagactgttttggactatatggggagccctctgaaggtacaactggacaagcagagagcagctgccatcctggagagcaaaaggaaacaaatgaccccaacctgcccccggccgtgagcagtgagagagctgacgggcagagcagactgcatgacagcaaagggcagaccaaactcctgcagctgctgaccaccaaatctgatcagatggagccctcgcccttagccagctctttgtcggatacaaacaaagactccacaggtagcttgcctggttctgggtctacacatggaacctcgctcaaggagaagcataaaattttgcacagactcttgcaggacagcagttcccctgtggacttggccaagttaacagcagaagccacaggcaaagacctgagccaggagtccagcagcacagctcctggatcagaagtgactattaaacaagagccggtgagccccaagaagaaagagaatgcactacttcgctatttgctagataaagatgatactaaagatattggtttaccagaaataacccccaaacttgagagactggacagtaagacagatcctgccagtaacacaaaattaatagcaatgaaaactgagaaggaggagatgagctttgagcctggtgaccagcctggcagtgagctggacaacttggaggagattttggatgatttgcagaatagtcaattaccacagcttttcccagacacgaggccaggcgcccctgctggatcagttgacaagcaagccatcatcaatgacctcatgcaactcacagctgaaaacagccctgtcacacctgttggagcccagaaaacagcactgcgaatttcacagagcacttttaataacccacgaccagggcaactgggcaggttattgccaaaccagaatttaccacttgacatcacattgcaaagcccaactggtgctggacctttcccaccaatcagaaacagtagtccctactcagtgatacctcagccaggaatgatgggtaatcaagggatgataggaaaccaaggaaatttagggaacagtagcacaggaatgattggtaacagtgcttctcggcctactatgccatctggagaatgggcaccgcagagttcggctgtgagagtcacctgtgctgctaccaccagtgccatgaaccggccagtccaaggaggtatgattcggaacccagcagccagcatccccatgaggcccagcagccagcctggccaaagacagacgcttcagtctcaggtcatgaatatagggccatctgaattagagatgaacatggggggacctcagtatagccaacaacaagctcctccaaatcagactgccccatggcctgaaagcatcctgcctatagaccaggcgtcttttgccagccaaaacaggcagccatttggcagttctccagatgacttgctatgtccacatcctgcagctgagtctccgagtgatgagggagctctcctggaccagctgtatctggccttgcggaattttgatggcctggaggagattgatagagccttaggaatacccgaactggtcagccagagccaagcagtagatccagaacagttctcaagtcaggattccaacatcatgctggagcagaaggcgcccgttttcccacagcagtatgcatctcaggcacaaatggcccagggtagctattctcccatgcaagatccaaactttcacaccatgggacagcggcctagttatgccacactccgtatgcagcccagaccgggcctcaggcccacgggcctagtgcagaaccagccaaatcaactaagacttcaacttcagcatcgcctccaagcacagcagaatcgccagccacttatgaatcaaatcagcaatgtttccaatgtgaacttgactctgaggcctggagtaccaacacaggcacctattaatgcacagatgctggcccagagacagagggaaatcctgaaccagcatcttcgacagagacaaatgcatcagcaacagcaagttcagcaacgaactttgatgatgagaggacaagggttgaatatgacaccaagcatggtggctcctagtggtatgccagcaactatgagcaaccctcggattccccaggcaaatgcacagcagtttccatttcctccaaactacggaataagtcagcaacctgatccaggctttactggggctacgactccccagagcccacttatgtcaccccgaatggcacatacacagagtcccatgatgcaacagtctcaggccaacccagcctatcaggccccctccgacataaatggatgggcgcaggggaacatgggcggaaacagcatgttttcccagcagtccccaccacactttgggcagcaagcaaacaccagcatgtacagtaacaacatgaacatcaatgtgtccatggcgaccaacacaggtggcatgagcagcatgaaccagatgacaggacagatcagcatgacctcagtgacctccgtgcctacgtcagggctgtcctccatgggtcccgagcaggttaatgatcctgctctgaggggaggcaacctgttcccaaaccagctgcctggaatggatatgattaagcaggagggagacacaacacggaaatattgctgacactgctgaagccagttgcttcttcagctgaccgggctcacttgctcaaaacacttccagtctggagagctgtgtctatttgtttcaacccaactgacctgccagccggttctgctagagcagacaggcctggccctggttcccagggtggcgtccactcggctgtggcaggaggagctgcctcttctcttgacagtctgaagctcgcatccagacagtcgctcagtctgttcactgcattcaccttagtgcaacttagatctctcctgcaaaagtaaatgttgacaggcaaatttcatacccatgtcagattgaatgtatttaaatgtatgtatttaaggagaaccatgctcttgttctgttcctgttcggttccagacactggtttcttgctttgttttccctggctaacagtctagtgcaaaagattaagattttatctgggggaaagaaaagaattttttaaaaaattaaactaaagatgttttaagctaaagcctgaatttgggatggaagcaggacagacaccgtggacagcgctgtatttacagacacacccagtgcgtgaagaccaacaaagtcacagtcgtatctctagaaagctctaaagaccatgttggaaagagtctccagttactgaacagatgaaaaggagcctgtgagagggctgttaacattagcaaatattttttccttgttttttctttgttaaaaccaaactggttcacctgaatcatgaattgagaagaaataattttcatttctaaattaagtcccttttagtttgatcagacagcttgaatcagcatctcttcttccctgtcagcctgactcttcccttcccctctctcattccccatactccctattttcattccttttttaaaaaataatataagctacagaaaccaggtaagccctttatttccttaaatgttttgccagccacttaccaattgctaagtattgaatttcagaaaaaaaaaatgcatttactggcaaggagaagagcaaagttaaggcttgataccaatcgagctaaggatacctgctttggaagcatgtttattctgttccccagcaactctggcctccaaaatgggagaaaacgccagtgtgtttaaattgatagcagatatcacgacagatttaacctctgccatgtgttttttattttgttttttagcagtgctgactaagccgaagttttgtaaggtacataaaatccaatttatatgtaaacaagcaataatttaagttgagaacttatgtgttttaattgtataatttttgtgaggtatacatattgtggaattgactcaaaaatgaggtacttcagtattaaattagatatcttcatagcaatgtctcctaaaggtgttttgtaaaggatatcaatgccttgattagacctaatttgtagacttaagactttttattttctaaaccttgtgattctgcttataagtcatttatctaatctatatgatatgcagccgctgtaggaaccaattcttgatttttatatgtttatattctttcttaatgaaccttagaaagactacatgttactaagcaggccacttatggttgtttttcttgcccactctggtaggggaaaaatcttttattaataggtgtcagtttcagacaactccaataccaagaaactgatgaccttttttgagctatttctccttaacccctaatacctttcttacctaaatttcagaatgatatctttttgatgtctaaaaagcaaagcattttataatatctcattagccaggctttttaggaacagagaagtttttccttgaaatttgattgtttgtttatttgtggcagggtgaaaaatgtacaaactacccctatttatacttatatctctctctatatgtacgcattatggaaatataggaagagatatagcccaaagatagatggtaagtagacagtctgaaaatgttgctccatactaaagaacctttctggaaatttgcatttcgctacttttttccacttgagaggggtctcaatacagggaggtggccaaggaacaacacttctcagtggccaccagttcatatatcccctcaaaaggctctacttttctccaccaaaccattgggttgcccaactgtgatggaaaaaacaagcagatgttggcccagaactccaggacctccccgtgggctgaggctcatgtggcatacaattcagtgtgaccagttttaatgttcagaaatatgtgaattagaatgacttttaacttcacacagcacaaaagagaaatggagtttaaactggatttgttttgttttgagtttcaagtcccttttcactacaacaccgtccaaaactatctacctatctcttcttttttatccatctgcccgctgtattttaatgtcaatcctaattcagacaaatccgcaacttcatgatactggtaatttataataattcgtgatcattgctgttttgaaggaaaagagatgataaattctcttacggtttcaatcaggtaatggattttgttttacatctagttaggagaagaaaagtaagtgaaggaatcctctgatcatattgatcactatagaagcaaaagccaaatcagttcccttcattatcagtatttctcatgctgtacacaataaatttgttagactgagtacttggtttttgtttaatagaacaaataatcagtgtttcacttatattactaaatgtgaaaaacataatgtgaaaagtatacatacattaacttggttgtaaaactcattttaagtgttcatgtaatgtggtaagtttaaaaagtgaagtgagctgttttactacaatgaattcgtttgactcaaagattaaaatgcccctccccctatgtgtatctcttatggcctgtaataattgaaagcaatgtttttgcagtttatataatgcaatttttaatctgtgttcaaaaatggagttcatatgggcttaacacatgaaatgggtggcacagatccacttgcagaacccaaagatacacaatcagttttgaaatgcaacttaagccattaattgttggtgtgaatttaaaattttctagtgtttgtatggtggtatgctgcctaagagcaaagcatcctctgcacaaaagaaaattactgtagtggcttcgattttaattagaattttctccctggtgtttctttatagactaaagcaaaatcttttaagtttcttactacaggtaaaagctatgtgcaagaacctcaaaatgctaaaatctagcataatgccttagatctgtttttaagtcttgtatattcctacatagctgtccgatgtattatatttgtatagtgaattgtgtacaatttttgaataagtgcatcatcacttaacctttatgttgtttgaatagtgatgatgatacatttcttcagacatttaactgtcatttttttcctttgtcatttgtgagttttatttgtacagttcctcatgaagttgcatctgagatgtgtgtatatgaaaagattatacaagggtaaaattaagcaatatattaactatggttcttcaggagaaagcttaccatttaggtaaaatcctgggaagtc

SEQ ID NO: 21512 - DNA, 8213 bp, Homo sapiens
ggcggccgcagcctcggctacagcttcggcggcgaaggtcagcgccgacggcagccggcacctgacggcgtgaccgacccgagccgatttctcttggatttggctacacacttatagatcttctgcactgtttacaggcacagttgctgatatgtgttcaagatgagtgggatgggagaaaatacctctgacccctccagggcagagacaagaaagcgcaaggaatgtcctgaccaacttggacccagccccaaaaggaacactgaaaaacgtaatcgtgaacaggaaaataaatatatagaagaacttgcagagttgatttttgcaaattttaatgatatagacaactttaacttcaaacctgacaaatgtgcaatcttaaaagaaactgtgaagcaaattcgtcagatcaaagaacaagagaaagcagcagctgccaacatagatgaagtgcagaagtcagatgtatcctctacagggcagggtgtcatcgacaaggatgcgctggggcctatgatgcttgaggcccttgatgggttcttctttgtagtgaacctggaaggcaacgttgtgtttgtgtcagagaatgtgacacagtatctaaggtataaccaagaagagctgatgaacaaaagtgtatatagcatcttgcatgttggggaccacacggaatttgtcaaaaacctgctgccaaagtctatagtaaatgggggatcttggtctggcgaacctccgaggcggaacagccataccttcaattgtcggatgctggtaaaacctttacctgattcagaagaggagggtcatgataaccaggaagctcatcagaaatatgaaactatgcagtgcttcgctgtctctcaaccaaagtccatcaaagaagaaggagaagatttgcagtcctgcttgatttgcgtggcaagaagagttcccatgaaggaaagaccagttcttccctcatcagaaagttttactactcgccaggatctccaaggcaagatcacgtctctggataccagcaccatgagagcagccatgaaaccaggctgggaggacctggtaagaaggtgtattcagaagttccatgcgcagcatgaaggagaatctgtgtcctatgctaagaggcatcatcatgaagtactgagacaaggattggcattcagtcaaatctatcgtttttccttgtctgatggcactcttgttgctgcacaaacgaagagcaaactcatccgttctcagactactaatgaacctcaacttgtaatatctttacatatgcttcacagagagcagaatgtgtgtgtgatgaatccggatctgactggacaaacgatggggaagccactgaatccaattagctctaacagccctgcccatcaggccctgtgcagtgggaacccaggtcaggacatgaccctcagtagcaatataaattttcccataaatggcccaaaggaacaaatgggcatgcccatgggcaggtttggtggttctgggggaatgaaccatgtgtcaggcatgcaagcaaccactcctcagggtagtaactatgcactcaaaatgaacagcccctcacaaagcagccctggcatgaatccaggacagcccacctccatgctttcaccaaggcatcgcatgagccctggagtggctggcagccctcgaatcccacccagtcagttttcccctgcaggaagcttgcattcccctgtgggagtttgcagcagcacaggaaatagccatagttataccaacagctccctcaatgcacttcaggccctcagcgaggggcacggggtctcattagggtcatcgttggcttcaccagacctaaaaatgggcaatttgcaaaactccccagttaatatgaatcctcccccactcagcaagatgggaagcttggactcaaaagactgttttggactatatggggagccctctgaaggtacaactggacaagcagagagcagctgccatcctggagagcaaaaggaaacaaatgaccccaacctgcccccggccgtgagcagtgagagagctgacgggcagagcagactgcatgacagcaaagggcagaccaaactcctgcagctgctgaccaccaaatctgatcagatggagccctcgcccttagccagctctttgtcggatacaaacaaagactccacaggtagcttgcctggttctgggtctacacatggaacctcgctcaaggagaagcataaaattttgcacagactcttgcaggacagcagttcccctgtggacttggccaagttaacagcagaagccacaggcaaagacctgagccaggagtccagcagcacagctcctggatcagaagtgactattaaacaagagccggtgagccccaagaagaaagagaatgcactacttcgctatttgctagataaagatgatactaaagatattggtttaccagaaataacccccaaacttgagagactggacagtaagacagatcctgccagtaacacaaaattaatagcaatgaaaactgagaaggaggagatgagctttgagcctggtgaccagcctggcagtgagctggacaacttggaggagattttggatgatttgcagaatagtcaattaccacagcttttcccagacacgaggccaggcgcccctgctggatcagttgacaagcaagccatcatcaatgacctcatgcaactcacagctgaaaacagccctgtcacacctgttggagcccagaaaacagcactgcgaatttcacagagcacttttaataacccacgaccagggcaactgggcaggttattgccaaaccagaatttaccacttgacatcacattgcaaagcccaactggtgctggacctttcccaccaatcagaaacagtagtccctactcagtgatacctcagccaggaatgatgggtaatcaagggatgataggaaaccaaggaaatttagggaacagtagcacaggaatgattggtaacagtgcttctcggcctactatgccatctggagaatgggcaccgcagagttcggctgtgagagtcacctgtgctgctaccaccagtgccatgaaccggccagtccaaggaggtatgattcggaacccagcagccagcatccccatgaggcccagcagccagcctggccaaagacagacgcttcagtctcaggtcatgaatatagggccatctgaattagagatgaacatggggggacctcagtatagccaacaacaagctcctccaaatcagactgccccatggcctgaaagcatcctgcctatagaccaggcgtcttttgccagccaaaacaggcagccatttggcagttctccagatgacttgctatgtccacatcctgcagctgagtctccgagtgatgagggagctctcctggaccagctgtatctggccttgcggaattttgatggcctggaggagattgatagagccttaggaatacccgaactggtcagccagagccaagcagtagatccagaacagttctcaagtcaggattccaacatcatgctggagcagaaggcgcccgttttcccacagcagtatgcatctcaggcacaaatggcccagggtagctattctcccatgcaagatccaaactttcacaccatgggacagcggcctagttatgccacactccgtatgcagcccagaccgggcctcaggcccacgggcctagtgcagaaccagccaaatcaactaagacttcaacttcagcatcgcctccaagcacagcagaatcgccagccacttatgaatcaaatcagcaatgtttccaatgtgaacttgactctgaggcctggagtaccaacacaggcacctattaatgcacagatgctggcccagagacagagggaaatcctgaaccagcatcttcgacagagacaaatgcatcagcaacagcaagttcagcaacgaactttgatgatgagaggacaagggttgaatatgacaccaagcatggtggctcctagtggtatgccagcaactatgagcaaccctcggattccccaggcaaatgcacagcagtttccatttcctccaaactacggaataagtcagcaacctgatccaggctttactggggctacgactccccagagcccacttatgtcaccccgaatggcacatacacagagtcccatgatgcaacagtctcaggccaacccagcctatcaggccccctccgacataaatggatgggcgcaggggaacatgggcggaaacagcatgttttcccagcagtccccaccacactttgggcagcaagcaaacaccagcatgtacagtaacaacatgaacatcaatgtgtccatggcgaccaacacaggtggcatgagcagcatgaaccagatgacaggacagatcagcatgacctcagtgacctccgtgcctacgtcagggctgtcctccatgggtcccgagcaggttaatgatcctgctctgaggggaggcaacctgttcccaaaccagctgcctggaatggatatgattaagcaggagggagacacaacacggaaatattgctgacactgctgaagccagttgcttcttcagctgaccgggctcacttgctcaaaacacttccagtctggagagctgtgtctatttgtttcaacccaactgacctgccagccggttctgctagagcagacaggcctggccctggttcccagggtggcgtccactcggctgtggcaggaggagctgcctcttctcttgacagtctgaagctcgcatccagacagtcgctcagtctgttcactgcattcaccttagtgcaacttagatctctcctgcaaaagtaaatgttgacaggcaaatttcatacccatgtcagattgaatgtatttaaatgtatgtatttaaggagaaccatgctcttgttctgttcctgttcggttccagacactggtttcttgctttgttttccctggctaacagtctagtgcaaaagattaagattttatctgggggaaagaaaagaattttttaaaaaattaaactaaagatgttttaagctaaagcctgaatttgggatggaagcaggacagacaccgtggacagcgctgtatttacagacacacccagtgcgtgaagaccaacaaagtcacagtcgtatctctagaaagctctaaagaccatgttggaaagagtctccagttactgaacagatgaaaaggagcctgtgagagggctgttaacattagcaaatattttttccttgttttttctttgttaaaaccaaactggttcacctgaatcatgaattgagaagaaataattttcatttctaaattaagtcccttttagtttgatcagacagcttgaatcagcatctcttcttccctgtcagcctgactcttcccttcccctctctcattccccatactccctattttcattccttttttaaaaaataatataagctacagaaaccaggtaagccctttatttccttaaatgttttgccagccacttaccaattgctaagtattgaatttcagaaaaaaaaaatgcatttactggcaaggagaagagcaaagttaaggcttgataccaatcgagctaaggatacctgctttggaagcatgtttattctgttccccagcaactctggcctccaaaatgggagaaaacgccagtgtgtttaaattgatagcagatatcacgacagatttaacctctgccatgtgttttttattttgttttttagcagtgctgactaagccgaagttttgtaaggtacataaaatccaatttatatgtaaacaagcaataatttaagttgagaacttatgtgttttaattgtataatttttgtgaggtatacatattgtggaattgactcaaaaatgaggtacttcagtattaaattagatatcttcatagcaatgtctcctaaaggtgttttgtaaaggatatcaatgccttgattagacctaatttgtagacttaagactttttattttctaaaccttgtgattctgcttataagtcatttatctaatctatatgatatgcagccgctgtaggaaccaattcttgatttttatatgtttatattctttcttaatgaaccttagaaagactacatgttactaagcaggccacttatggttgtttttcttgcccactctggtaggggaaaaatcttttattaataggtgtcagtttcagacaactccaataccaagaaactgatgaccttttttgagctatttctccttaacccctaatacctttcttacctaaatttcagaatgatatctttttgatgtctaaaaagcaaagcattttataatatctcattagccaggctttttaggaacagagaagtttttccttgaaatttgattgtttgtttatttgtggcagggtgaaaaatgtacaaactacccctatttatacttatatctctctctatatgtacgcattatggaaatataggaagagatatagcccaaagatagatggtaagtagacagtctgaaaatgttgctccatactaaagaacctttctggaaatttgcatttcgctacttttttccacttgagaggggtctcaatacagggaggtggccaaggaacaacacttctcagtggccaccagttcatatatcccctcaaaaggctctacttttctccaccaaaccattgggttgcccaactgtgatggaaaaaacaagcagatgttggcccagaactccaggacctccccgtgggctgaggctcatgtggcatacaattcagtgtgaccagttttaatgttcagaaatatgtgaattagaatgacttttaacttcacacagcacaaaagagaaatggagtttaaactggatttgttttgttttgagtttcaagtcccttttcactacaacaccgtccaaaactatctacctatctcttcttttttatccatctgcccgctgtattttaatgtcaatcctaattcagacaaatccgcaacttcatgatactggtaatttataataattcgtgatcattgctgttttgaaggaaaagagatgataaattctcttacggtttcaatcaggtaatggattttgttttacatctagttaggagaagaaaagtaagtgaaggaatcctctgatcatattgatcactatagaagcaaaagccaaatcagttcccttcattatcagtatttctcatgctgtacacaataaatttgttagactgagtacttggtttttgtttaatagaacaaataatcagtgtttcacttatattactaaatgtgaaaaacataatgtgaaaagtatacatacattaacttggttgtaaaactcattttaagtgttcatgtaatgtggtaagtttaaaaagtgaagtgagctgttttactacaatgaattcgtttgactcaaagattaaaatgcccctccccctatgtgtatctcttatggcctgtaataattgaaagcaatgtttttgcagtttatataatgcaatttttaatctgtgttcaaaaatggagttcatatgggcttaacacatgaaatgggtggcacagatccacttgcagaacccaaagatacacaatcagttttgaaatgcaacttaagccattaattgttggtgtgaatttaaaattttctagtgtttgtatggtggtatgctgcctaagagcaaagcatcctctgcacaaaagaaaattactgtagtggcttcgattttaattagaattttctccctggtgtttctttatagactaaagcaaaatcttttaagtttcttactacaggtaaaagctatgtgcaagaacctcaaaatgctaaaatctagcataatgccttagatctgtttttaagtcttgtatattcctacatagctgtccgatgtattatatttgtatagtgaattgtgtacaatttttgaataagtgcatcatcacttaacctttatgttgtttgaatagtgatgatgatacatttcttcagacatttaactgtcatttttttcctttgtcattttgtggtctttcctccttgcttcccttcctgtcttccttttagtgaaggttattttctcgggtcatatgttttaatttctagctttttatttttgtgtgtttgttgtatgttatttttgatctcgaggttaccgtgaggcttgcaaatgatataactctattttcaactgctgacacgcggacgctt

SEQ ID NO: 21513 - DNA, 4610 bp, Homo sapiens
acaaaaccccaggagtcaaaacccatcatgatctagcttgctgaagccagggagaacacacccagagaaccttgggagtatctgattagggaaaatcaggagggccattttatagaagaagggtttgtactggatgaatttgaggaagaattaggaagcagtggccccttctggatcggatgctgccaaaaagcagctgggtgaattgttctgtcatctttattgaaggtgggagaaatgaaattgagctaggatgttgttggttggagagcggtcattaaggagagattcatcatccatttgcagacgatggcctgcgagaaatagcatgtaggattcgctgggctcctccttggctcctggaagcgttgtgtggagggaggaatggcgccctctgcctgttcacctccacatcgaatgtactcatccagatgcggcctctgtgatttgctttattgaaaacagtcaggaattttgatgtttttgtggtgggctttatgatgtttttttcaaaacctcaaagatgtttcacaactttttatctgttttcctacagaaatattgctgacactgctgaagccagttgcttcttcagctgaccgggctcacttgctcaaaacacttccagtctggagagctgtgtctatttgtttcaacccaactgacctgccagccggttctgctagagcagacaggcctggccctggttcccagggtggcgtccactcggctgtggcaggaggagctgcctcttctcttgacagtctgaagctcgcatccagacagtcgctcagtctgttcactgcattcaccttagtgcaacttagatctctcctgcaaaagtaaatgttgacaggcaaatttcatacccatgtcagattgaatgtatttaaatgtatgtatttaaggagaaccatgctcttgttctgttcctgttcggttccagacactggtttcttgctttgttttccctggctaacagtctagtgcaaaagattaagattttatctgggggaaagaaaagaattttttaaaaaattaaactaaagatgttttaagctaaagcctgaatttgggatggaagcaggacagacaccgtggacagcgctgtatttacagacacacccagtgcgtgaagaccaacaaagtcacagtcgtatctctagaaagctctaaagaccatgttggaaagagtctccagttactgaacagatgaaaaggagcctgtgagagggctgttaacattagcaaatattttttccttgttttttctttgttaaaaccaaactggttcacctgaatcatgaattgagaagaaataattttcatttctaaattaagtcccttttagtttgatcagacagcttgaatcagcatctcttcttccctgtcagcctgactcttcccttcccctctctcattccccatactccctattttcattccttttttaaaaaataatataagctacagaaaccaggtaagccctttatttccttaaatgttttgccagccacttaccaattgctaagtattgaatttcagaaaaaaaaaatgcatttactggcaaggagaagagcaaagttaaggcttgataccaatcgagctaaggatacctgctttggaagcatgtttattctgttccccagcaactctggcctccaaaatgggagaaaacgccagtgtgtttaaattgatagcagatatcacgacagatttaacctctgccatgtgttttttattttgttttttagcagtgctgactaagccgaagttttgtaaggtacataaaatccaatttatatgtaaacaagcaataatttaagttgagaacttatgtgttttaattgtataatttttgtgaggtatacatattgtggaattgactcaaaaatgaggtacttcagtattaaattagatatcttcatagcaatgtctcctaaaggtgttttgtaaaggatatcaatgccttgattagacctaatttgtagacttaagactttttattttctaaaccttgtgattctgcttataagtcatttatctaatctatatgatatgcagccgctgtaggaaccaattcttgatttttatatgtttatattctttcttaatgaaccttagaaagactacatgttactaagcaggccacttatggttgtttttcttgcccactctggtaggggaaaaatcttttattaataggtgtcagtttcagacaactccaataccaagaaactgatgaccttttttgagctatttctccttaacccctaatacctttcttacctaaatttcagaatgatatctttttgatgtctaaaaagcaaagcattttataatatctcattagccaggctttttaggaacagagaagtttttccttgaaatttgattgtttgtttatttgtggcagggtgaaaaatgtacaaactacccctatttatacttatatctctctctatatgtacgcattatggaaatataggaagagatatagcccaaagatagatggtaagtagacagtctgaaaatgttgctccatactaaagaacctttctggaaatttgcatttcgctacttttttccacttgagaggggtctcaatacagggaggtggccaaggaacaacacttctcagtggccaccagttcatatatcccctcaaaaggctctacttttctccaccaaaccattgggttgcccaactgtgatggaaaaaacaagcagatgttggcccagaactccaggacctccccgtgggctgaggctcatgtggcatacaattcagtgtgaccagttttaatgttcagaaatatgtgaattagaatgacttttaacttcacacagcacaaaagagaaatggagtttaaactggatttgttttgttttgagtttcaagtcccttttcactacaacaccgtccaaaactatctacctatctcttcttttttatccatctgcccgctgtattttaatgtcaatcctaattcagacaaatccgcaacttcatgatactggtaatttataataattcgtgatcattgctgttttgaaggaaaagagatgataaattctcttacggtttcaatcaggtaatggattttgttttacatctagttaggagaagaaaagtaagtgaaggaatcctctgatcatattgatcactatagaagcaaaagccaaatcagttcccttcattatcagtatttctcatgctgtacacaataaatttgttagactgagtacttggtttttgtttaatagaacaaataatcagtgtttcacttatattactaaatgtgaaaaacataatgtgaaaagtatacatacattaacttggttgtaaaactcattttaagtgttcatgtaatgtggtaagtttaaaaagtgaagtgagctgttttactacaatgaattcgtttgactcaaagattaaaatgcccctccccctatgtgtatctcttatggcctgtaataattgaaagcaatgtttttgcagtttatataatgcaatttttaatctgtgttcaaaaatggagttcatatgggcttaacacatgaaatgggtggcacagatccacttgcagaacccaaagatacacaatcagttttgaaatgcaacttaagccattaattgttggtgtgaatttaaaattttctagtgtttgtatggtggtatgctgcctaagagcaaagcatcctctgcacaaaagaaaattactgtagtggcttcgattttaattagaattttctccctggtgtttctttatagactaaagcaaaatcttttaagtttcttactacaggtaaaagctatgtgcaagaacctcaaaatgctaaaatctagcataatgccttagatctgtttttaagtcttgtatattcctacatagctgtccgatgtattatatttgtatagtgaattgtgtacaatttttgaataagtgcatcatcacttaacctttatgttgtttgaatagtgatgatgatacatttcttcagacatttaactgtcatttttttcctttgtcatttgtgagttttatttgtacagttcctcatgaagttgcatctgagatgtgtgtatatgaaaagattatacaagggtaaaattaagcaatatattaactatggttcttcaggagaaagcttacagtgtttcaggttgtgatttattttcaaaatggagttgactctgaacatcactttgttcacctgcattgatgtttgtatttctagtgtgagcagtttatgcaaaggtagatatattcagagaaattttaaatacatttatgcaagttaatattgctttgctgatgctatttgcttatttgatgttaaataatgctattgtaaataaagaattctgttgttattgcatcatttaataaattttaatgccttcgggttttacatggctttagagattttaatgtgtttatattgtatcttctttcataattgcatttaaaaagaccttgtaatttaataatttattatatttatatggtagttgacactgttgacagcaccttaacatttaattcttccaataacccattttataaatttttacatttgaaataaaggattatctaataacttaa

SEQ ID NO: 21514 - DNA, 3847 bp, Homo sapiens
ggcggccgcagcctcggctacagcttcggcggcgaaggtcagcgccgacggcagccggcacctgacggcgtgaccgacccgagccgatttctcttggatttggctacacacttatagatcttctgcactgtttacaggcacagttgctgatatgtgttcaagatgagtgggatgggagaaaatacctctgacccctccagggcagagacaagaaagcgcaaggaatgtcctgaccaacttggacccagccccaaaaggaacactgaaaaacgtaatcgtgaacaggaaaataaatatatagaagaacttgcagagttgatttttgcaaattttaatgatatagacaactttaacttcaaacctgacaaatgtgcaatcttaaaagaaactgtgaagcaaattcgtcagatcaaagaacaagagaaagcagcagctgccaacatagatgaagtgcagaagtcagatgtatcctctacagggcagggtgtcatcgacaaggatgcgctggggcctatgatgcttgaggcccttgatgggttcttctttgtagtgaacctggaaggcaacgttgtgtttgtgtcagagaatgtgacacagtatctaaggtataaccaagaagagctgatgaacaaaagtgtatatagcatcttgcatgttggggaccacacggaatttgtcaaaaacctgctgccaaagtctatagtaaatgggggatcttggtctggcgaacctccgaggcggaacagccataccttcaattgtcggatgctggtaaaacctttacctgattcagaagaggagggtcatgataaccaggaagctcatcagaaatatgaaactatgcagtgcttcgctgtctctcaaccaaagtccatcaaagaagaaggagaagatttgcagtcctgcttgatttgcgtggcaagaagagttcccatgaaggaaagaccagttcttccctcatcagaaagttttactactcgccaggatctccaaggcaagatcacgtctctggataccagcaccatgagagcagccatgaaaccaggctgggaggacctggtaagaaggtgtattcagaagttccatgcgcagcatgaaggagaatctgtgtcctatgctaagaggcatcatcatgaagtactgagacaaggattggcattcagtcaaatctatcgtttttccttgtctgatggcactcttgttgctgcacaaacgaagagcaaactcatccgttctcagactactaatgaacctcaacttgtaatatctttacatatgcttcacagagagcagaatgtgtgtgtgatgaatccggatctgactggacaaacgatggggaagccactgaatccaattagctctaacagccctgcccatcaggccctgtgcagtgggaacccaggtcaggacatgaccctcagtagcaatataaattttcccataaatggcccaaaggaacaaatgggcatgcccatgggcaggtttggtggttctgggggaatgaaccatgtgtcaggcatgcaagcaaccactcctcagggtagtaactatgcactcaaaatgaacagcccctcacaaagcagccctggcatgaatccaggacagcccacctccatgctttcaccaaggcatcgcatgagccctggagtggctggcagccctcgaatcccacccagtcagttttcccctgcaggaagcttgcattcccctgtgggagtttgcagcagcacaggaaatagccatagttataccaacagctccctcaatgcacttcaggccctcagcgaggggcacggggtctcattagggtcatcgttggcttcaccagacctaaaaatgggcaatttgcaaaactccccagttaatatgaatcctcccccactcagcaagatgggaagcttggactcaaaagactgttttggactatatggggagccctctgaaggtacaactggacaagcagagagcagctgccatcctggagagcaaaaggaaacaaatgaccccaacctgcccccggccgtgagcagtgagagagctgacgggcagagcagactgcatgacagcaaagggcagaccaaactcctgcagctgctgaccaccaaatctgatcagatggagccctcgcccttagccagctctttgtcggatacaaacaaagactccacaggtagcttgcctggttctgggtctacacatggaacctcgctcaaggagaagcataaaattttgcacagactcttgcaggacagcagttcccctgtggacttggccaagttaacagcagaagccacaggcaaagacctgagccaggagtccagcagcacagctcctggatcagaagtgactattaaacaagagccggtgagccccaagaagaaagagaatgcactacttcgctatttgctagataaagatgatactaaagatattggtttaccagaaataacccccaaacttgagagactggacagtaagacagatcctgccagtaacacaaaattaatagcaatgaaaactgagaaggaggagatgagctttgagcctggtgaccagcctggcagtgagctggacaacttggaggagattttggatgatttgcagaatagtcaattaccacagcttttcccagacacgaggccaggcgcccctgctggatcagttgacaagcaagccatcatcaatgacctcatgcaactcacagctgaaaacagccctgtcacacctgttggagcccagaaaacagcactgcgaatttcacagagcagaatgattggtaacagtgcttctcggcctactatgccatctggagaatgggcaccgcagagttcggctgtgagagtcacctgtgctgctaccaccagtgccatgaaccggccagtccaaggaggtatgattcggaacccagcagccagcatccccatgaggcccagcagccagcctggccaaagacagacgcttcagtctcaggtcatgaatatagggccatctgaattagagatgaacatggggggacctcagtatagccaacaacaagctcctccaaatcagactgccccatggcctgaaagcatcctgcctatagaccaggcgtcttttgccagccaaaacaggcagccatttggcagttctccagatgacttgctatgtccacatcctgcagctgagtctccgagtgatgagggagctctcctggaccagctgtatctggccttgcggaattttgatggcctggaggagattgatagagccttaggaatacccgaactggtcagccaggtatgcgcggaagggcagcaggtgggggccaagcgctctcatgggcgcagaggtgtccattttctgtttacaggtactccacggtctgctttttagaatatattgttgttgttttttttacctcaaaacaggctggccctgtttcttcctcccctttccttgtaaccctcacataaacttttgcctgagaatggagagcactgaaaatgagcattgcatacagttcaagttagcagaaagacacaaactcaagtccatttcacctggtgtccgcccttgctgatagggaaggacacacaagatacagagaaaccacaaacagcacattgctgccttgtgacctagaacgcttccccctggaagttggtgtgagtgtagtcgtgaccccagtattcatttcacacctgtgggctggtgataggaagctgtttgtgctaaaagaatactttccacataagttagcagaagtcattttacaggtagctgcaactctttcatcatttttacctttaaaaatggcgggttaaacctttcacttatggtttagcccaggagttcaaggatgtag

SEQ ID NO: 21515 - DNA, 293 bp, Homo sapiens
atattcccaagttgtaaaaatggtaaagatttttcctcctctagattatgaaagtatttagacaagtataaaagtagtacataaagatgaaataatcatatttttcctacatcattttaataattcagaggcaatgaatctgatgtttgtttctttgtaaaactggattacttttgccttgctcagtaaatgggggatcttggtctggcgaacctccgaggcggaacagccataccttcaattgtcggatgctggtaaaacctttacctgattcagaagaggagggtcatgat

SEQ ID NO: 21516 - DNA, 313 bp, Homo sapiens
tacccacctaccactttcatgaagagaataaaaccagtaggaagctcaggtacatagtgtttcatcactgtctcccttactgcttttttaatgacaggctgtgctgtcataaatacacttgggtttgtttgaatcactagaaaagcccaatatgataaatgtaaacatgtgtggtttaagatttgcagtcctgcttgatttgcgtggcaagaagagttcccatgaaggaaagaccagttcttccctcatcagaaagttttactactcgccaggatctccaaggtaaatttcctctccaaagaagaccaaagga

SEQ ID NO: 21517 - DNA, 8579 bp, Homo sapiens
ggcggccgcagcctcggctacagcttcggcggcgaaggtcagcgccgacggcagccggcacctgacggcgtgaccgacccgagccgatttctcttggatttggctacacacttatagatcttctgcactgtttacaggcacagttgctgatatgtgttcaagatgagtgggatgggagaaaatacctctgacccctccagggcagagacaagaaagcgcaaggaatgtcctgaccaacttggacccagccccaaaaggaacactgaaaaacgtaatcgtgaacaggaaaataaatatatagaagaacttgcagagttgatttttgcaaattttaatgatatagacaactttaacttcaaacctgacaaatgtgcaatcttaaaagaaactgtgaagcaaattcgtcagatcaaagaacaagagaaagcagcagctgccaacatagatgaagtgcagaagtcagatgtatcctctacagggcagggtgtcatcgacaaggatgcgctggggcctatgatgcttgaggcccttgatgggttcttctttgtagtgaacctggaaggcaacgttgtgtttgtgtcagagaatgtgacacagtatctaaggtataaccaagaagagctgatgaacaaaagtgtatatagcatcttgcatgttggggaccacacggaatttgtcaaaaacctgctgccaaagtctatagtaaatgggggatcttggtctggcgaacctccgaggcggaacagccataccttcaattgtcggatgctggtaaaacctttacctgattcagaagaggagggtcatgataaccaggaagctcatcagaaatatgaaactatgcagtgcttcgctgtctctcaaccaaagtccatcaaagaagaaggagaagatttgcagtcctgcttgatttgcgtggcaagaagagttcccatgaaggaaagaccagttcttccctcatcagaaagttttactactcgccaggatctccaaggcaagatcacgtctctggataccagcaccatgagagcagccatgaaaccaggctgggaggacctggtaagaaggtgtattcagaagttccatgcgcagcatgaaggagaatctgtgtcctatgctaagaggcatcatcatgaagtactgagacaaggattggcattcagtcaaatctatcgtttttccttgtctgatggcactcttgttgctgcacaaacgaagagcaaactcatccgttctcagactactaatgaacctcaacttgtaatatctttacatatgcttcacagagagcagaatgtgtgtgtgatgaatccggatctgactggacaaacgatggggaagccactgaatccaattagctctaacagccctgcccatcaggccctgtgcagtgggaacccaggtcaggacatgaccctcagtagcaatataaattttcccataaatggcccaaaggaacaaatgggcatgcccatgggcaggtttggtggttctgggggaatgaaccatgtgtcaggcatgcaagcaaccactcctcagggtagtaactatgcactcaaaatgaacagcccctcacaaagcagccctggcatgaatccaggacagcccacctccatgctttcaccaaggcatcgcatgagccctggagtggctggcagccctcgaatcccacccagtcagttttcccctgcaggaagcttgcattcccctgtgggagtttgcagcagcacaggaaatagccatagttataccaacagctccctcaatgcacttcaggccctcagcgaggggcacggggtctcattagggtcatcgttggcttcaccagacctaaaaatgggcaatttgcaaaactccccagttaatatgaatcctcccccactcagcaagatgggaagcttggactcaaaagactgttttggactatatggggagccctctgaaggtacaactggacaagcagagagcagctgccatcctggagagcaaaaggaaacaaatgaccccaacctgcccccggccgtgagcagtgagagagctgacgggcagagcagactgcatgacagcaaagggcagaccaaactcctgcagctgctgaccaccaaatctgatcagatggagccctcgcccttagccagctctttgtcggatacaaacaaagactccacaggtagcttgcctggttctgggtctacacatggaacctcgctcaaggagaagcataaaattttgcacagactcttgcaggacagcagttcccctgtggacttggccaagttaacagcagaagccacaggcaaagacctgagccaggagtccagcagcacagctcctggatcagaagtgactattaaacaagagccggtgagccccaagaagaaagagaatgcactacttcgctatttgctagataaagatgatactaaagatattggtttaccagaaataacccccaaacttgagagactggacagtaagacagatcctgccagtaacacaaaattaatagcaatgaaaactgagaaggaggagatgagctttgagcctggtgaccagcctggcagtgagctggacaacttggaggagattttggatgatttgcagaatagtcaattaccacagcttttcccagacacgaggccaggcgcccctgctggatcagttgacaagcaagccatcatcaatgacctcatgcaactcacagctgaaaacagccctgtcacacctgttggagcccagaaaacagcactgcgaatttcacagagcacttttaataacccacgaccagggcaactgggcaggttattgccaaaccagaatttaccacttgacatcacattgcaaagcccaactggtgctggacctttcccaccaatcagaaacagtagtccctactcagtgatacctcagccaggaatgatgggtaatcaagggatgataggaaaccaaggaaatttagggaacagtagcacaggaatgattggtaacagtgcttctcggcctactatgccatctggagaatgggcaccgcagagttcggctgtgagagtcacctgtgctgctaccaccagtgccatgaaccggccagtccaaggaggtatgattcggaacccagcagccagcatccccatgaggcccagcagccagcctggccaaagacagacgcttcagtctcaggtcatgaatatagggccatctgaattagagatgaacatggggggacctcagtatagccaacaacaagctcctccaaatcagactgccccatggcctgaaagcatcctgcctatagaccaggcgtcttttgccagccaaaacaggcagccatttggcagttctccagatgacttgctatgtccacatcctgcagctgagtctccgagtgatgagggagctctcctggaccagctgtatctggccttgcggaattttgatggcctggaggagattgatagagccttaggaatacccgaactggtcagccagagccaagcagtagatccagaacagttctcaagtcaggattccaacatcatgctggagcagaaggcgcccgttttcccacagcagtatgcatctcaggcacaaatggcccagggtagctattctcccatgcaagatccaaactttcacaccatgggacagcggcctagttatgccacactccgtatgcagcccagaccgggcctcaggcccacgggcctagtgcagaaccagccaaatcaactaagacttcaacttcagcatcgcctccaagcacagcagaatcgccagccacttatgaatcaaatcagcaatgtttccaatgtgaacttgactctgaggcctggagtaccaacacaggcacctattaatgcacagatgctggcccagagacagagggaaatcctgaaccagcatcttcgacagagacaaatgcatcagcaacagcaagttcagcaacgaactttgatgatgagaggacaagggttgaatatgacaccaagcatggtggctcctagtggtatgccagcaactatgagcaaccctcggattccccaggcaaatgcacagcagtttccatttcctccaaactacggaataagtcagcaacctgatccaggctttactggggctacgactccccagagcccacttatgtcaccccgaatggcacatacacagagtcccatgatgcaacagtctcaggccaacccagcctatcaggccccctccgacataaatggatgggcgcaggggaacatgggcggaaacagcatgttttcccagcagtccccaccacactttgggcagcaagcaaacaccagcatgtacagtaacaacatgaacatcaatgtgtccatggcgaccaacacaggtggcatgagcagcatgaaccagatgacaggacagatcagcatgacctcagtgacctccgtgcctacgtcagggctgtcctccatgggtcccgagcaggttaatgatcctgctctgaggggaggcaacctgttcccaaaccagctgcctggaatggatatgattaagcaggagggagacacaacacggaaatattgctgacactgctgaagccagttgcttcttcagctgaccgggctcacttgctcaaaacacttccagtctggagagctgtgtctatttgtttcaacccaactgacctgccagccggttctgctagagcagacaggcctggccctggttcccagggtggcgtccactcggctgtggcaggaggagctgcctcttctcttgacagtctgaagctcgcatccagacagtcgctcagtctgttcactgcattcaccttagtgcaacttagatctctcctgcaaaagtaaatgttgacaggcaaatttcatacccatgtcagattgaatgtatttaaatgtatgtatttaaggagaaccatgctcttgttctgttcctgttcggttccagacactggtttcttgctttgttttccctggctaacagtctagtgcaaaagattaagattttatctgggggaaagaaaagaattttttaaaaaattaaactaaagatgttttaagctaaagcctgaatttgggatggaagcaggacagacaccgtggacagcgctgtatttacagacacacccagtgcgtgaagaccaacaaagtcacagtcgtatctctagaaagctctaaagaccatgttggaaagagtctccagttactgaacagatgaaaaggagcctgtgagagggctgttaacattagcaaatattttttccttgttttttctttgttaaaaccaaactggttcacctgaatcatgaattgagaagaaataattttcatttctaaattaagtcccttttagtttgatcagacagcttgaatcagcatctcttcttccctgtcagcctgactcttcccttcccctctctcattccccatactccctattttcattccttttttaaaaaataatataagctacagaaaccaggtaagccctttatttccttaaatgttttgccagccacttaccaattgctaagtattgaatttcagaaaaaaaaaatgcatttactggcaaggagaagagcaaagttaaggcttgataccaatcgagctaaggatacctgctttggaagcatgtttattctgttccccagcaactctggcctccaaaatgggagaaaacgccagtgtgtttaaattgatagcagatatcacgacagatttaacctctgccatgtgttttttattttgttttttagcagtgctgactaagccgaagttttgtaaggtacataaaatccaatttatatgtaaacaagcaataatttaagttgagaacttatgtgttttaattgtataatttttgtgaggtatacatattgtggaattgactcaaaaatgaggtacttcagtattaaattagatatcttcatagcaatgtctcctaaaggtgttttgtaaaggatatcaatgccttgattagacctaatttgtagacttaagactttttattttctaaaccttgtgattctgcttataagtcatttatctaatctatatgatatgcagccgctgtaggaaccaattcttgatttttatatgtttatattctttcttaatgaaccttagaaagactacatgttactaagcaggccacttatggttgtttttcttgcccactctggtaggggaaaaatcttttattaataggtgtcagtttcagacaactccaataccaagaaactgatgaccttttttgagctatttctccttaacccctaatacctttcttacctaaatttcagaatgatatctttttgatgtctaaaaagcaaagcattttataatatctcattagccaggctttttaggaacagagaagtttttccttgaaatttgattgtttgtttatttgtggcagggtgaaaaatgtacaaactacccctatttatacttatatctctctctatatgtacgcattatggaaatataggaagagatatagcccaaagatagatggtaagtagacagtctgaaaatgttgctccatactaaagaacctttctggaaatttgcatttcgctacttttttccacttgagaggggtctcaatacagggaggtggccaaggaacaacacttctcagtggccaccagttcatatatcccctcaaaaggctctacttttctccaccaaaccattgggttgcccaactgtgatggaaaaaacaagcagatgttggcccagaactccaggacctccccgtgggctgaggctcatgtggcatacaattcagtgtgaccagttttaatgttcagaaatatgtgaattagaatgacttttaacttcacacagcacaaaagagaaatggagtttaaactggatttgttttgttttgagtttcaagtcccttttcactacaacaccgtccaaaactatctacctatctcttcttttttatccatctgcccgctgtattttaatgtcaatcctaattcagacaaatccgcaacttcatgatactggtaatttataataattcgtgatcattgctgttttgaaggaaaagagatgataaattctcttacggtttcaatcaggtaatggattttgttttacatctagttaggagaagaaaagtaagtgaaggaatcctctgatcatattgatcactatagaagcaaaagccaaatcagttcccttcattatcagtatttctcatgctgtacacaataaatttgttagactgagtacttggtttttgtttaatagaacaaataatcagtgtttcacttatattactaaatgtgaaaaacataatgtgaaaagtatacatacattaacttggttgtaaaactcattttaagtgttcatgtaatgtggtaagtttaaaaagtgaagtgagctgttttactacaatgaattcgtttgactcaaagattaaaatgcccctccccctatgtgtatctcttatggcctgtaataattgaaagcaatgtttttgcagtttatataatgcaatttttaatctgtgttcaaaaatggagttcatatgggcttaacacatgaaatgggtggcacagatccacttgcagaacccaaagatacacaatcagttttgaaatgcaacttaagccattaattgttggtgtgaatttaaaattttctagtgtttgtatggtggtatgctgcctaagagcaaagcatcctctgcacaaaagaaaattactgtagtggcttcgattttaattagaattttctccctggtgtttctttatagactaaagcaaaatcttttaagtttcttactacaggtaaaagctatgtgcaagaacctcaaaatgctaaaatctagcataatgccttagatctgtttttaagtcttgtatattcctacatagctgtccgatgtattatatttgtatagtgaattgtgtacaatttttgaataagtgcatcatcacttaacctttatgttgtttgaatagtgatgatgatacatttcttcagacatttaactgtcatttttttcctttgtcatttgtgagttttatttgtacagttcctcatgaagttgcatctgagatgtgtgtatatgaaaagattatacaagggtaaaattaagcaatatattaactatggttcttcaggagaaagcttacagtgtttcaggttgtgatttattttcaaaatggagttgactctgaacatcactttgttcacctgcattgatgtttgtatttctagtgtgagcagtttatgcaaaggtagatatattcagagaaattttaaatacatttatgcaagttaatattgctttgctgatgctatttgcttatttgatgttaaataatgctattgtaaataaagaattctgttgttattgcatcatttaataaattttaatgccttcgggaaaaaaacaaacaccacaaaaaaaaaaaaatttttgggccgcttgggcccaggaaaaaggttttttaaccctcttgttgtgggcgcggggccccatttgggttagtgggaccttgggcaatagcggtcccaagggaaatccggcccaggacaggggttgggttttctccccatttaaag

SEQ ID NO: 21518 - DNA, 8185 bp, Homo sapiens
  misc_feature (8151)..(8151): n is a, c, g, or t
ggcggccgcagcctcggctacagcttcggcggcgaaggtcagcgccgacggcagccggcacctgacggcgtgaccgacccgagccgatttctcttggatttggctacacacttatagatcttctgcactgtttacaggcacagttgctgatatgtgttcaagatgagtgggatgggagaaaatacctctgacccctccagggcagagacaagaaagcgcaaggaatgtcctgaccaacttggacccagccccaaaaggaacactgaaaaacgtaatcgtgaacaggaaaataaatatatagaagaacttgcagagttgatttttgcaaattttaatgatatagacaactttaacttcaaacctgacaaatgtgcaatcttaaaagaaactgtgaagcaaattcgtcagatcaaagaacaagagaaagcagcagctgccaacatagatgaagtgcagaagtcagatgtatcctctacagggcagggtgtcatcgacaaggatgcgctggggcctatgatgcttgaggcccttgatgggttcttctttgtagtgaacctggaaggcaacgttgtgtttgtgtcagagaatgtgacacagtatctaaggtataaccaagaagagctgatgaacaaaagtgtatatagcatcttgcatgttggggaccacacggaatttgtcaaaaacctgctgccaaagtctatagtaaatgggggatcttggtctggcgaacctccgaggcggaacagccataccttcaattgtcggatgctggtaaaacctttacctgattcagaagaggagggtcatgataaccaggaagctcatcagaaatatgaaactatgcagtgcttcgctgtctctcaaccaaagtccatcaaagaagaaggagaagatttgcagtcctgcttgatttgcgtggcaagaagagttcccatgaaggaaagaccagttcttccctcatcagaaagttttactactcgccaggatctccaaggcaagatcacgtctctggataccagcaccatgagagcagccatgaaaccaggctgggaggacctggtaagaaggtgtattcagaagttccatgcgcagcatgaaggagaatctgtgtcctatgctaagaggcatcatcatgaagtactgagacaaggattggcattcagtcaaatctatcgtttttccttgtctgatggcactcttgttgctgcacaaacgaagagcaaactcatccgttctcagactactaatgaacctcaacttgtaatatctttacatatgcttcacagagagcagaatgtgtgtgtgatgaatccggatctgactggacaaacgatggggaagccactgaatccaattagctctaacagccctgcccatcaggccctgtgcagtgggaacccaggtcaggacatgaccctcagtagcaatataaattttcccataaatggcccaaaggaacaaatgggcatgcccatgggcaggtttggtggttctgggggaatgaaccatgtgtcaggcatgcaagcaaccactcctcagggtagtaactatgcactcaaaatgaacagcccctcacaaagcagccctggcatgaatccaggacagcccacctccatgctttcaccaaggcatcgcatgagccctggagtggctggcagccctcgaatcccacccagtcagttttcccctgcaggaagcttgcattcccctgtgggagtttgcagcagcacaggaaatagccatagttataccaacagctccctcaatgcacttcaggccctcagcgaggggcacggggtctcattagggtcatcgttggcttcaccagacctaaaaatgggcaatttgcaaaactccccagttaatatgaatcctcccccactcagcaagatgggaagcttggactcaaaagactgttttggactatatggggagccctctgaaggtacaactggacaagcagagagcagctgccatcctggagagcaaaaggaaacaaatgaccccaacctgcccccggccgtgagcagtgagagagctgacgggcagagcagactgcatgacagcaaagggcagaccaaactcctgcagctgctgaccaccaaatctgatcagatggagccctcgcccttagccagctctttgtcggatacaaacaaagactccacaggtagcttgcctggttctgggtctacacatggaacctcgctcaaggagaagcataaaattttgcacagactcttgcaggacagcagttcccctgtggacttggccaagttaacagcagaagccacaggcaaagacctgagccaggagtccagcagcacagctcctggatcagaagtgactattaaacaagagccggtgagccccaagaagaaagagaatgcactacttcgctatttgctagataaagatgatactaaagatattggtttaccagaaataacccccaaacttgagagactggacagtaagacagatcctgccagtaacacaaaattaatagcaatgaaaactgagaaggaggagatgagctttgagcctggtgaccagcctggcagtgagctggacaacttggaggagattttggatgatttgcagaatagtcaattaccacagcttttcccagacacgaggccaggcgcccctgctggatcagttgacaagcaagccatcatcaatgacctcatgcaactcacagctgaaaacagccctgtcacacctgttggagcccagaaaacagcactgcgaatttcacagagcacttttaataacccacgaccagggcaactgggcaggttattgccaaaccagaatttaccacttgacatcacattgcaaagcccaactggtgctggacctttcccaccaatcagaaacagtagtccctactcagtgatacctcagccaggaatgatgggtaatcaagggatgataggaaaccaaggaaatttagggaacagtagcacaggaatgattggtaacagtgcttctcggcctactatgccatctggagaatgggcaccgcagagttcggctgtgagagtcacctgtgctgctaccaccagtgccatgaaccggccagtccaaggaggtatgattcggaacccagcagccagcatccccatgaggcccagcagccagcctggccaaagacagacgcttcagtctcaggtcatgaatatagggccatctgaattagagatgaacatggggggacctcagtatagccaacaacaagctcctccaaatcagactgccccatggcctgaaagcatcctgcctatagaccaggcgtcttttgccagccaaaacaggcagccatttggcagttctccagatgacttgctatgtccacatcctgcagctgagtctccgagtgatgagggagctctcctggaccagctgtatctggccttgcggaattttgatggcctggaggagattgatagagccttaggaatacccgaactggtcagccagagccaagcagtagatccagaacagttctcaagtcaggattccaacatcatgctggagcagaaggcgcccgttttcccacagcagtatgcatctcaggcacaaatggcccagggtagctattctcccatgcaagatccaaactttcacaccatgggacagcggcctagttatgccacactccgtatgcagcccagaccgggcctcaggcccacgggcctagtgcagaaccagccaaatcaactaagacttcaacttcagcatcgcctccaagcacagcagaatcgccagccacttatgaatcaaatcagcaatgtttccaatgtgaacttgactctgaggcctggagtaccaacacaggcacctattaatgcacagatgctggcccagagacagagggaaatcctgaaccagcatcttcgacagagacaaatgcatcagcaacagcaagttcagcaacgaactttgatgatgagaggacaagggttgaatatgacaccaagcatggtggctcctagtggtatgccagcaactatgagcaaccctcggattccccaggcaaatgcacagcagtttccatttcctccaaactacggaataagtcagcaacctgatccaggctttactggggctacgactccccagagcccacttatgtcaccccgaatggcacatacacagagtcccatgatgcaacagtctcaggccaacccagcctatcaggccccctccgacataaatggatgggcgcaggggaacatgggcggaaacagcatgttttcccagcagtccccaccacactttgggcagcaagcaaacaccagcatgtacagtaacaacatgaacatcaatgtgtccatggcgaccaacacaggtggcatgagcagcatgaaccagatgacaggacagatcagcatgacctcagtgacctccgtgcctacgtcagggctgtcctccatgggtcccgagcaggttaatgatcctgctctgaggggaggcaacctgttcccaaaccagctgcctggaatggatatgattaagcaggagggagacacaacacggaaatattgctgacactgctgaagccagttgcttcttcagctgaccgggctcacttgctcaaaacacttccagtctggagagctgtgtctatttgtttcaacccaactgacctgccagccggttctgctagagcagacaggcctggccctggttcccagggtggcgtccactcggctgtggcaggaggagctgcctcttctcttgacagtctgaagctcgcatccagacagtcgctcagtctgttcactgcattcaccttagtgcaacttagatctctcctgcaaaagtaaatgttgacaggcaaatttcatacccatgtcagattgaatgtatttaaatgtatgtatttaaggagaaccatgctcttgttctgttcctgttcggttccagacactggtttcttgctttgttttccctggctaacagtctagtgcaaaagattaagattttatctgggggaaagaaaagaattttttaaaaaattaaactaaagatgttttaagctaaagcctgaatttgggatggaagcaggacagacaccgtggacagcgctgtatttacagacacacccagtgcgtgaagaccaacaaagtcacagtcgtatctctagaaagctctaaagaccatgttggaaagagtctccagttactgaacagatgaaaaggagcctgtgagagggctgttaacattagcaaatattttttccttgttttttctttgttaaaaccaaactggttcacctgaatcatgaattgagaagaaataattttcatttctaaattaagtcccttttagtttgatcagacagcttgaatcagcatctcttcttccctgtcagcctgactcttcccttcccctctctcattccccatactccctattttcattccttttttaaaaaataatataagctacagaaaccaggtaagccctttatttccttaaatgttttgccagccacttaccaattgctaagtattgaatttcagaaaaaaaaaatgcatttactggcaaggagaagagcaaagttaaggcttgataccaatcgagctaaggatacctgctttggaagcatgtttattctgttccccagcaactctggcctccaaaatgggagaaaacgccagtgtgtttaaattgatagcagatatcacgacagatttaacctctgccatgtgttttttattttgttttttagcagtgctgactaagccgaagttttgtaaggtacataaaatccaatttatatgtaaacaagcaataatttaagttgagaacttatgtgttttaattgtataatttttgtgaggtatacatattgtggaattgactcaaaaatgaggtacttcagtattaaattagatatcttcatagcaatgtctcctaaaggtgttttgtaaaggatatcaatgccttgattagacctaatttgtagacttaagactttttattttctaaaccttgtgattctgcttataagtcatttatctaatctatatgatatgcagccgctgtaggaaccaattcttgatttttatatgtttatattctttcttaatgaaccttagaaagactacatgttactaagcaggccacttatggttgtttttcttgcccactctggtaggggaaaaatcttttattaataggtgtcagtttcagacaactccaataccaagaaactgatgaccttttttgagctatttctccttaacccctaatacctttcttacctaaatttcagaatgatatctttttgatgtctaaaaagcaaagcattttataatatctcattagccaggctttttaggaacagagaagtttttccttgaaatttgattgtttgtttatttgtggcagggtgaaaaatgtacaaactacccctatttatacttatatctctctctatatgtacgcattatggaaatataggaagagatatagcccaaagatagatggtaagtagacagtctgaaaatgttgctccatactaaagaacctttctggaaatttgcatttcgctacttttttccacttgagaggggtctcaatacagggaggtggccaaggaacaacacttctcagtggccaccagttcatatatcccctcaaaaggctctacttttctccaccaaaccattgggttgcccaactgtgatggaaaaaacaagcagatgttggcccagaactccaggacctccccgtgggctgaggctcatgtggcatacaattcagtgtgaccagttttaatgttcagaaatatgtgaattagaatgacttttaacttcacacagcacaaaagagaaatggagtttaaactggatttgttttgttttgagtttcaagtcccttttcactacaacaccgtccaaaactatctacctatctcttcttttttatccatctgcccgctgtattttaatgtcaatcctaattcagacaaatccgcaacttcatgatactggtaatttataataattcgtgatcattgctgttttgaaggaaaagagatgataaattctcttacggtttcaatcaggtaatggattttgttttacatctagttaggagaagaaaagtaagtgaaggaatcctctgatcatattgatcactatagaagcaaaagccaaatcagttcccttcattatcagtatttctcatgctgtacacaataaatttgttagactgagtacttggtttttgtttaatagaacaaataatcagtgtttcacttatattactaaatgtgaaaaacataatgtgaaaagtatacatacattaacttggttgtaaaactcattttaagtgttcatgtaatgtggtaagtttaaaaagtgaagtgagctgttttactacaatgaattcgtttgactcaaagattaaaatgcccctccccctatgtgtatctcttatggcctgtaataattgaaagcaatgtttttgcagtttatataatgcaatttttaatctgtgttcaaaaatggagttcatatgggcttaacacatgaaatgggtggcacagatccacttgcagaacccaaagatacacaatcagttttgaaatgcaacttaagccattaattgttggtgtgaatttaaaattttctagtgtttgtatggtggtatgctgcctaagagcaaagcatcctctgcacaaaagaaaattactgtagtggcttcgattttaattagaattttctccctggtgtttctttatagactaaagcaaaatcttttaagtttcttactacaggtaaaagctatgtgcaagaacctcaaaatgctaaaatctagcataatgccttagatctgtttttaagtcttgtatattcctacatagctgtccgatgtattatatttgtatagtgaattgtgtacaatttttgaataagtgcatcatcacttaacctttatgttgtttgaatagtgatgatgatacatttcttcagacatttaactgtcatttttttcctttgtcatttgtgagttttatttgtacagttcctcatgaagttgcatctgagatgtgtgtatatgaaaagattatacaagggtaaaattaagcaatatattaactatggttcttcaggagaaagcttagctacngccaatttaaataagggtcctctagagtcaccct

SEQ ID NO: 21519 - DNA, 8392 bp, Homo sapiens
ggcggccgcagcctcggctacagcttcggcggcgaaggtcagcgccgacggcagccggcacctgacggcgtgaccgacccgagccgatttctcttggatttggctacacacttatagatcttctgcactgtttacaggcacagttgctgatatgtgttcaagatgagtgggatgggagaaaatacctctgacccctccagggcagagacaagaaagcgcaaggaatgtcctgaccaacttggacccagccccaaaaggaacactgaaaaacgtaatcgtgaacaggaaaataaatatatagaagaacttgcagagttgatttttgcaaattttaatgatatagacaactttaacttcaaacctgacaaatgtgcaatcttaaaagaaactgtgaagcaaattcgtcagatcaaagaacaagagaaagcagcagctgccaacatagatgaagtgcagaagtcagatgtatcctctacagggcagggtgtcatcgacaaggatgcgctggggcctatgatgcttgaggcccttgatgggttcttctttgtagtgaacctggaaggcaacgttgtgtttgtgtcagagaatgtgacacagtatctaaggtataaccaagaagagctgatgaacaaaagtgtatatagcatcttgcatgttggggaccacacggaatttgtcaaaaacctgctgccaaagtctatagtaaatgggggatcttggtctggcgaacctccgaggcggaacagccataccttcaattgtcggatgctggtaaaacctttacctgattcagaagaggagggtcatgataaccaggaagctcatcagaaatatgaaactatgcagtgcttcgctgtctctcaaccaaagtccatcaaagaagaaggagaagatttgcagtcctgcttgatttgcgtggcaagaagagttcccatgaaggaaagaccagttcttccctcatcagaaagttttactactcgccaggatctccaaggcaagatcacgtctctggataccagcaccatgagagcagccatgaaaccaggctgggaggacctggtaagaaggtgtattcagaagttccatgcgcagcatgaaggagaatctgtgtcctatgctaagaggcatcatcatgaagtactgagacaaggattggcattcagtcaaatctatcgtttttccttgtctgatggcactcttgttgctgcacaaacgaagagcaaactcatccgttctcagactactaatgaacctcaacttgtaatatctttacatatgcttcacagagagcagaatgtgtgtgtgatgaatccggatctgactggacaaacgatggggaagccactgaatccaattagctctaacagccctgcccatcaggccctgtgcagtgggaacccaggtcaggacatgaccctcagtagcaatataaattttcccataaatggcccaaaggaacaaatgggcatgcccatgggcaggtttggtggttctgggggaatgaaccatgtgtcaggcatgcaagcaaccactcctcagggtagtaactatgcactcaaaatgaacagcccctcacaaagcagccctggcatgaatccaggacagcccacctccatgctttcaccaaggcatcgcatgagccctggagtggctggcagccctcgaatcccacccagtcagttttcccctgcaggaagcttgcattcccctgtgggagtttgcagcagcacaggaaatagccatagttataccaacagctccctcaatgcacttcaggccctcagcgaggggcacggggtctcattagggtcatcgttggcttcaccagacctaaaaatgggcaatttgcaaaactccccagttaatatgaatcctcccccactcagcaagatgggaagcttggactcaaaagactgttttggactatatggggagccctctgaaggtacaactggacaagcagagagcagctgccatcctggagagcaaaaggaaacaaatgaccccaacctgcccccggccgtgagcagtgagagagctgacgggcagagcagactgcatgacagcaaagggcagaccaaactcctgcagctgctgaccaccaaatctgatcagatggagccctcgcccttagccagctctttgtcggatacaaacaaagactccacaggtagcttgcctggttctgggtctacacatggaacctcgctcaaggagaagcataaaattttgcacagactcttgcaggacagcagttcccctgtggacttggccaagttaacagcagaagccacaggcaaagacctgagccaggagtccagcagcacagctcctggatcagaagtgactattaaacaagagccggtgagccccaagaagaaagagaatgcactacttcgctatttgctagataaagatgatactaaagatattggtttaccagaaataacccccaaacttgagagactggacagtaagacagatcctgccagtaacacaaaattaatagcaatgaaaactgagaaggaggagatgagctttgagcctggtgaccagcctggcagtgagctggacaacttggaggagattttggatgatttgcagaatagtcaattaccacagcttttcccagacacgaggccaggcgcccctgctggatcagttgacaagcaagccatcatcaatgacctcatgcaactcacagctgaaaacagccctgtcacacctgttggagcccagaaaacagcactgcgaatttcacagagcagaatgattggtaacagtgcttctcggcctactatgccatctggagaatgggcaccgcagagttcggctgtgagagtcacctgtgctgctaccaccagtgccatgaaccggccagtccaaggaggtatgattcggaacccagcagccagcatccccatgaggcccagcagccagcctggccaaagacagacgcttcagtctcaggtcatgaatatagggccatctgaattagagatgaacatggggggacctcagtatagccaacaacaagctcctccaaatcagactgccccatggcctgaaagcatcctgcctatagaccaggcgtcttttgccagccaaaacaggcagccatttggcagttctccagatgacttgctatgtccacatcctgcagctgagtctccgagtgatgagggagctctcctggaccagctgtatctggccttgcggaattttgatggcctggaggagattgatagagccttaggaatacccgaactggtcagccagagccaagcagtagatccagaacagttctcaagtcaggattccaacatcatgctggagcagaaggcgcccgttttcccacagcagtatgcatctcaggcacaaatggcccagggtagctattctcccatgcaagatccaaactttcacaccatgggacagcggcctagttatgccacactccgtatgcagcccagaccgggcctcaggcccacgggcctagtgcagaaccagccaaatcaactaagacttcaacttcagcatcgcctccaagcacagcagaatcgccagccacttatgaatcaaatcagcaatgtttccaatgtgaacttgactctgaggcctggagtaccaacacaggcacctattaatgcacagatgctggcccagagacagagggaaatcctgaaccagcatcttcgacagagacaaatgcatcagcaacagcaagttcagcaacgaactttgatgatgagaggacaagggttgaatatgacaccaagcatggtggctcctagtggtatgccagcaactatgagcaaccctcggattccccaggcaaatgcacagcagtttccatttcctccaaactacggaataagtcagcaacctgatccaggctttactggggctacgactccccagagcccacttatgtcaccccgaatggcacatacacagagtcccatgatgcaacagtctcaggccaacccagcctatcaggccccctccgacataaatggatgggcgcaggggaacatgggcggaaacagcatgttttcccagcagtccccaccacactttgggcagcaagcaaacaccagcatgtacagtaacaacatgaacatcaatgtgtccatggcgaccaacacaggtggcatgagcagcatgaaccagatgacaggacagatcagcatgacctcagtgacctccgtgcctacgtcagggctgtcctccatgggtcccgagcaggttaatgatcctgctctgaggggaggcaacctgttcccaaaccagctgcctggaatggatatgattaagcaggagggagacacaacacggaaatattgctgacactgctgaagccagttgcttcttcagctgaccgggctcacttgctcaaaacacttccagtctggagagctgtgtctatttgtttcaacccaactgacctgccagccggttctgctagagcagacaggcctggccctggttcccagggtggcgtccactcggctgtggcaggaggagctgcctcttctcttgacagtctgaagctcgcatccagacagtcgctcagtctgttcactgcattcaccttagtgcaacttagatctctcctgcaaaagtaaatgttgacaggcaaatttcatacccatgtcagattgaatgtatttaaatgtatgtatttaaggagaaccatgctcttgttctgttcctgttcggttccagacactggtttcttgctttgttttccctggctaacagtctagtgcaaaagattaagattttatctgggggaaagaaaagaattttttaaaaaattaaactaaagatgttttaagctaaagcctgaatttgggatggaagcaggacagacaccgtggacagcgctgtatttacagacacacccagtgcgtgaagaccaacaaagtcacagtcgtatctctagaaagctctaaagaccatgttggaaagagtctccagttactgaacagatgaaaaggagcctgtgagagggctgttaacattagcaaatattttttccttgttttttctttgttaaaaccaaactggttcacctgaatcatgaattgagaagaaataattttcatttctaaattaagtcccttttagtttgatcagacagcttgaatcagcatctcttcttccctgtcagcctgactcttcccttcccctctctcattccccatactccctattttcattccttttttaaaaaataatataagctacagaaaccaggtaagccctttatttccttaaatgttttgccagccacttaccaattgctaagtattgaatttcagaaaaaaaaaatgcatttactggcaaggagaagagcaaagttaaggcttgataccaatcgagctaaggatacctgctttggaagcatgtttattctgttccccagcaactctggcctccaaaatgggagaaaacgccagtgtgtttaaattgatagcagatatcacgacagatttaacctctgccatgtgttttttattttgttttttagcagtgctgactaagccgaagttttgtaaggtacataaaatccaatttatatgtaaacaagcaataatttaagttgagaacttatgtgttttaattgtataatttttgtgaggtatacatattgtggaattgactcaaaaatgaggtacttcagtattaaattagatatcttcatagcaatgtctcctaaaggtgttttgtaaaggatatcaatgccttgattagacctaatttgtagacttaagactttttattttctaaaccttgtgattctgcttataagtcatttatctaatctatatgatatgcagccgctgtaggaaccaattcttgatttttatatgtttatattctttcttaatgaaccttagaaagactacatgttactaagcaggccacttatggttgtttttcttgcccactctggtaggggaaaaatcttttattaataggtgtcagtttcagacaactccaataccaagaaactgatgaccttttttgagctatttctccttaacccctaatacctttcttacctaaatttcagaatgatatctttttgatgtctaaaaagcaaagcattttataatatctcattagccaggctttttaggaacagagaagtttttccttgaaatttgattgtttgtttatttgtggcagggtgaaaaatgtacaaactacccctatttatacttatatctctctctatatgtacgcattatggaaatataggaagagatatagcccaaagatagatggtaagtagacagtctgaaaatgttgctccatactaaagaacctttctggaaatttgcatttcgctacttttttccacttgagaggggtctcaatacagggaggtggccaaggaacaacacttctcagtggccaccagttcatatatcccctcaaaaggctctacttttctccaccaaaccattgggttgcccaactgtgatggaaaaaacaagcagatgttggcccagaactccaggacctccccgtgggctgaggctcatgtggcatacaattcagtgtgaccagttttaatgttcagaaatatgtgaattagaatgacttttaacttcacacagcacaaaagagaaatggagtttaaactggatttgttttgttttgagtttcaagtcccttttcactacaacaccgtccaaaactatctacctatctcttcttttttatccatctgcccgctgtattttaatgtcaatcctaattcagacaaatccgcaacttcatgatactggtaatttataataattcgtgatcattgctgttttgaaggaaaagagatgataaattctcttacggtttcaatcaggtaatggattttgttttacatctagttaggagaagaaaagtaagtgaaggaatcctctgatcatattgatcactatagaagcaaaagccaaatcagttcccttcattatcagtatttctcatgctgtacacaataaatttgttagactgagtacttggtttttgtttaatagaacaaataatcagtgtttcacttatattactaaatgtgaaaaacataatgtgaaaagtatacatacattaacttggttgtaaaactcattttaagtgttcatgtaatgtggtaagtttaaaaagtgaagtgagctgttttactacaatgaattcgtttgactcaaagattaaaatgcccctccccctatgtgtatctcttatggcctgtaataattgaaagcaatgtttttgcagtttatataatgcaatttttaatctgtgttcaaaaatggagttcatatgggcttaacacatgaaatgggtggcacagatccacttgcagaacccaaagatacacaatcagttttgaaatgcaacttaagccattaattgttggtgtgaatttaaaattttctagtgtttgtatggtggtatgctgcctaagagcaaagcatcctctgcacaaaagaaaattactgtagtggcttcgattttaattagaattttctccctggtgtttctttatagactaaagcaaaatcttttaagtttcttactacaggtaaaagctatgtgcaagaacctcaaaatgctaaaatctagcataatgccttagatctgtttttaagtcttgtatattcctacatagctgtccgatgtattatatttgtatagtgaattgtgtacaatttttgaataagtgcatcatcacttaacctttatgttgtttgaatagtgatgatgatacatttcttcagacatttaactgtcatttttttcctttgtcatttgtgagttttatttgtacagttcctcatgaagttgcatctgagatgtgtgtatatgaaaagattatacaagggtaaaattaagcaatatattaactatggttcttcaggagaaagcttacagtgtttcaggttgtgatttattttcaaaatggagttgactctgaacatcactttgttcacctgcattgatgtttgtatttctagtgtgagcagtttatgcaaaggtagatatattcagagaaattttaaatacatttatgcaagttaatattgctttgctgatgctatttgcttatttgatgttaaataatgctattgtaaataaagaattctgttgttattgcatcatttaataaattttaatgccttcgggttttacatggctttagagattttaatgtgtttatattgtatcttctttcataattgcatttaaaaagaccttgtaatttaataatttattatatttatatggtagttgacactgttgacagcaccttaacatttaattcttccaataacccattttataaatttttacatttgaaataaaggattatctaataacttaa

SEQ ID NO: 21520 - DNA, 3552 bp, Homo sapiens
ggcggccgcagcctcggctacagcttcggcggcgaaggtcagcgccgacggcagccggcacctgacggcgtgaccgacccgagccgatttctcttggatttggctacacacttatagatcttctgcactgtttacaggcacagttgctgatatgtgttcaagatgagtgggatgggagaaaatacctctgacccctccagggcagagacaagaaagcgcaaggaatgtcctgaccaacttggacccagccccaaaaggaacactgaaaaacgtaatcgtgaacaggaaaataaatatatagaagaacttgcagagttgatttttgcaaattttaatgatatagacaactttaacttcaaacctgacaaatgtgcaatcttaaaagaaactgtgaagcaaattcgtcagatcaaagaacaagagaaagcagcagctgccaacatagatgaagtgcagaagtcagatgtatcctctacagggcagggtgtcatcgacaaggatgcgctggggcctatgatgcttgaggcccttgatgggttcttctttgtagtgaacctggaaggcaacgttgtgtttgtgtcagagaatgtgacacagtatctaaggtataaccaagaagagctgatgaacaaaagtgtatatagcatcttgcatgttggggaccacacggaatttgtcaaaaacctgctgccaaagtctatagtaaatgggggatcttggtctggcgaacctccgaggcggaacagccataccttcaattgtcggatgctggtaaaacctttacctgattcagaagaggagggtcatgataaccaggaagctcatcagaaatatgaaactatgcagtgcttcgctgtctctcaaccaaagtccatcaaagaagaaggagaagatttgcagtcctgcttgatttgcgtggcaagaagagttcccatgaaggaaagaccagttcttccctcatcagaaagttttactactcgccaggatctccaaggcaagatcacgtctctggataccagcaccatgagagcagccatgaaaccaggctgggaggacctggtaagaaggtgtattcagaagttccatgcgcagcatgaaggagaatctgtgtcctatgctaagaggcatcatcatgaagtactgagacaaggattggcattcagtcaaatctatcgtttttccttgtctgatggcactcttgttgctgcacaaacgaagagcaaactcatccgttctcagactactaatgaacctcaacttgtaatatctttacatatgcttcacagagagcagaatgtgtgtgtgatgaatccggatctgactggacaaacgatggggaagccactgaatccaattagctctaacagccctgcccatcaggccctgtgcagtgggaacccaggtcaggacatgaccctcagtagcaatataaattttcccataaatggcccaaaggaacaaatgggcatgcccatgggcaggtttggtggttctgggggaatgaaccatgtgtcaggcatgcaagcaaccactcctcagggtagtaactatgcactcaaaatgaacagcccctcacaaagcagccctggcatgaatccaggacagcccacctccatgctttcaccaaggcatcgcatgagccctggagtggctggcagccctcgaatcccacccagtcagttttcccctgcaggaagcttgcattcccctgtgggagtttgcagcagcacaggaaatagccatagttataccaacagctccctcaatgcacttcaggccctcagcgaggggcacggggtctcattagggtcatcgttggcttcaccagacctaaaaatgggcaatttgcaaaactccccagttaatatgaatcctcccccactcagcaagatgggaagcttggactcaaaagactgttttggactatatggggagccctctgaaggtacaactggacaagcagagagcagctgccatcctggagagcaaaaggaaacaaatgaccccaacctgcccccggccgtgagcagtgagagagctgacgggcagagcagactgcatgacagcaaagggcagaccaaactcctgcagctgctgaccaccaaatctgatcagatggagccctcgcccttagccagctctttgtcggatacaaacaaagactccacaggtagcttgcctggttctgggtctacacatggaacctcgctcaaggagaagcataaaattttgcacagactcttgcaggacagcagttcccctgtggacttggccaagttaacagcagaagccacaggcaaagacctgagccaggagtccagcagcacagctcctggatcagaagtgactattaaacaagagccggtgagccccaagaagaaagagaatgcactacttcgctatttgctagataaagatgatactaaagatattggtttaccagaaataacccccaaacttgagagactggacagtaagacagatcctgccagtaacacaaaattaatagcaatgaaaactgagaaggaggagatgagctttgagcctggtgaccagcctggcagtgagctggacaacttggaggagattttggatgatttgcagaatagtcaattaccacagcttttcccagacacgaggccaggcgcccctgctggatcagttgacaagcaagccatcatcaatgacctcatgcaactcacagctgaaaacagccctgtcacacctgttggagcccagaaaacagcactgcgaatttcacagagcacttttaataacccacgaccagggcaactgggcaggttattgccaaaccagaatttaccacttgacatcacattgcaaagcccaactggtgctggacctttcccaccaatcagaaacagtagtccctactcagtgatacctcagccaggaatgatgggtaatcaagggatgataggaaaccaaggaaatttagggaacagtagcacaggaatgattggtaacagtgcttctcggcctactatgccatctggagaatgggcaccgcagagttcggctgtgagagtcacctgtgctgctaccaccagtgccatgaaccggccagtccaaggaggtatgattcggaacccagcagccagcatccccatgaggcccagcagccagcctggccaaagacagacgcttcagtctcaggtcatgaatatagggccatctgaattagagatgaacatggggggacctcagtatagccaacaacaagctcctccaaatcagactgccccatggcctgaaagcatcctgcctatagaccaggcgtcttttgccagccaaaacaggtgagtcctgagcacctagggtagccagttattttatacctgtccagaaattaatcttttcctttggagtagtcggtgcctgaccagttttcatttattggtactatattatctactgtgcagtgcatgaagaggaggggtgaatccagaaatcagtatgacctaggacatacctttaaaggagttacaaattaaatggaaaataacatatgtatgctgataactgtaatat

SEQ ID NO: 21521 - DNA, 128 bp, Homo sapiens
taaattcataaataaaaactaactactgagtattccgcttatttagaccactgcttctcaaattatctttcatgaaggactagtttatttattttcctaaatttcccatctgttacacatgaaactgg

SEQ ID NO: 21522 - DNA, 616 bp, Homo sapiens
atacaaaaacctataaaatatatttttatctcaacttttttcaagcgtgattataaaatgcaggatttatggactttcttaattatgactttacattttaaaagacaaaataaaattctgctgcagacatgagtgtggagaaatgccattgaaaacaggctgtctttttcaccctgttccatctcagcttctggcatggccggcagatgcccccgaggctgtcactgtggtcactattgccccagatttccacggagtccaccatggacacataacgaacctgaagaagtttaccgcctacttcacttccgttctgtgcttcaccacccctggggacgggcctcccagcacacctcagctggtctggactcaggaagacaaaccaggagctgtgggacatctgagtttcacagagatcttggacacatctctcaaggtcagctggcaggagcccctggagaaaaatggcatcattactggctatcagatctcttgggaagtgtacggcaggaacgactctcgtctcacgcacaccctgaacagcacgacgcacgagtacaagatccaaggcctctcatctctcaccacctacaccatcgacgtggccgctgtgact

SEQ ID NO: 21523 - DNA, 432 bp, Homo sapiens
atacaaaaacctataaaatatatttttatctcaacttttttcaagcgtgattataaaatgcaggatttatggactttcttaattatgactttacattttaaaagacaaaataaaattctgctgcagacatgagtgtggagaaatgccattgaaaacaggctgtctttttcaccctgttccatctcagcttctggcatggccggcagatgcccccgaggctgtcactgtggtcactattgccccagatttccacggagtccaccatggacacataacgaacctgaagaagtttaccgcctacttcacttccgttctgtgcttcaccacccctggggacgggcctcccagcacacctcagctggtctggactcaggaagacagtgagtattcctttctgcgtgtctcttaagtcacttgtcaaagaggtgtata

SEQ ID NO: 21524 - DNA, 326 bp, Homo sapiens
tctttctctcttccagatggagctgagcctgacactctaaccggttctctgggtgtactgcaaaggtctaataaaaggcacctttgcccggttgcttcaattctaggaagctgttcaatgtttgactatatttctccatactcatttgaaaacagttcatcaggttagttcagttgaattattgctccttgggagttttccaaaccctggatttccttcggagagagctagattctattccattcttggaattcagctccttgcccttctctgtgaccccggatcgcgaatgcagtaaaaataaaaatatcctgctgcctcctgca

SEQ ID NO: 21525 - DNA, 362 bp, Homo sapiens
tgtagagccagggtctccctatgttgcccaggctgatcttgaactcctggcttcaagaaatcctcccaccttggcctcccaaatgagattacaggctctgggagccaccacacccagatcattataaaaatttaaaattgttatttttgtaaatggttttcaaaatttgcattcctatgatgactatcaagtttatatacttttcaattaagtttcatttcctcatacaaatatttattgagaagctactatgtgtcaaactctgtactgggtgtaccatggagatggactaatcttatgcagtctgtctctctcctccaggaacttctagttaggtacacagggaaagacaaaataagttc

SEQ ID NO: 21526 - DNA, 504 bp, Homo sapiens
agacaaaagaagcaaataacatataaagaagctccgtatgtctggcagcacatttctcagtggaaccctcacatgccatgagggagggggatgacatatccagagtgctaaaggcaaaaaaaagcttccaacttagaatattatatccagcaacatcattcttcaaacataaaaaagaaataaaaactttcccaggcaaacaaaagctaaaaaatgtcaccaacaccagaactataaagggaattcttcaatttaaaagaaaaggattctcaagcaacaagaaatcatctgaaggtataaaagtcactggtaaaacattattcacaacagccaagacatggaaacaacctgaatgtccatcaacagatcggataaagaaaatgtgggtcaggcacggctgcttatgcctgtaatcgcatcattttgggaggttgagacggacgtaccacttgagaccagaagttcaagatccatctgggaaacatactgagacctcgtctttgc

SEQ ID NO: 21527 - DNA, 1482 bp, Homo sapiens
cttaaagggctgagggcacggaagaggcatggcagggcatggcatgctggaccaaagtgttgctaatggtgggttgcaacctattcgtgtgtcaggtgttaggttagtgcgtcgcagccaatagtaaaataacccaactaggttaaaaaaaaatagagtgtaagggcattgtttgttattaaatttttattttatattttttgagacagagtctcactctgtcacccaagccgggaggtggagtgagccaagatctaaccactgcactgcagcctgggcaacagagcaagactctgtctcaaaaaaaaaaaaagattaaaaataataattaggagggagaataaacgacatcttggttttttaaaagtcctttttatgccattaaagtgtggcttgtggtttattattacatttgtatgcaaccttggtactgacatttttatcaaaagatattggagagatttcaggaatgaggagttacattccctttatatcttgttgccagaaattactcttaagcaaaataaattctgcctgaaataaaaagaaaatgagaacacagcatatgcgtgtttttggctctgtgatctatgcaaatagttatgtattaactcattaattaaaatgggcttattctacacacacatttctaccattggatttttcttcttaaaaaataagcagagcagagtggggaggcggcaagaggacctgtggcaggccctcttcggccatctctctggcctggtttccctcggcgtgccactgtgtgctcagtccagcaccatggggaagcgggacaatcgggtggcctatatgcacccaatagcaatggcgagatcaaggggtccaatccagtcttcagggccaacaatacaggattatctgaattgaccaaggcctacctgggaagaagtaaaagagcaactagaaaagaaaaagaaaggttccaaggctttggctgaatttgaagaaaaaatgaatgagaactggaagaaagaactggaaaaacacagggagaaattgttaactgcaagtgagagctcatccaaaaaaaagacagagaaagaaaaaagaaaagaagaaatctgataggtattcatcttcttcatcaagctctgattcttccagcaattcttctgattctgaagatgaggataagaaacaaggaaaatgaagaaagaaaaagaagaaccgttcacataaatcttctgaaagctccatgtcagaaactgaatcagacagtaaggatagtttaaaaaagaaaaagaagtcaaaagatggaactgagaaagaaaaggatattaaaggactcagcaaaaagagaaagatgtattctgaagataaacctttatcatctgagtccttgtaagaatcagagtatattgaggaggtgcgagcaaaaaagaagaaaagcagtgaagaacgagaaaaagcaacagaaaaaacaaaaaagaataagaagcataagaaacacagtaa

SEQ ID NO: 21528 - DNA, 367 bp, Homo sapiens
gttctttatggaatttgacaagctagtgaagacacttctcaaaaataataataggactggggactttccctgtcagatatcagaccttattataaagctacagaaatcatgtggtactgttacagagacagacaaactgaccagtggaataagttagtaagtcaagaaagaaatctctttgtatctggaactttaatatgtgacctaagatggcatgacagatgcatgagaaaaataaaaagttttaaatacatcaaacttatggagaaaattagatccctatttcatatcctgacataaatatcagtatcagggcctggcacagtggctcacgccagtaatcgcagcactttgggaggccggagtg

SEQ ID NO: 21529 - DNA, 174 bp, Homo sapiens
tagctgtaagttgataattgttgagactaactggtattactcattattattctgtctgatttcatatctgattaaaattttccacaacagtataaaaacatataaagcccaatgccccccaaaacaagaaaaaacaaatacccacttgaatttaggaacagtctttttaaagtt

SEQ ID NO: 21530 - DNA, 699 bp, Homo sapiens
gacgggagtgctcaagcagggtacgggggaccagaccctcacacccatctggaggagcaaaagggctgtgtgcttttcagtaggaaactaacaggagttggtcacaaatgaaaggctaagcccagattttcaaatgatagaaaacagctgcaatcttaaaagcatgctctataaaacgtaaccaccagtatctgccagtcctttatcccaaacctctgccatgagcagaggtggaaaaaccttgacccaaaatcctggccctgaggcagaggcagaaagaaggcagttgtctgcggaactcttcaccccagtctcttgtccaaagacagcaaagccctcactcttaaaggaaagagggagtttgaaaaacagtccaagtaaaatctagatgttcagccaaagaatgggagttccaatttcaggagacctcacacaaaacaccacatgagacctctgaagatggagagtgtcacactggttcccagcgccactctcagaaaaaccaggtgattgaggggagacattctgaatcctgctgtcttacatcacgtatgtcagcctaaaaggaagaagctgaggcaaaattaatataagtagagagttgatttgggccaagcctgaggattgcagcccaggtgtatggattcaggttgctctgagtatacaccccattagcagaagttggaagtagatttttaa

SEQ ID NO: 21531 - DNA, 200 bp, Homo sapiens
aagcgcacaacagcgatttcacactgcctctttagactcctgatccgcgggaaaattccacttgtccgtgttttctccaagctctccgtaggtgcaagtcacctgttgcattaaataaaagcgaaagatgtgtcaactttcaaagattggctaaaaaaagaaaaagaagaaggaaagaacacattaagccagcaacagtg

SEQ ID NO: 21532 - DNA, 475 bp, Homo sapiens
  misc_feature (402)..(402): n is a, c, g, or t
  misc_feature (437)..(437): n is a, c, g, or t
  misc_feature (452)..(452): n is a, c, g, or t
  misc_feature (472)..(472): n is a, c, g, or t
aatttttaatggagatgcattcaaattcgttgctaaaatgggcctgacacctcttgaccttggctaaacagagattctggatggagcaaagcactgtgacgtcatgtggactttgaaggttaagaaactacggatcatcaggacatatttgctcttccatctcacagagaaaatggggatatacctcctcattccaggaaactttcttcctatatttctaatatatccaggataaaattcaatatatatagtcagtagcttcaaagttaagcataatttgtttactagaattcttaaggcagatgttggatcattaactcattctcttaggaaataactttgggtgcttataagtagggcatcacataatctggatacactggatattatatatataatccnggatatattaaatgtttttccataatttattaccntatattttccaggtnttaattggtgggaaaaaccnttt

SEQ ID NO: 21533 - DNA, 1515 bp, Homo sapiens
agatagaatcgagtcggtaccggcactctagtccaatgaaatgcggggtgaaatgaaatgaaatgaagaaataaatgaaatattgaaatgaataataaaattctgggtgcggtgatgcactccagcttgggtgatagagtgagactccatgttggtcaggctgatctcgaactcccgacctcaggttgcagtgagcagagatcgcgccactgaattccagcctgggcgatagagcgagtctgtctcagaatgaaatgacgtgacatgacatgacatgatgaaatgaataatgaaatgccgggtgtggtggcacactccagcctgggcaatagagcaagtctctgtctcgaaatgaaatggaatgaaatgaagagaataaatgaaataaatgaaatgaaataataaaatgaataatgaattgccaggtgaaatgaaatgaaatgatgaaatgaataatgaaatgccgggtgcagtggtgcactccaacctgggcaatagagcaggtctccgtctcgaaatgaaatgagatgacatgagatgaaatgggatgaaatgaaataatgaacaatgaaatgccgggtgaaatgaaatgaaatgaagaaataaatgaaatattgaaatgaataataaaattctgggtgcggtgatgcactccagcttgggtgatagagtgagactccgtcttgaaatgaaatgatgaaataatgaaacaaaattaaatatgaaatgaaatacgaaatactgggtgcggtggctcacgcctgtaatcctagcactttgggaggctgaggagggtggatcacctgaggtcaggagttcaagaccagcctggccaacatgatgaaaccccatctctactaaaatacaaaaactagccgggcatgatagcgggtgcctgtaatcccagctacttgggaggctgagagaggagaatcgcttgaacccaggaggcagaggttgcagtgagcagggatcgcgccactgcactccagcctgggtgttagaacaagcctctggctcgaaatgacatgacatgacatgatgaaatgaaataatgaaatgaataatgaaatgcgtgtggtgcactccagcctgggcaatgcagcaagtctctgtcatgaaatggattgaaattgaatgggaatgggaatatgggaatggaataaatgaaatgaagaaatatgaaatgccaggtgtggtggcgcactccagcctgggtgatagagcgagtctccatcttgaagtgaaatgaaatgaaatgaaatgaagaaatgaaataaatgaatactgaaatgaaataataaaatgaaatgccaggtgtggtggcacactccagcctgggcaatagagcgcgtctccgtcttgaaatgaaatgaaataaatgaaatgagaaatgatgagatgaaatatgaaatgaataatgaaatgcgtgtggtgcactccagcctgggcaatgcagcaagtttctgtcattaaatggatttaaatttaatggggattgggatattgggatgg

SEQ ID NO: 21534 - DNA, 1476 bp, Homo sapiens
taggttcacgccattctcctgtctcagcctccccagcagctgggaccacaggcacccaccaccatgcccggctaattttgtgtatttttagtagagacggggtttctccatgttggtcaggctgatctcgaactcccgacctcaggttgcagtgagcagagatcgcgccactgaattccagcctgggcgatagagcgagtctgtctcagaatgaaatgacgtgacatgacatgacatgatgaaatgaataatgaaatgccgggtgtggtggcacactccagcctgggcaatagagcaagtctctgtctcgaaatgaaatggaatgaaatgaagagaataaatgaaataaatgaaatgaaataataaaatgaataatgaattgccaggtgaaatgaaatgaaatgatgaaatgaataatgaaatgccgggtgcagtggtgcactccaacctgggcaatagagcaggtctccgtctcgaaatgaaatgagatgacatgagatgaaatgggatgaaatgaaataatgaacaatgaaatgccgggtgaaatgaaatgaaatgaagaaataaatgaaatattgaaatgaataataaaattctgggtgcggtgatgcactccagcttgggtgatagagtgagactccgtcttgaaatgaaatgatgaaataatgaaacaaaattaaatatgaaatgaaatacgaaatactgggtgcggtggctcacgcctgtaatcctagcactttgggaggctgaggagggtggatcacctgaggtcaggagttcaagaccagcctggccaacatgatgaaaccccatctctactaaaatacaaaaactagccgggcatgatagcgggtgcctgtaatcccagctacttgggaggctgagagaggagaatcgcttgaacccaggaggcagaggttgcagtgagcagggatcgcgccactgcactccagcctgggtgttagaacaagcctctggctcgaaatgacatgacatgacatgatgaaatgaaataatgaaatgaataatgaaatgcgtgtggtgcactccagcctgggcaatgcagcaagtctctgtcatgaaatggattgaaattgaatgggaatgggaatatgggaatggaataaatgaaatgaagaaatatgaaatgccaggtgtggtggcgcactccagcctgggtgatagagcgagtctccatcttgaagtgaaatgaaatgaaatgaaatgaagaaatgaaataaatgaatactgaaatgaaataataaaatgaaatgccaggtgtggtggcacactccagcctgggcaatagagcgcgtctccgtcttgaaatgaaatgaaataaatgaaatgagaaatgatgagatgaaatatgaaatgaataatgaaatgcgtgtggtgcactccagcctgggcaatgcagcaagtttctgtcattaaatggatttaaatttaatggggattgggatattgggatgg

SEQ ID NO: 21535 - DNA, 568 bp, Homo sapiens
agatagaatcgagtcggtaccggcactctagtccaatgaaatgcggggtgaaatgaaatgaaatgaagaaataaatgaaatattgaaatgaataataaaattctgggtgcggtgatgcactccagcttgggtgatagagtgagactccatgttggtcaggctgatctcgaactcccgacctcaggttgcagtgagcagagatcgcgccactgaattccagcctgggcgatagagcgagtctgtctcagaatgaaatgacgtgacatgacatgacatgatgaaatgaataatgaaatgccgggtgtggtggcacactccagcctgggcaatagagcaagtctctgtctcgaaatgaaatggaatgaaatgaagagaataaatgaaataaatgaaatgaaataataaaatgaataatgaattgccaggtgaaatgaaatgaaatgatgaaatgaataatgaaatgccgggtgaaatgaaatgaaatgaaaaaatgaaataaatgaaatgatgaaatgaaataatgaaatgaataatgaaatgccaggtgcagtggcacactccagcctgg

SEQ ID NO: 21536 - DNA, 553 bp, Homo sapiens
gaatatgggaatggaataaatgaaatgaagaaatatgaaatgccaggtgtggtggcgcactccagcctgggtgatagagcgagtctccatcttgaagtgaaatgaaatgaaatgaaatgaagaaatgaaataaatgaatactgaaatgaaataataaaatgaaatgccaggtgtggtggcacactccagcctgggcaatagagcgcgtctccgtcttgaaatgaaatgaaataaatgaaatgagaaatgatgagatgaaatatgaaatgctgggtgaaatgaataatgaaatgccaggtgtggtggcgcagtccagcctgggtgatagagcgagtctctgtcttgaaatgaaatgaaatgatcaaatgaaatgatgaaatgaaataatgaaatgaataatgaaattctgggtgcagtggcgcactccagcctgggcaatagagggagtctccgtctcgaaatgaaatgaaatgaaatgatgaaatgaaataatgaaatgaataatgaaatgccgggtgaaatgaaatgaaatgaaaaaatgaaataaatgaaa

SEQ ID NO: 21537 - DNA, 821 bp, Homo sapiens
  misc_feature (746)..(746): n is a, c, g, or t
cgtgggtgggaattgtcgcctaagtggttccgggttggtggatgaccttgagccctcaggaacgagatggcggttctctggaggctgagtgccgtttgcggtgccctaggaggccgagctctgttgcttcgaactccagtggtcagacctgctcatatctcagcatttcttcaggaccgacctatcccagaatggtgtggagtgcagcacatacacttgtcaccgagccaccattctggctccaaggctgcatctctccactggactagcgagagggttgtcagtgttttgctcctgggtctgcttccggctgcttatttgaatccttgctctgcgatggactattccctggctgcagccctcactcttcatggtcactggggccttggacaagttgttactgactatgttcatggggatgccttgcagaaagctgccaaggcagggcttttggcactttcagctttaacctttgctgggctttgctatttcaactatcacgatgtgggcatctgcaaagctgttgccatgctgtggaagctctgacctttttgacttcatactttgaagaattgatgtatgcctctttgcctctgctttgtcatgccattaagctcacaataaggaagaaataacagataagtccattggtggacagccttcttctcttaatcacaagattattttcagaatttaatctttgaggaaaaggtttggtccacatccgggaggtaaggggggccccnccttttaaatcccggtataaagcatatagtcgcggcaatataccttagaaaaccttcaaagtatacaaccattgg

SEQ ID NO: 21538 - DNA, 797 bp, Homo sapiens
  misc_feature (780)..(780): n is a, c, g, or t
cgtgggtgggaattgtcgcctaagtggttccgggttggtggatgaccttgagccctcaggaacgagatggcggttctctggaggctgagtgccgtttgcggtgccctaggaggccgagctctgttgcttcgaactccagtggtcagacctgctcatatctcagcatttcttcaggaccgacctatcccagaatggtgtggagtgcagcacatacacttgtcaccgagccaccattctggctccaaggctgcatctctccactggactagcgagagggttgtcagtgttttgctcctgggtctgcttccggctgcttatttgaatccttgctctgcgatggactattccctggctgcagccctcactcttcatggtcactggggccttggacaagttgttactgactatgttcatggggatgccttgcagaaagctgccaaggcagggcttttggcactttcagctttaacctttgctgggctttgctatttcaactatcacgatgtgggcatctgcaaagctgttgccatgctgtggaagctctgacctttttgacttcatactttgaagaattgatgtatgcctctttgcctctgctttgtcatgccattaagctcacaataaggaagaaataacagataagtccattggtggacagccttcttctcttaatcacaagattattttcagaatttaatctttgaggaaaaggtttggggggaatttttttggtgggagactggggtttatatttggggggtgggggtggccccccgtttnttttagaccgcaggggg

SEQ ID NO: 21539 - DNA, 804 bp, Homo sapiens
cgtgggtgggaattgtcgcctaagtggttccgggttggtggatgaccttgagccctcaggaacgagatggcggttctctggaggctgagtgccgtttgcggtgccctaggaggccgagctctgttgcttcgaactccagtggtcagacctgctcatatctcagcatttcttcaggaccgacctatcccagaatggtgtggagtgcagcacatacacttgtcaccgagccaccattctggctccaaggctgcatctctccactggactagcgagagggttgtcagtgttttgctcctgggtctgcttccggctgcttatttgaatccttgctctgcgatggactattccctggctgcagccctcactcttcatggtcactggggccttggacaagttgttactgactatgttcatggggatgccttgcagaaagaagaaaaagctgccaaaggcaggggcctttttgggggacaccttttttcaccaaggccctttttttttttaaaaaaaaaccccccccccttttttttttttgggggggggcgacccccccttttttgggggggggaggggaagaagagggagagacaaccacacataatttttttatttacacagagcgaggacggggggggggcagagcccccattatcattaatcaaaaaacaagctgtcttttttatataagcgacaataaactagtacaccccccacaaaaaaaagaaaaacacaacacgtccctccccctttattttttttaaacaacaaacggttttttttttacccccccaaaaaaaaaaaggt

SEQ ID NO: 21540 - DNA, 1310 bp, Homo sapiens
cgtgggtgggaattgtcgcctaagtggttccgggttggtggatgaccttgagccctcaggaacgagatggcggttctctggaggctgagtgccgtttgcggtgccctaggaggccgagctctgttgcttcgaactccagtggtcagacctgctcatatctcagcatttcttcaggaccgacctatcccagaatggtgtggagtgcagcacatacacttgtcaccgagccaccattctggctccaaggctgcatctctccactggactagcgagagggttgtcagtgttttgctcctgggtctgcttccggctgcttatttgaatccttgctctgcgatggactattccctggctgcagccctcactcttcatggtcactggggccttggacaagttgttactgactatgttcatggggatgccttgcagaaagctgccaaggcagggcttttggcactttcagctttaacctttgctgggctttgctatttcaactatcacgatgtgggcatctgcaaagctgttgccatgctgtggaagctctgacctttttgacttcatactttgaagaattgatgtatgcctctttgcctctgctttgtcatgccattaagctcacaataaggaagaaataacagataagtccattggtggacagccttcttctcttaatcacaagattattttcagaatttaatctttgaggaaaaggtttgagaggaattatatctaagttgtgagactgagttctatattctggtgagttaatggggttgcctcccagcttcttataagactcacagtataactaaacatgatatatcagcttttgcctttcaatttatcaatctcttaaagagaatccaactttattacgattagtatatgatcaaacttccatatttgccttgggaataatggacaaagggaaatactcttaattcatgaataaaaactttgcagaaaattagacagtgtttaattttcgaaaacttccctctctagacagtagataccacctactgatggttacatatactagggaaattttaaaattaggaaatgctgatagctcatattataaatttctaaatcctaggaagaaacgcttggagtgcttctgaatatacagaagttccatttaagggcaagtttccccgtagatgtatcaaaatactaccaactgtaaattgagatttaattcccaaatgtattctacttgttctaaaacaatctgtccacaaatataaaactataagtaataaattgttattttcggcaaacacactccggggaggtccgtcttacat

SEQ ID NO: 21541 - DNA, 1312 bp, Homo sapiens
cgtgggtgggaattgtcgcctaagtggttccgggttggtggatgaccttgagccctcaggaacgagatggcggttctctggaggctgagtgccgtttgcggtgccctaggaggccgagctctgttgcttcgaactccagtggtcagacctgctcatatctcagcatttcttcaggaccgacctatcccagaatggtgtggagtgcagcacatacacttgtcaccgagccaccattctggctccaaggctgcatctctccactggactagcgagagggttgtcagtgttttgctcctgggtctgcttccggctgcttatttgaatccttgctctgcgatggactattccctggctgcagccctcactcttcatggtcactggggccttggacaagttgttactgactatgttcatggggatgccttgcagaaagctgccaaggcagggcttttggcactttcagctttaacctttgctgggctttgctatttcaactatcacgatgtgggcatctgcaaagctgttgccatgctgtggaagctctgacctttttgacttcatactttgaagaattgatgtatgcctctttgcctctgctttgtcatgccattaagctcacaataaggaagaaataacagataagtccattggtggacagccttcttctcttaatcacaagattattttcagaatttaatctttgaggaaaaggttttctggtgagttaatggggttgcctcccagcttcttataagactcacagtataactaaacatgatatatcagcttttgcctttcaatttatcaatctcttaaagagaatccaactttattacgattagtatatgatcaaacttccatatttgccttgggaataatggacaaagggaaatactcttaattcatgaataaaaactttgcagaaaattagacagtgtttaattttcgaaaacttccctctctagacagtagataccacctactgatggttacatatactagggaaattttaaaattaggaaatgctgatagctcatattataaatttctaaatcctaggaagaaacgcttggagtgcttctgaatatacagaagttccatttaagggcaagtttccccgtagatgtatcaaaatactaccaactgtaaattgagatttaattcccaaatgtattctacttgttctaaaacaatctgtccacaaatataaaactataagtaataaattgttattttcgcacaatgggaatctctaatgtgaaaatgtattctatgaaaataatttttttaaataaaatgttatataataaaa

SEQ ID NO: 21542 - DNA, 1396 bp, Homo sapiens
cgtgggtgggaattgtcgcctaagtggttccgggttggtggatgaccttgagccctcaggaacgagatggcggttctctggaggctgagtgccgtttgcggtgccctaggaggccgagctctgttgcttcgaactccagtggtcagacctgctcatatctcagcatttcttcaggaccgacctatcccagaatggtgtggagtgcagcacatacacttgtcaccgagccaccattctggctccaaggctgcatctctccactggactagcgagagggttgtcagtgttttgctcctgggtctgcttccggctgcttatttgaatccttgctctgcgatggactattccctggctgcagccctcactcttcatggtcactggggccttggacaagttgttactgactatgttcatggggatgccttgcagaaagctgccaaggcagggcttttggcactttcagctttaacctttgctgggctttgctatttcaactatcacgatgtgggcatctgcaaagctgttgccatgctgtggaagctctgacctttttgacttcatactttgaagaattgatgtatgcctctttgcctctgctttgtcatgccattaagctcacaataaggaagaaataacagataagtccattggtggacagccttcttctcttaatcacaagattattttcagaatttaatctttgaggaaaaggtttttcagcaacttaactcctttggagggacaacggcttctcgacacgaggaacctcatatccctacagtcggtggagacctggacgtctggtgagttaatggggttgcctcccagcttcttataagactcacagtataactaaacatgatatatcagcttttgcctttcaatttatcaatctcttaaagagaatccaactttattacgattagtatatgatcaaacttccatatttgccttgggaataatggacaaagggaaatactcttaattcatgaataaaaactttgcagaaaattagacagtgtttaattttcgaaaacttccctctctagacagtagataccacctactgatggttacatatactagggaaattttaaaattaggaaatgctgatagctcatattataaatttctaaatcctaggaagaaacgcttggagtgcttctgaatatacagaagttccatttaagggcaagtttccccgtagatgtatcaaaatactaccaactgtaaattgagatttaattcccaaatgtattctacttgttctaaaacaatctgtccacaaatataaaactataagtaataaattgttattttcgcacaatgggaatctctaatgtgaaaatgtattctatgaaaataatttttttaaataaaatgttatataataaaa

SEQ ID NO: 21543 - DNA, 1384 bp, Homo sapiens
  misc_feature (300)..(301): n is a, c, g, or t
atcattcgttcggagcgcggaggccaggtacgctatggtgaaccagtggtgcactatgcggtgtcgctagtgagagtcgctggtcattgtacttaggtgtctatggatttactctagcctacagtaaacttagatgcctcgtgtggagaactcgactcgctgtcgtgacagcaacattctcacgcatgagatgttcgttgagagtcgcttacctggtatctattgatccacggagtccaaacggactgacgtcgtgcgtactatcgagacaatgtactgctcctcgcaactgaaactagnncgagagggttgtcagtgttttgctcctgggtctgcttccggctgcttatttgaatccttgctctgcgatggactattccctggctgcagccctcactcttcatggtcactggggccttggacaagttgttactgactatgttcatggggatgccttgcagaaagctgccaaggcagggcttttggcactttcagctttaacctttgctgggctttgctatttcaactatcacgatgtgggcatctgcaaagctgttgccatgctgtggaagctctgacctttttgacttcatactttgaagaattgatgtatgcctctttgcctctgctttgtcatgccattaagctcacaataaggaagaaataacagataagtccattggtggacagccttcttctcttaatcacaagattattttcagaatttaatctttgaggaaaaggtttgagaggaattatatctaagttgtgagactgagttctatattctggtgagttaatggggttgcctcccagcttcttataagactcacagtataactaaacatgatatatcagcttttgcctttcaatttatcaatctcttaaagagaatccaactttattacgattagtatatgatcaaacttccatatttgccttgggaataatggacaaagggaaatactcttaattcatgaataaaaactttgcagaaaattagacagtgtttaattttcgaaaacttccctctctagacagtagataccacctactgatggttacatatactagggaaattttaaaattaggaaatgctgatagctcatattataaatttctaaatcctaggaagaaacgcttggagtgcttctgaatatacagaagttccatttaagggcaagtttccccgtagatgtatcaaaatactaccaactgtaaattgagatttaattcccaaatgtattctacttgttctaaaacaatctgtccacaaatataaaactataagtaataaattgttattttcgcacaatgggaatctctaatgtgaaaatgtattctatgaaaataatttttttaaataaaatgttatataataaaa

SEQ ID NO: 21544 - DNA, 1207 bp, Homo sapiens
cgtgggtgggaattgtcgcctaagtggttccgggttggtggatgaccttgagccctcaggaacgagatggcggttctctggaggctgagtgccgtttgcggtgccctaggaggccgagctctgttgcttcgaactccagtggtcagacctgctcatatctcagcatttcttcaggaccgacctatcccagaatggtgtggagtgcagcacatacacttgtcaccgagccaccattgggccttggacaagttgttactgactatgttcatggggatgccttgcagaaagctgccaaggcagggcttttggcactttcagctttaacctttgctgggctttgctatttcaactatcacgatgtgggcatctgcaaagctgttgccatgctgtggaagctctgacctttttgacttcatactttgaagaattgatgtatgcctctttgcctctgctttgtcatgccattaagctcacaataaggaagaaataacagataagtccattggtggacagccttcttctcttaatcacaagattattttcagaatttaatctttgaggaaaaggtttgagaggaattatatctaagttgtgagactgagttctatattctggtgagttaatggggttgcctcccagcttcttataagactcacagtataactaaacatgatatatcagcttttgcctttcaatttatcaatctcttaaagagaatccaactttattacgattagtatatgatcaaacttccatatttgccttgggaataatggacaaagggaaatactcttaattcatgaataaaaactttgcagaaaattagacagtgtttaattttcgaaaacttccctctctagacagtagataccacctactgatggttacatatactagggaaattttaaaattaggaaatgctgatagctcatattataaatttctaaatcctaggaagaaacgcttggagtgcttctgaatatacagaagttccatttaagggcaagtttccccgtagatgtatcaaaatactaccaactgtaaattgagatttaattcccaaatgtattctacttgttctaaaacaatctgtccacaaatataaaactataagtaataaattgttattttcgcacaatgggaatctctaatgtgaaaatgtattctatgaaaataatttttttaaataaaatgttatataataaaa

SEQ ID NO: 21545 - DNA, 1352 bp, Homo sapiens
cgtgggtgggaattgtcgcctaagtggttccgggttggtggatgaccttgagccctcaggaacgagatggcggttctctggaggctgagtgccgtttgcggtgccctaggaggccgagctctgttgcttcgaactccagtggtcagacctgctcatatctcagcatttcttcaggaccgacctatcccagaatggtgtggagtgcagcacatacacttgtcaccgagccaccattctggctccaaggctgcatctctccactggactagcgagagggttgtcagtgttttgctcctgggtctgcttccggctgcttatttgaatccttgctctgcgatggactattccctggctgcagccctcactcttcatggtcactggggccttggacaagttgttactgactatgttcatggggatgccttgcagaaagctgccaaggcagggcttttggcactttcagctttaacctttgctgggctttgctatttcaactatcacgatgtgggcatctgcaaagctgttgccatgctgtggaagctctgacctttttgacttcatactttgaagaattgatgtatgcctctttgcctctgctttgtcatgccattaagctcacaataaggaagaaataacagataagtccattggtggacagccttcttctcttaatcacaagattattttcagaatttaatctttgaggaaaaggtttgagaggaattatatctaagttgtgagactgagttctatattctggtgagttaatggggttgcctcccagcttcttataagactcacagtataactaaacatgatatatcagcttttgcctttcaatttatcaatctcttaaagagaatccaactttattacgattagtatatgatcaaacttccatatttgccttgggaataatggacaaagggaaatactcttaattcatgaataaaaactttgcagaaaattagacagtgtttaattttcgaaaacttccctctctagacagtagataccacctactgatggttacatatactagggaaattttaaaattaggaaatgctgatagctcatattataaatttctaaatcctaggaagaaacgcttggagtgcttctgaatatacagaagttccatttaagggcaagtttccccgtagatgtatcaaaatactaccaactgtaaattgagatttaattcccaaatgtattctacttgttctaaaacaatctgtccacaaatataaaactataagtaataaattgttattttcgcacaatgggaatctctaatgtgaaaatgtattctatgaaaataatttttttaaataaaatgttatataataaaa

SEQ ID NO: 21546 - DNA, 1834 bp, Homo sapiens
  misc_feature (1456)..(1456): n is a, c, g, or t
  misc_feature (1465)..(1465): n is a, c, g, or t
cgtgggtgggaattgtcgcctaagtggttccgggttggtggatgaccttgagccctcaggaacgagatggcggttctctggaggctgagtgccgtttgcggtgccctaggaggccgagctctgttgcttcgaactccagtggtcagacctgctcatatctcagcatttcttcaggaccgacctatcccagaatggtgtggagtgcagcacatacacttgtcaccgagccaccattctggctccaaggctgcatctctccactggactagcgagagggttgtcagtgttttgctcctgggtctgcttccggctgcttatttgaatccttgctctgcgatggactattccctggctgcagccctcactcttcatggtcactggggccttggacaagttgttactgactatgttcatggggatgccttgcagaaagctgccaaggcagggcttttggcactttcagctttaacctttgctgggctttgctatttcaactatcacgatgtgggcatctgcaaagctgttgccatgctgtggaagctctgacctttttgacttcatactttgaagaattgatgtatgcctctttgcctctgctttgtcatgccattaagctcacaataaggaagaaataacagataagtccattggtggacagccttcttctcttaatcacaagattattttcagaatttaatctttgaggaaaaggtttgagaggaattatatctaagttgtgagactgagttctatattctggtgagttaatggggttgcctcccagcttcttataagactcacagtataactaaacatgatatatcagcttttgcctttcaatttatcaatctcttaaagagaatccaactttattacgattagtatatgatcaaacttccatatttgccttgggaataatggacaaagggaaatactcttaattcatgaataaaaactttgcagaaaattagacagtgtttaattttcgaaaacttccctctctagacagtagataccacctactgatggttacatatactagggaaattttaaaattaggaaatgctgatagctcatattataaatttctaaatcctaggaagaaacgcttggagtgcttctgaatatacagaagttccatttaagggcaagtttccccgtagatgtatcaaaatactaccaactgtaaattgagatttaattcccaaatgtattctacttgttctaaaacaatctgtccacaaatataaaactataagtaataaattgttattttcgcacaatgggaatctctaatgtgaaaatgtattctatgaaaataatttttttaaataaaatgttatataataaaaaaaaaaaaaaaaaaaaaaaaaaaaaaaaaaaaaaaaaaaaaaacaaaaaaaaaaaaaaaaaaaaaaaaaaaaaaaaaaaaaaaaaaaaaaaaaaaaaaaaaaancgaaaaaanaaaagcggggggggggcgaataaagcacacgcgcggggacgcgacaaagacaccgcacgcagaaaatgatagaggaggcgcagcccagagaggaacagaaaataaagcgcaggagccggacggaataaaaacaaaggcggcagcgggaaaaaaagaaacacgaggggaggaggacaatggagaaaaaacaacaacaaacacagatggggagggagaagagaagaagggaggaacaacaccgcaacaggagaagagtaaaacaccagcacagaagacataaaacaaaaggggaggaggaggagcgacaaacaagcaaacatcggcgccgaaacgaaaaaaggaacagaagaaggatgagacaaatataac

SEQ ID NO: 21547 - DNA, 1405 bp, Homo sapiens
cgtgggtgggaattgtcgcctaagtggttccgggttggtggatgaccttgagccctcaggaacgagatggcggttctctggaggctgagtgccgtttgcggtgccctaggaggccgagctctgttgcttcgaactccagtggtcagacctgctcatatctcagcatttcttcaggaccgacctatcccagaatggtgtggagtgcagcacatacacttgtcaccgagccaccattctggctccaaggctgcatctctccactggactagcgagagggttgtcagtgttttgctcctgggtctgcttccggctgcttatttgaatccttgctctgcgatggactattccctggctgcagccctcactcttcatggtcactggggccttggacaagttgttactgactatgttcatggggatgccttgcagaaagctgccaaggcagggcttttggcactttcagctttaacctttgctgggctttgctatttcaactatcacgatgtgggcatctgcaaagctgttgccatgctgtggaagctctgacctttttgacttcatactttgaagaattgatgtatgcctctttgcctctgctttgtcatgccattaagctcacaataaggaagaaataacagataagtccattggtggacagccttcttctcttaatcacaagattattttcagaatttaatctttgaggaaaaggtttgagaggaattatatctaagttgtgagactgagttctatattctggtgagttaatggggttgcctcccagcttcttataagactcacagtataactaaacatgatatatcagcttttgcctttcaatttatcaatctcttaaagagaatccaactttattacgattagtatatgatcaaacttccatatttgccttgggaataatggacaaagggaaatactcttaattcatgaataaaaactttgcagaaaattagacagtgtttaattttcgaaaacttccctctctagacagtagataccacctactgatggttacatatactagggaaattttaaaattaggaaatgctgatagctcatattataaatttctaaatcctaggaagaaacgcttggagtgcttctgaatatacagaagttccatttaagggcaagtttccccgtagatgtatcaaaatactaccaactgtaaattgagatttaattcccaaatgtattctacttgttctaaaacaatctgtccacaaatataaaactataagtaataaattgttattttcgcacaatgggaatctctaatgtgaaaatgtattctatgaaaataatttttttaaataaaatgttatataataaaagtgtcttctatgcttttatatattacaacacacaaaccacacaccaaaaacac

SEQ ID NO: 21548 - DNA, 1308 bp, Homo sapiens
cgtgggtgggaattgtcgcctaagtggttccgggttggtggatgaccttgagccctcaggaacgagatggcggttctctggaggctgagtgccgtttgcggtgccctaggaggccgagctctgttgcttcgaactccagtggtcagacctgctcatatctcagcatttcttcaggaccgacctatcccagaatggtgtggagtgcagcacatacacttgtcaccgagccaccattctggctccaaggctgcatctctccactggactagcgagagggttgtcagtgttttgctcctgggtctgcttccggctgcttatttgaatccttgctctgcgatggactattccctggctgcagccctcactcttcatggtcactggggccttggacaagttgttactgactatgttcatggggatgccttgcagaaagctgccaaggcagggcttttggcactttcagctttaacctttgctgggctttgctatttcaactatcacgatgtgggcatctgcaaagctgttgccatgctgtggaagctctgacctttttgacttcatactttgaagaattgatgtatgcctctttgcctctgctttgtcatgccattaagctcacaataaggaagaaataacagataagtccattggtggacagccttcttctcttaatcacaagattattttcagaatttaatctttgaggaaaaggtttgagaggaattatatctaagttgtgagactgagttctatattctggtgagttaatggggttgcctcccagcttcttataagactcacagtataactaaacatgatatatcagcttttgcctttcaatttatcaatctcttaaagagaatccaactttattacgattagtatatgatcaaacttccatatttgccttgggaataatggacaaagggaaatactcttaattcatgaataaaaactttgcagaaaattagacagtgtttaattttcgaaaacttccctctctagacagtagataccacctactgatgctcatattataaatttctaaatcctaggaagaaacgcttggagtgcttctgaatatacagaagttccatttaagggcaagtttccccgtagatgtatcaaaatactaccaactgtaaattgagatttaattcccaaatgtattctacttgttctaaaacaatctgtccacaaatataaaactataagtaataaattgttattttcgcacaatgggaatctctaatgtgaaaatgtattctatgaaaataatttttttaaataaaatgttatataataaaa

SEQ ID NO: 21549 - DNA, 1380 bp, Homo sapiens
ttctaggagcatgcgcttgagccctgcagccagaagatgaagtgactctggacgagtatgcatgtgcccgctatggagatcctgtatgatgactagtgctggggttctcgaacatctagatgattcgccacgcgggtcataccgaatgcagtcacttgaccttacagtgcaccacaatgctagtccctagaaagtgatgttaggggtgtctacacaatacgagcatgtttcaacgcgagctcgcaatttctggattacagacgctggctccaaggctgcatctctccactggactagcgagagggttgtcagtgttttgctcctgggtctgcttccggctgcttatttgaatccttgctctgcgatggactattccctggctgcagccctcactcttcatggtcactggggccttggacaagttgttactgactatgttcatggggatgccttgcagaaagctgccaaggcagggcttttggcactttcagctttaacctttgctgggctttgctatttcaactatcacgatgtgggcatctgcaaagctgttgccatgctgtggaagctctgacctttttgacttcatactttgaagaattgatgtatgcctctttgcctctgctttgtcatgccattaagctcacaataaggaagaaataacagataagtccattggtggacagccttcttctcttaatcacaagattattttcagaatttaatctttgaggaaaaggtttgagaggaattatatctaagttgtgagactgagttctatattctggtgagttaatggggttgcctcccagcttcttataagactcacagtataactaaacatgatatatcagcttttgcctttcaatttatcaatctcttaaagagaatccaactttattacgattagtatatgatcaaacttccatatttgccttgggaataatggacaaagggaaatactcttaattcatgaataaaaactttgcagaaaattagacagtgtttaattttcgaaaacttccctctctagacagtagataccacctactgatggttacatatactagggaaattttaaaattaggaaatgctgatagctcatattataaatttctaaatcctaggaagaaacgcttggagtgcttctgaatatacagaagttccatttaagggcaagtttccccgtagatgtatcaaaatactaccaactgtaaattgagatttaattcccaaatgtattctacttgttctaaaacaatctgtccacaaatataaaactataagtaataaattgttattttcgcacaatgggaatctctaatgtgaaaatgtattctatgaaaataatttttttaaataaaatgttatataataaaa

SEQ ID NO: 21550 - DNA, 1482 bp, Homo sapiens
cgtgggtgggaattgtcgcctaagtggttccgggttggtggatgaccttgagccctcaggaacgagatggcggttctctggaggctgagtgccgtttgcggtgccctaggaggccgagctctgttgcttcgaactccagtggtcagacctgctcatatctcagcatttcttcaggaccgacctatcccagaatggtgtggagtgcagcacatacacttgtcaccgagccaccattctggctccaaggctgcatctctccactggactagcgagagggttgtcagtgttttgctcctgggtctgcttccggctgcttatttgaatccttgctctgcgatggactattccctggctgcagccctcactcttcatggtcactggctggagtgcaatggtgcgatcttggctcggcacgatctcggctcagcacgatctcggcttactgcaacctccgcctttcgggttcaagcgattctcctgcctcagcctcccaagtagctggcattacaggggccttggacaagttgttactgactatgttcatggggatgccttgcagaaagctgccaaggcagggcttttggcactttcagctttaacctttgctgggctttgctatttcaactatcacgatgtgggcatctgcaaagctgttgccatgctgtggaagctctgacctttttgacttcatactttgaagaattgatgtatgcctctttgcctctgctttgtcatgccattaagctcacaataaggaagaaataacagataagtccattggtggacagccttcttctcttaatcacaagattattttcagaatttaatctttgaggaaaaggtttgagaggaattatatctaagttgtgagactgagttctatattctggtgagttaatggggttgcctcccagcttcttataagactcacagtataactaaacatgatatatcagcttttgcctttcaatttatcaatctcttaaagagaatccaactttattacgattagtatatgatcaaacttccatatttgccttgggaataatggacaaagggaaatactcttaattcatgaataaaaactttgcagaaaattagacagtgtttaattttcgaaaacttccctctctagacagtagataccacctactgatggttacatatactagggaaattttaaaattaggaaatgctgatagctcatattataaatttctaaatcctaggaagaaacgcttggagtgcttctgaatatacagaagttccatttaagggcaagtttccccgtagatgtatcaaaatactaccaactgtaaattgagatttaattcccaaatgtattctacttgttctaaaacaatctgtccacaaatataaaactataagtaataaattgttattttcgcacaatgggaatctctaatgtgaaaatgtattctatgaaaataatttttttaaataaaatgttatataataaaa

SEQ ID NO: 21551 - DNA, 1261 bp, Homo sapiens
cgtgggtgggaattgtcgcctaagtggttccgggttggtggatgaccttgagccctcaggaacgagatggcggttctctggaggctgagtgccgtttgcggtgccctaggaggccgagctctgttgcttcgaactccagtggtcagacctgctcatatctcagcatttcttcaggaccgacctatcccagaatggtgtggagtgcagcacatacacttgtcaccgagccaccattctggctccaaggctgcatctctccactggactagcgagagggttgtcagtgttttgctcctgggtctgcttccggctgcttatttgaatccttgctctgcgatggactattccctggctgcagccctcactcttcatggtcactggggccttggacaagttgttactgactatgttcatggggatgccttgcagaaagctgccaaggcagggcttttggcactttcagctttaacctttgctgggctttgctatttcaactatcacgatgtgggcatctgcaaagctgttgccatgctgtggaagctctgacctttttgacttcatactttgaagaattgatgtatgcctctttgcctctgctttgtcatgccattaagctcacaataagagaggaattatatctaagttgtgagactgagttctatattctggtgagttaatggggttgcctcccagcttcttataagactcacagtataactaaacatgatatatcagcttttgcctttcaatttatcaatctcttaaagagaatccaactttattacgattagtatatgatcaaacttccatatttgccttgggaataatggacaaagggaaatactcttaattcatgaataaaaactttgcagaaaattagacagtgtttaattttcgaaaacttccctctctagacagtagataccacctactgatggttacatatactagggaaattttaaaattaggaaatgctgatagctcatattataaatttctaaatcctaggaagaaacgcttggagtgcttctgaatatacagaagttccatttaagggcaagtttccccgtagatgtatcaaaatactaccaactgtaaattgagatttaattcccaaatgtattctacttgttctaaaacaatctgtccacaaatataaaactataagtaataaattgttattttcgcacaatgggaatctctaatgtgaaaatgtattctatgaaaataatttttttaaataaaatgttatataataaaa

SEQ ID NO: 21552 - DNA, 3122 bp, Homo sapiens
agacactgaatcatcatttgtagtttggggggctttacatgcctgcagtggtgaaaactgaaattttgtcccacttaagggagtttcttcttccctttattaattgcaaaataaatatatgtcacttcagagggcagcagctggactacctatgtttgtggcgctacaccaacctgaacttcgcttcctgagacctaagattcagccccgtgctcagcagacatcagggatcaccgactctgtgccaggagctgttcttgatgctgggaacgcaggggtggacaaaacagagaaagccctgccctcagaatgccagcagttactctgcagagatgacggagcccaagtcggtgtgtgtctcggtggatgaggtggtgtccagcaacatggaggccactgagacggacctgctgaatggacatctgaaaaaagtagataataacctcacggaagcccagcgcttctcctccttgcctcggagggcagctgtgaacattgaattcagggacctttcctattcggttcctgaaggaccctggtggaggaagaaaggatacaagaccctcctgaaaggaatttccgggaagttcaatagtggtgagttggtggccattatgggtccttccggggccgggaagtccacgctgatgaacatcctggctggatacagggagacgggcatgaagggggccgtcctcatcaacggcctgccccgggacctgcgctgcttccggaaggtgtcctgctacatcatgcaggatgacatgctgctgccgcatctcactgtgcaggaggccatgatggtgtcggcacatctgaagcttcaggagaaggatgaaggcagaagggaaatggtcaaggagatactgacagcgctgggcttgctgtcttgcgccaacacgcggaccgggagcctgtcaggtggtcagcgcaagcgcctggccatcgcgctggagctggtgaacaaccctccagtcatgttcttcgatgagcccaccagcggcctggacagcgcctcctgcttccaggtggtctcgctgatgaaagggctcgctcaagggggtcgctccatcatttgcaccatccaccagcccagcgccaaactcttcgagctgttcgaccagctttacgtcctgagtcaaggacaatgtgtgtaccggggaaaagtctgcaatcttgtgccatatttgagggatttgggtctgaactgcccaacctaccacaacccagcagattttgtcatggaggttgcatccggcgagtacggtgatcagaacagtcggctggtgagagcggttcgggagggcatgtgtgactcagaccacaagagagacctcgggggtgatgccgaggtgaacccttttctttggcaccgcccctctgaagaggactcctcgtccatggaaggctgccacagcttctctgccagctgcctcacgcagttctgcatcctcttcaagaggaccttcctcagcatcatgagggactcggtcctgacacacctgcgcatcacctcgcacattgggatcggcctcctcattggcctgctgtacttggggatcgggaacgaagccaagaaggtcttgagcaactccggcttcctcttcttctccatgctgttcctcatgttcgcggccctcatgcctactgttctgacatttcccctggagatgggagtctttcttcgggaacacctgaactactggtacagcctgaaggcctactacctggccaagaccatggcagacgtgccctttcagatcatgttcccagtggcctactgcagcatcgtgtactggatgacgtcgcagccgtccgacgccgtgcgctttgtgctgtttgccgcgctgggcaccatgacctccctggtggcacagtccctgggcctgctgatcggagccgcctccacgtccctgcaggtggccactttcgtgggcccagtgacagccatcccggtgctcctgttctcggggttcttcgtcagcttcgacaccatccccacgtacctacagtggatgtcctacatctcctatgtcaggtatgggttcgaaggggtcatcctctccatctatggcttagaccgggaagatctgcactgtgacatcgacgagacgtgccacttccagaagtcggaggccatcctgcgggagctggacgtggaaaatgccaagctgtacctggacttcatcgtactcgggattttcttcatctccctccgcctcattgcctatttggtcctcaggtacaaaatccgggcagagaggtaaaacacctgaatgccaggaaacaggaagattagacactgtggccgagggcacgtctagaatcgaggaggcaagcctgtgcccgaccgacgacacagagactcttctgatccaacccctagaaccgcgttgggtttgtgggtgtctcgtgctcagccactctgcccagctgggttggatcttctctccattcccctttctagctttaactaggaagatgtaggcagattggtggttttttttttttttttaacatacagaattttaaataccacaactggggcagaatttaaagctgcaacacagctggtgatgagaggcttcctcagtccagtcgctccttagcaccaggcaccgtgggtcctggatggggaactgcaagcagcctctcagctgatggctgcacagtcagatgtctggtggcagagagtccgagcatggagcgattccattttatgactgttgtttttcacattttcatctttctaaggtgtgtctcttttccaatgagaagtcatttttgcaagccaaaagtcgatcaatcgcattcattttaagaaattatacctttttagtacttgctgaagaatgattcagggtaaatcacatactttgtttagagaggcgaggggtttaaccgagtcacccagctggtctcatacatagacagcacttgtgaaggattgaatgcaggttccaggtggagggaagacgtggacaccatctccactgagccatgcagacatttttaaaagctatacaaaaaattgtgagaagacattggccaactctttcaaagtctttctttttccacgtgcttcttattttaagcgaaatatattgtttgtttcttcctaa

SEQ ID NO: 21553 - DNA, 3040 bp, Homo sapiens
agcctgcgactgcactcccggggacaccctctcccggacccactcggggaggcggcggcgaaggcccggggagacccgcgaggggcaagcccggattcctgccggccgcctttctgcgcgcgccggagagagagacgcggtggggacagggatgcgcatttcacttccccgagctccggagagggatggcggggtgtcggcgagttcactgctggacacagttactaatgccagcagttactctgcagagatgacggagcccaagtcggtgtgtgtctcggtggatgaggtggtgtccagcaacatggaggccactgagacggacctgctgaatggacatctgaaaaaagtagataataacctcacggaagcccagcgcttctcctccttgcctcggagggcagctgtgaacattgaattcagggacctttcctattcggttcctgaaggaccctggtggaggaagaaaggatacaagaccctcctgaaaggaatttccgggaagttcaatagtggtgagttggtggccattatgggtccttccggggccgggaagtccacgctgatgaacatcctggctggatacagggagacgggcatgaagggggccgtcctcatcaacggcctgccccgggacctgcgctgcttccggaaggtgtcctgctacatcatgcaggatgacatgctgctgccgcatctcactgtgcaggaggccatgatggtgtcggcacatctgaagcttcaggagaaggatgaaggcagaagggaaatggtcaaggagatactgacagcgctgggcttgctgtcttgcgccaacacgcggaccgggagcctgtcaggtggtcagcgcaagcgcctggccatcgcgctggagctggtgaacaaccctccagtcatgttcttcgatgagcccaccagcggcctggacagcgcctcctgcttccaggtggtctcgctgatgaaagggctcgctcaagggggtcgctccatcatttgcaccatccaccagcccagcgccaaactcttcgagctgttcgaccagctttacgtcctgagtcaaggacaatgtgtgtaccggggaaaagtctgcaatcttgtgccatatttgagggatttgggtctgaactgcccaacctaccacaacccagcagattttgtcatggaggttgcatccggcgagtacggtgatcagaacagtcggctggtgagagcggttcgggagggcatgtgtgactcagaccacaagagagacctcgggggtgatgccgaggtgaacccttttctttggcaccgcccctctgaagaggactcctcgtccatggaaggctgccacagcttctctgccagctgcctcacgcagttctgcatcctcttcaagaggaccttcctcagcatcatgagggactcggtcctgacacacctgcgcatcacctcgcacattgggatcggcctcctcattggcctgctgtacttggggatcgggaacgaagccaagaaggtcttgagcaactccggcttcctcttcttctccatgctgttcctcatgttcgcggccctcatgcctactgttctgacatttcccctggagatgggagtctttcttcgggaacacctgaactactggtacagcctgaaggcctactacctggccaagaccatggcagacgtgccctttcagatcatgttcccagtggcctactgcagcatcgtgtactggatgacgtcgcagccgtccgacgccgtgcgctttgtgctgtttgccgcgctgggcaccatgacctccctggtggcacagtccctgggcctgctgatcggagccgcctccacgtccctgcaggtggccactttcgtgggcccagtgacagccatcccggtgctcctgttctcggggttcttcgtcagcttcgacaccatccccacgtacctacagtggatgtcctacatctcctatgtcaggtatgggttcgaaggggtcatcctctccatctatggcttagaccgggaagatctgcactgtgacatcgacgagacgtgccacttccagaagtcggaggccatcctgcgggagctggacgtggaaaatgccaagctgtacctggacttcatcgtactcgggattttcttcatctccctccgcctcattgcctatttggtcctcaggtacaaaatccgggcagagaggtaaaacacctgaatgccaggaaacaggaagattagacactgtggccgagggcacgtctagaatcgaggaggcaagcctgtgcccgaccgacgacacagagactcttctgatccaacccctagaaccgcgttgggtttgtgggtgtctcgtgctcagccactctgcccagctgggttggatcttctctccattcccctttctagctttaactaggaagatgtaggcagattggtggttttttttttttttttaacatacagaattttaaataccacaactggggcagaatttaaagctgcaacacagctggtgatgagaggcttcctcagtccagtcgctccttagcaccaggcaccgtgggtcctggatggggaactgcaagcagcctctcagctgatggctgcacagtcagatgtctggtggcagagagtccgagcatggagcgattccattttatgactgttgtttttcacattttcatctttctaaggtgtgtctcttttccaatgagaagtcatttttgcaagccaaaagtcgatcaatcgcattcattttaagaaattatacctttttagtacttgctgaagaatgattcagggtaaatcacatactttgtttagagaggcgaggggtttaaccgagtcacccagctggtctcatacatagacagcacttgtgaaggattgaatgcaggttccaggtggagggaagacgtggacaccatctccactgagccatgcagacatttttaaaagctatacaaaaaattgtgagaagacattggccaactctttcaaagtctttctttttccacgtgcttcttattttaagcgaaatatattgtttgtttcttcctaa

SEQ ID NO: 21554 - DNA, 2962 bp, Homo sapiens
cgcaccccgcgcagcggctgagccgggagccagcgcagcctcggccccgcagctcaagcctcgtccccgccgccgccgccgccgccgccgccgccgcccccggggcatggcctgtctgatggccgctttctcggtcggcaccgccatgaatgccagcagttactctgcagagatgacggagcccaagtcggtgtgtgtctcggtggatgaggtggtgtccagcaacatggaggccactgagacggacctgctgaatggacatctgaaaaaagtagataataacctcacggaagcccagcgcttctcctccttgcctcggagggcagctgtgaacattgaattcagggacctttcctattcggttcctgaaggaccctggtggaggaagaaaggatacaagaccctcctgaaaggaatttccgggaagttcaatagtggtgagttggtggccattatgggtccttccggggccgggaagtccacgctgatgaacatcctggctggatacagggagacgggcatgaagggggccgtcctcatcaacggcctgccccgggacctgcgctgcttccggaaggtgtcctgctacatcatgcaggatgacatgctgctgccgcatctcactgtgcaggaggccatgatggtgtcggcacatctgaagcttcaggagaaggatgaaggcagaagggaaatggtcaaggagatactgacagcgctgggcttgctgtcttgcgccaacacgcggaccgggagcctgtcaggtggtcagcgcaagcgcctggccatcgcgctggagctggtgaacaaccctccagtcatgttcttcgatgagcccaccagcggcctggacagcgcctcctgcttccaggtggtctcgctgatgaaagggctcgctcaagggggtcgctccatcatttgcaccatccaccagcccagcgccaaactcttcgagctgttcgaccagctttacgtcctgagtcaaggacaatgtgtgtaccggggaaaagtctgcaatcttgtgccatatttgagggatttgggtctgaactgcccaacctaccacaacccagcagattttgtcatggaggttgcatccggcgagtacggtgatcagaacagtcggctggtgagagcggttcgggagggcatgtgtgactcagaccacaagagagacctcgggggtgatgccgaggtgaacccttttctttggcaccgcccctctgaagaggactcctcgtccatggaaggctgccacagcttctctgccagctgcctcacgcagttctgcatcctcttcaagaggaccttcctcagcatcatgagggactcggtcctgacacacctgcgcatcacctcgcacattgggatcggcctcctcattggcctgctgtacttggggatcgggaacgaagccaagaaggtcttgagcaactccggcttcctcttcttctccatgctgttcctcatgttcgcggccctcatgcctactgttctgacatttcccctggagatgggagtctttcttcgggaacacctgaactactggtacagcctgaaggcctactacctggccaagaccatggcagacgtgccctttcagatcatgttcccagtggcctactgcagcatcgtgtactggatgacgtcgcagccgtccgacgccgtgcgctttgtgctgtttgccgcgctgggcaccatgacctccctggtggcacagtccctgggcctgctgatcggagccgcctccacgtccctgcaggtggccactttcgtgggcccagtgacagccatcccggtgctcctgttctcggggttcttcgtcagcttcgacaccatccccacgtacctacagtggatgtcctacatctcctatgtcaggtatgggttcgaaggggtcatcctctccatctatggcttagaccgggaagatctgcactgtgacatcgacgagacgtgccacttccagaagtcggaggccatcctgcgggagctggacgtggaaaatgccaagctgtacctggacttcatcgtactcgggattttcttcatctccctccgcctcattgcctatttggtcctcaggtacaaaatccgggcagagaggtaaaacacctgaatgccaggaaacaggaagattagacactgtggccgagggcacgtctagaatcgaggaggcaagcctgtgcccgaccgacgacacagagactcttctgatccaacccctagaaccgcgttgggtttgtgggtgtctcgtgctcagccactctgcccagctgggttggatcttctctccattcccctttctagctttaactaggaagatgtaggcagattggtggttttttttttttttttaacatacagaattttaaataccacaactggggcagaatttaaagctgcaacacagctggtgatgagaggcttcctcagtccagtcgctccttagcaccaggcaccgtgggtcctggatggggaactgcaagcagcctctcagctgatggctgcacagtcagatgtctggtggcagagagtccgagcatggagcgattccattttatgactgttgtttttcacattttcatctttctaaggtgtgtctcttttccaatgagaagtcatttttgcaagccaaaagtcgatcaatcgcattcattttaagaaattatacctttttagtacttgctgaagaatgattcagggtaaatcacatactttgtttagagaggcgaggggtttaaccgagtcacccagctggtctcatacatagacagcacttgtgaaggattgaatgcaggttccaggtggagggaagacgtggacaccatctccactgagccatgcagacatttttaaaagctatacaaaaaattgtgagaagacattggccaactctttcaaagtctttctttttccacgtgcttcttattttaagcgaaatatattgtttgtttcttcctaa

SEQ ID NO: 21555 - DNA, 2926 bp, Homo sapiens
gctttataaaggggagtttccctgcacaagctctctctcttgtctgccgccatgtgagacatgcctttcaccttccgccatgatcatgaggcttccccagccacatggaactaatgccagcagttactctgcagagatgacggagcccaagtcggtgtgtgtctcggtggatgaggtggtgtccagcaacatggaggccactgagacggacctgctgaatggacatctgaaaaaagtagataataacctcacggaagcccagcgcttctcctccttgcctcggagggcagctgtgaacattgaattcagggacctttcctattcggttcctgaaggaccctggtggaggaagaaaggatacaagaccctcctgaaaggaatttccgggaagttcaatagtggtgagttggtggccattatgggtccttccggggccgggaagtccacgctgatgaacatcctggctggatacagggagacgggcatgaagggggccgtcctcatcaacggcctgccccgggacctgcgctgcttccggaaggtgtcctgctacatcatgcaggatgacatgctgctgccgcatctcactgtgcaggaggccatgatggtgtcggcacatctgaagcttcaggagaaggatgaaggcagaagggaaatggtcaaggagatactgacagcgctgggcttgctgtcttgcgccaacacgcggaccgggagcctgtcaggtggtcagcgcaagcgcctggccatcgcgctggagctggtgaacaaccctccagtcatgttcttcgatgagcccaccagcggcctggacagcgcctcctgcttccaggtggtctcgctgatgaaagggctcgctcaagggggtcgctccatcatttgcaccatccaccagcccagcgccaaactcttcgagctgttcgaccagctttacgtcctgagtcaaggacaatgtgtgtaccggggaaaagtctgcaatcttgtgccatatttgagggatttgggtctgaactgcccaacctaccacaacccagcagattttgtcatggaggttgcatccggcgagtacggtgatcagaacagtcggctggtgagagcggttcgggagggcatgtgtgactcagaccacaagagagacctcgggggtgatgccgaggtgaacccttttctttggcaccgcccctctgaagaggactcctcgtccatggaaggctgccacagcttctctgccagctgcctcacgcagttctgcatcctcttcaagaggaccttcctcagcatcatgagggactcggtcctgacacacctgcgcatcacctcgcacattgggatcggcctcctcattggcctgctgtacttggggatcgggaacgaagccaagaaggtcttgagcaactccggcttcctcttcttctccatgctgttcctcatgttcgcggccctcatgcctactgttctgacatttcccctggagatgggagtctttcttcgggaacacctgaactactggtacagcctgaaggcctactacctggccaagaccatggcagacgtgccctttcagatcatgttcccagtggcctactgcagcatcgtgtactggatgacgtcgcagccgtccgacgccgtgcgctttgtgctgtttgccgcgctgggcaccatgacctccctggtggcacagtccctgggcctgctgatcggagccgcctccacgtccctgcaggtggccactttcgtgggcccagtgacagccatcccggtgctcctgttctcggggttcttcgtcagcttcgacaccatccccacgtacctacagtggatgtcctacatctcctatgtcaggtatgggttcgaaggggtcatcctctccatctatggcttagaccgggaagatctgcactgtgacatcgacgagacgtgccacttccagaagtcggaggccatcctgcgggagctggacgtggaaaatgccaagctgtacctggacttcatcgtactcgggattttcttcatctccctccgcctcattgcctatttggtcctcaggtacaaaatccgggcagagaggtaaaacacctgaatgccaggaaacaggaagattagacactgtggccgagggcacgtctagaatcgaggaggcaagcctgtgcccgaccgacgacacagagactcttctgatccaacccctagaaccgcgttgggtttgtgggtgtctcgtgctcagccactctgcccagctgggttggatcttctctccattcccctttctagctttaactaggaagatgtaggcagattggtggttttttttttttttttaacatacagaattttaaataccacaactggggcagaatttaaagctgcaacacagctggtgatgagaggcttcctcagtccagtcgctccttagcaccaggcaccgtgggtcctggatggggaactgcaagcagcctctcagctgatggctgcacagtcagatgtctggtggcagagagtccgagcatggagcgattccattttatgactgttgtttttcacattttcatctttctaaggtgtgtctcttttccaatgagaagtcatttttgcaagccaaaagtcgatcaatcgcattcattttaagaaattatacctttttagtacttgctgaagaatgattcagggtaaatcacatactttgtttagagaggcgaggggtttaaccgagtcacccagctggtctcatacatagacagcacttgtgaaggattgaatgcaggttccaggtggagggaagacgtggacaccatctccactgagccatgcagacatttttaaaagctatacaaaaaattgtgagaagacattggccaactctttcaaagtctttctttttccacgtgcttcttattttaagcgaaatatattgtttgtttcttcctaa

SEQ ID NO: 21556 - DNA, 640 bp, Homo sapiens
ggggtgtccttcctggagcccgggctgacccccgtctgtgtctcctgcagtcatggaggttgcatccggcgagtacggtgatcagaacagtcggctggtgagagcggttcgggagggcatgtgtgactcagaccacaagagagacctcgggggtgatgccgaggtgaacccttttctttggcaccgcccctctgaagaggtaaagcagacaaaacgattaaaggggttgagaaaggactcctcgtccatggaaggctgccacagcttctctgccagctgcctcacgcagttctgcatcctcttcaagaggaccttcctcagcatcatgagggactcggtcctgacacacctgcgcatcacctcgcacattgggatcggcctcctcattggcctgctgtacttggggatcgggaacgaagccaagaaggtcttgagcaactccggcttcctcttcttctccatgctgttcctcatgttcgcggccctcatgcctactgttctgacatctccactgagccatgcagacatttttaaaagctatacaaaaaattgtgagaagacattggccaactctttcaaagtctttctttttccacgtgcttcttattttaagcgaaatatattgtttgtttcttcctaa

SEQ ID NO: 21557 - DNA, 747 bp, Homo sapiens
cggcattgtggctagctgcactgtgggtagctgcaccgtggctagtggcactgtggctagctgcatcttggctagctgcaccgtggcctgcagtgcgggcatgaggctcacactgccagtggccgtctgttctgcttccacactgttgtccttgtcccctgcaggtgtcggcacatctgaagcttcaggagaaggatgaaggcagaagggaaatggtcaaggagatactgacagcgctgggcttgctgtcttgcgccaacacgcggaccgggagcctgtcaggtggtcagcgcaagcgcctggccatcgcgctggagctggtgaacaaccctccagtcatgttcttcgatgagcccaccagcggcctggacagcgcctcctgcttccaggtggtctcgctgatgaaagggctcgctcaagggggtcgctccatcatttgcaccatccaccagcccagcgccaaactcttcgagctgttcgaccagctttacgtcctgagtcaaggacaatgtgtgtaccggggaaaagtctgcaatcttgtgccatatttgagggatttgggtctgaactgcccaacctaccacaacccagcagattttggtaagcggagtcctgagcagctcgggggacagaaaggggattttcctcctctgtgggtctcacttttagctgacgcccccaactcagaaaccacttgactaccacaaatagctcaagtgtcatccagttataaaacgtttaaagaac

SEQ ID NO: 21558 - DNA, 457 bp, Homo sapiens
agagccatggcaggaccaagtgttctggacgttgccgagagctgccttcggtggaagcgcttccatcttttaggaacgttcttcctccccgaagtgccgagtgctcctaacaagtgctgattgtaaaacctttataagaaatctggtgggagtcaggcgtggtggctcatgtctgtaatcccagcactttgggaggctgaggcaggcagatcacttgaggtcaggagtttgagaccagcctggccaacatggcgaaaccccgtctccactaaaaacacaaaacaattaggtgggcttggtggcgcgcgactgtaattctagctactccggaggctgaggcgggagggcgggaagatcccttgaacctgggaggcagaggttgcagtgagctgagatcgcgccactgcactccagcctaggtgacagagtgagactccgtctcaataaaaaaaaaaaa

SEQ ID NO: 21559 - DNA, 247 bp, Homo sapiens
gtgagccgatgaaccagccagtgaatgagtgtgcctggtgaggccgtgcctgccttgcatgagcacctgggaggctctcagcctgctcagcagagagaattctccctggtggagaagggccatccactcggctgagctggtccgggccccaggcccctctctgctccttcccaggcctgaagtctgcagaggtccggcctttgggcagttgggtgtagcctgagctacacacagaattgttcagaag

SEQ ID NO: 21560 - DNA, 3539 bp, Homo sapiens
gaattccgggatgtggaacggtcgcaggaggctgctacaagccccatgagcaaggctgttcccactgacagagctttcccaggatgacagagagtgcgctctgcctctctggggtgtgctagcctacgaggggcaatcgtaaggcgaatgtcactgaaagaacacaagtgtccttaaacatggactatctgggctttctagtgctgaaattcttcccactcccactgcccacttcccattatataaaaaacacagttgtttcatgtttttgtttctttactgtttttctttgtttttgttaagaatgcattcatttattcaaaattgtttattgtagaataatcaggcattgcgtggatgaggtggtgtccagcaacatggaggccactgagacggacctgctgaatggacatctgaaaaaagtagataataacctcacggaagcccagcgcttctcctccttgcctcggagggcagctgtgaacattgaattcagggacctttcctattcggttcctgaaggaccctggtggaggaagaaaggatacaagaccctcctgaaaggaatttccgggaagttcaatagtggtgagttggtggccattatgggtccttccggggccgggaagtccacgctgatgaacatcctggctggatacagggagacgggcatgaagggggccgtcctcatcaacggcctgccccgggacctgcgctgcttccggaaggtgtcctgctacatcatgcaggatgacatgctgctgccgcatctcactgtgcaggaggccatgatggtgtcggcacatctgaagcttcaggagaaggatgaaggcagaagggaaatggtcaaggagatactgacagcgctgggcttgctgtcttgcgccaacacgcggaccgggagcctgtcaggtggtcagcgcaagcgcctggccatcgcgctggagctggtgaacaaccctccagtcatgttcttcgatgagcccaccagcggcctggacagcgcctcctgcttccaggtggtctcgctgatgaaagggctcgctcaagggggtcgctccatcatttgcaccatccaccagcccagcgccaaactcttcgagctgttcgaccagctttacgtcctgagtcaaggacaatgtgtgtaccggggaaaagtctgcaatcttgtgccatatttgagggatttgggtctgaactgcccaacctaccacaacccagcagattttgtcatggaggttgcatccggcgagtacggtgatcagaacagtcggctggtgagagcggttcgggagggcatgtgtgactcagaccacaagagagacctcgggggtgatgccgaggtgaacccttttctttggcaccgcccctctgaagaggtaaagcagacaaaacgattaaaggggttgagaaaggactcctcgtccatggaaggctgccacagcttctctgccagctgcctcacgcagttctgcatcctcttcaagaggaccttcctcagcatcatgagggactcggtcctgacacacctgcgcatcacctcgcacattgggatcggcctcctcattggcctgctgtacttggggatcgggaacgaagccaagaaggtcttgagcaactccggcttcctcttcttctccatgctgttcctcatgttcgcggccctcatgcctactgttctgacatttcccctggagatgggagtctttcttcgggaacacctgaactactggtacagcctgaaggcctactacctggccaagaccatggcagacgtgccctttcagatcatgttcccagtggcctactgcagcatcgtgtactggatgacgtcgcagccgtccgacgccgtgcgctttgtgctgtttgccgcgctgggcaccatgacctccctggtggcacagtccctgggcctgctgatcggagccgcctccacgtccctgcaggtggccactttcgtgggcccagtgacagccatcccggtgctcctgttctcggggttcttcgtcagcttcgacaccatccccacgtacctacagtggatgtcctacatctcctatgtcaggtatgggttcgaaggggtcatcctctccatctatggcttagaccgggaagatctgcactgtgacatcgacgagacgtgccacttccagaagtcggaggccatcctgcgggagctggacgtggaaaatgccaagctgtacctggacttcatcgtactcgggattttcttcatctccctccgcctcattgcctatttggtcctcaggtacaaaatccgggcagagaggtaaaacacctgaatgccaggaaacaggaagattagacactgtggccgagggcacgtctagaatcgaggaggcaagcctgtgcccgaccgacgacacagagactcttctgatccaacccctagaaccgcgttgggtttgtgggtgtctcgtgctcagccactctgcccagctgggttggatcttctctccattcccctttctagctttaactaggaagatgtaggcagattggtggttttttttttttttttaacatacagaattttaaataccacaactggggcagaatttaaagctgcaacacagctggtgatgagaggcttcctcagtccagtcgctccttagcaccaggcaccgtgggtcctggatggggaactgcaagcagcctctcagctgatggctgcacagtcagatgtctggtggcagagagtccgagcatggagcgattccattttatgactgttgtttttcacattttcatctttctaaggtgtgtctcttttccaatgagaagtcatttttgcaagccaaaagtcgatcaatcgcattcattttaagaaattatacctttttagtacttgctgaagaatgattcagggtaaatcacatactttgtttagagaggcgaggggtttaaccgagtcacccagctggtctcatacatagacagcacttgtgaaggattgaatgcaggttccaggtggagggaagacgtggacaccatctccactgagccatgcagacatttttaaaagctatacaaaaaattgtgagaagacattggccaactctttcaaagtctttctttttccacgtgcttcttattttaagcgaaatatattgtttgtttcttcctaaaaaaaaaaacaaatacaaaaaaaataaaagaaacaacaaaaaactaaaaaaaaaaaggggagggcgccatggtaagaatatactcccggcaggaggcccacaaaaatatttcctctgatcccgcccgtttctttgtagtgaacaacggggcgcccccccataagaggacggctgactatgaatacacacagagacggcaccgggcgcgcgcttaaaaccaaacggctggcgtctggagaaaccatagtccacctcacgacaactccttagtgggaagaagcgcccaactctttgcggggccgcagacaattgagcgagacaacactccaaaggttataaacgcccagcagtaatcaaacgtataagggggttatgaggtgcaagcaactg

SEQ ID NO: 21561 - DNA, 3245 bp, Homo sapiens
gaattccgggatgtggaacggtcgcaggaggctgctacaagccccatgagcaaggctgttcccactgacagagctttcccaggatgacagagagtgcgctctgcctctctggggtgtgctagcctacgaggggcaatcgtaaggcgaatgtcactgaaagaacacaagtgtccttaaacatggactatctgggctttctagtgctgaaattcttcccactcccactgcccacttcccattatataaaaaacacagttgtttcatgtttttgtttctttactgtttttctttgtttttgttaagaatgcattcatttattcaaaattgtttattgtagaataatcaggcattgcgtggatgaggtggtgtccagcaacatggaggccactgagacggacctgctgaatggacatctgaaaaaagtagataataacctcacggaagcccagcgcttctcctccttgcctcggagggcagctgtgaacattgaattcagggacctttcctattcggttcctgaaggaccctggtggaggaagaaaggatacaagaccctcctgaaaggaatttccgggaagttcaatagtggtgagttggtggccattatgggtccttccggggccgggaagtccacgctgatgaacatcctggctggatacagggagacgggcatgaagggggccgtcctcatcaacggcctgccccgggacctgcgctgcttccggaaggtgtcctgctacatcatgcaggatgacatgctgctgccgcatctcactgtgcaggaggccatgatggtgtcggcacatctgaagcttcaggagaaggatgaaggcagaagggaaatggtcaaggagatactgacagcgctgggcttgctgtcttgcgccaacacgcggaccgggagcctgtcaggtggtcagcgcaagcgcctggccatcgcgctggagctggtgaacaaccctccagtcatgttcttcgatgagcccaccagcggcctggacagcgcctcctgcttccaggtggtctcgctgatgaaagggctcgctcaagggggtcgctccatcatttgcaccatccaccagcccagcgccaaactcttcgagctgttcgaccagctttacgtcctgagtcaaggacaatgtgtgtaccggggaaaagtctgcaatcttgtgccatatttgagggatttgggtctgaactgcccaacctaccacaacccagcagattttgtcatggaggttgcatccggcgagtacggtgatcagaacagtcggctggtgagagcggttcgggagggcatgtgtgactcagaccacaagagagacctcgggggtgatgccgaggtgaacccttttctttggcaccgcccctctgaagaggtaaagcagacaaaacgattaaaggggttgagaaaggactcctcgtccatggaaggctgccacagcttctctgccagctgcctcacgcagttctgcatcctcttcaagaggaccttcctcagcatcatgagggactcggtcctgacacacctgcgcatcacctcgcacattgggatcggcctcctcattggcctgctgtacttggggatcgggaacgaagccaagaaggtcttgagcaactccggcttcctcttcttctccatgctgttcctcatgttcgcggccctcatgcctactgttctgacatttcccctggagatgggagtctttcttcgggaacacctgaactactggtacagcctgaaggcctactacctggccaagaccatggcagacgtgccctttcagatcatgttcccagtggcctactgcagcatcgtgtactggatgacgtcgcagccgtccgacgccgtgcgctttgtgctgtttgccgcgctgggcaccatgacctccctggtggcacagtccctgggcctgctgatcggagccgcctccacgtccctgcaggtggccactttcgtgggcccagtgacagccatcccggtgctcctgttctcggggttcttcgtcagcttcgacaccatccccacgtacctacagtggatgtcctacatctcctatgtcaggtatgggttcgaaggggtcatcctctccatctatggcttagaccgggaagatctgcactgtgacatcgacgagacgtgccacttccagaagtcggaggccatcctgcgggagctggacgtggaaaatgccaagctgtacctggacttcatcgtactcgggattttcttcatctccctccgcctcattgcctatttggtcctcaggtacaaaatccgggcagagaggtaaaacacctgaatgccaggaaacaggaagattagacactgtggccgagggcacgtctagaatcgaggaggcaagcctgtgcccgaccgacgacacagagactcttctgatccaacccctagaaccgcgttgggtttgtgggtgtctcgtgctcagccactctgcccagctgggttggatcttctctccattcccctttctagctttaactaggaagatgtaggcagattggtggttttttttttttttttaacatacagaattttaaataccacaactggggcagaatttaaagctgcaacacagctggtgatgagaggcttcctcagtccagtcgctccttagcaccaggcaccgtgggtcctggatggggaactgcaagcagcctctcagctgatggctgcacagtcagatgtctggtggcagagagtccgagcatggagcgattccattttatgactgttgtttttcacattttcatctttctaaggtgtgtctcttttccaatgagaagtcatttttgcaagccaaaagtcgatcaatcgcattcatttaaaattaaccttgttggaaaagaggggggggtgaacaaccccccctttttttttggggggtctctttccgggaaaaaaaagggaaaaaaaatttttggtaaaattttttcccccaaagggggggggtttaaaaaatattcccaaaccaaatactttgtttagagaggcgaggggtttaaccgagtcacccagctggtctcatacatagacagcacttgtgaaggattgaatgcaggttccaggtggagggaagacgtggacaccatctccactgagccatgcagacatttttaaaagctatacaaaaaattgtgagaagacattggccaactctttcaaagtctttctttttccacgtgcttcttattttaagcgaaatatattgtttgtttcttcctaa

SEQ ID NO: 21562 - DNA, 1421 bp, Homo sapiens
acgattccctccaaccgttagaaagcatgtaacctcggaagtgaacacaagacttctcagtgcatttcaccagtgaatatgtaccgctcattcaacttgtttttttgctgggggccctggaggaaacaaaattggaagaaaaacatagtggagctgttgcacgtgtttgtcttaagaaggtggtgggcggtgaggaagtattctggggaaggcggccctttgggaagggaggatagccaagctgggaatcgcagggagggtgaacgacattgaccttcagccaacggcgtggctggctgggagaacgtcctccctcatgcctggcctttcctcctaggtatgggttcgaaggggtcatcctctccatctatggcttagaccgggaagatctgcactgtgacatcgacgagacgtgccacttccagaagtcggaggccatcctgcgggagctggacgtggaaaatgccaagctgtacctggacttcatcgtactcgggattttcttcatctccctccgcctcattgcctatttggtcctcaggtacaaaatccgggcagagaggtaaaacacctgaatgccaggaaacaggaagattagacactgtggccgagggcacgtctagaatcgaggaggcaagcctgtgcccgaccgacgacacagagactcttctgatccaacccctagaaccgcgttgggtttgtgggtgtctcgtgctcagccactctgcccagctgggttggatcttctctccattcccctttctagctttaactaggaagatgtaggcagattggtggttttttttttttttttaacatacagaattttaaataccacaactggggcagaatttaaagctgcaacacagctggtgatgagaggcttcctcagtccagtcgctccttagcaccaggcaccgtgggtcctggatggggaactgcaagcagcctctcagctgatggctgcacagtcagatgtctggtggcagagagtccgagcatggagcgattccattttatgactgttgtttttcacattttcatctttctaaggtgtgtctcttttccaatgagaagtcatttttgcaagccaaaagtcgatcaatcgcattcattttaagaaattatacctttttagtacttgctgaagaatgattcagggtaaatcacatactttgtttagagaggcgaggggtttaaccgagtcacccagctggtctcatacatagacagcacttgtgaaggattgaatgcaggttccaggtggagggaagacgtggacaccatctccactgagccatgcagacatttttaaaagctatacaaaaaattgtgagaagacattggccaactctttcaaagtctttctttttccacgtgcttcttattttaagcgaaatatattgtttgtttcttcctaa

SEQ ID NO: 21563 - DNA, 828 bp, Homo sapiens
  misc_feature (757)..(757): n is a, c, g, or t
  misc_feature (770)..(770): n is a, c, g, or t
  misc_feature (802)..(803): n is a, c, g, or t
gaattccgggatgtggaacggtcgcaggaggctgctacaagccccatgagcaaggctgttcccactgacagagctttcccaggatgacagagagtgcgctctgcctctctggggtgtgctagcctacgaggggcaatcgtaaggcgaatgtcactgaaagaacacaagtgtccttaaacatggactatctgggctttctagtgctgaaattcttcccactcccactgcccacttcccattatataaaaaacacagttgtttcatgtttttgtttctttactgtttttctttgtttttgttaagaatgcattcatttattcaaaattgtttattgtagaataatcaggcattgcgtggatgaggtggtgtccagcaacatggaggccactgagacggacctgctgaatggacatctgaaaaaagtagataataacctcacggaagcccagcgcttctcctccttgcctcggagggcagctgtgaacattgaattcagggacctttcctattcggttcctgaaggaccctggtggaggaagaaaggatacaagaccctcctgaaaggaatttccgggaagttcaatagtggtgagttggtggccattatgggtccttccggggccgggaagtccacgctgatgaacatcctggctggatacaggtgagcagccctgcccagggcgcaaagttctctcccgggtgtcaggccagcagtgggaacagtggagctccttccatcagccccatcacctggagnaggctgtggtctncagcagtagtccaggggagagagtgacattgnnaggctgcacttgccaagggccatat

SEQ ID NO: 21564 - DNA, 870 bp, Homo sapiens
cccgggggaagctggcgtgggcgagcctcctctgcaggaggccaggctgcaggttctgctacatctgtcctgtgtgcccccaactccaggtggccactttcgtgggcccagtgacagccatcccggtgctcctgttctcggggttcttcgtcagcttcgacaccatccccacgtacctacagtggatgtcctacatctcctatgtcaggtagcgggcgtggggcacgcatggcgtggggaccgagggtgacgggggaagaaccgtctccaacagcgtgaggggctcacaaaagccactctgggctgctggccaagagcagattacacatctgaggatccaggccttccatcttcctgctagttccacctcctcctaccctcaccaacacacacacactaaacaaggaggccacacaaaccagcgcttcacacccggagagccatggcaggaccaagtgttctggacgttgccgagagctgccttcggtggaagcgcttccatcttttaggaacgttcttcctccccgaagtgccgagtgctcctaacaagtgctgattgtaaaacctttataagaaatctggtgggagtcaggcgtggtggctcatgtctgtaatcccagcactttgggaggctgaggcaggcagatcacttgaggtcaggagtttgagaccagcctggccaacatggcgaaaccccgtctccactaaaaacacaaaacaattaggtgggcttggtggcgcgcgactgtaattctagctactccggaggctgaggcgggagggcgggaagatcccttgaacctgggaggcagaggttgcagtgagctgagatcgcgccactgcactccagcctaggtgacagagtgagac

SEQ ID NO: 21565 - DNA, 2910 bp, Homo sapiens
gaattccggtttcttcctaaaaaatgtctgatggccgctttctcggtcggcaccgccatgaatgccagcagttactctgcagagatgacggagcccaagtcggtgtgtgtctcggtggatgaggtggtgtccagcaacatggaggccactgagacggacctgctgaatggacatctgaaaaaagtagataataacctcacggaagcccagcgcttctcctccttgcctcggagggcagctgtgaacattgaattcagggacctttcctattcggttcctgaaggaccctggtggaggaagaaaggatacaagaccctcctgaaaggaatttccgggaagttcaatagtggtgagttggtggccattatgggtccttccggggccgggaagtccacgctgatgaacatcctggctggatacagggagacgggcatgaagggggccgtcctcatcaacggcctgccccgggacctgcgctgcttccggaaggtgtcctgctacatcatgcaggatgacatgctgctgccgcatctcactgtgcaggaggccatgatggtgtcggcacatctgaagcttcaggagaaggatgaaggcagaagggaaatggtcaaggagatactgacagcgctgggcttgctgtcttgcgccaacacgcggaccgggagcctgtcaggtggtcagcgcaagcgcctggccatcgcgctggagctggtgaacaaccctccagtcatgttcttcgatgagcccaccagcggcctggacagcgcctcctgcttccaggtggtctcgctgatgaaagggctcgctcaagggggtcgctccatcatttgcaccatccaccagcccagcgccaaactcttcgagctgttcgaccagctttacgtcctgagtcaaggacaatgtgtgtaccggggaaaagtctgcaatcttgtgccatatttgagggatttgggtctgaactgcccaacctaccacaacccagcagattttgtcatggaggttgcatccggcgagtacggtgatcagaacagtcggctggtgagagcggttcgggagggcatgtgtgactcagaccacaagagagacctcgggggtgatgccgaggtgaacccttttctttggcaccgcccctctgaagaggtaaagcagacaaaacgattaaaggggttgagaaaggactcctcgtccatggaaggctgccacagcttctctgccagctgcctcacgcagttctgcatcctcttcaagaggaccttcctcagcatcatgagggactcggtcctgacacacctgcgcatcacctcgcacattgggatcggcctcctcattggcctgctgtacttggggatcgggaacgaagccaagaaggtcttgagcaactccggcttcctcttcttctccatgctgttcctcatgttcgcggccctcatgcctactgttctgacatttcccctggagatgggagtctttcttcgggaacacctgaactactggtacagcctgaaggcctactacctggccaagaccatggcagacgtgccctttcagatcatgttcccagtggcctactgcagcatcgtgtactggatgacgtcgcagccgtccgacgccgtgcgctttgtgctgtttgccgcgctgggcaccatgacctccctggtggcacagtccctgggcctgctgatcggagccgcctccacgtccctgcaggtggccactttcgtgggcccagtgacagccatcccggtgctcctgttctcggggttcttcgtcagcttcgacaccatccccacgtacctacagtggatgtcctacatctcctatgtcaggtatgggttcgaaggggtcatcctctccatctatggcttagaccgggaagatctgcactgtgacatcgacgagacgtgccacttccagaagtcggaggccatcctgcgggagctggacgtggaaaatgccaagctgtacctggacttcatcgtactcgggattttcttcatctccctccgcctcattgcctatttggtcctcaggtacaaaatccgggcagagaggtaaaacacctgaatgccaggaaacaggaagattagacactgtggccgagggcacgtctagaatcgaggaggcaagcctgtgcccgaccgacgacacagagactcttctgatccaacccctagaaccgcgttgggtttgtgggtgtctcgtgctcagccactctgcccagctgggttggatcttctctccattcccctttctagctttaactaggaagatgtaggcagattggtggttttttttttttttttaacatacagaattttaaataccacaactggggcagaatttaaagctgcaacacagctggtgatgagaggcttcctcagtccagtcgctccttagcaccaggcaccgtgggtcctggatggggaactgcaagcagcctctcagctgatggctgcacagtcagatgtctggtggcagagagtccgagcatggagcgattccattttatgactgttgtttttcacattttcatctttctaaggtgtgtctcttttccaatgagaagtcatttttgcaagccaaaagtcgatcaatcgcattcattttaagaaattatacctttttagtacttgctgaagaatgattcagggtaaatcacatactttgtttagagaggcgaggggtttaaccgagtcacccagctggtctcatacatagacagcacttgtgaaggattgaatgcaggttccaggtggagggaagacgtggacaccatctccactgagccatgcagacatttttaaaagctatacaaaaaattgtgagaagacattggccaactctttcaaagtctttctttttccacgtgcttcttattttaagcgaaatatattgtttgtttcttcctaa

SEQ ID NO: 21566 - DNA, 3163 bp, Homo sapiens
agacactgaatcatcatttgtagtttggggggctttacatgcctgcagtggtgaaaactgaaattttgtcccacttaagggagtttcttcttccctttattaattgcaaaataaatatatgtcacttcagagggcagcagctggactacctatgtttgtggcgctacaccaacctgaacttcgcttcctgagacctaagattcagccccgtgctcagcagacatcagggatcaccgactctgtgccaggagctgttcttgatgctgggaacgcaggggtggacaaaacagagaaagccctgccctcagtgagaaatatgctgtcatgtaaattgctttttcccctatagaatgccagcagttactctgcagagatgacggagcccaagtcggtgtgtgtctcggtggatgaggtggtgtccagcaacatggaggccactgagacggacctgctgaatggacatctgaaaaaagtagataataacctcacggaagcccagcgcttctcctccttgcctcggagggcagctgtgaacattgaattcagggacctttcctattcggttcctgaaggaccctggtggaggaagaaaggatacaagaccctcctgaaaggaatttccgggaagttcaatagtggtgagttggtggccattatgggtccttccggggccgggaagtccacgctgatgaacatcctggctggatacagggagacgggcatgaagggggccgtcctcatcaacggcctgccccgggacctgcgctgcttccggaaggtgtcctgctacatcatgcaggatgacatgctgctgccgcatctcactgtgcaggaggccatgatggtgtcggcacatctgaagcttcaggagaaggatgaaggcagaagggaaatggtcaaggagatactgacagcgctgggcttgctgtcttgcgccaacacgcggaccgggagcctgtcaggtggtcagcgcaagcgcctggccatcgcgctggagctggtgaacaaccctccagtcatgttcttcgatgagcccaccagcggcctggacagcgcctcctgcttccaggtggtctcgctgatgaaagggctcgctcaagggggtcgctccatcatttgcaccatccaccagcccagcgccaaactcttcgagctgttcgaccagctttacgtcctgagtcaaggacaatgtgtgtaccggggaaaagtctgcaatcttgtgccatatttgagggatttgggtctgaactgcccaacctaccacaacccagcagattttgtcatggaggttgcatccggcgagtacggtgatcagaacagtcggctggtgagagcggttcgggagggcatgtgtgactcagaccacaagagagacctcgggggtgatgccgaggtgaacccttttctttggcaccgcccctctgaagaggactcctcgtccatggaaggctgccacagcttctctgccagctgcctcacgcagttctgcatcctcttcaagaggaccttcctcagcatcatgagggactcggtcctgacacacctgcgcatcacctcgcacattgggatcggcctcctcattggcctgctgtacttggggatcgggaacgaagccaagaaggtcttgagcaactccggcttcctcttcttctccatgctgttcctcatgttcgcggccctcatgcctactgttctgacatttcccctggagatgggagtctttcttcgggaacacctgaactactggtacagcctgaaggcctactacctggccaagaccatggcagacgtgccctttcagatcatgttcccagtggcctactgcagcatcgtgtactggatgacgtcgcagccgtccgacgccgtgcgctttgtgctgtttgccgcgctgggcaccatgacctccctggtggcacagtccctgggcctgctgatcggagccgcctccacgtccctgcaggtggccactttcgtgggcccagtgacagccatcccggtgctcctgttctcggggttcttcgtcagcttcgacaccatccccacgtacctacagtggatgtcctacatctcctatgtcaggtatgggttcgaaggggtcatcctctccatctatggcttagaccgggaagatctgcactgtgacatcgacgagacgtgccacttccagaagtcggaggccatcctgcgggagctggacgtggaaaatgccaagctgtacctggacttcatcgtactcgggattttcttcatctccctccgcctcattgcctatttggtcctcaggtacaaaatccgggcagagaggtaaaacacctgaatgccaggaaacaggaagattagacactgtggccgagggcacgtctagaatcgaggaggcaagcctgtgcccgaccgacgacacagagactcttctgatccaacccctagaaccgcgttgggtttgtgggtgtctcgtgctcagccactctgcccagctgggttggatcttctctccattcccctttctagctttaactaggaagatgtaggcagattggtggttttttttttttttttaacatacagaattttaaataccacaactggggcagaatttaaagctgcaacacagctggtgatgagaggcttcctcagtccagtcgctccttagcaccaggcaccgtgggtcctggatggggaactgcaagcagcctctcagctgatggctgcacagtcagatgtctggtggcagagagtccgagcatggagcgattccattttatgactgttgtttttcacattttcatctttctaaggtgtgtctcttttccaatgagaagtcatttttgcaagccaaaagtcgatcaatcgcattcattttaagaaattatacctttttagtacttgctgaagaatgattcagggtaaatcacatactttgtttagagaggcgaggggtttaaccgagtcacccagctggtctcatacatagacagcacttgtgaaggattgaatgcaggttccaggtggagggaagacgtggacaccatctccactgagccatgcagacatttttaaaagctatacaaaaaattgtgagaagacattggccaactctttcaaagtctttctttttccacgtgcttcttattttaagcgaaatatattgtttgtttcttcctaa

SEQ ID NO: 21567 - DNA, 2874 bp, Homo sapiens
gaattccggtttcttcctaaaaaatgtctgatggccgctttctcggtcggcaccgccatgaatgccagcagttactctgcagagatgacggagcccaagtcggtgtgtgtctcggtggatgaggtggtgtccagcaacatggaggccactgagacggacctgctgaatggacatctgaaaaaagtagataataacctcacggaagcccagcgcttctcctccttgcctcggagggcagctgtgaacattgaattcagggacctttcctattcggttcctgaaggaccctggtggaggaagaaaggatacaagaccctcctgaaaggaatttccgggaagttcaatagtggtgagttggtggccattatgggtccttccggggccgggaagtccacgctgatgaacatcctggctggatacagggagacgggcatgaagggggccgtcctcatcaacggcctgccccgggacctgcgctgcttccggaaggtgtcctgctacatcatgcaggatgacatgctgctgccgcatctcactgtgcaggaggccatgatggtgtcggcacatctgaagcttcaggagaaggatgaaggcagaagggaaatggtcaaggagatactgacagcgctgggcttgctgtcttgcgccaacacgcggaccgggagcctgtcaggtggtcagcgcaagcgcctggccatcgcgctggagctggtgaacaaccctccagtcatgttcttcgatgagcccaccagcggcctggacagcgcctcctgcttccaggtggtctcgctgatgaaagggctcgctcaagggggtcgctccatcatttgcaccatccaccagcccagcgccaaactcttcgagctgttcgaccagctttacgtcctgagtcaaggacaatgtgtgtaccggggaaaagtctgcaatcttgtgccatatttgagggatttgggtctgaactgcccaacctaccacaacccagcagattttgtcatggaggttgcatccggcgagtacggtgatcagaacagtcggctggtgagagcggttcgggagggcatgtgtgactcagaccacaagagagacctcgggggtgatgccgaggtgaacccttttctttggcaccgcccctctgaagaggactcctcgtccatggaaggctgccacagcttctctgccagctgcctcacgcagttctgcatcctcttcaagaggaccttcctcagcatcatgagggactcggtcctgacacacctgcgcatcacctcgcacattgggatcggcctcctcattggcctgctgtacttggggatcgggaacgaagccaagaaggtcttgagcaactccggcttcctcttcttctccatgctgttcctcatgttcgcggccctcatgcctactgttctgacatttcccctggagatgggagtctttcttcgggaacacctgaactactggtacagcctgaaggcctactacctggccaagaccatggcagacgtgccctttcagatcatgttcccagtggcctactgcagcatcgtgtactggatgacgtcgcagccgtccgacgccgtgcgctttgtgctgtttgccgcgctgggcaccatgacctccctggtggcacagtccctgggcctgctgatcggagccgcctccacgtccctgcaggtggccactttcgtgggcccagtgacagccatcccggtgctcctgttctcggggttcttcgtcagcttcgacaccatccccacgtacctacagtggatgtcctacatctcctatgtcaggtatgggttcgaaggggtcatcctctccatctatggcttagaccgggaagatctgcactgtgacatcgacgagacgtgccacttccagaagtcggaggccatcctgcgggagctggacgtggaaaatgccaagctgtacctggacttcatcgtactcgggattttcttcatctccctccgcctcattgcctatttggtcctcaggtacaaaatccgggcagagaggtaaaacacctgaatgccaggaaacaggaagattagacactgtggccgagggcacgtctagaatcgaggaggcaagcctgtgcccgaccgacgacacagagactcttctgatccaacccctagaaccgcgttgggtttgtgggtgtctcgtgctcagccactctgcccagctgggttggatcttctctccattcccctttctagctttaactaggaagatgtaggcagattggtggttttttttttttttttaacatacagaattttaaataccacaactggggcagaatttaaagctgcaacacagctggtgatgagaggcttcctcagtccagtcgctccttagcaccaggcaccgtgggtcctggatggggaactgcaagcagcctctcagctgatggctgcacagtcagatgtctggtggcagagagtccgagcatggagcgattccattttatgactgttgtttttcacattttcatctttctaaggtgtgtctcttttccaatgagaagtcatttttgcaagccaaaagtcgatcaatcgcattcattttaagaaattatacctttttagtacttgctgaagaatgattcagggtaaatcacatactttgtttagagaggcgaggggtttaaccgagtcacccagctggtctcatacatagacagcacttgtgaaggattgaatgcaggttccaggtggagggaagacgtggacaccatctccactgagccatgcagacatttttaaaagctatacaaaaaattgtgagaagacattggccaactctttcaaagtctttctttttccacgtgcttcttattttaagcgaaatatattgtttgtttcttcctaa

SEQ ID NO: 21568 - DNA, 600 bp, Homo sapiens
agcctgcgactgcactcccggggacaccctctcccggacccactcggggaggcggcggcgaaggcccggggagacccgcgaggggcaagcccggattcctgccggccgcctttctgcgcgcgccggagagagagacgcggtggggacagggatgcgcatttcacttccccgagctccggagagggatggcggggtgtcggcgagttcactgctggacacagttactgtaagtgctgtttccaggggtggtcaggaatctccctttctggttttctggcattaggaacaaacaacaaaccaatcatcaggcccccagccacccacctcaccttatcctagcgcccttcatgtctacgcccagcacaccaacatcgtagaggtagctaaagtacaaatggaaagtcttccgtattccacgccgtgtatctgtgtagttactaccctgatattacttccccgaggctgtaagcccacagtgcatggcacgctccggggctcaccccgcccctcccctgtatttcatttttagcatcctgtatttgaagtcagcagggctcagcaggatttgaccgacagttacctcttgccttgagctcaaga

SEQ ID NO: 21569 - DNA, 3149 bp, Homo sapiens
gaattccgggatgtggaacggtcgcaggaggctgctacaagccccatgagcaaggctgttcccactgacagagctttcccaggatgacagagagtgcgctctgcctctctggggtgtgctagcctacgaggggcaatcgtaaggcgaatgtcactgaaagaacacaagtgtccttaaacatggactatctgggctttctagtgctgaaattcttcccactcccactgcccacttcccattatataaaaaacacagttgtttcatgtttttgtttctttactgtttttctttgtttttgttaagaatgcattcatttattcaaaattgtttattgtagaataatcaggcattgcgtggatgaggtggtgtccagcaacatggaggccactgagacggacctgctgaatggacatctgaaaaaagtagataataacctcacggaagcccagcgcttctcctccttgcctcggagggcagctgtgaacattgaattcagggacctttcctattcggttcctgaaggaccctggtggaggaagaaaggatacaagaccctcctgaaaggaatttccgggaagttcaatagtggtgagttggtggccattatgggtccttccggggccgggaagtccacgctgatgaacatcctggctggatacagggagacgggcatgaagggggccgtcctcatcaacggcctgccccgggacctgcgctgcttccggaaggtgtcctgctacatcatgcaggatgacatgctgctgccgcatctcactgtgcaggaggccatgatggtgtcggcacatctgaagcttcaggagaaggatgaaggcagaagggaaatggtcaaggagatactgacagcgctgggcttgctgtcttgcgccaacacgcggaccgggagcctgtcaggtggtcagcgcaagcgcctggccatcgcgctggagctggtgaacaaccctccagtcatgttcttcgatgagcccaccagcggcctggacagcgcctcctgcttccaggtggtctcgctgatgaaagggctcgctcaagggggtcgctccatcatttgcaccatccaccagcccagcgccaaactcttcgagctgttcgaccagctttacgtcctgagtcaaggacaatgtgtgtaccggggaaaagtctgcaatcttgtgccatatttgagggatttgggtctgaactgcccaacctaccacaacccagcagattttgtcatggaggttgcatccggcgagtacggtgatcagaacagtcggctggtgagagcggttcgggagggcatgtgtgactcagaccacaagagagacctcgggggtgatgccgaggtgaacccttttctttggcaccgcccctctgaagaggtaaagcagacaaaacgattaaaggggttgagaaaggactcctcgtccatggaaggctgccacagcttctctgccagctgcctcacgcagttctgcatcctcttcaagaggaccttcctcagcatcatgagggactcggtcctgacacacctgcgcatcacctcgcacattgggatcggcctcctcattggcctgctgtacttggggatcgggaacgaagccaagaaggtcttgagcaactccggcttcctcttcttctccatgctgttcctcatgttcgcggccctcatgcctactgttctgacatttcccctggagatgggagtctttcttcgggaacacctgaactactggtacagcctgaaggcctactacctggccaagaccatggcagacgtgccctttcagatcatgttcccagtggcctactgcagcatcgtgtactggatgacgtcgcagccgtccgacgccgtgcgctttgtgctgtttgccgcgctgggcaccatgacctccctggtggcacagtccctgggcctgctgatcggagccgcctccacgtccctgcaggtggccactttcgtgggcccagtgacagccatcccggtgctcctgttctcggggttcttcgtcagcttcgacaccatccccacgtacctacagtggatgtcctacatctcctatgtcaggtatgggttcgaaggggtcatcctctccatctatggcttagaccgggaagatctgcactgtgacatcgacgagacgtgccacttccagaagtcggaggccatcctgcgggagctggacgtggaaaatgccaagctgtacctggacttcatcgtactcgggattttcttcatctccctccgcctcattgcctatttggtcctcaggtacaaaatccgggcagagaggtaaaacacctgaatgccaggaaacaggaagattagacactgtggccgagggcacgtctagaatcgaggaggcaagcctgtgcccgaccgacgacacagagactcttctgatccaacccctagaaccgcgttgggtttgtgggtgtctcgtgctcagccactctgcccagctgggttggatcttctctccattcccctttctagctttaactaggaagatgtaggcagattggtggttttttttttttttttaacatacagaattttaaataccacaactggggcagaatttaaagctgcaacacagctggtgatgagaggcttcctcagtccagtcgctccttagcaccaggcaccgtgggtcctggatggggaactgcaagcagcctctcagctgatggctgcacagtcagatgtctggtggcagagagtccgagcatggagcgattccattttatgactgttgtttttcacattttcatctttctaaggtgtgtctcttttccaatgagaagtcatttttgcaagccaaaagtcgatcaatcgcattcattttaagaaattatacctttttagtacttgctgaagaatgattcagggtaaatcacatactttgtttagagaggcgaggggtttaaccgagtcacccagctggtctcatacatagacagcacttgtgaaggattgaatgcaggttccaggtggagggaagacgtggacaccatctccactgagccatgcagacatttttaaaagctatacaaaaaattgtgagaagacattggccaactctttcaaagtctttctttttccacgtgcttcttattttaagcgaaatatattgtttgtttcttcctaa

SEQ ID NO: 21570 - DNA, 3596 bp, Homo sapiens
gaattccgggatgtggaacggtcgcaggaggctgctacaagccccatgagcaaggctgttcccactgacagagctttcccaggatgacagagagtgcgctctgcctctctggggtgtgctagcctacgaggggcaatcgtaaggcgaatgtcactgaaagaacacaagtgtccttaaacatggactatctgggctttctagtgctgaaattcttcccactcccactgcccacttcccattatataaaaaacacagttgtttcatgtttttgtttctttactgtttttctttgtttttgttaagaatgcattcatttattcaaaattgtttattgtagaataatcaggcattgcgtggatgaggtggtgtccagcaacatggaggccactgagacggacctgctgaatggacatctgaaaaaagtagataataacctcacggaagcccagcgcttctcctccttgcctcggagggcagctgtgaacattgaattcagggacctttcctattcggttcctgaaggaccctggtggaggaagaaaggatacaagaccctcctgaaaggaatttccgggaagttcaatagtggtgagttggtggccattatgggtccttccggggccgggaagtccacgctgatgaacatcctggctggatacagggagacgggcatgaagggggccgtcctcatcaacggcctgccccgggacctgcgctgcttccggaaggtgtcctgctacatcatgcaggatgacatgctgctgccgcatctcactgtgcaggaggccatgatggtgtcggcacatctgaagcttcaggagaaggatgaaggcagaagggaaatggtcaaggagatactgacagcgctgggcttgctgtcttgcgccaacacgcggaccgggagcctgtcaggtggtcagcgcaagcgcctggccatcgcgctggagctggtgaacaaccctccagtcatgttcttcgatgagcccaccagcggcctggacagcgcctcctgcttccaggtggtctcgctgatgaaagggctcgctcaagggggtcgctccatcatttgcaccatccaccagcccagcgccaaactcttcgagctgttcgaccagctttacgtcctgagtcaaggacaatgtgtgtaccggggaaaagtctgcaatcttgtgccatatttgagggatttgggtctgaactgcccaacctaccacaacccagcagattttgtcatggaggttgcatccggcgagtacggtgatcagaacagtcggctggtgagagcggttcgggagggcatgtgtgactcagaccacaagagagacctcgggggtgatgccgaggtgaacccttttctttggcaccgcccctctgaagaggtaaagcagacaaaacgattaaaggggttgagaaaggactcctcgtccatggaaggctgccacagcttctctgccagctgcctcacgcagttctgcatcctcttcaagaggaccttcctcagcatcatgagggactcggtcctgacacacctgcgcatcacctcgcacattgggatcggcctcctcattggcctgctgtacttggggatcgggaacgaagccaagaaggtcttgagcaactccggcttcctcttcttctccatgctgttcctcatgttcgcggccctcatgcctactgttctgacatttcccctggagatgggagtctttcttcgggaacacctgaactactggtacagcctgaaggcctactacctggccaagaccatggcagacgtgccctttcagatcatgttcccagtggcctactgcagcatcgtgtactggatgacgtcgcagccgtccgacgccgtgcgctttgtgctgtttgccgcgctgggcaccatgacctccctggtggcacagtccctgggcctgctgatcggagccgcctccacgtccctgcaggtggccactttcgtgggcccagtgacagccatcccggtgctcctgttctcggggttcttcgtcagcttcgacaccatccccacgtacctacagtggatgtcctacatctcctatgtcaggtatgggttcgaaggggtcatcctctccatctatggcttagaccgggaagatctgcactgtgacatcgacgagacgtgccacttccagaagtcggaggccatcctgcgggagctggacgtggaaaatgccaagctgtacctggacttcatcgtactcgggattttcttcatctccctccgcctcattgcctatttggtcctcaggtacaaaatccgggcagagaggtaaaacacctgaatgccaggaaacaggaagattagacactgtggccgagggcacgtctagaatcgaggaggcaagcctgtgcccgaccgacgacacagagactcttctgatccaacccctagaaccgcgttgggtttgtgggtgtctcgtgctcagccactctgcccagctgggttggatcttctctccattcccctttctagctttaactaggaagatgtaggcagattggtggttttttttttttttttaacatacagaattttaaataccacaactggggcagaatttaaagctgcaacacagctggtgatgagaggcttcctcagtccagtcgctccttagcaccaggcaccgtgggtcctggatggggaactgcaagcagcctctcagctgatggctgcacagtcagatgtctggtggcagagagtccgagcatggagcgattccattttatgactgttgtttttcacattttcatctttctaaggtgtgtctcttttccaatgagaagtcatttttgcaagccaaaagtcgatcaatcgcattcattttaagaaattatacctttttagtacttgctgaagaatgattcagggtaaatcacatactttgtttagagaggcgaggggtttaaccgagtcacccagctggtctcatacatagacagcacttgtgaaggattgaatgcaggttccaggtggagggaagacgtggacaccatctccactgagccatgcagacatttttaaaagctatacaaaaaattgtgagaagacattggccaactctttcaaagtctttctttttccacgtgcttcttattttaagcgaaatatattgtttgtttcttcctaactttctgactacctttaattttgcctaggttgatttaaacaaacaaacaaacagcttccctttcctcctgtatcacctcagctgcctccactgaacctggaagaatggggcttagggaaattcaggcacgacctttgagggttggctcagcaggagtggccagcagtgaaagatgggctaactgtgcaagaggggaggaggccaacgagatggcatcagaatccaagggcttaggacgaagtcagtagacttcagcatgtggaggcatttgaaacttgatcaaacaacgcacttcgagtggtgggagatttcatctctgggttttgcgacctcacagctgcatcaccgcctcagtgttaggcctgtgtaaactttgcacgttggaaaccgcttctttcctatgactgaatcacataagtcacccgctagggcagaacagggcctatc

SEQ ID NO: 21571 - DNA, 1969 bp, Homo sapiens
ggggtgtccttcctggagcccgggctgacccccgtctgtgtctcctgcagtcatggaggttgcatccggcgagtacggtgatcagaacagtcggctggtgagagcggttcgggagggcatgtgtgactcagaccacaagagagacctcgggggtgatgccgaggtgaacccttttctttggcaccgcccctctgaagaggtaaagcagacaaaacgattaaaggggttgagaaaggactcctcgtccatggaaggctgccacagcttctctgccagctgcctcacgcagttctgcatcctcttcaagaggaccttcctcagcatcatgagggactcggtcctgacacacctgcgcatcacctcgcacattgggatcggcctcctcattggcctgctgtacttggggatcgggaacgaagccaagaaggtcttgagcaactccggcttcctcttcttctccatgctgttcctcatgttcgcggccctcatgcctactgttctgacatttcccctggagatgggagtctttcttcgggaacacctgaactactggtacagcctgaaggcctactacctggccaagaccatggcagacgtgccctttcagatcatgttcccagtggcctactgcagcatcgtgtactggatgacgtcgcagccgtccgacgccgtgcgctttgtgctgtttgccgcgctgggcaccatgacctccctggtggcacagtccctgggcctgctgatcggagccgcctccacgtccctgcaggtggccactttcgtgggcccagtgacagccatcccggtgctcctgttctcggggttcttcgtcagcttcgacaccatccccacgtacctacagtggatgtcctacatctcctatgtcaggtatgggttcgaaggggtcatcctctccatctatggcttagaccgggaagatctgcactgtgacatcgacgagacgtgccacttccagaagtcggaggccatcctgcgggagctggacgtggaaaatgccaagctgtacctggacttcatcgtactcgggattttcttcatctccctccgcctcattgcctatttggtcctcaggtacaaaatccgggcagagaggtaaaacacctgaatgccaggaaacaggaagattagacactgtggccgagggcacgtctagaatcgaggaggcaagcctgtgcccgaccgacgacacagagactcttctgatccaacccctagaaccgcgttgggtttgtgggtgtctcgtgctcagccactctgcccagctgggttggatcttctctccattcccctttctagctttaactaggaagatgtaggcagattggtggttttttttttttttttaacatacagaattttaaataccacaactggggcagaatttaaagctgcaacacagctggtgatgagaggcttcctcagtccagtcgctccttagcaccaggcaccgtgggtcctggatggggaactgcaagcagcctctcagctgatggctgcacagtcagatgtctggtggcagagagtccgagcatggagcgattccattttatgactgttgtttttcacattttcatctttctaaggtgtgtctcttttccaatgagaagtcatttttgcaagccaaaagtcgatcaatcgcattcattttaagaaattatacctttttagtacttgctgaagaatgattcagggtaaatcacatactttgtttagagaggcgaggggtttaaccgagtcacccagctggtctcatacatagacagcacttgtgaaggattgaatgcaggttccaggtggagggaagacgtggacaccatctccactgagccatgcagacatttttaaaagctatacaaaaaattgtgagaagacattggccaactctttcaaagtctttctttttccacgtgcttcttattttaagcgaaatatattgtttgtttcttcctaa

SEQ ID NO: 21572 - DNA, 495 bp, Homo sapiens
gaattccggtttcttcctaaaaaatgtctgatggccgctttctcggtcggcaccgccatgaatgccagcagttactctgcagagatgacggagcccaagtcggtgtgtgtctcggtggatgaggtggtgtccagcaacatggaggccactgagacggacctgctgaatggacatctgaaaaaagtagataataacctcacggaagcccagcgcttctcctccttgcctcggagggcagctgtgaacattgaattcagggacctttcctattcggttcctgaaggaccctggtggaggaagaaaggtagggagggcggctgctttgtgtatcaagctgggaggagcctctgaaggaggcaacaggttgtttgggcaaaatcggggtctggaggttgagaggctgagcttctcttcccaacgccgtcactgctgtggtcaatttattctattgctttctgcctgaattttcctctcctataaaatgaacaggttgga

SEQ ID NO: 21573 - DNA, 282 bp, Homo sapiens
gacaatggagatgagccttggtggcttctcaggacctgcgtggaactcacccatggttgtgaacaaagatgaacaagtcaatcttcaacgaaggccaagtcaaggcactgacttcagaaaatgcatatcaacagaaaatacacatacatttccaccagaatgaagccctccaaatgttcagatgaggctatgtcaggaacacaacctgccctcatagaacctcaggcatattgggatagagtcaacatcactgtttcccacagttgtgtctttatacctgca

SEQ ID NO: 21574 - DNA, 186 bp, Homo sapiens
attgttggcgtatttctggtattaccgtatttgatctctgcaactatatagaaaatttgggagcctcatgcctataatccagccctttggaaggctgaggtgggaggatcccttgagctcaggagttcaagatcagcctgggcaacctagggagactccgtctctacaaattaaaaaaataaaaat

SEQ ID NO: 21575 - DNA, 467 bp, Homo sapiens
gcgttctgagggcagcttttaggatggtgtgtccatagtgttactttcataagatagttgaaaaatctgaatataatgaagttgggcctttgtgtatgtaaaatctgcccatctcttctctttcagatgattctatccacaagctagagctagtgccagagtacaggaaagcagttccttaacgttgctgcgttactgaggtttttagtttcatgtattttttcacaatggaataaagcattgtaaactgtaaattgcatctgtacaaagagagcccagggtgcctgggaactccgtaaggaggttggcttcccagctgtcacttgactcagttatgggctgtcagaaggcatgaagagaggggggccctctgtgccagtggaatttggaaactgaattgtaacaaagtgtcagtataaggcaattgaaatcgagaatgggacttgacctaggaggagaggttttca

SEQ ID NO: 21576 - DNA, 338 bp, Homo sapiens
attcgactctacataaaaattctctaaagtacttattttccctgttatgctagaacataaccagaattgttctccttttcaaattgaatactgaaaagaaatgtaaacatgaaataacttgcccaaggtcacatacctacttaatggtgaagcccaaatttgaattaaagtctgtaatcccaaagaccaagctattttacattatttcatgttggcaaataagtatgtgttaataattccttttatttctgtatttaaattttataatagcctatttcattaatagctaggtaaatcacttaagaatttatctgctacatgctgaggttttttggtag

SEQ ID NO: 21577 - DNA, 288 bp, Homo sapiens
ttttatcttaggctgggttacccaagggcagaccctgaaacagcagaagctgacaagggagtgagggaattgggactggaaaggggaagaaaccaagcaaaggtgcaatttcatgcaaaggcccttggagggtagcttcagcctgagcctacagggaactccagagttgtcttggcctgaggcaaggtcattggctaaggtctactgactacctggtagtggtagtaaagggacacagcataggaggtctaaggtttgggctgttggaattacactgatgttcagagg

SEQ ID NO: 21578 - DNA, 357 bp, Homo sapiens
gcccagttctgtataacattgtgcatttttcttcctttttgtatttagcgaatacaaataagaaaaacagaagaggctagatgtagtgactcacactttgggagaccgaggtggtaatatcacttaagccaagaaatttgagaccagcctgtgcaacatagctagaccccatccctacaaaaaaattaaaaattaaaaattagctgggcatggcagcacatacctgtggtccaagctactcaggaggctgaggcaggaggatctcttgaggctgggaggttgaggctgcatgcattgtgccataattgcagcactgctgtatggcctgggtgacagagggagaccctgtctcaaaaa

SEQ ID NO: 21579 - DNA, 498 bp, Homo sapiens
actgcccggctgacagtattgcatggggcttggctcttaggcatggctcagcatggctcttgtactggtgcccagagaaacagagagagaaccagagctgtctttcttgtggatggacagaggggagccaggtcatggcttggcttgtctctcgtgcccagggaaacagagaaagagttaagctgctgaccctgaaagcaggggagaaccggctgtgcagctgtgtgtgtgggagcagttcagagcaagcagccgagacagggaggacagtgcgagagagacagtgtaagtaagctgctgatgagaaagctgttgatgagagctgctgctgaataaaatcatctttcacctgcctaaggctccctgagtgttctttctcttcatccatctactctctttggacctcaacatgacaattggcatagtcatgaacctgacactatatattggttgttatgtcccaaatcatctttgaaatgaattaaagtgtgaatagat

SEQ ID NO: 21580 - DNA, 121 bp, Homo sapiens
aacctgtcattgtcacatttctctttcattagtgcttagtgagaatcatttgctctctacatgctcattacgtggacaacttgcaagttaagaatagtttttacatttttaaagggtcctt

SEQ ID NO: 21581 - DNA, 1118 bp, Homo sapiens
  misc_feature (24)..(24): n is a, c, g, or t
  misc_feature (27)..(27): n is a, c, g, or t
ctatactactaaattcgcggccgngtngacagcaaagttacagtaaaatgaagtattctcttatttagtttttgcatgtggaagtttctactattacccacaggaaagaaaccccctaagacttcacagtatatctgaattactgatagtctttattcagaggctgctgtcaaagaacttgtctgtgggcctgattttcctgataggaattatgtttctgatagcaaggctatcaaaatttaccaattatttatcaaggtagctactagttaccagttatcaaatatttaccagttatttcatccatctgctgcaatgtgctccaaaaccacttaagcttttgaggagcatgataaaattaaagacaatatgtaaaagccattgaccagttaaaagagaatgataaaatgtgaaaccaagtccagctctgttaaaatgttggctttaatggaaaaagttaatgaaatgaaaagagcttgttttattcatttgtcctcactgcatttatctacagtaatctcatcatttcccttggggagctctgcacagaagctaccagtaaagacatgcaccttcagttttcctaactttgcatgaccaaactaattttgtttttcttcagtgtggtatttatttacagaaactttcccatttactgaaaacattaaagactttgactcaaacttggaaaactagtaaacatcatttagcagcaatgaacctgtcaacacatggaaataaggtttacagtcatgcaaatgtccatttaactttgtttgagccaaacaaatataacagtaaactaattagactggcttacatccccgtagacagtgaaaccaattatttcttaaagaagggtttgcttgtttttactctagggcaaaggtgcataacttcttgtaatactcctgaatagttcttcaaatcaggacagataaagttggcaactgatggaatagctaccttgatgtgcaaatggttgggtctttaattaggttcatttatataattgagaaagaagccagggaatgcatttgtgcaaggatgattttaaaagaagagggatggtctgccttttaattctgtatgggaggaaaattcataaaaaaaaaaaa

SEQ ID NO: 21582 - DNA, 423 bp, Homo sapiens
caaaagccaaaataaatgaaaacctaaacgcccatttacaaatgaatggaattttgtatgtatatatacaatggaatattattcagccttaaaaaagaaattctaccatatgtgacaatatgaatgaacctggaaaacactatgctaagcaagataaaccagtcacagaagggaaaatactgcatgatttcattcacatgagatatcaaaattagtcaaactaatggaaacgaagaatagaattgtggtttccaggggctaggaagagagggaaaaagggaggtgctgatgggtataaaatttattatgcaaaatgaataagttctagagagccactgtaaaacattgtgactacagatgaccatactgtattatatagtttaaaatctgataaaagggtaaatctcatgctaggtcttctta

SEQ ID NO: 21583 - DNA, 318 bp, Homo sapiens
tgaaagtggtctgaagaagtcacaaataggagtttataaagttctagaagtatcaagtttctagattcttttcagtttttgctctgtttaaacattcacaccaactgaggtctgggggtgaaaggggaagttaatttatcccctaaataatatttattttgtatacaaaagaatggttaaatgtattcagtagtctaacctgctcttcttggctattcattcctgaatgacaggaattccgtttgtaccaccctcatcaccaccattaatttcatgatggactagctacttcacagccctcatgtccccaccactcca

SEQ ID NO: 21584 - DNA, 1929 bp, Homo sapiens
actgctacaaaggatatactcataggccctactggttatcctagagtcgacaggcagtatagcttaacagaaagagtgttggtgttgtgtagaactggattcaaattcagattctgccacactaacttttccccacctataaaatgagggctactacatacatctcaaagattaagtgaggtaatatgagaaaagtgtcaggcacagtgcctggaacatagtacatatttaacaaatgcttacaaatattagcaagtgtaaaaatatagtgatgatcctaatgatgatggaaaagacataggtgggtcagtgaccaccaagtaaaagataactgagacaattaagttatttttgatgtgattgctctgtaaatgtggctagttaaggctaacaactgattgtttcccagtatcagatgatctaggccaaatatctagcagtcagtgtgtggctagatacatttctgcacataaaggctcatagaaatagattcagaaaaagcaaaatagataaaataaggcttacccaggtagaagagtaattgagctatttgttgatatgctttagtgggggcttggcaaaagtgggtaaagaggtaagctggaggataggtcatatgcaatctatgcctctaacccggaaactgttcctaggaatttgttctaaggaaatattacagatacgcgctaaagtgtaactacaaggatatttgtcactatagtatttaaaagagaaaatatataaatgatcaaaatattgaatagtaagggattgtgatacatatatatgtaatatatatatatatatatatatatatataaaatgggatactaatgcaagcattcagtgaaaaaagtagattaccaaactatacgatcctcatttattttaaaaagtgatatcacccagaaaaaaataagaaagataaaagatgttggtaaaataactaaagaataaaaatataggggaaaaggtagccaagggatagatattgatattcattttctttttacaactttattaagttgtaatttgtgtgcaacagattgcatatatttgaagtatataacttgactaattttgacaaatatatacacccatgaaactaccagttataattttaaacattttcatgaccctccaaagtttccttgtgtccttttgcaatacacgcaaacacacacaccccacacacagtatgtaggcaaccattgatctgccttctgttacaataggttagtttgcatcttttagaactgtacataactgaaatcacatagtatatactcctttgcatctggcttctttgactcagcataatgatttgagattcatccatatgctgttacatgtactagtaacgcatttttattactgagtagtatacaattgcatggctgtatcacatttttgtacctattcacctgttagtggacatttgggttgtttcccaaattacaacccacatttggctattacaaagaaagctgccattaacttttgtgtacaagtctttgtatggacatgtattatctcttgggtgaatatatccagggatgaaacgactatgttgaataatagatatattttaactttttaagaagctatcaaactgttttccaaggtggttgtaccattttatgttcccagcagcagtaactggtgagaatatggctcattttcaaaagatgatctgaagtttcaaaagtaaataagttattgaaacatgtaatttgatagtggtaattagccaacatgataatacgttactcatagggtttgttgtgaggattacatgcactaatgcataaaatgcatttaagcgcagaggaagtactcagtattcattagcagttttattgttattctgttaatttaacttctttggttgttaacagtagtacatttgtgactaatttcgatagacta

SEQ ID NO: 21585 - DNA, 448 bp, Homo sapiens
cactggctatcatagtggatagcagcatattagatatttccttcacatcactgtagaagttctattagacagcactggactagagagtaaaagagatttaagaggcttaaccaaatgcaatgtgtgaaattgtttcaattttgattcttttttggattaatgggaaaatttaaatatacctgagaatgagaagattaaagaattattgttaaatatgtaatgatggtattaggttatatataaaaatgtctatttttagagacacatctggaagtacatgagaataaaatgttatattagttggaatttactttaaaatacttcaggctgggcagggtggctcctgcctgtaatcccagcactttgggaggtcaaggcagaaggattgcttgagcccaggagtttgaggccaggctgggcaacacagggagaccccatctctaaaaaa

SEQ ID NO: 21586 - DNA, 1399 bp, Homo sapiens
tgccagggcatggctcaggtggcacagggacatctgatgaaccctgcccgaggttctcggtgcctcccgtgcatgagtggctcactgaaggcaggtgtggaagccaaatgcctgcaagccgtgtgtcaggccacagcagtgcagtcatgcatcacgcactcaggtttgtaacagcaacaccagggccctgtctagattcaccctgtgggtgagcccgttctccagatgggcgtataaaggggctttctcctctacaccgttcctgtcaatgttccgtacaggcccacattcccaccactaagccaatggagtcaaccagatttctgccatggatatacgtggtcacggggccacatttctgcagctggctcagtggcaggcttgggccgtctctcagtaccatctaagacttctgtctaggttcctgtttttttagactcctgaactgccattctgattagacacaattttaatggaatttttggatttaatgatagttgataatcaccttatgtatttgcacaatctctttataattaaaaactcgctaagcttcacttgctactatctactatatagaattagagacattccattggattctaagcatcagacactcctggatctcaaaatgaccttttctaaataagcacaagatttatttttgtcctagcactgttgataacactctgaaatatgttattgaactggaattgtttctttatgcttgcattccaaaaccaactgaaacagattgtagtttcactttaaattctaggcctgttctatattatgtgaaggaattctctgtaacgctgatactatgttgctaatttgtgtacttacaggcactttagaaaatgtttagactgcaacatgcactataacattgaactcagtcacatgaagtggttaacacttgcacactgactgacagatatgaaagctgtatactttggacccagtaatatgctcattggagcaagggttgggctgtgtggatggataaactgctttcttgggtttacatggaaacctggtaccactcctacttttggaaagttggtataaaagctattaggtagaagcttaattccactaaatgtagaatttagttttcttctctaaccaagattttagaagtttcaagtttcaaatatgcttataacttttccaagaaatgatgattacagtgcttttgtggttacaactgtttggtatattaaaaaataagggtttactatcacatctaggtcttttttactatgtcatttttaagatatgaaataagaatctgaggacagccctgaagaacagtcctttcctgggaggggaagacttgtaattcaaggtcatacaatacaaaataaaacaaaaacaaaagcaccaagagcagaac

SEQ ID NO: 21587 - DNA, 658 bp, Homo sapiens
  misc_feature (68)..(68): n is a, c, g, or t
  misc_feature (95)..(95): n is a, c, g, or t
attgtagtccccctttaaaatcccaggccctggccccaaattatggtgaggggaatccccctgtaccncctggaacccatggtgcccaaatttgnggtccttacgggcccctttagaaaatgtttagactgcaacatgcactataacattgaactcagtcacatgaagtggttaacacttgcacactgactgacagatatgaaagctgtatactttggacccagtaatatgctcattggagcaagggttgggctgtgtggatggataaactgctttcttgggtttacatggaaacctggtaccactcctacttttggaaagttggtataaaagctattaggtagaagcttaattccactaaatgtagaatttagttttcttctctaaccaagattttagaagtttcaagtttcaaatatgcttataacttttccaagaaatgatgattacagtgcttttgtggttacaactgtttggtatattaaaaaataagggtttactatcacatctaggtcttttttactatgtcatttttaagatatgaaataagaatctgaggacagccctgaagaacagtcctttcctgggaggggaagacttgtaattcaaggtcatacaatacaaaataaaacaaaaacaaaagcaccaagagcagaac

SEQ ID NO: 21588 - DNA, 3005 bp, Homo sapiens
acgcttcctttgccctgctttccatcccctctccctccaactcccctgccagagttccaaggctgtggaccccagagaaggtggcaggtggcccccctaggagagctctgggcacattcgaatcttcccaaactccaataataaaaattcgaagactttggcagagagtgtgtgtgtgtgtgtatggttgttgggcgtaggacaggtttcggggatgcgcggtacgcggtaccacccctcggaggcccccacccccagacgcccaggccgcctccccactccccctcaagcagccccagccggggactttccgtcgcggggaaggggcggggaccctgagcgaaaggtgcggaggcggcctgccggggtggttcggcttcccgttgccgcctcgggcgctgtacccagagctcgaagaggagcagcgcggccgcgcggacccggcaaggctgggccggactcggggctcccgagggacgccatgcggggaggcaggggcgcccctttctggctgtggccgctgcccaagctggcgctgctgcctctgttgtgggtgcttttccagcggacgcgtccccagggcagcgccgggccactgcagtgctacggagttggacccttgggcgacttgaactgctcgtgggagcctcttggggacctgggagccccctccgagttacacctccagagccaaaagtaccgttccaacaaaacccagactgtggcagtggcagccggacggagctgggtggccattcctcgggaacagctcaccatgtctgacaaactccttgtctggggcactaaggcaggccagcctctctggccccccgtcttcgtgaacctagaaacccaaatgaagccaaacgccccccggctgggccctgacgtggacttttccgaggatgaccccctggaggccactgtccattgggccccacctacatggccatctcataaagttctgatctgccagttccactaccgaagatgtcaggaggcggcctggaccctgctggaaccggagctgaagaccatacccctgacccctgttgagatccaagatttggagctagccactggctacaaagtgtatggccgctgccggatggagaaagaagaggatttgtggggcgagtggagccccattttgtccttccagacaccgccttctgctccaaaagatgtgtgggtatcagggaacctctgtgggacgcctggaggagaggaacctttgcttctatggaaggccccagggccctgtgtgcaggtgagctacaaagtctggttctgggttggaggtcgtgagctgagtccagaaggaattacctgctgctgctccctaattcccagtggggcggagtgggccagggtgtccgctgtcaacgccacaagctgggagcctctcaccaacctctctttggtctgcttggattcagcctctgccccccgtagcgtggcagtcagcagcatcgctgggagcacggagctactggtgacctggcaaccggggcctggggaaccactggagcatgtagtggactgggctcgagatggggaccccctggagaaactcaactgggtccggcttccccctgggaacctcagtgctctgttaccagggaatttcactgtcggggtcccctatcgaatcactgtgaccgcagtctctgcttcaggcttggcctctgcatcctccgtctgggggttcagggaggaattagcacccctagtggggccaacgctttggcgactccaagatgcccctccagggacccccgccatagcgtggggagaggtcccaaggcaccagcttcgaggccacctcacccactacaccttgtgtgcacagagtggaaccagcccctccgtctgcatgaatgtgagtggcaacacacagagtgtcaccctgcctgaccttccttggggtccctgtgagctgtgggtgacagcatctaccatcgctggacagggccctcctggtcccatcctccggcttcatctaccagataacaccctgaggtggaaagttctgccgggcatcctattcttgtggggcttgttcctgttggggtgtggcctgagcctggccacctctggaaggtgctaccacctaaggcacaaagtgctgccccgctgggtctgggagaaagttcctgatcctgccaacagcagttcaggccagccccacatggagcaagtacctgaggcccagccccttggggacttgcccatcctggaagtggaggagatggagcccccgccggttatggagtcctcccagcccgcccaggccaccgccccgcttgactctgggtatgagaagcacttcctgcccacacctgaggagctgggccttctggggccccccaggccacaggttctggcctgaaccacacgtctggctgggggctgccagccaggctagagggatgctcatgcaggttgcaccccagtcctggattagccctcttgatggatgaagacactgaggactcagagaggctgagtcacttacctgaggacacccagccaggcagagctgggattgaaggacccctatagagaagggcttggcccccatggggaagacacggatggaaggtggagcaaaggaaaatacatgaaattgagagtggcagctgcctgccaaaatctgttccgctgtaacagaactgaatttggaccccagcacagtggctcacgcctgtaatcccagcactttggcaggccaaggtggaaggatcacttagagctaggagtttgagaccagcctgggcaatatagcaagacccctcactacaaaaataaaacatcaaaaacaaaaacaattagctgggcatgatggcacacacctgtagtccgagccacttgggaggctgaggtgggaggatcggttgagcccaggagttcgaagctgcagggacctctgattgcaccactgcactccaggctgggtaacagaatgagaccttatctcaaaaataaacaaactaataaaaagc

SEQ ID NO: 21589 - DNA, 3327 bp, Homo sapiens
acgcttcctttgccctgctttccatcccctctccctccaactcccctgccagagttccaaggctgtggaccccagagaaggtggcaggtggcccccctaggagagctctgggcacattcgaatcttcccaaactccaataataaaaattcgaagactttggcagagagtgtgtgtgtgtgtgtatggttgttgggcgtaggacaggtttcggggatgcgcggtacgcggtaccacccctcggaggcccccacccccagacgcccaggccgcctccccactccccctcaagcagccccagccggggactttccgtcgcggggaaggggcggggaccctgagcgaaaggtgcggaggcggcctgccggggtggttcggcttcccgttgccgcctcgggcgctgtacccagagctcgaagaggagcagcgcggccgcgcggacccggcaaggctgggccggactcggggctcccgagggacgccatgcggggaggcaggggcgcccctttctggctgtggccgctgcccaagctggcgctgctgcctctgttgtgggtgcttttccagcggacgcgtccccagggcagcgccgggccactgcagtgctacggagttggacccttgggcgacttgaactgctcgtgggagcctcttggggacctgggagccccctccgagttacacctccagagccaaaagtaccgttccaacaaaacccagactgtggcagtggcagccggacggagctgggtggccattcctcgggaacagctcaccatgtctgacaaactccttgtctggggcactaaggcaggccagcctctctggccccccgtcttcgtgaacctagaaacccaaatgaagccaaacgccccccggctgggccctgacgtggacttttccgaggatgaccccctggaggccactgtccattgggccccacctacatggccatctcataaagttctgatctgccagttccactaccgaagatgtcaggaggcggcctggaccctgctggaaccggagctgaagaccatacccctgacccctgttgagatccaagatttggagctagccactggctacaaagtgtatggccgctgccggatggagaaagaagaggatttgtggggcgagtggagccccattttgtccttccagacaccgccttctgctccaaaagatgtgtgggtatcagggaacctctgtgggacgcctggaggagaggaacctttgcttctatggaaggccccagggccctgtgtgcaggtgagctacaaagtctggttctgggttggaggtcgtgagctgagtccagaaggaattacctgctgctgctccctaattcccagtggggcggagtgggccagggtgtccgctgtcaacgccacaagctgggagcctctcaccaacctctctttggtctgcttggattcagcctctgccccccgtagcgtggcagtcagcagcatcgctgggagcacggagctactggtgacctggcaaccggggcctggggaaccactggagcatgtagtggactgggctcgagatggggaccccctggagaaactcaactgggtccggcttccccctgggaacctcagtgctctgttaccagggaatttcactgtcggggtcccctatcgaatcactgtgaccgcagtctctgcttcaggcttggcctctgcatcctccgtctgggggttcagggaggaattagcacccctagtggggccaacgctttggcgactccaagatgcccctccagggacccccgccatagcgtggggagaggtcccaaggcaccagcttcgaggccacctcacccactacaccttgtgtgcacagagtggaaccagcccctccgtctgcatgaatgtgagtggcaacacacagagtgtcaccctgcctgaccttccttggggtccctgtgagctgtgggtgacagcatctaccatcgctggacagggccctcctggtcccatcctccggcttcatctaccagataacaccctgaggtggaaagttctgccgggcatcctattcttgtggggcttgttcctgttggggtgtggcctgagcctggccacctctggaaggtgctaccacctaaggcacaaagtgctgccccgctgggtctgggagaaagttcctgatcctgccaacagcagttcaggccagccccacatggagcaagtacctgaggcccagccccttggggacttgcccatcctggaagtggaggagatggagcccccgccggttatggagtcctcccagcccgcccaggccaccgccccgcttgactctgggtatgagaagcacttcctgcccacacctgaggagctgggccttctggggccccccaggccacaggttctggcctgaaccacacgtctggctgggggctgccagccaggctagagggatgctcatgcaggttgcaccccagtcctggattagccctcttgatggatgaagacactgaggactcagagaggctgagtcacttacctgaggacacccagccaggcagagctgggattgaaggacccctatagagaagggcttggcccccatggggaagacacggatggaaggtggagcaaaggaaaatacatgaaattgagagtggcagctgcctgccaaaatctgttccgctgtaacagaactgaatttggaccccagcacagtggctcacgcctgtaatcccagcactttggcaggccaaggtggaaggatcacttagagctaggagtttgagaccagcctgggcaatatagcaagacccctcactacaaaaataaaacatcaaaaacaaaaacaattagctgggcatgatggcacacacctgtagtccgagccacttgggaggctgaggtgggaggatcggttgagcccaggagttcgaagctgcagggacctctgattgcaccactgcactccaggctgggtaacagaatgagaccttatctcaaaaataaacaaactaataaaaagcaaaaaaaaaaaaaaaagaaaagaaaaaacactgcatttgggcaccatctcagctcccttgcatccaggtgcagcatggactgagttcttgacaacagaatgtggtcagaagtgacatatgccaacacggggtctgggtgggggctcccccacatcctttccttgcctatgagctggaacataacacatgcctatgatccagctttggtcatacccaaggggaaggtggagcaagaaatgaaaaggaacctgaatccctgaatgactgcatggatagaaccactaagaaaaataaacttttatatttttataaaaaaaaaagc

SEQ ID NO: 21590 - DNA, 2982 bp, Homo sapiens
acgcttcctttgccctgctttccatcccctctccctccaactcccctgccagagttccaaggctgtggaccccagagaaggtggcaggtggcccccctaggagagctctgggcacattcgaatcttcccaaactccaataataaaaattcgaagactttggcagagagtgtgtgtgtgtgtgtatggttgttgggcgtaggacaggtttcggggatgcgcggtacgcggtaccacccctcggaggcccccacccccagacgcccaggccgcctccccactccccctcaagcagccccagccggggactttccgtcgcggggaaggggcggggaccctgagcgaaaggtgcggaggcggcctgccggggtggttcggcttcccgttgccgcctcgggcgctgtacccagagctcgaagaggagcagcgcggccgcgcggacccggcaaggctgggccggactcggggctcccgagggacgccatgcggggaggcaggggcgcccctttctggctgtggccgctgcccaagctggcgctgctgcctctgttgtgggtgcttttccagcggacgcgtccccagggcagcgccgggccactgcagtgctacggagttggacccttgggcgacttgaactgctcgtgggagcctcttggggacctgggagccccctccgagttacacctccagagccaaaagtaccgttccaacaaaacccagactgtggcagtggcagccggacggagctgggtggccattcctcgggaacagctcaccatgtctgacaaactccttgtctggggcactaaggcaggccagcctctctggccccccgtcttcgtgaacctagaaacccaaatgaagccaaacgccccccggctgggccctgacgtggacttttccgaggatgaccccctggaggccactgtccattgggccccacctacatggccatctcataaagttctgatctgccagttccactaccgaagatgtcaggaggcggcctggaccctgctggaaccggagctgaagaccatacccctgacccctgttgagatccaagatttggagctagccactggctacaaagtgtatggccgctgccggatggagaaagaagaggatttgtggggcgagtggagccccattttgtccttccagacaccgccttctgctccaaaagatgtgtgggtatcagggaacctctgtgggacgcctggaggagaggaacctttgcttctatggaaggccccagggccctgtgtgcaggtgagctacaaagtctggttctgggttggaggtcgtgagctgagtccagaaggaattacctgctgctgctccctaattcccagtggggcggagtgggccagggtgtccgctgtcaacgccacaagctgggagcctctcaccaacctctctttggtctgcttggattcagcctctgccccccgtagcgtggcagtcagcagcatcgctgggagcacggagctactggtgacctggcaaccggggcctggggaaccactggagcatgtagtggactgggctcgagatggggaccccctggagaaactcaactgggtccggcttccccctgggaacctcagtgctctgttaccagggaatttcactgtcggggtcccctatcgaatcactgtgaccgcagtctctgcttcaggcttggcctctgcatcctccgtctgggggttcagggaggaattagcacccctagtggggccaacgctttggcgactccaagatgcccctccagggacccccgccatagcgtggggagaggtcccaaggcaccagcttcgaggccacctcacccactacaccttgtgtgcacagagtggaaccagcccctccgtctgcatgaatgtgagtggcaacacacagagtgtcaccctgcctgaccttccttggggtccctgtgagctgtgggtgacagcatctaccatcgctggacagggccctcctggtcccatcctccggcttcatctaccagataacaccctgaggtggaaagttctgccgggcatcctattcttgtggggcttgttcctgttggggtgtggcctgagcctggccacctctggaaggtgctaccacctaaggcacaaagtgctgccccgctgggtctgggagaaagttcctgatcctgccaacagcagttcaggccagccccacatggagcaagtacctgaggcccagccccttggggacttgcccatcctggaagtggaggagatggagcccccgccggttatggagtcctcccagcccgcccaggccaccgccccgcttgactctgggtatgagaagcacttcctgcccacacctgaggagctgggccttctggggccccccaggccacaggttctggcctgaaccacacgtctggctgggggctgccagccaggctagagggatgctcatgcaggttgcaccccagtcctggattagccctcttgatggatgaagacactgaggactcagagaggctgagtcacttacctgaggacacccagccaggcagagctgggattgaaggacccctatagagaagggcttggcccccatggggaagacacggatggaaggtggagcaaaggaaaatacatgaaattgagagtggcagctgcctgccaaaatctgttccgctgtaacagaactgaatttggaccccagcacagtggctcacgcctgtaatcccttgcatccaggtgcagcatggactgagttcttgacaacagaatgtggtcagaagtgacatatgccaacacggggtctgggtgggggctcccccacatcctttccttgcctatgagctggaacataacacatgcctatgatccagctttggtcatacccaaggggaaggtggagcaagaaatgaaaaggaacctgaatccctgaatgactgcatggatagaaccactaagaaaaataaacttttatatttttataaaaaaaaaagc

SEQ ID NO: 21591 - DNA, 1484 bp, Homo sapiens
acgcttcctttgccctgctttccatcccctctccctccaactcccctgccagagttccaaggctgtggaccccagagaaggtggcaggtggcccccctaggagagctctgggcacattcgaatcttcccaaactccaataataaaaattcgaagactttggcagagagtgtgtgtgtgtgtgtatggttgttgggcgtaggacaggtttcggggatgcgcggtacgcggtaccacccctcggaggcccccacccccagacgcccaggccgcctccccactccccctcaagcagccccagccggggactttccgtcgcggggaaggggcggggaccctgagcgaaaggtgcggaggcggcctgccggggtggttcggcttcccgttgccgcctcgggcgctgtacccagagctcgaagaggagcagcgcggccgcgcggacccggcaaggctgggccggactcggggctcccgagggacgccatgcggggaggcaggggcgcccctttctggctgtggccgctgcccaagctggcgctgctgcctctgttgtgggtgcttttccagcggacgcgtccccagggcagcgccgggccactgcagtgctacggagttggacccttgggcgacttgaactgctcgtgggagcctcttggggacctgggagccccctccgagttacacctccagagccaaaagtaccgttccaacaaaacccagactgtggcagtggcagccggacggagctgggtggccattcctcgggaacagctcaccatgtctgacaaactccttgtctggggcactaaggcaggccagcctctctggccccccgtcttcgtgaacctagaaacccaaatgaagccaaacgccccccggctgggccctgacgtggacttttccgaggatgaccccctggaggccactgtccattgggccccacctacatggccatctcataaagttctgatctgccagttccactaccgaagatgtcaggaggcggcctggaccctgctggaaccggagctgaagaccatacccctgacccctgttgagatccaagatttggagctagccactggctacaaagtgtatggccgctgccggatggagaaagaagaggatttgtggggcgagtggagccccattttgtccttccagacaccgccttctgctccaaaagatgtgtgggtatcagggaacctctgtgggacgcctggaggagaggaacctttgcttctatggaaggccccagggccctgtgtgcaggtgagctacaaagtctggttctgggttggaggtcgtgagctgagtccagaaggaattacctgctgctgctccctaattcccagtggggcggagtgggccagggtgtccgctgtcaacgccacaagctgggagcctctcaccaacctctctttggtctgcttggattcagcctctgccccccgtagtagtaggcgcagcggggacctctagagcg

SEQ ID NO: 21592 - DNA, 2830 bp, Homo sapiens
acgcttcctttgccctgctttccatcccctctccctccaactcccctgccagagttccaaggctgtggaccccagagaaggtggcaggtggcccccctaggagagctctgggcacattcgaatcttcccaaactccaataataaaaattcgaagactttggcagagagtgtgtgtgtgtgtgtatggttgttgggcgtaggacaggtttcggggatgcgcggtacgcggtaccacccctcggaggcccccacccccagacgcccaggccgcctccccactccccctcaagcagccccagccggggactttccgtcgcggggaaggggcggggaccctgagcgaaaggtgcggaggcggcctgccggggtggttcggcttcccgttgccgcctcgggcgctgtacccagagctcgaagaggagcagcgcggccgcgcggacccggcaaggctgggccggactcggggctcccgagggacgccatgcggggaggcaggggcgcccctttctggctgtggccgctgcccaagctggcgctgctgcctctgttgtgggtgcttttccagcggacgcgtccccagggcagcgccgggccactgcagtgctacggagttggacccttgggcgacttgaactgctcgtgggagcctcttggggacctgggagccccctccgagttacacctccagagccaaaagtaccgttccaacaaaacccagactgtggcagtggcagccggacggagctgggtggccattcctcgggaacagctcaccatgtctgacaaactccttgtctggggcactaaggcaggccagcctctctggccccccgtcttcgtgaacctagaaacccaaatgaagccaaacgccccccggctgggccctgacgtggacttttccgaggatgaccccctggaggccactgtccattgggccccacctacatggccatctcataaagttctgatctgccagttccactaccgaagatgtcaggaggcggcctggaccctgctggaaccggagctgaagaccatacccctgacccctgttgagatccaagatttggagctagccactggctacaaagtgtatggccgctgccggatggagaaagaagaggatttgtggggcgagtggagccccattttgtccttccagacaccgccttctgctccaaaagatgtgtgggtatcagggaacctctgtgggacgcctggaggagaggaacctttgcttctatggaaggccccagggccctgtgtgcaggtgagctacaaagtctggttctgggttggaggtcgtgagctgagtccagaaggaattacctgctgctgctccctaattcccagtggggcggagtgggccagggtgtccgctgtcaacgccacaagctgggagcctctcaccaacctctctttggtctgcttggattcagcctctgccccccgtagcgtggcagtcagcagcatcgctgggagcacggagctactggtgacctggcaaccggggcctggggaaccactggagcatgtagtggactgggctcgagatggggaccccctggagaaactcaactgggtccggcttccccctgggaacctcagtgctctgttaccagggaatttcactgtcggggtcccctatcgaatcactgtgaccgcagtctctgcttcaggcttggcctctgcatcctccgtctgggggttcagggaggaattagcacccctagtggggccaacgctttggcgactccaagatgcccctccagggacccccgccatagcgtggggagaggtcccaaggcaccagcttcgaggccacctcacccactacaccttgtgtgcacagagtggaaccagcccctccgtctgcatgaatgtgagtggcaacacacagagtgtcaccctgcctgaccttccttggggtccctgtgagctgtgggtgacagcatctaccatcgctggacagggccctcctggtcccatcctccggcttcatctaccagataacaccctgaggtggaaagttctgccgggcatcctattcttgtggggcttgttcctgttggggtgtggcctgagcctggccacctctggaaggtgctaccacctaaggcacaaagtgctgccccgctgggtctgggagaaagttcctgatcctgccaacagcagttcaggccagccccacatggagcaagtacctgaggcccagccccttggggacttgcccatcctggaagtggaggagatggagcccccgccggttatggagtcctcccagcccgcccaggccaccgccccgcttgactctgggtatgagaagcacttcctgcccacacctgaggagctgggccttctggggccccccaggccacaggttctggcctgaaccacacgtctggctgggggctgccagccaggctagagggatgctcatgcaggttgcaccccagtcctggattagccctcttgatggatgaagacactgaggactcagagaggctgagtcacttacctgaggacacccagccaggcagagctgggattgaaggacccctatagagaagggcttggcccccatggggaagacacggatggaaggtggagcaaaggaaaatacatgaaattgagagtggcagctgcctgccaaaatctgttccgctgtaacagaactgaatttggaccccagcacagtggctcacgcctgtaatcccagcactttggcaggccaaggtggaaggatcacttagagctaggagtttgagaccagcctgggcaatatagcaagacccctcaccctaaccccggaaccctcaccctaacccct

SEQ ID NO: 21593 - DNA, 1347 bp, Homo sapiens
taagaatgatctcttccctaccctaccagataacaccctgaggtggaaagttctgccgggcatcctattcttgtggggcttgttcctgttggggtgtggcctgagcctggccacctctggaaggtgctaccacctaaggcacaaagtgctgccccgctgggtctgggagaaagttcctgatcctgccaacagcagttcaggccagccccacatggagcaagtacctgaggcccagccccttggggacttgcccatcctggaagtggaggagatggagcccccgccggttatggagtcctcccagcccgcccaggccaccgccccgcttgactctgggtatgagaagcacttcctgcccacacctgaggagctgggccttctggggccccccaggccacaggttctggcctgaaccacacgtctggctgggggctgccagccaggctagagggatgctcatgcaggttgcaccccagtcctggattagccctcttgatggatgaagacactgaggactcagagaggctgagtcacttacctgaggacacccagccaggcagagctgggattgaaggacccctatagagaagggcttggcccccatggggaagacacggatggaaggtggagcaaaggaaaatacatgaaattgagagtggcagctgcctgccaaaatctgttccgctgtaacagaactgaatttggaccccagcacagtggctcacgcctgtaatcccagcactttggcaggccaaggtggaaggatcacttagagctaggagtttgagaccagcctgggcaatatagcaagacccctcactacaaaaataaaacatcaaaaacaaaaacaattagctgggcatgatggcacacacctgtagtccgagccacttgggaggctgaggtgggaggatcggttgagcccaggagttcgaagctgcagggacctctgattgcaccactgcactccaggctgggtaacagaatgagaccttatctcaaaaataaacaaactaataaaaagcaaaaaaaaaaaaaaaagaaaagaaaaaacactgcatttgggcaccatctcagctcccttgcatccaggtgcagcatggactgagttcttgacaacagaatgtggtcagaagtgacatatgccaacacggggtctgggtgggggctcccccacatcctttccttgcctatgagctggaacataacacatgcctatgatccagctttggtcatacccaaggggaaggtggagcaagaaatgaaaaggaacctgaatccctgaatgactgcatggatagaaccactaagaaaaataaacttttatatttttataaaaaaaaaagc

SEQ ID NO: 21594 - DNA, 324 bp, Homo sapiens
tactgataggctttattaaagtagttttaagtttatgggaaaattaagtaaaaagtacagagggttctcatatactatcttttctctctcatcccagccacaatttccctattattagcatcttctttggcacatttgttagaattggtggacaaatattgatatataattattaactagagactacagttcacactagggtttattctgtgttttttacagttctattggttttgacagatacatgatgccatgtacctactattacagtaccataccaaaatagttttgttattccacaaatcccctattttccatctgttc

SEQ ID NO: 21595 - DNA, 1462 bp, Homo sapiens
attataatctgcaatctttaacttatatattaaatatttgtatcatatcctgcttttgaatttttagacactgataccctcaatttatatattttttggccttaattatctaagtcttaggtttaatggcctctggtatggattcgttgataaattgcatttgggttatcattttaattttttagaataacttattagaagattaattatcactgacagaccataaccttttcctcaatcttagttaatcatataattcagttgagaatgcttttggttacatgttgaaaatgcaaattgatgttcggatattaattatgaataatcatctttggtactacacataaaggtatgaaaccatggtgtgtgtgggcatgtgtgtgtgtatgtgtgtgtgtgtgtgtgtatgtgtgagacagagagatctatagtttataatttgcatgcttttaaatttcaaatgggtatttaatactcttattttttcctgaagtgcaaattgatgttcggatattaattatgaataataatctttggtactacacataaaggtatgaaaccatgggtgtgtgtgggcttgtgtgtgtgtgtgtgtgtgtgtgtgtgtgtgtatgtatgtgtgagacagagagatctatagtttataatttgcatgcttttaaatttcaaatcggtatttaatactcttattttttcctgaagtttcagcaataggtttaacaaccttttaaatgttaattttcagttaatcaacattttagataatgacaaattaattaagtgggtttttttggtggtgggatggatggtgctttagttttacttttgaatacaatttcatttatatatgcacagaagtatacaaatcataatgtactgctcaattgattttcgtaaaagaagtgctcccaagaaatcagcaccaggtcaataaataaaacaatgacagaatctcagaaacttctttccagttcctacctcgcttaccctaatggtaatcactaacctgacttccaacaccagagattagctttgcttacttctgaacttcatataaatggactcataccaaatattctcttttgtgtctgtattctttatctcagtatttatgtttgtggaaattgatttctgttgttgtaggctcattcattttattgctatattgtagtttattgtataaataaacaatagtctcttctgctgtagatagatgtttggcttgtttccagtttctggctattacaaatactgctgctataaacattcttacccatgtcctttgtggaacatatatacactttttttgggtatttagttagggttaaaatttcttggtctgggtgcagtggctcacacttgtaatctgaacactttgggaagccaaggcaggaggattgcttgagcccaagaatttgagatcagcctgggcaacatgacaagaccccacctctaaaaaaaa

SEQ ID NO: 21596 - DNA, 1047 bp, Homo sapiens
  misc_feature (24)..(25): n is a, c, g, or t
  misc_feature (30)..(30): n is a, c, g, or t
  misc_feature (33)..(33): n is a, c, g, or t
  misc_feature (39)..(40): n is a, c, g, or t
  misc_feature (55)..(55): n is a, c, g, or t
  misc_feature (57)..(57): n is a, c, g, or t
  misc_feature (61)..(61): n is a, c, g, or t
  misc_feature (65)..(65): n is a, c, g, or t
  misc_feature (70)..(70): n is a, c, g, or t
  misc_feature (92)..(92): n is a, c, g, or t
  misc_feature (99)..(99): n is a, c, g, or t
  misc_feature (102)..(102): n is a, c, g, or t
  misc_feature (106)..(106): n is a, c, g, or t
  misc_feature (109)..(109): n is a, c, g, or t
gttcatgtatacacgcagagatcnntctcnatntttacnngcacacttcatatananggcnacantaganatgggccataataggcacacanaggctcnctntgcncanatataagtgtagaaaaattcaggtgagagagagagagagatatgtgtcttgtgttgtgtgtgtgtgtgtgtgtgtgtgtgtgtgtgtatgtatgtgtgagacagagagatctatagtttataatttgcatgcttttaaatttcaaatcggtatttaatactcttattttttcctgaagtttcagcaataggtttaacaaccttttaaatgttaattttcagttaatcaacattttagataatgacaaattaattaagtgggtttttttggtggtgggatggatggtgctttagttttacttttgaatacaatttcatttatatatgcacagaagtatacaaatcataatgtactgctcaattgattttcgtaaaagaagtgctcccaagaaatcagcaccaggtcaataaataaaacaatgacagaatctcagaaacttctttccagttcctacctcgcttaccctaatggtaatcactaacctgacttccaacaccagagattagctttgcttacttctgaacttcatataaatggactcataccaaatattctcttttgtgtctgtattctttatctcagtatttatgtttgtggaaattgatttctgttgttgtaggctcattcattttattgctatattgtagtttattgtataaataaacaatagtctcttctgctgtagatagatgtttggcttgtttccagtttctggctattacaaatactgctgctataaacattcttacccatgtcctttgtggaacatatatacactttttttgggtatttagttagggttaaaatttcttggtctgggtgcagtggctcacacttgtaatctgaacactttgggaagccaaggcaggaggattgcttgagcccaagaatttgagatcagcctgggcaacatgacaagaccccacctctaaaaaaaa

SEQ ID NO: 21597 - DNA, 267 bp, Homo sapiens
gtgatattcttcccacccagaaactcttccagtaacagcaccacgactttcctctgttagattcccttcctcactccctacagaactgtaggtggaattgactccacttcccttctgggatgtgcatgtaaccaagttttgaccaatcagagtgtggtgcaccccccatctctggttggttgacagatagtcacatgataaacagcagtgagagggaaaccttcagtttagtcaggagagactgggaaagtggccagaaatgcctca

SEQ ID NO: 21598 - DNA, 257 bp, Homo sapiens
tttttttgagtcagggtcttgctccgtcatccaagctggagtgcagtggcacgatcatggctcattgtaacttggaactcctgggctcaagcgaccctcctgcttcagcctcccaaagtgctggtattagaggtgtgagccacctcgcccagcttcttctacaactattaactgaaattcttctgtaaataattttcccttaccaactaggtctttttggtatcctaaaataaccatttgtacatgatgagtagaat

SEQ ID NO: 21599 - DNA, 372 bp, Homo sapiens
ccgcaaaactcataccctcccaaacccaccctgaatcctgcacacctcactcattttcctcacatccctgagtcttttccctccacactctcccctcctggtttcttgttctgcaatatcttctttcccatgttatacttggattttactccttcctcttgtctatgctgctcagtggccagttttccccaggggaggctggggacattctctttctacggccctgtttatctctactctgaataagtcaatatgcaaacatgtgggtgtccaactcataccccccaggagggattctctttagcctgacagcctattatacttgtggggggtggcctaacgtgtgtctggggggaggcttatgcgcattgt

SEQ ID NO: 21600 - DNA, 519 bp, Homo sapiens
tttaggcactgagataaaaggtgtcccacagtgcacctagtttaaaaaggagtaagtcatcaagcatttcatcatgtgtgactcatatatggacatggaaaaatgtaagccatttatatataaacacgatgcttattaaaggaaaggaagaaaagaatataatggaaaacctagaagaatacttgcttttctttttctaggtgcacattaattagaacaagattaaagggcatgggtcaggtgaggtggctcatacctgtaatcccagcactttgggaggctgaggcaggaggattgtttgaggccaggagttcaagtccatcttgggcaacataatgacaccccccaaattaaaaaaaaaaatagccgggcatggtggcatgcactgagtccaagctacatgggggactgaggtaggagggttgcttgggcttaggaggtagaggctgcagtgagctatgattgtcccgctgcactcaagcctgcatgacagagcaagaatttgtctcaaaaaaaaaa

SEQ ID NO: 21601 - DNA, 317 bp, Homo sapiens
tttaggcactgagataaaaggtgtcccacagtgcacctagtttaaaaaggagtaagtcatcaagcatttcatcatgtgtgactcatatatggacatggaaaaatgtaagccatttatatataaacacgatgcttattaaaggaaaggaagaaaagaatataatggaaaacacaatagaaaaagtataggttcagggccatacaaaataacccacaatggagatagcattccactgataagagaacagtattataatcggtcagaggtaggaaacaggaactctctaacatcattttgcggttttcctggcgtcgagc

SEQ ID NO: 21602 - DNA, 207 bp, Homo sapiens
ttactgttacacagatagtgaacatggtacccaattggtaatttttcaaggccttgccctagaattttttaaaacatctctagagtatttgaaattattggaaggttgagtcatcattagagctggagagaactgagaatttaaggttcagtataatggacatttaaatgggtgactgtagaattgtcttaaagagggtcacgatta

SEQ ID NO: 21603 - DNA, 229 bp, Homo sapiens
cccacccattctgtagccactgagctctctgggagcaccaagccccacagccatcaccccgggccatgggggtctctcgatggcgagggtttggggcttccgtggagatcaatacccctactcctgccgtcgctacgggcggcccagcgggctgagaccatcgcatcttgctcagccccagttcagaacacagaacttcacaccgcctgctcgggcctggagtcccccc

SEQ ID NO: 21604 - DNA, 391 bp, Homo sapiens
actgggtctggcaatattgcccaggctggttgcaaacaccaacactgcgcccagccatctgggcctgataatttaaaaggactctcattcctcagataaaagttcttttcggccaggtgaggtggcacgtgtctgtaatcccagcgctttgggaggctgagactggaggatcgcctgagcccgggagttcgaggccagcttgggcaagatgttgagacccccgtctctaccaaaaatgaacaaattaaaagagtgtggtggcgggcactcgcctgtagtcccagctactcgggatggctgaggcgggaagatcccttgagagcccaggaattcgatacttaagctatgattgcactagcctgcgtggcaaaatgagacctcttctcttaca

SEQ ID NO: 21605 - DNA, 536 bp, Homo sapiens
atgagatttggattcagccattcactattataagttattgacataagaagtgctaaaaagaatctttatcctaaggaatgaaatcaaaacttcttcaaagttacctcaaactgaattgtaaacactaaatttaacagcaagaatttcagaaaaatgattttcttgctaataattcttaagatttattagtttggctagtttttaaagcatttaactggggaaaaaactatgtgttgaataattagatttctaagtcatcctgttaaatagttagtagagctttgcctttgatggtattactttttaattcttctcatccagttacaagttgtattaatgccaaagaagtgtatttgttacagattttcataacattttattaaattgctagatatgatgataggttttggtatgtttacagaggagaaattgcatattttcactcagattcaaaagagcatgctcttttaatgctttaatggtgaatggtcatgataagaggtattataaaaataaagtactaatttgaaaattag

SEQ ID NO: 21606 - DNA, 343 bp, Homo sapiens
ttaatgatgtttgtctagtagtcacttttttcttatgagaagagaaaacctttacatgttggtgccagggatttctggttttattttgatattttcccttatgtattcctcaaacaaatacctactttacttttgttgtttgagattcctcatatgagtaattatttagatcaacctcctgtcttgattgacctaggcaagacctttggaaatgctcttcccactatttaatgcttctggtataacttaaaacttgaaggaaaatattttctgagttattggggaaagcacaattagaaacctatcggcaacagagagagactccgtctcaaaaaaaaaaaaa

SEQ ID NO: 21607 - DNA, 356 bp, Homo sapiens
gatggacagaggaaaggctgaaagctccatcacctgctacttcgccttgtcactgggggaataaggaactaacatggggtttcagaaaggaggcaggaacacccaaccattccacatgaaaggaacatttcaaatgaaaggggaaaaaaggctgtgcttttttatttcaccacaggaactcttacgcaaggcaaaattgcaaaaaagcccacatgaaaagtaggttcccttgacagtcttcaggcttcttccctggggcaaggttttagcagtgagtgcaggaaggctgtgcacaatcagaaaggggcttttgagaattgacttttccaaagtggcactggggacacccagagcaa

SEQ ID NO: 21608 - DNA, 434 bp, Homo sapiens
gatgatgacattccagctaatttttagacattgtttattttgggataattgaaaaaggcccttgataatgttcaaaattctacctctgcttgtgtattttttatttagaagaccattcatttattgaaacaaaacgataaaattcaccctttaattgtggcttcatgttttcactggcgagtattttttataaatataaaagactagaacaccaggatagaatagatattttaaagtatctatgagtttcatttacagatattgactgtgattccaatttcaaaggcaaccaaagttttgtgcttatatatggagaaacatctatccaggggaaagcactttaagctatttttgctgatatggataatatcttcaccctctattagattcaatacccctgtgactgtgacaagatctcccatgtttaaaaaaaa

SEQ ID NO: 21609 - DNA, 347 bp, Homo sapiens
acattgtatttttacacctagtttatgtgaaaaatatctgtattgtgtattatagttttgcagtcactgaaaatagtgtactgaattcagctgttttcttcaggtagctattccatgataactgagtttgtcaagcaacaattgaagatttgaatgttggactatgaaaatgaggtttcagcagtcacagtcatcacagggtgagaatagattagatagtgttgccaggttttagaagacagagtattagaacctagtatcagtaaggaggaacacaggaatatagagaagaccatttttgagttttagattttttagaatttttagacagttttgcaggtatatat

SEQ ID NO: 21610 - DNA, 317 bp, Homo sapiens
gctgagagggggcacaatagtggggcctgtggtggatatggcctctggtcttaggttgcccctgctgtttgctctgaatataggagccatgcagccaggaagatgagagaaagctcggccacaggaaaaggactggtggtaggacctgtgaggataggaaaaagaaaagcaaacacagggcagagaaggatcagactagcaagcagaggcctctactgcagactaaagagtaggctgattagaaagtgcaaagagggaggggggcttctattgtgcagctgggaaattcttcctgttgcaaaaggggctacctgggg

SEQ ID NO: 21611 - DNA, 130 bp, Homo sapiens
agaaggtttttctgtatcataaccatagcaaaaggtaagccaattaatctgtagtaaacattattttataatattgagattcagttacttgtcctgaatttttgaaattcttatgtcctttactagtgtt

SEQ ID NO: 21612 - DNA, 459 bp, Homo sapiens
atctcctgacatcgtgatccacacgcctcggattcccaaagtgctgggattacaggcgtgagccaccgcgccgggcccataattttttatgatcatttctcttgagacatttcagaaggcatcaggcagcattaacaagaaacatcagcttgttttcacaggtgcacgtttttatttgatactgcctttaaaacattcctagtgattttatgtgtgaagctttccttatctaatgcctaattgcattctatgctctttgcacagtgaattcttgattatccatggtcatggtagaaagggagagcgtggataatctaaaaatctcatttgcatcaactgcctctctcaccaaatcttttgccagagatagtaatgagtgtatcaaagctagtggaagtacaaatgagctgtgaaatggcaaaaacacgtgttgccaaatgaaaagctctgaataataca

SEQ ID NO: 21613 - DNA, 272 bp, Homo sapiens
tctttttgatgtggcagttgtcccaagtttggcccatgggaccccctttctgttggcacatgtgtcttttagacatgactccctggtctttgatttttcccttgctttctgacctgggatactccaggtacacctgtacttcacttgctgtacaaccagactcagctgtttttccaagaagccctacttcttttttcttttgtctctgcaaaggctgggcatagagcacgtacctacctagttcttatagaatgggttttttggagacatct

SEQ ID NO: 21614 - DNA, 329 bp, Homo sapiens
aaggccaggaattcccatgtgtgctcagttggcccacagcatcattgtgcctaggaaactgcttcaatttatcaagtcctctgggctgggaatctcactgaattccaaacggcggaaagaggaaactttcccaacccgatgtgggtgtgacgcgagccaggggccccagggacactgtcccagagcacaccgtccccctttaacagcaactggagcttggattcgctcttatattgtacagtcctttcgaccattgccctggagcacccgcacacgcgcacgcatctccggccgcgctcacacacactcatacacacgcacgcaaacgc

SEQ ID NO: 21615 - DNA, 212 bp, Homo sapiens
ctgttttataagaagaaattgaactgaaatgcaggttgcgtgacttaacaaaataacttagtgtctttgcccttgacatattatttgtttttttttaatgagataattcagacataaaacaactatggtcgaaccaaatgattcttgttcttttcatttattgtattgccagtaagctttcagtgttggcatattgtttaatatattctgaa

SEQ ID NO: 21616 - DNA, 371 bp, Homo sapiens
aaggtagtataagcattttattgcctgaataataaaaggtggtctagagaacagctgcttcggtagcaggtgggatgggtaatgctaggtatcactctgtgatcatgaataatgttctcctggacatcatggcatcagttaaatcaggatatttgctcagcaacaatgaattaactccctctgacgttccctatggacgaagtccttccctagcacggtagcacttggagaggtgcacaatgcacatgacattttttacttatgttcaggtggaagccagaagttgattggcattttcttaatttacagtgtctaggaaaagcatacctgggtatcagtgttttagtcacattttacactcatcgcttttg

SEQ ID NO: 21617 - DNA, 278 bp, Homo sapiens
gctagggatgagactgaaacttcacaatttaaattcctcaaatttgaaatgtgtcaaaacaatctctgatttaattaagttttatcaattaacagtacttttgttcttagaggtttatatgtaatgtcaggaaatggaaatttatttttgatcaataaattattaaagagagaatattaactaaagaatatagtcttaagtagtagactcttgttttaattaataaagctacgagttaaatagcttaggattcatttccacttattcatttccacaaa

SEQ ID NO: 21618 - DNA, 144 bp, Homo sapiens
agcgcatgcacaaaggggaaagtgctacacactttcaaacaactagatcttgtgagaactcacttactgtcatgagaacagtaaggggaagtccgccccatgattcagtaatgtcccaccaggcccctccaccgacatgtgggg

SEQ ID NO: 21619 - DNA, 403 bp, Homo sapiens
gcggccgcggccgggctggggcttcagcgggaggcagcagaggggaagtggtcagcgtggcgaatgacggaagaaactcgcattgtctactggatcaaggacagacagctcaccaaccgtgacagcaccatactggaacttcaaaaagttctgaaaacatgttgtgctcagagcatgaaaattttctgctgtctttggaactttgtctacaaacagttagaagatgcagcccaagggctcaccatgggtggcgatgttgaagaacatgaagaccttactgctgatagcaccatcttcaaatttgtggaagcttatgtgagttggataggaaaatttcctacatataatgttggctcttccatttgtttctaatttagtatttctcaattgatattttttttgt

SEQ ID NO: 21620 - DNA, 359 bp, Homo sapiens
gcggccgcggccgggctggggcttcagcgggaggcagcagaggggaagtggtcagcgtggcgaatgacggaagaaactcgcattgtctactggatcaaggacagacagctcaccaaccgtgacagcaccatactggaacttcaaaaagttctgaaaacatgttggttcgtttgttggagtatttttcaacttaaattccttttccttttttttttttttgctcactttttcctctgcagaaaaaccttaaaatgttctaccttttccttgaaacctcctcccactccttagttcacattgacttgtctttaaatgtttttgagaaaataatcagaaatgcacaattaaacctcgtgccg

SEQ ID NO: 21621 - DNA, 769 bp, Homo sapiens
gcggccgcggccgggctggggcttcagcgggaggcagcagaggggaagtggtcagcgtggcgaatgacggaagaaactcgcattgtctactggatcaaggacagacagctcaccaaccgtgacagcaccatactggaacttcaaaaagttctgaaaacatgttgtgctcagagcatgaaaattttctgctgtctttggaactttgtctacaaacagttagaagatgcagcccaagggctcaccatgggtggcgatgttgaagaacatggtgagtttgactgtggctggtggcagaggtctctgtgtgtcagcggcatctgcaaagcagcccaatcttaagtattttgttataacagcacatacagactaagacaacttccttgaccaaactttaattgggctcatctgagcattctgcttaaccagggcatgaccttggtctgccattaggcaagaatcctgctaagttattttagagagaatctccgcaccttttatatctaattacctttgatatctgatcaagtttcttattccccacccttgatgtctaagtccttggcttccctctaccaagaatcctattagacaattttagcaagaatccccctacccttgatatctccttttgttaattctctatccactgaccttttcattcttctcattggcaatacatctatagctatctttgctgaatttggagtaagtgcaatctctctcccctcttgtaatagtcttgaataaagtcttccttaccatttcaata

SEQ ID NO: 21622 - DNA, 419 bp, Homo sapiens
aaagaaagaaaaatatatagtgagcccaataaagctgtataatctaaatcaaacatgacttgcatgcctggagactttgcactagaaaaatatttctacctaaaaaatcaaattttattttctttctcacaaatattcaatctgctttcatctcagttcttcctaccttgtcaaacctctccccacatttcctattctttttctctccagcctgatatctctcattatactgcttaagagaaatgttatgttactattcttttctcccagaactgtttctctggttctttaaggtgtctgagtacacactgtgccttcttccttttagccctctcttctccttgttccctgagccttacctttatgaccttagaacttcaagttcccactacaattttaaatatagactattttgcttt

SEQ ID NO: 21623 - DNA, 539 bp, Homo sapiens
catccggctgcgggaccctctcctcaccctcacagcacatccgttctaggaaccccactccgtctccactctccggaagcctgctcgcccagacctccatgtagcggcatctaaaggctgggaccctccccagctgcaaacgctctcctcgaggattctgcagcactctcccggccctcccgctccccactatcccgtggctggtttgcaccggtcctctaccctcggaagcccttacgaccctacgactggcaggacgcgcgccgacgggctcccccgcagctgcgtccactcggttaaccccggcccccgggactgtcctcggcgtggctgactctcttcccaggcccagcacggagagcggcccgcggcaggcgagcgtaaatgtgtgctaagtgcacgagtgcgtcccgactggtagtggtgcattcttcacccgggaggagcgccattcccggcggccggaccaggaaaacgctccgcttccggcactgctggcacttggggcgggcgctgggcccgaccgcggccgcaagctt

SEQ ID NO: 21624 - DNA, 252 bp, Homo sapiens
gtgtcctaaccctgggtatcctgagcttgctccctacttggtctttgaaaagtgttctctgttaacttcaacacatatttataggaattcctactaagtccaggcctggggctgggtccccacatggatgaaaaagaccaggagcaaacaggtgcaggcttggttcagtggggtgggttctgccccttcccaggtgatttggaagcaggtggtctgggacccacactctgagaaatgctgaggcatagccat

SEQ ID NO: 21625 - DNA, 514 bp, Homo sapiens
ttttttttctcagtagaaatagggtctcactctgttggccaggctggtcttgaactcctggcctcaagcaatcctcctgccttagcctcccaaagtgctgggattacagacataatctcacgtagatttttaaagaagccatttacaaagatataaaatttgggggccgggagtggtggctcacgcctgtaatcccagcactttgggaggccaaagcgggtcaatcatctgaggtcaggacttcaagaccagcctgcccaacatggtgaaaccctgtctctaccaaaaatacaaaaaattatctgggtgtggtggcgggcacctgtaatcccagctactccggaggctgaggccaagagcaaaactctgtctcaaacaaacaggtcggatgcggtggctcaccactgtaatcccagcactttgggaggctgaggcgggtggatcgcccaaggtcaggagttggagaccaccctggccaacatggcgaaaccccgtctctactaaaaatacaaaa

SEQ ID NO: 21626 - DNA, 689 bp, Homo sapiens
agcctcagttttcccatctgtagaatgggggaatgctgattcctttgcatagtggttgtgagggttaagtaatatagtacagtcatccgtcaatatccagggaggattgattctaaacccccccaccgcccgtccctgctgtcatgtctcacccctgcaccccctcaaggggcagagctggcagtcctgtcacagactggtactgataaatggcgtctctgagatgtctgtgcaccttatctgtattgggcagaatggtcctgtcccactcctgcatatggccactgcatggctaaatggtaaggcccagagggcatgcagcttggcatcagtaggaatctagatttgcatttcagcttcatgtccttgttagctgtggggggccttcatttctcaaggtccatctctttactgtaaaataggctcaagggttgtcctggcacagcccaccatggggacggccttgagagaggcatggaaagctgtccagggaaagttggttgtgctgtgaaatcctgtgtcattgttaacagggatgaaatgaggagtcttgcactgttctctttggtatgtatcctgccctggcaggtgctcagactgtgcctgatttttttttattgtataagggaatccccttttattgtatgtggaaatcccacaaaggcgattccacatacaataaaaaaaaa

SEQ ID NO: 21627 - DNA, 473 bp, Homo sapiens
aaaagctcccaaagagctctctcgcccctttcctctacgtgaggacacaatgagaacttggccatctgcaacctggaaagggcccctcaccagaactcaaccattctggcactctgacatcagactttcagcttgcagaactatgagaaataaatgcttattggataagccacccagtctatggtaatttgttacagtatcccaaactgactcatgcacattttacgatgaggaaactgaggttcacggaaactaagtggtttatccaaaatcacacatctttcacttgtcagagctctctctcaagcccaaactttctgacttgaagtccagacctgtctctctggctgatttcagtcctgacctttctgttagctacgtgttgggggtgcacgtcatggagagcaggtgtttgctcatcctgtccactgtccttcccagtgcctagaatccagggtaagtatgcaacacat

SEQ ID NO: 21628 - DNA, 707 bp, Homo sapiens
gcaatgtttttctttctctacctggtttaggtcatttaccatgcggtcctccaggttcaacagtatggctccaaatgatgaaatttcattctgattttctggctgaagactattctgtttgtgtatgtccaccacagttactttatcccttcatctgtggatgggcagttggttggcagagaatttgaactggagatgaactttattatccaggatgctgagagtataacatgcatgacagagcttttagagcactgtgatgtaacatgtcaagcagaaatagggagcatgtttacagccattctatgaaaaagtgttcggaatgtacagactagcacagaagctggactaattgaacaagtattgctgaaaatgagtgctgtagatgacatgatagcaggtatggggttgtctgtcaggaaagtataacttaaatgtttataaagtttcacatacttctctttatattctataggtaatgtagatttgttgacactgctttgatttaaaataaatggaaatgtatagaaattttactttttatattaatggaaaacctgaaaagtgaaagaagaaaaacataattattatagtagacaaacataattactaacgttgttttctaaattttagaaaatctcagtaccacggagtgctatgaagtctatcagaaaaataaacagtatctttttatgtagtatttcatt

SEQ ID NO: 21629 - DNA, 1891 bp, Homo sapiens
atcttttcctgaccatgtaatccaaagtagaatcctactttattctttttcagtttatactgttctttttctcttcactgtaatcaccatgatttataattctacatttgtttaattgtgtcatatatatttcttttatagctcataacttctaggagaactggttagccttgggtatctgcagtgcctggcacaatgtaaattttaaatgaatgaacacaaatgaattgtatttccacaattttgaatcttggtatagtggaaagaatattactctggaggtcaaggggctgtagttcttgtcttctccatgaatattctttatgtgccacttctaccatctgtgaaatgagggatgggagggggaacttgaggaagtggtattagatgatcattaatagtcctgtcagcatattattgtagggttttatgaatattataattgcattttagaccataataaccaaacattacatattgatatatttaatttttttatttaagtggtacatgatcagcattgtccacatttacaatcgatggagaaacagtgaaattcagtgttatgttaatggacaactggtatcttatggtgatatggcttggcatgttaacacaaatgacgtaagtctttatttttctgtctgtgttttaatttgtttgagagtatgatctatcattacaaaatgaattgaataataaaatagtttggtagaaacttaaaaaaaaaaaaaaaaaaaaaaaaaaaaaaaaaaaaaaaaaaaaaaaaaaaaaaaaaaaaagagagagacagaaaaaaaaaaaaaagcacaaaaagagagaaaagagacaaaagcaagcaaccaaccaagaaaaaagaggacaaaaaaaagagaaaggagaacagacaccaagacagaaaacgcagaccaaagaagcaaacaagcgaagacagacccaacaagcgacgcaacacagaaacaaaggagaaaagagaaaaagaaaacgaacgaagccgcgaacaagaagaagagaggagaacagacaacccacacacacagaaaacaaaagacaaagacgggaagaacgagaagaaaacaaagagaaaaaaaaggagagaacagaaaaaggaagaggagagaagaaggagcagagaaacaacggcagacagagagacaggaggccgcagaacgccaccagaagacaaaaaaaaccagagacaaagaggaggcgagccaaacaacccacggcagaaaggaggcaaaagaggcgccgaaggaggagaaagagagagaaaagaaaagagcacgagagcacgaccaccgcggcgggcagcgcgcgaggcaaagcacgagagcaaaggagacgagaaagcaggcaggagggagacgaagaggagcagagaaggaaaagacgacaatgaaagaaggagaaacgagaacgaaggaaggcagagcaggaagcaaaggcgcagagaagggcgtacaggccagcgacaagaagaagaaaagagcgagacgaaagaggaaaacagcaaagaaccgggaaggaagggaggagagagggaagagaacactagggaacggcgaaggagaagaagagaggaagaaggaggaaagagagggcaaacgaggaacaaagacagagagagacgaaacgagacagaaagaagacggcaacaacgaaaacagccacgaagcgaagcagaacaagcacaggagagacgaaaggaagacagcccgggagagcacgacaaagaagaagaggactaaacgagcaggagaaaggcataacgccgacgacaaaaaaaagaatgaagaaaaaagaggaagagaaagaacagagagacgcgaagcgacagcgacacacgaacaagaaaagacacaagacaggagaaggagacaaatgagaa

SEQ ID NO: 21630 - DNA, 983 bp, Homo sapiens
atcttttcctgaccatgtaatccaaagtagaatcctactttattctttttcagtttatactgttctttttctcttcactgtaatcaccatgatttataattctacatttgtttaattgtgtcatatatatttcttttatagctcataacttctaggagaactggttagccttgggtatctgcagtgcctggcacaatgtaaattttaaatgaatgaacacaaatgaattgtatttccacaattttgaatcttggtatagtggaaagaatattactctggaggtcaaggggctgtagttcttgtcttctccatgaatattctttatgtgccacttctaccatctgtgaaatgagggatgggagggggaacttgaggaagtggtattagatgatcattaatagtcctgtcagcatattattgtagggttttatgaatattataattgcattttagaccataataaccaaacattacatattgatatatttaatttttttatttaagtggtacatgatcagcattgtccacatttacaatcgatggagaaacagtgaaattcagtgttatgttaatggacaactggtatcttatggtgatatggcttggcatgttaacacaaatgacagtaccttcaagtttaaatctgagagtgatattcatttggcagaacatcataaacaggttttgtatgatgggaaacttgcaagtagcattacctttacatatactgctaaggccactgatgctcaactctgcctggaatcatcaccaaaagagaatgcatcaatttttgtgcattcccaacatgctctaatgcttcagattcaagtgctttttccactgtttccccaattggataatcggcagctcaatgacagtcaagtggaaacaactgtctggtaagttttctttacatgtgcaattgctggtattttatacacacttagactatgcatgatgtactcagtgctgtgtaaatgtat

SEQ ID NO: 21631 - DNA, 1460 bp, Homo sapiens
gcaatgtttttctttctctacctggtttaggtcatttaccatgcggtcctccaggttcaacagtatggctccaaatgatgaaatttcattctgattttctggctgaagactattctgtttgtgtatgtccaccacagttactttatcccttcatctgtggatgggcagttggttggcagagaatttgaactggagatgaactttattatccaggatgctgagagtataacatgcatgacagagcttttagagcactgtgatgtaacatgtcaagcagaaatagggagcatgtttacagccattctatgaaaaagtgttcggaatgtacagactagcacagaagctggactaattgaacaagtattgctgaaaatgagtgctgtagatgacatgatagcagagtaccttcaagtttaaatctgagagtgatattcatttggcagaacatcataaacaggttttgtatgatgggaaacttgcaagtagcattacctttacatatactgctaaggccactgatgctcaactctgcctggaatcatcaccaaaagagaatgcatcaatttttgtgcattcccaacatgctctaatgcttcagattcaagtgctttttccactgtttccccaattggataatcggcagctcaatgacagtcaagtggaaacaactgtctgctcctgcttcaggtgcagaaatacagcgatttccagtgccagctgttgagccagtgccagcaccaggggcagattcccctccagggacagcgctggagctagaggaagctccagagccctcctgccgctgccctgggactgcccaggaccagcccagtgaggagctgcctgacttcatggcacctcctgtagagccaccggcctcagccctggagctgaaagtgtggctggagctagaggtggcagagaggggtggccagcacagctccagccagcagctcccacactgctcccagtcctgggcacagtggaagctatggaggcagagaccagggtttgcaatctgggctcctctgcctcactggagagggacttctctcattcagcagagcagcagccctgctgctgaagggcctgctgctactgctgctggggctgtttgcctgcctgcaggaggtgctggagagcaagaaaaggagcctgtgagcaggggttccagcaggtcctcctgctcccagaggcgacctcctcctccaggcatggaggtttgccctcagctgggcatctgggccatttgcccctaacgtgctgcccaggatggcctcctcttgacaggcggacagggggtgagggggccagggggcatctccaaaggaagcttttaaactcagcagctgcaccccagaatctgtatgcctgcacctgcccaaggatttattcatagcttacctaagaatttcaaatttctaccataacactgaataaagtttgactttttgaaactt

SEQ ID NO: 21632 - DNA, 1140 bp, Homo sapiens
cggccgcggaggcaacgggggcatgcgcggcgccgtgtcccgctcctggagcctggagagcctgcgctcggccaccgccgagtaccttcaagtttaaatctgagagtgatattcatttggcagaacatcataaacaggttttgtatgatgggaaacttgcaagtagcattacctttacatatactgctaaggccactgatgctcaactctgcctggaatcatcaccaaaagagaatgcatcaatttttgtgcattcccaacatgctctaatgcttcagattcaagtgctttttccactgtttccccaattggataatcggcagctcaatgacagtcaagtggaaacaactgtctgctcctgcttcaggtgcagaaatacagcgatttccagtgccagctgttgagccagtgccagcaccaggggcagattcccctccagggacagcgctggagctagaggaagctccagagccctcctgccgctgccctgggactgcccaggaccagcccagtgaggagctgcctgacttcatggcacctcctgtagagccaccggcctcagccctggagctgaaagtgtggctggagctagaggtggcagagaggggtggccagcacagctccagccagcagctcccacactgctcccagtcctgggcacagtggaagctatggaggcagagaccagggtttgcaatctgggctcctctgcctcactggagagggacttctctcattcagcagagcagcagccctgctgctgaagggcctgctgctactgctgctggggctgtttgcctgcctgcaggaggtgctggagagcaagaaaaggagcctgtgagcaggggttccagcaggtcctcctgctcccagaggcgacctcctcctccaggcatggaggtttgccctcagctgggcatctgggccatttgcccctaacgtgctgcccaggatggcctcctcttgacaggcggacagggggtgagggggccagggggcatctccaaaggaagcttttaaactcagcagctgcaccccagaatctgtatgcctgcacctgcccaaggatttattcatagcttacctaagaatttcaaatttctaccataacactgaataaagtttgactttttgaaactt

SEQ ID NO: 21633 - DNA, 1325 bp, Homo sapiens
gtcacctgggctgggagggcggcttaggggcggaagcggcggtccagggccgcctggtgcagcagcctgtctcagccgcggtccctccagtccctccctggcggctgcggagccgtccgaggacaggggccataaactctccagagcgggaagccgcacgctggtggcccggccccgcgcacagacctggcggcagctggcacctgacccgctgcatgggtctccagtgagctcgctgcccacccggctgctgcagcctcggctccctcgtacgcgctctggtggagatgactgtgtgtgcgcacacctgggggtgaagaggacgcagcctgtctacctgacccatgaaatggaggagactgtaccccagaagcagcgggttcactgctccattgattaagcaagtctgggacacacatgtagctaagctgtgacttctgtgccagcggtcccaacacccacgccttcaggaagacacatgtgtgaggggttgcatgtttgtcaggcctgagagtggagagcaggggccagagacactagctcctgcttcaggtgcagaaatacagcgatttccagtgccagctgttgagccagtgccagcaccaggggcagattcccctccagggacagcgctggagctagaggaagctccagagccctcctgccgctgccctgggactgcccaggaccagcccagtgaggagctgcctgacttcatggcacctcctgtagagccaccggcctcagccctggagctgaaagtgtggctggagctagaggtggcagagaggggtggccagcacagctccagccagcagctcccacactgctcccagtcctgggcacagtggaagctatggaggcagagaccagggtttgcaatctgggctcctctgcctcactggagagggacttctctcattcagcagagcagcagccctgctgctgaagggcctgctgctactgctgctggggctgtttgcctgcctgcaggaggtgctggagagcaagaaaaggagcctgtgagcaggggttccagcaggtcctcctgctcccagaggcgacctcctcctccaggcatggaggtttgccctcagctgggcatctgggccatttgcccctaacgtgctgcccaggatggcctcctcttgacaggcggacagggggtgagggggccagggggcatctccaaaggaagcttttaaactcagcagctgcaccccagaatctgtatgcctgcacctgcccaaggatttattcatagcttacctaagaatttcaaatttctaccataacactgaataaagtttgactttttgaaactt

SEQ ID NO: 21634 - DNA, 1195 bp, Homo sapiens
tgctttcttggatcatcagaaactgctgatgcaaatagggtattctgtggtcaacttggtgccgtgtatgtgttcagtgaagcactcaacccagcacagatatttgcaattcatcagttaggacctagatataagagtaccttcaagtttaaatctgagagtgatattcatttggcagaacatcataaacaggttttgtatgatgggaaacttgcaagtagcattacctttacatatactgctaaggccactgatgctcaactctgcctggaatcatcaccaaaagagaatgcatcaatttttgtgcattcccaacatgctctaatgcttcagattcaagtgctttttccactgtttccccaattggataatcggcagctcaatgacagtcaagtggaaacaactgtctgctcctgcttcaggtgcagaaatacagcgatttccagtgccagctgttgagccagtgccagcaccaggggcagattcccctccagggacagcgctggagctagaggaagctccagagccctcctgccgctgccctgggactgcccaggaccagcccagtgaggagctgcctgacttcatggcacctcctgtagagccaccggcctcagccctggagctgaaagtgtggctggagctagaggtggcagagaggggtggccagcacagctccagccagcagctcccacactgctcccagtcctgggcacagtggaagctatggaggcagagaccagggtttgcaatctgggctcctctgcctcactggagagggacttctctcattcagcagagcagcagccctgctgctgaagggcctgctgctactgctgctggggctgtttgcctgcctgcaggaggtgctggagagcaagaaaaggagcctgtgagcaggggttccagcaggtcctcctgctcccagaggcgacctcctcctccaggcatggaggtttgccctcagctgggcatctgggccatttgcccctaacgtgctgcccaggatggcctcctcttgacaggcggacagggggtgagggggccagggggcatctccaaaggaagcttttaaactcagcagctgcaccccagaatctgtatgcctgcacctgcccaaggatttattcatagcttacctaagaatttcaaatttctaccataacactgaataaagtttgactttttgaaactt

SEQ ID NO: 21635 - DNA, 341 bp, Homo sapiens
tttttttttagactagtcaaatgcagtactgagagtatgagtagaacaaggagttcaatctgtaactgactgtgaaaaatcccttgagataactcattaccttagacaagtctcatctattgctggtttaagaatgagtaataaatgttgtcaagtcttttttctccatttattgagatgatctcatggttttctaattcaatctttggatatggtgaattacattggatgctttttctaacactgaactgacagtatattcctgacataaactccagctagacatggggtattatccttttcataagattgattttctaatattttgttgaagatgtttg

SEQ ID NO: 21636 - DNA, 390 bp, Homo sapiens
cctgagccgctgctcccagctcaccaccttctactttggcagaaattgcatgtctacggacaccctgaaggacctgctgcgccacaccagtgggctgagcaagttaagcctggagacgtatcctgcccctgaggagagtttgaattccttggttcgtgtcgattgggagatcttcgccccactttgggctgagctgatgtgtacactgagggaagtcaggcagcccaagaggatcttcactggtcccactccctgcccttcctgtggctcatcaccgtctgaggaactggagctccatctttgctgctagggaaggcgtgcctagtggggttgataaatccaaagttctcttccaggcacttggacactaaaatctagtatgtaagtgca

SEQ ID NO: 21637 - DNA, 122 bp, Homo sapiens
gacagaatccccaagacagaagccatggtcctttataacctaatcttagaaggcatggtggctcacgcctgtaatcccagaactttgagaggctgaggtgagcacgtcacttgaggttagga

SEQ ID NO: 21638 - DNA, 560 bp, Homo sapiens
gatcctcataattgacaaattgtcaatatttatgaatacactttatatacataattcaaaagcaaagtatacaattcatctagaaatataagttctgatatatttggaaaagttgtcattttttgaggtgttttgtcagttgatctcagtatagtactgtgcttaggaatacatgttgcttgactgtggatgataacatagaacaatagttggaacgttaagttccattgaagaaaacaagatgtagtaatgatcattgtctactctaaagaatatttttgaccagatgcggtggctcacgcttgtaatcccagcactttgggaggccgaggcgggcagatcattaggtcaggagttcaagaccagtctggccaacacaatgaaaccctgtctctactaaaaatacaaaaattagctgggcttagtggcgggcacctgtaatcccagctactcaggaggctgaggcaggaaaatcgattgaacctgggaggcggaggttgcagtaaggcaagatcatgccactgcacttaagcctgggtgacagagctagattccatctc

SEQ ID NO: 21639 - DNA, 696 bp, Homo sapiens
cagtgtatgtttgtctaaagttctatcaattaataaatggatctgcagaaagccagttagtttaaggggcaagtagatggagggtgcttaaaatcacaccccctgctaaacattttgctctccttatttaaaataaaatcacagatattttctgagaaggaataacaatttgagtgaaatagcagatgagaagttgccaattttaaagtgaaagatattaaatatttctgggattcttacaggattccacttagaaaaatctagcaaacctggatttcagcatcttttgcttgactttaagagaaaaataacacgatcaaattaaaattatacagctgtcagcgttcaagtcaggcagttcacaatagacaagaaaaattgccttcctaatacatattggtataattaagccatatggaagtctctgaattctctcctccagttagaaaatggagtgttggttgccactgttctttgtcatgaagtgaactaggtagtcttttaaaaatacacttgtaaaaccaacagataggccatcccatggcatcttctgagcatgtagcttttccattccaccagaaatataatttgcctcctgaggttgctgatttttatttttcttattttcacaagaaataactatttcttgaaaaacaaagctgaatatcttaaagcaaacccttcctaaagaaaaaa

SEQ ID NO: 21640 - DNA, 642 bp, Homo sapiens
gggaagtagtacagatagtgtagagttcccacacaccctagacccagtcttctctgttattaacattaatacttgagtatggcacatttgtcacaattaaagaaccaaattattatttcatggtttatagtaaaccaaattccatattgttactcagatttccttagttcttacctaatatcctttatctgttccatgatcctgtctgggacactatttcattgtcatgtttccttaggcttctcttgactgactgtgacagtttcctaaactctccttcttattgatgatctggacagttttcaggaatattgatcaggtattttgtcaaatgaccctcagttggaacttgtgtgaagtttttcccattattagactgggtttatggactttctaggaggaagacttcagataaaatgtcattctcatcatatcaagggcacatacaagcaatatgacttaccactgatgttgatgttaaccaaccaacctacctaccttccttccttcctttttctttctttctttctttttttttttttttgacagagtcttgccgtgttgctaggcggagcttgcagtgagctgagatcacaccactgcacttcatccagcctgggcaacagagcgagactccatctc

SEQ ID NO: 21641 - DNA, 206 bp, Homo sapiens
ctccagatccaatgcaattctaataataattccaagcggcattttggtagaaatttacaagctgattctaccatttatatggtaatgtcaatgatcaagaataataaaatagcaatattataaaagaataatggcgaatgaattcactacctatttccagaattactctacagctatgaaaatcaagattatgtgttttgttgaaa

SEQ ID NO: 21642 - DNA, 581 bp, Homo sapiens
agaattatattgtccaaggaaacttaaagagacagtagttttatgaaaactaatatatgtcaaatgaaagtatgtattgtttctttattttgctttatcctttttctcctatcttatcaaatcttactaaacacttgagttaggcaacattatttcaatatagctttaatacattgaatttattttcagaacaaaggtttgctggtttgaatgttgtttttctctgtggaaatgggaaagaaatgaaatggggtcctattcccccttcctgaaaggattgccaaatccatggtagattcagggctctccctgtttccttctctctcccctccacctcacaccccaccatcttttatctctgttacttactcaggagacgtgaaagccactacataataagtgtaccattgctattcctgaaaactaaaaatacaaaaattagccaggcatggtggcatgtgcctgtaatcccagctacttcagaggctgaggcaggagaatcgcttgaacctggaaggcggaggctgcagtaagccgagattgcgccattgcattccagcctgggcgaaggagcaagactc

SEQ ID NO: 21643 - DNA, 452 bp, Homo sapiens
cccaccctaatgacctcattttaacttaccccttttataatccatctccaaacagagtcatattttgagatatcgggggttaggactttaacatatgaatttgagggagacgcaattcagcacaaagcacaaggcataaataacttgtttttgtacagattcttagctaaggaactacctttctagaaagccctgtgaaatattcaaaagtatatgaggtgacagatacatgaattagcttgatttaaccatttcacaatgtatacaggtaccagaacatgctgcacactgagaatatatttcatttgtacgtgccagttataccttagccataaattcatgtggatagataacgtttttctttaaaagcaaacttaaagaatattaatcaaagagtattcatatcaaataattactgacagtgttgttttccaacctgataattttcttga

SEQ ID NO: 21644 - DNA, 1094 bp, Homo sapiens
ggcgcacgcccctcctcgcgggcactggagaccccggggaggaaggctggggagtgttgtcgcccagctgcagggaaccgtggttgatcagagctccccgaggaggagaaagttgtggaacagggacaccagggagctgccacagccttcccggtggccccgggaggtcttcgaggccctccagggtgggcagttttgagagaatacagcccagctggggtgtgccaggcccccgaaggcccaagccagagctctgatgtgaataaatacagccaaggctggggacggaggtgaggggtgactgagaacagccctgcctcaccgcggcccctacgccctcgggttggatggaaaccagcccctccacatccccctccccaggtggctcaggagttaggaaggaggctgtctgtgggggggacccacgatgccactgtggagggaggtggctgaggcaccctgtctctgcccggcggccgcgggggaggcagccgccgcgctcaggggctccagattccagtttctggagttgaaagctactgcatctcttccgccagccccgggaggagaggcgcagacatcacctgtcagctggtgctgactccgtgggcgactgttcagggcttcctcagaaggtttaaaatggaaatggcctgagctgacagggcccgtgcctgggaggggacgctgcctagctgggccagcagtgagggggccctggtaggtgtgaggggcaggaagagctgagggctgtcacatatctggctgaagggtcggccatgggcacagggtgtgtgtgtgtgtgcgcacccagtcccatgttctttcccagacacagagactggatactcttcagtaaaaagcaccctgaccccagcatggaggctccgtagcccacacccccaaggcagctgtggcctgctggacttcacctagacctgggtctgtgcatccgcactctaccatttattggtccctccacctccctgtgcctcagtttcccttgttggtaaaatgggattgatagtgccacctcctgagcctgagccagggtgctgctttgtaagtgcatttgacgcatgttgttagtggtc

SEQ ID NO: 21645 - DNA, 476 bp, Homo sapiens
atctttttctcggtgtttctgttgtggcagtcatgaatgagactctgtcaggtctccatggcagggacctgattggcagaaggcccaggtcagtgcatttcaaattcaccacctcttgtgcacagaaagcttctttcctacaggctcccagcaagggtgtgaaagcaagcctagttctccgaggctctctttaactctaatgggtgactggttggaggattcctcatcagccttgcaaaaactcttagaactgcattggtacctaaaacttctttctctttgtttttcataggaatcagctctgcatagtggtctgtgggttctcccatactaccttcatgcctgccccacattccctcacagatgtcttccctgataaattatcttgtatgtctaatcccatcttggatgcatctcagttggtaaatactaacataccaggcttgattcttgcccttccttctttctctttctct

SEQ ID NO: 21646 - DNA, 460 bp, Homo sapiens
ccaagaatattaaattgtcagcttagcccagtctgttatgcaagctcagagtccttactggggaaaaataggaccctgagagatggaaacatctgggctgatacattcaagttttaaatcctcagattcctttgaacctctgaatctacagaagagtcccatgctttaaggaccgatgctggccaggtgtggtggctcatgcttgtaatcccagtactttgggaggctgaggcgggcagatcacttgaggtcaggagttcaagaccagcctggccaacacagtgaaaccctgtctctactaaaaatacaaaaattagctggttgtggtggcgagcacctgtaatcctactcggcaggctgaggtatgagaatcacttgaacctgggaggtggagtttgcaatgagccgagatcacgccactgcactccagcctgggtgacagagcgagactctgtctcaa

SEQ ID NO: 21647 - DNA, 414 bp, Homo sapiens
ttgtttgataggactattgcctgaatagcccaagcaaatatcttttgcttatataaagttggactgttatttttttctgaattatgtaagtacttgccccatttctattattttaccattgttagcttgctcttagaagggtgaggtatgggtttcttttagaaattctgcactattgctctactctccttctccccctctcttgatgagctttggtatcagtatattccagctgcaatgctttgtagtagaaactatatcttttaaaatatactggacatggtggctcatgtctttaatcccagtgactcaggaggctgaggcaggaggatcacttgaacctaggggtttgaggctgcagtgaactgtgattgtgccactgtactccagcctgagtgacaaagcaagaccctg

SEQ ID NO: 21648 - DNA, 387 bp, Homo sapiens
acatcgacagacagtcttcttttgacagtagaagatatttccatgccaggtaaagtgagaggcatcttaacagtgagaagagtgtccatgttccctgtggtcagtggccaccagtgttgacatttcctgtgttatgctgccaagttgatgatggcttgtaggttatgtgtatctaaaacttctgtctgattagtcttcttatccttttctgtgtatagtcatgcactgcaaaacgacattggagactgggcctggtggctcacgccggtaatcccagcgctttgggaggccgaggcgggtggatcacgacatcaggagatcgagaccatcctggctaagacggtggggccctgtctctactaaaaatgcctccccagtagccgggca

SEQ ID NO: 21649 - DNA, 537 bp, Homo sapiens
acaataaataaggtgatttcagatatttatcaatgaccagtgaatgaagtaaagcagggcaattgtataaagagtaatatgggatgcagtgtagtaacagtattatatatgagaacatgatataatgagaaggagccacctgcatgaagacttggaataagatcagccacagagaaggaaaagtaaatgaaaagcccaatgtaagcgtcaggaggggagagtagtacaagatgaggtcagaaagataggcaagggctggctgcagtggctcacacatgtaatcccagcactttgggaggccaaggtgggtggatcacttggtgtcagtagttcgagaccagcctgaccaacatggtaaaaccctgtgtctactaaaaatacaaaaattagccaggcatggtggtatgcacctgtagtcccaactactggggaggccgaggcaggagaatcgcttgaacctaggaggcggacgttgcagtgagcggataccatgctgctgcatccagcctagacgacagagcaagactccatcccaaa

SEQ ID NO: 21650 - DNA, 677 bp, Homo sapiens
catacttattacctttgtggacaagatggacatatgtagaaaggatgaaagtgaagctaaattgaatgttagtactcacccgatgataaaccagagagtgagaaatgctatgtctctgattaacatttttattaatggctcagattaatttatagatgatatgtgtctcagtccattttgtgcagctatagcagaatacctgagactgggtgatttataaagaacagagattcatttcttatatttctggaggctgggaagtccaaggttgagggatccacatctggcgagggccttcttgctgtgtcattccatgttggaaggcagaagggcaagagagcatgcatgagcaagaaagaaaggtgccaaactcatccttttattaggaactcactcaacaataactaatccacttccaggataaaggcatttaatccactcacaggagattcatctcttaaagtctccacctttcaacactgctccactggggattaagtttccaacacatgaatttttgaggagggcacattcaaactatagcagtatatttatcaaaatttcaaaagggtatcaaatatattaggcattaggattaaatatttcaacagattggaacagtggacttaacatgaaatttaatcaagtatctgcttttgtgaagaaaggaaaaaaat

SEQ ID NO: 21651 - DNA, 860 bp, Homo sapiens
attccacctggggcacaaagccaaaattttttttcaaaaaaaaaaaaaaaagaaatttcccgtgggcggggcacagtgactcatgcctgtagtaatcccagcacttttggaggccaaggtgggcagatcccctgagctcaggagtccaacctgggcaacatggtgaaacccctgtctctacaaaaaataaaaaaatgagtccagtgtggtggtgtgcacctgtggtcccagctactctggaggctgaggtgggaagaccacctaagccccaggaggtcgaggctgcagtgagccatgattgcaccactgcactccagcctgggcaacagagtgagatccagtctcaaaaaaaaaaaattccccctttcctcaatccccaccccacccccccaccatatgcctgtgacccactgaggcttgcatactctgcattgcaattatgtgttattcttgattaaattcatttattctggagagcctgagtttctctttaggttgacaccactcactcttgtcagtccctggagtaccccaagcatcctcacgtggttagcagggaaaccttggcatctcaaggatgcaggtgcaggagagcgagtctccaggctgtcagagctgagcatgcagaagcctgccctggagagcgccccgaggttcctgaccgcaggttgtctcaggccctcctgagaccctggtgaagagtgggatgggaccgcggggggattccttggcaccccaagtagtcttggccttcatgtgtgaactcctgtccctaagggggcccccagtgagctccagccctgggacacagctgtgaacacctgatccttgttcccaacacccgtgcactgcccaaaaac

SEQ ID NO: 21652 - DNA, 2168 bp, Homo sapiens
cggggtaacggatatcgtcgacccacggcgctcgctgggcttctctcgcctcctgtcgtctggctgcaccgactttgcccacgccctcacgggagacgcagacactagggacccggggaggcgcccgggcggggccgccatgttggcagagagtcccagcgtcccgcgcctcggttccggaacccgcggcgcggggatggagctgggctgcccttgggcgccgtcctgggctggtgcccaccctggccgcgtggtcaccggcaagaagcccagggcctcacccaggcgtgggggccgggggaaggaccggaccctcccgaagtcgcggaccaggccgggcggcacccgggctggggtggctgctaccccgagctaagctggctgcgccgcatctcacggtccccggggcccgagcgctgcgcctggaccggcgccgagcgaggcggccaatcggccggctggacccacagtccccgcgccataggcgggtcggggctttcagacccggctcccagccctcgaactcggtaaccttggaggtcagcttgagatgactgcgcttcctgcacgcgttgtcctccccagaaacgcccaaaatggcaaagcggcgtccgtggccgcccgaggccctccctgcctgggttctccccagccgaacctcacgcccggcccctccttcattctctcctggccaggctgctcctgcccttgggcgaatccgctgcgtcccacggtcctgactgtggcatttctgcgtgtctggagagctcccccggcagcgacgtcctgcttagcacgtggctcgtctaactctgttcccctggcctcctgctcttctaggggtcatctttaggtttctgctggtctctgccccctgtgacacttgctggtacccaaatgaagtcgtttatgtcacactctaacaagaggccctgaagaagccctcacaaaaacattagcaacggagcgcctgcggcaaacccttctaacctttggtctttatggtttcaaagcagtttatgggaacttctcttttttaaaagattccccttggggccaggcgcggtggcttctgtaatcccaggactttgggaggccgaggcaggtggatcacttgaggtcaggagttcaagactagcctggccaacatggtgagacacccgtctctacaaaaaacacaaaaaaattagcagggcatggttggtggcaggcacctgtagtcccagctacacgggaggcttaggcaggagaattccttgaacccaggaggtggaggttgcagtgagccgagatggcaccactgcactccagcctgggcaacagagcaagactctgtctcaaaaaaaaaaaaaaaaaaaagaaatttcccgtgggcggggcacagtgactcatgcctgtagtaatcccagcacttttggaggccaaggtgggcagatcccctgagctcaggagtccaacctgggcaacatggtgaaacccctgtctctacaaaaaataaaaaaatgagtccagtgtggtggtgtgcacctgtggtcccagctactctggaggctgaggtgggaagaccacctaagccccaggaggtcgaggctgcagtgagccatgattgcaccactgcactccagcctgggcaacagagtgagatccagtctcaaaaaaaaaaaattccccctttcctcaatccccaccccacccccccaccatatgcctgtgacccactgaggcttgcatactctgcattgcaattatgtgttattcttgattaaattcatttattctggagagcctgagtttctctttaggttgacaccactcactcttgtcagtccctggagtaccccaagcatcctcacgtggttagcagggaaaccttggcatctcaaggatgcaggtgcaggagagcgagtctccaggctgtcagagctgagcatgcagaagcctgccctggagagcgccccgaggttcctgaccgcaggttgtctcaggccctcctgagaccctggtgaagagtgggatgggaccgcggggggattccttggcaccccaagtagtcttggccttcatgtgtgaactcctgtccctaagggggcccccagtgagctccagccctgggacacagctgtgaacacctgatccttgttcccaacacccgtgcactgcccaaaaac

SEQ ID NO: 21653 - DNA, 2255 bp, Homo sapiens
gtccggcagcgcctgcccaggtgtgctcggagcgtagctgtagcaacggggcgggccttggttcgcctggggcgtggtcgctgtctggggctcccacgtggttcgcctcatgggcctggagctgggcttctctcgcctcctgtcgtctggctgcaccgactttgcccacgccctcacgggagacgcagacactagggacccggggaggcgcccgggcggggccgccatgttggcagagagtcccagcgtcccgcgcctcggttccggaacccgcggcgcggggatggagctgggctgcccttgggcgccgtcctgggctggtgcccaccctggccgcgtggtcaccggcaagaagcccagggcctcacccaggcgtgggggccgggggaaggaccggaccctcccgaagtcgcggaccaggccgggcggcacccgggctggggtggctgctaccccgagctaagctggctgcgccgcatctcacggtccccggggcccgagcgctgcgcctggaccggcgccgagcgaggcggccaatcggccggctggacccacagtccccgcgccataggcgggtcggggctttcagacccggctcccagccctcgaactcggtaaccttggaggtcagcttgagatgactgcgcttcctgcacgcgttgtcctccccagaaacgcccaaaatggcaaagcggcgtccgtggccgcccgaggccctccctgcctgggttctccccagccgaacctcacgcccggcccctccttcattctctcctggccaggctgctcctgcccttgggcgaatccgctgcgtcccacggtcctgactgtggcatttctgcgtgtctggagagctcccccggcagcgacgtcctgcttagcacgtggctcgtctaactctgttcccctggcctcctgctcttctaggggtcatctttaggtttctgctggtctctgccccctgtgacacttgctggtacccaaatgaagtcgtttatgtcacactctaacaagaggccctgaagaagccctcacaaaaacattagcaacggagcgcctgcggcaaacccttctaacctttggtctttatggtttcaaagcagtttatgggaacttctcttttttaaaagattccccttggggccaggcgcggtggcttctgtaatcccaggactttgggaggccgaggcaggtggatcacttgaggtcaggagttcaagactagcctggccaacatggtgagacacccgtctctacaaaaaacacaaaaaaattagcagggcatggttggtggcaggcacctgtagtcccagctacacgggaggcttaggcaggagaattccttgaacccaggaggtggaggttgcagtgagccgagatggcaccactgcactccagcctgggcaacagagcaagactctgtctcaaaaaaaaaaaaaaaaaaaagaaatttcccgtgggcggggcacagtgactcatgcctgtagtaatcccagcacttttggaggccaaggtgggcagatcccctgagctcaggagtccaacctgggcaacatggtgaaacccctgtctctacaaaaaataaaaaaatgagtccagtgtggtggtgtgcacctgtggtcccagctactctggaggctgaggtgggaagaccacctaagccccaggaggtcgaggctgcagtgagccatgattgcaccactgcactccagcctgggcaacagagtgagatccagtctcaaaaaaaaaaaattccccctttcctcaatccccaccccacccccccaccatatgcctgtgacccactgaggcttgcatactctgcattgcaattatgtgttattcttgattaaattcatttattctggagagcctgagtttctctttaggttgacaccactcactcttgtcagtccctggagtaccccaagcatcctcacgtggttagcagggaaaccttggcatctcaaggatgcaggtgcaggagagcgagtctccaggctgtcagagctgagcatgcagaagcctgccctggagagcgccccgaggttcctgaccgcaggttgtctcaggccctcctgagaccctggtgaagagtgggatgggaccgcggggggattccttggcaccccaagtagtcttggccttcatgtgtgaactcctgtccctaagggggcccccagtgagctccagccctgggacacagctgtgaacacctgatccttgttcccaacacccgtgcactgcccaaaaac

SEQ ID NO: 21654 - DNA, 505 bp, Homo sapiens
gtggtgttcggttttctgttcctgtgttagtttgctgggaatgatggtttccagcttcatccatgtccctgcaaaggacatgaacacattcttttttatggctgtgcagtattatttgtccctagctggcccctttccttggcaatttctttaacctctaatccatcccacaagcatccttcactctcagaagttgattttgactctttctggtttctcttggcctatatccagtactaagacatttaaaaaatcttcttaaatcccgtgctttccattctctctgcagttgctctacttcaggtcttcatcatttaacttggctattatatggtcttccagttgttctcctgtctctaagctccatccacaccctcaccctgccactacatacacacttgctgaaaccaacatacccatcttctaaaaactatagacttcaattaattgctcccctacttaaaaatctttagtgattcatgactcccttcaaaataaagcttag

SEQ ID NO: 21655 - DNA, 1494 bp, Homo sapiens
gcgcttctgacaagcccgaaagtcatttccaatctcaagtggactttgttccaactattgggggcgtcgctccccctcttcatggtcgcgggcaaacttcctcctcggcgcctcttctaatggagccccacctgctcgggctgctcctcggcctcctgctcggtggcaccagggtcctcgctggctacccaatttggtggtccctggccctgggccagcagtacacatctctgggctcacagcccctgctctgcggctccatcccaggcctggtccccaagcaactgcgcttctgccgcaattacatcgagatcatgcccagcgtggccgagggcgtgaagctgggcatccaggagtgccagcaccagttccggggccgccgctggaactgcaccaccatagatgacagcctggccatctttgggcccgtcctcgacaaagccacccgcgagtcggccttcgttcacgccatcgcctcggccggcgtggccttcgccgtcacccgctcctgcgccgagggcacctccaccatttgcggctgtgactcgcatcataaggggccgcctggcgaaggctggaagtggggcggctgcagcgaggacgctgacttcggcgtgttagtgtccagggagttcgcggatgcgcgcgagaacaggccggacgcgcgctcggccatgaacaagcacaacaacgaggcgggccgcacgactatcctggaccacatgcacctcaaatgcaagtgccacgggctgtcgggcagctgtgaggtgaagacctgctggtgggcgcagcctgacttccgtgccatcggtgacttcctcaaggacaagtatgacagcgcctcggagatggtagtagagaagcaccgtgagtcccgaggctgggtggagaccctccgggccaagtactcgctcttcaagccacccacggagagggacctggtctactacgagaactcccccaacttttgtgagcccaacccagagacgggttcctttggcacaagggaccggacttgcaatgtcacctcccacggcatcgatggctgcgatctgctctgctgtggccggggccacaacacgaggacggagaagcggaaggaaaaatgccactgcatcttccactggtgctgctacgtcagctgccaggagtgtattcgcatctacgacgtgcacacctgcaagtagggcaccagggcgctgggaaggggtgaagtgtgtggctgggcggattcagcgaagtctcatgggaagcaggacctagagccgggcacagccctcagcgtcagacagcaaggaactgtcaccagccgcacgcgtggtaaatgacccagacccaactcgcctgtggacggggaggctctccctctctctcatcttacatttctcaccctactctggatggtgtgtggtttttaaagaagggggctttctttttagttctctagggtctgataggaacagacctgaggcttatctttgcacatgttaaaga

SEQ ID NO: 21656 - DNA, 1704 bp, Homo sapiens
cactcccgcgagcacgtgcgcgtcctcgctgctcacatttcggcggagggcgcgctccctggaaaattccactcctgtgctagctccaccctatgcggcttttctcctacccgacgctcttcactctcagctcccttcccggcggcctttgcgggaacaagatggcagcccccatacctcaagggttctcttgtttatcgaggtttttgggctggtggtttcggcagccagttctggtgactcagtccgcagctatagttccagtaagaactaaaaaacgtttcacacctcctatttatcaacctaaatttaaaacagaaaaggagtttatgcaacatgcccggaaagcaggattggttattcctccagaaaaatcggaccgttccatacatctggcctgtacagctggtatatttgatgcctatgttcctcctgagggtgatgcacgcatatcatctctttcaaaggagggactgatagagagaactgaacgaatgaagaagactatggcatcacaagtgtcaatccggaggataaaagactatgatgccaactttaaaataaaggacttccctgaaaaagctaaggatatctttattgaagctcacctttgtctaaataactcagaccatgaccgacttcataccttggtaactgaacactgttttccagacatgacttgggacatcaaatataagaccgtccgctggagctttgtggaatctttagagccctctcatgttgttcaagttcgctgttcaagtatgatgaaccagggcaacgtgtacggccagatcaccgtacgcatgcacacccggcagactctggccatctatgaccggtttggccggttgatgtatggacaggaagatgtacccaaggatgtcctggagtatgttgtattcgaaaagcagttgacaaacccctatggaagctggagaatgcataccaagatcgttcccccatgggcaccccctaagcagcccatccttaagacggtgatgatccctggccctcagctgaaaccagaagaagaatatgaagaggcacaaggagaggcccagaagcctcagctagcctgatgacaaaaatgacttctagggtgaagcctgggtgatgaggctgctggaagctttgaagtctcccattcccctcatgctataaaaagaactacctttgttctctcccatcctgctcaggtcttttcagcagtctcatcatcagcaaccatgactgatgactgggccctagcaggtggcaggtataacatggccatggacactcttcttttttaaattttatgtctagcttctgagtctagatgaaagacagtatgtttcagagaacattggatatcagtttttcccacagcagggactgtgagagacaaccagcagcatcctctttgtaatcacagggcagggatcagagtttgaaatgaaatgttgtcagggtgttggaaaaattttggtgagttctgcacatttcccctggttcaggctgggcatggaccagccttcagatggcagaagtggaagatgagcctacttgtgagcgatgtgactttaaggaaatgaagactggggaagaataattagtgtttataagacatttaagaggccctttttcatatactgactcactgatgaatcagcatttgcattttatggaaaaatataaatccaaagaaataatttatccctt

SEQ ID NO: 21657 - DNA, 944 bp, Homo sapiens
cactcccgcgagcacgtgcgcgtcctcgctgctcacatttcggcggagggcgcgctccctggaaaattccactcctgtgctagctccaccctatgcggcttttctcctacccgacgctcttcactctcagctcccttcccggcggcctttgcgggaacaagatggcagcccccatacctcaagggttctcttgtttatcgaggtttttgggctggtggtttcggcagccagttctggtgactcagtccgcagctatagttccagtaagaactaaaaaacgtttcacatctcctatttatcaacctaaatttaaaacagaaaaggagtttatgcaacatgcccggaaagcaggattggttattcctccagaaaaatcggaccgttccatacatctggcctgtacagctggtatatttgatgcctatgttcctcctgagggtgatgcacgcatatcatctctttcaaaggagagatgatagagagaactgatagagagaactgaacgaatgaagaagactatggcatcacaagtgtcaatccggaggataaaagactatgatgccaactttaaaataaaggacttccctgaaaaagctaaggatatctttattgaagctcacctttgtctaaataagttgggcccatgagatgtgtgctctgtatattccggaggtacaatttgccagtgtttccacaatggaaccaattgttttacagtctgttccacatgatcattgtaataaggtacagtggatattattttattactgtttgaatatcactgctgggaaatagaaaggaagtctttgtatttttaaaattatagttctccccaacctggctaatacggtgaaaccccgtctctactaaaaatacaaaaattagctgggcatggtggcgggcacctgtagtcccagctattcgggaggctgaggcaggagaat

SEQ ID NO: 21658 - DNA, 1070 bp, Homo sapiens
cactcccgcgagcacgtgcgcgtcctcgctgctcacatttcggcggagggcgcgctccctggaaaattccactcctgtgctagctccaccctatgcggcttttctcctacccgacgctcttcactctcagctcccttcccggcggcctttgcgggaacaagatggcagcccccatacctcaagggttctcttgtttatcgaggtttttgggctggtggtttcggcagccagttctggtgactcagtccgcagctatagttccagtaagaactaaaaaacgtttcacatctcctatttatcaacctaaatttaaaacagaaaaggagtttatgcaacatgcccggaaagcaggattggttattcctccagaaaaatcggaccgttccatacatctggcctgtacagctggtatatttgatgcctatgttcctcctgagggtgatgcacgcatatcatctctttcaaaggagagatgatagagagaactgatagagagaactgaacgaatgaagaagactatggcatcacaagtgtcaatccggaggataaaagactatgatgccaactttaaaataaaggacttccctgaaaaagctaaggatatctttattgaagctcacctttgtctaaataagttgggcccatgagatgtgtgctctgtatattccggaggtacaatttgccagtgtttccacaatggaaccaattgttttacagtctgttccacatgatcattgtaataagggttagaataggctcagtggctcatgcctatagtcctagcactttgggacgcccaggcaggagtatcacttgagcccagaagtttgaatccagtctggacaacaagcaagaccctgtctctacaaaaaagaataaatttagccaggtgtggggaggcacatgtgtctgtagtcccaactactcaagaggctgcggtgggagggtcccttgagcccagaggtcaaggctgcagtgaaccgtgactgtgccctgcacccccacctgggcaacagagcaagaccctgtctcagaaaagaacagcaagcaaagaaacacaaaacaaaaaa

SEQ ID NO: 21659 - DNA, 839 bp, Homo sapiens
cactcccgcgagcacgtgcgcgtcctcgctgctcacatttcggcggagggcgcgctccctggaaaattccactcctgtgctagctccaccctatgcggcttttctcctacccgacgctcttcactctcagctcccttcccggcggcctttgcgggaacaagatggcagcccccatacctcaagggttctcttgtttatcgaggtttttgggctggtggtttcggcagccagttctggtgactcagtccgcagctatagttccagtaagaactaaaaaacgtttcacatctcctatttatcaacctaaatttaaaacagaaaaggagtttatgcaacatgcccggaaagcaggattggttattcctccagaaaaatcggaccgttccatacatctggcctgtacagctggtatatttgatgcctatgttcctcctgagggtgatgcacgcatatcatctctttcaaaggagagatgatagagagaactgatagagagaactgaacgaatgaagaagactatggcatcacaagtgtcattttattggctgggtgcggtggctcacgtctgtaatcccagcactttgggaggctgaggtgggcagatcacctgaggtcaggaatcgaaaaccagcctgaccaacgtggagaaacctcgtctctactaaaaatgcaaaattagccgggcgtggtggcacatgcctgtaatcccagctactcaagaggctgaggcaggagaatcgcttgaacctgggaggcggaggttgcggtgagctgagatcgtgccattgcactccagcctgggcaacaagggcgaaactctgtctcaaaaaataataata

SEQ ID NO: 21660 - DNA, 1190 bp, Homo sapiens
cactcccgcgagcacgtgcgcgtcctcgctgctcacatttcggcggagggcgcgctccctggaaaattccactcctgtgctagctccaccctatgcggcttttctcctacccgacgctcttcactctcagctcccttcccggcggcctttgcgggaacaagatggcagcccccatacctcaagggttctcttgtttatcgaggtttttgggctggtggtttcggcagccagttctggtgactcagtccgcagctatagttccagtaagaactaaaaaacgtttcacatctcctatttatcaacctaaatttaaaacagaaaaggagtttatgcaacatgcccggaaagcaggattggttattcctccagaaaaatcggaccgttccatacatctggcctgtacagctggtatatttgatgcctatgttcctcctgagggtgatgcacgcatatcatctctttcaaaggagagatgatagagagaactgatagagagaactgaacgaatgaagaagactatggcatcacaagtgtcattttattggctgggtgcggtggctcacgtctgtaatcccagcactttgggaggctgaggtgatccacccgcctcagtgagccactgtgcccggcaaaaagatcgcagatggggatataactagtatcagtacaagtgcacccgtcttaattcataaggcttcatggcatcttatatacataatacaccatgtattactcctaataccccaatcagcatacggacacatatcagaatcgtacacagggcggctcatcagtccccattccagcaagggttcttcatgagaacccattcttgtaccttatcacatatgattgtgcctgttttgagcacatcattacggggacaaccgatctcgaggactgatgtgttaaggaaagaatatggctgtgtagcgggatgccgaggaggcaagagaactaaaagtaatccataatgtggggaggaaatccgtggatgtggtattaaccattgcggtaaagggatagaggagactatagtagataacgagattagtaagtgtagagaaacaggaagaagctcataatgtgtggagaagaaatattcgcaacaaaaaagttgggtagaattgtggtgagtatgttttttattctatcatcatagatttttatgagtgaaggaatagagagag

SEQ ID NO: 21661 - DNA, 1264 bp, Homo sapiens
gtatcaacgcagagtgcccattacggccggggactgatagagagaactgaacgaatgaagaagactatggcatcacaagtgtcaatccggaggataaaagactatgatgccaactttaaaataaaggacttccctgaaaaagctaaggatatctttattgaagctcacctttgtctaaataactcagaccatgaccgacttcataccttggtaactgaacactgttttccagacatgacttgggacatcaaatataagaccgtccgctggagctttgtggaatctttagagccctctcatgttgttcaagttcgctgttcaagtatgatgaaccagggcaacgtgtacggccagatcaccgtacgcatgcacacccggcagactctggccatctatgaccggtttggccggttgatgtatggacaggaagatgtacccaaggatgtcctggagtatgttgtattcgaaaagcagttgacaaacccctatggaagctggagaatgcataccaagatcgttcccccatgggcaccccctaagcagcccatccttaagacggtgatgatccctggccctcagctgaaaccagaagaagaatatgaagaggcacaaggagaggcccagaagcctcagctagcctgatgacaaaaatgacttctagggtgaagcctgggtgatgaggctgctggaagctttgaagtctcccattcccctcatgctataaaaagaactacctttgttctctcccatcctgctcaggtcttttcagcagtctcatcatcagcaaccatgactgatgactgggccctagcaggtggcaggtataacatggccatggacactcttcttttttaaattttatgtctagcttctgagtctagatgaaagacagtatgtttcagagaacattggatatcagtttttcccacagcagggactgtgagagacaaccagcagcatcctctttgtaatcacagggcagggatcagagtttgaaatgaaatgttgtcagggtgttggaaaaattttggtgagttctgcacatttcccctggttcaggctgggcatggaccagccttcagatggcagaagtggaagatgagcctacttgtgagcgatgtgactttaaggaaatgaagactggggaagaataattagtgtttataagacatttaagaggccctttttcatatactgactcactgatgaatcagcatttgcattttatggaaaaatataaatccaaagaaataatttatccctt

SEQ ID NO: 21662 - DNA, 1554 bp, Homo sapiens
cactcccgcgagcacgtgcgcgtcctcgctgctcacatttcggcggagggcgcgctccctggaaaattccactcctgtgctagctccaccctatgcggcttttctcctacccgacgctcttcactctcagctcccttcccggcggcctttgcgggaacaagatggcagcccccatacctcaagggttctcttgtttatcgaggtttttgggctggtggtttcggcagccagttctggtgactcagtccgcagctatagttccagtaagaactaaaaaacgtttcacacctcctatttatcaacctaaatttaaaacagaaaaggagtttatgcaacatgcccggaaagcaggattggttattcctccagaaaaatcggaccgttccatacatctggcctgtacagctggtatatttgatgcctatgttcctcctgagggtgatgcacgcatatcatctctttcaaaggagggactgatagagagaactgaacgaatgaagaagactatggcatcacaagtgtcaatccggaggataaaagactatgatgccaactttaaaataaaggacttccctgaaaaagctaaggatatctttattgaagctcacctttgtctaaataactcagaccatgaccgacttcataccttggtaactgaacactgttttccaactctggccatctatgaccggtttggccggttgatgtatggacaggaagatgtacccaaggatgtcctggagtatgttgtattcgaaaagcagttgacaaacccctatggaagctggagaatgcataccaagatcgttcccccatgggcaccccctaagcagcccatccttaagacggtgatgatccctggccctcagctgaaaccagaagaagaatatgaagaggcacaaggagaggcccagaagcctcagctagcctgatgacaaaaatgacttctagggtgaagcctgggtgatgaggctgctggaagctttgaagtctcccattcccctcatgctataaaaagaactacctttgttctctcccatcctgctcaggtcttttcagcagtctcatcatcagcaaccatgactgatgactgggccctagcaggtggcaggtataacatggccatggacactcttcttttttaaattttatgtctagcttctgagtctagatgaaagacagtatgtttcagagaacattggatatcagtttttcccacagcagggactgtgagagacaaccagcagcatcctctttgtaatcacagggcagggatcagagtttgaaatgaaatgttgtcagggtgttggaaaaattttggtgagttctgcacatttcccctggttcaggctgggcatggaccagccttcagatggcagaagtggaagatgagcctacttgtgagcgatgtgactttaaggaaatgaagactggggaagaataattagtgtttataagacatttaagaggccctttttcatatactgactcactgatgaatcagcatttgcattttatggaaaaatataaatccaaagaaataatttatccctt

SEQ ID NO: 21663 - DNA, 1233 bp, Homo sapiens
gcgtattgtggatgggcgcgagggcggcttttccacccccctgccattttgcaatccggaggataaaagactatgatgccaactttaaaataaaggacttccctgaaaaagctaaggatatctttattgaagctcacctttgtctaaataactcagaccatgaccgacttcataccttggtaactgaacactgttttccagacatgacttgggacatcaaatataagaccgtccgctggagctttgtggaatctttagagccctctcatgttgttcaagttcgctgttcaagtatgatgaaccagggcaacgtgtacggccagatcaccgtacgcatgcacacccggcagactctggccatctatgaccggtttggccggttgatgtatggacaggaagatgtacccaaggatgtcctggagtatgttgtattcgaaaagcagttgacaaacccctatggaagctggagaatgcataccaagatcgttcccccatgggcaccccctaagcagcccatccttaagacggtgatgatccctggccctcagctgaaaccagaagaagaatatgaagaggcacaaggagaggcccagaagcctcagctagcctgatgacaaaaatgacttctagggtgaagcctgggtgatgaggctgctggaagctttgaagtctcccattcccctcatgctataaaaagaactacctttgttctctcccatcctgctcaggtcttttcagcagtctcatcatcagcaaccatgactgatgactgggccctagcaggtggcaggtataacatggccatggacactcttcttttttaaattttatgtctagcttctgagtctagatgaaagacagtatgtttcagagaacattggatatcagtttttcccacagcagggactgtgagagacaaccagcagcatcctctttgtaatcacagggcagggatcagagtttgaaatgaaatgttgtcagggtgttggaaaaattttggtgagttctgcacatttcccctggttcaggctgggcatggaccagccttcagatggcagaagtggaagatgagcctacttgtgagcgatgtgactttaaggaaatgaagactggggaagaataattagtgtttataagacatttaagaggccctttttcatatactgactcactgatgaatcagcatttgcattttatggaaaaatataaatccaaagaaataatttatccctt

SEQ ID NO: 21664 - DNA, 1229 bp, Homo sapiens
attaaattaaattttcgggccaccttttaaaaatttttctatctcaggaatccggaggataaaagactatgatgccaactttaaaataaaggacttccctgaaaaagctaaggatatctttattgaagctcacctttgtctaaataactcagaccatgaccgacttcataccttggtaactgaacactgttttccagacatgacttgggacatcaaatataagaccgtccgctggagctttgtggaatctttagagccctctcatgttgttcaagttcgctgttcaagtatgatgaaccagggcaacgtgtacggccagatcaccgtacgcatgcacacccggcagactctggccatctatgaccggtttggccggttgatgtatggacaggaagatgtacccaaggatgtcctggagtatgttgtattcgaaaagcagttgacaaacccctatggaagctggagaatgcataccaagatcgttcccccatgggcaccccctaagcagcccatccttaagacggtgatgatccctggccctcagctgaaaccagaagaagaatatgaagaggcacaaggagaggcccagaagcctcagctagcctgatgacaaaaatgacttctagggtgaagcctgggtgatgaggctgctggaagctttgaagtctcccattcccctcatgctataaaaagaactacctttgttctctcccatcctgctcaggtcttttcagcagtctcatcatcagcaaccatgactgatgactgggccctagcaggtggcaggtataacatggccatggacactcttcttttttaaattttatgtctagcttctgagtctagatgaaagacagtatgtttcagagaacattggatatcagtttttcccacagcagggactgtgagagacaaccagcagcatcctctttgtaatcacagggcagggatcagagtttgaaatgaaatgttgtcagggtgttggaaaaattttggtgagttctgcacatttcccctggttcaggctgggcatggaccagccttcagatggcagaagtggaagatgagcctacttgtgagcgatgtgactttaaggaaatgaagactggggaagaataattagtgtttataagacatttaagaggccctttttcatatactgactcactgatgaatcagcatttgcattttatggaaaaatataaatccaaagaaataatttatccctt

SEQ ID NO: 21665 - DNA, 1320 bp, Homo sapiens
cactcccgcgagcacgtgcgcgtcctcgctgctcacatttcggcggagggcgcgctccctggaaaattccactcctgtgctagctccaccctatgcggcttttctcctacccgacgctcttcactctcagctcccttcccggcggcctttgcgggaacaagatggcagcccccatacctcaagggttctcttgtttatcgaggtttttgggctggtggtttcggcagccagttctggtgactcagtccgcagctatagttccagtaagaactaaaaaacgtttcacacctcctatttatcaacctaaatttaaaacagaaaaggagtttatgcaacatgcccggaaagcaggattggttattcctccagaaaaatcggaccgttccatacatctggcctgtacagctggtatatttgatgcctatgttcctcctgagggtgatgcacgcatatcatctctttcaaaggagggactgatagagagaactgaacgaatgaagaagactatggcatcacaagtgtcaatccggaggataaaagactatgatgccaactttaaaataaaggacttccctgaaaaagctaaggatatctttattgaagctcacctttgtctaaataagtaagtgaactccctacctttacccattctgttctcagcagttagctattattttaggcacagttttttgtttgtttgtttttgttttgcacaaatttgttttctgccttcaggtaagagatctagagtgagagaacttcctatattggaagtaattagtgactgaagctgtctttcactcccctctctgcttctgggaatttctaccatttggtctgtctcagttccacctgcaagtgttgggaccttgtgccagaatagctgcctttttcaccccatctgatccctgaattcatcctgatcttttttgtgtgtttgtcttatgtatcttcatttccctttccttggttattttgaatatatttcttgtgaaaatttccagctctccctccacttttatttttcttattttttattttgagatggagtctcgctctgtcgcccaggctgggagtgcaatggctgcaatcttggctctctgcaacctccacgtccctggttcaagcgactcccctgcctcagcctcccaagtagctgggattacaggtgcacgccaccacatccagctaatttttttgtatttttagtagagacggggtttcatcatgttggccagactggtcctgaactcctgacctcaggcaacctgcccgcctcggcctcccaaagtgctgggattacaggcgtgagccaccatg

SEQ ID NO: 21666 - DNA, 1655 bp, Homo sapiens
cactcccgcgagcacgtgcgcgtcctcgctgctcacatttcggcggagggcgcgctccctggaaaattccactcctgtgctagctccaccctatgcggcttttctcctacccgacgctcttcactctcagctcccttcccggcggcctttgcgggaacaagatggcagcccccatacctcaagggttctcttgtttatcgaggtttttgggctggtggtttcggcagccagttctggtgactcagtccgcagctatagttccagtaagaactaaaaaacgtttcacacctcctatttatcaacctaaatttaaaacagaaaaggagtttatgcaacatgcccggaaagcaggattggttattcctccagaaaaatcggaccgttccatacatctggcctgtacagctggtatatttgatgcctatgttcctcctgagggtgatgcacgcatatcatctctttcaaaggagggactgatagagagaactgaacgaatgaagaagactatggcatcacaagtgtcaatccggaggataaaagactatgatgccaactttaaaataaaggacttccctgaaaaagctaaggatatctttattgaagctcacctttgtctaaataagacatgacttgggacatcaaatataagaccgtccgctggagctttgtggaatctttagagccctctcatgttgttcaagttcgctgttcaagtatgatgaaccagggcaacgtgtacggccagatcaccgtacgcatgcacacccggcagactctggccatctatgaccggtttggccggttgatgtatggacaggaagatgtacccaaggatgtcctggagtatgttgtattcgaaaagcagttgacaaacccctatggaagctggagaatgcataccaagatcgttcccccatgggcaccccctaagcagcccatccttaagacggtgatgatccctggccctcagctgaaaccagaagaagaatatgaagaggcacaaggagaggcccagaagcctcagctagcctgatgacaaaaatgacttctagggtgaagcctgggtgatgaggctgctggaagctttgaagtctcccattcccctcatgctataaaaagaactacctttgttctctcccatcctgctcaggtcttttcagcagtctcatcatcagcaaccatgactgatgactgggccctagcaggtggcaggtataacatggccatggacactcttcttttttaaattttatgtctagcttctgagtctagatgaaagacagtatgtttcagagaacattggatatcagtttttcccacagcagggactgtgagagacaaccagcagcatcctctttgtaatcacagggcagggatcagagtttgaaatgaaatgttgtcagggtgttggaaaaattttggtgagttctgcacatttcccctggttcaggctgggcatggaccagccttcagatggcagaagtggaagatgagcctacttgtgagcgatgtgactttaaggaaatgaagactggggaagaataattagtgtttataagacatttaagaggccctttttcatatactgactcactgatgaatcagcatttgcattttatggaaaaatataaatccaaagaaataatttatccctt

SEQ ID NO: 21667 - DNA, 1194 bp, Homo sapiens
tgcctgcccctctgaacctgatcccttaagtacggccccgccgtcgcctcatcatgccaccaaatccggaggataaaagactatgatgccaactttaaaataaaggacttccctgaaaaagctaaggatatctttattgaagctcacctttgtctaaataagacatgacttgggacatcaaatataagaccgtccgctggagctttgtggaatctttagagccctctcatgttgttcaagttcgctgttcaagtatgatgaaccagggcaacgtgtacggccagatcaccgtacgcatgcacacccggcagactctggccatctatgaccggtttggccggttgatgtatggacaggaagatgtacccaaggatgtcctggagtatgttgtattcgaaaagcagttgacaaacccctatggaagctggagaatgcataccaagatcgttcccccatgggcaccccctaagcagcccatccttaagacggtgatgatccctggccctcagctgaaaccagaagaagaatatgaagaggcacaaggagaggcccagaagcctcagctagcctgatgacaaaaatgacttctagggtgaagcctgggtgatgaggctgctggaagctttgaagtctcccattcccctcatgctataaaaagaactacctttgttctctcccatcctgctcaggtcttttcagcagtctcatcatcagcaaccatgactgatgactgggccctagcaggtggcaggtataacatggccatggacactcttcttttttaaattttatgtctagcttctgagtctagatgaaagacagtatgtttcagagaacattggatatcagtttttcccacagcagggactgtgagagacaaccagcagcatcctctttgtaatcacagggcagggatcagagtttgaaatgaaatgttgtcagggtgttggaaaaattttggtgagttctgcacatttcccctggttcaggctgggcatggaccagccttcagatggcagaagtggaagatgagcctacttgtgagcgatgtgactttaaggaaatgaagactggggaagaataattagtgtttataagacatttaagaggccctttttcatatactgactcactgatgaatcagcatttgcattttatggaaaaatataaatccaaagaaataatttatccctt

SEQ ID NO: 21668 - DNA, 1605 bp, Homo sapiens
cactcccgcgagcacgtgcgcgtcctcgctgctcacatttcggcggagggcgcgctccctggaaaattccactcctgtgctagctccaccctatgcggcttttctcctacccgacgctcttcactctcagctcccttcccggcggcctttgcgggaacaagatggcagcccccatacctcaagggttctcttgtttatcgaggtttttgggctggtggtttcggcagccagttctggtgactcagtccgcagctatagttccagtaagaactaaaaaacgtttcacacctcctatttatcaacctaaatttaaaacagaaaaggagtttatgcaacatgcccggaaagcaggattggttattcctccagaaaaatcggaccgttccatacatctggcctgtacagctggtatatttgatgcctatgttcctcctgagggtgatgcacgcatatcatctctttcaaaggagggactgatagagagaactgaacgaatgaagaagactatggcatcacaagtgtcctcagaccatgaccgacttcataccttggtaactgaacactgttttccagacatgacttgggacatcaaatataagaccgtccgctggagctttgtggaatctttagagccctctcatgttgttcaagttcgctgttcaagtatgatgaaccagggcaacgtgtacggccagatcaccgtacgcatgcacacccggcagactctggccatctatgaccggtttggccggttgatgtatggacaggaagatgtacccaaggatgtcctggagtatgttgtattcgaaaagcagttgacaaacccctatggaagctggagaatgcataccaagatcgttcccccatgggcaccccctaagcagcccatccttaagacggtgatgatccctggccctcagctgaaaccagaagaagaatatgaagaggcacaaggagaggcccagaagcctcagctagcctgatgacaaaaatgacttctagggtgaagcctgggtgatgaggctgctggaagctttgaagtctcccattcccctcatgctataaaaagaactacctttgttctctcccatcctgctcaggtcttttcagcagtctcatcatcagcaaccatgactgatgactgggccctagcaggtggcaggtataacatggccatggacactcttcttttttaaattttatgtctagcttctgagtctagatgaaagacagtatgtttcagagaacattggatatcagtttttcccacagcagggactgtgagagacaaccagcagcatcctctttgtaatcacagggcagggatcagagtttgaaatgaaatgttgtcagggtgttggaaaaattttggtgagttctgcacatttcccctggttcaggctgggcatggaccagccttcagatggcagaagtggaagatgagcctacttgtgagcgatgtgactttaaggaaatgaagactggggaagaataattagtgtttataagacatttaagaggccctttttcatatactgactcactgatgaatcagcatttgcattttatggaaaaatataaatccaaagaaataatttatccctt

SEQ ID NO: 21669 - DNA, 1313 bp, Homo sapiens
agcggatgaggtttttgggctggtggtttcggcagccagttctggtgactcagtccgcagctatagttccagtaagaactaaaaaacgtttcacacctcctatttatcaacctaaatttaaaacagaaaaggagtttatgcaacatgcccggaaagcaggattggttattcctccagaaaaatcggaccgttccatacatctggcctgtacagctggtatatttgatgcctatgttcctcctgagggtgatgcacgcatatcatctctttcaaaggagggactgatagagagaactgaacgaatgaagaagactatggcatcacaagtgtcaatccggaggataaaagactatgatgccaactttaaaataaaggacttccctgaaaaagctaaggatatctttattgaagctcacctttgtctaaataaactctggccatctatgaccggtttggccggttgatgtatggacaggaagatgtacccaaggatgtcctggagtatgttgtattcgaaaagcagttgacaaacccctatggaagctggagaatgcataccaagatcgttcccccatgggcaccccctaagcagcccatccttaagacggtgatgatccctggccctcagctgaaaccagaagaagaatatgaagaggcacaaggagaggcccagaagcctcagctagcctgatgacaaaaatgacttctagggtgaagcctgggtgatgaggctgctggaagctttgaagtctcccattcccctcatgctataaaaagaactacctttgttctctcccatcctgctcaggtcttttcagcagtctcatcatcagcaaccatgactgatgactgggccctagcaggtggcaggtataacatggccatggacactcttcttttttaaattttatgtctagcttctgagtctagatgaaagacagtatgtttcagagaacattggatatcagtttttcccacagcagggactgtgagagacaaccagcagcatcctctttgtaatcacagggcagggatcagagtttgaaatgaaatgttgtcagggtgttggaaaaattttggtgagttctgcacatttcccctggttcaggctgggcatggaccagccttcagatggcagaagtggaagatgagcctacttgtgagcgatgtgactttaaggaaatgaagactggggaagaataattagtgtttataagacatttaagaggccctttttcatatactgactcactgatgaatcagcatttgcattttatggaaaaatataaatccaaagaaataatttatccctt

SEQ ID NO: 21670 - DNA, 601 bp, Homo sapiens
agctagagcccaggaggtcaaggctgcagtgaaccgtgatcgtgccatcgcactccaggctagcgatctgcctcaaaaaataataaagaatagtattctgcccatttcagtattgagttggtgtttccccatcaccatcagtttttgaaacttgctttgatcaactcagtatccgtaggagttagcatagtcctgtactgtgggaagttctaaaggaaagcctttagtaaatgtgatgttaataaaggttgctaactgtcttctatttagagacacccataagtattaaggtcctaatgcattttttccctgtgatattgttttataattgttcctgaagcattctttggatattccctctctatagtgctttgcttagagtttgtaaaagatagtagatcttttttctaggttcctaacctttcctttaccttccagccagttctggtgactcagtccgcagctatagttccagtaagaactaaaaaacgtttcacacctcctatttatcaacctaaatttaaaacagaaaaggagtttatgcaacatgcccggaaagcaggattggttattcctccagaaaaatcggaccgttccatac

SEQ ID NO: 21671 - DNA, 444 bp, Homo sapiens
gacataggcatgggcgaaaacttcatgactaaaacaccaaaagcaatggcaacaaaagccatgatgtccacaaatgatcttaacttaggtttttagaaaatttcctcatcaccgtctagtttcctaaggatgcaatactatcttgaaagacgactattggccgggcgcggtggctcatgcctgttatcccagcactttgggaggccgaggtgggtggatcatgaggtcaggagatcgagacctacctggctaacatggtgaaaccccgtctctactaaaaatacaaaaaattagccaagcgtggtgccaggcacgtgtagtcccagatacttgggaggctgaagcaagagaatggcgtgaacccaggaggtggagcttgcagtgagcctagattgcgccactgcactccagcctgggcgacagagtgagactcagtctcaaaaa

SEQ ID NO: 21672 - DNA, 275 bp, Homo sapiens
aacattccagttagtaaagaactattgaacataggcaaggcagatacagagaaaagggaacagacacacgagacatttaaactgacccacaaacacagcactaccaatttgtgagtgcttgatgcgggccaggcaccatattatgtaatttgcatacattatttcattaatcctttcagcttcctttgaagtaggaacttacatcagatattgtctatgggtacttgagtccacacctgactttctatctgtaatcttccctgtattgcccaggt

SEQ ID NO: 21673 - DNA, 430 bp, Homo sapiens
ccaggcaggcaggagacagcatgcatgcagccagcgcttagcgatgtcccttactggtgccagggctgtcaccaggctaatgctctagggcaagattttacatctagaactaagatgaacaagacctggtgtggggtgtgtgaggccccagagcgatgcccttgacaggtcacccagcctggagctcaggagaagctatgtccagctgtcacacatgatgcttgctgcctgcagcaggggactgcaggaggggacactggctgctgagactggggcccaggcaggagctgctcagctccctcctgtttttggggaacaattccctaagcttggaagcaagagaaaaccaatctcaaaggaaaagactgacagatttcagcatgtacaaactggaaatttgccagacacgaaaagacctaatggtggttta

SEQ ID NO: 21674 - DNA, 385 bp, Homo sapiens
atatctgtgttctaactataactttttaattctaccaataagttacatgtgctttcccccacttttcttcaacctaaattatataaccagtaatgatatatcaacatgaacaagatagtgaatatttaaagcagactgacatgtttttgtgtagtcaccatgtgccataataattttgaaactgttcttctccgctatttgtactcgtttctttttatcttgccgattgactttatagttaaaatttttacctcttctttctatgtgacaatcaactgcagttagtaccctatctgtaatattacagggatttttgtccttatttatgatactataataaattataagccaacaaactgtataattctgttgtattgaatatttt

SEQ ID NO: 21675 - DNA, 121 bp, Homo sapiens
catttgttttgcttgtgaatcttttatgaaaaaaagtgtctggagattaaaggattagtgagttcttaagaagctgggcagctgctaaagcatctgaatattcttcctaaagatggttgaa

SEQ ID NO: 21676 - DNA, 362 bp, Homo sapiens
cctttgagttccaaattgtagactgaacaccttgttcaaggttgagaatcttatttcagttcttagaagagatttctaggaatgccagaaatactttactcttattctgtggttgtcaggtccattactttcagatcaagatctcatctcttggaatactgtgtaccgcagaaacagtatcgcattgctcagtctggcacactttaggtttggctctcccactccctggccccttccctgatgtgatgccctttgaatgggctcctcagaggcatgtgctttggtgccacaataaggtaaccaggactgtttattaagcttatgcattttttcaagtgcaggcagccccccactaataagtt

SEQ ID NO: 21677 - DNA, 493 bp, Homo sapiens
gcaggaaatccaggtgcaaatcccaccctataagtcttagttttcccatttgtaaagtgaagataaaaaacactttgtgcattaggttgctttggagattgaattagctaaatgcttagtataatcccaaggcatggaacatacttatgtgctcaataagtgacacatatgattcatatatatgtaacagtatctaatttaaaaacataataggccgggcgtggtggcttacgcctgtaatcccagcactttgggagaccgaggcgggtggatcacaaaatcaggagcttgagaccaacctggccaacatgatgaaaccccgtctctactaaaaatacaaaaattagctggacatggtggcgggtgcctgtaatcccagctactcgggaggctgcggcaggagaatcgcttgaacccgggaggcagaggttgcagtgagccgagattgtgccactgcactccactgtgggtgacagagtgagactccgtctca

SEQ ID NO: 21678 - DNA, 353 bp, Homo sapiens
tttatagcagcatgagaatggactaatacagttttcagcaaaggcaagaccagcctcatcagaggagtaaacaggctgcttctgtaggcatgggacattcagtagatttcgggagcacaggataccatttttatagccctactctttttcagtcgctgccctaacttccacaatcagagatcaagtaaaatcattaattctactttggtcataattcagcattctactgaatcagattctgcttctaatttttgatgtgttagacttgtggctttacgggattttttagggcaatcatggaaaatccctggttttctgaagtgctgagttaaaaatttgaaatcttgggccta

SEQ ID NO: 21679 - DNA, 691 bp, Homo sapiens
cacgcccttaaccccaacactttgggaggtgaggcgggaggatcgcttgaggccaggagtttgggaccagcctgggcaacagagagagaccccatctctacaaataaacagatagctgggtgcaatggcacatgcctatagttccagctactgagaagaccaaagtgggagtatcgcttgagcccaggagtttgaaggtgcagtgagttatgatcacaccactgcactgttgccttggcaacagagcaagaccctatctctaaaaaaacaaagacaaaacaattgtactaactgttgatgacaggtgtactttcttccagatgcctctacgcctataattacctatggctacgtgaacactcttcccctgcagtctgatcgttttttgttggttaaaagtataattgccggctgggtgcggtggctcacgcctgtaatcccagcacttcgggaggctgagacgggtggatcacctgaggtcaggagtttgagaccagcctggccaacatgatgaaaccttgtctgtactaaaaatacaaaaattagccaggtgtggtggcgcatgcctgtagtcccagctactcgggaggctgaggcaggagaattgcttgaacccgggaggcagaggttgcagtgagccaagatcacgccactgcactccagcctgggcgacagagtgagactccatctc

SEQ ID NO: 21680 - DNA, 360 bp, Homo sapiens
tcatttcccattccccccagccccatccccatcccctggcaaccactaatctattttctattatctattgatttgtctattctgtatatttcatagaagtggcattatataacatgtggcctttgtatctggcttctttgacttaatatgatgttccatccatgttgtagcatgtatgtagagacagggtctcactctgtcacccaggttggagtgcagtggtgtgatcataattcactgcagcctcaaactcccatgctcaagcggctctcttgcttcagctgccagagtagctggaattacaggtgcatgccaccatgcccagctaattttttaaatgttttgtagagttggggtctc

SEQ ID NO: 21681 - DNA, 357 bp, Homo sapiens
ttctttttttttcttttttaataaaaaaagaattgttcttttaatttctttaacgctaacaaaactccaaagaaatgaggaaagaagacatctgctgcttgagaaagacttccatttcctaagtcccagttcctttttactccgggaagatctaattttatctaggcttcccgaatgcagtcacacagtggggactgctgagattggggctctggcagggggattacaagcagagcttttgttttgatctcactgcttaggttaatgcatcatgactcctccacgggctgtttcgcgggacgctgctatcccactgtctgctagggaagaaaatgtctcgtgaaaataaatcaaatg

SEQ ID NO: 21682 - DNA, 211 bp, Homo sapiens
ggaggtgcagacacaccttctgcaaaggcttgtagttaaataaggcagcacgtggaatggacagactggagacagtccttacctcatgtggaacctaggacaggtaaggccctgtcctccaccccagagctcactttgtctgagagcagctgaccagcagtggaagacatttgctcagcgatatattagttatggctgcaaaagcccaaga

SEQ ID NO: 21683 - DNA, 2377 bp, Homo sapiens
  misc_feature (939)..(939): n is a, c, g, or t
cttttctcttgttgagtgcaaatggagaacagctgctcacgctcgtcgtctgacatcagctatttctcaggatgaccctgcgagacaggccagggtcattagacccaatttggttctcagcaaatatgtgtttattcctgcatgcgtgggccacaggctggtttcttgggtgcaatgaatagctgcaggtttattagggtgtctttttagatggatgtatgtttcccgatgtctatagaacactccggaccccggagagtgaagactctgcctgtcggacttgctttgagaagatccttctccacctccccatggcagaagttgcttcacagaggggaacagttttatggatgtggctgagaccttaaacttgaggcaacccatctgaggtggcatccagaggagactggctggcccctccttcaccttggatgtagtgctgtttctaggatctcttttcaatcagcaaaacaggggatgttccaagagggtgtggattccctgccatcccacatggtcaagtggaggggacgggaaaaagctatgaagggtttgtgaccacacagactctcctggccccctgtccttttggaaagaagacagggatgaaatataatcaagcaattaaccacccccatcatcaccaagaacaacagtatcaacaagaagaacagggacaacaaaacccacggatgaaacattcctttctcagctcagatcttatctggtgcgttctctctctgctctgtcttggtgtgtggtttagagaaacatggacaacgctgtttggaagaacaggtgagcgagggtggggaatttcagaggcctgggcccaccgcctccaccccttccccagtttaacctttgacaggatcttcacctctctctgatcagcattgcttcttgttcaaaggcctcagccacccagctgtgtccctntccccagaaagcaagggcagatggcagtgggtctgttgatgagagaactttaagggcccaatcagtccctgggcaccccctcctgggctcgttttctccaggaggctgcattctgatccataaaccttctcctcggggtttagggtcgagctgttcctgatgtttatcggagactgggatcaaagctatccaggtcataaatctctctctgtggctgttgggccccagggcagctgaagagggttgacagccctttggacctcaaaggaaaaaatgtgctctactccacccactcccagctctgccaagaagctgtcctctgagaagccatggctgggccgttccattctggggagctgctgaaaagagctgggaggccgagaagaacttgcgtgtgctgggggagaggaagcctggccttgagggaggggtgcaggtgtggctcctctgtgtgtgggggctgggggaccttgtgtgccttttccttgtggctgtgaaatgctttatgagtacttccataggaggatggacagggagtcggggagataaactcagccacaaggccccagggcctcaggaaacttgcacccaaccctctcattttacagaagaaaactgtgcctggaaggttgaagggtttgttcccagtcacacaaccagggatccttaggacagccagaccaggaaaccatttccaaactgccaagccatggcagagtatcaagacctcaggaaccatcgagacaccatggaagcattgggaaaagcctccttagcttttgaagctcctcattgttcttgagtgtgcatggagcccatgactgcggggttttgtagacacctcagggattacatgactggtacccctgacaaagtcaaggctgctggacaaaatgagtccgaggatttcaggggcagctgggcgcaggagctggtgggctgttgggagtgcccctttactgggcaggcttccttcctcctggtgatggggggttcctcagcacaaaagtgaaggggtggaggggctggaggagcaggaatctctcttgttgataggtatgaggccttgaagtccttttctttgtcccaggattcatggacgcttcggggctgatctttgagttttcaagcatggggtgcagagacgtttaggtaaactcttaccgtcctctctcttcgtcagggcttcccaggaatcaacaatgcccaagaaggaagggattgtagaaatagcttaaccctttcatttaccaacgtggaaattgaagcccagggaagggaagggaccggtcgtggaagggagagccatcagcagaaagagaccctgagatcttcgcctgggattcccaggaagtccagcccgagctgattcacagaataaatgcatgcaaaccttgctatcaataaattacacatgcacttacgtaaaacacataaa

SEQ ID NO: 21684 - DNA, 1053 bp, Homo sapiens
cttttctcttgttgagtgcaaatggagaacagctgctcacgctcgtcgtctgacatcagctatttctcaggatgaccctgcgagacaggccagggtcattagacccaatttggttctcagcaaatatgtgtttattcctgcatgcgtgggccacaggctggtttcttgggtgcaatgaatagctgcaggtttattagggtgtctttttagatggatgtatgtttcccgatgtctatagaacactccggaccccggagagtgaagactctgcctgtcggacttgctttgagaagatccttctccacctccccatggcagaagttgcttcacagaggggaacagttttatggatgtggctgagaccttaaacttgaggcaacccatctgaggtggcatccagaggagactggctggcccctccttcaccttggatgtagtgctgtttctaggatctcttttcaatcagcaaaacaggggatgttccaagagggtgtggattccctgccatcccacatggtcaagtggaggggacgggaaaaagctatgaagggtttgtgaccacacagactctcctggccccctgtccttttggaaagaagacagggatgaaatataatcaagcaattaaccacccccatcatcaccaagaacaacagtatcaacaagaagaacagggacaacaaaacccacggatgaaacattcctttctcagctcagatcttatctggtgcgttctctctctgctctgtcttggtgtgtggtttagagaaacatggacaacgctgtttggaagaacagggcttcccaggaatcaacaatgcccaagaaggaagggattgtagaaatagcttaaccctttcatttaccaacgtggaaattgaagcccagggaagggaagggaccggtcgtggaagggagagccatcagcagaaagagaccctgagatcttcgcctgggattcccaggaagtccagcccgagctgattcacagaataaatgcatgcaaaccttgctatcaataaattacacatgcacttacgtaaaacacataaa

SEQ ID NO: 21685 - DNA, 1904 bp, Homo sapiens
  misc_feature (939)..(939): n is a, c, g, or t
cttttctcttgttgagtgcaaatggagaacagctgctcacgctcgtcgtctgacatcagctatttctcaggatgaccctgcgagacaggccagggtcattagacccaatttggttctcagcaaatatgtgtttattcctgcatgcgtgggccacaggctggtttcttgggtgcaatgaatagctgcaggtttattagggtgtctttttagatggatgtatgtttcccgatgtctatagaacactccggaccccggagagtgaagactctgcctgtcggacttgctttgagaagatccttctccacctccccatggcagaagttgcttcacagaggggaacagttttatggatgtggctgagaccttaaacttgaggcaacccatctgaggtggcatccagaggagactggctggcccctccttcaccttggatgtagtgctgtttctaggatctcttttcaatcagcaaaacaggggatgttccaagagggtgtggattccctgccatcccacatggtcaagtggaggggacgggaaaaagctatgaagggtttgtgaccacacagactctcctggccccctgtccttttggaaagaagacagggatgaaatataatcaagcaattaaccacccccatcatcaccaagaacaacagtatcaacaagaagaacagggacaacaaaacccacggatgaaacattcctttctcagctcagatcttatctggtgcgttctctctctgctctgtcttggtgtgtggtttagagaaacatggacaacgctgtttggaagaacaggtgagcgagggtggggaatttcagaggcctgggcccaccgcctccaccccttccccagtttaacctttgacaggatcttcacctctctctgatcagcattgcttcttgttcaaaggcctcagccacccagctgtgtccctntccccagaaagcaagggcagatggcagtgggtctgttgatgagagaactttaagggcccaatcagtccctgggcaccccctcctgggctcgttttctccaggaggctgcattctgatccataaaccttctcctcggggtttagggtcgagctgttcctgatgtttatcggagactgggatcaaagctatccaggtcataaatctctctctgtggctgttgggccccagggcagctgaagagggttgacagccctttggacctcaaaggaaaaaatgtgctctactccacccactcccagctctgccaagaagctgtcctctgagaagccatggctgggccgttccattctggggagctgctgaaaagagctgggaggccgagaagaacttgcgtgtgctgggggagaggaagcctggccttgagggaggggtgcaggtgtggctcctctgtgtgtgggggctgggggaccttgtgtgccttttccttgtggctgtgaaatgctttatgagtacttccataggaggatggacagggagtcggggagataaactcagccacaaggccccagggcctcaggaaacttgcacccaaccctctcattttacagaagaaaactgtgcctggaaggttgaagggtttgttcccagtcacacaaccagggatccttaggacagccagaccaggaaaccatttccaaactgccaagccatggcagagtatcaagacctcaggaaccatcgagacaccatggaagcattgggaaaagcctccttagcttttgaagctcctcattgttcttgagtgtgcatggaccggtcgtggaagggagagccatcagcagaaagagaccctgagatcttcgcctgggattcccaggaagtccagcccgagctgattcacagaataaatgcatgcaaaccttgctatcaataaattacacatgcacttacgtaaaacacataaa

SEQ ID NO: 21686 - DNA, 1630 bp, Homo sapiens
  misc_feature (939)..(939): n is a, c, g, or t
cttttctcttgttgagtgcaaatggagaacagctgctcacgctcgtcgtctgacatcagctatttctcaggatgaccctgcgagacaggccagggtcattagacccaatttggttctcagcaaatatgtgtttattcctgcatgcgtgggccacaggctggtttcttgggtgcaatgaatagctgcaggtttattagggtgtctttttagatggatgtatgtttcccgatgtctatagaacactccggaccccggagagtgaagactctgcctgtcggacttgctttgagaagatccttctccacctccccatggcagaagttgcttcacagaggggaacagttttatggatgtggctgagaccttaaacttgaggcaacccatctgaggtggcatccagaggagactggctggcccctccttcaccttggatgtagtgctgtttctaggatctcttttcaatcagcaaaacaggggatgttccaagagggtgtggattccctgccatcccacatggtcaagtggaggggacgggaaaaagctatgaagggtttgtgaccacacagactctcctggccccctgtccttttggaaagaagacagggatgaaatataatcaagcaattaaccacccccatcatcaccaagaacaacagtatcaacaagaagaacagggacaacaaaacccacggatgaaacattcctttctcagctcagatcttatctggtgcgttctctctctgctctgtcttggtgtgtggtttagagaaacatggacaacgctgtttggaagaacaggtgagcgagggtggggaatttcagaggcctgggcccaccgcctccaccccttccccagtttaacctttgacaggatcttcacctctctctgatcagcattgcttcttgttcaaaggcctcagccacccagctgtgtccctntccccagaaagcaagggcagatggcagtgggtctgttgatgagagaactttaagggcccaatcagtccctgggcaccccctcctgggctcgttttctccaggaggctgcattctgatccataaaccttctcctcggggtttagggtcgagctgttcctgatgtttatcggagactgggatcaaagctatccaggtcataaatctctctctgtggctgttgggccccagggcagctgaagagggttgacagccctttggacctcaaaggaaaaaatgtgctctactccacccactcccagctctgccaagaagctgtcctctgagaagccatggctgggccgttccattctggggagctgctgaaaagagctgggaggccgagaagaacttgcgtgtgctgggggagaggaagcctggccttgagggaggggtgcagggcttcccaggaatcaacaatgcccaagaaggaagggattgtagaaatagcttaaccctttcatttaccaacgtggaaattgaagcccagggaagggaagggaccggtcgtggaagggagagccatcagcagaaagagaccctgagatcttcgcctgggattcccaggaagtccagcccgagctgattcacagaataaatgcatgcaaaccttgctatcaataaattacacatgcacttacgtaaaacacataaa

SEQ ID NO: 21687 - DNA, 673 bp, Homo sapiens
atgcgtgtgcatgtgtatgaagtgggctagggatttttaatcttagagcgaaagctataatcactgtgcctgtcataaggtgatggcatggctaggtttatagatagttgggtggttggtgtaaatgagtgaggcaggagtcgataataaatagtatggggataaggggtgtaggtgtgccttgtggtaaagaagtgggcaggcttccttcctcctggtgatggggggttcctcagcacaaaagtgaaggggtggaggggctggaggagcaggaatctctcttgttgataggtatgaggccttgaagtccttttctttgtcccaggattcatggacgcttcggggctgatctttgagttttcaagcatggggtgcagagacgtttaggtaaactcttaccgtcctctctcttcgtcagggcttcccaggaatcaacaatgcccaagaaggaagggattgtagaaatagcttaaccctttcatttaccaacgtggaaattgaagcccagggaagggaagggaccggtcgtggaagggagagccatcagcagaaagagaccctgagatcttcgcctgggattcccaggaagtccagcccgagctgattcacagaataaatgcatgcaaaccttgctatcaataaattacacatgcacttacgtaaaacacataaa

SEQ ID NO: 21688 - DNA, 724 bp, Homo sapiens
cttttctcttgttgagtgcaaatggagaacagctgctcacgctcgtcgtctgacatcagctatttctcaggatgaccctgcgagacaggccagggtcattagacccaatttggttctcagcaaatatgtgtttattcgctgcattctgatccataaaccttctcctcggggtttagggtcgagctgttcctgatgtttatcggagactgggatcaaagctatccaggtcataaatctctctctgtggctgttgggccccagggcagctgaagagggttgacagccctttggacctcaaaggaaaaaatgtgctctactccacccactcccagctctgccaagaagctgtcctctgagaagccatggctgggccgttccattctggggagctgctgaaaagagctgggaggccgagaagaacttgcgtgtgctgggggagaggaagcctggccttgagggaggggtgcagggcttcccaggaatcaacaatgcccaagaaggaagggattgtagaaatagcttaaccctttcatttaccaacgtggaaattgaagcccagggaagggaagggaccggtcgtggaagggagagccatcagcagaaagagaccctgagatcttcgcctgggattcccaggaagtccagcccgagctgattcacagaataaatgcatgcaaaccttgctatcaataaattacacatgcacttacgtaaaacacataaa

SEQ ID NO: 21689 - DNA, 353 bp, Homo sapiens
agttgcccttcccgtggtcaccacagcggcttcattgctgccagtgtgaatgttggtcctagcaagactggaaagttgagagtaattcacgtccttgtcgtgatccgaagaatgttgtccacatcaatccctaggcctttgcttcctggctggacatggtgtgtggttgggagtgtccgctaagcagcactcttttagagcagaaggcatgtgcctcaacgatttcatttccctccttgtaaactggaacagcagattgttgccaaatttagcaccttgaaatgggtaagcgttggttgtttagggtgtctcagctggaaaaaggccctccagtgtgggcggtagtgagcttt

SEQ ID NO: 21690 - DNA, 701 bp, Homo sapiens
gatcgagctcgtgtaccgggtgggagtacggaatcaacagaagcttctggtgcccaaagaatcttatgtgaaactcctgattggtccgaagggccacgtgatctcccagatagcacaggaggcaggccatgacctcatggacatcttcctctgcgatgttgacatccgcctctctgtgaagctcctcaagtgaccaccctctactgaccctcccagggcattccagctcaagctgctggcaggaactgaccagttctttccttggctggggaccctccaggcactggtgagagacatgaacactgactggccactagctggcctggccctgttgagtctgcacagtccctgcccagctgtgtcttctgttggaagaaggaacctgccttagctcagtttccaggtggttcttctgcctggcaccacagctacaaaggtgtagctaagaagatggcccattggtgggagcaatgtcaccctgcctccagctagctatgggcccagagtttctccctgagtcgctgttgctagcagggagatttctcttcctgccctcacttctttcaccttgaacttggataagaactcgtgtctcctgagtgaggtagcgcctcccatctgctccccaattcttgatctctcccaccccatccctctccccagtcttggatactaataaaatataagcattctggttctca

SEQ ID NO: 21691 - DNA, 1855 bp, Homo sapiens
cctggtcggttcccgcagtgccttgcggctgtaatggctgcccccagctggcgcggggctaggcttgttcaatcggtgttaagagtctggcaggtgggccctcatgtcgcgagggagcgggtgatccctttttcctcactcttaggcttccaacggaggtgcgtgtcctgcgtcgcggggtccgctttctctggtccccgcttggcctcggcttctcgcagtaatggccagggctctgccctggaccacttcctcggattctctcagcccgacagttcggtgactccttgcgtccccgcggtgtccatgaacagagatgagcaggatgtcctcttggtccatcaccctgatatgcctgagaattcccgggtcctacgagtggtcctcctgggagccccgaatgcagggaagtcaacactctccaaccagctactgggccgaaaggtgttccctgtttccaggaaggtgcatactactcgctgccaagctctgggggtcatcacagagaaggagacccaggtgattctacttgacacacctggcattatcagtcctggtaaacagaagaggcatcacctggagctctctttgttggaagatccatggaagagcatggaatctgctgatcttgttgtggttcttgtggatgtctcagacaagtggacacggaaccagctcagcccccagttgctcaggtgcttgaccaagtactcccagatccctagtgtcctggtcatgaacaaggtagattgtttgaagcagaagtcagttctcctggagctcacggcagccctcactgaaggtgtggtcaatggcaaaaagctcaagatgaggcaggccttccactcacaccctggcacccattgccccagcccagcagttaaggacccaaacacacaatctgtgggaaatcctcagaggattggctggccccacttcaaggagatcttcatgttgtcagccctaagccaggaggatgtgaaaacactaaagcaataccttctgacacaggcccagccagggccctgggagtaccacagtgcagtcctcactagccagacaccagaagagatctgtgccaacattatccgagagaagctcctagaacacctgccccaggaggtgccttacaatgtacagcagaagacagcagtgtgggaggaaggaccaggtggggagctggttatccaacagaagcttctggtgcccaaagaatcttatgtgaaactcctgattggtccgaagggccacgtgatctcccagatagcacaggaggcaggccatgacctcatggacatcttcctctgcgatgttgacatccgcctctctgtgaagctcctcaagtgaccaccctctactgaccctcccagggcattccagctcaagctgctggcaggaactgaccagttctttccttggctggggaccctccaggcactggtgagagacatgaacactgactggccactagctggcctggccctgttgagtctgcacagtccctgcccagctgtgtcttctgttggaagaaggaacctgccttagctcagtttccaggtggttcttctgcctggcaccacagctacaaaggtgtagctaagaagatggcccattggtgggagcaatgtcaccctgcctccagctagctatgggcccagagtttctccctgagtcgctgttgctagcagggagatttctcttcctgccctcacttctttcaccttgaacttggataagaactcgtgtctcctgagtgaggtagcgcctcccatctgctccccaattcttgatctctcccaccccatccctctccccagtcttggatactaataaaatataagcattctggttctca

SEQ ID NO: 21692 - DNA, 1872 bp, Homo sapiens
aggatccttaattttattaatcccccccccccccggcagttgcggctgtaatggctgcccccagctggcgcggggctaggcttgttcaatcggtgttaagagtctggcaggtgggccctcatgtcgcgagggagcgggtgatccctttttcctcactcttaggcttccaacggaggtgcgtgtcctgcgtcgcggggtccgctttctctggtccccgcttggcctcggcttctcgcagtaatggccagggctctgccctggaccacttcctcggattctctcagcccgacagttcggtgactccttgcgtccccgcggtgtccatgaacagagatgagcaggatgtcctcttggtccatcaccctgatatgcctgagaattcccgggtcctacgagtggtcctcctgggagccccgaatgcagggaagtcaacactctccaaccagctactgggccgaaaggtgttccctgtttccaggaaggtgcatactactcgctgccaagctctgggggtcatcacagagaaggagacccaggtgattctacttgacacacctggcattatcagtcctggtaaacagaagaggcatcacctggagctctctttgttggaagatccatggaagagcatggaatctgctgatcttgttgtggttcttgtggatgtctcagacaagtggacacggaaccagctcagcccccagttgctcaggtgcttgaccaagtactcccagatccctagtgtcctggtcatgaacaaggtagattgtttgaagcagaagtcagttctcctggagctcacggcagccctcactgaaggtgtggtcaatggcaaaaagctcaagatgaggcaggccttccactcacaccctggcacccattgccccagcccagcagttaaggacccaaacacacaatctgtgggaaatcctcagaggattggctggccccacttcaaggagatcttcatgttgtcagccctaagccaggaggatgtgaaaacactaaagcaataccttctgacacaggcccagccagggccctgggagtaccacagtgcagtcctcactagccagacaccagaagagatctgtgccaacattatccgagagaagctcctagaacacctgccccaggaggtgccttacaatgtacagcagaagacagcagtgtgggaggaaggaccaggtggggagctggttatccaacagaagcttctggtgcccaaagaatcttatgtgaaactcctgattggtccgaagggccacgtgatctcccagatagcacaggaggcaggccatgacctcatggacatcttcctctgcgatgttgacatccgcctctctgtgaagctcctcaagtgaccaccctctactgaccctcccagggcattccagctcaagctgctggcaggaactgaccagttctttccttggctggggaccctccaggcactggtgagagacatgaacactgactggccactagctggcctggccctgttgagtctgcacagtccctgcccagctgtgtcttctgttggaagaaggaacctgccttagctcagtttccaggtggttcttctgcctggcaccacagctacaaaggtgtagctaagaagatggcccattggtgggagcaatgtcaccctgcctccagctagctatgggcccagagtttctccctgagtcgctgttgctagcagggagatttctcttcctgccctcacttctttcaccttgaacttggataagaactcgtgtctcctgagtgaggtagcgcctcccatctgctccccaattcttgatctctcccaccccatccctctccccagtcttggatactaataaaatataagcattctggttctca

SEQ ID NO: 21693 - DNA, 1813 bp, Homo sapiens
cctggtcggttcccgcagtgccttgcggctgtaatggctgcccccagctggcgcggggctaggcttgttcaatcggtgttaagagtctggcaggtgggccctcatgtcgcgagggagcgggtgatccctttttcctcactcttaggcttccaacggaggtgcgtgtcctgcgtcgcggggtccgctttctctggtccccgcttggcctcggcttctcgcagtaatggccagggctctgccctggaccacttcctcggattctctcagcccgacagttcggtgactccttgcgtccccgcggtgtccatgaacagagatgagcaggatgtcctcttggtccatcaccctgatatgcctgagaattcccgggtcctacgagtggtcctcctgggagccccgaatgcagggaagtcaacactctccaaccagctactgggccgaaaggtgttccctgtttccaggaaggtgcatactactcgctgccaagctctgggggtcatcacagagaaggagacccaggtgattctacttgacacacctggcattatcagtcctggtaaacagaagaggcatcacctggagctctctttgttggaagatccatggaagagcatggaatctgctgatcttgttgtggttcttgtggatgtctcagacaagtggacacggaaccagctcagcccccagttgctcaggtgcttgaccaagtactcccagatccctagtgtcctggtcatgaacaaggtagattgtttgaagcagaagtcagttctcctggagctcacggcagccctcactgaaggtgtggtcaatggcaaaaagctcaagatgaggcaggccttccactcacaccctggcacccattgccccagcccagcagttaaggacccaaacacacaatctgtgggaaatcctcagaggattggctggccccacttcaaggagatcttcatgttgtcagccctaagccaggaggatgtgaaaacactaaagcacagtgcagtcctcactagccagacaccagaagagatctgtgccaacattatccgagagaagctcctagaacacctgccccaggaggtgccttacaatgtacagcagaagacagcagtgtgggaggaaggaccaggtggggagctggttatccaacagaagcttctggtgcccaaagaatcttatgtgaaactcctgattggtccgaagggccacgtgatctcccagatagcacaggaggcaggccatgacctcatggacatcttcctctgcgatgttgacatccgcctctctgtgaagctcctcaagtgaccaccctctactgaccctcccagggcattccagctcaagctgctggcaggaactgaccagttctttccttggctggggaccctccaggcactggtgagagacatgaacactgactggccactagctggcctggccctgttgagtctgcacagtccctgcccagctgtgtcttctgttggaagaaggaacctgccttagctcagtttccaggtggttcttctgcctggcaccacagctacaaaggtgtagctaagaagatggcccattggtgggagcaatgtcaccctgcctccagctagctatgggcccagagtttctccctgagtcgctgttgctagcagggagatttctcttcctgccctcacttctttcaccttgaacttggataagaactcgtgtctcctgagtgaggtagcgcctcccatctgctccccaattcttgatctctcccaccccatccctctccccagtcttggatactaataaaatataagcattctggttctca

SEQ ID NO: 21694 - DNA, 1817 bp, Homo sapiens
taggctagtacaggccggtggtaatcggccgagggagagagaactagtctggcaggtgggccctcatgtcgcgagggagcgggtgatccctttttcctcactcttaggcttccaacggaggtgcgtgtcctgcgtcgcggggtccgctttctctggtccccgcttggcctcggcttctcgcagtaatggccagggctctgccctggaccacttcctcggattctctcagcccgacagttcggtgactccttgcgtccccgcggtgtccatgaacagagatgagcaggatgtcctcttggtccatcaccctgatatgcctgagaattcccgggtcctacgagtggtcctcctgggagccccgaatgcagggaagtcaacactctccaaccagctactgggccgaaaggtgttccctgtttccaggaaggtgcatactactcgctgccaagctctgggggtcatcacagagaaggagacccaggtgattctacttgacacacctggcattatcagtcctggtaaacagaagaggcatcacctggagctctctttgttggaagatccatggaagagcatggaatctgctgatcttgttgtggttcttgtggatgtctcagacaagtggacacggaaccagctcagcccccagttgctcaggtgcttgaccaagtactcccagatccctagtgtcctggtcatgaacaaggtagattgtttgaagcagaagtcagttctcctggagctcacggcagccctcactgaaggtgtggtcaatggcaaaaagctcaagatgaggcaggccttccactcacaccctggcacccattgccccagcccagcagttaaggacccaaacacacaatctgtgggaaatcctcagaggattggctggccccacttcaaggagatcttcatgttgtcagccctaagccaggaggatgtgaaaacactaaagcaataccttctgacacaggcccagccagggccctgggagtaccacagtgcagtcctcactagccagacaccagaagagatctgtgccaacattatccgagagaagctcctagaacacctgccccaggaggtgccttacaatgtacagcagaagacagcagtgtgggaggaaggaccaggtggggagctggttatccaacagaagcttctggtgcccaaagaatcttatgtgaaactcctgattggtccgaagggccacgtgatctcccagatagcacaggaggcaggccatgacctcatggacatcttcctctgcgatgttgacatccgcctctctgtgaagctcctcaagtgaccaccctctactgaccctcccagggcattccagctcaagctgctggcaggaactgaccagttctttccttggctggggaccctccaggcactggtgagagacatgaacactgactggccactagctggcctggccctgttgagtctgcacagtccctgcccagctgtgtcttctgttggaagaaggaacctgccttagctcagtttccaggtggttcttctgcctggcaccacagctacaaaggtgtagctaagaagatggcccattggtgggagcaatgtcaccctgcctccagctagctatgggcccagagtttctccctgagtcgctgttgctagcagggagatttctcttcctgccctcacttctttcaccttgaacttggataagaactcgtgtctcctgagtgaggtagcgcctcccatctgctccccaattcttgatctctcccaccccatccctctccccagtcttggatactaataaaatataagcattctggttctca

SEQ ID NO: 21695 - DNA, 1961 bp, Homo sapiens
cctggtcggttcccgcagtgccttgcggctgtaatggctgcccccagctggcgcggggctaggcttgttcaatcggtgttaagagtctggcaggtgggccctcatgtcgcgagggagcgggtgatccctttttcctcactcttaggcttccaacggaggtgcgtgtcctgcgtcgcggggtccgctttctctggtccccgcttggcctcggcttctcgcagtaatggccagggctctgccctggaccacttcctcggattctctcagcccgacagttcggtgactccttgcgtccccgcggtgtccatgaacagagatgagcaggatgtcctcttggtccatcaccctgatatgcctgagaattcccgggtcctacgagtggtcctcctgggagccccgaatgcagggaagtcaacactctccaaccagctactgggccgaaaggtgttccctgtttccaggaaggtgcatactactcgctgccaagctctgggggtcatcacagagaaggagacccaggtgggtgggtacctacaaagggagtccttgaaacaggacagagggtgaagctaagagggtctcccttaccatcagccttgaagaaaatgatggtcacattcatttatgtattctacttgacacacctggcattatcagtcctggtaaacagaagaggcatcacctggagctctctttgttggaagatccatggaagagcatggaatctgctgatcttgttgtggttcttgtggatgtctcagacaagtggacacggaaccagctcagcccccagttgctcaggtgcttgaccaagtactcccagatccctagtgtcctggtcatgaacaaggtagattgtttgaagcagaagtcagttctcctggagctcacggcagccctcactgaaggtgtggtcaatggcaaaaagctcaagatgaggcaggccttccactcacaccctggcacccattgccccagcccagcagttaaggacccaaacacacaatctgtgggaaatcctcagaggattggctggccccacttcaaggagatcttcatgttgtcagccctaagccaggaggatgtgaaaacactaaagcaataccttctgacacaggcccagccagggccctgggagtaccacagtgcagtcctcactagccagacaccagaagagatctgtgccaacattatccgagagaagctcctagaacacctgccccaggaggtgccttacaatgtacagcagaagacagcagtgtgggaggaaggaccaggtggggagctggttatccaacagaagcttctggtgcccaaagaatcttatgtgaaactcctgattggtccgaagggccacgtgatctcccagatagcacaggaggcaggccatgacctcatggacatcttcctctgcgatgttgacatccgcctctctgtgaagctcctcaagtgaccaccctctactgaccctcccagggcattccagctcaagctgctggcaggaactgaccagttctttccttggctggggaccctccaggcactggtgagagacatgaacactgactggccactagctggcctggccctgttgagtctgcacagtccctgcccagctgtgtcttctgttggaagaaggaacctgccttagctcagtttccaggtggttcttctgcctggcaccacagctacaaaggtgtagctaagaagatggcccattggtgggagcaatgtcaccctgcctccagctagctatgggcccagagtttctccctgagtcgctgttgctagcagggagatttctcttcctgccctcacttctttcaccttgaacttggataagaactcgtgtctcctgagtgaggtagcgcctcccatctgctccccaattcttgatctctcccaccccatccctctccccagtcttggatactaataaaatataagcattctggttctca

SEQ ID NO: 21696 - DNA, 1398 bp, Homo sapiens
ggctgacctgaggacctcaaaagtgcctcttctatatctacatcacagagaaggagacccaggtgattctacttgacacacctggcattatcagtcctggtaaacagaagaggcatcacctggagctctctttgttggaagatccatggaagagcatggaatctgctgatcttgttgtggttcttgtggatgtctcagacaagtggacacggaaccagctcagcccccagttgctcaggtgcttgaccaagtactcccagatccctagtgtcctggtcatgaacaaggtagattgtttgaagcagaagtcagttctcctggagctcacggcagccctcactgaaggtgtggtcaatggcaaaaagctcaagatgaggcaggccttccactcacaccctggcacccattgccccagcccagcagttaaggacccaaacacacaatctgtgggaaatcctcagaggattggctggccccacttcaaggagatcttcatgttgtcagccctaagccaggaggatgtgaaaacactaaagcaataccttctgacacaggcccagccagggccctgggagtaccacagtgcagtcctcactagccagacaccagaagagatctgtgccaacattatccgagagaagctcctagaacacctgccccaggaggtgccttacaatgtacagcagaagacagcagtgtgggaggaaggaccaggtggggagctggttatccaacagaagcttctggtgcccaaagaatcttatgtgaaactcctgattggtccgaagggccacgtgatctcccagatagcacaggaggcaggccatgacctcatggacatcttcctctgcgatgttgacatccgcctctctgtgaagctcctcaagtgaccaccctctactgaccctcccagggcattccagctcaagctgctggcaggaactgaccagttctttccttggctggggaccctccaggcactggtgagagacatgaacactgactggccactagctggcctggccctgttgagtctgcacagtccctgcccagctgtgtcttctgttggaagaaggaacctgccttagctcagtttccaggtggttcttctgcctggcaccacagctacaaaggtgtagctaagaagatggcccattggtgggagcaatgtcaccctgcctccagctagctatgggcccagagtttctccctgagtcgctgttgctagcagggagatttctcttcctgccctcacttctttcaccttgaacttggataagaactcgtgtctcctgagtgaggtagcgcctcccatctgctccccaattcttgatctctcccaccccatccctctccccagtcttggatactaataaaatataagcattctggttctca

SEQ ID NO: 21697 - DNA, 1606 bp, Homo sapiens
cctggtcggttcccgcagtgccttgcggctgtaatggctgcccccagctggcgcggggctaggcttgttcaatcggtgttaagagtctggcaggtgggccctcatgtcgcgagggagcgggtgatccctttttcctcactcttaggcttccaacggaggtgcgtgtcctgcgtcgcggggtccgctttctctggtccccgcttggcctcggcttctcgcagtaatggccagggctctgccctggaccacttcctcggattctctcagcccgacagttcggtgactccttgcgtccccgcggtgtccatgaacagagatgagcaggatgtcctcttggtccatcaccctgatatgcctgagaattcccgggtcctacgagtggtcctcctgggagccccgaatgcagggaagtcaacactctccaaccagctactgggccgaaaggtgttccctgtttccaggaaggtgcatactactcgctgccaagctctgggggtcatcacagagaaggagacccaggtgattctacttgacacacctggcattatcagtcctggtaaacagaagaggcatcacctggagctctctttgttggaagatccatggaagagcatggaatctgctgatcttgttgtggttcttgtggatgtctcagacaagtggacacggaaccagctcagcccccagttgctcaggtgcttgaccaagtactcccagatccctagtgtcctggtcatgaacaagcaataccttctgacacaggcccagccagggccctgggagtaccacagtgcagtcctcactagccagacaccagaagagatctgtgccaacattatccgagagaagctcctagaacacctgccccaggaggtgccttacaatgtacagcagaagacagcagtgtgggaggaaggaccaggtggggagctggttatccaacagaagcttctggtgcccaaagaatcttatgtgaaactcctgattggtccgaagggccacgtgatctcccagatagcacaggaggcaggccatgacctcatggacatcttcctctgcgatgttgacatccgcctctctgtgaagctcctcaagtgaccaccctctactgaccctcccagggcattccagctcaagctgctggcaggaactgaccagttctttccttggctggggaccctccaggcactggtgagagacatgaacactgactggccactagctggcctggccctgttgagtctgcacagtccctgcccagctgtgtcttctgttggaagaaggaacctgccttagctcagtttccaggtggttcttctgcctggcaccacagctacaaaggtgtagctaagaagatggcccattggtgggagcaatgtcaccctgcctccagctagctatgggcccagagtttctccctgagtcgctgttgctagcagggagatttctcttcctgccctcacttctttcaccttgaacttggataagaactcgtgtctcctgagtgaggtagcgcctcccatctgctccccaattcttgatctctcccaccccatccctctccccagtcttggatactaataaaatataagcattctggttctca

SEQ ID NO: 21698 - DNA, 1871 bp, Homo sapiens
gcaggagttctctcggttgactactatcgctgtcatgtctggtcgtggcaagcaaggaggcaaggcccgcgccaaggccaagtcgcgctcgtcccgcgctggccttcagttcccggtagggcgagtgcatcgcttgctgcgctaatagcgcaactacgcggagcgagtgggggccggcgcgccctgtctacatggctgctggtcctcgagtatctgacctgtcgagatcctggagctggcgggctaactgctggctcgggacaacaagaagacgcgcatcatccctcgtcagctccagctggccatccgcaacgacgaggaactgaacaagctgctgggcaatagtcagccatctgcccaggggtcggcgtctttgcctacacatccaggccgtactgctccctaaagaacgaccggagatgtcaccacaatggcaagagggcaagtgaggctgacgtccggcccaagtgggcccagcccggcccgcgtctcgcaaggggcacctgtgaactcaagaaggctcttttcagtagccacccacgttttcgaattaaagagttgttaatgctggcaaaggcatcacctggaagctacatacataaagtaggcaagatccatggaacgagcatggaatctgctgaatctagttgtggttcttgtggatgtctcagacaagtggacacggaaccagctcagcccccagttgctcaggtgcttgaccaagtactcccagatccctagtgtcctggtcatgaacaaggtagattgtttgaagcagaagtcagttctcctggagctcacggcagccctcactgaaggtgtggtcaatggcaaaaagctcaagatgaggcaggccttccactcacaccctggcacccattgccccagcccagcagttaaggacccaaacacacaatctgtgggaaatcctcagaggattggctggccccacttcaaggagatcttcatgttgtcagccctaagccaggaggatgtgaaaacactaaagcaataccttctgacacaggcccagccagggccctgggagtaccacagtgcagtcctcactagccagacaccagaagagatctgtgccaacattatccgagagaagctcctagaacacctgccccaggaggtgccttacaatgtacagcagaagacagcagtgtgggaggaaggaccaggtggggagctggttatccaacagaagcttctggtgcccaaagaatcttatgtgaaactcctgattggtccgaagggccacgtgatctcccagatagcacaggaggcaggccatgacctcatggacatcttcctctgcgatgttgacatccgcctctctgtgaagctcctcaagtgaccaccctctactgaccctcccagggcattccagctcaagctgctggcaggaactgaccagttctttccttggctggggaccctccaggcactggtgagagacatgaacactgactggccactagctggcctggccctgttgagtctgcacagtccctgcccagctgtgtcttctgttggaagaaggaacctgccttagctcagtttccaggtggttcttctgcctggcaccacagctacaaaggtgtagctaagaagatggcccattggtgggagcaatgtcaccctgcctccagctagctatgggcccagagtttctccctgagtcgctgttgctagcagggagatttctcttcctgccctcacttctttcaccttgaacttggataagaactcgtgtctcctgagtgaggtagcgcctcccatctgctccccaattcttgatctctcccaccccatccctctccccagtcttggatactaataaaatataagcattctggttctca

SEQ ID NO: 21699 - DNA, 1035 bp, Homo sapiens
cctggtcggttcccgcagtgccttgcggctgtaatggctgcccccagctggcgcggggctaggcttgttcaatcggtgttaagagtctggcaggtgggccctcatgtcgcgagggagcgggtgatccctttttcctcactcttaggcttccaacggaggtgcgtgtcctgcgtcgcggggtccgctttctctggtccccgcttggcctcggcttctcgcagtaatggccagggctctgccctggaccacttcctcggattctctcagcccgacagttcggtgactccttgcgtccccgcggtgtccatgaacagagatgagcaggatgtcctcttggtccatcaccctgatatgcctgagaattcccgggtcctacgagtggtcctcctgggagccccgaatgcagggaagtcaacactctccaaccagctactgggccgaaaggtgttccctgtttccaggaaggtgcatactactcgctgccaagctctgggggtcatcacagagaaggagacccaggtgattctacttgacacacctggcattatcagtcctggtaaacagaagaggcatcacctggagctctctttgttggaagatccatggaagagcatggaatctgctgatcttgttgtggttcttgtggatgtctcagacaagtggacacggaaccagctcagcccccagttgctcaggtgcttgaccaagtactcccagatccctagtgtcctggtcatgaacaaggtagattgtttgaagcagaagtcagttctcctggagctcacggcagccctcactgaaggtgtggtcaatggcaaaaagctcaagatgaggcaggccttccactcacacctgggccatgcccaccagagtaggcccaaccaactggggaacccaagatggggcccctcagggaatccgtgtgggctagcggggggtaccaagaacttgaggcccgggcgggaaccagggtctcgcgccaatggttcagcgaaccgggaatgaacaggggagggcggccctgaggacacacct

SEQ ID NO: 21700 - DNA, 1106 bp, Homo sapiens
tgctggggggagaaacctgacaatatgacagagcacccactgcccaagactcagccatagaagatgccgccccaccttctacttgggtagctgggctgggacgctgggacaggaccccgtcctccttcatgactcccactgctgcctctcctgggcatggctgttagctgttctgccttctgggtgagctggcactcttctccctgagaccaaagatttgacctgtcggtcttgatgtcaaggtccccaaagaccaggttaagtgacgacacctgtctgttcctgccctgttgcttccagccactgtgatgtttgaaatatgtgatagtacctggttgtgaaaaaaagacaatgaactgctagtgacattcctcaatgacctctcccaaaccccaagacagcagtgtgggaggaaggaccaggtggggagctggttatccaacagaagcttctggtgcccaaagaatcttatgtgaaactcctgattggtccgaagggccacgtgatctcccagatagcacaggaggcaggccatgacctcatggacatcttcctctgcgatgttgacatccgcctctctgtgaagctcctcaagtgaccaccctctactgaccctcccagggcattccagctcaagctgctggcaggaactgaccagttctttccttggctggggaccctccaggcactggtgagagacatgaacactgactggccactagctggcctggccctgttgagtctgcacagtccctgcccagctgtgtcttctgttggaagaaggaacctgccttagctcagtttccaggtggttcttctgcctggcaccacagctacaaaggtgtagctaagaagatggcccattggtgggagcaatgtcaccctgcctccagctagctatgggcccagagtttctccctgagtcgctgttgctagcagggagatttctcttcctgccctcacttctttcaccttgaacttggataagaactcgtgtctcctgagtgaggtagcgcctcccatctgctccccaattcttgatctctcccaccccatccctctccccagtcttggatactaataaaatataagcattctggttctca

SEQ ID NO: 21701 - DNA, 654 bp, Homo sapiens
cctggtcggttcccgcagtgccttgcggctgtaatggctgcccccagctggcgcggggctaggcttgttcaatcggtgttaagagtctggcaggtgggccctcatgtcgcgagggagcgggtgatccctttttcctcactcttaggcttccaacggaggtgcgtgtcctgcgtcgcggggtccgctttctctggtccccgcttggcctcggcttctcgcagtaatggccagggctctgccctggaccacttcctcggattctctcagcccgacagttcggtgactccttgcgtccccgcggtgtccatgaacagagatgagcaggatgtcctcttggtccatcaccctgatatgcctgagaattcccgggtcctacgagtggtcctcctgggagccccgaatgcagggaagtcaacactctccaaccagctactgggccgaaaggtgttccctgtttccaggaaggtgcatactactcgctgccaagctctgggggtcatcacagagaaggagacccaggtgggtgggtacctacaaagggagtccttgaaacaggacagagggtgaagctaagagggtctcccttaccatcagccttgaagaaaatgatggtcacattcatttatgtagagggaatcgtgagagaggaaggat

SEQ ID NO: 21702 - DNA, 1884 bp, Homo sapiens
taaaaggcatagtgatacgagggccccgagcgcgtgttttaaatcggccgattgcggctgtaatggctgcccccagctggcgcggggctaggcttgttcaatcggtgttaagagtctggcaggtgggccctcatgtcgcgagggagcgggtgatccctttttcctcactcttaggcttccaacggaggtgcgtgtcctgcgtcgcggggtccgctttctctggtccccgcttggcctcggcttctcgcagtaatggccagggctctgccctggaccacttcctcggattctctcagcccgacagttcggtgactccttgcgtccccgcggtgtccatgaacagagatgagcaggatgtcctcttggtccatcaccctgatatgcctgagaattcccgggtcctacgagtggtcctcctgggagccccgaatgcagggaagtcaacactctccaaccagctactgggccgaaaggtgttccctgtttccaggaaggtgcatactactcgctgccaagctctgggggtcatcacagagaaggagacccaggtgattctacttgacacacctggcattatcagtcctggtaaacagaagaggcatcacctggagctctctttgttggaagatccatggaagagcatggaatctgctgatcttgttgtggttcttgtggatgtctcagacaagtggacacggaaccagctcagcccccagttgctcaggtgcttgaccaagtactcccagatccctagtgtcctggtcatgaacaaggtagattgtttgaagcagaagtcagttctcctggagctcacggcagccctcactgaaggtgtggtcaatggcaaaaagctcaagatgaggcaggccttccactcacaccctggcacccattgccccagcccagcagttaaggacccaaacacacaatctgtgggaaatcctcagaggattggctggccccacttcaaggagatcttcatgttgtcagccctaagccaggaggatgtgaaaacactaaagcaataccttctgacacaggcccagccagggccctgggagtaccacagtgcagtcctcactagccagacaccagaagagatctgtgccaacattatccgagagaagctcctagaacacctgccccaggaggtgccttacaatgtacagcagaagacagcagtgtgggaggaaggaccaggtggggagctggttatccaacagaagcttctggtgcccaaagaatcttatgtgaaactcctgattggtccgaagggccacgtgatctcccagatagcacaggaggcaggccatgacctcatggacatcttcctctgcgatgttgacatccgcctctctgtgaagctcctcaagtgaccaccctctactgaccctcccagggcattccagctcaagctgctggcaggaactgaccagttctttccttggctggggaccctccaggcactggtgagagacatgaacactgactggccactagctggcctggccctgttgagtctgcacagtccctgcccagctgtgtcttctgttggaagaaggaacctgccttagctcagtttccaggtggttcttctgcctggcaccacagctacaaaggtgtagctaagaagatggcccattggtgggagcaatgtcaccctgcctccagctagctatgggcccagagtttctccctgagtcgctgttgctagcagggagatttctcttcctgccctcacttctttcaccttgaacttggataagaactcgtgtctcctgagtgaggtagcgcctcccatctgctccccaattcttgatctctcccaccccatccctctccccagtcttggatactaataaaatataagcattctggttctca

SEQ ID NO: 21703 - DNA, 1996 bp, Homo sapiens
cctggtcggttcccgcagtgccttgcggctgtaatggctgcccccagctggcgcggggctaggcttgttcaatcggtgttaagagtctggcaggtgggccctcatgtcgcgagggagcgggtgatccctttttcctcactcttaggcttccaacggaggtgcgtgtcctgcgtcgcggggtccgctttctctggtccccgcttggcctcggcttctcgcagtaatggccagggctctgccctggaccacttcctcggattctctcagcccgacagttcggtgactccttgcgtccccgcggtgtccatgaacagagatgagcaggatgtcctcttggtccatcaccctgatatgcctgagaattcccgggtcctacgagtggtcctcctgggagccccgaatgcagggaagtcaacactctccaaccagctactgggccgaaaggtgttccctgtttccaggaaggtgcatactactcgctgccaagctctgggggtcatcacagagaaggagacccaggtgattctacttgacacacctggcattatcagtcctggtaaacagaagaggcatcacctggagctctctttgttggaagatccatggaagagcatggaatctgctgatcttgttgtggttcttgtggatgtctcagacaagtggacacggaaccagctcagcccccagttgctcaggtgcttgaccaagtactcccagatccctagtgtcctggtcatgaacaaggtagattgtttgaagcagaagtcagttctcctggagctcacggcagccctcactgaaggtgtggtcaatggcaaaaagctcaagatgaggcaggccttccactcacaccctggcacccattgccccagcccagcagttaaggacccaaacacacaatctgtgggaaatcctcagaggattggctggccccacttcaaggagatcttcatgttgtcagccctaagccaggaggatgtgaaaacactaaagaggtcagttagtcttggccatagcctggcccttggtttctaccatatgaagacagccctcaaatttcctcctggaagcaaaagtgaggagaaaagtcctggttgggattaagatgcccatctattccctctgttcccacagcaataccttctgacacaggcccagccagggccctgggagtaccacagtgcagtcctcactagccagacaccagaagagatctgtgccaacattatccgagagaagctcctagaacacctgccccaggaggtgccttacaatgtacagcagaagacagcagtgtgggaggaaggaccaggtggggagctggttatccaacagaagcttctggtgcccaaagaatcttatgtgaaactcctgattggtccgaagggccacgtgatctcccagatagcacaggaggcaggccatgacctcatggacatcttcctctgcgatgttgacatccgcctctctgtgaagctcctcaagtgaccaccctctactgaccctcccagggcattccagctcaagctgctggcaggaactgaccagttctttccttggctggggaccctccaggcactggtgagagacatgaacactgactggccactagctggcctggccctgttgagtctgcacagtccctgcccagctgtgtcttctgttggaagaaggaacctgccttagctcagtttccaggtggttcttctgcctggcaccacagctacaaaggtgtagctaagaagatggcccattggtgggagcaatgtcaccctgcctccagctagctatgggcccagagtttctccctgagtcgctgttgctagcagggagatttctcttcctgccctcacttctttcaccttgaacttggataagaactcgtgtctcctgagtgaggtagcgcctcccatctgctccccaattcttgatctctcccaccccatccctctccccagtcttggatactaataaaatataagcattctggttctca

SEQ ID NO: 21704 - DNA, 1664 bp, Homo sapiens
cctggtcggttcccgcagtgccttgcggctgtaatggctgcccccagctggcgcggggctaggcttgttcaatcggtgttaagagtctggcaggtgggccctcatgtcgcgagggagcgggtgatccctttttcctcactcttaggcttccaacggaggtgcgtgtcctgcgtcgcggggtccgctttctctggtccccgcttggcctcggcttctcgcagtaatggccagggctctgccctggaccacttcctcggattctctcagcccgacagttcggtgactccttgcgtccccgcggtgtccatgaacagagatgagcaggatgtcctcttggtccatcaccctgatatgcctgagaattcccgggtcctacgagtggtcctcctgggagccccgaatgcagggaagtcaacactctccaaccagctactgggccgaaaggtgttccctgtttccaggaaggtgcatactactcgctgccaagctctgggggtcatcacagagaaggagacccaggtgattctacttgacacacctggcattatcagtcctggtaaacagaagaggcatcacctggagctctctttgttggaagatccatggaagagcatggaatctgctgatcttgttgtggttcttgtggatgtctcagacaagtggacacggaaccagctcagcccccagttgctcaggtgcttgaccaagtactcccagatccctagtgtcctggtcatgaacaaggtagattgtttgaagcagaagtcagttctcctggagctcacggcagccctcactgaagcaataccttctgacacaggcccagccagggccctgggagtaccacagtgcagtcctcactagccagacaccagaagagatctgtgccaacattatccgagagaagctcctagaacacctgccccaggaggtgccttacaatgtacagcagaagacagcagtgtgggaggaaggaccaggtggggagctggttatccaacagaagcttctggtgcccaaagaatcttatgtgaaactcctgattggtccgaagggccacgtgatctcccagatagcacaggaggcaggccatgacctcatggacatcttcctctgcgatgttgacatccgcctctctgtgaagctcctcaagtgaccaccctctactgaccctcccagggcattccagctcaagctgctggcaggaactgaccagttctttccttggctggggaccctccaggcactggtgagagacatgaacactgactggccactagctggcctggccctgttgagtctgcacagtccctgcccagctgtgtcttctgttggaagaaggaacctgccttagctcagtttccaggtggttcttctgcctggcaccacagctacaaaggtgtagctaagaagatggcccattggtgggagcaatgtcaccctgcctccagctagctatgggcccagagtttctccctgagtcgctgttgctagcagggagatttctcttcctgccctcacttctttcaccttgaacttggataagaactcgtgtctcctgagtgaggtagcgcctcccatctgctccccaattcttgatctctcccaccccatccctctccccagtcttggatactaataaaatataagcattctggttctca

SEQ ID NO: 21705 - DNA, 1978 bp, Homo sapiens
aggatccttaattttattaatcccccccccccccggcagttgcggctgtaatggctgcccccagctggcgcggggctaggcttgttcaatcggtgttaagagtctggcaggtgggccctcatgtcgcgagggagcgggtgatccctttttcctcactcttaggcttccaacggaggtgcgtgtcctgcgtcgcggggtccgctttctctggtccccgcttggcctcggcttctcgcagtaatggccagggctctgccctggaccacttcctcggattctctcagcccgacagttcggtgactccttgcgtccccgcggtgtccatgaacagagatgagcaggatgtcctcttggtccatcaccctgatatgcctgagaattcccgggtcctacgagtggtcctcctgggagccccgaatgcagggaagtcaacactctccaaccagctactgggccgaaaggtgttccctgtttccaggaaggtgcatactactcgctgccaagctctgggggtcatcacagagaaggagacccaggtgggtgggtacctacaaagggagtccttgaaacaggacagagggtgaagctaagagggtctcccttaccatcagccttgaagaaaatgatggtcacattcatttatgtattctacttgacacacctggcattatcagtcctggtaaacagaagaggcatcacctggagctctctttgttggaagatccatggaagagcatggaatctgctgatcttgttgtggttcttgtggatgtctcagacaagtggacacggaaccagctcagcccccagttgctcaggtgcttgaccaagtactcccagatccctagtgtcctggtcatgaacaaggtagattgtttgaagcagaagtcagttctcctggagctcacggcagccctcactgaaggtgtggtcaatggcaaaaagctcaagatgaggcaggccttccactcacaccctggcacccattgccccagcccagcagttaaggacccaaacacacaatctgtgggaaatcctcagaggattggctggccccacttcaaggagatcttcatgttgtcagccctaagccaggaggatgtgaaaacactaaagcaataccttctgacacaggcccagccagggccctgggagtaccacagtgcagtcctcactagccagacaccagaagagatctgtgccaacattatccgagagaagctcctagaacacctgccccaggaggtgccttacaatgtacagcagaagacagcagtgtgggaggaaggaccaggtggggagctggttatccaacagaagcttctggtgcccaaagaatcttatgtgaaactcctgattggtccgaagggccacgtgatctcccagatagcacaggaggcaggccatgacctcatggacatcttcctctgcgatgttgacatccgcctctctgtgaagctcctcaagtgaccaccctctactgaccctcccagggcattccagctcaagctgctggcaggaactgaccagttctttccttggctggggaccctccaggcactggtgagagacatgaacactgactggccactagctggcctggccctgttgagtctgcacagtccctgcccagctgtgtcttctgttggaagaaggaacctgccttagctcagtttccaggtggttcttctgcctggcaccacagctacaaaggtgtagctaagaagatggcccattggtgggagcaatgtcaccctgcctccagctagctatgggcccagagtttctccctgagtcgctgttgctagcagggagatttctcttcctgccctcacttctttcaccttgaacttggataagaactcgtgtctcctgagtgaggtagcgcctcccatctgctccccaattcttgatctctcccaccccatccctctccccagtcttggatactaataaaatataagcattctggttctca

SEQ ID NO: 21706 - DNA, 1415 bp, Homo sapiens
gggaggtactgaaagagggtggggagattccattataggggctggaaaacccctttaccataccacatccctcatcagaaatgccttagtcataagacctttcctgactgatgtatgtctgtccctcaggcatcacctggagctctctttgttggaagatccatggaagagcatggaatctgctgatcttgttgtggttcttgtggatgtctcagacaagtggacacggaaccagctcagcccccagttgctcaggtgcttgaccaagtactcccagatccctagtgtcctggtcatgaacaaggtagattgtttgaagcagaagtcagttctcctggagctcacggcagccctcactgaaggtgtggtcaatggcaaaaagctcaagatgaggcaggccttccactcacaccctggcacccattgccccagcccagcagttaaggacccaaacacacaatctgtgggaaatcctcagaggattggctggccccacttcaaggagatcttcatgttgtcagccctaagccaggaggatgtgaaaacactaaagcaataccttctgacacaggcccagccagggccctgggagtaccacagtgcagtcctcactagccagacaccagaagagatctgtgccaacattatccgagagaagctcctagaacacctgccccaggaggtgccttacaatgtacagcagaagacagcagtgtgggaggaaggaccaggtggggagctggttatccaacagaagcttctggtgcccaaagaatcttatgtgaaactcctgattggtccgaagggccacgtgatctcccagatagcacaggaggcaggccatgacctcatggacatcttcctctgcgatgttgacatccgcctctctgtgaagctcctcaagtgaccaccctctactgaccctcccagggcattccagctcaagctgctggcaggaactgaccagttctttccttggctggggaccctccaggcactggtgagagacatgaacactgactggccactagctggcctggccctgttgagtctgcacagtccctgcccagctgtgtcttctgttggaagaaggaacctgccttagctcagtttccaggtggttcttctgcctggcaccacagctacaaaggtgtagctaagaagatggcccattggtgggagcaatgtcaccctgcctccagctagctatgggcccagagtttctccctgagtcgctgttgctagcagggagatttctcttcctgccctcacttctttcaccttgaacttggataagaactcgtgtctcctgagtgaggtagcgcctcccatctgctccccaattcttgatctctcccaccccatccctctccccagtcttggatactaataaaatataagcattctggttctca

SEQ ID NO: 21707 - DNA, 1581 bp, Homo sapiens
gggaggtactgaaagagggtggggagattccattataggggctggaaaacccctttaccataccacatccctcatcagaaatgccttagtcataagacctttcctgactgatgtatgtctgtccctcaggcatcacctggagctctctttgttggaagatccatggaagagcatggaatctgctgatcttggttaggttcaggatgggaaccttaagcccagtttacaggggtcatggcctttcattccttggtagtttggggggcaaaagccaagctcataccatggaagtttttgtcagggcaggaggaagagtgaccatttccttttccttcttcctgccttgccatcttctagttgtggttcttgtggatgtctcagacaagtggacacggaaccagctcagcccccagttgctcaggtgcttgaccaagtactcccagatccctagtgtcctggtcatgaacaaggtagattgtttgaagcagaagtcagttctcctggagctcacggcagccctcactgaaggtgtggtcaatggcaaaaagctcaagatgaggcaggccttccactcacaccctggcacccattgccccagcccagcagttaaggacccaaacacacaatctgtgggaaatcctcagaggattggctggccccacttcaaggagatcttcatgttgtcagccctaagccaggaggatgtgaaaacactaaagcaataccttctgacacaggcccagccagggccctgggagtaccacagtgcagtcctcactagccagacaccagaagagatctgtgccaacattatccgagagaagctcctagaacacctgccccaggaggtgccttacaatgtacagcagaagacagcagtgtgggaggaaggaccaggtggggagctggttatccaacagaagcttctggtgcccaaagaatcttatgtgaaactcctgattggtccgaagggccacgtgatctcccagatagcacaggaggcaggccatgacctcatggacatcttcctctgcgatgttgacatccgcctctctgtgaagctcctcaagtgaccaccctctactgaccctcccagggcattccagctcaagctgctggcaggaactgaccagttctttccttggctggggaccctccaggcactggtgagagacatgaacactgactggccactagctggcctggccctgttgagtctgcacagtccctgcccagctgtgtcttctgttggaagaaggaacctgccttagctcagtttccaggtggttcttctgcctggcaccacagctacaaaggtgtagctaagaagatggcccattggtgggagcaatgtcaccctgcctccagctagctatgggcccagagtttctccctgagtcgctgttgctagcagggagatttctcttcctgccctcacttctttcaccttgaacttggataagaactcgtgtctcctgagtgaggtagcgcctcccatctgctccccaattcttgatctctcccaccccatccctctccccagtcttggatactaataaaatataagcattctggttctca

SEQ ID NO: 21708 - DNA, 967 bp, Homo sapiens
ggtaccagttcgacggagactctgcggataatgattggctggccccacttcaaggagatcttcatgttgtcagccctaagccaggaggatgtgaaaacactaaagcaataccttctgacacaggcccagccagggccctgggagtaccacagtgcagtcctcactagccagacaccagaagagatctgtgccaacattatccgagagaagctcctagaacacctgccccaggaggtgccttacaatgtacagcagaagacagcagtgtgggaggaaggaccaggtggggagctggttatccaacagaagcttctggtgcccaaagaatcttatgtgaaactcctgattggtccgaagggccacgtgatctcccagatagcacaggaggcaggccatgacctcatggacatcttcctctgcgatgttgacatccgcctctctgtgaagctcctcaagtgaccaccctctactgaccctcccagggcattccagctcaagctgctggcaggaactgaccagttctttccttggctggggaccctccaggcactggtgagagacatgaacactgactggccactagctggcctggccctgttgagtctgcacagtccctgcccagctgtgtcttctgttggaagaaggaacctgccttagctcagtttccaggtggttcttctgcctggcaccacagctacaaaggtgtagctaagaagatggcccattggtgggagcaatgtcaccctgcctccagctagctatgggcccagagtttctccctgagtcgctgttgctagcagggagatttctcttcctgccctcacttctttcaccttgaacttggataagaactcgtgtctcctgagtgaggtagcgcctcccatctgctccccaattcttgatctctcccaccccatccctctccccagtcttggatactaataaaatataagcattctggttctca

SEQ ID NO: 21709 - DNA, 680 bp, Homo sapiens
cctggtcggttcccgcagtgccttgcggctgtaatggctgcccccagctggcgcggggctaggcttgttcaatcggtgttaagagtctggcaggtgggccctcatgtcgcgagggagcgggtgatccctttttcctcactcttaggcttccaacggaggtgcgtgtcctgcgtcgcggggtccgctttctctggtccccgcttggcctcggcttctcgcagtaatggccagggctctgccctggaccacttcctcggattctctcagcccgacagttcggtgactccttgcgtccccgcggtgtccatgaacagagatgagcaggatgtcctcttggtccatcaccctgatatgcctgagaattcccgggtcctacgagtggtcctcctgggagccccgaatgcagggaagtcaacactctccaaccagctactgggccgaaaggtgttccctgtttccaggaaggtgcatactactcgctgccaagctctgggggtcatcacagagaaggagacccaggtgctgattctacttggcacacctggcactatcagtcccggtccgacgaggcatcacctggagccctcttctgctgcacgacccactggcagagcaggcaatctgctgcccttgctgcggccctcgcgcactgctgccccgtggtccatcgcccctgtcct

SEQ ID NO: 21710 - DNA, 1913 bp, Homo sapiens
cgcgggccggggcggagggttcggctgcgcggcggggctgaggcggccgcggggcccgagcgcagggagtggagcttggtttcgggatctcggtgctgcagacggcgagacctcctgcacagggtgtacagcaagctgtgattcctgggaaaactaaaaaagctctctggacaacggggcccagagctgatggcagacaatgtcagccactaacaacatagcccaggcccggaagctggtggaacagctacgcatagaagccgggattgagcgcatcaaggtctccaaagcggcgtctgacctcatgagctactgtgagcaacatgcccggaacgaccccctgctggtcggagtccctgcctcggagaacccctttaaggacaagaaaccttgtattattttataactgtgttctcatatgttctctctctctctctctctttctctctctctctctctgtctctgtctctgtctcaggcagggcatcattcagtaattagctcaaacaaaacatctcaagtccccaaaacctttaattccaaaagaaatcccccctctccccgccaaaaaaggcgttcccaccgcccggatggggtagaatggaccttgtaggtggagatgaattttcaggtccgaccccatggccctctcagtttgggccaaaagggatggaggctttacggccacttcccgttcggaataactgaaatcccccagcgatggggtaacaattttttaaaactctcgattgccgtttcaattgtggaccggcgccgagggggaaagggaggtgacttcgcccggtggcaatagttccgggagaattggccattggtaaaaagacttcatagggtcactggaatgctttgtgttgtttttaagtagaggtaaaattgagatggggggcgggaggtgacatcatgaagttttttggaaatatctctttatttaaaaaattgttactccatacggctaaaatcggattgtgatggttgaacccgtcgctaaactgcacgatcctgcaatgaatgcacgatggagtgtgggggtctggagggggcttcgtctatgaaaagttgccaagtgtgactcccctgcatgatgttagccatgggtcctttctgcagggtcccctctgtgccagaaatgggttttcgggacttgccccagggaagccgtcaccggcccggcccatcatgtttttggattttttttttttttctttttttgagatggagtttcattcttgttacccaggctggagtgcagctgcatgatttcagctcaccgcaacctctgcctccaccggttcaagcgattctcctgcctcagcctcccgagtagctgagactacaggcgtgtgccactacgcccggctaattgttgtatttttagtagagacggggtttcaccgtattggccaggccgctctcaaactcctgacctcgggatccgcccacctcggcctcccaaagtgctgggattacaggcatgagccaccgcgcccagtggtgttttaagcatgaggcatccgcgtggctgggagaggctttgaccatccttggctcttccaggttgtcctaccctctggcatccaccatagacgtttttcaaacagaaaatgcaggctggggagccgcggcagggcgggtggggctaccctgtgctgctgtgtgtacaaaattgttccatgatcttggagtgactctgaaggactctgggaggtgagacgttgtcccggagatcaaaacgtccgctcaaaacgttaccctgtcgctcgaacccgatctttttgcttttccacccccgtgcaacccaggacggctgtctgaggccgggagatgccttagacgcaggatgggccactcctcccagcggcaagtggaaatcgaagatgtcatggggtcggggg

SEQ ID NO: 21711 - DNA, 394 bp, Homo sapiens
gtagctctgtgagttccttgtaagtaaaaaatatgtaaccatgcttttctctttctctctccttttttaaacagggtgtacagcaagctgtgattcctgggaaaactaaaaaaggtatgtggcattttctcttacttcatgaggttggaatctcttgttttttagaaaaaggaacaaacaagccccagtcttttatgtgtgcctgacactttgggaggttgagtcatcccataaaagggctccgggctcagagccaggaaacctgagttcaaatcccagatccccttttaccagctctgccccgtttgggtgggttcgcgtcaactgtctgcagtggagatgacgttctccgttttgcaggaaggttgcaaagattaaacaagcatatagatac

SEQ ID NO: 21712 - DNA, 1842 bp, Homo sapiens
cagcagcgtgtcgccatgtcttgtgtggctgggatacgctgcaggggtgtggagtcgccgccccaatagcgccccgccctctcccggcttgtccctgcagagccccgaggcctcagaggctcctcagagctcccagtgccctggacggttccgtgcagcgctctccagttctgatggttgctctcaggaggcggctggtctgaaacaattcagtttccattgctgtgtcctgcaccacggtgtgggactggtggtttcttactgtttttctcagttctctgacgctttgaggaattgtttttaaagcgagttatccatcattttagttgttttctctgtgttctcatatgttctctctctctctctctctttctctctctctctctctgtctctgtctctgtctcaggcagggcatcattcagtaattagctcaaacaaaacatctcaagtccccaaaacctttaattccaaaagaaatcccccctctccccgccaaaaaaggcgttcccaccgcccggatggggtagaatggaccttgtaggtggagatgaattttcaggtccgaccccatggccctctcagtttgggccaaaagggatggaggctttacggccacttcccgttcggaataactgaaatcccccagcgatggggtaacaattttttaaaactctcgattgccgtttcaattgtggaccggcgccgagggggaaagggaggtgacttcgcccggtggcaatagttccgggagaattggccattggtaaaaagacttcatagggtcactggaatgctttgtgttgtttttaagtagaggtaaaattgagatggggggcgggaggtgacatcatgaagttttttggaaatatctctttatttaaaaaattgttactccatacggctaaaatcggattgtgatggttgaacccgtcgctaaactgcacgatcctgcaatgaatgcacgatggagtgtgggggtctggagggggcttcgtctatgaaaagttgccaagtgtgactcccctgcatgatgttagccatgggtcctttctgcagggtcccctctgtgccagaaatgggttttcgggacttgccccagggaagccgtcaccggcccggcccatcatgtttttggattttttttttttttctttttttgagatggagtttcattcttgttacccaggctggagtgcagctgcatgatttcagctcaccgcaacctctgcctccaccggttcaagcgattctcctgcctcagcctcccgagtagctgagactacaggcgtgtgccactacgcccggctaattgttgtatttttagtagagacggggtttcaccgtattggccaggccgctctcaaactcctgacctcgggatccgcccacctcggcctcccaaagtgctgggattacaggcatgagccaccgcgcccagtggtgttttaagcatgaggcatccgcgtggctgggagaggctttgaccatccttggctcttccaggttgtcctaccctctggcatccaccatagacgtttttcaaacagaaaatgcaggctggggagccgcggcagggcgggtggggctaccctgtgctgctgtgtgtacaaaattgttccatgatcttggagtgactctgaaggactctgggaggtgagacgttgtcccggagatcaaaacgtccgctcaaaacgttaccctgtcgctcgaacccgatctttttgcttttccacccccgtgcaacccaggacggctgtctgaggccgggagatgccttagacgcaggatgggccactcctcccagcggcaagtggaaatcgaagatgtcatggggtcggggg

SEQ ID NO: 21713 - DNA, 488 bp, Homo sapiens
caaggatcaaatatatatactttttctttttacttggtataattaagcaacttttatttggtgttctgtaagaatttatttcttattatgccacaaataccttttgagtcttcccattgattagccctcttattttagaggcctttgacagtgtttctgccaactttaggccttaggaaaagcctctgaaacttaaactttggtatcccattcaggtaccagatgtcttgaaaagccccctagagcctctgtaagccctcagagccacaaggaacacaccatggctgctggtattcattcttcagcttctcatggtgacaagctggtgaaaaccctggggagctaagagtgggggactggtgctgagactactccttgccaccccaacctcaccccaacccacactatgcccttgttccaaggtcctcatggcagggcacacagccttctgggcttggcagatgcacctacccgtgtgggcttccctg

SEQ ID NO: 21714 - DNA, 313 bp, Homo sapiens
tttaaatgggagtatgaaaaaaataatttactccgaaatggcatttaatacatagagtacttactatatggtttttgttatttttctcatattaagaaaactatgattaccaatttagaagagatttctaaatatagctctctagaatacaatattcttaataaaaactaatctgaatccacagctgttgaagtttaaccggccacttttttgatataattggtagtcatgcatttgtatcagaatgtgtagttatagtttgtctttacaatgcaatcatatgcattgtcttcatgtacacaccaaaaaaaac

SEQ ID NO: 21715 - DNA, 540 bp, Homo sapiens
  misc_feature (18)..(18): n is a, c, g, or t
  misc_feature (52)..(52): n is a, c, g, or t
  misc_feature (93)..(93): n is a, c, g, or t
  misc_feature (99)..(99): n is a, c, g, or t
  misc_feature (105)..(105): n is a, c, g, or t
  misc_feature (117)..(117): n is a, c, g, or t
  misc_feature (155)..(155): n is a, c, g, or t
  misc_feature (162)..(162): n is a, c, g, or t
tgagggaccctatatacngcactcaaacaagggcctttttaccccgggagcnccaacacaaagaagaatcgcccctgaaccccggcctatggnaaaacnccttantaataaattcgnatgaaacttgttgttggccgttccagatgccaattggncccaagngaacaatgggaacccagtcctttcaaaatgatggccatccagtaatgagaatgaacagtctccaactaaaggcaacaatatagatgaatctcggaaacatgatattgaccagacagaaaagattccacttacataaacttcaaaagaagataaaactgatctatgacattaatagtcagaatattcattatccttgagggaactaaactgggaagccacatgatagggcatctggaagctagtaatgtcctctttcttgatctgttacattggtgtgtttatttcattagatttattgagctatacatttaccaccgtgtacttgtctctgtatatgttttgcattgaaataaattttaccaataaaatgataaagca

SEQ ID NO: 21716 - DNA, 424 bp, Homo sapiens
catgtgccaccacacctggctatttttttttttttttgtatttttagtagagctggggtttcaccatgttggccatctgttctcgaactcctgacctcaggtgatccacctgcctcggcctcccaaagtgttgggattacaggcatgagccaccatgccctgccaaaagcgtttctttatgttaccatgtaagtttgccatataacctctaggaccctccccccgacaaaaaaacaatctaaataatccaggtagtcacaacagataaatctaaagatagcagaaggatggaaatgataaagattagaaccgaacttattgaaatagaaaagtgaacagcatcaacaaaaccaaaagctgattatttgaaaactctttttttcaaacaaaagagaaacttctggaaaaactactgaaaaaaaaa

SEQ ID NO: 21717 - DNA, 577 bp, Homo sapiens
cacacgcacccacattccttctgaatcgtattttctaggcatcttactaatataatccccacaacaacgagctgcagaaggttgtttctctcacagatttctgcatattctctgtacttgtagaatttgggggaacaagtcaagttacacaagctaatccctgaaacgtgagccccacggctcctcagccctctcccagagccggtggcctgcgtgccaggtccccgacaaatgctggctccatggcagctgcgatgacttccctcgagaagtgccagtccgcagggcaatctcgaggtcctcgtgcgggtgaccagctgcggcacggccagcacggcacagggagggaggggctgtgctgaccctcaggtgtctcgcgggggcccttggcggtcccagcagagggtttgcccgtgagaaggtctggaagtgctgcttcttacagggctgccttcaattatttcagctgctccgaggtatttcaaagtcagaccaaataaacatttgtatctaaaaaaggcgaaacagggtcatttgaaatggagaagaaagcctttcccgtatccggagggtgtgg

SEQ ID NO: 21718 - DNA, 456 bp, Homo sapiens
tattgagcaattttaaaattcaacttgcagaaatggattatacatgataatttgctgtgcatccataaaaaccataaaatataagagaagtgttgttagagtagctgttcccatttcctggcagtcattacatgcttccaatacaaaaacatttttctcctaactatcttttctgagctcaaaaatggatttccctccagcccctgtcattcaattatcacctcgggaaatgcacagatataactgatgatccctttcaaacgtcctgcggcaggcctcgctctctcatccttcatcgttcgtcccgctcccgtcattaaacgttacattgccgatgtatattttataaggtgaccctgacggatgtcactttgatgctgtgcagggataataagattgcacatataatgaaaggccaataaatagaaaaatgtttacgagatagagaatggtagt

SEQ ID NO: 21719 - DNA, 377 bp, Homo sapiens
caggctcaccctggtgcttgtatctgacttgccttcacttctagttcctctcacaaaacttgacctggaatccatacttgacccctgcctctggtccttcacttttggaagcccatgtttccccaaaatctttacactgacctcttctgtaccttgcacttttttttgagacagtttctcattgtctctcaggctggagtgcagtggcaccatctcagcttactgcaaactcgaccctctgggctcaagcgattctcccacctcagcctccagagcagttgggactacaggcatgtgccaccatgcccgctaatttttttgtattttaaatagagacagggtttcgccatgttggccaggctggtctcaaactcctg

SEQ ID NO: 21720 - DNA, 505 bp, Homo sapiens
cattgtgtttgggaaaggcaattgaacagtggtagccaaatattattcctccgtcggtcatccttcagggtaactgcctcggtttccacttttaaaaacgtgtggtgattgatgctttcatggactctgttgccccaagtccccaagccttgtaccagcgtttgctcattggtcctttgacctgttgagaacacaatctctgtattgtgttcaatgcagggatgcatttagagttgcccctgcatctacccattaagtttatactcctgtgttctcatattaacgtctgtgtttgcgaatagtctctctagtctttgattcactaactcccccaattctaacccaccaatggccaccaacaaacagccacactcaaaggactcaacatatttaaatattccctagaattctttgctctgttctaaaagctatgtattccgtctacataatttgattctattgtaatttctcatggttttaaaattttccttaccagtaaaaaaaa

SEQ ID NO: 21721 - DNA, 296 bp, Homo sapiens
atgcaagaaagttagagcatcagagtttgtaaagatgaaactgatgacactgcaaagcaggagccaataagactacaaaaccaaagcaacctgataattacaattattaatataaatttaaaggagctgggcagaaatgcaggaaccagatggaaaaccacagagttaaaaccagtgagtcagccaggcgcagtggctcatgcctgtaatctcagcactttgggaggctgaggtgggcggatcacctgaggtcaggagttcgagaccagcctggccaacgtggtgaaaccccatct

SEQ ID NO: 21722 - DNA, 151 bp, Homo sapiens
tgtctttcatgtcgctgtcacctctctttcaggtctcctgacttcccaccatgtgatgcaatgatcatcttgctggatttctgtgatgagagagggatgctgtggtatagaataaacatggaaatgggtcttgggaaattcctctggagtc

SEQ ID NO: 21723 - DNA, 330 bp, Homo sapiens
tccatctactgattcaaatgctaatctctcctggaaacactctcacagccacacccagaaataatgttttaccagctatctggacatccttagcttagtcaagctgacacataaaattaatcatcacatgtcctatttctttttcaatgatatttccttgctccatcttatttatatctttttaaaaatatgtattgttgctatgacctaaaaacaatctctctctttgctattatttactagctcctctcccatgtgactatatgaccgccttcaatgtacacattcatcccttattggaactttggcctttaaattagctatagtagg

SEQ ID NO: 21724 - DNA, 412 bp, Homo sapiens
aaaaaagcagtaggaaccactgatgagtgttaagcagcctttgacacgagcagagtagtgttttgaagaagattgaattggtgggtgcagagaggacaataggttgtagacaatatcctgcctgcttttgttgtggtctgtgggatggggaaatcacaatgatttggactagattggtggtggccatggggatggagagaaatggacagatttgagagatatttaacagtttcaacgaataggacttggggatagatgcgctctcaagagggagatctcagggcatataggtttctagcatgttccctgcttggctggttggctactgatcctattcacagaggcaagaatcagatctgctgaagatttgagaaggaagctcatgagttcttgtagcatatgactgaggtag

SEQ ID NO: 21725 - DNA, 404 bp, Homo sapiens
gagcccgtttgggatgtagattcctaccgtgatgtttctagaatgagagtgggatgggtcctgctgtgtggagcacacgtggactcgggacagggattgtgcatgtagcacgcgtggactcggggagagaggtggtgtgatttgggctgctccagacccatcgaagtatctcttttgatctcctggtcctgggtggtgagctggggtccagagagcttgttcccagtggacagggcactgtccgcacagctgagatgcactcatgcacacgtgggagccccaccatgtcctgcatgtttctctgggagaagtcacttctagagtggctcatggcacatgctcactcctgtgaggagtcattagcaatgggtggaccacttgagtgtaacacctacttacaagtg

SEQ ID NO: 21726 - DNA, 562 bp, Homo sapiens
agtaaagaagagtgagtcaggtgtactaaaaggacaggaagcccaagaaaagaaggagagttttgaggataaaggaaataatgataaagaaaaggagagagatgcagagaaagatccaaataaaaaagaaaaaggtgacaaaaacacaaaaggtgacaaaggaaaggacaaagttaaaggaaagagagaatcagaaatcaatggtgaaaaatcaaaaggctcgaaaagggcgaaggcaaatacaggaaggaagtacaacaaaaaagtggaagagtaaggataaattttttaaaggcccataagacaagtgattattatgattcccatactccagatacaaaccatatcccagccattgcctaaacagattacaattataaaatccctttcatcttcatatcacagtttctgctcttcagaagtttcaccctttttaatctctcagccacaaacctcagtttccaaatatttgtttcataagttaagacgtatatgattccgtcaagaaagactggatactttctgaagtaaaacattttaattaaagaaatatatagtaaat

SEQ ID NO: 21727 - DNA, 230 bp, Homo sapiens
actgaaataaaacaggtttcatatacactgtggaggaacttaactgtgcatttgcactgtgacatggctaaactctttaacaaagacgaaagcacagaaatttaacctgggatcgcccagcctgaaacaccatgaaatataagctttttgtgccacattatccttgagcattttatagtagcagaaagaagtcaaacttcacgccaagctaggggacttctgggtgctcc

SEQ ID NO: 21728 - DNA, 995 bp, Homo sapiens
caggtgaattacttgaggtcaggagttcgagaccagcctgaccaacatggtgaaaccctgtctatactaaaatatacaaaaatcagtctagcgtggtggtgggcgcctgtaatcccagctattcgggaggctgaggcaggagaattgctcgatcccgggaggcagaggttgcagtgagccgagatcgtgccactgcactccagcctgggcgacagagcgagactccgtctcaaaaagaaacttgtatcatggctagcaaagtggaatttggttttatgctaaaataaaatcctagagccaggtgtggaggcgagtgcctataatcccagctactcagaggctgaggcaggaggatttgttgagaccaggagttcaagaccagcctgggcaacataataagacctcatctcaaaaaaaaaataataaagtaaaataaaataaaaatcctactctagggcacctgggaaccaaccagtggtgcctttggaaatcttggtttatgcttcctctctgacagtaggaaaaagctattgtgggagtttctcctgccatgtagagtgatggaagagcagaattgtggaggagcagggttgctttgttttgtctttgttgtactcagctggaaagctgtttaaggaaagaatctggtcatatgacctcctttctgcaattggaaatgaacgccacagggaaaagaagatataagacacagaatgctccttgcctggctaaaatggaagaggacaaaggaagcagaatactttctgggcttttggcttttgctaccctcctctggcagacccctgtccaagacgctggctgtgttgtgtgccaggctagagcttgtacctactgtaaaatctgtgtgtgatgtctgttgagttttttggaaaacaaaaaacttatattttaaaatacaaggtattagataataccaagggcagataattccacccttggaaataaaaaagattttcttttcttcagcttgaatg

SEQ ID NO: 21729 - DNA, 813 bp, Homo sapiens
caggtgaattacttgaggtcaggagttcgagaccagcctgaccaacatggtgaaaccctgtctatactaaaatatacaaaaatcagtctagcgtggtggtgggcgcctgtaatcccagctattcgggaggctgaggcaggagaattgctcgatcccgggaggcagaggttgcagtgagccgagatcgtgccactgcactccagcctgggcgacagagcgagactccgtctcaaaaaaataataaagtaaaataaaataaaaatcctactctagggcacctgggaaccaaccagtggtgcctttggaaatcttggtttatgcttcctctctgacagtaggaaaaagctattgtgggagtttctcctgccatgtagagtgatggaagagcagaattgtggaggagcagggttgctttgttttgtctttgttgtactcagctggaaagctgtttaaggaaagaatctggtcatatgacctcctttctgcaattggaaatgaacgccacagggaaaagaagatataagacacagaatgctccttgcctggctaaaatggaagaggacaaaggaagcagaatactttctgggcttttggcttttgctaccctcctctggcagacccctgtccaagacgctggctgtgttgtgtgccaggctagagcttgtacctactgtaaaatctgtgtgtgatgtctgttgagttttttggaaaacaaaaaacttatattttaaaatacaaggtattagataataccaagggcagataattccacccttggaaataaaaaagattttcttttcttcagcttgaatg

SEQ ID NO: 21730 - DNA, 1563 bp, Homo sapiens
gaattcccggagaccagcgctgcgggccgcggcggctggggcgaggccagctggcggccccggctctcagcccccagagcagcacctgggaggtcacatcttgcagtccctggatggctttgtgttcgccttgaaccaggaaggaaaattcctctacatctcagagacagtctccatctatctgggtctctcacaggtggagatgacgggcagcagcgtcttcgactacattcaccctggggaccactcagaggtgctggagcaactggggctgcggacgccgacgcccggccccccaaccccgccctccgtctcctcttcctcctcctcttcctcttcgcttgcagatacccccgagatcgaggccagcctcaccaaggtgcccccctcctccctggtccaggagcgctccttctttgtccgcatgaaatccacgctcaccaagagggggctgcacgtcaaggcctcagggtacaaggtcatccacgtgactgggcgccttcgggcccacgccctgggccttgtggccctcgggcacacgttgcccccggcccccctggctgagctgccactccatggacacatgatcgtcttccgtctcagcctgggtctcaccatccttgcttgtgagagcagagtcagcgaccacatggacctggggccctcagagctggtgggccgcagctgctaccagtttgtccacggacaagacgccacgaggatccgccagagccacgtggacttgctggacaagggtcaggtgatgactggttactaccgttggctgcagcgtgccgggggcttcgtgtggctgcagtctgtggccacagtggctgggagcgggaagagccccggggagcaccatgtgctttgggtcagccacgtgctcagccaagccgagggtggccaaactcctttggatgccttccagcttccagccagcgtggcctgtgaggaggcatccagcccggggccagagcccacagagccggagcctccgacggaagggaagcaggctgccccagcggagaacgaggccccccagacccagggcaaacgcatcaaagtggagcccggcccgagggaaaccaaaggctccgaggacagtggcgacgaggatccctccagccacccggccacaccgaggcccgagttcacctctgtcatccgggcaggggtcctgaagcaggatccggtgcggccatggggcctggcgcctcccggggaccccccgcccaccctcctgcacgcgggcttcctgccgccggtggtgcggggcctgtgcacacccggcaccatccgctacggccccgcggagctgggcctggtgtacccgcacctgcagaggctgggtccgggccccgcgctcccggaggccttttacccgcccctgggcctgccctacccggggcccgcgggcaccaggctgccgcggaagggggactgaggactggcagagctgccggcgccggaccctgcgacaaccggggtcccccaggacagtaggcccggctctgcccgtagccctgagaattaaacgccggctctccctgcagtggtttg

SEQ ID NO: 21731 - DNA, 744 bp, Homo sapiens
gctgagcccagagggcgagcgagttactgcgcgcgcacctcacccgccccctgcattcccctccttcgccggcaggtggagatgacgggcagcagcgtcttcgactacattcaccctggggaccactcagaggtgctggagcaactggggctgcggacgccgacgcccggccccccaaccccgccctccgtctcctcttcctcctcctcttcctcttcgcttgcagatacccccgagatcggagcgctccttctttgtccgcatgaaatccacgctcaccaagagggggctgcacgtcaaggcctcagggtacaaggtcatccacgtgactgggcgccttcgggcccacgccctgggccttgtggccctcgggcacacgttgcccccggcccccctggctgagctgccactccatggacacatgatcgtcttccgtctcagcctgggtctcaccatccttgcttgtgagagcagagtcagcgaccacatggacctggggccctcagagctggtgggccgcagctgctaccagtttgtccacggacaagacgccacgaggatccgccagagccacgtggactgtgagacccacctccagccacaagcctgcctaccaccccccagacccgagcatccactccctggtccctggaagtccttcttcagggctgcccacagtccctcctgctgcacctacagctccagggactccgtttagcattggaagagcagcaaggagactga

SEQ ID NO: 21732 - DNA, 2109 bp, Homo sapiens
gtctccaagtctgcgaggccgaggtgggcgccgagagctgggcgccacagcccgcgcgtcccgctgcgccccgcgcgccccggggtctatggagctgcccctccgcgccgcccggccggccccacgccgcgcccggagcctgctctgcggccaagtaatcggactggcggtcctgcgggagactcggggctcggagcccgcctgagcgagccccccggagatggcggccccctatcccggcagtggcggcggaagcgaggtcaaatgcgtgggaggccgcggcgccagcgtcccctgggactttctacccgggctgatggtcaaggcgccgtccggaccgtgcctgcaggcgcagcgcaaggagaagtcccggaacgcggcgcgctcgcggcgcgggaaggagaacctggagttcttcgagctggccaagcttctcccgctgcccggcgccatctccagccagctggacaaggcttccatcgtgcgcctcagcgtcacctacctccgcctgcgccggttcgccgcgctgggggcgccgccctgggggctgagagccgcggggccgccagctggcctcgccccaggccgccgcggccccgcagcgctggtctccgaagtcttcgagcagcacctgggaggtcacatcttgcagtccctggatggctttgtgttcgccttgaaccaggaaggaaaattcctctacatctcagagacagtctccatctatctgggtctctcacaggtggagatgacgggcagcagcgtcttcgactacattcaccctggggaccactcagaggtgctggagcaactggggctgcggacgccgacgcccggccccccaaccccgccctccgtctcctcttcctcctcctcttcctcttcgcttgcagatacccccgagatcgaggccagcctcaccaaggtgcccccctcctccctggtccaggagcgctccttctttgtccgcatgaaatccacgctcaccaagagggggctgcacgtcaaggcctcagggtacaaggtcatccacgtgactgggcgccttcgggcccacgccctgggccttgtggccctcgggcacacgttgcccccggcccccctggctgagctgccactccatggacacatgatcgtcttccgtctcagcctgggtctcaccatccttgcttgtgagagcagagtcagcgaccacatggacctggggccctcagagctggtgggccgcagctgctaccagtttgtccacggacaagacgccacgaggatccgccagagccacgtggacttgctggacaagggtcaggtgatgactggttactaccgttggctgcagcgtgccgggggcttcgtgtggctgcagtctgtggccacagtggctgggagcgggaagagccccggggagcaccatgtgctttgggtcagccacgtgctcagccaagccgagggtggccaaactcctttggatgccttccagcttccagccagcgtggcctgtgaggaggcatccagcccggggccagagcccacagagccggagcctccgacggaagggaagcaggctgccccagcggagaacgaggccccccagacccagggcaaacgcatcaaagtggagcccggcccgagggaaaccaaaggctccgaggacagtggcgacgaggatccctccagccacccggccacaccgaggcccgagttcacctctgtcatccgggcaggggtcctgaagcaggatccggtgcggccatggggcctggcgcctcccggggaccccccgcccaccctcctgcacgcgggcttcctgccgccggtggtgcggggcctgtgcacacccggcaccatccgctacggccccgcggagctgggcctggtgtacccgcacctgcagaggctgggtccgggccccgcgctcccggaggccttttacccgcccctgggcctgccctacccggggcccgcgggcaccaggctgccgcggaagggggactgaggactggcagagctgccggcgccggaccctgcgacaaccggggtcccccaggacagtaggcccggctctgcccgtagccctgagaattaaacgccggctctccctgcagtggtttg

SEQ ID NO: 21733 - DNA, 1891 bp, Homo sapiens
gtctccaagtctgcgaggccgaggtgggcgccgagagctgggcgccacagcccgcgcgtcccgctgcgccccgcgcgccccggggtctatggagctgcccctccgcgccgcccggccggccccacgccgcgcccggagcctgctctgcggccaagtaatcggactggcggtcctgcgggagactcggggctcggagcccgcctgagcgagccccccggagatggcggccccctatcccggcagtggcggcggaagcgaggtcaaatgcgtgggaggccgcggcgccagcgtcccctgggactttctacccgggctgatggtcaaggcgccgtccggaccgtgcctgcaggcgcagcgcaaggagaagtcccggaacgcggcgcgctcgcggcgcgggaaggagaacctggagttcttcgagctggccaagcttctcccgctgcccggcgccatctccagccagctggacaaggcttccatcgtgcgcctcagcgtcacctacctccgcctgcgccggttcgccgcgctgggggcgccgccctgggggctgagagccgcggggccgccagctggcctcgccccaggccgccgcggccccgcagcgctggtctccgaagtcttcgagcagcacctgggaggtcacatcttgcagtccctggatggctttgtgttcgccttgaaccaggaaggaaaattcctctacatctcagagacagtctccatctatctgggtctctcacaggtggagatgacgggcagcagcgtcttcgactacattcaccctggggaccactcagaggtgctggagcaactggggctgcggacgccgacgcccggccccccaaccccgccctccgtctcctcttcctcctcctcttcctcttcgcttgcagatacccccgagatcgagtcagcgaccacatggacctggggccctcagagctggtgggccgcagctgctaccagtttgtccacggacaagacgccacgaggatccgccagagccacgtggacttgctggacaagggtcaggtgatgactggttactaccgttggctgcagcgtgccgggggcttcgtgtggctgcagtctgtggccacagtggctgggagcgggaagagccccggggagcaccatgtgctttgggtcagccacgtgctcagccaagccgagggtggccaaactcctttggatgccttccagcttccagccagcgtggcctgtgaggaggcatccagcccggggccagagcccacagatgggaagactgagggctggggacacacacaggccctcagcatcttcctcttccagagccggagcctccgacggaagggaagcaggctgccccagcggagaacgaggccccccagacccagggcaaacgcatcaaagtggagcccggcccgagggaaaccaaaggctccgaggacagtggcgacgaggatccctccagccacccggccacaccgaggcccgagttcacctctgtcatccgggcaggggtcctgaagcaggatccggtgcggccatggggcctggcgcctcccggggaccccccgcccaccctcctgcacgcgggcttcctgccgccggtggtgcggggcctgtgcacacccggcaccatccgctacggccccgcggagctgggcctggtgtacccgcacctgcagaggctgggtccgggccccgcgctcccggaggccttttacccgcccctgggcctgccctacccggggcccgcgggcaccaggctgccgcggaagggggactgaggactggcagagctgccggcgccggaccctgcgacaaccggggtcccccaggacagtaggcccggctctgcccgtagccctgagaattaaacgccggctctccctgcagtggtttg

SEQ ID NO: 21734 - DNA, 1873 bp, Homo sapiens
gtctccaagtctgcgaggccgaggtgggcgccgagagctgggcgccacagcccgcgcgtcccgctgcgccccgcgcgccccggggtctatggagctgcccctccgcgccgcccggccggccccacgccgcgcccggagcctgctctgcggccaagtaatcggactggcggtcctgcgggagactcggggctcggagcccgcctgagcgagccccccggagatggcggccccctatcccggcagtggcggcggaagcgaggtcaaatgcgtgggaggccgcggcgccagcgtcccctgggactttctacccgggctgatggtcaaggcgccgtccggaccgtgccccaggccgccgcggccccgcagcgctggtctccgaagtcttcgagcagcacctgggaggtcacatcttgcagtccctggatggctttgtgttcgccttgaaccaggaaggaaaattcctctacatctcagagacagtctccatctatctgggtctctcacaggtggagatgacgggcagcagcgtcttcgactacattcaccctggggaccactcagaggtgctggagcaactggggctgcggacgccgacgcccggccccccaaccccgccctccgtctcctcttcctcctcctcttcctcttcgcttgcagatacccccgagatcgaggccagcctcaccaaggtgcccccctcctccctggtccaggagcgctccttctttgtccgcatgaaatccacgctcaccaagagggggctgcacgtcaaggcctcagggtacaaggtcatccacgtgactgggcgccttcgggcccacgccctgggccttgtggccctcgggcacacgttgcccccggcccccctggctgagctgccactccatggacacatgatcgtcttccgtctcagcctgggtctcaccatccttgcttgtgagagcagagtcagcgaccacatggacctggggccctcagagctggtgggccgcagctgctaccagtttgtccacggacaagacgccacgaggatccgccagagccacgtggacttgctggacaagggtcaggtgatgactggttactaccgttggctgcagcgtgccgggggcttcgtgtggctgcagtctgtggccacagtggctgggagcgggaagagccccggggagcaccatgtgctttgggtcagccacgtgctcagccaagccgagggtggccaaactcctttggatgccttccagcttccagccagcgtggcctgtgaggaggcatccagcccggggccagagcccacagagccggagcctccgacggaagggaagcaggctgccccagcggagaacgaggccccccagacccagggcaaacgcatcaaagtggagcccggcccgagggaaaccaaaggctccgaggacagtggcgacgaggatccctccagccacccggccacaccgaggcccgagttcacctctgtcatccgggcaggggtcctgaagcaggatccggtgcggccatggggcctggcgcctcccggggaccccccgcccaccctcctgcacgcgggcttcctgccgccggtggtgcggggcctgtgcacacccggcaccatccgctacggccccgcggagctgggcctggtgtacccgcacctgcagaggctgggtccgggccccgcgctcccggaggccttttacccgcccctgggcctgccctacccggggcccgcgggcaccaggctgccgcggaagggggactgaggactggcagagctgccggcgccggaccctgcgacaaccggggtcccccaggacagtaggcccggctctgcccgtagccctgagaattaaacgccggctctccctgcagtggtttg

SEQ ID NO: 21735 - DNA, 762 bp, Homo sapiens
ctcgctgctgggctacctctcagtctctctgactctgcctctctgtgctttcacctttttctcttctccccaccgtctccctgcccactcccctgctctcactcctcctgtctcctcctgtctacctggctctctgtcttgcccctgtccccaccccacccccttcccggggccagagcccacagagccggagcctccgacggaagggaagcaggctgccccagcggagaacgaggccccccagacccagggcaaacgcatcaaagtggagcccggcccgagggaaaccaaaggctccgaggacagtggcgacgaggatccctccagccacccggccacaccgaggcccgagttcacctctgtcatccgggcaggggtcctgaagcaggatccggtgcggccatggggcctggcgcctcccggggaccccccgcccaccctcctgcacgcgggcttcctgccgccggtggtgcggggcctgtgcacacccggcaccatccgctacggccccgcggagctgggcctggtgtacccgcacctgcagaggctgggtccgggccccgcgctcccggaggccttttacccgcccctgggcctgccctacccggggcccgcgggcaccaggctgccgcggaagggggactgaggactggcagagctgccggcgccggaccctgcgacaaccggggtcccccaggacagtaggcccggctctgcccgtagccctgagaattaaacgccggctctccctgcagtggtttg

SEQ ID NO: 21736 - DNA, 352 bp, Homo sapiens
cagcagcctcttcagcatccatctattgtggggggtacctggactgggaaggcgaatgctcaagatccctccactccctgccccttccgaggaccactgaagccccctccccaccaaaacagtccacctcaggtggagacccaggtttcagaacctcttaccacttggcggctggacagagggacaccgggtcctctccttccccctccctgtctctcccggctctagtccctggatggctttgtgttcgccttgaaccaggaaggaaaattcctctacatctcagagacagtctccatctatctgggtctctcacaggtaagggacccccagtggacctggattggctcag

SEQ ID NO: 21737 - DNA, 2049 bp, Homo sapiens
tcatccaggcccccccccccagctccttgctgggaccctgagccctgcacggatctcagtttccctagaaggtctcccgagggcactaagcgttgcccctggccccctcccgctgcaggagactcggggctcggagcccgcctgagcgagccccccggagatggcggccccctatcccggcagtggcggcggaagcgaggtcaaatgcgtgggaggccgcggcgccagcgtcccctgggactttctacccgggctgatggtcaaggcgccgtccggaccgtgcctgcaggcgcagcgcaaggagaagtcccggaacgcggcgcgctcgcggcgcgggaaggagaacctggagttcttcgagctggccaagcttctcccgctgcccggcgccatctccagccagctggacaaggcttccatcgtgcgcctcagcgtcacctacctccgcctgcgccggttcgccgcgctgggggcgccgccctgggggctgagagccgcggggccgccagctggcctcgccccaggccgccgcggccccgcagcgctggtctccgaagtcttcgagcagcacctgggaggtcacatcttgcagtccctggatggctttgtgttcgccttgaaccaggaaggaaaattcctctacatctcagagacagtctccatctatctgggtctctcacaggtggagatgacgggcagcagcgtcttcgactacattcaccctggggaccactcagaggtgctggagcaactggggctgcggacgccgacgcccggccccccaaccccgccctccgtctcctcttcctcctcctcttcctcttcgcttgcagatacccccgagatcgaggccagcctcaccaaggtgcccccctcctccctggtccaggagcgctccttctttgtccgcatgaaatccacgctcaccaagagggggctgcacgtcaaggcctcagggtacaaggtcatccacgtgactgggcgccttcgggcccacgccctgggccttgtggccctcgggcacacgttgcccccggcccccctggctgagctgccactccatggacacatgatcgtcttccgtctcagcctgggtctcaccatccttgcttgtgagagcagagtcagcgaccacatggacctggggccctcagagctggtgggccgcagctgctaccagtttgtccacggacaagacgccacgaggatccgccagagccacgtggacttgctggacaagggtcaggtgatgactggttactaccgttggctgcagcgtgccgggggcttcgtgtggctgcagtctgtggccacagtggctgggagcgggaagagccccggggagcaccatgtgctttgggtcagccacgtgctcagccaagccgagggtggccaaactcctttggatgccttccagcttccagccagcgtggcctgtgaggaggcatccagcccggggccagagcccacagagccggagcctccgacggaagggaagcaggctgccccagcggagaacgaggccccccagacccagggcaaacgcatcaaagtggagcccggcccgagggaaaccaaaggctccgaggacagtggcgacgaggatccctccagccacccggccacaccgaggcccgagttcacctctgtcatccgggcaggggtcctgaagcaggatccggtgcggccatggggcctggcgcctcccggggaccccccgcccaccctcctgcacgcgggcttcctgccgccggtggtgcggggcctgtgcacacccggcaccatccgctacggccccgcggagctgggcctggtgtacccgcacctgcagaggctgggtccgggccccgcgctcccggaggccttttacccgcccctgggcctgccctacccggggcccgcgggcaccaggctgccgcggaagggggactgaggactggcagagctgccggcgccggaccctgcgacaaccggggtcccccaggacagtaggcccggctctgcccgtagccctgagaattaaacgccggctctccctgcagtggtttg

SEQ ID NO: 21738 - DNA, 778 bp, Homo sapiens
gtctccaagtctgcgaggccgaggtgggcgccgagagctgggcgccacagcccgcgcgtcccgctgcgccccgcgcgccccggggtctatggagctgcccctccgcgccgcccggccggccccacgccgcgcccggagcctgctctgcggccaagtaatcggactggcggtcctgcggccccaggccgccgcggccccgcagcgctggtctccgaagtcttcgagcagcacctgggaggtcacatcttgcagtccctggatggctttgtgttcgccttgaaccaggaaggaaaattcctctacatctcagagacagtctccatctatctgggtctctcacaggtggagatgacgggcagcagcgtcttcgactacattcaccctggggaccactcagaggtgctggagcaactggggctgcggacgccgacgcccggccccccaaccccgccctccgtctcctcttcctcctcctcttcctcttcgcttgcagatacccccgagatcgagtcagcgaccacatggacctggggccctcagagctggtgggccgcagctgctaccagtttgtccacggacaagacgccacgaggatccgccagagccacgtggactgtgagacccacctccagccacaagcctgcctaccaccccccagacccgagcatccactccctggtccctggaagtccttcttcagggctgcccacagtccctcctgctgcacctacagctccagggactccgtttagcattggaagagcagcaaggagactga

SEQ ID NO: 21739 - DNA, 1835 bp, Homo sapiens
gtctccaagtctgcgaggccgaggtgggcgccgagagctgggcgccacagcccgcgcgtcccgctgcgccccgcgcgccccggggtctatggagctgcccctccgcgccgcccggccggccccacgccgcgcccggagcctgctctgcggccaagtaatcggactggcggtcctgcgggagactcggggctcggagcccgcctgagcgagccccccggagatggcggccccctatcccggcagtggcggcggaagcgaggtcaaatgcgtgggaggccgcggcgccagcgtcccctgggactttctacccgggctgatggtcaaggcgccgtccggaccgtgcctgcaggcgcagcgcaaggagaagtcccggaacgcggcgcgctcgcggcgcgggaaggagaacctggagttcttcgagctggccaagcttctcccgctgcccggcgccatctccagccagctggacaaggcttccatcgtgcgcctcagcgtcacctacctccgcctgcgccggttcgccgcgctgggggcgccgccctgggggctgagagccgcggggccgccagctggcctcgccccaggccgccgcggccccgcagcgctggtctccgaagtcttcgagcagcacctgggaggtcacatcttgcagtccctggatggctttgtgttcgccttgaaccaggaaggaaaattcctctacatctcagagacagtctccatctatctgggtctctcacaggtggagatgacgggcagcagcgtcttcgactacattcaccctggggaccactcagaggtgctggagcaactggggctgcggacgccgacgcccggccccccaaccccgccctccgtctcctcttcctcctcctcttcctcttcgcttgcagatacccccgagatcgagtcagcgaccacatggacctggggccctcagagctggtgggccgcagctgctaccagtttgtccacggacaagacgccacgaggatccgccagagccacgtggacttgctggacaagggtcaggtgatgactggttactaccgttggctgcagcgtgccgggggcttcgtgtggctgcagtctgtggccacagtggctgggagcgggaagagccccggggagcaccatgtgctttgggtcagccacgtgctcagccaagccgagggtggccaaactcctttggatgccttccagcttccagccagcgtggcctgtgaggaggcatccagcccggggccagagcccacagagccggagcctccgacggaagggaagcaggctgccccagcggagaacgaggccccccagacccagggcaaacgcatcaaagtggagcccggcccgagggaaaccaaaggctccgaggacagtggcgacgaggatccctccagccacccggccacaccgaggcccgagttcacctctgtcatccgggcaggggtcctgaagcaggatccggtgcggccatggggcctggcgcctcccggggaccccccgcccaccctcctgcacgcgggcttcctgccgccggtggtgcggggcctgtgcacacccggcaccatccgctacggccccgcggagctgggcctggtgtacccgcacctgcagaggctgggtccgggccccgcgctcccggaggccttttacccgcccctgggcctgccctacccggggcccgcgggcaccaggctgccgcggaagggggactgaggactggcagagctgccggcgccggaccctgcgacaaccggggtcccccaggacagtaggcccggctctgcccgtagccctgagaattaaacgccggctctccctgcagtggtttg

SEQ ID NO: 21740 - DNA, 1878 bp, Homo sapiens
ttggtgcgccggagtaggctagggcagcgacacgcccgcgtcgtattccggtgtgccccgatgcgccccaggggtcctatggagctgtccgctccgtcgccgctcgcggccttcctggatgccagagctgaggcagcgtgctctgcggcctgtttatcggcagtggtgggtcctgcagggtagcactcggagtcctcgcgacgtctcagaccttgcagcggatgccctcgccttggcacgattggatggcctgctctattccgggctaggtgagcggggcgaagccgaagagtaagacatgccgatgggaaggactgtcgcgtgctcgacgcgtcccctgggactttctacccgggctgatggtcaaggcgccgtccggaccgtgcctgcaggcgcagcgcaaggagaagtcccggaacgcggcgcgctcgcggcgcgggaaggagaacctggagttcttcgagctggccaagcttctcccgctgcccggcgccatctccagccagctggacaaggcttccatcgtgcgcctcagcgtcacctacctccgcctgcgccggttcgccgcgctgggggcgccgccctgggggctgagagccgcggggccgccagctggcctcgccccaggccgccgcggccccgcagcgctggtctccgaagtcttcgagcagcacctgggaggtcacatcttgcagtccctggatggctttgtgttcgccttgaaccaggaaggaaaattcctctacatctcagagacagtctccatctatctgggtctctcacaggtggagatgacgggcagcagcgtcttcgactacattcaccctggggaccactcagaggtgctggagcaactggggctgcggacgccgacgcccggccccccaaccccgccctccgtctcctcttcctcctcctcttcctcttcgcttgcagatacccccgagatcgagtcagcgaccacatggacctggggccctcagagctggtgggccgcagctgctaccagtttgtccacggacaagacgccacgaggatccgccagagccacgtggacttgctggacaagggtcaggtgatgactggttactaccgttggctgcagcgtgccgggggcttcgtgtggctgcagtctgtggccacagtggctgggagcgggaagagccccggggagcaccatgtgctttgggtcagccacgtgctcagccaagccgagggtggccaaactcctttggatgccttccagcttccagccagcgtggcctgtgaggaggcatccagcccggggccagagcccacagagccggagcctccgacggaagggaagcaggctgccccagcggagaacgaggccccccagacccagggcaaacgcatcaaagtggagcccggcccgagggaaaccaaaggctccgaggacagtggcgacgaggatccctccagccacccggccacaccgaggcccgagttcacctctgtcatccgggcaggggtcctgaagcaggatccggtgcggccatggggcctggcgcctcccggggaccccccgcccaccctcctgcacgcgggcttcctgccgccggtggtgcggggcctgtgcacacccggcaccatccgctacggccccgcggagctgggcctggtgtacccgcacctgcagaggctgggtccgggccccgcgctcccggaggccttttacccgcccctgggcctgccctacccggggcccgcgggcaccaggctgccgcggaagggggactgaggactggcagagctgccggcgccggaccctgcgacaaccggggtcccccaggacagtaggcccggctctgcccgtagccctgagaattaaacgccggctctccctgcagtggtttg

SEQ ID NO: 21741 - DNA, 928 bp, Homo sapiens
gtctccaagtctgcgaggccgaggtgggcgccgagagctgggcgccacagcccgcgcgtcccgctgcgccccgcgcgccccggggtctatggagctgcccctccgcgccgcccggccggccccacgccgcgcccggagcctgctctgcggccaagtaatcggactggcggtcctgcgggagactcggggctcggagcccgcctgagcgagccccccggagatggcggccccctatcccggcagtggcggcggaagcgaggtcaaatgcgtgggaggccgcggcgccagcgtcccctgggactttctacccgggctgatggtcaaggcgccgtccggaccgtgcctgcaggcgcagcgcaaggagaagtcccggaacgcggcgcgctcgcggcgcgggaaggagaacctggagttcttcgagctggccaagcttctcccgctgcccggcgccatctccagccagctggacaaggcttccatcgtgcgcctcagcgtcacctacctccgcctgcgccggttcgccgcgctgggggcgccgccctgggggctgagagccgcggggccgccagctggcctcgccccaggccgccgcggccccgcagcgctggtctccgaagtcttcgagcagcacctgggaggtcacatcttgcagtccctggatggctttgtgttcgccttgaaccaggaaggaaaattcctctacatctcagagacagtctccatctatctgggtctctcacaggtggagatgacgggcagcagcgtcttcgactacattcaccctggggaccactcagaggtgctggagcaactggggctgcggacgccgacgcccggccccccaaccccgccctccgtctcctcttcctcctcctcttcctcttcgcttgcagatacccccgagatcggtaattctaagggctcctaa

SEQ ID NO: 21742 - DNA, 1122 bp, Homo sapiens
agggaaattaggaaagggcgatgtaagtttggcttttataagttcattgtcacagtagttcctggtatttagtttgtcacattgaagctttgctggatgtgactaagctggcagagaaatcttgcaaaatatctttttgaaattagtatcacacccaactgcattctgttgcaaattaccaacattgtgtgtgacatttttccttcctgccccctcagctagccccagttattgggatttagatgtgttttcctgcttgaaaaagaaaagagccttaacaggtagcagtatgtcaagttggactttgcccaccgaggaaacagcatctgccattgattgacatgatactaatttcagctgggtgcccaggaggcctctggccgatagttgttttggttggtttgtttatttggatttgttttgcagttcgtgtctgggatgtccggccatttgcccccaaagagagatgtgtaaagatatttcaaggaaatgtgcacaactttgaaaagaaccttctgagatgttcttggtcacctgatggaagcaaaatagcagctggctcagccgacaggtttgtttatgtgtgggataccacaagcaggagaatattgtataagctgcccggccatgctggctccatcaatgaagtggctttccaccctgatgagcccatcattatctcagcatcgagtgacaagagactgtatatgggagagattcagtgaagatatggactggaagactccaaggccgcttgtctttgagacctcagactgcataagtgatgccaaatgttggatgtccaggctagcaccctcccttcagatgaccattgctagcaagaaacaggaggcggtggccatattccaaaaaccacttctgtcccatttcaccaggatgactaaggcaagctccctgtggcctctaaaaaccacctgccagatttcagggactgtttttttttttctttttcttttttcctgttttctaatgcaggcccaatgtgacaaatttgttggttgggatttttttttttttttgtaactggcttgtatgatattttctttctgtatttctctatatcattttgtattaaaagccaaatagatgcctttttacaag

SEQ ID NO: 21743 - DNA, 2115 bp, Homo sapiens
aagctggaagttgtggaggaaggactaatttggaaccaattgcgtggcgcctgagagcggcagcgcggtcagtggcggcgctgaagagaccggttgccgccatgatagaacagcagaagcgtaagggcccagagttgccgctggttccagtcaagcggcagcggcatgagttgctgttgggagcggggtctggcccaggagccgggcagcagcaggcgacgccgggagccttgctgcaagcgggacctccaagatgttcctcccttcaagccccaatcatgctgctctctggacatgaaggggaagtctactgctgcaagttccaccccaacggatccaccttagcatctgcaggatttgaccgactgatattactgtggaatgtctatggtgactgtgataactatgccacactgaagggacacagtggagcagtgatggaattgcattacaacacagatggcagtatgcttttctcagcatccacagataaaaccgtggctgtgtgggatagtgaaacaggtgagagggttaaaaggctaaagggacatacttcctttgtgaattcctgttatccagccaggagaggccctcagcttgtctgcactggcagtgacgatggcacagttaagctttgggacatccggaagaaagcagccatccagacatttcagaacacgtaccaggtgttagctgtgaccttcaatgacacaagtgatcagattatttctggtggaatagacaatgatatcaaggtctgggacctgcgccagaacaagctaacctacaccatgagaggccatgcagattcagtgactggcctgagtttaagttctgaaggctcttatcttttgtccaatgcaatggacaatacagttcgtgtctgggatgtccggccatttgcccccaaagagagatgtgtaaagatatttcaaggaaatgtgcacaactttgaaaagaaccttctgagatgttcttggtcacctgatggaagcaaaatagcagctggctcagccgacaggtttgtttatgtgtgggataccacaagcaggagaatattgtataagctgcccggccatgctggctccatcaatgaagtggctttccaccctgatgagcccatcattatctcagcatcgagtgacaagagactgtatatgggagagattcagtgaagatatggactggaagactccaaggccgcttgtctttgagacctcagactgcataagtgatgccaaatgttggatgtccaggctagcaccctcccttcagatgaccattgctagcaagaaacaggaggcggtggccatattccaaaaaccacttctgtcccatttcaccaggatgactaaggcaagctccctgtggcctctaaaaaccacctgccagatttcagggactgtttttttttttctttttcttttttcctgttttctaatgcaggcccaatgtgacaaatttgttggttgggatttttttttttttttgtaactggcttgtatgatattttctttctgtatttctctatatcattttgtattaaaagccaaatagatgcctttttacaagagccatgtggattggatttattgctgtcttttttttgaggcttgattgctataaatcagaatagagcatgatgtggccacagaatacaattcatttaaacttccaaaaaaaaaaaaaaaaaaaaaaaaaaaaaaaaaaaaaaaaaaaataaaaaaaaaaaaaaccaaacaaaatacctataaaacacctataacatcacacaacatatatataccataataccagaaaaaaatccttggggggggccccttacccactttgccctttatcggctggttttccaaaatagtagtctctttatcaacttaattcgccggaaaaaccctgtaattcccctattaaattcacctgttagcacatccttgttcatctatctggataataggaaaaaagcctgctcaaatcccctttccctaaaatcctccattccgtcatggaaaaacccccctattaacacttctttcttgttataaaataccacctaaattatcctaaaaaactttctttcttatcacactgactcgacctatcaaaaccctttat

SEQ ID NO: 21744 - DNA, 1833 bp, Homo sapiens
  misc_feature (1734)..(1734): n is a, c, g, or t
aagctggaagttgtggaggaaggactaatttggaaccaattgcgtggcgcctgagagcggcagcgcggtcagtggcggcgctgaagagaccggttgccgccatgatagaacagcagaagcgtaagggcccagagttgccgctggttccagtcaagcggcagcggcatgagttgctgttgggagcggggtctggcccaggagccgggcagcagcaggcgacgccgggagccttgctgcaagcgggacctccaagatgttcctcccttcaagccccaatcatgctgctctctggacatgaaggggaagtctactgctgcaagttccaccccaacggatccaccttagcatctgcaggatttgaccgactgatattactgtggaatgtctatggtgactgtgataactatgccacactgaagggacacagtggagcagtgatggaattgcattacaacacagatggcagtatgcttttctcagcatccacagataaaaccgtggctgtgtgggatagtgaaacaggtgagagggttaaaaggctaaagggacatacttcctttgtgaattcctgttatccagccaggagaggccctcagcttgtctgcactggcagtgacgatggcacagttaagctttgggacatccggaagaaagcagccatccagacatttcagaacacgtaccaggtgttagctgtgaccttcaatgacacaagtgatcagattatttctggtggaatagacaatgatatcaaggtctgggacctgcgccagaacaagctaacctacaccatgagaggccatgcagattcagtgactggcctgagtttaagttctgaaggctcttatcttttgtccaatgcaatggacaatacagttcgtgtctgggatgtccggccatttgcccccaaagagagatgtgtaaagatatttcaaggaaatgtgcacaactttgaaaagaaccttctgagatgttcttggtcacctgatggaagcaaaatagcagctggctcagccgacaggtttgtttatgtgtgggataccacaagcaggagaatattgtataagctgcccggccatgctggctccatcaatgaagtggctttccaccctgatgagcccatcattatctcagcatcgagtgacaagagactgtatatgggagagattcagtgaagatatggactggaagactccaaggccgcttgtctttgagacctcagactgcataagtgatgccaaatgttggatgtccaggctagcaccctcccttcagatgaccattgctagcaagaaacaggaggcggtggccatattccaaaaaccacttctgtcccatttcaccaggatgactaaggcaagctccctgtggcctctaaaaaccacctgccagatttcagggactgtttttttttttctttttcttttttcctgttttctaatgcaggcccaatgtgacaaatttgttggttgggatttttttttttttttgtaactggcttgtatgatattttctttctgtatttctctatatcattttgtattaaaagccaaatagatgcctttttacaagagccatgtggattggatttattgctgtcttttttttgaggcttgattgctataaatcagaatagagcatgatgtggccacagaatacaattcatttaaacttccaaaaaaaaaaaaaaaaaaaaaaaaaaaaaaaaaaaaaaaaaaaataaaaaaaactcgngactagttccacgcacacaccaccacgcccatgtgctcctagttttttttctaagccaaattcagccttggcctgactgatttccacatccaagaatcc

SEQ ID NO: 21745 - DNA, 703 bp, Homo sapiens
ctctgtgttcctagtttctaaaagccagaacatggttcagtaaatgtaaggtaagtaaataattgttgcttccatttcctttaaaaagccatgcctctgtcctacccccagctctaagaggacttacccttgcttttcatgataccttacaggtttgtttatgtgtgggataccacaagcaggagaatattgtataagctgcccggccatgctggctccatcaatgaagtggctttccaccctgatgagcccatcattatctcagcatcgagtgacaagagactgtatatgggagagattcagtgaagatatggactggaagactccaaggccgcttgtctttgagacctcagactgcataagtgatgccaaatgttggatgtccaggctagcaccctcccttcagatgaccattgctagcaagaaacaggaggcggtggccatattccaaaaaccacttctgtcccatttcaccaggatgactaaggcaagctccctgtggcctctaaaaaccacctgccagatttcagggactgtttttttttttctttttcttttttcctgttttctaatgcaggcccaatgtgacaaatttgttggttgggatttttttttttttttgtaactggcttgtatgatattttctttctgtatttctctatatcattttgtattaaaagccaaatagatgcctttttacaag

SEQ ID NO: 21746 - DNA, 274 bp, Homo sapiens
gtaagtctgtcccaacgagggggaaagggaaactggaaatctccccgtagggatcctgggaatagagagtcaaaagcgggtatctgttttatacgaatttccatgcaaacagcctttgggtgtttttgttgttgttgttgttggtttttttgttgttgggttttgttttgttttgtttttgagacagtgtctcgctgttttgcccaggttggagcaatggtgcaatcttggctcactgcaacctctgcctcctgggttcaagcagttctcctgc

SEQ ID NO: 21747 - DNA, 405 bp, Homo sapiens
tactgtggaatgtctatggtgactgtgataactatgccacactgaagggacacagtggagcagtgatggaattgcattacaacacagatggcaggtgagtattctgcataatggaaggacagcttctcatactaattcttggcgtcctttcacctttcatcctttctcaggagaccctgctatcaaaaactactaattttgggtagctactttagtatccgatttatcactgtcaccccaagtgaggtgtttatagtctgtgtatgcaaatataaagatgttacatcggtcatttcaacaacccagacaaatttttctttttttaagacataaaataaatgtgatttttatatgtaggctggagtgcagtgacacaaacatggctcactgcagcctcaacctctt

SEQ ID NO: 21748 - DNA, 1572 bp, Homo sapiens
aagctggaagttgtggaggaaggactaatttggaaccaattgcgtggcgcctgagagcggcagcgcggtcagtggcggcgctgaagagaccggttgccgccatgatagaacagcagaagcgtaagggcccagagttgccgctggttccagtcaagcggcagcggcatgagttgctgttgggagcggggtctggcccaggagccgggcagcagcaggcgacgccgggagccttgctgcaagcgggacctccaagatgttcctcccttcaagccccaatcatgctgctctctggacatgaaggggaagtctactgctgcaagttccaccccaacggatccaccttagcatctgcaggatttgaccgactgatattactgtggaatgtctatggtgactgtgataactatgccacactgaagggacacagtggagcagtgatggaattgcattacaacacagatggcagtatgcttttctcagcatccacagataaaaccgtggctgtgtgggatagtgaaacaggtgagagggttaaaaggctaaagggacatacttcctttgtgaattcctgttatccagccaggagaggccctcagcttgtctgcactggcagtgacgatggcacagttaagctttgggacatccggaagaaagcagccatccagacatttcagaacacgtaccaggtgttagctgtgaccttcaatgacacaagtgatcagattatttctggtggaatagacaatgatatcaaggtctgggacctgcgccagaacaagctaacctacaccatgagaggccatgcagattcagtgactggcctgagtttaagttctgaaggctcttatcttttgtccaatgcaatggacaatacagttcgtgtctgggatgtccggccatttgcccccaaagagagatgtgtaaagatatttcaaggaaatgtgcacaactttgaaaagaaccttctgagatgttcttggtcacctgatggaagcaaaatagcagctggctcagccgacaggtttgtttatgtgtgggataccacaagcaggagaatattgtataagctgcccggccatgctggctccatcaatgaagtggctttccaccctgatgagcccatcattatctcagcatcgagtgacaagagactgtatatgggagagattcagtgaagatatggactggaagactccaaggccgcttgtctttgagacctcagactgcataagtgatgccaaatgttggatgtccaggctagcaccctcccttcagatgaccattgctagcaagaaacaggaggcggtggccatattccaaaaaccacttctgtcccatttcaccaggatgactaaggcaagctccctgtggcctctaaaaaccacctgccagatttcagggactgtttttttttttctttttcttttttcctgttttctaatgcaggcccaatgtgacaaatttgttggttgggatttttttttttttttgtaactggcttgtatgatattttctttctgtatttctctatatcattttgtattaaaagccaaatagatgcctttttacaag

SEQ ID NO: 21749 - DNA, 574 bp, Homo sapiens
  misc_feature (484)..(484): n is a, c, g, or t
  misc_feature (503)..(503): n is a, c, g, or t
  misc_feature (539)..(539): n is a, c, g, or t
aagctggaagttgtggaggaaggactaatttggaaccaattgcgtggcgcctgagagcggcagcgcggtcagtggcggcgctgaagagaccggttgccgccatgatagaacagcagaagcgtaagggcccagagttgccgctggttccagtcaagcggcagcggcatgagttgctgttgggagcggggtctggcccaggagccgggcagcagcaggcgacgccgggagccttgctgcaagcgggacctccaagatgttcctcccttcaagccccaatcatgctgctctctggacatgaaggggaagtctactgctgcaagttccaccccaacggatccaccttagcatctgcaggatttgaccgactgatattactgtggaatgtctatggtgactgtgataactatgccacactgaagggacacagtggagcagtgatggaattgcattacaacacagatggcagtatgcttttcttagcatnacagataaaccgtggttgntggatagtgaaacagttaaagggtggtaaaggacancttctttggtcctgtatccaccggggcctcttgct

SEQ ID NO: 21750 - DNA, 1887 bp, Homo sapiens
  misc_feature (1734)..(1734): n is a, c, g, or t
aagctggaagttgtggaggaaggactaatttggaaccaattgcgtggcgcctgagagcggcagcgcggtcagtggcggcgctgaagagaccggttgccgccatgatagaacagcagaagcgtaagggcccagagttgccgctggttccagtcaagcggcagcggcatgagttgctgttgggagcggggtctggcccaggagccgggcagcagcaggcgacgccgggagccttgctgcaagcgggacctccaagatgttcctcccttcaagccccaatcatgctgctctctggacatgaaggggaagtctactgctgcaagttccaccccaacggatccaccttagcatctgcaggatttgaccgactgatattactgtggaatgtctatggtgactgtgataactatgccacactgaagggacacagtggagcagtgatggaattgcattacaacacagatggcagtatgcttttctcagcatccacagataaaaccgtggctgtgtgggatagtgaaacaggtgagagggttaaaaggctaaagggacatacttcctttgtgaattcctgttatccagccaggagaggccctcagcttgtctgcactggcagtgacgatggcacagttaagctttgggacatccggaagaaagcagccatccagacatttcagaacacgtaccaggtgttagctgtgaccttcaatgacacaagtgatcagattatttctggtggaatagacaatgatatcaaggtctgggacctgcgccagaacaagctaacctacaccatgagaggccatgcagattcagtgactggcctgagtttaagttctgaaggctcttatcttttgtccaatgcaatggacaatacagttcgtgtctgggatgtccggccatttgcccccaaagagagatgtgtaaagatatttcaaggaaatgtgcacaactttgaaaagaaccttctgagatgttcttggtcacctgatggaagcaaaatagcagctggctcagccgacaggtttgtttatgtgtgggataccacaagcaggagaatattgtataagctgcccggccatgctggctccatcaatgaagtggctttccaccctgatgagcccatcattatctcagcatcgagtgacaagagactgtatatgggagagattcagtgaagatatggactggaagactccaaggccgcttgtctttgagacctcagactgcataagtgatgccaaatgttggatgtccaggctagcaccctcccttcagatgaccattgctagcaagaaacaggaggcggtggccatattccaaaaaccacttctgtcccatttcaccaggatgactaaggcaagctccctgtggcctctaaaaaccacctgccagatttcagggactgtttttttttttctttttcttttttcctgttttctaatgcaggcccaatgtgacaaatttgttggttgggatttttttttttttttgtaactggcttgtatgatattttctttctgtatttctctatatcattttgtattaaaagccaaatagatgcctttttacaagagccatgtggattggatttattgctgtcttttttttgaggcttgattgctataaatcagaatagagcatgatgtggccacagaatacaattcatttaaacttccaaaaaaaaaaaaaaaaaaaaaaaaaaaaaaaaaaaaaaaaaaaataaaaaaaactcgngactagttccacgcacacaccaccacgcccatgtgctcctagttttttttctaaataagcaacctgagacacaaaggataagctttagcagctcatacacgtgacagagccaaattcagccttggcctgactgatttccacatccaagaatcc

SEQ ID NO: 21751 - DNA, 454 bp, Homo sapiens
ggttactacaaacctcttaggggaccgaaacagaaacctttgctatttatgtctcagacatgcagccaccatgaagaaagcaggtaattcgtggaaacgcagctcattagtagccaagatgaaatgaaaaggaaatatatattgcagtaatttaattaagaaactcacaagaggggctgggcatggtggttcatacctgtaatcccagcgctttgggaggccgaggtggcagatcacttgtggtcaggagttcgagaccagcctggccaacatggcgaaaccccatctctactgaaaatacaaaaattcgccgggcatggtggtgtctgcctgcagtctcaggtactagggagcctgaagtgggaggatcacttgaatccaggaggcagaggttgcagtgagccgagatcgcgccattgcactccaacctgggcgacagagtgagactctgtct

SEQ ID NO: 21752 - DNA, 456 bp, Homo sapiens
acaaatacaattagctattgcaaagccttttgggaattattcccagtgtaaataaacacataaccatatagcaagagccttgataaagtccaaaaacatgcaaacttggagtgtctaagagaaaagaccacaatgtaaatgaaaaaccaaataaactcgggcaaaccataggatagggccctgtctgtgatggcctgcatatgatgagccatagaaaaaggatggtgaattctggataataagaaatgtcaatgagatggaagaaccacctgttttatgtaaagctccaaataaccagatcacagtggacagccactcaaataatgccttcataatacagagtattattcaggaattaacttcaattcacagaggagctttaagggcagccaatatttggataggcctgttcagaaaaaaacagaacagtaattatagaaaagaatcatatcctcg

SEQ ID NO: 21753 - DNA, 391 bp, Homo sapiens
ttttcccctaagtccccaaagtccattgtatcattctgatgcctttgcatcctcatagcttagctcccacttatgagtgagaacatataatgtttggttttccattcttgaattactgaacttggaatattagcctccagttccatccaggttgctgccaatgcaattaatttgttcctttttatggctgagtggcattccatcatatacatatgatggaatatatatatacacacatatatatgtatgtatatatacatatatgtatatgcatgtatatatacacatgtacacatatgtatatgtatgtatatatacatatatacatgtgtgtgtatatacacacatatatatacacatatgtatatataccaaagccctcaccaaaatt

SEQ ID NO: 21754 - DNA, 432 bp, Homo sapiens
ccaccacccagctctgtgactttgggctggtcactcatactttttgtgcctcagtttcctcatctgtaaaatgagaatgataacagtatcctagagtactcagtttcaaagaccatgggctagaactcaagacctaatgttccgatccagacccgaagcaagctggggtagctgacctcgaggcagagctgtgggaagagcccactcgtgacctggatgcgaacccttgacttgccagaagtccatgggcaagttctggctcctgtgccagccttagtttccacatctataaaataaagacaggccgggcatggtggctcacgcctgtaatcccagcactttgggaggccaaggcaggcggatcacttgaggtcaggagttcgagaccagcctggccaacatggtgtaaccccatctctactaaaaatacaa

SEQ ID NO: 21755 - DNA, 411 bp, Homo sapiens
aaactcatacatcttacataaaaggaaatcatcagcatttcagacacacctttattggagggtaaaatcacttaagatttgctagttgcctatttttttttaaatcatcttttccagcgataatctgctaaagcatccttccaccctctttgttctccagaatgccagcccctctcaaggtagaggagctggagaagcctgcactgggccgggtccaaggaagcctgtgatttactcctgtggcttgatgagaccaagtcatgtgcatatggtggattatttttcctgactttgtctcaaaattttgtgtagaaaggatgacgattattagatttttccaggggcttgaggtataggaatggggaaaatgtatatggaaatcatgaaactgaattatgagttttggcaaaa

SEQ ID NO: 21756 - DNA, 840 bp, Homo sapiens
ggacaggatggaaggggcatgctggacaagagttaaccgatgacgaagggaaaaaaactcccaaaaaatggagtaaagaccccttttctttaacatgacagtctaaatgaatgtcataattatgaaactttgctaactagatgctgtcaacagtacaccttggaccaatagaaactttgacgttgattttgcttttttcacagtcgtggtcgtggtttgcagtttgttgttggtggtggcagtggtggtggttggttgtggtgagtgtgtctgtgtgtatgtgtttgccagttactggtttctcctaattgtaagaggtttagagggttctttacttcactaatgtagtcttctttgttctggtagttagatcagcccccacggtatttgtggaagacttttcattataagggcttttgaatgtggtttgtgtctaggctttagtaaaactaagaattctagaacagctatttaatgaaaccttgtttctcaagtcttgatttagctacaggcagaaaaaagaaaaaaaaaaaaacaatagcaacattcttgcctcaaccagtaatgcactttggaaatactttctctgagaaacttactccatcagtttgaggctgtcacattgagaaacatgcaatttcggtttttttcctgttatttttcccgtgccattaattaaaactgagcagctacctctgtaaatgcagcggttcaaaatgaactgtgaaaaaggatttttcatttgtgttggatttctaattagaaaactgcattcaaagttgcttagaggtggaaatgttaacatttgtgaataaatggtacttggtgacacacttattt

SEQ ID NO: 21757 - DNA, 389 bp, Homo sapiens
cagcgtcctgaaacctctcgtcccctcccactgaaatccccgatctgtctgaatctgttccttgctgtaaaataaatcctccctcccgcagacctgtggggcccttcggatttcctgccgctgccatgatccttaacaatgcgattgaaaagccagtgctcggctggaaaaaaatccccaggtgccagccggccgcgccttgaccttgctgaaggagcctttaacccggctgccagaggggctctggtccagccgtgggaatccaggaagaaggagggcgccccggaggcggctgggttagctccccgggcagggcgggaatcaggtcgcggcggggaccgcagagggggaggggacgggactccgcggcaacctgtttcccggcgagc

SEQ ID NO: 21758 - DNA, 189 bp, Homo sapiens
gaaaatcgacgttatatgtctacagagtttgaagattcgaatagtttagcaaggcttggtatgaaaaagaactatccttcagccttcctcctctcatccctggattcttcaaggcaatcacattcgactattttagctggttcttttgatattaatcttattatcactaaatgtcatgtttatgtcatt

SEQ ID NO: 21759 - DNA, 654 bp, Homo sapiens
tcttttttttcaggtgggttgggggagaaggagccaattcaatgtctagtctttactggaaagaagaaactttacagcgcattttgagcaatttagtgcagagtctcagtgggtcaactggcggggcaccagatagtaatggatttcacagttagggcattgctgggtctcacctttgtgcagccaaaaactagaggacagcactgttgtactcttcacagatgcagcccactattcacttgttggtgatggaggagactaaattagggtcttctttggtgccagaagcttccttttggagtagtgtattctatgggtccagtccctttcatgcagccattatgacctacatctccagtccagacacatcaccatcagtaggaacaccaccttcagatgccatggagcacatcaaggccacccactggaaccatgggccctcagagtctgcaagggcagcactccaactctgtggcataacctcaaagccatatgctcacgacaagcagcagcacttctgggaacaggcttcagagacaacttgagttcttccttaatttctctcagtaagatttatagttttctatgtacaggttgtgtactttttctttgtgtgaacttattcctatttgaaacttcagatgctgtggaaat

SEQ ID NO: 21760 - DNA, 180 bp, Homo sapiens
acagcacctaaacaagaattatagcctgggaaggtcatttacttgcttactagctgtttcctgtgtcataatgtaagctgcataagggcaggaatcttttctgcctcacctccatatttatagcctcacctccaaaatggtgtctagcacatagaaggcacttaacagatatttgttgaa

SEQ ID NO: 21761 - DNA, 296 bp, Homo sapiens
taattttattaatttgggcttcttatttaaatccctgtctgactcattggctccttctgagaataataacaatacctacattatagggttgttgcagtgattaactgagttatcacatgtaaatcatatagaacataggtgctgagataagctgataagattattagaaatcctgcttgttggccatggctcacacctgtaatcctagcacttggtggggccaaggcaggcagattgcctgaactcaggagttcaagaccagtctgggcaacatggcgaacccgtttctactaaaa

SEQ ID NO: 21762 - DNA, 318 bp, Homo sapiens
ccccaaatgcttaacttcagtcactctttatgatctgagatactacagaagattacaaagtatatagttaactcctcctaatactaatgatgggcaaaaggtaagtagatacacctgtgattaaaaacacagtaagatacaccatgggtaaggagatataccagtgattaaaggacattttaattctttcttcacttttattctaaagattttcataagaaatgtttgctgatttcaactcacatattaatagacatgttgctgacaagttgaataacttcaaattaggttgtaagaaaatgtttaaaaaatgttaaa

SEQ ID NO: 21763 - DNA, 483 bp, Homo sapiens
aaacttttacatcctgtgtctgcggcctctgggtgtgtatatttgcttatcagagaccacaggtgtgagagaagttagaagcactgacttggaaatggacccccagtcttggttctttgggtgaccttgggcaaatcctatctctctgagcctctggttcctcatgtgtaaaatggagagatgttggtttgcatgataataataaaaagctatcttttaactgggcatggtggctcacacctgcagttccagcattttgggaggccgagttgggttgatggcttaagccaggagtttgagaccagcctggtcaacatggtgaaaccctgtctctactgaaaatacgtgctgggatgctcctgtaatcctagctacttgggaggctgaggtatgagaattgcttaaaccctggagacggaggttacagtaagctgaaatcacgccactgcactccagcctggatgacagaacaatactgtctca

SEQ ID NO: 21764 - DNA, 848 bp, Homo sapiens
atagctacaagtttttatgttgagggctggccagtgtggctcactcctgtaatcccagcactttgggaggccttggcaagaggaccgcttgaggccaggagttcaagaccagtgtgggcaacataacaagatactgtctctacaaataataataataattcatgttgaggtttatgatgagcttgcttctttcatctcacacacaaaaaaatgggttgtgttttgttgttgttgtttttggatgtgtatcagggaattaggctaggacaggatttagactagctactaagagaaattaaggagttggtcatgacaggttaaatgtttcctgcccaaaaaattgcctcaaaacttagtggcttaaaagagcaaacacatattatattatctgacagtttctatgggtccaggattaggagcagtttagctatgtggttctagcttaggttctctcatgaaattactgttaaggtgttggccagggctgcagctagaggattcatttccaagatgactcattcatatggctagctaagtgaattgtgcatctatcctaggtaaaagagagtaggaataaagatattttagaagaaatggtaaaaggaacccaggagaactttatcttgctgagaataaagacatttttactaaacaaattagctgactctgttgcagtttcaagttgctataggtggttaaaaataactttgctgtaagggaagcagtatagcattatagttaacagtacactctctgtaatcaagctttctgccttactaattgtgtgacttggacaaatgactgaatttgtgtttcttgtccataaaatgagagataataagagtacc

SEQ ID NO: 21765 - DNA, 382 bp, Homo sapiens
ttttcaaattcagtaggagttgtagcccttacttttgtctcccaggcaagatgctattaggggtcacttcccatgtacggagaaaacaatcttcatggataataatgataaaaccttatggaatgcaaaaacaaccaaaatatgtattctcggatgactgcattagggccaagtcaatattagtcccacttcacccacgcattgcatagtctaaaaatgctgtcagcctgataagaatttcctgatttactctcttttccaatagaaaatgtaggtcatcaaaataaacttctgacactaaaagaacagtagttacactgtcaagtctttttttttttatttcgttagccagttatggtcaaacagtttctttacttgacca

SEQ ID NO: 21766 - DNA, 662 bp, Homo sapiens
atgatagaaaagcatatatttaaatatcaaattataattggatagattatcagaattgaacattaaatctatttaccaagaaagtatgtttatttgtaaatgaaaataaaaatttgaatttcaaaggctaatcattccataaaagtttccatttctattcgtaatttaaattttattttgaaaaagtgatagtctaaggaactcatttaatttttggcctaaatgtgaaatatagaataaaaaacacacatatctattacagaaatacttgagatcctatatgtactatacaaatcctatatgtactgttatctacaaccatttgaacacttatccataaacccctaataagtaccttttgcttcaagacctatattccttagacccaccattagaaaattggatgttcactccagctatatgatatttaaaaaaaaaatgaatcagctgggagcagtggctcacacttgtaatcccagcattttgggaggcagaggatggcttgaggccaggaattcaagaccagcctgggcaacatagtaacaccttgtttctattaaaaaattagttttaaattttaaattacaataaaataaagtgtaagtattaaaaggccacttgtctatttctcacttggaatattaaatgctggaagctgtgtt

SEQ ID NO: 21767 - DNA, 405 bp, Homo sapiens
tatatgggaaaaaccagagacctggaagcactgcagggaagtaattcaatcagcaggttctgctaatgtaataagcgacacaagggtgaaacctgagtagtttacatgtaccagaaatgcccttcagttgaattattgtcttatcatggttgcctgcctgtgcactactgttatgaatattaaaagacagcacagctcactttttccccagatggaaaaggcccaaatcttcatcaccttagtaatttgtttcctcctcttcccactccttaccgcctttagtcaaagctcatgctttgggtttattacttagaaatcttgtccgggataataaagcatacagacttggtgttgtataaaaactaccacactccagcctgggcgacacagtgaaaccctgtctca

SEQ ID NO: 21768 - DNA, 967 bp, Homo sapiens
agaaaaaagataatatactaattcttaattttagtaagtagacagttgtagtgtatggatgttttgttaaatctttgttgatacagaatatataatttcctttttctgtttgtgtgagaagtaaagattgaacaaaaatatgtgagtgctaaactgtctttaaaaagtagataactatatcaaaaagagtaaggaccagtgggcaccatgcagaacaagcaaatagaagctcagcctttgagtagcagctttggtagtatacaaaaatgaactgaaaataggaactcagcagtgttttaagatgacagattaaacaaacatcccaccagaaagaggtaatcacttagactaatttcctcatcccctaggataaaatcttaagtcagtgacttgaaaactattttgacccaatccattgagaaatgcatttttacattgcagcccagcacacacatatgtataactgaagcaagagttgtacttaacaatacttacttatccgtgtgttatgcatcttgatatttcttattctcttttaccccttcctctgtgtgtctgtgtgtattctttttcccccccacccacccgataccgttcaggaaacactacgttgatttcattacctgctaatgtgttgcaacccctttgagatgatcctactagttatgatgagatgcttctaataaaagttacaccagtagaaaatgccaatatttcataaggccaggatgatgacttagatagtactaatattactacactttaggaaagttcatttcattttatttttaggaaggacactaatagagttccataaaagaaaagtctttagtgcatgttatttattattcagggtgtagatactattttaacttccacattctaaattatagtgtgggtatcaatctatgaagtaggtgctgacaagttgtcaacattactgacttttatggtgaagttttaaatt

SEQ ID NO: 21769 - DNA, 241 bp, Homo sapiens
ggcaaacgtgtaacatgcatcccatgtccacttgggggtgaggttctagcattaaaatgaggtggatttggcttttgacttcaaaaggtgagctatagggcacaaagttggtgcacaccctgtcggcgctcaagctggccccgggtctgcagtgttatgaggagagccggtagggccgccctcggtcccagcagagttgtaatggtctgtgttgtaaatcagagttaggaggggtctgaca

SEQ ID NO: 21770 - DNA, 377 bp, Homo sapiens
aaaaaatcctatgctgaggttgctaagaactacagtaagaaagaaattttctatctgtgaaattgtgaagaaggaaaaaaaaactcgttcatagtatattattagtttggtaatatctgtgtttcaggcatccactgggggtcttggaatgtatcccccaaggataaggggggaccagtatacaattgcattaatacagcatcatcaaagagcaggaataaagaaaaatgcaatgatggtagtgggagaaacatttacccatccctaaaaagtgcctctagcaggagaatcgcttgaaccctggaagcggaagttgcagtgagctgagatcccgccactgcactccagcttgggtgacaaagtgagactccatctca

SEQ ID NO: 21771 - DNA, 522 bp, Homo sapiens
ggcacttgagtgtagtcttcagatgcttacagatgtgcacgctgttctataatcatttcttaatccttttgctcccctacttctaaaagtattatgctggatgtggtggaagctgtaaaacaggaatttcccagggcttgtaaggccaggcaggagatcacagtaccttttttaaggctcagaagcaatgtagagaatactggtggaatctcagtctgggtgcagaggttcatcctctttctcctctgctcctagaagcgagatgagcgcagtgtgaagagcacagctgtgcgggttggtagactttggcagtgccacctttgaccatgagcaccatagcaccattgtctccactcgccattaccgagcaccagaagtcatccttggtaagggagggcaaggctgttccaagtgtgtgagatgatgtgagggtgggggccacctaagcctcataacaccttttccctcccattctcacccagagttgggctggtcacagccttgtgatgtgtggagtatagg

SEQ ID NO: 21772 - DNA, 403 bp, Homo sapiens
ttcctcccatgacacatgaaaattatgggaattacaattcaagatgagatttgggtggggacacaaccaaaccatatcagccacttagtcctggatcactttaaaaatggagggctagaactctactccagatttccctaaacccaactctgttctaccctcatattgtcttcatttcagcctagagaaaaggactgaatgtacctcatattcttattttttcccaacttcctgattgcagctattgagcaatagcccatgtgcatgcatttcaaaaaagtaactttccgttaagggggggtttaaaccctgatttaggggaaaatgtaataagcagatttgcataattttgcaaaagctaatacctattttatagcacccaaataaagagagcatgatatct

SEQ ID NO: 21773 - DNA, 239 bp, Homo sapiens
aataataatccttccttcctgagtcagacgggcatggagacgcttctggaaggaacaccgcaatggctgcgcagggacagccccaggtccagttcaaacttgtattggttggtgatggtggtactggaaaaacgactttcgtgaaacatcatttgactggtgaatttgagaagaagtatgtagccaccttgggtgttgaggttcatcccctagtgttccataccaacagaggacctgtt

SEQ ID NO: 21774 - DNA, 450 bp, Homo sapiens
gctgggactacagatgtgtgcctccatgcctggctaactttttaattttttgtagagacgggttcttgcccatgttaccctagactggttttgaacttctaagctctagcagtcctcccactgtggcctgcccaaagtgctgggattacaggcatgaggcaccacacgcagccagaaaatttcagcatattcaaaactagtattacacatcttcgtgtactcattaccccagcctcagggctggcattttgaagcaaatcccaggtactgtaccacttcatctttcaatattttattaatagtatgtgactgtaaaatataaggccaggtgttgtggctcacacctgtaatcccagcactttgggaagccaaggcaggagaatcacttgaacccaggagttggaaagcagcctgggcagcacagtgagatccccaccccatctctaccaa

SEQ ID NO: 21775 - DNA, 458 bp, Homo sapiens
acaataattttacaatgacgatatcttcattttatagatgaggaaattaagtcatagaaagctttactagtgtaagaaagttggtacagtttttagaattggcacagtggagattcaaattctggtctttctgacattttttctactgaacttccctaccttaattcagcttaagtttcttgttgaatgatataaatgaccatctgaagacctgagaacaaaccccaaccttgagatgctgatgtaattggactgaggtgaatccagtgcattcagtcttgaaaagcgttcctggtgatttcaatgcctgatacattttgagaaccactggacaaaattgtattattaactccacccaatagatatcttcctaacagcaaaaataattgcagctctgatttaccaaactggcctgcaggtggaatggaaagtcaacagctgaattaggcagaaatgag

SEQ ID NO: 21776 - DNA, 237 bp, Homo sapiens
tgttatcccagcctgagatcttttgttctcctgtgtcagccggtccctggccaagggctgcagactctcttggggccccagcagactggaggagaagcagcatggtctgcggtctactcttttgtgcacaccaacccacctcttccccagctgacactgctggaggaggagagggaagagatatcatcccctcctatggcaacctgtgggatagcaatggcccttttcctgttgggt

SEQ ID NO: 21777 - DNA, 371 bp, Homo sapiens
aagcacctggcttcagtgctcagaggagcagacacagttgctcactctccactcaaagttggtccaggccttgtgctaattaaaggaggaagcactgctgtagcgcagaaggaaaaggccagtcctccacctgttcagcatgataatgcagctcccctgtggtaagggttggtcggactacaatatctttgtgactttgatgaaagcatctgcagttataatgtggcaaagaaaaggataattccagaatttcccatttccatcatttgagcttgaaatatctgaatagatatttacaaaaccttgtgaagaagtcaccttatttctcatgtttctaatgaacatatataaacttctcatttccagctcta

SEQ ID NO: 21778 - DNA, 324 bp, Homo sapiens
cctcctgagtagctgggattacaggcacaagccaccatacccagctaatttttgtatttttagtagagatggtgtttcatcaagttggtcaacctggtctcgaactcctgacctcaagtgacctgcccacctcagcctcccggagtgctgggattacaggcgtgagctgccgcacctggctgaaaactttaaatcagtgaaagctatctgaatagatgggaaacaactgcctatttttggtgtaaaaagtgtcaatcatttatttgtgatttatatgtaagagggaaaatgttgctgtcatatttactgaaagataaatgctaa

SEQ ID NO: 21779 - DNA, 219 bp, Homo sapiens
ctggggaagggcggcccctccgctgccctctaagcctcagtttcctccgttgtgaaacattgcagttgtactaggtcgtggttctggaggtatgcctgaaggggtgtgcaggagtctgcatgggtatgcacatatgtgttggtgcacgtgttggtgcatgtgtgtgttggaggcagcctatggccgtctgagaagggctatgtctccatgcgtgggtgc

SEQ ID NO: 21780 - DNA, 324 bp, Homo sapiens
aaaagaatggctactccataggcagagcagcagcatgggctgctttaactgaatatacttatagttatttcttgattatatacaagcagttctccagttctctgcagatgctaatgccacgtcctgcaattcaattctgaccttatctacctggagttagtgcagacccaacaggttgaaggctgagtcccaaaagactgtccccacttcagatgccagtcgcacaagtgatgagtctccaggttatcctcaacttctgtccaactcaactacagatcagaggttcccatggccccctactcaggttctataatttgctagaag

SEQ ID NO: 21781 - DNA, 339 bp, Homo sapiens
tatgtacacattgtgatcagtgctgtgaagaaagataataaagggcgctgtggaggacagcctccacgatcccccatgatccctacctcctggaattcaagcccttatttcgtaccttccccttgtatgggggtaggactcattgacttgatgatcacagacactaaagcaaaagtgttggagtgtgacctctgagattgggttataaaaagactgtagctggctgggcacagtggctcacacctgtaatcccagcactttaggaggccaaggcaggaggattgcttgagcccaagaattcaagaccagcttggacaacataggaagaccctgactcta

SEQ ID NO: 21782 - DNA, 435 bp, Homo sapiens
accctaatccgatgtgactggtgtccttagaagaagaggacatttggatacgcagagacacacagaggaatgaccctgtgaggacacgatgaaagatcacatctacaagtcatgagagaggccttgggagaaaccgaccctgcccatgctttgatctcgacttccagcctccagagctgtgagaaaatagatttctgggtttcagctgcccagtgtgtagtatttgttatggcagcctgcatagaataatacaagcactcgaggtgtccccggcattgttacgggtgaaggagacatggtgaatgaacaccaggcaatgccctcttgtcttatgttctagtggaaaatccacatacaatttgctgaagagcgtagctgaacgagtgagtgtataaatgaattaataaataaactatttttccagagttcacaaaa

SEQ ID NO: 21783 - DNA, 191 bp, Homo sapiens
ttactttaatgcataactgtatgttatacatatgttataatgtataaaaatttattttaagatataccaaatcatgagtagttttattttttaactactagctccacaacatcttacctacatggcttctctttactttttaacattgagtatacctctttttttttttgagacagagtctctctgtgtcg

SEQ ID NO: 21784 - DNA, 478 bp, Homo sapiens
aagcgtggtctgagcacaccccttatcaaaatttggcaacctagaataaatgcaggttcctggatcctgccccagacctaatcacatccccaagggtgagtctgcaaggcaatcttctacaaccaccatctgagtcctaaagcaggcttccccaggagcctaagtcctaattctaaatccatataatctagtgataacaatcccttgcccatgtaaccctctcaagtctgagatccttgatctttgcacaaccgagtgcaggaggcaaggtttcgcgcagggccccctttcagaagaccggtaaggtgagttgccctcggtggaatgggactagacctggtgtcaacacaccgcgcggtctggagagaggttcccagtccctgcctgccgggtgggagctgggacctaagacccaggtggccatctgtcgcgacccccagcctagggcaggtccagagtccttcctctgaccctctcc

SEQ ID NO: 21785 - DNA, 355 bp, Homo sapiens
cagtcacttccctgcttaaaaacttctactgactctctactgctctgaaggtaaaaggcgaactccttaccatgagatacaaggtctgttatgagtttgaccctgcttccttcacctctgcaaactgccgttcatcttctctgctctagctatgctatgcctggaatgtagcattatttctcatgtttgtagctttgcacatgcctccttctgtctgcaatgctcattcatcaaaattcagctcagatgtaaccttttccagaaagccttctgggaccttcttcattagggttgccgagcaaaatactgcttaggatacacttatgctgaaaaattattgttgtttattggcaat

SEQ ID NO: 21786 - DNA, 657 bp, Homo sapiens
atctcatattgtgggattgcaattaccttgcccaagaaaagattatttacgattccattgtttatattgtttgttgaaataattaattctcaaaacttctggatacctgagactcagctaggaacttatttttaaaatataaattcctagtcccactccctaaagattctgagttagtacattcaggatggggtctaggaatcagtgtgtttaagaagtgcatcaggttcttctggtactgattgtccatgaaccacactttgagaaagctccatctaaagagataagttactgacgtgtgttaccagagagagcctagaaaacctgggcacaacagtagttgttaagaactaccagacctgggccaggcccggtggctcatgcccgtaatcttagcactttgggaggctgaggcgggtggatcacttgagcccaggggtttcagatcagtctgggcaacatggtgaaaccctacctctacaaaaaatagaaaaaattagctgggcatggtagtgcatgcctgtggtcccagctacttgggaggctgaggttcgagggttgcttgagcctgggaggtcaaagctgcagtgagccaagatcatgccactgcactccagcctgggagagtgtgagaccttgtctcagaaaaaaaaaaaa

SEQ ID NO: 21787 - DNA, 317 bp, Homo sapiens
aatgatcctatcacccaagtgcttgttacttagccctctttagtattctcctcattctcatgctccccttctggtcaaagcccaaaactcagatagcatagagagcagtgccccttaggacaatctgcacttccttaagaattcctttgaaggagtgaaataccaacatgaggcagtcctctcctcttctgatgttcccctctcctgtttaccttcctataagtaccgaacaaagtaagtaggtatatcagtcttaagggcttcccatgccataagatataacttaaagcagttatatcttatgaaggaaattattt

SEQ ID NO: 21788 - DNA, 103 bp, Homo sapiens
ttaccgcccaccaaattctccttaagaaccctagcctctgagttcttgtggggactgatttgagaaataaactcccatcctttcacttggctagctctgtgtt

SEQ ID NO: 21789 - DNA, 208 bp, Homo sapiens
tcccaggcttgaagaactgaaatgtaatgtcttttactaaagttgttgatattaccataactttgtataatcccatcctgaactttccatggatgatgaattataattaagtcctaatgccaagctttcccaggaaagaaaggcataaggattcagctcacaatttctaagctcttcctctctcatccttttaactcatcctatttaa

SEQ ID NO: 21790 - DNA, 407 bp, Homo sapiens
gcagctgcccatataaaagtaaatatgtaactgggcatgctgatgcacaggtactcacatactcgagaggctgaggtaggaggctctcttgaggctgggaatccaaggctgcagtgtgctgtaattgcacctgcaaatacgcattgcactccagcctgagcaacatagtgagaacctgtcactatttggtaagtaaaaattgtaaatatgtactagtggcttaggtttatgactgtcttgagaattatttattttctctgtcctcaacacagtcctgtagagtaggaaagtctttgtccaaggagttccaagttacaagcaccacatacctttgtgtatgtatcattatattttgccatatcactggaaatgggatttctgagtcacggaggaaattcatacgtaat

SEQ ID NO: 21791 - DNA, 477 bp, Homo sapiens
ggaagatccaagagcaagcttccaagaggaccagacagaagctgtgtattgcccttttacagcctaggcttggaagtcacatagtgtcacttcagcagcagtcacaagcctgcctggattgaaggggaagaaatgcagaacccgcctcatgctgggagggaggtcaacgtcactctgtgagaagagcttctgggatgggagacgtcgttctgaccatcttgcaaataacatttgccacgttcctcctctggcaacaatttacattcttcatatctgcaaaatgatgccttatttccttcccgtgagattcccaaaccgcatcccatcagggcatccgcttcaagtccagcatctcatcattgaaatcaagtccagctgcagatgaggcttctcagatgggattctttgaacgtagttccttgagtgttaatcttacggatttaaagatctgttaatgaaagatacaagttacctaca

SEQ ID NO: 21792 - DNA, 6679 bp, Homo sapiens
  misc_feature (1874)..(1874): n is a, c, g, or t
  misc_feature (5539)..(5539): n is a, c, g, or t
  misc_feature (5563)..(5563): n is a, c, g, or t
  misc_feature (6330)..(6330): n is a, c, g, or t
  misc_feature (6468)..(6468): n is a, c, g, or t
  misc_feature (6617)..(6617): n is a, c, g, or t
gcggcggcccaagcggtttcaaacggcttagagcaggccgcttggttctgacccagctgaggaaatactcttaattctaaggaaaacctggaagcacaatgggagatgacagtgagtggttgaaactgccagttgatcagaaatgtgaacacaagctgtggaaagcaaggttaagtgggtatgaagaggccctgaagatcttccagaaaataaaggatgaaaagagcccagagtggtccaaatttttaggattgatcaaaaaatttgtcactgattccaatgcagtggttcaattgaaaggattagaagctgcacttgtttatgttgaaaatgcccatgtagcaggaaaaaccacaggagaagttgtgtcaggtgttgtaagtaaggtgttcaatcaacctaaagctaaagccaaggagctgggcatagagatctgtcttatgtacatagagattgagaaaggagaggctgttcaagaagagctcctgaaaggcttggacaataagaatcccaagatcatagtggcctgtatagagacactgaggaaagccttaagtgaatttggttccaaaatcatcttgcttaagccaattatcaaagtgttgccaaaactctttgagtctcgagagaaggctgttcgagatgaagccaaactaattgctgtggagatttacagatggattcgggatgctctgagacccccattacaaaatataaactctgttcagttgaaagaactagaagaagaatgggtcaaactgccaacaagtgctcctagacctactcgatttcttcgttcccaacaagaactagaagctaaattggaacaacaacagtctgctggtggagatgctgaaggaggtggtgatgatggtgatgaggtgccacaaatagatgcttatgagcttttagaagctgtagaaatcctttccaaacttcccaaagacttttatgacaaaattgaggcaaaaaaatggcaagagagaaaagaggccctggagtctgtagaagtactaataaaaaaccccaaactggaagctggcgattatgcagatttagtaaaagcattaaagaaggttgttggaaaggacaccaatgtcatgttggtggctttggcagcaaaatgtcttactggcctggctgttgggctaaggaagaaatttggacaatatgcaggacatgttgtgccaaccatcttggagaaattcaaagagaagaaacctcaagtggtacaagccctgcaggaggcaattgatgcaatcttccttactaccacactacagaacatcagtgaggatgttttagcagtaatggataataaaaatccaaccatcaagcagcagacatctctttttattgcaagaagtttccgccactgcactgcttctaccctgccaaagagcttgctaaagcccttttgtgctgcactacttaagcacatcaatgattctgctcctgaagtcagagatgccgcatttgaagcattgggtactgctttgaaggtggttggcgagaaagcagtaaaaccattcctagctgatgtggacaaactcaagcttgataagatcaaagaatgttcagaaaaggtagaactgatacatggtaagaaagctggactagctgctgataagaaggaattcaaacctctgcctggaaggactgctgcttcaggggctgcaggagataaggacacaaaggacatttctgcacccaaaccaggacctctaaaaaaggcacctgctgctaaggctggtgggccaccaaaaaaggggaaaccagctgcaccaggaggcgcagggaatactggaaccaagaacaagaaaggactggagactaaagaaatagtggagcctgagctctcgatagaagtatgngaagaaaaagcttcagctgttcttccccctacctgtatacagcttcttgacagcagtaactggaaagaaaggctggcttgtatggaagagttccagaaggctgttgagctaatggaccgaactgaaatgccatgccaggcattagtgaggatgctagccaagaaacctggatggaaagaaactaattttcaggtgatgcaaatgaagcttcatatagttgctttgattgcccagaagggaaatttttccaaaacgtcagctcaggttgtattagatggccttgtggacaagattggagatgtgaaatgtgggaacaatgcaaaagaagctatgacagcaatagccgaagcctgtatgttaccatggactgctgaacaggttgtgtcaatggctttctcacaaaagaatcccaaaaatcagtcagaaactctgaattggctatcaaatgccataaaagaatttggtttttctgggttgaatgtcaaagctttcattagcaatgtgaagacagctcttgctgcaacaaacccagctgtgaggactgctgccataaccctgcttggcgtgatgtatctgtatgttggtccctctttgcgaatgttctttgaggatgagaagcctgccctcctatcccagatagatgcagaatttgagaagatgcagggacaaagtccacctgctccaaccagaggaatttccaagcatagcacaagtggtacagatgaaggagaagatggagatgaaccagatgacgggagcaatgatgtcgttgatcttttgccgaggacggagatcagtgataaaatcacttcagagttggtatctaagattggtgataagaattggaagattaggaaagaaggcctagatgaagtggcaggtattattaatgacgcaaaatttatccaaccgaatataggtgaacttccaactgccttgaagggtcgactcaatgattcaaataaaatcttggtacagcaaacgctgaatatcctgcaacaactggcagtagccatgggcccaaatattaagcaacatgtaaaaaatttaggcatccctatcatcacagtccttggagacagcaagaacaatgttcgagctgctgccctagcgactgtgaatgcttgggcagaacagactggcatgaaggaatggctggaaggagaagatctttctgaagagctcaaaaaggaaaatcctttcttgaggcaagagcttctgggctggctggctgagaaactacctactcttcgttccacccctacagaccttatcctttgtgttcctcatctctactcctgcctagaagatcgaaatggagatgtgcgaaagaaggcccaagatgccttgccattcttcatgatgcatttaggatatgaaaaaatggccaaggctactgggaaactaaagccaacttctaaagatcaggtattggccatgctagagaaagccaaagttaacatgccagccaagcctgctccacccactaaagcaacttctaaaccaatgggagggtccgctccagccaaattccagcctgcatcagcacctgctgaagattgtatttccagcagtacagaacccaaacctgatccaaaaaaggccaaagctccaggattatcctctaaagcaaagagtgcacaagggaagaagatgccaagcaaaaccagcttaaaggaggatgaagacaaatccgggcctatttttattgttgttccaaatggaaaagagcaaaggatgaaagatgaaaaaggattgaaggtgctaaagtggaattttactaccccacgggatgaatacattgagcaactaaagactcaaatgtctagctgtgtggctaaatggttacaagatgagatgtttcactcagactttcagcatcataacaaagcccttgctgttatggttgatcacttggagagtgaaaaagaaggagttattggttgcctggatcttatcttaaagtggcttaccctgaggttttttgacaccaatacaagcgtcctgatgaaagcactagaatatttaaaattgctcttcaccttgctaagtgaagaagaatatcatcttactgagaatgaagcatcttccttcatcccctatcttgtcgtcaaggttggagaaccaaaggatgtcattcgtaaagatgttcgtgccatcctgaaccggatgtgccttgtctacccagctagcaagatgtttccctttatcatggaaggaaccaaatccaaaaactctaagcagagagcagagtgcctggaagagctgggatgtctggttgagtcctatggcatgaatgtttgccaaccaaccccaggaaaagccttaaaggaaatagctgttcacataggagaccgtgacaatgctgtacgcaatgctgcactcaacaccattgtaacggtgtacaatgtacatggggatcaggtgttcaaactgattggaaatctttctgaaaaggatatgagcatgctcgaggagaggattaagcggtcagcaaagagaccctctgctgcaccaataaaacaggtggaagagaaacctcagcgtgcacagaacataagctccaatgccaacatgttacgcaagggaccagctgaggacatgtcttccaaactcaaccaagcccgaagcatgagtgggcatcctgaggcagcccagatggtccgccgagaattccagctggatctagatgagattgagaatgacaatggtacagtccgatgtgaaatgccagaacttgttcagcacaaactggatgacatttttgagccagtccttattcctgaacccaagatccgggctgtttctccacacttcgatgacatgcacagtaatacagcatccacaatcaatttcattatctcccaagtagccagtggtgacatcaacacaagtatccaagctctgacacagatcgatgaggtcctgagacaggaagacaaagctgaagccatgtccggccatattgatcagtttctgatagccacttttatgcagctaagactcatctacaacacacacatggcagatgagaaattggagaaggacgagatcatcaagttgtatagctgtatcattggcaacatgatttcgctgtttcagatagagagccttgcccgggaggcctccactggagtactaaaagacctaatgcatggcctcatcaccttaatgctggattctcggattgaagatcttgaggaaggacaacaggtcatccgctctgtgaacctcttggtggtgaaggttctggagaagtcagaccagaccaacatcctgagtgccctacttgttttgctccaagacagcctgctagcaacagccagttctcccaaattctcagagcttgttatgaagtgtctctggagaatggttcgactgttgcctgataccatcaatagcattaacctagacagaattcttctggatatccacattttcatgaaggtcttccccaaagagaaactgaagcaatgcaaaagtgaatttcccataaggaccctaaagaccctgctacacaccttatgcaaattaaaagggcccaagatcctggaccacctaacgatgatcgacaacaaaaacgagtctgagctggaggcccatctctgccggatgatgaagcacagtatggaccagactgggagcaagtctgataaggaaacagnaaagggagcatctcgaatagatgnaaaatcatcaaaggccaaagtgaatgatttcttagctgagatttttaagaagattggctctaaagaaaacactaaagagggactagcagagttatatgaatataagaagaaatactcagatgctgacattgaaccatttctgaaaaattcctcacagttcttccagagctatgtcgaaagaggccttcgggtgattgagatggagagggagggcaaaggtcgtatttccacttcaacaggcatctcccctcagatggaagtcacatgtgtgcccacgcccacaagcacagtgtcctccataggtaacacaaatggggaagaagtggggccatctgtctacttggaaaggctaaagatcctccgacagcgatgtggtctggacaacacaaagcaagatgaccgacctcctttgacctctttgctctccaaaccagcagttcctactgtcgcctcttccacagacatgctccacagcaaactctctcagctccgggagtcacgggagcagcaccagcattcagacctggattctaaccagactcactcttcaggaactgtgacctcctcctcctccacagctaacatagacgacttgaaaaaaagactggagagaataaagagcagtcgcaaatgaagctgccccactcccccggcaccctgcagctttagtttactaaactagaagtcctcatagtttaaaatggcctcagcaggcctagtgtatacaaactggttgtatgtatcatgccgtggagctagggggaggngtcattgtggcacaagtatttgtacatactctgcttctctctgtcagcgtcctgctgctctagaagactgtccgtggatgagtttagtgtacagacttgtaaacagctgccccctctctgctcagtctagttcccagntccttttctttttaattgctcatttgtaaaattgtcctaatctttcctagctttttaatagttaatattagaaactctttaatagttttcctttcagtttgtgagctcttctctgtcgccctgaagggtcactgtattctgtatgaatncatggcatgatacaactaatttaagagtcttttataaataaagtttgcattaactatacctg

SEQ ID NO: 21793 - DNA, 6499 bp, Homo sapiens
  misc_feature (1874)..(1874): n is a, c, g, or t
  misc_feature (5359)..(5359): n is a, c, g, or t
  misc_feature (5383)..(5383): n is a, c, g, or t
  misc_feature (6150)..(6150): n is a, c, g, or t
  misc_feature (6288)..(6288): n is a, c, g, or t
  misc_feature (6437)..(6437): n is a, c, g, or t
gcggcggcccaagcggtttcaaacggcttagagcaggccgcttggttctgacccagctgaggaaatactcttaattctaaggaaaacctggaagcacaatgggagatgacagtgagtggttgaaactgccagttgatcagaaatgtgaacacaagctgtggaaagcaaggttaagtgggtatgaagaggccctgaagatcttccagaaaataaaggatgaaaagagcccagagtggtccaaatttttaggattgatcaaaaaatttgtcactgattccaatgcagtggttcaattgaaaggattagaagctgcacttgtttatgttgaaaatgcccatgtagcaggaaaaaccacaggagaagttgtgtcaggtgttgtaagtaaggtgttcaatcaacctaaagctaaagccaaggagctgggcatagagatctgtcttatgtacatagagattgagaaaggagaggctgttcaagaagagctcctgaaaggcttggacaataagaatcccaagatcatagtggcctgtatagagacactgaggaaagccttaagtgaatttggttccaaaatcatcttgcttaagccaattatcaaagtgttgccaaaactctttgagtctcgagagaaggctgttcgagatgaagccaaactaattgctgtggagatttacagatggattcgggatgctctgagacccccattacaaaatataaactctgttcagttgaaagaactagaagaagaatgggtcaaactgccaacaagtgctcctagacctactcgatttcttcgttcccaacaagaactagaagctaaattggaacaacaacagtctgctggtggagatgctgaaggaggtggtgatgatggtgatgaggtgccacaaatagatgcttatgagcttttagaagctgtagaaatcctttccaaacttcccaaagacttttatgacaaaattgaggcaaaaaaatggcaagagagaaaagaggccctggagtctgtagaagtactaataaaaaaccccaaactggaagctggcgattatgcagatttagtaaaagcattaaagaaggttgttggaaaggacaccaatgtcatgttggtggctttggcagcaaaatgtcttactggcctggctgttgggctaaggaagaaatttggacaatatgcaggacatgttgtgccaaccatcttggagaaattcaaagagaagaaacctcaagtggtacaagccctgcaggaggcaattgatgcaatcttccttactaccacactacagaacatcagtgaggatgttttagcagtaatggataataaaaatccaaccatcaagcagcagacatctctttttattgcaagaagtttccgccactgcactgcttctaccctgccaaagagcttgctaaagcccttttgtgctgcactacttaagcacatcaatgattctgctcctgaagtcagagatgccgcatttgaagcattgggtactgctttgaaggtggttggcgagaaagcagtaaaaccattcctagctgatgtggacaaactcaagcttgataagatcaaagaatgttcagaaaaggtagaactgatacatggtaagaaagctggactagctgctgataagaaggaattcaaacctctgcctggaaggactgctgcttcaggggctgcaggagataaggacacaaaggacatttctgcacccaaaccaggacctctaaaaaaggcacctgctgctaaggctggtgggccaccaaaaaaggggaaaccagctgcaccaggaggcgcagggaatactggaaccaagaacaagaaaggactggagactaaagaaatagtggagcctgagctctcgatagaagtatgngaagaaaaagcttcagctgttcttccccctacctgtatacagcttcttgacagcagtaactggaaagaaaggctggcttgtatggaagagttccagaaggctgttgagctaatggaccgaactgaaatgccatgccaggcattagtgaggatgctagccaagaaacctggatggaaagaaactaattttcaggtgatgcaaatgaagcttcatatagttgctttgattgcccagaagggaaatttttccaaaacgtcagctcaggttgtattagatggccttgtggacaagattggagatgtgaaatgtgggaacaatgcaaaagaagctatgacagcaatagccgaagcctgtatgttaccatggactgctgaacaggttgtgtcaatggctttctcacaaaagaatcccaaaaatcagtcagaaactctgaattggctatcaaatgccataaaagaatttggtttttctgggttgaatgtcaaagctttcattagcaatgtgaagacagctcttgctgcaacaaacccagctgtgaggactgctgccataaccctgcttggcgtgatgtatctgtatgttggtccctctttgcgaatgttctttgaggatgagaagcctgccctcctatcccagatagatgcagaatttgagaagatgcagggacaaagtccacctgctccaaccagaggaatttccaagcatagcacaagtggtacagatgaaggagaagatggagatgaaccagatgacgggagcaatgatgtcgttgatcttttgccgaggacggagatcagtgataaaatcacttcagagttggtatctaagattggtgataagaattggaagattaggaaagaaggcctagatgaagtggcaggtattattaatgacgcaaaatttatccaaccgaatataggtgaacttccaactgccttgaagggtcgactcaatgattcaaataaaatcttggtacagcaaacgctgaatatcctgcaacaactggcagtagccatgggcccaaatattaagcaacatgtaaaaaatttaggcatccctatcatcacagtccttggagacagcaagaacaatgttcgagctgctgccctagcgactgtgaatgcttgggcagaacagactggcatgaaggaatggctggaaggagaagatctttctgaagagctcaaaaaggaaaatcctttcttgaggcaagagcttctgggctggctggctgagaaactacctactcttcgttccacccctacagaccttatcctttgtgttcctcatctctactcctgcctagaagatcgaaatggagatgtgcgaaagaaggcccaagatgccttgccattcttcatgatgcatttaggatatgaaaaaatggccaaggctactgggaaactaaagccaacttctaaagatcaggtattggccatgctagagaaagccaaagttaacatgccagccaagcctgctccacccactaaagcaacttctaaaccaatgggagggtccgctccagccaaattccagcctgcatcagcacctgctgaagattgtatttccagcagtacagaacccaaacctgatccaaaaaaggccaaagctccaggattatcctctaaagcaaagagtgcacaagggaagaagatgccaagcaaaaccagcttaaaggaggatgaagacaaatccgggcctatttttattgttgttccaaatggaaaagagcaaaggatgaaagatgaaaaaggattgaaggtgctaaagtggaattttactaccccacgggatgaatacattgagcaactaaagactcaaatgtctagctgtgtggctaaatggttacaagatgagatgtttcactcagactttcagcatcataacaaagcccttgctgttatggttgatcacttggagagtgaaaaagaaggagttattggttgcctggatcttatcttaaagtggcttaccctgaggttttttgacaccaatacaagcgtcctgatgaaagcactagaatatttaaaattgctcttcaccttgctaagtgaagaagaatatcatcttactgagaatgaagcatcttccttcatcccctatcttgtcgtcaaggttggagaaccaaaggatgtcattcgtaaagatgttcgtgccatcctgaaccggatgtgccttgtctacccagctagcaagatgtttccctttatcatggaaggaaccaaatccaaaaactctaagcagagagcagagtgcctggaagagctgggatgtctggttgagtcctatggcatgaatgtttgccaaccaaccccaggaaaagccttaaaggaaatagctgttcacataggagaccgtgacaatgctgtacgcaatgctgcactcaacaccattgtaacggtgtacaatgtacatggggatcaggtgttcaaactgattggaaatctttctgaaaaggatatgagcatgctcgaggagaggattaagcggtcagcaaagagaccctctgctgcaccaataaaacaggtggaagagaaacctcagcgtgcacagaacataagctccaatgccaacatgttacgcaagggaccagctgaggacatgtcttccaaactcaaccaagcccgaagcatgagtgggcatcctgaggcagcccagatggtccgccgagaattccagctggatctagatgagattgagaatgacaatggtacagtccgatgtgaaatgccagaacttgttcagcacaaactggatgacatttttgagccagtccttattcctgaacccaagatccgggctgtttctccacacttcgatgacatgcacagtaatacagcatccacaatcaatttcattatctcccaagtagccagtggtgacatcaacacaagtatccaagctctgacacagctgtttcagatagagagccttgcccgggaggcctccactggagtactaaaagacctaatgcatggcctcatcaccttaatgctggattctcggattgaagatcttgaggaaggacaacaggtcatccgctctgtgaacctcttggtggtgaaggttctggagaagtcagaccagaccaacatcctgagtgccctacttgttttgctccaagacagcctgctagcaacagccagttctcccaaattctcagagcttgttatgaagtgtctctggagaatggttcgactgttgcctgataccatcaatagcattaacctagacagaattcttctggatatccacattttcatgaaggtcttccccaaagagaaactgaagcaatgcaaaagtgaatttcccataaggaccctaaagaccctgctacacaccttatgcaaattaaaagggcccaagatcctggaccacctaacgatgatcgacaacaaaaacgagtctgagctggaggcccatctctgccggatgatgaagcacagtatggaccagactgggagcaagtctgataaggaaacagnaaagggagcatctcgaatagatgnaaaatcatcaaaggccaaagtgaatgatttcttagctgagatttttaagaagattggctctaaagaaaacactaaagagggactagcagagttatatgaatataagaagaaatactcagatgctgacattgaaccatttctgaaaaattcctcacagttcttccagagctatgtcgaaagaggccttcgggtgattgagatggagagggagggcaaaggtcgtatttccacttcaacaggcatctcccctcagatggaagtcacatgtgtgcccacgcccacaagcacagtgtcctccataggtaacacaaatggggaagaagtggggccatctgtctacttggaaaggctaaagatcctccgacagcgatgtggtctggacaacacaaagcaagatgaccgacctcctttgacctctttgctctccaaaccagcagttcctactgtcgcctcttccacagacatgctccacagcaaactctctcagctccgggagtcacgggagcagcaccagcattcagacctggattctaaccagactcactcttcaggaactgtgacctcctcctcctccacagctaacatagacgacttgaaaaaaagactggagagaataaagagcagtcgcaaatgaagctgccccactcccccggcaccctgcagctttagtttactaaactagaagtcctcatagtttaaaatggcctcagcaggcctagtgtatacaaactggttgtatgtatcatgccgtggagctagggggaggngtcattgtggcacaagtatttgtacatactctgcttctctctgtcagcgtcctgctgctctagaagactgtccgtggatgagtttagtgtacagacttgtaaacagctgccccctctctgctcagtctagttcccagntccttttctttttaattgctcatttgtaaaattgtcctaatctttcctagctttttaatagttaatattagaaactctttaatagttttcctttcagtttgtgagctcttctctgtcgccctgaagggtcactgtattctgtatgaatncatggcatgatacaactaatttaagagtcttttataaataaagtttgcattaactatacctg

SEQ ID NO: 21794 - DNA, 464 bp, Homo sapiens
tagcaacggatcatgctagtccccatggttactgggaactgagctcaagtggattgttatcctgaacaagtctgtgtcaggatattcttgtcacctttcagctctttggtatttgctctctttcttgaatcagcaaaagaaatcgctgtaaagttaatgtaatttacgggaagttcccgtgccacactgcatgcttttgtgtgtcacaagacttaagcttcctgctaccctctgttaaaggagaactttttatgttcctaacaatatacgattctttcaggagctatttacatagctgggttggttaatagacaactggggactgggctataagcattttgacctggaaatatttctttggggttatgtgaactactgtacaataaaacctcaattaactaggattacttggagaaaagacagtttctggttgaattttcttttaaatggaaggttaaacactt

SEQ ID NO: 21795 - DNA, 327 bp, Homo sapiens
ccctgtcccggatactggttaaaatttgcaccatcaccaaggagattaaggatgggaaggtcatttcttcttacgagcatgtgcagccttgtttcatcatcagacctgccaaagtctaacatcccaaggtgatgaaaatgacccacatttatgaaacagaggccaatacatgctcctgccagagaggtttaagaaaactccccagtcccttaaggtacttagtttcttactactacagcgggtccccattgctaggtagaatatcttttattctgctccttccctaactcaccactgctaacatgataataaattacatttctctgg

SEQ ID NO: 21796 - DNA, 476 bp, Homo sapiens
tactgtggctattgaagaaaggtttgctttttggcaacactgaaacagatttaaattcatattgaaacaaatgacgcaagcatctctagttaaaatagctttgttgggagaactggctagccatatgcagaaaattcaaactgaaccccttccttataccttatgcaaaaattaactcaagatagattaaagacttaaatgtaaaactgaaaatgataaaaaccctagaagaaagtctaggcaataccattcaggacataggcacgggcaaagatttcatgatgaaaatgtcaaaagcaattgcaacagaagcaaaaattgaccaatgggacctaattaaatgaaagagcttctccacagcaaagaaactatcatcagagtgaacaggcaacctacagaatgagagaaaatttttgcaatctatccatctgacaattctaacatctagaatctacaaggaacttaaacaaatttgc

SEQ ID NO: 21797 - DNA, 417 bp, Homo sapiens
ttagctaggcgtggtggtgcatgcctgtaaccccagctactcaggaggctgagttgggagaatcactggaacccaggaggcagaagttgtagtgagccaagattgtgccactgcactctagcctgggtgacagagcaagactccatctcaaaaaaaaagaaaaaagaaaaagaaaaagtcagaaacatcttgaggcaggcatagtgctgtcatctgtccaatattgaagatgatttaagaataagaaagaagagaacaaagaagagacaaagaagttgccttaggtgtacccacccagaaaaggacaaaggcattcttgtagtcattgtgttgtattttagctcttaaactttttaagagattagaataatttgacacatagaagatctaaaccactgaagaggctctgaagcagat

SEQ ID NO: 21798 - DNA, 411 bp, Homo sapiens
atgggttttgacagatgtatgtacccctcaaaccccagtcccactcaagatccagaacatttccatccctacaaaagttttctttgcagcttctctttctctctctctcaacactgcattcacttccaagtctggcctctgtgtcattaatttgatcttcagccatgtttcttctgttttttcctagttatgaattgttagacttgtgacaatagtgttattatgtttcacagttggtttccattttcccttttactctgttgttttatcatctcatctcgaaactctcacatcagtgaaatgatattctttttaagttcttccatgtgcaaagacgtaggtaacacagcctgttcctctggttgtgttttgcccagacatggctctttcaatgtattcctttctttcttt

SEQ ID NO: 21799 - DNA, 224 bp, Homo sapiens
agaactgccataccattttccaaagtggctgcaccattttactttcccacaaataatgcacaaacagttactatttcttcacatccttgccaacatttgctattttatgttgttttccttcaagaccagaatgagataccactttaaatctattttatgatagacatatatatacaatatatatatatacatatagccatactaaaatacatgtaaagtggtat

SEQ ID NO: 21800 - DNA, 380 bp, Homo sapiens
aatcagtcctggctaaaggctgagaaacttaagattgtaagcccaaattccacccaatcactgtaactaaactgctgctcccaaagaaaccagttttatcatccatttctgcagaacgtcatctaaatggattccgctttcattcatgtccttatccagtaagaggaagcttctgatttttccagcagagggttttatttagaagcatattcacatttaatttggttttagaaaacccttaatgttttttaatattgagctaggttgagttcaggggattgagaaaaaagactaaaagctttgcatatagctagcatgctcgtgctattattgaacatgcaagaaaagtgacggctcaatattgcactaggttaagaaaa

SEQ ID NO: 21801 - DNA, 225 bp, Homo sapiens
attcataaaaacaggcaaggggtcagatttggcctgcaggccacagtttgccaaccttggatctaaaggaagaacattctaggcagccggtacagccgaatgtaaaaatgaatgcgcttaatgaatttgaaggctagcatgaggaggccatgtacctagaggttggaattgagtggacaggggcaggagattaggccagaaaggtaggcaggggctggatcttag

SEQ ID NO: 21802 - DNA, 1020 bp, Homo sapiens
ccaggtcacagacttaggcagatcttccagaggttgacacgtttcattacacagtatccaaaaatccagtttttgaacttgaccacccatctctttgaagtctttaagtgttgtgaagttcagagtggcagatacatatttccaaaattttaattttttgcttgaaagctgtaattttcactaacaaacactgccagttgtttgccttgaaatgacaggcttattttgttcatgttcaagaaaatgtctagcagatacccaagagtaaataattatagtttgtgtcaatcattcttccaagtaaaaatggtggtccataaaaaaaagtggttagttccactcacaactcggttacataagtgctttttcttgagacatttatcaagtgcaattaaagtgttatgtggacatcatcttgtcacaagaatgttaaaaacgtatatactccctggttgagttttaataaaaagaataatgtttactcatccaggacattcttaagtgaaaccagttttgttttgttttttactataaatttgtggcagtgaagagtttttgccaaggtgccagcaatttcacccaccattggttttgcacatcagcacagatgtcagcacaacaaaaaggacaactgacatcttagtggtatttagaaaatagttgtgaccaaatggagccactgaaaggactcagggggccctgggggtctgcacactgtactttgaggatcactgatttatggaaaggctcattgtctacattttttttcttcctgcctttaggatttgagattaaagagcttcttctctactaaaaccaaccaggcttactaggactgttggcagggtttggagtgatggcagtaattctttgtttaatattaagaagggtgttgcggccaggtgtggtggctcatgcctgtaatcccaacactttgggcagccaaggcaggagggttgctgaggctagttttgagaccaggctgggtgaaaaagcaggactccatccctacaaaaaaaa

SEQ ID NO: 21803 - DNA, 876 bp, Homo sapiens
ccaggtcacagacttaggcagatcttccagaggttgacacgtttcattacacagtatccaaaaatccagtttttgaacttgaccacccatctctttgaagtctttaagtgttgtgaagttcagagtggcagatacatatttccaaaattttaattttttgcttgaaagctgtaattttcactaacaaacactgccagttgtttgccttgaaatgacaggcttattttgttcatgttcaagaaaatgtctagcagatacccaagagtaaataattatagtttgtgtcaatcattcttccaagtaaaaatggtggtccataaaaaaaagtggttagttccactcacaactcggttacataagtgctttttcttgagacatttatcaagtgcaattaaagtgttatgtggacatcatcttgtcacaagaatgttaaaaacgtatatactccctggttgagttttaataaaaagaataatgtttactcatccaggacattcttaagtgaaaccagttttgttttgttttttactataaatttgtggcagtgaagagtttttgccaaggtgccagcaatttcacccaccattggttttgcacatcagcacagatgtcagcacaacaaaaaggacaactgacatcttagtggtatttagaaaatagttgtgaccaaatggagccactgaaaggactcagggggccctgggggtctgcacactgtactttgaggatcactgatttatggaaaggctcattgtctacattttttttcttcctgccttggctgcccaaagtgttgggattacaggcatgagccaccacacctggccgcaacacccttcttaatattaaacaaagaattactgccatcactccaaa

SEQ ID NO: 21804 - DNA, 689 bp, Homo sapiens
agcacagatttagtaccgtaatctgccctagaaccgtagccttccttagccattgccattttgtcttgcttcctctgcctagtctctaggacaggtggtttaactacattttagcttatactgtaggggtcatcaggggaagataggttttgtgggtcatcatggaggtagtattaaacctcattaatttgggctaattgggggaaaacctagtgagagtgttgtaggttatttttctttagatgcagctgttactttgagttcatacagtaattgaaactaggctaatagtgttaccaggttattttgttagatagagatccttgtacctggtttaatgaatagctgagaatggtgtgcaaattaactttaattgtatgtaaattagacttgaaatgcttaaaaacagctcattaaacatttctccctgcaatcttatttacactgttttcttagtctttattagagtgcagaggtaaacttcagctcagttctgaatatatctcaactttcatgtgtggagtctatattaataaagtgtggctgtagcgttcagagaattttagaaagatatttgagaagtaaagaggaacagcatctgaaagtcagacatctggcagtctcagccagtcagaatgtgtttccttgcgtctttaaaagtaagctgtttttctcctgctgctttcgga

SEQ ID NO: 21805 - DNA, 1119 bp, Homo sapiens
gagataattcttctcccctgactggacctctggcagcagcttcactaaggtgggatggatagcagggtctcaggcacaaccagtaatggagagacaaaaccagtgtatccagtcatggaaaagaaggaggaagatggcaccctggagcgggggcactggaacaacaagatggagtttgtgctgtcagtggctggggagatcattggcttaggcaacgtctggaggtttccctatctctgctacaaaaatgggggaggtgagatgagagcccttgtgccaccccacccactcctggaaggaggatacttccatctcctgcacttacggcccctctggggagtcccatagatgtatagaattctggaggtaggaggacgcttagaggtcattaaggacactctgtaagagactaagacctagaaaggttacgtgactatcccagggctctttctattataacgtggcatcgtagaaatatgagcacaagctggaaccaggtggatgagagtttggattctggctctgctacttaacactctgtgtgatcttggacaagttacttaagctctcagagcatcaattgccgctcctgcaaattgagataataatgcctgcctttcaaggtcattgtaaggattagagacaatgtgtgtaaagcacttaataaatagtagctctgctgatgatgacgttgataaccaaactgttctgtggtcttaagtaataaatagtagctctgctgatgatgacgttgataaccaaactgttctgtggtcttaagtaataagtagtagctctgttgatgatgacgttgataaccaaactgttctgtggtcttaagtaataagtagtagctctgctgatgatgacgttgataaccaaactgttctgtggtcttaagtaataaatagtagctctgctgatgatgatgttgataaccaaactgttctgtggtcttaagtaataaatagtagctctgctgatgatgacgttgataaccaaactgttctgtggtcttaagtaataaatagtagctctgctgatgatgacgttgataaccaaactgttctgtggtcttaagtaataaatagtagctctgctgatgatgacgttgataac

SEQ ID NO: 21806 - DNA, 2114 bp, Homo sapiens
gagataattcttctcccctgactggacctctggcagcagcttcactaaggtgggatggatagcagggtctcaggcacaaccagtaatggagagacaaaaccagtgtatccaaagatggagtttgtgctgtcagtggctggggagatcattggcttaggcaacgtctggaggtttccctatctctgctacaaaaatgggggaggtgccttcttcatcccctacctcgtcttcctctttacctgtggcattcctgtcttccttctggagacagcactaggccagtacactagccagggaggcgtcacagcctggaggaagatctgccccatctttgagggcattggctatgcctcccagatgatcgtcatcctcctcaacgtctactacatcattgtgttggcctgggccctgttctacctcttcagcagcttcaccatcgacctgccctggggcggctgctaccatgagtggaacacagaacactgtatggagttccagaagaccaacggctccctgaatggtacctctgagaatgccacctctcctgtcatcgagttctgggagcggcgggtcttgaagatctctgatgggatccagcacctgggggccctgcgctgggagctggctctgtgcctcctgctggcctgggtcatctgctacttctgcatctggaagggggtgaagtccacaggcaaggtggtgtacttcacggccacatttccttacctcatgctggtggtcctgttaattcgaggggtgacgttgcctggggcagcccaaggaattcagttttacctgtacccaaacctcacgcgtctgtgggatccccaggtgtggatggatgcaggcacccagatattcttctccttcgccatctgtcttgggtgcctgacagccctgggcagctacaacaagtaccacaacaactgctacagcggcaccagctttgtggccggctttgccatcttctccatcctgggcttcatgtctcaggagcagggggtgcccatttctgaggtggccgagtcaggccctggcctggctttcatcgcttacccgcgggctgtggtgatgctgcccttctctcctctctgggcctgctgtttcttcttcatggtcgttctcctgggactggatagccagtttgtgtgtgtagaaagcctggtgacagcgctggtggacatgtaccctcacgtgttccgcaagaagaaccggagggaagtcctcatccttggagtatctgtcgtctccttccctgtggggctgatcatgctcacagagggcggaatgtacgtgttccagctctttgactactatgcggccagtggcatgtgcctcctgttcgtggccatcttcgagtccctctgtgtggcttgggtttacggagccaagcgcttctacgacaacatcgaagacatgattgggtacaggccatggcctcttatcaaatactgttggctcttcctcacaccagctgtgtgcacagccacctttctcttctccctgataaagtacactccgctgacctacaacaagaagtacacgtacccgtggtggggcgatgccctgggctggctcctggctctgtcctccatggtctgcattcctgcctggagcctctacagactcggaaccctcaagggccccttcagagagagaatccgtcagctcatgtgcccagccgaggacctgccccagcggaacccagcaggaccctcggctcccgccacccccaggacctcactgctcagactcacagagctagagtctcactgctagggggcaggcccttggatggtgcctgtgtgcctggccttggggatggctgtggagggaacgtggcagaagcagccccatgtgcttccctgcccccgacctggagtggataagacaagaggggtattttggagtccacctgctgagctggaggcctcccactgcaacttttcagctcaggggttgttgaacagatgtgaaaggccagtgccaagagtgtccctctgagacccttgggaagctgggtgggggctggtaggtggggcgagacttgctggcttcgggccctctcatccttcattccattaaatccacattcttcccgctgactgctagcg

SEQ ID NO: 21807 - DNA, 2268 bp, Homo sapiens
gagataattcttctcccctgactggacctctggcagcagcttcactaaggtgggatggatagcagggtctcaggcacaaccagtaatggagagacaaaaccagtgtatccagtcatggaaaagaaggaggaagatggcaccctggagcgggggcactggaacaacaagatggagtttgtgctgtcagtggctggggagatcattggcttaggcaacgtctggaggtttccctatctctgctacaaaaatgggggaggtgccttcttcatcccctacctcgtcttcctctttacctgtggcattcctgtcttccttctggagacagcactaggccagtacactagccagggaggcgtcacagcctggaggaagatctgccccatctttgagggcattggctatgcctcccagatgatcgtcatcctcctcaacgtctactacatcattgtgttggcctgggccctgttctacctcttcagcagcttcaccatcgacctgccctggggcggctgctaccatgagtggaacacagaacactgtatggagttccagaagaccaacggctccctgaatggtacctctgagaatgccacctctcctgtcatcgagttctgggagcggcgggtcttgaagatctctgatgggatccagcacctgggggccctgcgctgggagctggctctgtgcctcctgctggcctgggtcatctgctacttctgcatctggaagggggtgaagtccacaggcaaggtggtgtacttcacggccacatttccttacctcatgctggtggtcctgttaattcgaggggtgacgttgcctggggcagcccaaggaattcagttttacctgtacccaaacctcacgcgtctgtgggatccccaggtgtggatggatgcaggcacccagatattcttctccttcgccatctgtcttgggtgcctgacagccctgggcagctacaacaagtaccacaacaactgctacagcggcaccagctttgtggccggctttgccatcttctccatcctgggcttcatgtctcaggagcagggggtgcccatttctgaggtggccgagtcaggccctggcctggctttcatcgcttacccgcgggctgtggtgatgctgcccttctctcctctctgggcctgctgtttcttcttcatggtcgttctcctgggactggatagccagtttgtgtgtgtagaaagcctggtgacagcgctggtggacatgtaccctcacgtgttccgcaagaagaaccggagggaagtcctcatccttggagtatctgtcgtctccttccctgtggggctgatcatgctcacagaggaacgacaaagtaggcaggtccctcctctggcctttgggcatggaccacccacctccagggatgggtgaggagccatttggctccacagtaagtgaagagggcggaatgtacgtgttccagctctttgactactatgcggccagtggcatgtgcctcctgttcgtggccatcttcgagtccctctgtgtggcttgggtttacggagccaagcgcttctacgacaacatcgaagacatgattgggtacaggccatggcctcttatcaaatactgttggctcttcctcacaccagctgtgtgcacagccacctttctcttctccctgataaagtacactccgctgacctacaacaagaagtacacgtacccgtggtggggcgatgccctgggctggctcctggctctgtcctccatggtctgcattcctgcctggagcctctacagactcggaaccctcaagggccccttcagagagagaatccgtcagctcatgtgcccagccgaggacctgccccagcggaacccagcaggaccctcggctcccgccacccccaggacctcactgctcagactcacagagctagagtctcactgctagggggcaggcccttggatggtgcctgtgtgcctggccttggggatggctgtggagggaacgtggcagaagcagccccatgtgcttccctgcccccgacctggagtggataagacaagaggggtattttggagtccacctgctgagctggaggcctcccactgcaacttttcagctcaggggttgttgaacagatgtgaaaggccagtgccaagagtgtccctctgagacccttgggaagctgggtgggggctggtaggtggggcgagacttgctggcttcgggccctctcatccttcattccattaaatccacattcttcccgctgactgctagcg

SEQ ID NO: 21808 - DNA, 1552 bp, Homo sapiens
cgcattcttttaggactaccttgatttattccgtccctgggctggtggggccgaggagtgtcggaggagagccagtgctttgcgtggtcctctgaattctgccaggtagccctgctccggcgtccgtgaaggggccaggacagtgtccgccaggaggggctgtgctcccagacaggaagcaggagaggttgcagccctgttctgaccctgccattccgccctctcctcacccctgccccacagggactgcatcgccctctgcttcctcaacagcggcaccagctttgtggccggctttgccatcttctccatcctgggcttcatgtctcaggagcagggggtgcccatttctgaggtggccgagtcaggccctggcctggctttcatcgcttacccgcgggctgtggtgatgctgcccttctctcctctctgggcctgctgtttcttcttcatggtcgttctcctgggactggatagccagtttgtgtgtgtagaaagcctggtgacagcgctggtggacatgtaccctcacgtgttccgcaagaagaaccggagggaagtcctcatccttggagtatctgtcgtctccttccctgtggggctgatcatgctcacagaggaacgacaaagtaggcaggtccctcctctggcctttgggcatggaccacccacctccagggatgggtgaggagccatttggctccacagtaagtgaagagggcggaatgtacgtgttccagctctttgactactatgcggccagtggcatgtgcctcctgttcgtggccatcttcgagtccctctgtgtggcttgggtttacggagccaagcgcttctacgacaacatcgaagacatgattgggtacaggccatggcctcttatcaaatactgttggctcttcctcacaccagctgtgtgcacagccacctttctcttctccctgataaagtacactccgctgacctacaacaagaagtacacgtacccgtggtggggcgatgccctgggctggctcctggctctgtcctccatggtctgcattcctgcctggagcctctacagactcggaaccctcaagggccccttcagagagagaatccgtcagctcatgtgcccagccgaggacctgccccagcggaacccagcaggaccctcggctcccgccacccccaggacctcactgctcagactcacagagctagagtctcactgctagggggcaggcccttggatggtgcctgtgtgcctggccttggggatggctgtggagggaacgtggcagaagcagccccatgtgcttccctgcccccgacctggagtggataagacaagaggggtattttggagtccacctgctgagctggaggcctcccactgcaacttttcagctcaggggttgttgaacagatgtgaaaggccagtgccaagagtgtccctctgagacccttgggaagctgggtgggggctggtaggtggggcgagacttgctggcttcgggccctctcatccttcattccattaaatccacattcttcccgctgactgctagcg

SEQ ID NO: 21809 - DNA, 785 bp, Homo sapiens
gagataattcttctcccctgactggacctctggcagcagcttcactaaggtgggatggatagcagggtctcaggcacaaccagtaatggagagacaaaaccagtgtatccagtcatggaaaagaaggaggaagatggcaccctggagcgggggcactggaacaacaagatggagtttgtgctgtcagtggctggggagatcattggcttaggcaacgtctggaggtttccctatctctgctacaaaaatgggggaggtgagatgagagcccttgtgccaccccacccactcctggaaggaggatacttccatctcctgcacttacggcccctctggggagtcccatagatgtatagaattctggaggtaggaggacgcttagaggtcattaaggacactctgtaagagactaagacctagaaaggttacgtgactatcccagggctctttctattataacgtggcatcgtagaaatatgagcacaagctggaaccaggtggatgagagtttggattctggctctgctacttaacactctgtgtgatcttggacaagttacttaagctctcagagcatcaattgccgctcctgcaaattgagataataatgcctgcctttcaaggtcattgtaaggattagagacaatgtgtgtaaagcacttaataaatagtagctttccccctcacgaatccgggacctaaacctccgtccgggggttgaggagagacccggggcttgagtggcgaaccgggactgggggtgaccggggcgatcagtgcggccg

SEQ ID NO: 21810 - DNA, 1010 bp, Homo sapiens
gagataattcttctcccctgactggacctctggcagcagcttcactaaggtgggatggatagcagggtctcaggcacaaccagtaatggagagacaaaaccagtgtatccagtcatggaaaagaaggaggaagatggcaccctggagcgggggcactggaacaacaagatggagtttgtgctgtcagtggctggggagatcattggcttaggcaacgtctggaggtttccctatctctgctacaaaaatgggggaggtgccttcttcatcccctacctcgtcttcctctttacctgtggcattcctgtcttccttctggagacagcactaggccagtacactagccagggaggcgtcacagcctggaggaagatctgccccatctttgagggcattggctatgcctcccagatgatcgtcatcctcctcaacgtctactacatcattgtgttggcctgggccctgttctacctcttcagcagcttcaccatcgacctgccctggggcggctgctaccatgagtggaacacagaacactgtatggagttccagaagaccaacggctccctgaatggtacctctgagaatgccacctctcctgtcatcgagttctgggagcggcgggtcttgaagatctctgatgggatccagcacctgggggccctgcgctgggagctggctctgtgcctcctgctggcctgggtcatctgctacttctgcatctggaagggggtgaagtccacaggcaaggttcgtgtggggagctcctgcccctcccattcccggactcctgccctcactgggggctgtcacccaggagttctctaagctgtggccccgttgaggatgggaggcgatgacccagcgaggatttgatgtggctcccttccttgattctccgcctctcctagactcacatacttctggtttttgggactggaagagagcgagaaaggcaggaaggacacctccagggtaatctgatcttggaactgacgatgggtgggcac

SEQ ID NO: 21811 - DNA, 377 bp, Homo sapiens
tctgtggccccacgctgggaagccatgggtcacccacagcctggagctggcccgggcactggcccgtgttcctctgctccttgtcgtaggccctggcctggctttcatcgcttacccgcgggctgtggtgatgctgcccttctctcctctctgggcctgctgtttcttcttcatggtcgttctcctgggactggatagccaggtatcaagaggcagccactcagaggctgagagatgagtgggggggtgtgtgctggggaggaggagccatgggtgaatgtcagaagtggatgcccttttggggacacaggagcttgagggtgagtcctgacctaaccaggcaaggacaatagctcaggggacctgagacagtgagg

SEQ ID NO: 21812 - DNA, 357 bp, Homo sapiens
aaaagttaaccacctatgaagtacacgatccccaaaggtcagggctgattctgccctgctggttacgaaagcgtcctctcccctggccaaacagactaacctgccctgtcatagagactgttcttagattaagttcagaagtaagcatcactgctagaatgtctgacctatttttccaaaacacagctctcttccccttactaaatatgcatttatactgaaatataccattgaccttgttttctataaaattatacacaataattcagaacttcatatcctactaacatagaccacaacagtcattttcaaagaatactgataattctatggaatgcaatttaaggacattaaaag

SEQ ID NO: 21813 - DNA, 417 bp, Homo sapiens
caggatctcgtgtggattttctttcctacgctggaaactactaaactctagctattcagatgccacttcatattctaaaatccaaatcaaatagaaataaacagtactgtatggcaaaggtgtacctcaccgagaactcaggtccactgagcccccagcgtagatagacattccacctcccagatggtggaaaaaaggattgatggctggttctgctccaccctcagagactgtgccagaacaccttctaccctgggatataacttttttaagtttccagaacaatgtatgtggtaaatatacatctattctcaaattagatgtttaaaaataaaaacccaaagtaaggatttgactgtaacagaatagacggtgccttcctgttaaatcattcatatgttcctagttagatggatt

SEQ ID NO: 21814 - DNA, 282 bp, Homo sapiens
gtaatataaaacatgctataattcttatgtcaaattaaaaaacagtgacaaactatgcatataaaataaagaccaggcagaaatacacaaaaatccatagttgttgagctagttggaactatagatcatcctcccttccatttactgaaatttatgaagtttttttatggcttctataaatttaaaaccaaacaaaatgaaaacaaatgaatagcagtgcacctttctagctttttttttttttctagcccccactgaccagtaaaaatgattctggatttg

SEQ ID NO: 21815 - DNA, 175 bp, Homo sapiens
ggaattatgggagctacaagatgagatttgcctgggatcacagagccaaaccatatcagtgtccatcaatggatgaatggataaagaaaatgtgacatatgtatagatagatacatacatatatagatacatagatagatagatagacatatacaatgaaatactattaagcctt

SEQ ID NO: 21816 - DNA, 442 bp, Homo sapiens
ggcacccaaataggaagggccagagaaaaaaaggaaaatcagaaaagtttcccaaagtgctagatggtatacaagaatattcctttattacttatttatttttggaggcagggtctcgctctatcacccaggttggagtatggtagtgtcatcacaggtcactgtggcctcaacctttaaggctcaagggatgctactgcctcagtctcccaagtagctgggactacaggtgtagtagtcaccatgcctagctaatttttatttatatttttttgtagagatgggttctcactatattgcccaggctggtctcaaactcttggcctcaagcaatcctctcacctcagcctcctaaaatgttgggattacaaatgtgagccaccacacccagccttcaatttcttatctgcatacacccccaccaagccagcaaatgtcattg

SEQ ID NO: 21817 - DNA, 317 bp, Homo sapiens
gctgaagtgggaggatggctggagtccaggagatggaggcttcagcgagccgtgatcgcaccaccgcactctatcttgggtgacacagtgagaccctgactcaaataaaataaaaaatgaccgggtgtggtggctcactcctgcattcccagcactttgggaggctgaagagggtggattgcctgagctcgataaatacaaagtatttatttgaaatcagcctggacaacatggcaaaactgcatctccacaaaaaatgcaaaaattaacagggtatggtagcacatgcctgtagttccagctacttgggggttgag

SEQ ID NO: 21818 - DNA, 482 bp, Homo sapiens
ctcagaaagattaagtcactttcactcaactaatcatcatcagagctggaatttgatccagttgtagactctgcactctcaacctccaagctgagctgagctgctaagtaaagttaaactgcttctgggagtctgggtagagagaaaaaagagaaatatgtttgctgaatcaactgctgccggccaagggccaggcctttgcacctggcatcacagctgactgaagctgcagaatccgcagaattcagagcctggggctcctgctgtgtgggacacagaatgggaagatgaagtcaccaccccagtgtgtcccaggtctttgtcagaggacgaaatgctgacatttcaggagggaggaagacccttgctgctatcatggcccttaatcctgaggttagggagccaaagcggaggtcctgtaggggtgagaacatccatcccaactgtgtccgcccaccctgctcaagaaaccgcctgcgggg

SEQ ID NO: 21819 - DNA, 242 bp, Homo sapiens
atggcatttacagactatgttttgtgtatttttattttttactttttgtttttttttcttatgttagcaaaagtatgcttgctattgaaatgttgaaaatatttcattggtcttaaaatgatgcttatttttccagatgcttgcattcattctgcatgtgctattttgtcatttggtttaatttattaaacaattttattaattaaatttattaattataaattaatttataattaattaca

SEQ ID NO: 21820 - DNA, 469 bp, Homo sapiens
atgttatgtgaatgttcactgcagcactatttgtaatagcccaaatgtgaaaacgtttactatcaagagtagaatgggtaaagtgtaatatactatactttggaacactgtataaagaacaggaaagaactacacacagcagagatgaacccacaaacctaatattgaatgaaagcaggcagacccaaaagatgaacattatatgagtccatttgtataaagtacaaaaaagcccaaactagtattttgttagttgatatgggtgctggttccatggctgtgttcgctttgtgaaaacgtgttgtgtttttatgctttgggtacttctctgcattaaaaattaaaaatattaacttttcaatataaaatgcacagtctgcagcttatgatggttcaatttaaattcttttcaactttacgacggtgcaaaagcaagcattcagtaaaaactctactttgaactttgaat

SEQ ID NO: 21821 - DNA, 705 bp, Homo sapiens
cggagccatgcaggccgaaggccggggcacagggggttcgacgggcgatgctgatggcccaggaggccctggcattcctgatggcccagggggcaatgctggcggcccaggagaggcgggtgccacgggcggcagaggtccccggggcgcaggggcagcaagggcctcggggccgggaggaggcgccccgcggggtccgcatggcggcgcggcttcagggctgaatggatgctgcagatgcggggccagggggccggagagccgcctgcttgagttctacctcgccatgcctttcgcgacacccatggaagcagagctggcccgcaggagcctggcccaggatgccccaccgcttcccgtgccaggggtgcttctgaaggagttcactgtgtccggcaacatactgactatccgactgactgctgcagaccaccgccaactgcagctctccatcagctcctgtctccagcagctttccctgttgatgtggatcacgcagtgctttctgcccgtgtttttggctcagcctccctcagggcagaggcgctaagcccagcctggcgccccttcctaggtcatgcctcctcccctagggaatggtcccagcacgagtggccagttcattgtgggggcctgattgtttgtcgctggaggaggacggcttacatgtttgtttctgtagaaaataaaactgagctacgattc

SEQ ID NO: 21822 - DNA, 238 bp, Homo sapiens
cttattccatttgcactgttataacaaagtaccattagctgggtgcctcattaacaacagaaatttgcttattgtggttctggaggctgagaaatccaagatcgaggcactagcagattccatgtctagtgagagcctgcttcctcatggatgactgtcttctcactgtaactttacatggcagaggcggaatgaacctctctctggcctcttttataagaacactgacctaatcacc

SEQ ID NO: 21823 - DNA, 1394 bp, Homo sapiens
  misc_feature (1)..(2): n is a, c, g, or t
nngggccctttctactgtgaacacacagtagttaggagagtatggactttggagccacacccaagttcgtattccagctatgcctcttacaaactgtgtgatttggagtagtaactaaccatctctgccttgttttcctttctaaaaaatgggtgtaaaatcacctacctaatgcagttatcatgaagatcaaatgagttaatgtatggaaaggggtggcacatagttactcctcagtaatgttggcctcattccctctccctgctttctgtaatgcagagaattatcttctggtaacttcattgaaaaggcctctttaggcatgaaatcacctgccagctgtgctgaggacaggcttcacagagctcctggaggctaattaaggtgcagagttcagagcagaaagatgcttcactatacctgtggcaggatggccaccagggctgttccctggccagagtaagcactctttccctagggatttggaacagccccattctcacctggtgtttaccccaggttttgaagagattccaaactagagcagcaagcaaagtctagagctgactggggaaccagccctaccctgggatattggcctctgatgaaagcaccactaaacctcaccttctctcctaaatctcttcagaaatgcttactctctgtgatagacatgggaacagattgttttgcctcagggatttattgattgattttgccaaagtctttcccaaggctcctttcaaaactggactgatcccttggttctgggaatgagtggtgaacatcagacctctggaatggtggctggtcaatgtctttgccctctcaagttgctcttgaatgttgattcaactcattaggacatacttggatgatgaattagaaggagcatctttgccctctacttacagatcctaggaacaatttgtggaattatcagtaagcaatatctgtaacagataaaatgtctgctttccctttgcccctcttagcctatgacatgccacatccaatttgtcttcgttccaactgtgagaggtcttaatttcatcattctggcccttttgccagttaaatattctcccaaggatatgatctatggggagaggactgatagtggaactaatctttcaaggttctgcttaagcaattgtagataacataggagaagaaactctggaaacaattatgattatcctagttctgcccctgtggaaattcaatccgaaacccttcatgtttttgcttctctcttctctacatggatggaatatgttatacttttttgagctgaaaaatctaaataattagaaaaagacaaagttgtaatgagttttctgtttaaacttataggaccctttctaataaaagtgttattttaatcattgaat

SEQ ID NO: 21824 - DNA, 817 bp, Homo sapiens
agactcggtgtcatcaccaatccatcgccagaaggggaggaaactggaatccagcagcggcgagcagcagctgggcggtcacatctggaaatggaaagccgacctccccctcctcctccacctcctcctcctcctcctccttctcctcctctcacccaggatcacttccgaaaccagttggccttcagcccctgcctcggccagaggtttcatttttaactgaatatttacgaaagctgaaagcgtgcgaggggggtggggtggaaatagcggctgcttcttttccaaggatttatttaatggggatgtgttcaaggcaagaccgaattcagaaggatatcgacgtcgtgatccagaagtccagagctgaggactgcctgtttgcagttctgtttcatcaaatggaaatgggacatggacagtttctcctatcccatgcagaccatgctcctgaattaaaactgcagaatgtgttaaagcatcattcaacatcgtgagcacatttgagatactgtacaggacaacctgcttttcatattctctgtgaatttcaaagacgactgggattttcttcctcctctaccaccctgaacagcaagaccaatacatcctgtatttcctcctcttcagcctacttgtgaagacaaggatgaagacctccatgatgagccatctccacttaatgactgtctcacattggccggcaacttgttccaggtatagttgtgccggatgtggaactccacatctatgttcatgatgcggcggccagggccggcggcgggggccacgaccgcgacccacactaggcctcccg

SEQ ID NO: 21825 - DNA, 1090 bp, Homo sapiens
ctcgatctcctgacctcgtgatccgccctcctcagtctcccaaagtattaggattacaggcgtgagccaccgcccccggccctcaaagattgttatgagtcctcacagatgtcagaggacgatgctgtgacctatatttgcaaacgcccggaagacttaaagctattgttttgcaaatgcacagataacaataataacatgatgctgtggatgagcatgaaagtttttctcttactcctaattataatgttttccctcttactgctttgccctgctgatggaattcagtaaaggaatctctaccagcagacacttggtttttacccttcctaggacctttaatagatatctttttattactaatctttgctctttgcttgtttaacctccttgtaaagtttgtgtcttccagattacaataattccatgtaaagatgatgctggcacaaggctttcaacccatcccctcttctgacccagaagataaagacatcctacctttgagccttttagaacaggtatccagggattttacctctccagtgctaggcagggtctatgcccataacatcagcaggaagcagttacagaagatgaacctccgcccttctgcaagccccttaagattaaggaggagtatataatctctgatggggaaatgaggtaggagaccagaaggacttattttccattcccaaccccattgaacagagcaggatctggtcaaaacagggtgcagtggagaagcctgctgaaaccagcagatgatgatgaaagtgacctctagttgccctcactgcttatgagcataaagacactaccactgggaccatggccagtttacaaatgtcatggcaacacaccttggcaatggcctggaagttactttatatggttctggaaactccctgcccctttcccagaaagttctgaataacctacctcttaattggcatgcaattaaaagtggctctaaatacaactagctagtagcccacaggcacaaactctgggcacactgcctataggttagccctgctctgcaagaagtagcaccagttcaataaaagttgctttctctcaaaaaaaa

SEQ ID NO: 21826 - DNA, 1409 bp, Homo sapiens
agactcggtgtcatcaccaatccatcgccagaaggggaggaaactggaatccagcagcggcgagcagcagctgggcggtcacatctggaaatggaaagccgacctccccctcctcctccacctcctcctcctcctcctccttctcctcctctcacccaggatcacttccgaaaccagttggccttcagcccctgcctcggccagaggtttcatttttaactgaatatttacgaaagctgaaagcgtgcgaggggggtggggtggaaatagcggctgcttcttttccaaggatttatttaatggggatgtgttcaaggcaagaccgaattcagaaggatatcgacgtcgtgatccagaagtccagagctgaggactgcctgtttgcagttctgtttcatcaaatggaaatgggacatggacagtttctcctatcccatgcagaccatgctcctgaattaaaactgcagaatgtgttaaagcatcattcaacatcgtgagcacatttgagatactgtacaggacaacctgcttttcatattctctgtgaatttcaaagacgactgggattttcttcctcctctaccaccctgaacagcaagaccaatacatcctgtatttcctcctcttcagcctacttgtgaagacaaggatgaagacctccatgatgagccatctccacttaatgactgtctcacattggccggcaacttgttccagtttgtgtcttccagattacaataattccatgtaaagatgatgctggcacaaggctttcaacccatcccctcttctgacccagaagataaagacatcctacctttgagccttttagaacaggtatccagggattttacctctccagtgctaggcagggtctatgcccataacatcagcaggaagcagttacagaagatgaacctccgcccttctgcaagccccttaagattaaggaggagtatataatctctgatggggaaatgaggtaggagaccagaaggacttattttccattcccaaccccattgaacagagcaggatctggtcaaaacagggtgcagtggagaagcctgctgaaaccagcagatgatgatgaaagtgacctctagttgccctcactgcttatgagcataaagacactaccactgggaccatggccagtttacaaatgtcatggcaacacaccttggcaatggcctggaagttactttatatggttctggaaactccctgcccctttcccagaaagttctgaataacctacctcttaattggcatgcaattaaaagtggctctaaatacaactagctagtagcccacaggcacaaactctgggcacactgcctataggttagccctgctctgcaagaagtagcaccagttcaataaaagttgctttctctcaaaaaaaa

SEQ ID NO: 21827 - DNA, 1166 bp, Homo sapiens
agactcggtgtcatcaccaatccatcgccagaaggggaggaaactggaatccagcagcggcgagcagcagctgggcggtcacatctggaaatggaaagccgacctccccctcctcctccacctcctcctcctcctcctccttctcctcctctcacccaggatcacttccgaaaccagttggccttcagcccctgcctcggccagaggtttcatttttaactgaatatttacgaaagctgaaagcgtgcgaggggggtggggtggaaatagcggctgcttcttttccaaggatttatttaatggggatgtgttcaaggcaagaccgaattcagaaggatatcgacgtcgtgatccagaagtccagagctgaggactgcctgtttgcagcctacttgtgaagacaaggatgaagacctccatgatgagccatctccacttaatgactgtctcacattggccggcaacttgttccagtttgtgtcttccagattacaataattccatgtaaagatgatgctggcacaaggctttcaacccatcccctcttctgacccagaagataaagacatcctacctttgagccttttagaacaggtatccagggattttacctctccagtgctaggcagggtctatgcccataacatcagcaggaagcagttacagaagatgaacctccgcccttctgcaagccccttaagattaaggaggagtatataatctctgatggggaaatgaggtaggagaccagaaggacttattttccattcccaaccccattgaacagagcaggatctggtcaaaacagggtgcagtggagaagcctgctgaaaccagcagatgatgatgaaagtgacctctagttgccctcactgcttatgagcataaagacactaccactgggaccatggccagtttacaaatgtcatggcaacacaccttggcaatggcctggaagttactttatatggttctggaaactccctgcccctttcccagaaagttctgaataacctacctcttaattggcatgcaattaaaagtggctctaaatacaactagctagtagcccacaggcacaaactctgggcacactgcctataggttagccctgctctgcaagaagtagcaccagttcaataaaagttgctttctctcaaaaaaaa

SEQ ID NO: 21828 - DNA, 1814 bp, Homo sapiens
agactcggtgtcatcaccaatccatcgccagaaggggaggaaactggaatccagcagcggcgagcagcagctgggcggtcacatctggaaatggaaagccgacctccccctcctcctccacctcctcctcctcctcctccttctcctcctctcacccaggatcacttccgaaaccagttggccttcagcccctgcctcggccagaggtttcatttttaactgaatatttacgaaagctgaaagcgtgcgaggggggtggggtggaaatagcggctgcttcttttccaaggatttatttaatggggatgtgttcaaggcaagaccgaattcagaaggatatcgacgtcgtgatccagaagtccagagctgaggactgcctgtttgcagatactgtacaggacaacctgcttttcatattctctgtgaatttcaaagacgactgggattttcttcctcctctaccaccctgaacagcaagaccaatacatcctgtatttcctcctcttcagcctacttgtgaagacaaggatgaagacctccatgatgagccatctccacttaatgactgtctcacattggccggcaacttgttccaggctggagtgcaatggtgcaatcttggctcaccacaacctccacccccagggttcaagcaattctgcctcagcctcccaagtagctgtgattacaggcaggcaccaccacacccaggtaatttttttttttttgtatttttagtagagatggggttcctccatgttggtcaggctgatctcaaactcccaacctcaggtgatcctcccaaagtgctgggattacaggctcaagccaccaagcctggccaaaaaaaatttctaattgcaattctgaacaagttatgggttgtgaaatcaatatagtggactgcttgctactacaggctttatttaaatactaggaaggttggattacacataatgaaagattttttaaaaactgatcacaaagaattgtatatttctcactgcatcttgtggtcagataagtttgagaaactgctctacataggcaaattataggttcaatctatccatctacctctttttctcttctcttttttccatgctatgcaaacaaaaccatggcgagaggaaggaaaattccatcaatgggtggtgttaagccttttctatgaggtagctgtacatttgggacacttctatgttggcgacttgacattctaatagatagatggtccttttcatctctagccacatgtgaaaattacttgggagctttttaagactactagtggcttccacccacctggaagcatttaaatcagaatctctaggtgtagagtccaggcacttgtgttcccaccctatttcccaccattctctttgtttctctttcaccataggcttctttcccatgagaaagtaaagattttagtctctctttccacagtctgaagtaaatcactatctttctcaactggacttccaaggcaaagatttctttccatttatctatctggagttttacaaagttggcctctggattcccttttcccaaagctaattcaccacaaaggcacccctcaagtcaaggagctggactttcatacacctgcacctgtcaatcatgggtaaataatttgcaggcaaggttgctgggtgctgtgggattgacataaactcccaggtattgccagctctgagcctcaggcaagcttgtgactaaatgactccagtagtctgaggacagtccttactcagaagggtctttggaagcaaaagcagacataggcatgagagggtaaaaaaaaaaaa

SEQ ID NO: 21829 - DNA, 1245 bp, Homo sapiens
tgaaacaatttcgctcttgttgcccaggctggagtgcaatggtgcaatcttggctcaccacaacctccacccccagggttcaagcaattctgcctcagcctcccaagtagctgtgattacaggcaggcaccaccacacccaggtaatttttttttttttgtatttttagtagagatggggttcctccatgttggtcaggctgatctcaaactcccaacctcaggtgatcctcccaaagtgctgggattacaggctcaagccaccaagcctggccaaaaaaaatttctaattgcaattctgaacaagttatgggttgtgaaatcaatatagtggactgcttgctactacaggctttatttaaatactaggaaggttggattacacataatgaaagattttttaaaaactgatcacaaagaattgtatatttctcactgcatcttgtggtcagataagtttgagaaactgctctacataggcaaattataggttcaatctatccatctacctctttttctcttctcttttttccatgctatgcaaacaaaaccatggcgagaggaaggaaaattccatcaatgggtggtgttaagccttttctatgaggtagctgtacatttgggacacttctatgttggcgacttgacattctaatagatagatggtccttttcatctctagccacatgtgaaaattacttgggagctttttaagactactagtggcttccacccacctggaagcatttaaatcagaatctctaggtgtagagtccaggcacttgtgttcccaccctatttcccaccattctctttgtttctctttcaccataggcttctttcccatgagaaagtaaagattttagtctctctttccacagtctgaagtaaatcactatctttctcaactggacttccaaggcaaagatttctttccatttatctatctggagttttacaaagttggcctctggattcccttttcccaaagctaattcaccacaaaggcacccctcaagtcaaggagctggactttcatacacctgcacctgtcaatcatgggtaaataatttgcaggcaaggttgctgggtgctgtgggattgacataaactcccaggtattgccagctctgagcctcaggcaagcttgtgactaaatgactccagtagtctgaggacagtccttactcagaagggtctttggaagcaaaagcagacataggcatgagagggtaaaaaaaaaaaa

SEQ ID NO: 21830 - DNA, 1221 bp, Homo sapiens
aagacacatcaggtgagaattaaaaaacaataaaaaggacacagatgagagaatctgtagataagcacattgaaacaaatataactgtataccttgtattaaagaagctaggccagtgtggtggctcatgcttgtaatcccagcactttgccaggccaatgtgggtcacatgaggctgatctcaaactcccaacctcaggtgatcctcccaaagtgctgggattacaggctcaagccaccaagcctggccaaaaaaaatttctaattgcaattctgaacaagttatgggttgtgaaatcaatatagtggactgcttgctactacaggctttatttaaatactaggaaggttggattacacataatgaaagattttttaaaaactgatcacaaagaattgtatatttctcactgcatcttgtggtcagataagtttgagaaactgctctacataggcaaattataggttcaatctatccatctacctctttttctcttctcttttttccatgctatgcaaacaaaaccatggcgagaggaaggaaaattccatcaatgggtggtgttaagccttttctatgaggtagctgtacatttgggacacttctatgttggcgacttgacattctaatagatagatggtccttttcatctctagccacatgtgaaaattacttgggagctttttaagactactagtggcttccacccacctggaagcatttaaatcagaatctctaggtgtagagtccaggcacttgtgttcccaccctatttcccaccattctctttgtttctctttcaccataggcttctttcccatgagaaagtaaagattttagtctctctttccacagtctgaagtaaatcactatctttctcaactggacttccaaggcaaagatttctttccatttatctatctggagttttacaaagttggcctctggattcccttttcccaaagctaattcaccacaaaggcacccctcaagtcaaggagctggactttcatacacctgcacctgtcaatcatgggtaaataatttgcaggcaaggttgctgggtgctgtgggattgacataaactcccaggtattgccagctctgagcctcaggcaagcttgtgactaaatgactccagtagtctgaggacagtccttactcagaagggtctttggaagcaaaagcagacataggcatgagagggtaaaaaaaaaaaa

SEQ ID NO: 21831 - DNA, 376 bp, Homo sapiens
gaaaattccatcaatgggtggtgttaagccttttctatgaggtagctgtacatttgggacacttctatgttggcgacttgacattctaatagatagatggtccttttcatctctagccacatgtgaaaattacttgggagctttttaagactactagtggcttccacccacctggaagcatttaaatcagaatctctaggtgtagagtccaggcacttgtgttaaaacctcaccaggctttataatatgacagaatggtttaaagctactgagtagacccaccctatttcccaccattctctttgtttctctttcaccataggcttctttcccatgagaaagtaaagattttagtctctctttccacagtctgaag

SEQ ID NO: 21832 - DNA, 339 bp, Homo sapiens
ccacagtctgaagtaaatcactatctttctcaactggacttccaaggcaaagatttctttccatttatctatctggagttttacaaagttggcctctggattcccttttcccaaagctaattcaccacaaaggcacccctcaagtcaaggagctggactttcatacacctgcacctgtcaatcatgggtaaataatttgcaggcaaggttgctgggtgctgtgggattgacataaactcccaggtattgccagctctgagcctcaggcaagcttgtgactaaatgactccagtagtctgaggacagtccttactcagaagggtctttggaagcaaaagc

SEQ ID NO: 21833 - DNA, 1288 bp, Homo sapiens
agactcggtgtcatcaccaatccatcgccagaaggggaggaaactggaatccagcagcggcgagcagcagctgggcggtcacatctggaaatggaaagccgacctccccctcctcctccacctcctcctcctcctcctccttctcctcctctcacccaggatcacttccgaaaccagttggccttcagcccctgcctcggccagaggtttcatttttaactgaatatttacgaaagctgaaagcgtgcgaggggggtggggtggaaatagcggctgcttcttttccaaggatttatttaatggggatgtgttcaaggcaagaccgaattcagaaggatatcgacgtcgtgatccagaagtccagagctgaggactgcctgtttgcagatactgtacaggacaacctgcttttcatattctctgtgaatttcaaagacgactgggattttcttcctcctctaccaccctgaacagcaagaccaatacatcctgtatttcctcctcttcagcctacttgtgaagacaaggatgaagacctccatgatgagccatctccacttaatgactgtctcacattggccggcaacttgttccagtttgtgtcttccagattacaataattccatgtaaagatgatgctggcacaaggctttcaacccatcccctcttctgacccagaagataaagacatcctacctttgagccttttagaacaggtatccagggattttacctctccagtgctaggcagggtctatgcccataacatcagcaggaagcagttacagaagatgaacctccgcccttctgcaagccccttaagattaaggaggagtatataatctctgatggggaaatgaggtaggagaccagaaggacttattttccattcccaaccccattgaacagagcaggatctggtcaaaacagggtgcagtggagaagcctgctgaaaccagcagatgatgatgaaagtgacctctagttgccctcactgcttatgagcataaagacactaccactgggaccatggccagtttacaaatgtcatggcaacacaccttggcaatggcctggaagttactttatatggttctggaaactccctgcccctttcccagaaagttctgaataacctacctcttaattggcatgcaattaaaagtggctctaaatacaactagctagtagcccacaggcacaaactctgggcacactgcctataggttagccctgctctgcaagaagtagcaccagttcaataaaagttgctttctctcaaaaaaaa

SEQ ID NO: 21834 - DNA, 1935 bp, Homo sapiens
agactcggtgtcatcaccaatccatcgccagaaggggaggaaactggaatccagcagcggcgagcagcagctgggcggtcacatctggaaatggaaagccgacctccccctcctcctccacctcctcctcctcctcctccttctcctcctctcacccaggatcacttccgaaaccagttggccttcagcccctgcctcggccagaggtttcatttttaactgaatatttacgaaagctgaaagcgtgcgaggggggtggggtggaaatagcggctgcttcttttccaaggatttatttaatggggatgtgttcaaggcaagaccgaattcagaaggatatcgacgtcgtgatccagaagtccagagctgaggactgcctgtttgcagttctgtttcatcaaatggaaatgggacatggacagtttctcctatcccatgcagaccatgctcctgaattaaaactgcagaatgtgttaaagcatcattcaacatcgtgagcacatttgagatactgtacaggacaacctgcttttcatattctctgtgaatttcaaagacgactgggattttcttcctcctctaccaccctgaacagcaagaccaatacatcctgtatttcctcctcttcagcctacttgtgaagacaaggatgaagacctccatgatgagccatctccacttaatgactgtctcacattggccggcaacttgttccaggctggagtgcaatggtgcaatcttggctcaccacaacctccacccccagggttcaagcaattctgcctcagcctcccaagtagctgtgattacaggcaggcaccaccacacccaggtaatttttttttttttgtatttttagtagagatggggttcctccatgttggtcaggctgatctcaaactcccaacctcaggtgatcctcccaaagtgctgggattacaggctcaagccaccaagcctggccaaaaaaaatttctaattgcaattctgaacaagttatgggttgtgaaatcaatatagtggactgcttgctactacaggctttatttaaatactaggaaggttggattacacataatgaaagattttttaaaaactgatcacaaagaattgtatatttctcactgcatcttgtggtcagataagtttgagaaactgctctacataggcaaattataggttcaatctatccatctacctctttttctcttctcttttttccatgctatgcaaacaaaaccatggcgagaggaaggaaaattccatcaatgggtggtgttaagccttttctatgaggtagctgtacatttgggacacttctatgttggcgacttgacattctaatagatagatggtccttttcatctctagccacatgtgaaaattacttgggagctttttaagactactagtggcttccacccacctggaagcatttaaatcagaatctctaggtgtagagtccaggcacttgtgttcccaccctatttcccaccattctctttgtttctctttcaccataggcttctttcccatgagaaagtaaagattttagtctctctttccacagtctgaagtaaatcactatctttctcaactggacttccaaggcaaagatttctttccatttatctatctggagttttacaaagttggcctctggattcccttttcccaaagctaattcaccacaaaggcacccctcaagtcaaggagctggactttcatacacctgcacctgtcaatcatgggtaaataatttgcaggcaaggttgctgggtgctgtgggattgacataaactcccaggtattgccagctctgagcctcaggcaagcttgtgactaaatgactccagtagtctgaggacagtccttactcagaagggtctttggaagcaaaagcagacataggcatgagagggtaaaaaaaaaaaa

SEQ ID NO: 21835 - DNA, 323 bp, Homo sapiens
tttgagacggagtctcgctctgtcgcccagactggagtgcagtggcgcaatctaggctcactgcaagctccgcctcccgggttcacgccattctcctgtctcagcctcctgagcagctgggactacaggtgcctgccaccgcgcccggctaatttttttttttgtatttttagtagagacggggtttcaccaggatctcgatcttctgacctcgtgatccgcccacctcggcctcccaaagtgctgggattacaggcccgagccactgcgcccagccaaatctctctttttattgataaactaatgcagagtaaggaaattct

SEQ ID NO: 21836 - DNA, 453 bp, Homo sapiens
cagtggtgcccttacgtggacaaagaaattcagcctagattatttggccctggacttcaattcagcatcaccagcccccatgcagcaggccagagcctttgtgttccaggtcatctccagtccagggccgaggcaagagaagcagcccccatctgaagtgtgctggcctcctggcagaggaaaaagagagattgcagaatcacagaatacctctttctccttaggattggaacatgtcacttcctttttgttattattgttttgttttcttgagtcaagatctcactctgtcactcaggctggagtgcagtggcatggtcatagctcactgcagcctcgatctcctgggctaaagttatcctcccatctcagcctcccaagtagctggtactacagttgcacatcatcacccacggctgttttttattttttaataaaaaatgatcttgatct

SEQ ID NO: 21837 - DNA, 492 bp, Homo sapiens
gagggaaagcaaattccaggctgattgttactctgtctcatgggaaccagccaactcgctgtttgaagccaccatgtccaccggggagaaggagagcacccattttgtgaccaggcttttctccaactccagcctgtcccatgaaggcttaacgttcctacactttgggttatggaattcagcatctctgggaactgctggggaccagctcctccaggggtccaagcagggcggacccgctgcgggtctcactgcagcaggtgcatcagagatcatgcctcagcctggctctcatgtcccacaaattcctggaagattactgctgtcagaaaatgaggcaatgacagggatggttccagtgctttaggactgtgggaacaacacaagctgctgcaggggccatgctagccctagtggaatcctgggaaggcagatgggtcggaacagatgtgagaagagtcatgagcatggcccgatgcatgagcagagcag

SEQ ID NO: 21838 - DNA, 325 bp, Homo sapiens
ctgaaataggcccagccaactgcttctcctctccaactacaatcttagtggctagctagttctgacttgattgtctagctcagagaaggaaagtgactagctcatggtcacagttcaagttggcaggagagccaggtctagaaccaggtatcctgactcctaggccagtgctctggtgcttcacatgaacctaagaaaataccaagggtatggctggggtatggtggctcatgcctataatcccagcactttgggaggccaaggcagatggatcacctgaggtcaggagtttgtgaccagccgggccaacatgacaaaatcttgc

SEQ ID NO: 21839 - DNA, 535 bp, Homo sapiens
gaacactcctccacgcaggttacctgaagccagtgtattacttacagataggacaacagaagcctatgattcgtaaaagcctcaagaaagctagtttggcagatggggtttcatctgcatgtgccacatttgcactgcagtcgagggtcccaagaaagcactccaccctaggttttataccccagcataacatgattcactgtgctaatgtgttgaaggacatgctgtttctatgagggattagaacagaacctaggctgttcaggctagtttctccctatcttaagatgttgcattctcagcatattctatatttattcttgagaactatgagtaaaaaagaggggtaactgtgtcagtccaaagatacctgaagaattgtcctgtgctaacagcagaaaagtttccagttgatttaaaatcaagtgatttgcaatgtagttacaaacaaaattattaagtgcctattttgtatttgaccccatggtaatactgattatgataataataaaatatattaagcaaaaaaaaaaaa

SEQ ID NO: 21840 - DNA, 355 bp, Homo sapiens
cttgaacctgggaggcggaggtggcagtgagccgagatcgtgccactgcactgcagcctggtgacagagcgagactccgtctcaaaataaataaataaataaaaattaaaattagaaatttcctggtggagaggaaagcagaggtatttttaaagctctcaggtgatatatttctgttttaaggtaggactaaaaatcatgggactacgtcagaagttctaattataaatctataggttagttttctccaggcatgggtatagtgcttaaatgccttttaaatttgttaccaacatagaaaaaaaaaggtttccggcttctcttgaaaaatggaaatattaggcaacagttgggc

SEQ ID NO: 21841 - DNA, 1045 bp, Homo sapiens
tacaggtgtgagccactgtgcccagccgatactctaaatttctaataagctcttaggtaatgctgatgctgctggtccaaaggtgacactttgactactgaggttcaaagatgcctcagaagaagaagaaatttaattacaaacatacatgaattgttgaatagcagctggtactaatctagaaaaattattccaatctgttgagtttaatagtgtttctttgttaattgcctttcaaagtgattacttctcccctacatcgtaactatctacatgttatgggacagtttatgggcttatttgtatccataattatgttagtgaaatcaaatagtaaagaaagctgagttagaacctgttccacaagtataactttgttgtttaaacttcttctgatattcagctctaattcctttttgaaagaaacttttctacagattttgtgttagattactggtagtctcaaatgagttctctaaccatccaattctgcatggcttccttgcattgtctttgggttgattaggattgccaggaagtaaaatagccactatagctacttcctttttcaagtcattcaagttaagcttaatgtagaaaaacttcgtgagatttcattaaaattcttccctactctccaattggagtataataaatccaatcaagataggctctggattttgctgttagtactccaatgaaggcagaaatggggacatagcaaactacagcaaggcttattttataccagtacagagccttgcttataacagtggaggtatgtagctatttagtcttgggccatctattactctcagtctgagacccagttatacaacccagttgtataactcaatggattaatatttccaaattaaataaaactgaattgggtacagtattgtgctcctgtagtcctggctacttgggaggctaaggcaggaggattgcttgagcccaggagtttgaggctgcagtgtgctacatttgtgcttgtgaatagacactgcactctagcctgggcaacatagcaagacctagtctc

SEQ ID NO: 21842 - DNA, 648 bp, Homo sapiens
aaaaattattctacatctggccatatatatgatgaaggcttgagctaataacttagcttctctgtgctagtttcctcctataatctagtaaacaaccttcccagtctaattttctaggattatttgctgactcaaatttttccagtcttgtagccaatggcatcccacttgaggttcttatcctacttgaaacttatagcttacaaacttcacagcctttgggtgaaactagagtgtgttctacctaacatgaaacttaatagtggagacggtgcactgggaattgagaataagaatctgttagagaggtgaagtgagtcaaagtctcttccagctgagccaacctcggaaagctttatttatgggtcaatttatgggtcaatgaagtcacatgacatggactgccttcctacaggacactcgtgcatggaagcccaatttcctcaaaacctagattttccttagaagttgtctcaaaaaaaaaaaaaaaagaaagaaaaagaaaaaagaaagctttgcctaagtggtttcctgtccttaaggtttccatggagagaacattttcaagattaaaggagtctagctgtcatttttaacccgaggggtcttcagatttatgtttcaaagcagggtgggaatttggtcctt

SEQ ID NO: 21843 - DNA, 739 bp, Homo sapiens
aactccggaccttaggtgatctgcctgcctcagcctcccaaagtgctgggattacaggcgtgagccaccatgcccaatgggtgtgggatttagtatattaatgagtgtataatgaggtccttggtgaaacctacatcaaatccagcaccgtgttgggtccagtctgtcttagccagcttggtccacaccctggttttttagggtcttattggccccttacttctgcagcaaaagtttccttttgctagtcatgtgaaactgccacctggaattttctattctctagtgaccaccctgtattattcctgtctcactgggaccctaagaaattgggaattccaactacacatccaaaatagtttgactaaaactgttgaaaaaagaaaaaaataatggcataaagtattgcttgactaaattccagccaggtgcattggccactttaggtcgggtgtggtggctcatgcttgtaatcccagcattttgggaggctgaggcgggaggatcacttgaggtcaggagttccaaaccagtctggccaaaatggtaaaaccccctctctactaaaaatacaaaaattagccggacctggtggcggaagcctgtaatcccagctactctggaggctgaggcacgaaaattgcttgaacccaggaggtggaggttgcattgaaccaagatcataccactgcactctagcctgtgtgacagagaaagattccgtctcaagaaacaaaaa

SEQ ID NO: 21844 - DNA, 503 bp, Homo sapiens
gcgattctcctgcctcagcctcccgaatagctgggattacaggcgccttccaccatgcccagctaatttttgtatttttagtagagactgggtttcaccatgttggccaggctggtctcgaacacctgacctcaggcagtctccctgcctcagcctcgcaaagtgctgggattacaggcgtgaaccactgcgcctggccacatttaggatttttaaatcgctgtgtatgtctgagattggcctgtgatttttttcctttctcataccgtatgtacccagttttaatctcaagtttatagtaccctcaaacaatgaattagtgaattttcccactcttcctttcatccaaaagcttctgtaataaagagattatctgtttcctaaagaattgtttgctggggttttttcccgctctccactggccccagacatgatatctctctctgtcttcaggctgtagtgcagtggcaagatcatagctcactgcaacctcaaactcctgg

SEQ ID NO: 21845 - DNA, 395 bp, Homo sapiens
ggtatcttcaatggaatccttaatgagagtttattgaagcagttatgtaggatgtggggatggaggactcatctgctaggatgatgagaaggtgattttagagggagcggattgataggacttgtgaccttgaaattccaattcaattccaagagactccttgcctgattatgcttacttaatagaattctcccatctattaaggtttcttagactccttatctttctaattccttttctctcatgtaaactaatgggatgctctgaataagtgaaaagttaatgtagggaaattttacagcacaatcttgaaggcagccacagtaatgcagtattgaaaagcacacttaatgatgggtatgtggagttcatgaacaacaatagttcatttgtaa

SEQ ID NO: 21846 - DNA, 278 bp, Homo sapiens
aagaggggctgccgcctaagcaagggccctggcctgcgaggcaggaagaacgggctctagcttcacaaatggtatctcagaagatatgtcaatccatttttaaaataataatgcagttgtaataagagtgtcattgtgtcaaagaaacagagccactaggtgacatatagagatttatgataaggaattggctcacacaactatggagtctggcaaactccaacaccagcagtgggaatgggcaagagggccaatggtatggttccagtccaaaggcc

SEQ ID NO: 21847 - DNA, 288 bp, Homo sapiens
gcttaatccataatagcctgttactgaacacaactcatacattcatcaacaaatgaatgaataaacaaattgtattatattcatacaatggaatactactcagcaataaaaatgaatgtactactgatacaaatagcatggatgaaactcaaaatcattattctaagagccagatactatagtctgtattttatgattcactttcaatgaaattctacaatagacagaactatctatcaacagaaagcagatcagtggttttctgcagccagaggtatgaaaggtttg

SEQ ID NO: 21848 - DNA, 400 bp, Homo sapiens
ccgttactaccacttggcactccctaaaagcttgagattcagagaaaggaagacaaagcccctgtacttgaggagggagagaataaagagagccggcgggggagggggtggcaggagagagagagagagagaggcgtgtgagtgagttcttgcaacacagtgtggtcagtgtgatcacagagctgtgatggagtgcggatgaggtctgatgacttactggtcaagagcatgggttcaggcctcagttcctccccaatcacatgtggggtcttaggcatctttctttttaatcttcagtttctttgtctgtgaaatgaagataatggcacagagcctacctcccagagttctatgtggattaaatgagacaggcaaacaacaacaaaaaccacaaacaaac

SEQ ID NO: 21849 - DNA, 1722 bp, Homo sapiens
ataatgttttagtatatttaatattcaggacatatacaaaaaatgtgtttatctgaaattcaaatttaactgaacatcttttatctggtaaccctacttctacatgttttctctacccagcttctattttaatgctttgcgtatagtaataataaaatgaacaagaagtagttgggaaggtgtgatcgttgagttccaaaatgcagttatttgtagcattttgaacaataaaaaggttacactctgcatcaatctttccatgaatctgaagcccttaagagataagaattacagaacagtgcacattcagtgtataagaacaagacagccaagcatggtggcttatgcttgtaatcccagcactttgggaggccaaggtgggaggatagcttgaggccaagagttggagaccagcctagacaacatgataagacctcatctttacaaaaaataatttagaaagaaaaagacataatctaagtatttttttttaaatctgtttttccccattgtggaagataaaatttgaacaattacgcgagatttgtttacctaggcatgtgtatcaagtagattaaaattcataaaagtcattaagagtgattgcatcagccatggtgctttgtggaatgaaggtccataacagcatgatggcttccagtatatcatcgagtttagaaaaaccaattctatagctgcccatcctccaggtttgcaaatatatgaatcccaaaattgaagtaattgctaaagcaagaatatgtttttttaagattgtagtctttgtaatgaatttggaaatctgtggtatcatatactaaggagtggcatcaagtgacaaagcaagaccatagtatgtacatgacaccaaacacaaccaaatcaagttatatttgtgaagttgtgattcccaagctctggagaaatctaaaatttggatgcatgtgttggtggagcaaatatctcagaagttactgaaatattgcaaggttcttaagttagcatgaaagcaaacttttttctctctttcctgggagatgtgcagagtatgttgtatgaggaggaagacaggacttagggaagaggctaaatattttggagcaagtctgactcagccatttgtatctcctggttggaaaacggactgtcatatcactctacattcatcatcacattagagaatagattattttcccctttagagatgtcctgggaacgtgtttgcacaagtgtccatgtgggtactgaggtgaagtttggttgagctagtggaaacctagtggggaaaagtcttaaaaatccatatacataagaaaaatcatctgtccaagtatctttcattttagagaatcgagtcacttgatacttctgattgtttcctccactttaagttaagcctgggcaacatgttgagatcctgatctggtttggctgtgtccccaaccaaatctcacttgaattgtaattcccacaattcccacgtgtcatgggtggtgactgaattatgggggtgggtctttccggtgctgttcttatgatagtgaatgagtcttacgagatctgatggttttaaaaaccatcagtgcagggagttgccctgcacaagctctctgcctgctgccctccacataagatgtgtcttgctcctcttgccttctgccatgattgtgaggcttcctcagccatgtggaactgtaagtccaattaaacctgtttcttgca

SEQ ID NO: 21850 - DNA, 307 bp, Homo sapiens
gatcagatcattggactctgatgaccagccctagcactcgtttggtgtgcgttggacatgcacatgaactgatcaagcttgatttcttcctctgtaaaacaggaattctcaaagcttcatattgggattaaatgagattaaatgaaataatggatggtacatgtcagtgttggtcatagggaagtaaaagattgaatacaccaagggacaatggtcagatcatctataaaaatagaactgtgacccaggatctgcatcaaccagcccagtaaactaacctgttatctagccatgccagacttgtagg

SEQ ID NO: 21851 - DNA, 213 bp, Homo sapiens
acggaagtagaaactataatgatagataccaaagactaggaaaggtgatgggtctcagggagaggggttaagagtgaggttggtgaatgggtacaaacacacagttagataaaaggaacaaattttaatgtttgatagcagagtagggtgactataattcacaacaatgtattgtttttcagaacagctaggaaagaggacctgcaatgtacc

SEQ ID NO: 21852 - DNA, 824 bp, Homo sapiens
gtggagagatagctgggctcacttcagaagacccaaattttgattcaagactgctttgttctctcaccagaggcaaacatatcaccaggttgcctttgggaggagactgctaacaaccattgagcagacataacctggagatttgttttgcaatgtgttgtataacaatgttgatttaattgcctcaggcgatttcacatgaaaatccaggtagaaaagtggaaaatatagcaacagtgggattggaggtgaatagctgcctccacctgtggatgaggcatgtcctctctttttatcaaactctcatcacctcttttcttatatcctgtctgcttcatttatttatatcatctgcttgcctctgttggtatggcagttagcaacactaatcatctggtttggggaggacggtgctgcacttattttcaccaacaaagggccaggggacgttttgcactcattttttgatagcaggaacacttacaggatcatgaacaccacattggaatcagaggttcctcagtgctactcaaaacttctctgctgcaattccaactctacctccctgggccctcgttagaatcctttgatcatcctcctccagggattgagatcacatgataaacaatcttggattgggtcaggttaagctatatgcaggtatgataaattcataattttcaaactgcggtatgtgtacctaaggcttttcacggattgcatactcaggacaattttcaggaaattaatttccagatcctctatatacactatactctttccttaaattgatctgctgagaatgagtctttgttcatactgtt

SEQ ID NO: 21853 - DNA, 514 bp, Homo sapiens
atagttttcctggtgtcttggagagaccctacctccacagctcctgcaggagcaaaaccatgttttctgccatgtgagctctcctacactggccacagctgattgtacccaaggttcagtacccgaccccaaagagactcattttccaggccagagggcggcctaaggaatgaaagtgtaccctagcagtggtattcttgtttgatggtacctggccccaccaatcacggccctcttttagggagtttgaacaccagaaagtaaatgatgaataggaagcacagccagaatagacacagtcaccgtaatggtgactctgagaacagtgacagcagttacttctgcagtcaagacaatttgaggtcttgttgattcaccattctgctcttagcttactggagaaatacttgactcctgaacaatgagtctggactttgtagttcctgggttgctttttttttttttcctttcttatgtattgacataaataaactcacattaactgaaaaaaact

SEQ ID NO: 21854 - DNA, 213 bp, Homo sapiens
aaaacatcaagctaactcaatagagaggcattctacaaaatacctgattgtatacatctcaaaaccacgaaggtcttcaaaaacaaagtctgagaaactgtcatagccaagaggaagctaaagggacatgacaactaaatgtagtgtgatatcctggatgtgatcctggaacaggaaaagaacattaggtaaaagctaaggaaatatgagtaa

SEQ ID NO: 21855 - DNA, 794 bp, Homo sapiens
ctcatccagggcggacagagaggatcggagacagcgatgggcgctgggggctaggtgagagctgtgcctgcaagagagcttcttgggcatctcaaaggagacactccacaaaaatatcgcttcaatgcactcctttttggaggcatatcaaaagcagccctcttttatttccatgccttgcataatagcagatttccagtcccaaagtgtagaggagccttgctctcggcgcagaggccctttgtaaaactacagaaggctttgtcttccctcccaaccgggtctgtttcatgcataggtcagagcattgatgtgctactagccaggaaaaattaaccaggtgaacactctcctcattaaacagcgacagagtttaattgtgaatttgctctcttccccatctccattcctggccacgtatttgactggggcatgtgcctgggacaaactgagaaatggcagggcctatccagcttccccctctggggccaggcctcctccatttgaggcaggtaggcacctggcagggaagggacaattcagagtacacaatgcacacagaggatctgagaccccctttggggccagcttcagaggctagctctgtcatgcgccagctgccatcaggcacaccccaccttcttggcctcccctcaccagccaccccaatctttgcatgcacagtcctcagcctttagtgaacctggttggtccctgtggcctccagcatctgtactattctattttctcacctataccgctcctcggttggggtctggcctgtctcctgccaa

SEQ ID NO: 21856 - DNA, 369 bp, Homo sapiens
acacaaaagaggacatactggatgcttccatttacacagttcaaaaaggggcatatctaatatacagtgttagaagtcaggatggtgggtttctttgaggaaggaggaggtggtggcttgaatgggcacaaggaagttgtaggggcactgtaatggtccagtcttgattttgttagtaattacaaattaattaggtatgatcaattttttgaaaatttcctcaagatccactttcctgtatatatatttcaatggtaaatttgcgtaacaaaaccttagcttaatcagagaaccacagattttaaaagaatgttctgaaccatcaacgatgtatccaaatagttttctacaaacttgcagcttaggtga

SEQ ID NO: 21857 - DNA, 774 bp, Homo sapiens
agagagccacaggaatgaaatgcagagaacattgtggagatatattttctgttatccccattcgaaatagatcaggctgcactgataacagctgcaaaaacaattggggaccttattcataaaatcaaaggtaaactgccagatggcaaccaaccagaggacctgaggatgaagaggattgcaaaatgctggtgacatagagaacaaaccctttggagaataaacatgtctgtatctttgttaaaatgtagaaatcagaatttttcccaaacttgcaagtaatagagaataaaataaaaacaacaagtgtttgttaactagaaagtttgcctatggaaaaaaacaattttcttagttgaaaatgtgacgggctgttcaggcttctctgtcattcttcttgtctctcttcataatctctatgtaatgcagaaacagccagtaaaagaagagaatctgtgcgtctttaattacttcctgtaagtttcacaagtactaccacagtctcattggctatgctacatctaaataagccactctttcaaagacagcataattatttgcatacacttgcttccctagctatatatcatgcctatcaaaactaagtgcttccaacctaccttaacagtgtcttagcatctatctcacttgttactaaattctgtgttggtaaatattcaaaccatttatgataatatatactcataatctgaactaaaacccagaacagaatttattaaaattgaggataaaaataaactcaatctttatgac

SEQ ID NO: 21858 - DNA, 257 bp, Homo sapiens
taaatttctacatttagattttcaaaaatatatcctagcaaaatgctgccaactttcttctgatgtgaaggactgtcctttattctaattatagatctctcttggtgtaaggtaaaaatattacttttttgacattaggttgatagtaagatagtagagtttattttgcccagtacatattaaaaactgtcaaccttaggttgggcccgtccttttaattttttaatattaagagtccatattaagtggtccaaaag

SEQ ID NO: 21859 - DNA, 452 bp, Homo sapiens
ctgccttggggcataggaggggaggaactcagtctggccacactggctcaggtgagggcgccccaggggaggccgagaggggctgttctcttgtctgctttgctatcagggactgcctcgagatgtctttggagaaagtgttcctggcttgctgggaaggatccgtgttcagctcccgctgcccagcagcttccatgggaaccttgccctcctggggtctggatccatcgcgacgtgaaggtgatcatcgcccacccccgggacactgtgggggtcaagagaggccccgtggtgagggaggatcatcatcctgggggtcgggggggtttcctcctcagggaggaagatttccagccccggtgctctgcctccggcagactctgtcttgcccacccgctttgtctttgtcgcatgatggaaataaatggaaatggtttccacacacgaatgca

SEQ ID NO: 21860 - DNA, 367 bp, Homo sapiens
gtgcgccactaccttccctccagttttcaccaggtcttgggttcatcctgactccctccttcttctctccccgtccctgccacacctcactgctcacaagaaagacatcactgtgtccgttctccttttttcttttcttttctttttttttttttttttgagacagggtttcgctctgtcttccaggctggagtacagtggtgcgatcttggctcactgcctcccaggttcaaaaaattctcatgcctcagccttccaagtagctgggactacaggcacgcgctaccacacccagttacatttttttgtgtatttttagtagagatggcttttgccatgttggccatggctggtctcaaactcctgg

SEQ ID NO: 21861 - DNA, 1178 bp, Homo sapiens
gaaattaaaatatttattatgatttttcctcatttatttaaaaagacggacataaaaattatacaacaaaaaacccaagtcacatttcaggaggtaaaaactaaaaagtctgatatgaaaatatggtggttagcatttgtgaaagattagatattgaagagaaatatattattgaatgggaatatacagcaaaagaaactatgccaaataaaatgcagatcagagaatttttaaaataaaaagagcattagcgggcaacagaaaatcttcaagtggccgacagatgtgtatttctgtccattaaaaagaggaaggagagatcatggcggacgggaggcaagactagcctgcagctctggacagagcagcgagtgggagctcgcattgtaaactttagctccagatggacggcaaaaacaaaccagcaatccccagaggacccacagaccctctgaaggaagtgggctgctcctgcaggacccgggagacccccaaaactgtgagtgtccagctgccgaagtgggaaagggaaaccctcctctccggaacagacaccccctgagaagtctatttgtgggagaagtttccgactttacctggagctgagtcagtctggagagctgactgaaatacagggatagaggaggcagcagcaaggccctgggagctgaatgggtccccgggcagcccattcctgcctggcaccacagggatccaacgggagaggaacagagggtaaaactacacggagagaaggaaatctctagctgaactttgtaacaattcgaacagcgtgagaagtctcctggccagaactcgggggaggacacaaatctcctgcacagtttaatatccaagagtcacacgtggagaggaagcattcacaatgagacattgcaaccatttatctgtcaggtcctagaagtgttggcagagctgcaggattgactaggtacacggctggggggggaaaaaaagacccgatggtccgatcaggaaacagagaaaattcagggaccctaaaattttcaagaaatcacacacccaagcaggtcgggccagagaaccctttgatgagaggccgtcacttgacagatgcgcggagcacgtcacccagagaatgggaggtccagctcgatgtacgacccgagagaaggagaaacggcaaggaaagaccc

SEQ ID NO: 21862 - DNA, 731 bp, Homo sapiens
tcacttggtaaaactgagatttatccttgctgttggatccagttcattccttttcactgttagttactattctattatatgaacacacaatttgtttatccatttatttgcaggtggatatttgggttgtttccagtttttgtcttattacaaacaaagctgctataaacatttgagtacgaatctttgtatagaaatatttcctgttttcttttggcaaataaaagcagaatggctgaatcattatgacagatacacgtttaacttttaaagaaaccgctgaacttttttcaaagtgattgtaccattttacaatcccaacagtgtttgaaggttctagttcctccacattctcaccaatacttgctatggttaatgttaagtctatttaattttagccatcctaataagtatgtcgtggtacatctcactgtggttttaacttgcattttcctaataactaatgatcttaacatcttttcacaaatgcagctttgtttttaatagtaacatgtgagagataaaccaaaagttcaccaacagagggctaaaaaaacatccaatgaaatggaataccatatggattaaaacacaagaaagctctaagaactgacatgaaaaagtccaaaagtagctgggcgcagtggctcacgcctgtaatcccagcactttaggaggaaatttttaaagtctttgctaatttaaattctattttttagaaaccctatatg

SEQ ID NO: 21863 - DNA, 441 bp, Homo sapiens
cttgttggtcatttaggcacaaactccaaatgatttcccatgcaggtcagttcaaggaggagtgagagggtcgaaaatcaatctatgtggatgtgaatctaaagccaactggtggatgtgagttttcacttaggtggtcttgaggtggccctaaaaatcctggacactgtaccagtgtaaaataggcctgacacctgaatcattttcccagactgagaatattggccagaagcccactgtctagggatgtgtgtaggtaacagctgttctctttcatataatacagcaggatgggcactgggtgtttcagctctaccattcactcagtgagaaaccttatgtaaattaccttgtatctccggctctcttacctgttttccaaacccattagtggttcagaaaagcatggtcaccatcatcagattttaaaatcagagtgca

SEQ ID NO: 21864 - DNA, 427 bp, Homo sapiens
gatcgtgccactgcacttcagcctgggcaacagagcaagacttctcaaaaaaaaaaaaaaaaaaaagtatatagagcacctggtgcatagtggatgctcaagagatgttattcacacttaatgatgtatatactctgctggtatgtaaacagttactgtctttctgaaggacgatttcttaattcttaccgagagctttaaaaatgagtgttttctgtatgactcagcaatcccataactaaaaatttattctaaggaaataattaaagatgtgtgcacatctggtcacacgtggcacctcactcctgtaatcctagcacttgggaggccgaggcaggaagatcccttcagcccaggtgttcgagaccagcctgagcagtatagtgagactctgtctctacaaaaaataaaattagtaagagaaaag

SEQ ID NO: 21865 - DNA, 717 bp, Homo sapiens
tctatcctgctagtggaaaggttactgtttgaaaaatgtagttccaacacagccactagtttgtgctactttagacaagtatttaaatctttgcaatagagatattataatagagcattccttgccttggcacaaggctgttgttaaattggaagactaaggatatgaaagaattttgtaatgtataaagaaatcttggccaagcacggtggctcatgcctgtaatcccaacactttgggaggccaaagtgggaggatcacttaaggccaggagtttgagaccagcctgggcaacatagtgagaccttgtatctacagaaaatttaaaaattggctgcatgtgctggcatgtacctgtagtcccagctactccagtctgggtgacagagtaagaccctgtctttattaagaaagaaagaaatcatatgtgcattataaagattttgccactcttaagattgagtgcaaggatctatggtaacacttcccagttgatgaagaaattgggcattagataatgaaggttttgcagcagtaattgagtttgagctattttcatgacagtgtattggaaaggtgatagaggagttgtctcctaaaatgagggaaaacatcaatacaaaatgatggtaagaaagaaatgaaaatatttgtaatgatgctttaaagctttagggtacttttaaaataccctaaatatatcaccttactaagcca

SEQ ID NO: 21866 - DNA, 421 bp, Homo sapiens
ctgatcgtgtgagtcaatactctttcataaactctccttcatgtatacacttatcctattagtcctgtccctctagagaagcctaatacaatgaggaataatttaatttttcagttttttagcacttaatttatatttttggtgcaaatatatccacatttgaacactttgaagacaattacatttactttttaattctttaaataattgagggtgaatacaagtcaaaattgtgataaaaatagattgagtagaaatagcaatcatttggttatgcatgcctgtagtttcagctactcaggaggctgaggcaagaggatcccttcagcccaggagttcaaggctgtagtgcactatgatcatgcctgtgaatagtcactgcactccagcctagacaatctagcgagacaccaactcttaa

SEQ ID NO: 21867 - DNA, 700 bp, Homo sapiens
ggattagctctagacggcactacagaggcatttgaactttctttctttgcctctctatgtctctctgtcttttcctgtcttctgatttatctgtctttctttctctagtaaatggcactcaatataaaagtggtggagtcaatcttaaacttatttttattatgattgtattgatacatgcacgaagtccctctgccctactccctattcaaggatattactcactgcacatcataaatctccatcatctgtcttaaagttttatgagtagatttcatctacattatattcaagttcatttattactgagctgtattactgtggagctctaacagtatttgtttcctgatttcaaactcaatgctacagagcactttgaatacatcacaccttataggaaagatagtaaatgtattaatcccattgaaaaattagttttgtacaatgtgctaaatagtattgcattggattacttttatatttaacacactccatcaaaacatcccataacataattttacaatctgcatgtgaatttaactgtgaaattcagtattgtgatattttgaataagtgaattctttctctgcaaatactatgttgataaaattacttgtatgttcccctgaaatggtttgtttcctgtttcttcattattaaaacataaatcaatcatatgtttacagataaaaaaaaatgg

SEQ ID NO: 21868 - DNA, 324 bp, Homo sapiens
cccctgccccccatgaggagggagtcgggctctggacctgactcatgttcataggagggtgtgaacccagtgcaaggctgaggttgagcccaggcttagggagtggggaggctgctgaggacggaccatacctgctcccactgtggagtctgcaggacaccaggtgatataagtcatgattaaattgggatatactcttcaatagatttgaaatgacctgtcatggaaataatgcatatattaggaagaaaaaaaatcagggatagatagatagatagatagatagatagatagatggatagatagagagaaggaatcaagacc

SEQ ID NO: 21869 - DNA, 1862 bp, Homo sapiens
  misc_feature (557)..(557): n is a, c, g, or t
  misc_feature (667)..(667): n is a, c, g, or t
  misc_feature (681)..(681): n is a, c, g, or t
  misc_feature (763)..(763): n is a, c, g, or t
  misc_feature (800)..(800): n is a, c, g, or t
tttttgttttgttttaacttccccttgtttcaagacaatgctaaggaactttaaaattgtagcagttcatatttgctgggctcttactgtgtagtggcagggttgtaattgcgttacctatattaactcagtcaatccttacaacagccctatatgactggcataattatacccttgttttgtgcatgaggaaatacagggaattgacatactggatggcagggctgggactcaaggacagtctgactctggagcacagctcttttgtttttctttttttcttttttctttgtgtttgtgtgtgtgtgtgtgtgtgtgtgtgtgtgtgtgtgtgtgtgtgtgtaggagagagagacagagtctcgctgttgcctaggctggaggtgcagtagctcaatcttggctcactgcaacctccacctcccaggttcaagggattctcctgcctcaccctccccagtagttgggattacaggcgtgtgccaccacccccagctgactttttgtgtgtgtatgtgtatgtttttttttttttttttttgagacggagtctcgcnttgttgcccaggctggagtgcagtggcgcgatctctgctcactgcaagctctgcctcatgggttcatgccattctcctgcctcagcctcccaagtagctgggactacagncgccaccaccacgnctggctaattttttgtatttttagtagagatgaggtttcatcgtgttagcaggattgtctcgatctcctgacttgtgatccncccacctcggcctcccaaagtgctgggattataggcntgaaccactgcgcccggccgactttttttttttttttttttttctcaagacagagtctcactgtgttgcccaggctggagtgcaatggtgagatctcggctcactgcaacctccacctcctgggttcaagcgattctccttccttagccccctgagtagctgggactacaggcgtgcgccaccacacccagctaatttttgtatttttagtagagacagggattcaccatattggctaggctgatctcgaactcctgacctcaggtgatccgcttgccttggcttcccagagtgctgggattacaggcatgagccactgcggccggccgaggagcacagctcttaactgccacactgtgctgccacctgccttttaatgtgcagtagagtcgtggcttgttaattccatcacttaaaactcatccttagtggcaggggcaggggcttgaacacacttctctcaggagagcaagccggtgagtagaagttcctgggacagtggctgacacatgctaggtggtcagtgagtagttagttgttcgtgaaataaatggggctgggcacggtggctcacacctgtaatcccagcactttggaaggccaagatgagcagatcacttgagcccaggagttcaaaaccagcctgggcaacatggcaaaacctcgtctctaaaaaaaatacaaaaattagccagatgtggtggtgtgtgcatgtagtcccagttacttgtggggctgaggtgggaggatcacttcagcccaggtggttgaggctgcagtgagctgtgatcatgccactgtactacagcctgggggacagagcaagaccctctctcaataaataaataattaacacacaattcatggaagagtcatgcactgggattagcccagctctacagctgatggtcttaggcaagtgcatctctcttggagtaaatcattctaacccataaaatgggtgtaacagtttgtcttgcctgcttcttttggtaattggaaggattgaatgagacaaggtcctgtgtaaacagaataaaaatttttgtaaagtcttaaaaa

SEQ ID NO: 21870 - DNA, 575 bp, Homo sapiens
ttctcccctcccccgccagcctttttgcaaaggctgagcccagtccagccaggacggccgagggatctctgctccgggacgcgatttgctggcattgtcttcgggcccttccccagcggccccgcctccccgggtgaatccccggcggccagcgcagcgcaggcagcgatcctggcggctgccggggccggcagcttcctggaaagttacttcttgttggagccggcaataggcaaagtgtgttctgtgaaatccgcagagccgagattgactacgttccgggaatgagagggctgtgtcattcccctcattgcctgctgcattgacggcgtaacaggaaaaaaaaaaaaaaaaaaaaaaaggcatacacacaatgttagctaccgaggtgcaccaaaagttttatttgaatgtaactaaattaagggccgccacggtcataccacaaagcctccgtcgcgccttgcggggggcttcgaggtggatcgcccaggggcgggcagtccctggaagacaggtacggagtggtcggggtggggtagcgaagtctgcctaggcttgccccggcgcgcagg

SEQ ID NO: 21871 - DNA, 386 bp, Homo sapiens
ttctcccctcccccgccagcctttttgcaaaggctgagcccagtccagccaggacggccgagggatctctgctccgggacgcgatttgctggcattgtcttcgggcccttctggaaggctgtctcgcgctgagcgtatggggaacgtcccttctgcaactcctcttcagatcttgatgataaaacacatccctctgttttattgcatttcctagaagcttgcaggcttgcaagagcactgttggcaggaaacgtgatagaaatgaaagtcaggacacaatgtccccgaacacctcggttatccaaagcggctgtcgaggccatcgcgttatcaaattcgcttttatttactgtcgtctcctgcaccctcccgttccccagccaaga

SEQ ID NO: 21872 - DNA, 1732 bp, Homo sapiens
actacggcacgaggccttattaaaattccttgtccttgtccctaaacagtgctttacactttcagatttccctttggatttttcagcgggttattggagttattagattaccaataatccaacagcctctgtagcctctctggctggagaggaggggggaagggcggaaggcattctccaaatcgggaggctctggccaaactaggtcaatgggaaggaggggaggggcgagaaaggggttgacggtttcaaaccttgatggagggctctctctagcgttaggcagcggtaaaaacaccattcggtttgagctcccggaaccacgggactcctaatttccaataaatgcacttacttcattttaacttcccagattctcatccctaccccttattaaatcccaaccgtctctttcacctttatcccaccgggcgaaggggtgagaaagcctcaatgtaggattttgaggccaaaggctcgttctttgcagaccgactctgacccttccgcttgccgcagaagggatgagcggcgcagtgtgacgccactggctagttttaggaccagactgcggcctttgtggctgagtctttcgctgtcccctagcccccgaaagcgcaccccggagcctgctaccgagaccaattaggacatggcacccgggggttataattcccgggagggccacaggaaggcgaggcaactttggagagtgccagtgcgcgcgcaggggtcggggccccggcctttgccgagtccaagctgtgtctctacggtttcggggaaatcggattcggaaatccttacggcttggcagctcctgttctaaagactttgggcggaaaccaagtggagctgggttcccgttcttgccaacgtaggcggaaggggctttctgtttagtttttctccaaccttgcctggggcgcctatgatggagaccctcagcccctagggactccatcttttgaccttgaagtctcgctcaaacattcccctaaaagaacgggggtgagggagaatggaaggcaaaaagagggaaaaaagcaaataaacttcggaatcggacaacttaaagtctcgatatgagcctcggattgcattcgaactcctgggttctagacccagctctgctactaacttgtctgaccttccccatttataaactgttgtgggtgagaggtgggactaggtgaactctgagagccctgcactcggcgcggacgagggatttaggggaaagtgtgctgtattccccgcgagccttccccagcggccccgcctccccgggtgaatccccggcggccagcgcagcgcaggcagcgatcctggcggctgccggggccggcagcttcctggaaagttacttcttgttggagccggcaataggcaaagtgtgttctgtgaaatccgcagagccgagattgactacgttccgggaatgagagggctgtgtcattcccctcattgcctgctgcattgacggcgtaacaggaaaaaaaaaaaaaaaaaaaaaaaggcatacacacaatgttagctaccgaggtgcaccaaaagttttatttgaatgtaactaaattaagggccgccacggtcataccacaaagcctccgtcgcgccttgcggggggcttcgaggtggatcgcccaggggcgggcagtccctggaagacaggtacggagtggtcggggtggggtagcgaagtctgcctaggcttgccccggcgcgcagg

SEQ ID NO: 21873 - DNA, 1742 bp, Homo sapiens
cactcttcgccctcttggctggggaacgggagggtgcaggagacgacagtaaataaaagcgaattccactttcagatttccctttggatttttcagcgggttattggagttattagattaccaataatccaacagcctctgtagcctctctggctggagaggaggggggaagggcggaaggcattctccaaatcgggaggctctggccaaactaggtcaatgggaaggaggggaggggcgagaaaggggttgacggtttcaaaccttgatggagggctctctctagcgttaggcagcggtaaaaacaccattcggtttgagctcccggaaccacgggactcctaatttccaataaatgcacttacttcattttaacttcccagattctcatccctaccccttattaaatcccaaccgtctctttcacctttatcccaccgggcgaaggggtgagaaagcctcaatgtaggattttgaggccaaaggctcgttctttgcagaccgactctgacccttccgcttgccgcagaagggatgagcggcgcagtgtgacgccactggctagttttaggaccagactgcggcctttgtggctgagtctttcgctgtcccctagcccccgaaagcgcaccccggagcctgctaccgagaccaattaggacatggcacccgggggttataattcccgggagggccacaggaaggcgaggcaactttggagagtgccagtgcgcgcgcaggggtcggggccccggcctttgccgagtccaagctgtgtctctacggtttcggggaaatcggattcggaaatccttacggcttggcagctcctgttctaaagactttgggcggaaaccaagtggagctgggttcccgttcttgccaacgtaggcggaaggggctttctgtttagtttttctccaaccttgcctggggcgcctatgatggagaccctcagcccctagggactccatcttttgaccttgaagtctcgctcaaacattcccctaaaagaacgggggtgagggagaatggaaggcaaaaagagggaaaaaagcaaataaacttcggaatcggacaacttaaagtctcgatatgagcctcggattgcattcgaactcctgggttctagacccagctctgctactaacttgtctgaccttccccatttataaactgttgtgggtgagaggtgggactaggtgaactctgagagccctgcactcggcgcggacgagggatttaggggaaagtgtgctgtattccccgcgagccttccccagcggccccgcctccccgggtgaatccccggcggccagcgcagcgcaggcagcgatcctggcggctgccggggccggcagcttcctggaaagttacttcttgttggagccggcaataggcaaagtgtgttctgtgaaatccgcagagccgagattgactacgttccgggaatgagagggctgtgtcattcccctcattgcctgctgcattgacggcgtaacaggaaaaaaaaaaaaaaaaaaaaaaaggcatacacacaatgttagctaccgaggtgcaccaaaagttttatttgaatgtaactaaattaagggccgccacggtcataccacaaagcctccgtcgcgccttgcggggggcttcgaggtggatcgcccaggggcgggcagtccctggaagacaggtacggagtggtcggggtggggtagcgaagtctgcctaggcttgccccggcgcgcagg

SEQ ID NO: 21874 - DNA, 1678 bp, Homo sapiens
actacggcacgaggccttattaaaattccttgtccttgtccctaaacagtgctttacactttcagatttccctttggatttttcagcgggttattggagttattagattaccaataatccaacagcctctgtagcctctctggctggagaggaggggggaagggcggaaggcattctccaaatcgggaggctctggccaaactaggtcaatgggaaggaggggaggggcgagaaaggggttgacggtttcaaaccttgatggagggctctctctagcgttaggcagcggtaatgcacttacttcattttaacttcccagattctcatccctaccccttattaaatcccaaccgtctctttcacctttatcccaccgggcgaaggggtgagaaagcctcaatgtaggattttgaggccaaaggctcgttctttgcagaccgactctgacccttccgcttgccgcagaagggatgagcggcgcagtgtgacgccactggctagttttaggaccagactgcggcctttgtggctgagtctttcgctgtcccctagcccccgaaagcgcaccccggagcctgctaccgagaccaattaggacatggcacccgggggttataattcccgggagggccacaggaaggcgaggcaactttggagagtgccagtgcgcgcgcaggggtcggggccccggcctttgccgagtccaagctgtgtctctacggtttcggggaaatcggattcggaaatccttacggcttggcagctcctgttctaaagactttgggcggaaaccaagtggagctgggttcccgttcttgccaacgtaggcggaaggggctttctgtttagtttttctccaaccttgcctggggcgcctatgatggagaccctcagcccctagggactccatcttttgaccttgaagtctcgctcaaacattcccctaaaagaacgggggtgagggagaatggaaggcaaaaagagggaaaaaagcaaataaacttcggaatcggacaacttaaagtctcgatatgagcctcggattgcattcgaactcctgggttctagacccagctctgctactaacttgtctgaccttccccatttataaactgttgtgggtgagaggtgggactaggtgaactctgagagccctgcactcggcgcggacgagggatttaggggaaagtgtgctgtattccccgcgagccttccccagcggccccgcctccccgggtgaatccccggcggccagcgcagcgcaggcagcgatcctggcggctgccggggccggcagcttcctggaaagttacttcttgttggagccggcaataggcaaagtgtgttctgtgaaatccgcagagccgagattgactacgttccgggaatgagagggctgtgtcattcccctcattgcctgctgcattgacggcgtaacaggaaaaaaaaaaaaaaaaaaaaaaaggcatacacacaatgttagctaccgaggtgcaccaaaagttttatttgaatgtaactaaattaagggccgccacggtcataccacaaagcctccgtcgcgccttgcggggggcttcgaggtggatcgcccaggggcgggcagtccctggaagacaggtacggagtggtcggggtggggtagcgaagtctgcctaggcttgccccggcgcgcagg

SEQ ID NO: 21875 - DNA, 934 bp, Homo sapiens
gtgcgcggaaaacctagtgggcgcggaaaacctagtgggcgcggaaaccaagtggagctgggttcccgttcttgccaacgtaggcggaaggggctttctgtttagtttttctccaaccttgcctggggcgcctatgatggagaccctcagcccctagggactccatcttttgaccttgaagtctcgctcaaacattcccctaaaagaacgggggtgagggagaatggaaggcaaaaagagggaaaaaagcaaataaacttcggaatcggacaacttaaagtctcgatatgagcctcggattgcattcgaactcctgggttctagacccagctctgctactaacttgtctgaccttccccatttataaactgttgtgggtgagaggtgggactaggtgaactctgagagccctgcactcggcgcggacgagggatttaggggaaagtgtgctgtattccccgcgagccttccccagcggccccgcctccccgggtgaatccccggcggccagcgcagcgcaggcagcgatcctggcggctgccggggccggcagcttcctggaaagttacttcttgttggagccggcaataggcaaagtgtgttctgtgaaatccgcagagccgagattgactacgttccgggaatgagagggctgtgtcattcccctcattgcctgctgcattgacggcgtaacaggaaaaaaaaaaaaaaaaaaaaaaaggcatacacacaatgttagctaccgaggtgcaccaaaagttttatttgaatgtaactaaattaagggccgccacggtcataccacaaagcctccgtcgcgccttgcggggggcttcgaggtggatcgcccaggggcgggcagtccctggaagacaggtacggagtggtcggggtggggtagcgaagtctgcctaggcttgccccggcgcgcagg

SEQ ID NO: 21876 - DNA, 224 bp, Homo sapiens
gtgtatctatatgtaattaaaattaggtcattagggtgggctttaatccaatatgactggtgtccttacaaaaatagaaatttgaacacagccacatacaggaggaatatgatgtgaagacaaagggagaagacagccatctataagctaaggacatggacctggaacacatccttccctcccagccctcagacagaaccaactctgtagatcaaccaacacct

SEQ ID NO: 21877 - DNA, 403 bp, Homo sapiens
ctgtctcccaccaggagagttttggccacgtttacaacctagttctgcccatgaaggcaccagctgtcaccagctcaaccacgcagtagattaggcactgcatataaggcattggcgactcactgacaaacaagttgcacttcctgaagagagtgtgcaactatggtccactgaaagagacatccagaaagtggctgtcaatgacagaagtgagaaataagactgcaggacttacttagaagccacatttttcttctggtccataaactgtgaatctttgtatggtttgcaaaaccaacgaccccagaggtcaagcagggaaaacaaaactcatcatctgtaaacctgatccagttttgctttattctgatttttgccattaaactttaaacagagaaaactt

SEQ ID NO: 21878 - DNA, 252 bp, Homo sapiens
cttcacattcagaacttccctcactctcttctgtcaacaaccatagcttctagatctttctttgtcacctctattcaacctcattcaactcaacctcttttatttgatgctatatgttcttacttgactgaggtccttagctttactaacttgaggcatctagcacacctcaatgctactttctatttgtttctcacaaccatggttatctgggaagtccctgtggctccaggatctcctgtctggaccaga

SEQ ID NO: 21879 - DNA, 377 bp, Homo sapiens
attccaaacagtaggattttaatctgggttgccacagaagtctgtctatgggaaaagaatatgctggagatgccaccttgagtggttcagactccattgctataattgtaggagtagttgtaatagtagagatagcatttatttagtacttatatgtgataggtactatgctaagtgcatcctttgaacaacatacagttggttcctgtttaaatgatatttgtatcaagttctttcttctaaatgtcactggcatgaacaacagggtatatagagctaggtatctactgtttcactgactaatcctgaatggccctttttactcctctacctaaccagcccatgattcattttcttcttgctagaaatagaagcaa

SEQ ID NO: 21880 - DNA, 1308 bp, Homo sapiens
gctttatggaggtataatctatataccataaaatccacttattttaatatatgattttagtaaatttaaagacttgtgcagcccttaccacatcatacaaaccagaatgtttccatcacccaaaaagaaacttcatgtctatttagtcactccctgtttctactcccagctctaggtggccattaatctgagtatctctagatttgtcttttctagacctaaacatcaggtttttgtttttctgcagccagagttgagaaccataattctaaatgcattatgagaaataatggtttttaaagattatatataatattttacgtattttcatatttatgactcccatccttacagtgaatgcgtctatcaccagtaagacaaagatcattaatttgataatggaacttaacagaccattctttccttttatacattttagtatcatattcaaaatggcctcccattctgtccccaagttattttaaaacatctccagtcttgcttttttcccctttagctcataaatgaatagtgctggaagatatctcaggagcattctccctgagatgatgtcttcagtaatgatcgcacgtattggtgttgattccatccttgaagttactttcctttatctttcacagtggtgtttcttcactagaggttttgctgtctgattaacttctctgccaaataaatggacttttgcttcataggtacacaaacatttctaaaactttttttggaaaatatatttctttcttaaaaaaacaaatagtgcatgcacatttttaaaaaaataaataaaaaataatctaccccaaaatgaccagttaagatttactttcagacaactctgtgcatatttacatatgcttatatacaactatgtacacctttgcatagatgagatcacactctatgtactgctttgtaacttgcttctttcacttaatcctgagaacatttgtacatgaccatagatatagatttgtattgtttttaatggctgtatagttttgcattatactgaatcttgatgtttaagagctatgtatattgaggacattatttctttgtcttgtgttgcaaattttttaccatgttattattagtcttttaaccttatttatagtttttttgttataaaagttaagttttatgatgtaaacttaatctctttgattttataattcctggttttcccgacgtgcgtagaatgaccttccccacaaggtaataaaaatacctccatgattttgcttaaaacttttatgctttatattaaatctttgttacatcttgaattga

SEQ ID NO: 21881 - DNA, 440 bp, Homo sapiens
ggggccgggagagcaaggcaacccctacttgcagaaggatgatggtcagcttgtggacagacccccagtgccccacgcagcagcccctccatggtgaccactcaaaggcgagtcagggctggagagcagccaacaggtcccacagtctgtcccgggcactgcaggaggctgcccctagggaaacatggctgggagtaagagtgaaggaggggcaggtggagtaggaggccagatgtggtggctcacacctataatcccagcactttgagatgccgaggtgggagagctgctagcagccaggagttcaaaaccagcctggacaacatagtaagcccctgtggctacaaaaaattttaaaattactttgggagggccaggcgcggtggctcacgcctgtaatcccggcactttgggaggctgaggcaggcggatcacaacgt

SEQ ID NO: 21882 - DNA, 642 bp, Homo sapiens
tgagacacagttttgctctttgcccaggctggagtgcaatgcaatggcatgatcttggctcaccgcaacctccgcctcctggtttcaagtgattctcctgccccagcctcccgggtagctgggattacaggcgcccgccaccacacccagctaatttttgtattttcagtagaatcagggtttcaccatgttggccaggctggtctggaactcctgacctcaggtgatctgcccaactcggtctcctaaagtgctgggattacaggcatgggccaccacgctcggcccagacagctcattttaaagccaatctgaccatatcacatccccacatctaacctcagaaagcttcgcattttccttagggccaacacggaactccttcccaagccccgcaggacctgcctcctccctggtcccagggccgctctcttgcctcatctgcagttgactaagctgcagccagtccagccttctcatcgacccggataactcagcctcaggatctctgctcctgtggttccctgcccccagctagcccagcccttcagtctcaagccttgctcagatctgcctcccccaagggaggctccagcagccccgcccggcacatgtggcatcacggccactcacccggggtca

SEQ ID NO: 21883 - DNA, 948 bp, Homo sapiens
tcgagccctgcagcccggcgaaatggctcccggcggggccgtttgcgcatgcccagtcatgacggttgtcggcgcgggccctagcgtggcggcgctgcagtctgggcagtgggttggttcctcctcggtcctctgtcgagtggcgacagggcctagccacctggcgggggtgaccttcggacgtgcgacccgctcggagaagggagggaactgtggcccgcaacaaagcagtgacaggcccgacatcccctgcagcgcgatctttccctcagctgcctgccggaggaagggcctttctgtttcacagggctaaagatggggcgcggttcctccacggggcggctgccgggtgaacggaacggggatggaggcgctgccagaagagcccgagctcgagcccgccctgccctcggcctccccgccgcgccgctccgcaggagccccgctcctctcctgctcgctccggagaaccccagtccggcctgacctcggccctcgcggtcaggcgctccaaccagagcgactccagctcgaacagcgctgggtaaactgaggctgaaccccgctggctgcatccccaggagtcgggcgtttacggtcacgggaacaggttaataaacttttacgcagcagacccggaacttaggtcccgatgtccgggtatcttaagaacaagaagcattcttagttgaagtttcgctttaaagataatgatacagatgcttgcggaggacaggcgttatgcaaagattggcaatcctttgacgagcccaggtagtacagcacgtctcccccgtgatgttttttggcttttatcttacatataaacaagcgtacccaggtggacgccttcctcctcgtgcttttgggaacaccctgctctatggagtagccattcttttattccttcactgccttaataaacttgctttcactttaaactgtgga

SEQ ID NO: 21884 - DNA, 357 bp, Homo sapiens
gaagacagatgggtgaagtgcagatgtacatcgtacctgtgccatagaatattcttgctaaaagtggtgaagggctgggagagtggtggctcacacctgtaatcccagctaatcaagaggccaaggcaggaggatcacttgagcccaggagttcaagaccaactagggcaatatagtgagaccctgactctacaaaaactaaaataaaattatttgggcatggtggcatgtacctgtagttccagctacgtgggaggctagggtgggagcatctcttgagcccaggagttggaggttgcagtgagctatgattgtaccactacactccagcctgggtgatggagtgagaccctatct

SEQ ID NO: 21885 - DNA, 739 bp, Homo sapiens
tttttttttgagatggagtttcgctcttgttgcccaggttggagtgcaatggtgcgatctcagctcacgcaacctccgcctcctgggttcaagcgattcccctgcctcagcctcccaagtagctgggattacaggaatgcgctaccacgcccggctaattttgtatttttagtagagacagggtttccccatgtgggtcagtctggtccccaactcctgacctcgtgagccgcccgcctctgccggccgaagtgcggggtctacagacatgagctaccgcgcccgggaaagccaagcgttttcctacaagaagccccagtagagcgagctaggcttcaacatgcgcgttctggagagaaaacattgactccacaacagtggtcctttttgttttaaattaacatccccgactttttttatccttaccatttttataaaatgccgcgcgcttgcctcttggcaggcgtagggtttccctggggctgctgtggagaggccgcactggctggaaacagccgggctgtgcggctgccagaggcagcgtgtgcgcagcgcttcctgcagccacgtagcatcttctgccgcatcgcgcactcagctcgggcgggcgtcgggagtgagggcccggggcgcagggtcagcggccggggcaacaccctccctggttgcccaaggaacagaaggggctgggccacgcggggggttcttgactcctgagggcagctgggtgtcctgcagg

SEQ ID NO: 21886 - DNA, 357 bp, Homo sapiens
gagcattgccttctgcaggccctgccctttgtggtccctgaggatggtggcagactgctcctgctcttggggactttttcctcttaaatgctctgacacaaagcaatgctacaaaggtactaataccaaatatgacattgatgactgcatttaagtatgagtcattactttgtcatggctgtgatagaacttggaagatctgagaaaaaattggaaggcagcatctatataaataggcatgagcaattctgagggggcctggcatctgctatctactattttcagtgttctctgcccacatcagagttacgaggattgctgctattcacaattccgtttaaagactcataggaaaaa

SEQ ID NO: 21887 - DNA, 465 bp, Homo sapiens
  misc_feature (409)..(409): n is a, c, g, or t
  misc_feature (420)..(420): n is a, c, g, or t
gtgaaatccagtaatggattgacctcatctaacaaaggcaaaagtggaagtgtttttgcagtttggaaaccatgaattttattttctctagataagctgcagattagctggtagctagcaaagaggccagtaaggatattctgatctcaggcacctagatgggtcaacaaagaaagcaatttcagttatctaaggactctttagaagacagaattttgctgttggcatgcgtgacaggctatctctgtacatctggcggtgtactttgttttctctgccgtctttgttattccaggtctgcaccatttccttctcagaatatctaatatgtgtccattagatgaaccataatggtgtgttagggttttgtatatccttgctttttttttttttaatgttactgatccgnctcaaaaaagnaataaataaatagtctattgcctaagaataatatcctattcctca

SEQ ID NO: 21888 - DNA, 810 bp, Homo sapiens
taaagataaagtccaaattctagaacatggcccacagcatttggtgcctcaccacctcttcagcctctcagttgctgttcacccatttctctattcctctccttctcacaccttgtgctgcagccacatagataacctgcagtttttgtaacgtgcaatgatgtctcaaattccaaggcattgctggtaccacacagcctgcctggtaaaatcctagacttctttcaagataaattcaaagacacctccatgaggtctttctacctctccaagtagagttgaccgctgtctcctttgtgtccccacttccaccaccatcctaaaatacttattatacttagattaataattgtcgctcttactgcactggaattaccctgaaaggaaaggccatgtattatttatcattgtcttcctagtacatagcccacagcctatacctcccaccccaaaaaaaaccttttgtaaataattgaacaaattaagaaacacccaaggcccccagtaaacatcaaggcctaaggaatgcatatctggattctaaataatcataaggttttacaacaccatgttaagcaccagggacttcagagagcttttagtctaaatcttattagagaggccagcaaagacctccaaaggaagtggcattgaactgagacttgaaaagccagtagttaggcaaagatagggagggaaatatttcagacaaagggaggagatggcacaagatttaggacacggaaaagggtatggtgcagtcatagagaaaacagatgtgcagaatggctggagccccaagagggaagg

SEQ ID NO: 21889 - DNA, 227 bp, Homo sapiens
gtgaatatgagcatccttgtcttgttccagatcttagaggaaaggcttcagttttttcccattcagtacaatgttagctgtgggtttgtcacatatggcctttatttttgcggggaggggtatgatccttctataccattaacattctattaatgtgatgtgtcaagtttattgacttgcatattttgagctattcttgcatcactgggaagaatctcacttgatcg

SEQ ID NO: 21890 - DNA, 371 bp, Homo sapiens
tcaaaggagaattagatatttaaaatgagtgaattgtatggtacatgaattagatctcaataaaactattttaaaaaaagaaactaaagcttagagaagtataatatcttgttcaatatgacactacctggtaaagcttttgtccaaatttttctgagaccaaagctattctttcttccactgacgcatgctatctctactaattatatagccacggtatcctttttctttaaaaatgtaggaaaaaatggctgggtgcggtggctcacgcctgtaatcccagcactttgggaggccaaggcggacggatctcttgaggtcaggagtttgagaccagcctggccaacatggtgataccccacctctactaa

SEQ ID NO: 21891 - DNA, 266 bp, Homo sapiens
gctaaaaacatttgtgcgtgaaaagacaccatcaaggaagtggaaagacaacccaagaaatgacagcaaacatttgtgaatcatctatttgataagggactagtatctaaacatgtaaagaactctaacttatcaacaagaagacaaaccacctacctttaatgatgggcaaaggattagaatagagcttgctccaaagaagatgtacatatgaccgataagctcatgaaaagatgtccccatcattagtcatcagggaaatgcaa

SEQ ID NO: 21892 - DNA, 500 bp, Homo sapiens
gcaagtctcacactcctggactcaagcaatcctcccactccagcttcctaaagtgttgggatgacaggtatgagccaccacacctgaccaataatgtatttgttattctgaagaatatttacctattctgacaatagaatattctttacaaattcattgaaaataacttttcaagagtggcgtgaagtaatacagtaagtttatgaacaatgaagcatgtgaagaacgtgtggagaatcaaggctgttggagcaacagttatgttgccttaaagagcaatgagattataactagagaggaaggtatgatagcatgtaaccctgatacaaaagtcaaaactgcaaaggttcagagtgtggtatatagatgtctatactttagaagaaatgatctaacaacatttctggaataccatgcacctggggaagttcaactgttttatttcataacttagcaatatttaatgttagtaaaattaaaaagtacaaagccagtaaaag

SEQ ID NO: 21893 - DNA, 367 bp, Homo sapiens
gctgagatcgcacctcaaaaagaaaccctgcctcaaaacaaaacaaaacaacaaaaaaaaaccaaccaaaccacaacaaaaaaacacctcaggggctgggcacaagtctcacgcctgaaatcccggcactctgggaggccgaggtgggcggatcacctgaggttaggagttcaagaccagcctggccaacgtagtgaaacccgtctctactaaaaatatagaaattagatgggtgtggtggtgtgctcctgtagtctgaggctgctgcaggagaatcgcttggacacgggaggcggaggttgcagtgagccgagattgcgccactgcactccagcctgggtgacagagcaagactccagccaaaaaa

SEQ ID NO: 21894 - DNA, 298 bp, Homo sapiens
aatgacatattttatagtattttccattcaagcattgcaattattactttatatgtactctcatttaatcactgatgtggtctcgctgtgtccccacccaaatctcatcattgtggctcccataatgcctatgtgtcatgggagggacctggtgggaggtaattgaatcataggggcgggtttatcctgtgctgctcttgtgacagtgaagaagtctcacaagatctgatgcttttataaagggcagttcccctgcacatgctctcttgcctgctgcctttgctcctcctttgctttc

SEQ ID NO: 21895 - DNA, 391 bp, Homo sapiens
tagtctaacaaattttattatgtattaagatgttgaaaacaaggcattctggcttaaagaataaagagataaaaagctttcctttattattaatcttgttcataagagacctgtgttgtaggccgggtgcagtgactcatacctgtaatcccagtactttgggaagctgaggtgggcagatcacttgaggtcaggagttcaagaccagcctggccaacatggtgaaacctggtctctactaaaaatacaaaaattagctaggtgtggtggtgtgttgtctgtaatcccagttactcaggaggctgaggcaggaaaattgcttgaacccaggaggcaggggttgcagtgagctgagatcgcaccactgcactccagcctgggtgatggagca

SEQ ID NO: 21896 - DNA, 515 bp, Homo sapiens
tagaggcagaatcttgccgtattgcccaggctggtcttgaactcctgacctcaagcgatcctctcacctcagcctcccaaagtgctgagattacaaacatgagcctccgtacctggccaatccatatatttaatatctcactttgactgttaatgttaatagctgataacattcttgaaggtagacatttgctccctgataatgaagaaatgctttgtttctgagtagaggtgatgtttttgtatttagttttctccacatatatctgtcccacttgcaatggatagtatttatctgcaaaacaactgttaactggaatgaattatcaaagaagatttatagaaaaaatttggtttgttggtggttgggaaaaaaaaaatcaactggccagcatggtggcttccacctgtaatcccagcacttcagggatcaaggtgggtggatcacttgatcccaggagttcgagacaagcctgggcaacatggcaaaaacccatctctacaggaaaaaaaaaa

SEQ ID NO: 21897 - DNA, 442 bp, Homo sapiens
ctctagagcctactactactaaattcgcggccgcgtcgactggccaatccatatatttaatatctcactttgactgttaatgttaatagctgataacattcttgaaggtagacatttgctccctgataatgaagaaatgctttgtttctgagtagaggtgatgtttttgtatttagttttctccacatatatctgtcccacttgcaatggatagtatttatctgcaaaacaactgttaactggaatgaattatcaaagaagatttatagaaaaaatttggtttgttggtggttgggaaaaaaaaaatcaactggccagcatggtggcttccacctgtaatcccagcacttcagggatcaaggtgggtggatcacttgatcccaggagttcgagacaagcctgggcaacatggcaaaaacccatctctacaggaaaaaaaaaa

SEQ ID NO: 21898 - DNA, 2481 bp, Homo sapiens
gattgtgccacttcattccagcctgggcgacagagcgaaactctgtcaaaggaaaggaaagaaaagaaaaaaaaaaagagagagagaaaagaagaggggaggggagggaaagggaagggaggggaggggaggagaggagagcagattgggggggctcatgttctgagagaaaggaataatagcatttgtctagtacattccagtttacaaagtgcctgatatacatgatctcctttaatcttcacccaatcctgtaaagtaggtgttagatccccattttgcaagtaaataagtggaggcttagagcagttaaccgctggcaggtaggtagctggttccatagcacatcattttcctgcggcatcacggcatggtgccgaagaagacagctgtggatgtcgttgactcagatgtgcccccgttggggtgggagaacccagggatgggggtcagcaagccaggaactccgcagggtttgtttttaaaactctgctggacagaagtggaggaggaaagaatctaaccatatgacttttataaaaatcctttcacttttcccctccccatttgaaaactctttttaagagtgaatgtagctgaaacacaactgtgtccagccattttcctgtctccacattcttccagatgtgtgacagaggagggactctgctcaattccagttgtgggtccccttggagtttacatcacttgtttttcaattcttggttttctgttcccttctaccaaaacccagcataggactcagtgtacacttactttaaaacaaaaactcacatttcttagctgcaggtgatggcctcagtcattttaatacagcctggaatgagtttgcttattacccagtcactttcgtagtgaatgttcaaaccccaaagcaaatgtttgcatctccttgtccataaaggagaaagccaggttataggagaaagagagagaaaggcgcatgtctgtttgcacagagagaggcaattttgtctacctttcgagaatcagttataaacagaagggcctcttaggattttgagctctcctgacaatgaaggaaaagctctcttgagtatacaagttccacactcattacctttcagtggtgacccatcacccactacaatttgttgaaggaagggagtgtcagagatatgctttaaagttgtactttaggctgaaattctctctgtatttggacctgcagatgttgtgtacagaaccgatgcatggcagggtcaggaagctaggagagtgaaggcgcttgtggagacagctctgtagcaaatgaaacacggaagcctccgggaatgtgtttgtgtcaccagcagcaggcatttccctgtcctccccacccccagtctccacatccccagcagcctcttccagaagcatgtcagggagacggacaggtgctctccttctcgtgcaccacatccaagtccacccaccgtggacgcagtgtgactaaatgctggccttgaagagaaaccctcagccagcttgtctgttgtccaggtccctcagtgtctctggtttccctgccctgcataatttaagcattagtgccaaatacatctgtcatattcctctccctggagactgcgaaatgtccagactttttcagactagtggagggaaggaatgttacataactaagtggaggcctggaactgtcaggatttgacagggctggaccagagacccttccgcctctgcctagtgtgtctgtcaggcaggcagcagccatcaatccaagaatgagccatggcggcaagcactgtgtggagaaaggaacccagccgaggtctgagtttcagacagaaactggggagttgggacatcttctctgtgccaggcttcattgacaccatcgctccccacagcagctccttggggcagggggctcacctgtgcagccacccttactcacagtagcatcccattcttcacactgcaaccccccagcactgtggacccttccagggaggtgacaggagccagcagacacatgacattcccagaaagccccatcttatccagacaggcttccctccatacttctttccacagttttaccctcagaaaaatgttggctgcagtcttcccttccttcacctccaccctggggaagggtcagtaaccaatgccgagggtcggggaaggaggaggcacaggcaagacagggactcagcgcagtgctcccgccatcatcggggacaggtgccagggtcagctgcagctctccttccgggagcagggtgtggtggccctggatggtcccagggagcagagggaggcaggcagctgtcacagccacagcggctctgaatggcttgagcttttagtatgtgttcaagtgcaggatactacaaactggtaaagacttccaccatgtgaagaatgtatgtaaattaaagtttattgtaatgaaggtttttactttttgcaattaaaagtgttggttgataagaa

SEQ ID NO: 21899 - DNA, 2427 bp, Homo sapiens
gattgtgccacttcattccagcctgggcgacagagcgaaactctgtcaaaggaaaggaaagaaaagaaaaaaaaaaagagagagagaaaagaagaggggaggggagggaaagggaagggaggggaggggaggagaggagagcagattgggggggctcatgttctgagagaaaggaataatagcatttgtctagtacattccagtttacaaagtgcctgatatacatgatctcctttaatcttcacccaatcctgtaaagtaggtgttagatccccattttgcaagtaaataagtggaggcttagagcagttaaccgctggcaggtaggtagctggttccatagcacatcattttcctgcggcatcacggcatggtgccgaagaagacagctgtggatgtcgttgactcagatgtgcccccgttggggtgggagaacccagggatgggggtcagcaagccaggaactccgcagggtttgtttttaaaactctgctggacagaagtggaggaggaaagaatctaaccatatgacttttataaaaatcctttcacttttcccctccccatttgaaaactctttttaagagtgaatgtagctgaaacacaactgtgtccagccattttcctgtctccacattcttccagatgtgtgacagaggagggactctgctcaattccagttgtgggtccccttggagtttacatcacttgtttttcaattcttggttttctgttcccttctaccaaaacccagcataggactcagtgtacacttactttaaaacaaaaactcacatttcttagctgcaggtgatggcctcagtcattttaatacagcctggaatgagtttgcttattacccagtcactttcgtagtgaatgttcaaaccccaaagcaaatgtttgcatctccttgtccataaaggagaaagccaggttataggagaaagagagagaaaggcgcatgtctgtttgcacagagagaggcaattttgtctacctttcgagaatcagttataaacagaagggcctcttaggattttgagctctcctgacaatgaaggatcacccactacaatttgttgaaggaagggagtgtcagagatatgctttaaagttgtactttaggctgaaattctctctgtatttggacctgcagatgttgtgtacagaaccgatgcatggcagggtcaggaagctaggagagtgaaggcgcttgtggagacagctctgtagcaaatgaaacacggaagcctccgggaatgtgtttgtgtcaccagcagcaggcatttccctgtcctccccacccccagtctccacatccccagcagcctcttccagaagcatgtcagggagacggacaggtgctctccttctcgtgcaccacatccaagtccacccaccgtggacgcagtgtgactaaatgctggccttgaagagaaaccctcagccagcttgtctgttgtccaggtccctcagtgtctctggtttccctgccctgcataatttaagcattagtgccaaatacatctgtcatattcctctccctggagactgcgaaatgtccagactttttcagactagtggagggaaggaatgttacataactaagtggaggcctggaactgtcaggatttgacagggctggaccagagacccttccgcctctgcctagtgtgtctgtcaggcaggcagcagccatcaatccaagaatgagccatggcggcaagcactgtgtggagaaaggaacccagccgaggtctgagtttcagacagaaactggggagttgggacatcttctctgtgccaggcttcattgacaccatcgctccccacagcagctccttggggcagggggctcacctgtgcagccacccttactcacagtagcatcccattcttcacactgcaaccccccagcactgtggacccttccagggaggtgacaggagccagcagacacatgacattcccagaaagccccatcttatccagacaggcttccctccatacttctttccacagttttaccctcagaaaaatgttggctgcagtcttcccttccttcacctccaccctggggaagggtcagtaaccaatgccgagggtcggggaaggaggaggcacaggcaagacagggactcagcgcagtgctcccgccatcatcggggacaggtgccagggtcagctgcagctctccttccgggagcagggtgtggtggccctggatggtcccagggagcagagggaggcaggcagctgtcacagccacagcggctctgaatggcttgagcttttagtatgtgttcaagtgcaggatactacaaactggtaaagacttccaccatgtgaagaatgtatgtaaattaaagtttattgtaatgaaggtttttactttttgcaattaaaagtgttggttgataagaa

SEQ ID NO: 21900 - DNA, 1911 bp, Homo sapiens
cacatctggaagaatgtggagacaggaaaatggctggacacagttgtgtttcagctacattcactcttaaaaagagttttcaaatggggagggactctgctcaattccagttgtgggtccccttggagtttacatcacttgtttttcaattcttggttttctgttcccttctaccaaaacccagcataggactcagtgtacacttactttaaaacaaaaactcacatttcttagctgcaggtgatggcctcagtcattttaatacagcctggaatgagtttgcttattacccagtcactttcgtagtgaatgttcaaaccccaaagcaaatgtttgcatctccttgtccataaaggagaaagccaggttataggagaaagagagagaaaggcgcatgtctgtttgcacagagagaggcaattttgtctacctttcgagaatcagttataaacagaagggcctcttaggattttgagctctcctgacaatgaaggaaaagctctcttgagtatacaagttccacactcattacctttcagtggtgacccatcacccactacaatttgttgaaggaagggagtgtcagagatatgctttaaagttgtactttaggctgaaattctctctgtatttggacctgcagatgttgtgtacagaaccgatgcatggcagggtcaggaagctaggagagtgaaggcgcttgtggagacagctctgtagcaaatgaaacacggaagcctccgggaatgtgtttgtgtcaccagcagcaggcatttccctgtcctccccacccccagtctccacatccccagcagcctcttccagaagcatgtcagggagacggacaggtgctctccttctcgtgcaccacatccaagtccacccaccgtggacgcagtgtgactaaatgctggccttgaagagaaaccctcagccagcttgtctgttgtccaggtccctcagtgtctctggtttccctgccctgcataatttaagcattagtgccaaatacatctgtcatattcctctccctggagactgcgaaatgtccagactttttcagactagtggagggaaggaatgttacataactaagtggaggcctggaactgtcaggatttgacagggctggaccagagacccttccgcctctgcctagtgtgtctgtcaggcaggcagcagccatcaatccaagaatgagccatggcggcaagcactgtgtggagaaaggaacccagccgaggtctgagtttcagacagaaactggggagttgggacatcttctctgtgccaggcttcattgacaccatcgctccccacagcagctccttggggcagggggctcacctgtgcagccacccttactcacagtagcatcccattcttcacactgcaaccccccagcactgtggacccttccagggaggtgacaggagccagcagacacatgacattcccagaaagccccatcttatccagacaggcttccctccatacttctttccacagttttaccctcagaaaaatgttggctgcagtcttcccttccttcacctccaccctggggaagggtcagtaaccaatgccgagggtcggggaaggaggaggcacaggcaagacagggactcagcgcagtgctcccgccatcatcggggacaggtgccagggtcagctgcagctctccttccgggagcagggtgtggtggccctggatggtcccagggagcagagggaggcaggcagctgtcacagccacagcggctctgaatggcttgagcttttagtatgtgttcaagtgcaggatactacaaactggtaaagacttccaccatgtgaagaatgtatgtaaattaaagtttattgtaatgaaggtttttactttttgcaattaaaagtgttggttgataagaa

SEQ ID NO: 21901 - DNA, 1605 bp, Homo sapiens
ggcaggtaggcgggtgatcggaaggcaacccaagcaagttgatctcctgtcataagaaagcaggtatgagaaagagagagaaaggcgcatgtctgtttgcacagagagaggcaattttgtctacctttcgagaatcagttataaacagaagggcctcttaggattttgagctctcctgacaatgaaggaaaagctctcttgagtatacaagttccacactcattacctttcagtggtgacccatcacccactacaatttgttgaaggaagggagtgtcagagatatgctttaaagttgtactttaggctgaaattctctctgtatttggacctgcagatgttgtgtacagaaccgatgcatggcagggtcaggaagctaggagagtgaaggcgcttgtggagacagctctgtagcaaatgaaacacggaagcctccgggaatgtgtttgtgtcaccagcagcaggcatttccctgtcctccccacccccagtctccacatccccagcagcctcttccagaagcatgtcagggagacggacaggtgctctccttctcgtgcaccacatccaagtccacccaccgtggacgcagtgtgactaaatgctggccttgaagagaaaccctcagccagcttgtctgttgtccaggtccctcagtgtctctggtttccctgccctgcataatttaagcattagtgccaaatacatctgtcatattcctctccctggagactgcgaaatgtccagactttttcagactagtggagggaaggaatgttacataactaagtggaggcctggaactgtcaggatttgacagggctggaccagagacccttccgcctctgcctagtgtgtctgtcaggcaggcagcagccatcaatccaagaatgagccatggcggcaagcactgtgtggagaaaggaacccagccgaggtctgagtttcagacagaaactggggagttgggacatcttctctgtgccaggcttcattgacaccatcgctccccacagcagctccttggggcagggggctcacctgtgcagccacccttactcacagtagcatcccattcttcacactgcaaccccccagcactgtggacccttccagggaggtgacaggagccagcagacacatgacattcccagaaagccccatcttatccagacaggcttccctccatacttctttccacagttttaccctcagaaaaatgttggctgcagtcttcccttccttcacctccaccctggggaagggtcagtaaccaatgccgagggtcggggaaggaggaggcacaggcaagacagggactcagcgcagtgctcccgccatcatcggggacaggtgccagggtcagctgcagctctccttccgggagcagggtgtggtggccctggatggtcccagggagcagagggaggcaggcagctgtcacagccacagcggctctgaatggcttgagcttttagtatgtgttcaagtgcaggatactacaaactggtaaagacttccaccatgtgaagaatgtatgtaaattaaagtttattgtaatgaaggtttttactttttgcaattaaaagtgttggttgataagaa

SEQ ID NO: 21902 - DNA, 2314 bp, Homo sapiens
gattgtgccacttcattccagcctgggcgacagagcgaaactctgtcaaaggaaaggaaagaaaagaaaaaaaaaaagagagagagaaaagaagaggggaggggagggaaagggaagggaggggaggggaggagaggagagcagattgggggggctcatgttctgagagaaaggaataatagcatttgtctagtacattccagtttacaaagtgcctgatatacatgatctcctttaatcttcacccaatcctgtaaagtaggtgttagatccccattttgcaagtaaataagtggaggcttagagcagttaaccgctggcaggtaggtagctggttccatagcacatcattttcctgcggcatcacggcatggtgccgaagaagacagctgtggatgtcgttgactcagatgtgcccccgttggggtgggagaacccagggatgggggtcagcaagccaggaactccgcagggtttgtttttaaaactctgctggacagaagtggaggaggaaagaatctaaccatatgacttttataaaaatcctttcacttttcccctccccatttgaaaactctttttaagagtgaatgtagctgaaacacaactgtgtccagccattttcctgtctccacattcttccagatgtgtgacagaggagggactctgctcaattccagttgtgggtccccttggagtttacatcacttgtttttcaattcttggttttctgttcccttctaccaaaacccagcataggactcagtgtacacttactttaaaacaaaaactcacatttcttagctgcaggtgatggcctcagtcattttaatacagcctggaatgagtttgcttattacccagtcactttcgtagtgaatgttcaaaccccaaagcaaatgtttgcatctccttgtccataaaggagaaagccaggttataggagaaagagagagaaaggcgcatgtctgtttgcacagagagaggcaattttgtctacctttcgagaatcagttataaacagaagggcctcttaggattttgagctctcctgacaatgaaggaaaagctctcttgagtatacaagttccacactcattacctttcagtggtgacccatcacccactacaatttgttgaaggaagggagtgtcagagatatgctttaaagttgtactttaggctgaaattctctctgtatttggacctgcagatgttgtgtacagaaccgatgcatggcagggtcaggaagctaggagagtgaaggcgcttgtggagacagctctgtagcaaatgaaacacggaagcctccgggaatgtgtttgtgtcaccagcagcaggcatttccctgtcctccccacccccagtctccacatccccagcagcctcttccagaagcatgtcagggagacggacaggtgctctccttctcgtgcaccacatccaagtccacccaccgtggacgcagtgtgactaaatgctggccttgaagagaaaccctcagccagcttgtctgttgtccaggtccctcagtgtctctggtttccctgccctgcataatttaagcattagtgccaaatacatctgtcatattcctctccctggagactgcgaaatgtccagactttttcagactagtggagggaaggaatgttacataactaagtggaggcctggaactgtcaggatttgacagggctggaccagagacccttccgcctctgcctagtgtgtctgtcaggcaggcagcagccatcaatccaagaatgagccatggcggcaagcactgtgtggagaaaggaacccagccgaggtctgagtttcagacagaaactggggagttgggacatcttctctgtgccaggcttcattgacaccatcgctccccacagcagctccttggggcagggggctcacctgtgcagccacccttactcacagtagcatcccattcttcacactgcaaccccccagcactgtggacccttccagggaggtgacaggagccagcagacacatgacattcccagaaagccccatcttatccagacaggctcgcccagcgcatactcccagtcacaacgttacaatcagacgaacgttgccaacattgcacccttccagcaccactatcgaggatcacgttcaccaccaaacgcctaagtctcgacacgaagacagaacatcgtcaagacagggactaggcgcctacttcctagccatcatcaggggatcagctgaaaagggtcaggacaaactctcgattcagagatcagtgtgatccgcgtgatagtcacacgagaacagtaaagca

SEQ ID NO: 21903 - DNA, 2079 bp, Homo sapiens
gattgtgccacttcattccagcctgggcgacagagcgaaactctgtcaaaggaaaggaaagaaaagaaaaaaaaaaagagagagagaaaagaagaggggaggggagggaaagggaagggaggggaggggaggagaggagagcagattgggggggctcatgttctgagagaaaggaataatagcatttgtctagtacattccagtttacaaagtgcctgatatacatgatctcctttaatcttcacccaatcctgtaaagtaggtgttagatccccattttgcaagtaaataagtggaggcttagagcagttaaccgctggcaggtaggtagctggttccatagcacatcattttcctgcggcatcacggcatggtgccgaagaagacagctgtggatgtcgttgactcagatgtgcccccgttggggtgggagaacccagggatgggggtcagcaagccaggaactccgcagggtttgtttttaaaactctgctggacagaagtggaggaggaaagaatctaaccatatgacttttataaaaatcctttcacttttcccctccccatttgaaaactctttttaagagtgaatgtagctgaaacacaactgtgtccagccattttcctgtctccacattcttccagatgtgtgacagaggagggactctgctcaattccagttgtgggtccccttggagtttacatcacttgtttttcaattcttggttttctgttcccttctaccaaaacccagcataggactcagtgtacacttactttaaaacaaaaactcacatttcttagctgcaggtgatggcctcagtcattttaatacagcctggaatgagtttgcttattacccagtcactttcgtagtgaatgttcaaaccccaaagcaaatgtttgcatctccttgtccataaaggagaaagccaggttataggagaaagagagagaaaggcgcatgtctgtttgcacagagagaggcaattttgtctacctttcgagaatcagttataaacagaagggcctcttaggattttgagctctcctgacaatgaaggaaaagctctcttgagtatacaagttccacactcattacctttcagtggtgacccatcacccactacaatttgttgaaggaagggagtgtcagagatatgctttaaagttgtactttaggctgaaattctctctgtatttggacctgcagatgttgtgtacagaaccgatgcatggcagggtcaggaagctaggagagtgaaggcgcttgtggagacagctctgtagcaaatgaaacacggaagcctccgggaatgtgtttgtgtcaccagcagcaggcatttccctgtcctccccacccccagtctccacatccccagcagcctcttccagaagcatgtcagggagacggacaggtgctctccttctcgtgcaccacatccaagtccacccaccgtggacgcagtgtgactaaatgctggccttgaagagaaaccctcagccagcttgtctgttgtccaggtccctcagtgtctctggtttccctgccctgcataatttaagcattagtgccaaatacatctgtcatattcctctccctggagactgcgaaatgtccagactttttcagactagtggagggaaggaatgttacataactaagtggaggcctggaactgtcaggatttgacagggctggaccagagacccttccgcctctgcctagtgtgtctgtcaggcaggcagcagccatcaatccaagaatgagccatggcggcaagcactgtgtggagaaaggaacccagccgaggtctgagtttcagacagaaactggggagttgggacatcttctctgtgccagggtgtggtggccctggatggtcccagggagcagagggaggcaggcagctgtcacagccacagcggctctgaatggcttgagcttttagtatgtgttcaagtgcaggatactacaaactggtaaagacttccaccatgtgaagaatgtatgtaaattaaagtttattgtaatgaaggtttttactttttgcaattaaaagtgttggttgataagaa

SEQ ID NO: 21904 - DNA, 1921 bp, Homo sapiens
gattgtgccacttcattccagcctgggcgacagagcgaaactctgtcaaaggaaaggaaagaaaagaaaaaaaaaaagagagagagaaaagaagaggggaggggagggaaagggaagggaggggaggggaggagaggagagcagattgggggggctcatgttctgagagaaaggaataatagcatttgtctagtacattccagtttacaaagtgcctgatatacatgatctcctttaatcttcacccaatcctgtaaagtaggtgttagatccccattttgcaagtaaataagtggaggcttagagcagttaaccgctggcaggtaggtagctggttccatagcacatcattttcctgcggcatcacggcatggtgccgaagaagacagctgtggatgtcgttgactcagatgtgcccccgttggggtgggagaacccagggatgggggtcagcaagccaggaactccgcagggtttgtttttaaaactctgctggacagaagtggaggaggaaagaatctaaccatatgacttttataaaaatcctttcacttttcccctccccatttgaaaactctttttaagagtgaatgtagctgaaacacaactgtgtccagccattttcctgtctccacattcttccagatgtgtgacagaggagggactctgctcaattccagttgtgggtccccttggagtttacatcacttgtttttcaattcttggttttctgttcccttctaccaaaacccagcataggactcagtgtacacttactttaaaacaaaaactcacatttcttagctgcaggtgatggcctcagtcattttaatacagcctggaatgagtttgcttattacccagtcactttcgtagtgaatgttcaaaccccaaagcaaatgtttgcatctccttgtccataaaggagaaagccaggttataggagaaagagagagaaaggcgcatgtctgtttgcacagagagaggcaattttgtctacctttcgagaatcagttataaacagaagggcctcttaggattttgagctctcctgacaatgaaggaaaagctctcttgagtatacaagttccacactcattacctttcagtggtgacccatcacccactacaatttgttgaaggaagggagtgtcagagatatgctttaaagttgtactttaggctgaaattctctctgtatttggacctgcagatgttgtgtacagaaccgatgcatggcagggtcaggaagctaggagagtgaaggcgcttgtggagacagctctgtagcaaatgaaacacggaagcctccgggaatgtgtttgtgtcaccagcagcaggcatttccctgtcctccccacccccagtctccacatccccagcagcctcttccagaagcatgtcagggagacggacaggtgctctccttctcgtgcaccacatccaagtccacccaccgtggacgcagtgtgactaaatgctggccttgaagagaaaccctcagccagcttgtctgttgtccaggtccctcagtgtctctggtttccctgccctgcataatttaagcattagtgccaaatacatctgtcatattcctctccctggagactgcgaaatgtccagactttttcagactagtggagggaaggaatgttacataactaagtggaggcctggaactgtcaggatttgacagggctggaccagagacccttccgcctctgcctagtgtgtctgtcagggaggcaggcagctgtcacagccacagcggctctgaatggcttgagcttttagtatgtgttcaagtgcaggatactacaaactggtaaagacttccaccatgtgaagaatgtatgtaaattaaagtttattgtaatgaaggtttttactttttgcaattaaaagtgttggttgataagaa

SEQ ID NO: 21905 - DNA, 366 bp, Homo sapiens
acagttatacaacacttcatagctcaaaaataactctatacacattaccatatttgattttcacagcagcaagacaagacaagtaatattgcattcattttctataaagtacacggagatgttaagtgatttacctggtattacttcagtgaaaacaggaaagatgaaggtaggagaatatacttggaatccttttccggactgtttggaaaaacaaggtaataatactgtttttccacggaatattggcaaacaaaaatgtcttaagtgaataatactacatttaactatagggcacagaaatgagtatattaagaaatccaggtttcaaaaggtggatagaattagtttctcctcggtaaacat

SEQ ID NO: 21906 - DNA, 424 bp, Homo sapiens
atgcttttacatggtcaccctggttgcctgatgatagcaggccaggagtggagatggagaccagttggaggtggtggtggttttaccaggatagtagcagtggaagtggtgagaaagagttgaattctggggatacattttgaagttagagacaacagcattttctgttggagtagtagtggggtcagagagtagttaattatgatcacaagcattttggccggagcagctggaaggatggagtggacatttgttcagctggaaaagacttcaggggaaaccaactgagggaaaagatgaggagttctgtttcaggcttggtaagtttgagatgcctactacgcattaaagtggaaacattgagtaggtagctggatatatgactctggcatgtacagagggggccagagaatgtatcaatttt

SEQ ID NO: 21907 - DNA, 424 bp, Homo sapiens
gatgagcataggcaggaccatgcaggcatcgggtgttgctaaagagcaacacattcaaggagaccctggcaggctgggcccgaccctctacgcctccctctacaacggagacaggcagggagaccccggcaggctgggccccgaccctctacgcctccctctacaacggagacaggcagggagaccctggcaggctgggccccgaccctctacgcctccctctacaacggagacaggcagggagaccctggcaggctgggccccgaccctctacgcctccctctacaacggagacaggcaggaagcccggaggcgagggcctctaatagccaggccgggtcccagcaagtctctccacttctctgggcttctgaagatccaagcatgagacagatggatgattgtgaagttccctgtaaacagc

SEQ ID NO: 21908 - DNA, 525 bp, Homo sapiens
cagccaaaggcctcctcgctcagagaagtcatctgaaaaaagctagcccaggggcaggaaagggcctcaggctggcgccccagaaggtggcccatcagtcactctgggaagacagatagacatcgtcagtctctttttacaagtcaagacagtaaaatcaaagtaatagtttcctggcaggaagaaagagaattgctggagcgttggagagccatctcttaacctctggggtgactcaaaggaagagttgcctggtctgagaactttagaccaaagaatttaaatcatgtgaactgaaaatgcatgtgtatccatatatacatgtacatatatgtttatatacccaatatagaaaggttaccagagacaaagaaatagcaacaatagttgttttggggaagggaaaggaagggctgtggggtgaggaagcatactttcactgaatatcctctgtactgtgtgcatttttgccacatgcatgaactaaacctacaagaaaataaacaaataaaaaaaaagaacaca

SEQ ID NO: 21909 - DNA, 692 bp, Homo sapiens
cagtgtctcaaatttctgtatgaaagtgatggagaacaatctgtacacatgtacgtgtacacatttgcagtcattttgaatcagcacccatcacagtgcagtgctctggtctctgggtggcagtgtgactgggaagcttgaccggccagtcggcgttggcctgatggttccaactgcaggaggctgcagcatccaccagggcagggagactctggaccaggagcccagggctcactgctgagctaattccagaatttaacaacagaagcacaaaacagacagagagatggttactggaactcttcattcccttcattgggagatgcctggatgaacacagacaggatcctgtctccttgcacatcacgtgggttggtcagaattggaaggtggtgcccccaaagttagactaagtactgagtttgggtttcagcaagtgagaccatgtggaagggtttctacagtcaagaaaggagtttgagaccagcctgggcaacatagtgagaccttgtctctacaaaaaatgaaaacttagcagggtttggtggcacgcatgtgtagtcccagctacgtggggggtgggggctgacaggggcagatcacttgagcctgggaagttgaggctgcagttgtgccatgatcgtgccactgtactccagcctgggcgacagtgagactcagtctcttgaaaa

SEQ ID NO: 21910 - DNA, 544 bp, Homo sapiens
tagaacaaatgtgtaatggcaggtatccatcattatagtatcctacagagtatttccactgccctgaaattcttctgtggggtaatttttgtttttgtttgttgtttttttagagatggggtctcactatattgcccagactggagtgcagtggctgttagcaggcgcagtcatggctcactgtagcctcgaactcctcggcccaagctatccacctgcctcagcctctggagtagctgagactacaggcactagctctttggttactttttaaactcttttttccactttttggtaataagagatttaaaaatccaacggactctccagacaactctcaaagaaagaggtctctagagttctaggttactggaaggacgttagaagaaagtaatgaaatcagataggattattttgtggtaatactcaataattccaattgatttaacagcaaggaatcacttgggagcactgttagtagtatctcactgtctggttaaccacacatgacacggcataaagcatatttctctagcaagtagaa

SEQ ID NO: 21911 - DNA, 389 bp, Homo sapiens
gcaaagaaagggggagattttgcagttctaattctttgaccttgttgcacttgggggaagtcctggaagcagggacaaaacttcctgcaaagaaatgatgtaaaacatgttttgttcaacgtggctgaaaagcatttccagcatgggtccagttggagctccttcgtgaatctagatttgactgggttaagagaagctggtgatgccaaggctggaaaccttgtagacctgtagatctatcctgcctgaacctaggagagcagaggatagagagatttgaacccactacgtttggcctacaggatgcagttcttggcatgcttaaaattttgccttaacagtttcccgttttatagggaagtactgggctttggtgcatttgtgaaaaa

SEQ ID NO: 21912 - DNA, 283 bp, Homo sapiens
actgggagcaacacaaagatgactttgaatctctgtccaccacccctagactgtatgacacccgcaagtgacaacctcccctctctggcctcggtttccccctctgtaaaatgggggatggcctaccttgccagtcatggcaggtcaatataaaacaacttctggctgtgcacagtggcacatgcctgtaatcccagcactttgggaagctgaggcaggaggattgcttgaggccaggagttcaagaccagcctgggcaatatagcaagatcccatccctctt

SEQ ID NO: 21913 - DNA, 355 bp, Homo sapiens
gtttctgtcaatggcaatcatcaccagacagcctctgcctgaccaccaccagggacaggggactcatcaactccagcagtgatcagaattgatctacacaaatctcattaataaggaactctactttatgatgagttgaaacctaccttcctaaagtttccatccattaggcttaattctgctaaggacacagaataattattctcctcaaacagccaataattgctatcatatctgctgtggtttgaatatgtccctcaaaagttcatgtgttggaaacttaatccccaatgcaccagtgtatgagggcagaatggattaatgtcattactgtaaaatccaggttagttatctc

SEQ ID NO: 21914 - DNA, 260 bp, Homo sapiens
ggtaggagaaaaagagtggaaaagacagaagatgagatgatgtctgcagcaatttcataggccatgtctacaccgatctctggtgtttacaatgctggttggggtttgcttgcagaagggcaatgacagtgttaggggcgtttgaaccagagcaactccatcttaaataggagctaggtaaaatgaggctgagacctactgggctgcattcccagacggttaagacattctaagtcacagggtgagataggaggtcatca

SEQ ID NO: 21915 - DNA, 373 bp, Homo sapiens
caacatgggaaaagaattcccaacaaattacacgttttaaagtcaacaaacacccagatgtctgcagttcaccctcactggtggtgacacatctgtcacattttgttcctactttgcttggctgtgtcctctttcatcaccctttcccatgataatgatcttgtaatatcatgtaggaatagaaagattcctcaatctttccttgagcatggtcgatctctgttttgaattattgatactttagaaaagtttctgtcatcttcacaactcttattggcatagtcatgtaaatttttagaactgtcatcaaatgtggggcaactgttaccaagtttctttcatatctgagctgtaagattctagaacaccccca

SEQ ID NO: 21916 - DNA, 874 bp, Homo sapiens
ctcaaaaaaaaaaaaaaagataattcagtgcatttagtaagttcgtagcattgtgcaaccatcaacttccatctggttccagaacattttcatcatccccaaaagaaccccatacccatttcctcccactgctgtacacccatccctggccaccagtgatgtgctttgtatctctatgaattcacctattctgggcatttcatctcagtggaatcatttgatctgtagccttttgtgctttcgaggttcattccagggctgtcgtggagccggaatgatcagtgataaaactgctaggctggccaccccgggcttcccgaagtctgatcttttcctttgcatttaggattcaaggtcatacttagttagcaggagcgataccataatcatgaacgtggttttcccagggtgaggcttatccattgcactcccctgcaatctccccattaaaaaaaaaaaattcaagattctatctagaacactgtaccttttgacctgcaggtttgattgtgcaaacgttgaatgaacccgttttgggcgcgcaaggagtaggatgacacccaggaccttgtgagtgcccgaagtagcagcttgcactggcctattccagagaattctgaggctgttgaggctgaattgtttagaagcagatctgttgctgaaagtgaggtccctcgtggagtttatttccacgtcccgaggattccagatcggtgcattaatatcagttaagggcacggatgatcgctgggtctgacactgtggcttctccctgcgggttcctgggttttttgcctccacttttaacaaaactgaggccgggcgcggtggctcacacctgtaaccatagcattttgggaggctgaggtgagtg

SEQ ID NO: 21917 - DNA, 479 bp, Homo sapiens
aatctccaaaagaaagagaatatagagaaaagatcagaaaacaagagaatttatctaaaaagtccaacatctgactagtggtagttctagagaggccagaaacaggggaggaaattgtcaaatagtaggttggtacaaaagttattgtggtttttgccgtagaaagtaataccaaaaaagtgtctagaacttcagagcaagagtttctagattgaaagggcctgagtacccaccacaatgaatggaaaggaaaaataaagctgtaccagggcacattatcatacaatttcagaattgaggatgtagaaaacaacctaaaagctctgaagggaatatctctgggtggtgaggtgaaataaactaatagattacttaatgtagttgattatgagaaaaatactgttgagaagggttttgtgattgtgtaataaactttggagagatttccaatagtgacacagaaaactaagcaaatgaaa

SEQ ID NO: 21918 - DNA, 732 bp, Homo sapiens
  misc_feature (712)..(713): n is a, c, g, or t
  misc_feature (715)..(715): n is a, c, g, or t
tttcccttatccatagctaggtagtgttactactctcaattttaggacactgttcacagtcaaatgggatcctacagtcatttatattacttgctttctcaactcatgggctgaagtcacacccttaattgcttactaatatttcaaagcattgttagccttgaggcccttaggtctcttttaatagggaatgttgtctagttatcatttacctttcttataagtgtttaatctctttgtcataaaagttttacatgagttcctgaatctagtacaggggaaaggaattcctaagtatgtggtctgtattgtgcttgtactgaccatgtatatatgctatggttatttagtgctagctaagaacataccatttccccagtagcagtctgacttttgccttaagacttcatatcttgaggtgctactactctttgtgtagaaaagctttccctttcctagatttgttttcttgtccacccaccaagcacactaggtccttaatgttgagaatgaaatggtagtagtaaacttttgcaccaaggttgtttgcaaagaggtctttttcttttttagagatagggtttcatgttggtcaggctcgtctccaactcctgacctcaagtgatatgcctcccaaagtgctgggattacaagaattgtttttctttcttttttttttttttgagactccatcataaataaataaataaannantgggtcacattaaaaaa

SEQ ID NO: 21919 - DNA, 329 bp, Homo sapiens
tttgtttgtttgtttttcttaatctgagctttctgcccactcttagcacggggcaaagggaagatttttctgccacttcttttggtgagaagagtcactttctgattaggatttgagctgaaaataggtccccctttgggaagaaacatgagtgcagggcgcttcctgtgtcactcccaaggaggcacctcctcagggcagttcctctttgagaatttcatggtcagtaagaagtaggctcccagggaccccagagtggggaccctttgactgaagtcaccccagtgggtataagataaacataagagacgcttctcagagaagatttg

SEQ ID NO: 21920 - DNA, 325 bp, Homo sapiens
tatgatgccatctaacctcttcctctatccctggatagcctatatgttgatgtagttagtttgagattggcagttatggccaggtgcggtggctcatgcctgtaatctcaacactttgggaggctgaggtgggtggatcacctgaggtcaggagttcgagaccagactggccaacatggtgaaaccccatctctactaaaaatacaaaaattagccgggcatggtggtgcatgcctgtagtcccagctacttggggggctgaggcaggagaatcacttgaacctgggaggcagaggttgcagtcagcggggtgagactctgtctc

SEQ ID NO: 21921 - DNA, 578 bp, Homo sapiens
atgagtttttgaatgtctatgtttggacagagcgcaaatttaacagatggtgcttcaaaaatagacgtgagattttaaaaatagtttcttccagctacgggaatgtaggctccagttaagcagactgacatctggcgaattaagttgccatggtaacaggttttcaggtcaagcctggagactgggtcagccctcccctctgtcatgggaacagtcttccaggggggtcagtgaaaagaacatctttgacaacacacactttcagtcaagccaccagtgccctaaggtctctaccttttgtcatcttcatataaaagctctaagaaagaattccttaaaaaagaagccctcaggtgttcacttcctgtgatatgtgatcatagctagcttctacaaatggcaggggcaaattttcctaaaaatcttaacttttgtattccagcataaatacttctaatttctcctctgcaggagccactatgtggagaagaacctttaaaatcaatagcagaagttgctggcagtggttatctcaggaggatgggacgcagagattttcactttccgtgtcatgtatc

SEQ ID NO: 21922 - DNA, 128 bp, Homo sapiens
aagactaccaggctgcggaggagactgcttttgttgttgatgaagtgagcaaattgtaaaagaggctatagaaagcacaattggtggttaacgcttattaacacagcaaagtgaaccagtggaacaca

SEQ ID NO: 21923 - DNA, 431 bp, Homo sapiens
ggaggctgaggcaggagaattgcttgaacctgggaggcggaggttgcagtgagccgagatcacaccactgcactgcagcctggcgacagagtgagactctgtctcagaaaaaaaacaaaaaacaaaaaagaaaagaaaaagaaagaaaaagaaaaactagattgcccaaggtgaagacatcatttttttcctatactcccagtacccactgactccctctttatcctacacgtctaatgaaatggaccacgtctgtcttcctcagtcccatttctcacctcttcctcctcccctccgttactgagcccttgcgcgtgtggctctcaccagcacttctgtaacctgcagagtgctgctgtgctcctgagcccccaccctctcttctttttgaaactgttgtcagatcagtcttcctaaaccaccactttcac

SEQ ID NO: 21924 - DNA, 479 bp, Homo sapiens
aacatttgttgggctgacgctgtaatcacaccacaagggacacttgaaattatatctgtatttgggaagctaattttaaagaactttttctcttcataattatatgcaatcagccagctagtgttattggggattctctttttccctcttcagctgagaggccatctgccttcctcttcctgcctttccttccagcacacggtgagccatctccctgggagagggaccactggcccttggctgcctgcaagccccagggaaacctttccatggtgattgcggaggaagggatgaggaggaagagcaggggaggatgatgggggcctctggcttggctacaggatgagtccgttttcaagactggaggcgcaggttggtgatggaaatgatggagtgtagcgtttcgatttggacattgaagcagccagggctcttgtgaatgcaagtggcagaaaatccaattcagatgagtttaagca

SEQ ID NO: 21925 - DNA, 191 bp, Homo sapiens
tctcaaatgagtgctgtcctgctgctgccactcattgacttcctagtccttttagccttgacatttggactgcacagtgtttctctctggtaacctctgaatttgctgttttgttgttgttgttgttgttgttgttgtttcttttttagacacagtttcactctgttgcctggagtgcagtggcgcaatct

SEQ ID NO: 21926 - DNA, 164 bp, Homo sapiens
atggtgcgctgcttccccatgactcctctgcctgaggtttcctcacctggtcggccctccgcgactcctggcgtccggagaccatcctgttgacccctgggagaggtcaggctggagcctcgataccgacgcactgccacagtgggctcctgcttcgcccagcc

SEQ ID NO: 21927 - DNA, 160 bp, Homo sapiens
ttttatttactatgagcttcagctgaaaatccaaaagaaactttaatttcagatatttaatgaaatcattatagctgtggtaatttcctttagctgggtgtgagtgtgtgatgtgagcgtgtgatgtgtgtgtgtgtgtgtgtgtgtgtgtactctggca

SEQ ID NO: 21928 - DNA, 894 bp, Homo sapiens
  misc_feature (302)..(302): n is a, c, g, or t
acactaagatggctttggagcgtgagaaggacttcacctagcaaatgtgggaaaggagtgagacctccaggcagagggactggctggagacgagcgtgatgtgatattcactgaatggccactgtgtgcctggcactgttccaagtgctgaagaaaaatgaagaaaacaaaaatccctgcccttatagaggagacattataatgtgacaagataacataatgaaaaagaatgaagaataaaatagaaaagtaaaatggattgcatgtcacttgatgacaagtactgtggaatgaggccgtcnatctaaatggagcacagaaagtggaacatggcgacatctcagccaaaagacccggcagacaccatcttggccaagggatcgaggttggcatcgcagcctgtgagcagtgctgacatcttattatcttcgatatggcgtcatgagcaggctgcctcctcttggtgggatcttcccccaaacccagaacctcagtctaatcacaagaaaatgacagccaatcccaagttcagggacatttggcaaaatagcccaccactcctacttaaaagtgtcgaggtcttgaaaggcaaggaaaccctgggaaatcgtctttggccggaggaaactcagcagacatgacgactaaatgcaatgtagaatcctcggacagaaaaggacattagtgggacagctggtgaaacccaagtaagtccaggctgtaccaatgtccacttcccagttctgaggaacatgctgtggtctgtccacatttacattaggagaagcagggagagcgtatatgggacctctctgtattgtttttataacttttctgtaaatccaaaactgtcttaaaatagtttttttaaattatactttaagttctggggta

SEQ ID NO: 21929 - DNA, 467 bp, Homo sapiens
gaaagtcttgggaaccccctaaagtcttttgggaatcctcaaaaagcatgggaagttaagtatttagctacataaatgttgtaagatcatatcttatgtatagaagtaataagaccatttggaattactggactaattgaatagttaaggtttctattcgggacaataaaatgtattttgaaagtgctgctaactattgatgctgacagtgtttcactcctatgagtgacccaaacatattataaatatgtggtaaagggaatggagcctgtggggttgagcagaatgttgtactagctgtgcctggactgagtataacagctttatgattatgagaaaacaaattctttatttttttttctgttccaaagattcatcctatggggtggccataaagtctagaattagatactaatattttgtcattcattataacatatcgataaaccatttgttaaaagatttgc

SEQ ID NO: 21930 - DNA, 407 bp, Homo sapiens
gaaacacaatgcacatacagagaggaaaggaagtaacagcagccgtcttggaggctagtcccacagcacaatactcaggaattacagtcagaactgctgtccattatcacggaacgttcttaacacctttaaatgaaactttttttttttaaatgacagagaacttagaatttgtgtgtgatttcttttgtccagagtgccctatagatggtaaacacttaataatgttactaacttattaaccaagtccccactcctcattccctgctattgtgaatctacaaggaaattttggatgggtagagtccttgtgttctcacattgagttgagaaccttgtccagccacgttgtacctctcagtatggaggcagcagaaaagaataaaaacaatattggtcatttgtca

SEQ ID NO: 21931 - DNA, 475 bp, Homo sapiens
agcagccgcattaaagatgtaaattttttttaagtaaaaagaaaaggtgaaattattttagtaaatgccttagtttgttttatgctgctgtcacagaataccacagactgggtaatttgtaatgaacagaaatttatttagcttacagtttgagaggctgggcagtccaaggccaagcgaccagcatctggtgatggccttcttgctgcgtcataacatggtgaatggcatctcatgttcaagaaagagtacaagagagggccaaactgacttttatgacaaacccaccctcattttaatgacattgatccattcatgaaggtagagccctcatgacttaatcacctcttaaaggtctcatgtctcagtagtgttacattgggaattagatttccaacacatgaacttttgttgttgttattgtttttgttttgagatagagtctcattctagccacccaggctggagttcacag

SEQ ID NO: 21932 - DNA, 657 bp, Homo sapiens
tgcctggtgacagcatctgaattttctttgtgaaataacagttccctccccccaccacccacctcagctcatgtgatttgggcaaaactaatatgccctgtatctctgtactcctcgcaggggtgggcaggcaatccctgcagccatggtggatgcatatgactgacagtgtcctgtgatattcaattccacaactccagaggaaactactgatcaagaggcatcctccttctgctggggttccctgagctggtgacttggaagccaggagctgccggaggccacctgtgacactgcaaagggacaatctgccaaagagtgaagccaacacagagaaaagcaggggaaagaggcaagcagtttcctaaagacatattttgagacccccgaatccagccacacttgaatatattccaggtaaatgagccagtgtgaatttcctttctgcttaaaccagtctgactcgggtgcctctcacccacatctgaaaggctccaagtcaatactgcccctcatcacactgaataaccatcacttgtttccttggctgttgtcccattagacccagggcacttgagggcagggcctagttcaaagccatcacgatgtctcagtgcctgattccaaccatcctggatgaatatttgctgaatgaat

SEQ ID NO: 21933 - DNA, 232 bp, Homo sapiens
gcagagaaggaagatcaattgagctggggaggctgaggctgcggtgagctgagatcatatcactgcactccagcctggtcaacaaagggagatcctgtctcaaaaaaaaaaaaaaaaaaaaaaaaaaaaatccattctttcttcactcgttcacggaacctaggaaccttaactgagctcctattacatcagttgaagtgatggatgctaagtacagtagtggggataggct

SEQ ID NO: 21934 - DNA, 467 bp, Homo sapiens
actggagcttttactgagctgctgcttctacagggccctacaacatattccaggcatatctcccatctccactgcccaccacgaccatcaaacattaagtaggaatgggcaaaggtatgttgcaagactatctccctgccaccaagctatgcagagagcagaaacagagaacagtgatataattctcaccaccactcaaagtgaaactttgagatgagcaactttcagatgctcatcttcctgtttactccctagtcaaaagtcagtctgccccagctgctggccaatatctgtaagagctcatggtacctatgaagaagaaggaatccagtggcaagcaatagagcacctcaggttgcttcaggtcacagcctgtgggtgggaataccaggcaaagtcttccaagggaggagagcaggcttgatgcttggcatggcacagccacactaatgggctgtaccaggagt

SEQ ID NO: 21935 - DNA, 253 bp, Homo sapiens
acagagcaagactctgactgggcgggggccacaaaaaaatcatagcatagctacatatcctaacattttagtttgtagcatgaatactttagcagtatgtaattggtatgtagggctgatgccgtggctcacgcctgtaaccccaacactttgggagactgaggtgggtggatcacttgagggcaagttgggcttgaaggcctgaccccatgatccgcctgcctcatcctccaaaggtctgggattacaggtt

SEQ ID NO: 21936 - DNA, 788 bp, Homo sapiens
agctgcgcgtgcgcggcagagtcacaatggcagccagattcaggtgcggccatttgtgtgtccccgaggttcctcgcgggccggcatcccacgccgagggtggtggtggcaggctttccagaaaggcagcacaccaggctcagctctgctggcgagcaggaggcgacggcagaggaaacttcaacccgatgaacttcctggttgcggggacatttgcctcctcctgccactcaccacctctgctctggtccctccctccaagaatcctcatagcgtcctctctccccactctctcccatcccgcgtctcccatatttgccccagcttggctcagggccacagttctgcactcttcagccggcggcgccaccagcagttgtttctacgcgggaaatagggcaacagcatcccagcacagctgagtgcccaaggatggtcagccgggtagggcaagaagcttctttcagggattctgatctcacgctagaaacaagagtaatgatggcacttcactcagaggtttgtcctgaggcttaaatgaggcaacatggacacagcattttagcacaaggccaggtacagtatgtgtaaggagtgttggctgctattttctcaggctcatcatccatcagatgcaatcactgttccctgtctttgaattgtgcctttaattttcataccgcccctgaccaaaattccatcagaaaaaggtggcttcagctaaaggttcttacaccagaagcacaattagagtgattggtgaaaatttccctttgcatgagattggc

SEQ ID NO: 21937 - DNA, 1084 bp, Homo sapiens
agctgcgcgtgcgcggcagagtcacaatggcagccagattcaggtgcggccatttgtgtgtccccgaggttcctcgcgggccggcatcccacgccgagggtggtggtggcaggctttccagaaaggcagcacaccaggctcagctctgctggcgagcaggaggcgacggcagaggaaacttcaacccgatgaacttcctggttgcggggacatttgcctcctcctgccactcaccacctctgctctggtccctccctccaagaatcctcatagcgtcctctctccccactctctcccatcccgcgtctcccatatttgccccagcttggctcagggccacagttctgcactcttcagccggcggcgccaccagcagttgtttctacgcgggaaatagggcaacagcatcccagcacagctgagtgcccaaggatggtcagccgggtagggcaagaagcttctttcagggattctgatctcacgctagaaacaagagtaatgatggcacttcactcagaggtttgtcctgaggcttaaatgaggcaacatggacacagcattttagcacaaggccaggtggtgaagccccctaatgtcctgactccacagttcctgtcccatgaccagggccagctcaccaaagagctatagcagcacataaagtcagtgacaggcccatgcaagtaccaaaggaagccaagactgaccatgaggaacacttggagctcaggaaggaaagatcagcccagaagcagggacagggagctggttggggaggatgagaagtcagaaggtctgcgaagtttccagagaggacctgtctttgggatggcgcatcaggggttcaggtgggggagggggtgttggaagaatgtggacatcacatggaatgcccactgtgaggcactatggtaccaggaccgaggattggtggagaggaagtataaagccccagggttgctaaggtagcgcccagacaggagaaggtttggtagaaaccagagccctggtctccctccaactgctcctgagcctcctgctcccctgccccactcctcctgctgttttgctgatagactttttc

SEQ ID NO: 21938 - DNA, 723 bp, Homo sapiens
agctgcgcgtgcgcggcagagtcacaatggcagccagattcaggtgcggccatttgtgtgtccccgaggttcctcgcgggccggcatcccacgccgagggtggtggtggcaggctttccagaaaggcagcacaccaggctcagctctgctggcgagcaggaggcgacggcagaggaaacttcaacccgatgaacttcctggttgcggggacatttgcctcctcctgccactcaccacctctgctctggtccctccctccaagaatcctcatagcgtcctctctccccactctctcccatcccgcgtctcccatatttgccccagcttggctcagggccacagttctgcactcttcagccggcggcgccaccagcagttgtttctacgcgggaaatagggcaacagcatcccagcacagctgagtgcccaaggatggtcagccgggtagggcaagaagcttctttcagggattctgatctcacgctagaaacaagagtaatgatggcacttcactcagaggtttgtcctgaggcttaaatgaggcaacatggacacagcattttagcacaaggccagatgtgatggtgctgatgtttaagaagaaagtccttattaggaggatgctgctgaaatatttaaggacaaagtgtcataatgtctgcatttactcccaaatgtctcatcaaaaatgtgcaaatatgaagtaaatggggcaaaatctta

SEQ ID NO: 21939 - DNA, 818 bp, Homo sapiens
cggcacgagcgccgtcggctccgcgtctccgccgtcggctccgcggcgccgccatggccgacgtggaagacggagaggaaacctgcgccctggcctctcactccgggagctcaggctccaagtcgggaggcgacaagatgttctccctcaagaagtggaacgcggtggccatgtggagctgggacgtggagtgcgatacgtgcgccatctgcagggtccaggtgatggatgcctgtcttagatgtcaagctgaaaacaaacaagaggactgtgttgtggtctggggagaatgtaatcattccttccacaactgctgcatgtccctgtgggtgaaacagaacaatcgctgccctctctgccagcaggactgggtggtccaaagaatcggcaaatgagagtggttagaaggcttcttagcgcagttgttcagagccctggtggatcttgtaatccagtgccctacaaaggctagaacactacaggggatgaattcttcaaataggagccgatggatctgtggtcctttgggactcatcaaagccttggtttagcattttgtcagttttatcttcagaaattctctgcgattaagaagataatttattaaaggtggtccttcctacctctgtggtgtgtgtcgcgcacacagcttagaagtgctataaaaaaggaaagagctccaaattgaatcacctttataatttacccatttctatacaacaggcagtggaagcagtttcagagaactttttgcatgcttatggttgatcagttaaaaaagaatgttacagtaacaaataaagtgcagtttaaaaccc

SEQ ID NO: 21940 - DNA, 1051 bp, Homo sapiens
  misc_feature (980)..(980): n is a, c, g, or t
gtgggcagccggggtctaggcaccacggtggctggcggcctgcgggcggcgctgtggcccgtcgggcggctccacagagccgccctagccttccgccttccccaagccaacgtctccgccgtcggctccgcggcgccgccatggccgacgtggaagacggagaggaaacctgcgccctggcctctcactccgggagctcaggctccaagtcgggaggcgacaagatgttctccctcaagaagtggaacgcggtggccatgtggagctgggacgtggagtgcgatacgtgcgccatctgcagggtccaggtgatggatgcctgtcttagatgtcaagctgaaaacaaacaagaggactgtgttgtggtctggggagaatgtaatcattccttccacaactgctgcatgtccctgtgggtgaaacagaacaatcgctgccctctctgccagcaggactgggtggtccaaagaatcggcaaatgagagtggttagaaggcttcttagcgcagttgttcagagccctggtggatcttgtaatccagtgccctacaaaggctagaacactacaggggatgaattcttcaaataggagccgatggatctgtggtcctttgggactcatcaaagccttggtttagcattttgtcagttttatcttcagaaattctctgcgattaagaagataatttattaaaggtggtccttcctacctctgtggtgtgtgtcgcgcacacagcttagaagtgctataaaaaaggaaagagctccaaattgaatcacctttataatttacccatttctatacaacaggcagtggaagcagtttcagagaactttttgcatgcttatggttgatcagttaaaaaagaatgtccgtacacaataagggcgttaacccaaaaaaaaaggggccgctaagttcccgggccatagcaccgcttgtaaggccccagggggtttagagcggcgctacccggggngcaggccttggaccggggcaggcccaacagaaatggaacggcgggtaaatacacaccgacacctccccaag

SEQ ID NO: 21941 - DNA, 917 bp, Homo sapiens
ccacgcgttccgcccacgcgttcgcggacgcggtggggtcgcgcacacagcttagaagtgctataaaaaaggaaagagctccaaattgaatcacctttataatttacccatttctatacaacaggcagtggaagcagtttcagagaactttttgcatgcttatggttgatcagttaaaaaagaatgttacagtaacaaataaagtgcagtttaaaacccaactcttactcttaatttgttcctaatacgtatttttggcagggagagggaacggtccatgaaatctttatgtgatataaggattttaagtttgggccagtgaacagggtaaataaaatttaacttttgagcatatggaattttgattgcctttaaagttactattctgtatcattgattcatcaagaaaacctagatctgcactcacctcactgttcaatcattgagtggtaaaggacagaagtattttctagttctggtcagatgatataattttttttttttttttttgtgggggtgaagtcttgctctgccacccaggctggagtgcagtggcatgatgtcaactcactgcaacctccgcctcccgggttcaagtgattctcctgcctcagcctcccgagtagctgggattacaggtgtgtgccaccacacccggctaatttttgtatttttagtagagacgggatttccccatgttggccaggctggtctcaaactcctgacctcaggtgattcgcccacctcagcctcccaaagtgctgggattacaggtgtgggccactgcacctggcccagatgatataatttaactgtgttttaggtaacatgttaatgagggaaaatgtttaccagtgtagcattggatcaaaaagtttatcacacagtgttttaataaatggtttattctgcttacc

SEQ ID NO: 21942 - DNA, 1193 bp, Homo sapiens
  misc_feature (917)..(917): n is a, c, g, or t
gtgggcagccggggtctaggcaccacggtggctggcggcctgcgggcggcgctgtggcccgtcgggcggctccacagagccgccctagccttccgccttccccaagccaacgtctccgccgtcggctccgcggcgccgccatggccgacgtggaagacggagaggaaacctgcgccctggcctctcactccgggagctcaggctccaagtcgggaggcgacaagatgttctccctcaagaagtggaacgcggtggccatgtggagctgggacgtggagtgcgatacgtgcgccatctgcagggtccaggtgatggatgcctgtcttagatgtcaagctgaaaacaaacaagaggactgtgttgtggtctggggagaatgtaatcattccttccacaactgctgcatgtccctgtgggtgaaacagaacaatcgctgccctctctgccagcaggactgggtggtccaaagaatcggcaaatgagagtggttagaaggcttcttagcgcagttgttcagagccctggtggatcttgtaatccagtgccctacaaaggctagaacactacaggggatgaattcttcaaataggagccgatggatctgtggtcctttgggactcatcaaagccttggtttagcattttgtcagttttatcttcagaaattctctgcgattaagaagataatttattaaaggtggtccttcctacctctgtggtgtgtgtcgcgcacacagcttagaagtgctataaaaaaggaaagagctccaaattgaatcacctttataatttacccatttctatacaacaggcagtggaagcagtttcagagaactttttgcatgcttatggttgatcagttaaaaaagaatgttacagtaacaaataaagtgcagtttaaaacccaaaaaaaaaaanaaaaaaaaatgggggggttagtggggggggggggaaaaggggtaggaatgggccatgggtcataggctggtttcttggacccagtttttctggtccaaggggggaaagatctggccgggtccccctaataagggaggcggataaattcggataaagcgaggttaccggggtagtgtctggggagagaaaaccggggataaccagacaaggagcggttttgagacaaagacacacgaggaaaacctcaagggagaaatagcaagacaaacaaaaaga

SEQ ID NO: 21943 - DNA, 1867 bp, Homo sapiens
gtgggcagccggggtctaggcaccacggtggctggcggcctgcgggcggcgctgtggcccgtcgggcggctccacagagccgccctagccttccgccttccccaagccaacgtctccgccgtcggctccgcggcgccgccatggccgacgtggaagacggagaggaaacctgcgccctggcctctcactccgggagctcaggctccaagtcgggaggcgacaagatgttctccctcaagaagtggaacgcggtggccatgtggagctgggacgtggagtgcgatacgtgcgccatctgcagggtccaggtgatggatgagggaattggagttcgtaattggtccgaggccctgaacctaataaatgccagtgaaatgggatttgactgtagatctggctccacagccctcgctgtcccctctgtctcactggcttctcaccagccttgtctggatgaccatcggtagcaacctattggaagcatacaaagcagtttattttagaggaactctcaagtgtcttagggtagaaagtaaaaagttgcttcttatgagttgctaaaggaaggcttctgtgtcaatgcctgtcttagatgtcaagctgaaaacaaacaagaggactgtgttgtggtctggggagaatgtaatcattccttccacaactgctgcatgtccctgtgggtgaaacagaacaatcgctgccctctctgccagcaggactgggtggtccaaagaatcggcaaatgagagtggttagaaggcttcttagcgcagttgttcagagccctggtggatcttgtaatccagtgccctacaaaggctagaacactacaggggatgaattcttcaaataggagccgatggatctgtggtcctttgggactcatcaaagccttggtttagcattttgtcagttttatcttcagaaattctctgcgattaagaagataatttattaaaggtggtccttcctacctctgtggtgtgtgtcgcgcacacagcttagaagtgctataaaaaaggaaagagctccaaattgaatcacctttataatttacccatttctatacaacaggcagtggaagcagtttcagagaactttttgcatgcttatggttgatcagttaaaaaagaatgttacagtaacaaataaagtgcagtttaaaacccaactcttactcttaatttgttcctaatacgtatttttggcagggagagggaacggtccatgaaatctttatgtgatataaggattttaagtttgggccagtgaacagggtaaataaaatttaacttttgagcatatggaattttgattgcctttaaagttactattctgtatcattgattcatcaagaaaacctagatctgcactcacctcactgttcaatcattgagtggtaaaggacagaagtattttctagttctggtcagatgatataattttttttttttttttttgtgggggtgaagtcttgctctgccacccaggctggagtgcagtggcatgatgtcaactcactgcaacctccgcctcccgggttcaagtgattctcctgcctcagcctcccgagtagctgggattacaggtgtgtgccaccacacccggctaatttttgtatttttagtagagacgggatttccccatgttggccaggctggtctcaaactcctgacctcaggtgattcgcccacctcagcctcccaaagtgctgggattacaggtgtgggccactgcacctggcccagatgatataatttaactgtgttttaggtaacatgttaatgagggaaaatgtttaccagtgtagcattggatcaaaaagtttatcacacagtgttttaataaatggtttattctgcttacc

SEQ ID NO: 21944 - DNA, 985 bp, Homo sapiens
ttctttcgaaaggccggtttttggaaagaagaaaaggcagtcaccgtgtgcaccgattaagaagataatttattaaaggtggtccttcctacctctgtggtgtgtgtcgcgcacacagcttagaagtgctataaaaaaggaaagagctccaaattgaatcacctttataatttacccatttctatacaacaggcagtggaagcagtttcagagaactttttgcatgcttatggttgatcagttaaaaaagaatgttacagtaacaaataaagtgcagtttaaaacccaactcttactcttaatttgttcctaatacgtatttttggcagggagagggaacggtccatgaaatctttatgtgatataaggattttaagtttgggccagtgaacagggtaaataaaatttaacttttgagcatatggaattttgattgcctttaaagttactattctgtatcattgattcatcaagaaaacctagatctgcactcacctcactgttcaatcattgagtggtaaaggacagaagtattttctagttctggtcagatgatataattttttttttttttttttgtgggggtgaagtcttgctctgccacccaggctggagtgcagtggcatgatgtcaactcactgcaacctccgcctcccgggttcaagtgattctcctgcctcagcctcccgagtagctgggattacaggtgtgtgccaccacacccggctaatttttgtatttttagtagagacgggatttccccatgttggccaggctggtctcaaactcctgacctcaggtgattcgcccacctcagcctcccaaagtgctgggattacaggtgtgggccactgcacctggcccagatgatataatttaactgtgttttaggtaacatgttaatgagggaaaatgtttaccagtgtagcattggatcaaaaagtttatcacacagtgttttaataaatggtttattctgcttacc

SEQ ID NO: 21945 - DNA, 401 bp, Homo sapiens
gtaaaattctcaccagtttgtatcatccccacttaatatataaatacctcacagtattgtcccttttttacagatgagggaattggagttcgtaattggtccgaggccctgaacctaataaatgccagtgaaatgggatttgactgtagatctggctccacagccctcgctgtcccctctgtctcactggcttctcaccagccttgtctggatgaccatcggtagcaacctattggaagcatacaaagcagtttattttagaggaactctcaagtgtcttagggtagaaagtaaaaagttgcttcttatgagttgctaaaggaaggcttctgtgtcagtaagtatggatgactttaaaaaacttgtttatgaagcaattttttaatttaattttttataag

SEQ ID NO: 21946 - DNA, 521 bp, Homo sapiens
ttccttccacaactgctgcatgtccctgtgggtgaaacagaacaatcgctgccctctctgccagcaggactgggtggtccaaagaatcggcaaatgagagtggttagaaggcttcttagcgcagttgttcagagccctggtggatcttgtaatccagtgccctacaaaggctagaacactacaggggatgaattcttcaaataggagccgatggatctgtggtcctttgggactcatcaaagccttggtttagcattttgtcagttttatcttcagaaattctctgcgattaagaagataatttattaaaggtggtccttcctacctctgtggtgtgtgtcgcgcacacagcttagaagtgctataaaaaaggaaagagctccaaattgaatcacctttataatttacccatttctatacaacaggcagtggaagcagtttcagagaactttttgcatgcttatggttgatcagttaaaaaagaatgttacagtaacaaataaagtgcagtttaaaaccca

SEQ ID NO: 21947 - DNA, 905 bp, Homo sapiens
gtgggcagccggggtctaggcaccacggtggctggcggcctgcgggcggcgctgtggcccgtcgggcggctccacagagccgccctagccttccgccttccccaagccaacgtctccgccgtcggctccgcggcgccgccatggccgacgtggaagacggagaggaaacctgcgccctggcctctcactccgggagctcaggctccaagtcgggaggcgacaagatgttctccctcaagaagtggaacgcggtggccatgtggagctgggacgtggagtgcgatacgtgcgccatctgcagggtccaggtgatggatgcctgtcttagatgtcaagctgaaaacaaacaagaggactgtgttgtggtctggggagaatgtaatcattccttccacaactgctgcatgtccctgtgggtgaaacagaacaatcgctgccctctctgccagcaggactgggtggtccaaagaatcggcaaatgagagtggttagaaggcttcttagcgcagttgttcagagccctggtggatcttgtaatccagtgccctacaaaggctagaacactacaggggatgaattcttcaaataggagccgatggatctgtggtcctttgggactcatcaaagccttggtttagcattttgtcagttttatcttcagaaattctctgcgattaagaagataatttattaaaggtggtccttcctacctctgtggtgtgtgtcgcgcacacagcttagaagtgctataaaaaaggaaagagctccaaattgaatcacctttataatttacccatttctatacaacaggcagtggaagcagtttcagagaactttttgcatgcttatggttgatcagttaaaaaagaatgttacagtaacaaataaagtgcagtttaaaaccc

SEQ ID NO: 21948 - DNA, 1603 bp, Homo sapiens
gtgggcagccggggtctaggcaccacggtggctggcggcctgcgggcggcgctgtggcccgtcgggcggctccacagagccgccctagccttccgccttccccaagccaacgtctccgccgtcggctccgcggcgccgccatggccgacgtggaagacggagaggaaacctgcgccctggcctctcactccgggagctcaggctccaagtcgggaggcgacaagatgttctccctcaagaagtggaacgcggtggccatgtggagctgggacgtggagtgcgatacgtgcgccatctgcagggtccaggtgatggatgcctgtcttagatgtcaagctgaaaacaaacaagaggactgtgttgtggtctggggagaatgtaatcattccttccacaactgctgcatgtccctgtgggtgaaacagaacaatcgctgccctctctgccagcaggactgggtggtccaaagaatcggcaaatgagagtggttagaaggcttcttagcgcagttgttcagagccctggtggatcttgtaatccagtgccctacaaaggctagaacactacaggggatgaattcttcaaataggagccgatggatctgtggtcctttgggactcatcaaagccttggtttagcattttgtcagttttatcttcagaaattctctgcgattaagaagataatttattaaaggtggtccttcctacctctgtggtgtgtgtcgcgcacacagcttagaagtgctataaaaaaggaaagagctccaaattgaatcacctttataatttacccatttctatacaacaggcagtggaagcagtttcagagaactttttgcatgcttatggttgatcagttaaaaaagaatgttacagtaacaaataaagtgcagtttaaaacccaactcttactcttaatttgttcctaatacgtatttttggcagggagagggaacggtccatgaaatctttatgtgatataaggattttaagtttgggccagtgaacagggtaaataaaatttaacttttgagcatatggaattttgattgcctttaaagttactattctgtatcattgattcatcaagaaaacctagatctgcactcacctcactgttcaatcattgagtggtaaaggacagaagtattttctagttctggtcagatgatataattttttttttttttttttgtgggggtgaagtcttgctctgccacccaggctggagtgcagtggcatgatgtcaactcactgcaacctccgcctcccgggttcaagtgattctcctgcctcagcctcccgagtagctgggattacaggtgtgtgccaccacacccggctaatttttgtatttttagtagagacgggatttccccatgttggccaggctggtctcaaactcctgacctcaggtgattcgcccacctcagcctcccaaagtgctgggattacaggtgtgggccactgcacctggcccagatgatataatttaactgtgttttaggtaacatgttaatgagggaaaatgtttaccagtgtagcattggatcaaaaagtttatcacacagtgttttaataaatggtttattctgcttacc

SEQ ID NO: 21949 - DNA, 1033 bp, Homo sapiens
gtgggcagccggggtctaggcaccacggtggctggcggcctgcgggcggcgctgtggcccgtcgggcggctccacagagccgccctagccttccgccttccccaagccaacgtctccgccgtcggctccgcggcgccgccatggccgacgtggaagacggagaggaaacctgcgccctggcctctcactccgggagctcaggctccaagtcgggaggcgacaagatgttctccctcaagaagtggaacgcggtggccatgtggagctgggacgtggagtgcgatacgtgcgccatctgcagggtccaggtgatgggtaagcgctgcacgcgagtccagggccgccctgcggcctccgggagccgacctcggggttgggaagggacgggcgtccgtcagaagcctcggaaagtgccctgcctgggagagtgggtggaggtcgccctgccccggcgccggaggaacgcggagccacgctcctgctgcggctcctgagggctgcggccgccgcctggggctgcggggttgtgcaacaggcgccctgcgccgggtggttggtgttctagggagagagacgggcaataaacggagttaaacaaggtaatttcaggtagtgatgggtgtgaccaagaaagtaaaaccgggtgattgttgggaactagcaggaaacacttcggtttgtgtgtccagccccagccccacctctaaaagctcaacacaaggtggtcagggtaaaggccgtgattcagcagtgaactttaatagtcttggtcaccaccaaagtgatgctccagagtcatcttccacaaaacgacacccttagttctcctcgagggacgcaggaaagtgttcatagccattgcatttccggattagcttaccgccgctcttcgaatggcttttaaatctggattgatttaagacgggtcagatagcactagcgtggcttgaagggaacagtgtggttcaagaatatctaagtttcatggaagctgaagaattgtaagcccttttttcagaaacgtaaaacttca

SEQ ID NO: 21950 - DNA, 1564 bp, Homo sapiens
gtgggcagccggggtctaggcaccacggtggctggcggcctgcgggcggcgctgtggcccgtcgggcggctccacagagccgccctagccttccgccttccccaagccaacgtctccgccgtcggctccgcggcgccgccatggccgacgtggaagacggagaggaaacctgcgccctggcctctcactccgggagctcaggctccaagtcgggaggcgacaagatgttctccctcaagaagtggaacgcggtggccatgtggagctgggacgtggagtgcgatacgtgcgccatctgcagggtccaggtgatggatgcctgtcttagatgtcaagctgaaaacaaacaagaggactgtgttgtggtctggggagaatgtaatcattccttccacaactgctgcatgtccctgtgggtgaaacagaacaatcgctgccctctctgccagcaggactgggtggtccaaagaatcggcaaatgagagtggttagaaggcttcttagcgcagttgttcagagccctggtggatcttgtaatccagtgccctacaaaggctagaacactacaggggatgaatttcatcaaagccttggtttagcattttgtcagttttatcttcagaaattctctgcgattaagaagataatttattaaaggtggtccttcctacctctgtggtgtgtgtcgcgcacacagcttagaagtgctataaaaaaggaaagagctccaaattgaatcacctttataatttacccatttctatacaacaggcagtggaagcagtttcagagaactttttgcatgcttatggttgatcagttaaaaaagaatgttacagtaacaaataaagtgcagtttaaaacccaactcttactcttaatttgttcctaatacgtatttttggcagggagagggaacggtccatgaaatctttatgtgatataaggattttaagtttgggccagtgaacagggtaaataaaatttaacttttgagcatatggaattttgattgcctttaaagttactattctgtatcattgattcatcaagaaaacctagatctgcactcacctcactgttcaatcattgagtggtaaaggacagaagtattttctagttctggtcagatgatataattttttttttttttttttgtgggggtgaagtcttgctctgccacccaggctggagtgcagtggcatgatgtcaactcactgcaacctccgcctcccgggttcaagtgattctcctgcctcagcctcccgagtagctgggattacaggtgtgtgccaccacacccggctaatttttgtatttttagtagagacgggatttccccatgttggccaggctggtctcaaactcctgacctcaggtgattcgcccacctcagcctcccaaagtgctgggattacaggtgtgggccactgcacctggcccagatgatataatttaactgtgttttaggtaacatgttaatgagggaaaatgtttaccagtgtagcattggatcaaaaagtttatcacacagtgttttaataaatggtttattctgcttacc

SEQ ID NO: 21951 - DNA, 408 bp, Homo sapiens
taatctattgtatttctcaaccgtaatcttctgtctcagtcattttcaggttatttcaccttgcagcattttctacctatgcacaccacttttctggcctgagttctgatataagcgaaacaaaggtgagcacttgcatcaatgctttaggtggcttcagacatgttagaacagacaagaacaaataagatctgctcttcttggtccagaagctggaaccagaattccacactggaaaggctatcactgcttccagattgctgacattctagggaaacagtgaggcaagggaatgtttatatatgggaaagctttcctactgttttcaagttggcattttctttattaaaacaggcaaggttgttgtaaacctttgaatattttccaaagttctgacaatgttgatac

SEQ ID NO: 21952 - DNA, 437 bp, Homo sapiens
ggaagatggcctttgggtcctggatggttccgttgcaggccggcacagtggtctttcaaaggtcatcttttggctgcttttgatttatctcccttaatctcagatgtggctccccagagcactgtgcaggaaaaaagtcaaaacagccaggcttccccctctccgaggcagatggagaaagggcaggcaggcttccctgtccccatccacaacgtgcaagaggggcaggggccccagtggctaaaacccagccctacccatgatctgcttgaaatttcctccatccaggctacccctttggtttaaggtgctggttttccaccttagccacacattccagccacctggcaatggctaaaatacacctttcccgaggctgcacccccagagagttggattccatttttcaacagtggggtctagacatcggtgttttg

SEQ ID NO: 21953 - DNA, 474 bp, Homo sapiens
taagatactaatgatagagaaaactgaataagggtatatgggaactgtctgtagtatctttgcaacttttttgttatgtctaaaatgattctaaaataaaaagcttattaaaataatcatagcactatggcataattgttacttagagaatgagcaggaacaatttggtaatagtaataactttttccttgatatgattattttcactgtgctttaagggaagaaagaagccagatgcactggctcacgcctgtcatttcaacactttggaaggctgctacaggcagatcacttgagctcaggtgttcgagactagtctgggcaatagggcgaaacttcatctctacaaaaaaaaatttttttaaaattaactgggcatggtggtgtgtgcctgtagtcccagctatttgggaggttgaggtgggagaattacctgagcctgagaggttgaggctgccatgagctgagttgtga

SEQ ID NO: 21954 - DNA, 546 bp, Homo sapiens
gagaaatgagaaaagttggaagctgttgtggcctgactttatacccccaaaattcatattttgaataccccaaaaagaagtataatgtaagtccagaatcattactggtgatgacattcaaaagtcagaattgagatataccccaaagaacacaccttgctattgccctagagaagtttaatgtgttttatgcctatgttcctattgatgcagttaaagtgaccaactattagcaacaaaccccaaattgtcctttgtacaaaaatagttgattaggccaggtgcagtagctcatacctgtaaactcccagtactttgggaggccaaagtgggaagttcgcttgaagccaggaatttgagaccagtgggcaacatagcaagcccgtctctacaaagtgttaaaaaattagctgggctacttggaggatctggctacgtggtggctgagatgggaggattgcttgagcccaggagttcaagaccgcagtgagctatgattgtgccactgcactctagctgggcaagagtgagaccctttctcaaaaa

SEQ ID NO: 21955 - DNA, 799 bp, Homo sapiens
gtagtgccttacccatattccttttcgactgcactgattgttcctaacaactgaaatgttttctattgtagcatctgtagataaaatagataacaatcaaaagagttacagtttatttagtcccttgtgatgggacagtggtttctttctaactaggcttaggcaaagaaaatacagttttcttcttcttcttcttttttttttttgttcgagaaggagtcttgctctgtcacccaggctatggtgcagtggcagaatctcagctcactgcaacctctgcctcctgggttcaagcaattctcctacctcagctacttggaaggctgaggcacaagaatcgcttgaagccaggaaacagattgcagtgggccaagatcgtgccatgcactccagcctggactctgtctaaaaaaaaaaatacggagtcataatttattatgcatattatatacatattgagcacttactatatagagtactgtcctgtgcatttcttatgtattagttaaccttcacttttattttctccattttgtggataagaaactaaaggacagggtatttaggaaaattgcaaaagatgtctccattagaaaataaaagaaccacattttgaccccaagcaatcttcctctagtgcctggttggtgtctccatataaaataaactgaatttgaatcctggctctactatttagtaggaatatagctttggataagtcatctaatctctttgagcctcactttctacatgaggtagttggcagattgtgagtaaagctccttagtccattgtgatt

SEQ ID NO: 21956 - DNA, 337 bp, Homo sapiens
tgcagtactttatagtttgtaaagtgcttttatgactattagctcatttgatcctctgggaggtaggcagggcaggtagttattccattttacagatgagaaaagtgaggttcagagaggatgaagtgacttcattagggtttcaaagggtcaagtggtgaaataaagacctgagtttgggtcatttgacttctaatctaatcatctcctcttcattaaggctgacttcatctgttctatgttgtcatatccagttgccctttcagagaatgcagttatctgactttgtcaccacatttttggggataccctgaaaataaaactgtggtggttcatg

SEQ ID NO: 21957 - DNA, 534 bp, Homo sapiens
ctgcagtggtttaagaagtatggaattttacctcattctttaaatttgggtggcattcagaaagcccttctaaaaccttctaataaattggatcagctgagtttagacttgtaatttattttttaaaacaaagagggcatattaaatgagtaatttggaaatacttcagatgaataaataacatctctgcaacttcctttttctcctgatcagtcctgtgagtgacccttgataacttttcttaaaagcaatatgagtcaaccaaagaataagattaatttttgaggatttgtgataaccagaagaaagcactgtaggctgtgacaacctgtgagggccgagagaaatacaggggagccaactggtgatccatattggctttcatagagtggtagtatttttgtgtcagcttgttacatgcctgaacctctggattgcagcagtgttgtcattgtaccagcagttgctcagactctaatcagagtctgatttaccctcaataaagttctgtacgcatcagattggaatcatgaa

SEQ ID NO: 21958 - DNA, 1142 bp, Homo sapiens
agcctacttgcaggagatatggaaggcagaagtgaagaaagcattagtcaggttttatagccaccatatgtggagacagatggatgcataggagcttcagggacacctgcttccaccacattgtcctgatcctttgctctgccaattgagagtattcttagaaccaccactaactgcttgactgccatattttccttccttccttccttctttctttccctttccctttcttttctttctttactttctttttccgagatggagtcttgctctgtcgcccaggctggagtgcagtggtacgatcttggctcactgcaacctctgccttctgggttcaagcaattgtcctgccccagcctcccaagtagctgggattataggtgcccaccaccaagcccagctaaattttttttgtatttttagtagagacagggtttcatcattgttggccaggctggtctcaaactcctgacctcatgatctgcccaccttggccttccaaagtgctgagattacaggcgtgagccactgtgcatggccccagctgccatattttcaaagatgtagttttccacaaattgtcttcaaaagttctactcaaagatgcactgcagtttggattttcctagaaactctaatgtgtccaccaggcaaccatttagactcttaaggttgggaatattctctgatgctctgactcacctcatctctaggttgaatttatccaaggtattatttatgtaataaacaccatgttttgttaacagtaccagtgactatgtgtttctgattccaccgtgacaactacagtggtgcagtcaaaaagaactacatgggtgtttgcttctccactgcactgtgcagggaatgcacttacccagtcctacagtgtaagaataagcaccttcctaatatcaagcagattgtcggtgtttcctattacagttgaatgtcatctctcagtacattttcaattttgtttcattatatgtgattaaaaaccatgtgtatgtttttgttgaacaaaagcttctgtagatgtttcttagaaatattttattaacttttcaaataacttgtatgctatcacttgtctatttaattttctgcaaggatatattaaaatattccattgcaattat

SEQ ID NO: 21959 - DNA, 5526 bp, Homo sapiens
tggatttcgaggtcggggataaaatccgaattctggcgaccttggaagatggctggctggaaggatccctgaagggcaggacaggcatctttccttaccggtttgtgaaattatgtcctgacacacgggtggaggaaaccatggctctgccccaggaaggcagccttgccaggatcccggaaacttctttggattgtttggagaacaccttaggagtagaggaacaaagacatgaaaccagtgaccatgaggccgaggagcctgactgcattatttctgaagcacccacttctcccctcggtcatctgacttcagagtatgacacagacagaaactcttatcaggacgaggacaccgcaggagggcccccgagaagcccaggcgtggagtgggaaatgcctcttgccacagactctcccacatctgaccctacagaagtagtcaatggtatttcctcccaacctcaggtcccttttcatcccaacttgcagaaaagccagtattattctacagtgggagggagccacccgcactcagaacagtaccccgaccttcttcccctagaagcaaggactagagactatgccagcctacctcccaaaagaatgtattcccagctaaaaactcttcagaagccagtgctccctctttacaggggctcttctgtttcagcttcaagggtagtcaaacccagacaatcaagtcctcagctccacaacctagcaagttatactaaaaagcaccacacgtccagtgtttactccatctcagagagattggagatgaagcctggtccgcaagcccaagggcttgttatggaagcagcaacacattcacagggagacggcagcactgacctggactcgaagctgacacaacagctgatcgagtttgagaagagcttggcagggcccggcacagagccagataaaattttacgccacttttcaatcatggactttaactctgagaaggatattgtccgaggttcctcaaagttaatcaccgagcaggagctgccggaaaggagaaaggccctaaggccaccgccacctcgtccctgtactccggtatccacttctccccatttgctggttgaccagaacctaaaacctgcaccacccttggtggtgcgaccctctcgcccagctcccctgcctccctcagcacagcagagaacgaatgcggtatcccccaagctcctatctcgacaccgtcctacctgtgagaccttagaaaaggagggccctggtcatatgggaaggagtctggaccagacctccccatgccccttagtgctggtgaggattgaggaaatggagcgggacttggatatgtacagtagagctcaagaagagctaaacctcatgctggaggagaagcaggatgaatcatcaagagcagagaccctcgaggatctcaagttctgtgaaagtaacattgaaagtttgaatatggaactccagcaactaagagaaatgacgctcctctcctcccagtcttcatcactggtggccccttctgggtctgtgtctgccgaaaatccagagcagaggatgctggagaagagagccaaggtcatagaagaacttcttcagacagaaagagactacattcgggatctggaaatgtgtattgagcggatcatggtacccatgcagcaggcacaggtaccaaacattgattttgagggactttttggaaatatgcagatggtgattaaggtctcgaagcaattattggctgctctggaaatcagcgatgctgtaggacctgtgtttcttggtcaccgggatgagcttgagggaacatacaagatttactgccagaatcatgatgaggccattgcgctgcttgaaatctacgagaaggatgagaagatccagaagcatcttcaggactccttggcagatctgaagagcctatacaacgaatggggatgcacaaattatattaacctgggctccttcctcatcaaaccagtacagagagtaatgcgttacccgctgttgctaatggagttgctgaattccaccccagaatcccacccagataaagtgcctttaaccaatgcagtccttgcggtcaaggaaatcaacgttaacattaatgaatataaacggcgaaaggacctggtcctcaagtaccgtaagggtgatgaagatagccttatggagaaaatttccaaactgaacatccactccatcatcaagaaatccaaccgagttagcagtcacctgaagcatctcactggctttgctcctcagataaaagatgaagtatttgaagaaacagaaaaaaacttccgaatgcaagaaagattgattaagtcttttatccgagacctgtctctctacctccaacacatccgggagtccgcatgtgtgaaagtggtggctgctgtgagcatgtgggatgtgtgcatggagagaggacaccgggacctggagcagtttgagagggtgcatcgctacatcagtgaccagctcttcacaaactttaaggagaggacagagcggcttgtcatctcccccttaaatcagttactgagcatgtttacagggccccataagctggtacagaaacgctttgacaagctcctggacttctataactgtacagaacgggcagaaaagctaaaggacaagaagaccctggaggagctgcagtcggcccggaacaactatgaggccctgaatgcacagctgctggatgagctgcccaagttccaccagtacgcccagggcctcttcaccaactgtgtccacggctatgctgaagcccactgtgactttgtgcaccaggctctggagcaattaaagccactgctttcgttactcaaagtggctggcagagagggaaaccttattgccatcttccacgaagagcacagcagagttctgcagcaactccaggtttttaccttcttcccggagtctcttccagctaccaagaagccatttgagaggaaaaccattgaccgccagtctgctcgaaagccactcctgggcctgccaagttacatgctacagtcagaagaactccgggcctccctcctggccaggtatccccctgaaaaactcttccaggcagaacggaacttcaatgctgctcaagacttggatgtctcacttttggaaggtgacctggtgggtgtgattaagaaaaaagaccccatgggcagccagaaccgctggctgattgacaatggagtcaccaaaggcttcgtgtacagctctttcctaaagccctacaatcctcgccgcagccactccgatgcctccgtgggtagccactcctccacagagtctgagcacggcagctcctcccccaggttcccacgccagaacagcggcagcaccctgaccttcaaccccagcagcatggctgtatcctttacctcggggtcttgccagaagcagcctcaagatgcatctcctccgccaaaagaatgtgaccaaggaactctcagtgcatccctaaatccgagtaattcagagagtagtccttccagatgcccttcagacccagactccacctcccagccaaggtcaggggactctgcagatgtagctagagatgtaaagcaacccactgccacgccgaggagctaccggaacttcaggcatccagaaatagttggctactccgtaccaggacgaaatgggcaaagtcaagacctcgtcaaaggatgtgcaagaacagcccaggctccggaagacagaagtacagagccagatggcagtgaggcagaaggcaaccaggtctattttgctgtctacaccttcaaggcacgaaacccaaatgagctgagcgtgtcagccaatcagaaactcaagatcctcgagtttaaagatgttacaggaaatacagagtggtggttagctgaggttaacgggaagaagggctacgttccctccaattatatccgcaaaaccgagtacacctgagcccacgttgcctgccacccagccttgctgcctttgctttcagtccgccgagggttctggcggcccaccgagagggcgcctgctcctgagacacaggccctgtctgcgttgcttaaccatggcatggtggagcacaccacagatcttgttctcctcgattgggttgtaaaccttgatgctcactagaatctctagaatttgaaatggaccctggggctttgcaaatgacttagtgactatgagaagagagacaagtcttagagctggcttttggaaaggagaaacttgcagtcagaagcccagtgtcctatgtatgcaggaagctgtgctctagcaatagacagtgttggtaatggttgtgctgtacggcgtttggggtggccccatgttccatgctcagctgaccggatgccaactcagatgaaaagaattcatggctctgggcaccccgtgaggcagtgcttgcacatggctgggagtttgtcgggattgaaccaaacctagtgcttcaaagctcctgggacacctccagtgtccagcacacattctcatacatactgcccctaatttctaaagtccctaaagcactacattctgtaaccttgtttcttttactccattcccagattagttatgcaaaattcaactgcgttctacttttagaagtgtttagggtctttattttctgttgacccttcatctgaaagattctcttcccttgttaggtacaatcactgcccccccgcttttttttttgagatggggtcttgctatgttgcccaggctggtcttaaacgcctgggctcaagcaaccctcccgcctccctgctgagattacaggtgtaagccaccataccgcaacctcaatgacacctttctgatggtctttacacagtctgtgatgtctggtggcccccctgccctggactcaataattgatagattttcctagagtaacagtatgagagctccagccattccattaaaagtattagttctgctttgagctgaaaccagttgagcctaatggaagactggatgtctttcttcttcatccaagcaccctaatgactgtttagttacatccatagatgcagacaacataacacctgtgacttacttgaattgggataagccattccagaagtagcttatcctagacttggaaataagatttttttcaccactaacttccatgcttcagagatgacattcaaagccagattcccaagtgcctgatcatacctcccagtctcaggaagatatttgcttaccccttagaccaagaatcttaagatcttccccagctatgaagcctatcttggaatgggaaaccatgaaatttgtcttttaaaagaaagggaagaaatagccttacagcccctgttccctccaagtgcacatttagccttaaaatcctgggagtcgggagacaccgtggagtccttacatccacagtgtctgctggtcgtggtcagaaggcagtaatgcaagagtccttttgtgaagagtgtttctatgtagagatgtttatatttaagtagttcttttataaataaaagcatttctaatggcc

SEQ ID NO: 21960 - DNA, 494 bp, Homo sapiens
gtttttgtgtgtcttgttttaagcaagctacttttgccagtaagattaaaggagtgtccagatttgctaacagcacttgtttatttttgaacagataaaagatgaagtatttgaagaaacagaaaaaaacttccgaatgcaagaaagattgattaagtcttttatccgagacctgtctctctacctccaacacatccgggtgagcgtcaacatcactgtagttagattaacatacgatgtaattctgtcccctttcctgttcatcagtcatattgtttaatgaatgctgagtaatctggactcaaattactattatgccccatcatactttttgttgagatgccagtaggttatttaacagtaatagcatttagatcaatgttgtcacattcatttcaaagcagcccaactttttccaccctctttttggtcttcatcacccttcatcccacacacaccttatttttcttttacttattacagttcattttatc

SEQ ID NO: 21961 - DNA, 4898 bp, Homo sapiens
gaggtgacagcgggctggggactggcggctgcaactgcctgccgcgccgagggaccgccgggcggcggaaagcagcattggccaggactactagaactgtgtcaaaacagctgctacactaacgggcatctttgtcttgttctcagtcttaaaaagagttataaaacatggaggctggctcagtggttcgagccatttttgacttctgccctagcgtatcagcactgacctggactcgaagctgacacaacagctgatcgagtttgagaagagcttggcagggcccggcacagagccagataaaattttacgccacttttcaatcatggactttaactctgagaaggatattgtccgaggttcctcaaagttaatcaccgagcaggagctgccggaaaggagaaaggccctaaggccaccgccacctcgtccctgtactccggtatccacttctccccatttgctggttgaccagaacctaaaacctgcaccacccttggtggtgcgaccctctcgcccagctcccctgcctccctcagcacagcagagaacgaatgcggtatcccccaagctcctatctcgacaccgtcctacctgtgagaccttagaaaaggagggccctggtcatatgggaaggagtctggaccagacctccccatgccccttagtgctggtgaggattgaggaaatggagcgggacttggatatgtacagtagagctcaagaagagctaaacctcatgctggaggagaagcaggatgaatcatcaagagcagagaccctcgaggatctcaagttctgtgaaagtaacattgaaagtttgaatatggaactccagcaactaagagaaatgacgctcctctcctcccagtcttcatcactggtggccccttctgggtctgtgtctgccgaaaatccagagcagaggatgctggagaagagagccaaggtcatagaagaacttcttcagacagaaagagactacattcgggatctggaaatgtgtattgagcggatcatggtacccatgcagcaggcacaggtaccaaacattgattttgagggactttttggaaatatgcagatggtgattaaggtctcgaagcaattattggctgctctggaaatcagcgatgctgtaggacctgtgtttcttggtcaccgggatgagcttgagggaacatacaagatttactgccagaatcatgatgaggccattgcgctgcttgaaatctacgagaaggatgagaagatccagaagcatcttcaggactccttggcagatctgaagagcctatacaacgaatggggatgcacaaattatattaacctgggctccttcctcatcaaaccagtacagagagtaatgcgttacccgctgttgctaatggagttgctgaattccaccccagaatcccacccagataaagtgcctttaaccaatgcagtccttgcggtcaaggaaatcaacgttaacattaatgaatataaacggcgaaaggacctggtcctcaagtaccgtaagggtgatgaagatagccttatggagaaaatttccaaactgaacatccactccatcatcaagaaatccaaccgagttagcagtcacctgaagcatctcactggctttgctcctcagataaaagatgaagtatttgaagaaacagaaaaaaacttccgaatgcaagaaagattgattaagtcttttatccgagacctgtctctctacctccaacacatccgggagtccgcatgtgtgaaagtggtggctgctgtgagcatgtgggatgtgtgcatggagagaggacaccgggacctggagcagtttgagagggtgcatcgctacatcagtgaccagctcttcacaaactttaaggagaggacagagcggcttgtcatctcccccttaaatcagttactgagcatgtttacagggccccataagctggtacagaaacgctttgacaagctcctggacttctataactgtacagaacgggcagaaaagctaaaggacaagaagaccctggaggagctgcagtcggcccggaacaactatgaggccctgaatgcacagctgctggatgagctgcccaagttccaccagtacgcccagggcctcttcaccaactgtgtccacggctatgctgaagcccactgtgactttgtgcaccaggctctggagcaattaaagccactgctttcgttactcaaagtggctggcagagagggaaaccttattgccatcttccacgaagagcacagcagagttctgcagcaactccaggtttttaccttcttcccggagtctcttccagctaccaagaagccatttgagaggaaaaccattgaccgccagtctgctcgaaagccactcctgggcctgccaagttacatgctacagtcagaagaactccgggcctccctcctggccaggtatccccctgaaaaactcttccaggcagaacggaacttcaatgctgctcaagacttggatgtctcacttttggaaggtgacctggtgggtgtgattaagaaaaaagaccccatgggcagccagaaccgctggctgattgacaatggagtcaccaaaggcttcgtgtacagctctttcctaaagccctacaatcctcgccgcagccactccgatgcctccgtgggtagccactcctccacagagtctgagcacggcagctcctcccccaggttcccacgccagaacagcggcagcaccctgaccttcaaccccagcagcatggctgtatcctttacctcggggtcttgccagaagcagcctcaagatgcatctcctccgccaaaagaatgtgaccaaggaactctcagtgcatccctaaatccgagtaattcagagagtagtccttccagatgcccttcagacccagactccacctcccagccaaggtcaggggactctgcagatgtagctagagatgtaaagcaacccactgccacgccgaggagctaccggaacttcaggcatccagaaatagttggctactccgtaccaggacgaaatgggcaaagtcaagacctcgtcaaaggatgtgcaagaacagcccaggctccggaagacagaagtacagagccagatggcagtgaggcagaaggcaaccaggtctattttgctgtctacaccttcaaggcacgaaacccaaatgagctgagcgtgtcagccaatcagaaactcaagatcctcgagtttaaagatgttacaggaaatacagagtggtggttagctgaggttaacgggaagaagggctacgttccctccaattatatccgcaaaaccgagtacacctgagcccacgttgcctgccacccagccttgctgcctttgctttcagtccgccgagggttctggcggcccaccgagagggcgcctgctcctgagacacaggccctgtctgcgttgcttaaccatggcatggtggagcacaccacagatcttgttctcctcgattgggttgtaaaccttgatgctcactagaatctctagaatttgaaatggaccctggggctttgcaaatgacttagtgactatgagaagagagacaagtcttagagctggcttttggaaaggagaaacttgcagtcagaagcccagtgtcctatgtatgcaggaagctgtgctctagcaatagacagtgttggtaatggttgtgctgtacggcgtttggggtggccccatgttccatgctcagctgaccggatgccaactcagatgaaaagaattcatggctctgggcaccccgtgaggcagtgcttgcacatggctgggagtttgtcgggattgaaccaaacctagtgcttcaaagctcctgggacacctccagtgtccagcacacattctcatacatactgcccctaatttctaaagtccctaaagcactacattctgtaaccttgtttcttttactccattcccagattagttatgcaaaattcaactgcgttctacttttagaagtgtttagggtctttattttctgttgacccttcatctgaaagattctcttcccttgttaggtacaatcactgcccccccgcttttttttttgagatggggtcttgctatgttgcccaggctggtcttaaacgcctgggctcaagcaaccctcccgcctccctgctgagattacaggtgtaagccaccataccgcaacctcaatgacacctttctgatggtctttacacagtctgtgatgtctggtggcccccctgccctggactcaataattgatagattttcctagagtaacagtatgagagctccagccattccattaaaagtattagttctgctttgagctgaaaccagttgagcctaatggaagactggatgtctttcttcttcatccaagcaccctaatgactgtttagttacatccatagatgcagacaacataacacctgtgacttacttgaattgggataagccattccagaagtagcttatcctagacttggaaataagatttttttcaccactaacttccatgcttcagagatgacattcaaagccagattcccaagtgcctgatcatacctcccagtctcaggaagatatttgcttaccccttagaccaagaatcttaagatcttccccagctatgaagcctatcttggaatgggaaaccatgaaatttgtcttttaaaagaaagggaagaaatagccttacagcccctgttccctccaagtgcacatttagccttaaaatcctgggagtcgggagacaccgtggagtccttacatccacagtgtctgctggtcgtggtcagaaggcagtaatgcaagagtccttttgtgaagagtgtttctatgtagagatgtttatatttaagtagttcttttataaataaaagcatttctaatggcc

SEQ ID NO: 21962 - DNA, 5570 bp, Homo sapiens
  misc_feature (5209)..(5209): n is a, c, g, or t
  misc_feature (5217)..(5217): n is a, c, g, or t
tggatttcgaggtcggggataaaatccgaattctggcgaccttggaagatggctggctggaaggatccctgaagggcaggacaggcatctttccttaccggtttgtgaaattatgtcctgacacacgggtggaggaaaccatggctctgccccaggaaggcagccttgccaggatcccggaaacttctttggattgtttggagaacaccttaggagtagaggaacaaagacatgaaaccagtgaccatgaggccgaggagcctgactgcattatttctgaagcacccacttctcccctcggtcatctgacttcagagtatgacacagacagaaactcttatcaggacgaggacaccgcaggagggcccccgagaagcccaggcgtggagtgggaaatgcctcttgccacagactctcccacatctgaccctacagaagtagtcaatggtatttcctcccaacctcaggtcccttttcatcccaacttgcagaaaagccagtattattctacagtgggagggagccacccgcactcagaacagtaccccgaccttcttcccctagaagcaaggactagagactatgccagcctacctcccaaaagaatgtattcccagctaaaaactcttcagaagccagtgctccctctttacaggggctcttctgtttcagcttcaagggtagtcaaacccagacaatcaagtcctcagctccacaacctagcaagttatactaaaaagcaccacacgtccagtgtttactccatctcagagagattggagatgaagcctggtccgcaagcccaagggcttgttatggaagcagcaacacattcacagggagacggcagcactgacctggactcgaagctgacacaacagctgatcgagtttgagaagagcttggcagggcccggcacagagccagataaaattttacgccacttttcaatcatggactttaactctgagaaggatattgtccgaggttcctcaaagttaatcaccgagcaggagctgccggaaaggagaaaggccctaaggccaccgccacctcgtccctgtactccggtatccacttctccccatttgctggttgaccagaacctaaaacctgcaccacccttggtggtgcgaccctctcgcccagctcccctgcctccctcagcacagcagagaacgaatgcggtatcccccaagctcctatctcgacaccgtcctacctgtgagaccttagaaaaggagggccctggtcatatgggaaggagtctggaccagacctccccatgccccttagtgctggtgaggattgaggaaatggagcgggacttggatatgtacagtagagctcaagaagagctaaacctcatgctggaggagaagcaggatgaatcatcaagagcagagaccctcgaggatctcaagttctgtgaaagtaacattgaaagtttgaatatggaactccagcaactaagagaaatgacgctcctctcctcccagtcttcatcactggtggccccttctgggtctgtgtctgccgaaaatccagagcagaggatgctggagaagagagccaaggtcatagaagaacttcttcagacagaaagagactacattcgggatctggaaatgtgtattgagcggatcatggtacccatgcagcaggcacaggtaccaaacattgattttgagggactttttggaaatatgcagatggtgattaaggtctcgaagcaattattggctgctctggaaatcagcgatgctgtaggacctgtgtttcttggtcaccgggatgagcttgagggaacatacaagatttactgccagaatcatgatgaggccattgcgctgcttgaaatctacgagaaggatgagaagatccagaagcatcttcaggactccttggcagatctgaagagcctatacaacgaatggggatgcacaaattatattaacctgggctccttcctcatcaaaccagtacagagagtaatgcgttacccgctgttgctaatggagttgctgaattccaccccagaatcccacccagataaagtgcctttaaccaatgcagtccttgcggtcaaggaaatcaacgttaacattaatgaatataaacggcgaaaggacctggtcctcaagtaccgtaagggtgatgaagatagccttatggagaaaatttccaaactgaacatccactccatcatcaagaaatccaaccgagttagcagtcacctgaagcatctcactggctttgctcctcagataaaagatgaagtatttgaagaaacagaaaaaaacttccgaatgcaagaaagattgattaagtcttttatccgagacctgtctctctacctccaacacatccgggagtccgcatgtgtgaaagtggtggctgctgtgagcatgtgggatgtgtgcatggagagaggacaccgggacctggagcagtttgagagggtgcatcgctacatcagtgaccagctcttcacaaactttaaggagaggacagagcggcttgtcatctcccccttaaatcagttactgagcatgtttacagggccccataagctggtacagaaacgctttgacaagctcctggacttctataactgtacagaacgggcagaaaagctaaaggacaagaagaccctggaggagctgcagtcggcccggaacaactatgaggccctgaatgcacagctgctggatgagctgcccaagttccaccagtacgcccagggcctcttcaccaactgtgtccacggctatgctgaagcccactgtgactttgtgcaccaggctctggagcaattaaagccactgctttcgttactcaaagtggctggcagagagggaaaccttattgccatcttccacgaagagcacagcagagttctgcagcaactccaggtttttaccttcttcccggagtctcttccagctaccaagaagccatttgagaggaaaaccattgaccgccagtctgctcgaaagccactcctgggcctgccaagttacatgctacagtcagaagaactccgggcctccctcctggccaggtatccccctgaaaaactcttccaggcagaacggaacttcaatgctgctcaagacttggatgtctcacttttggaaggtgacctggtgggtgtgattaagaaaaaagaccccatgggcagccagaaccgctggctgattgacaatggagtcaccaaaggcttcgtgtacagctctttcctaaagccctacaatcctcgccgcagccactccgatgcctccgtgggtagccactcctccacagagtctgagcacggcagctcctcccccaggttcccacgccagaacagcggcagcaccctgaccttcaaccccagcagcatggctgtatcctttacctcggggtcttgccagaagcagcctcaagatgcatctcctccgccaaaagaatgtgaccaaggaactctcagtgcatccctaaatccgagtaattcagagagtagtccttccagatgcccttcagacccagactccacctcccagccaaggtcaggggactctgcagatgtagctagagatgtaaagcaacccactgccacgccgaggagctaccggaacttcaggcatccagaaatagttggctactccgtaccaggacgaaatgggcaaagtcaagacctcgtcaaaggatgtgcaagaacagcccaggctccggaagacagaagtacagagccagatggcagtgaggcagaaggcaaccaggtctattttgctgtctacaccttcaaggcacgaaacccaaatgagctgagcgtgtcagccaatcagaaactcaagatcctcgagtttaaagatgttacaggaaatacagagtggtggttagctgaggttaacgggaagaagggctacgttccctccaattatatccgcaaaaccgagtacacctgagcccacgttgcctgccacccagccttgctgcctttgctttcagtccgccgagggttctggcggcccaccgagagggcgcctgctcctgagacacaggccctgtctgcgttgcttaaccatggcatggtggagcacaccacagatcttgttctcctcgattgggttgtaaaccttgatgctcactagaatctctagaatttgaaatggaccctggggctttgcaaatgacttagtgactatgagaagagagacaagtcttagagctggcttttggaaaggagaaacttgcagtcagaagcccagtgtcctatgtatgcaggaagctgtgctctagcaatagacagtgttggtaatggttgtgctgtacggcgtttggggtggccccatgttccatgctcagctgaccggatgccaactcagatgaaaagaattcatggctctgggcaccccgtgaggcagtgcttgcacatggctgggagtttgtcgggattgaaccaaacctagtgcttcaaagctcctgggacacctccagtgtccagcacacattctcatacatactgcccctaatttctaaagtccctaaagcactacattctgtaaccttgtttcttttactccattcccagattagttatgcaaaattcaactgcgttctacttttagaagtgtttagggtctttattttctgttgacccttcatctgaaagattctcttcccttgttaggtacaatcactgcccccccgcttttttttttgagatggggtcttgctatgttgcccaggctggtcttaaacgcctgggctcaagcaaccctcccgcctccctgctgagattacaggtgtaagccaccataccgcaacctcaatgacacctttctgatggtctttacacagtctgtgatgtctggtggcccccctgccctggactcaataattgatagattttcctagagtaacagtatgagagctccagccattccattaaaagtattagttctgctttgagctgaaaccagttgagcctaatggaagactggatgtctttcttcttcatccaagcaccctaatgactgtttagttacatccatagatgcagacaacataacacctgtgacttacttgaattgggataagccattccagaagtagcttatcctagacttggaaataagatttttttcaccactaacttccatgcttcagagatgacattcaaagccagattcccaagtgcctgatccaaaaattataaaccccnccttctcnccccaaggtttcttacgaaggggggaaaaaagggaaaaaatatttgcttaccccttagaccaagaatcttaagatcttccccagctatgaagcctatcttggaatgggaaaccatgaaatttgtcttttaaaagaaagggaagaaatagccttacagcccctgttccctccaagtgcacatttagccttaaaatcctgggagtcgggagacaccgtggagtccttacatccacagtgtctgctggtcgtggtcagaaggcagtaatgcaagagtccttttgtgaagagtgtttctatgtagagatgtttatatttaagtagttcttttataaataaaagcatttctaatggcc

SEQ ID NO: 21963 - DNA, 2667 bp, Homo sapiens
tggatttcgaggtcggggataaaatccgaattctggcgaccttggaagatggctggctggaaggatccctgaagggcaggacaggcatctttccttaccggtttgtgaaattatgtcctgacacacgggtggaggaaaccatggctctgccccaggaaggcagccttgccaggatcccggaaacttctttggattgtttggagaacaccttaggagtagaggaacaaagacatgaaaccagtgaccatgaggccgaggagcctgactgcattatttctgaagcacccacttctcccctcggtcatctgacttcagagtatgacacagacagaaactcttatcaggacgaggacaccgcaggagggcccccgagaagcccaggcgtggagtgggaaatgcctcttgccacagactctcccacatctgaccctacagaagtagtcaatggtatttcctcccaacctcaggtcccttttcatcccaacttgcagaaaagccagtattattctacagtgggagggagccacccgcactcagaacagtaccccgaccttcttcccctagaagcaaggactagagactatgccagcctacctcccaaaagaatgtattcccagctaaaaactcttcagaagccagtgctccctctttacaggggctcttctgtttcagcttcaagggtagtcaaacccagacaatcaagtcctcagctccacaacctagcaagttatactaaaaagcaccacacgtccagtgtttactccatctcagagagattggagatgaagcctggtccgcaagcccaagggcttgttatggaagcagcaacacattcacagggagacggcagcactgacctggactcgaagctgacacaacagctgatcgagtttgagaagagcttggcagggcccggcacagagccagataaaattttacgccacttttcaatcatggactttaactctgagaaggatattgtccgaggttcctcaaagttaatcaccgagcaggagctgccggaaaggagaaaggccctaaggccaccgccacctcgtccctgtactccggtatccacttctccccatttgctggttgaccagaacctaaaacctgcaccacccttggtggtgcgaccctctcgcccagctcccctgcctccctcagcacagcagagaacgaatgcggtatcccccaagctcctatctcgacaccgtcctacctgtgagaccttagaaaaggagggccctggtcatatgggaaggagtctggaccagacctccccatgccccttagtgctggtgaggattgaggaaatggagcgggacttggatatgtacagtagagctcaagaagagctaaacctcatgctggaggagaagcaggatgaatcatcaagagcagagaccctcgaggatctcaagttctgtgaaagtaacattgaaagtttgaatatggaactccagcaactaagagaaatgacgctcctctcctcccagtcttcatcactggtggccccttctgggtctgtgtctgccgaaaatccagagcagaggatgctggagaagagagccaaggtcatagaagaacttcttcagacagaaagagactacattcgggatctggaaatgtgtattgagcggatcatggtacccatgcagcaggcacaggtaccaaacattgattttgagggactttttggaaatatgcagatggtgattaaggtctcgaagcaattattggctgctctggaaatcagcgatgctgtaggacctgtgtttcttggtcaccgggatgagcttgagggaacatacaagatttactgccagaatcatgatgaggccattgcgctgcttgaaatctacgagaaggatgagaagatccagaagcatcttcaggactccttggcagatctgaagagcctatacaacgaatggggatgcacaaattatattaacctgggctccttcctcatcaaaccagtacagagagtaatgcgttacccgctgttgctaatggagttgctgaattccaccccagaatcccacccagataaagtgcctttaaccaatgcagtccttgcggtcaaggaaatcaacgttaacattaatgaatataaacggcgaaaggacctggtcctcaagtaccgtaagggtgatgaagatagccttatggagaaaatttccaaactgaacatccactccatcatcaagaaatccaaccgagttagcagtcacctgaagcatctcactggctttgctcctcagataaaagatgaagtatttgaagaaacagaaaaaaacttccgaatgcaagaaagattgattaagtcttttatccgagacctgtctctctacctccaacacatccgggtgagcgtcaacatcactgtagttagattaacatacgatgtaattctgtcccctttcctgttcatcagtcatattgtttaatgaatgctgagtaatctggactcaaattactattatgccccatcatactttttgttgagatgccagtaggttatttaacagtaatagcatttagatcaatgttgtcacattcatttcaaagcagcccaactttttccaccctctttttggtcttcatcacccttcatcccacacacaccttatttttcttttacttattacagttcattttatc

SEQ ID NO: 21964 - DNA, 719 bp, Homo sapiens
gtttcaccatgttggccaggctggtcttaaattcccaacttcaggtgatccacccatctcagcctcccagagtgctgggattacaggcatgagccaccgtgcccggccaaattggtgttttcttttaatcatccctattatggtagccatcatccgtatgtacctatttaaatttattttagttaaaattaaataagattaaaaattcagttcctctgtctcactggccatatttcaggggctcagtagccacatgtgggcatgtggatgtggaaccctccccaacaccgcacgaagctgttggatggcattgctcccagcaatttcccattttctctctctccctcacacaggtctattttgctgtctacaccttcaaggcacgaaacccaaatgagctgagcgtgtcagccaatcagaaactcaagatcctcgagtttaaagatgttacaggaaatacagagtggtggttagctgaggttaacgggaagaagggctacgttccctccaattatatccgcaaaaccgagtacacctgagcccacgttgcctgccacccagccttgctgcctttgctttcagtccgccgagggttctggcggcccaccgagagggcgcctgctcctgagacacaggccctgtctgcgttgcttaaccatggcatggtggagcacaccacagatcttgttctcctcgattgggttgtaaaccttgatgct

SEQ ID NO: 21965 - DNA, 4180 bp, Homo sapiens
ggggaaatgccgaccctattcaaaggagtttggggggttgtggagcattccagagctctgggaagattctgtcccgcctgcttaccctcaggcccacacctccacacacagccagctctgggcactgcagaaatgacgctcctctcctcccagtcttcatcactggtggccccttctgggtctgtgtctgccgaaaatccagagcagaggatgctggagaagagagccaaggtcatagaagaacttcttcagacagaaagagactacattcgggatctggaaatgtgtattgagcggatcatggtacccatgcagcaggcacaggtaccaaacattgattttgagggactttttggaaatatgcagatggtgattaaggtctcgaagcaattattggctgctctggaaatcagcgatgctgtaggacctgtgtttcttggtcaccgggatgagcttgagggaacatacaagatttactgccagaatcatgatgaggccattgcgctgcttgaaatctacgagaaggatgagaagatccagaagcatcttcaggactccttggcagatctgaagagcctatacaacgaatggggatgcacaaattatattaacctgggctccttcctcatcaaaccagtacagagagtaatgcgttacccgctgttgctaatggagttgctgaattccaccccagaatcccacccagataaagtgcctttaaccaatgcagtccttgcggtcaaggaaatcaacgttaacattaatgaatataaacggcgaaaggacctggtcctcaagtaccgtaagggtgatgaagatagccttatggagaaaatttccaaactgaacatccactccatcatcaagaaatccaaccgagttagcagtcacctgaagcatctcactggctttgctcctcagataaaagatgaagtatttgaagaaacagaaaaaaacttccgaatgcaagaaagattgattaagtcttttatccgagacctgtctctctacctccaacacatccgggagtccgcatgtgtgaaagtggtggctgctgtgagcatgtgggatgtgtgcatggagagaggacaccgggacctggagcagtttgagagggtgcatcgctacatcagtgaccagctcttcacaaactttaaggagaggacagagcggcttgtcatctcccccttaaatcagttactgagcatgtttacagggccccataagctggtacagaaacgctttgacaagctcctggacttctataactgtacagaacgggcagaaaagctaaaggacaagaagaccctggaggagctgcagtcggcccggaacaactatgaggccctgaatgcacagctgctggatgagctgcccaagttccaccagtacgcccagggcctcttcaccaactgtgtccacggctatgctgaagcccactgtgactttgtgcaccaggctctggagcaattaaagccactgctttcgttactcaaagtggctggcagagagggaaaccttattgccatcttccacgaagagcacagcagagttctgcagcaactccaggtttttaccttcttcccggagtctcttccagctaccaagaagccatttgagaggaaaaccattgaccgccagtctgctcgaaagccactcctgggcctgccaagttacatgctacagtcagaagaactccgggcctccctcctggccaggtatccccctgaaaaactcttccaggcagaacggaacttcaatgctgctcaagacttggatgtctcacttttggaaggtgacctggtgggtgtgattaagaaaaaagaccccatgggcagccagaaccgctggctgattgacaatggagtcaccaaaggcttcgtgtacagctctttcctaaagccctacaatcctcgccgcagccactccgatgcctccgtgggtagccactcctccacagagtctgagcacggcagctcctcccccaggttcccacgccagaacagcggcagcaccctgaccttcaaccccagcagcatggctgtatcctttacctcggggtcttgccagaagcagcctcaagatgcatctcctccgccaaaagaatgtgaccaaggaactctcagtgcatccctaaatccgagtaattcagagagtagtccttccagatgcccttcagacccagactccacctcccagccaaggtcaggggactctgcagatgtagctagagatgtaaagcaacccactgccacgccgaggagctaccggaacttcaggcatccagaaatagttggctactccgtaccaggacgaaatgggcaaagtcaagacctcgtcaaaggatgtgcaagaacagcccaggctccggaagacagaagtacagagccagatggcagtgaggcagaaggcaaccaggtctattttgctgtctacaccttcaaggcacgaaacccaaatgagctgagcgtgtcagccaatcagaaactcaagatcctcgagtttaaagatgttacaggaaatacagagtggtggttagctgaggttaacgggaagaagggctacgttccctccaattatatccgcaaaaccgagtacacctgagcccacgttgcctgccacccagccttgctgcctttgctttcagtccgccgagggttctggcggcccaccgagagggcgcctgctcctgagacacaggccctgtctgcgttgcttaaccatggcatggtggagcacaccacagatcttgttctcctcgattgggttgtaaaccttgatgctcactagaatctctagaatttgaaatggaccctggggctttgcaaatgacttagtgactatgagaagagagacaagtcttagagctggcttttggaaaggagaaacttgcagtcagaagcccagtgtcctatgtatgcaggaagctgtgctctagcaatagacagtgttggtaatggttgtgctgtacggcgtttggggtggccccatgttccatgctcagctgaccggatgccaactcagatgaaaagaattcatggctctgggcaccccgtgaggcagtgcttgcacatggctgggagtttgtcgggattgaaccaaacctagtgcttcaaagctcctgggacacctccagtgtccagcacacattctcatacatactgcccctaatttctaaagtccctaaagcactacattctgtaaccttgtttcttttactccattcccagattagttatgcaaaattcaactgcgttctacttttagaagtgtttagggtctttattttctgttgacccttcatctgaaagattctcttcccttgttaggtacaatcactgcccccccgcttttttttttgagatggggtcttgctatgttgcccaggctggtcttaaacgcctgggctcaagcaaccctcccgcctccctgctgagattacaggtgtaagccaccataccgcaacctcaatgacacctttctgatggtctttacacagtctgtgatgtctggtggcccccctgccctggactcaataattgatagattttcctagagtaacagtatgagagctccagccattccattaaaagtattagttctgctttgagctgaaaccagttgagcctaatggaagactggatgtctttcttcttcatccaagcaccctaatgactgtttagttacatccatagatgcagacaacataacacctgtgacttacttgaattgggataagccattccagaagtagcttatcctagacttggaaataagatttttttcaccactaacttccatgcttcagagatgacattcaaagccagattcccaagtgcctgatcatacctcccagtctcaggaagatatttgcttaccccttagaccaagaatcttaagatcttccccagctatgaagcctatcttggaatgggaaaccatgaaatttgtcttttaaaagaaagggaagaaatagccttacagcccctgttccctccaagtgcacatttagccttaaaatcctgggagtcgggagacaccgtggagtccttacatccacagtgtctgctggtcgtggtcagaaggcagtaatgcaagagtccttttgtgaagagtgtttctatgtagagatgtttatatttaagtagttcttttataaataaaagcatttctaatggcc

SEQ ID NO: 21966 - DNA, 4678 bp, Homo sapiens
cgagctcggtaccccaacgatggtcctccgctgtgctgagggagtcaggggagcttggcagggcccggcacagagccagataaaattttacgccacttttcaatcatggactttaactctgagaaggatattgtccgaggttcctcaaagttaatcaccgagcaggagctgccggaaaggagaaaggccctaaggccaccgccacctcgtccctgtactccggtatccacttctccccatttgctggttgaccagaacctaaaacctgcaccacccttggtggtgcgaccctctcgcccagctcccctgcctccctcagcacagcagagaacgaatgcggtatcccccaagctcctatctcgacaccgtcctacctgtgagaccttagaaaaggagggccctggtcatatgggaaggagtctggaccagacctccccatgccccttagtgctggtgaggattgaggaaatggagcgggacttggatatgtacagtagagctcaagaagagctaaacctcatgctggaggagaagcaggatgaatcatcaagagcagagaccctcgaggatctcaagttctgtgaaagtaacattgaaagtttgaatatggaactccagcaactaagagaaatgacgctcctctcctcccagtcttcatcactggtggccccttctgggtctgtgtctgccgaaaatccagagcagaggatgctggagaagagagccaaggtcatagaagaacttcttcagacagaaagagactacattcgggatctggaaatgtgtattgagcggatcatggtacccatgcagcaggcacaggtaccaaacattgattttgagggactttttggaaatatgcagatggtgattaaggtctcgaagcaattattggctgctctggaaatcagcgatgctgtaggacctgtgtttcttggtcaccgggatgagcttgagggaacatacaagatttactgccagaatcatgatgaggccattgcgctgcttgaaatctacgagaaggatgagaagatccagaagcatcttcaggactccttggcagatctgaagagcctatacaacgaatggggatgcacaaattatattaacctgggctccttcctcatcaaaccagtacagagagtaatgcgttacccgctgttgctaatggagttgctgaattccaccccagaatcccacccagataaagtgcctttaaccaatgcagtccttgcggtcaaggaaatcaacgttaacattaatgaatataaacggcgaaaggacctggtcctcaagtaccgtaagggtgatgaagatagccttatggagaaaatttccaaactgaacatccactccatcatcaagaaatccaaccgagttagcagtcacctgaagcatctcactggctttgctcctcagataaaagatgaagtatttgaagaaacagaaaaaaacttccgaatgcaagaaagattgattaagtcttttatccgagacctgtctctctacctccaacacatccgggagtccgcatgtgtgaaagtggtggctgctgtgagcatgtgggatgtgtgcatggagagaggacaccgggacctggagcagtttgagagggtgcatcgctacatcagtgaccagctcttcacaaactttaaggagaggacagagcggcttgtcatctcccccttaaatcagttactgagcatgtttacagggccccataagctggtacagaaacgctttgacaagctcctggacttctataactgtacagaacgggcagaaaagctaaaggacaagaagaccctggaggagctgcagtcggcccggaacaactatgaggccctgaatgcacagctgctggatgagctgcccaagttccaccagtacgcccagggcctcttcaccaactgtgtccacggctatgctgaagcccactgtgactttgtgcaccaggctctggagcaattaaagccactgctttcgttactcaaagtggctggcagagagggaaaccttattgccatcttccacgaagagcacagcagagttctgcagcaactccaggtttttaccttcttcccggagtctcttccagctaccaagaagccatttgagaggaaaaccattgaccgccagtctgctcgaaagccactcctgggcctgccaagttacatgctacagtcagaagaactccgggcctccctcctggccaggtatccccctgaaaaactcttccaggcagaacggaacttcaatgctgctcaagacttggatgtctcacttttggaaggtgacctggtgggtgtgattaagaaaaaagaccccatgggcagccagaaccgctggctgattgacaatggagtcaccaaaggcttcgtgtacagctctttcctaaagccctacaatcctcgccgcagccactccgatgcctccgtgggtagccactcctccacagagtctgagcacggcagctcctcccccaggttcccacgccagaacagcggcagcaccctgaccttcaaccccagcagcatggctgtatcctttacctcggggtcttgccagaagcagcctcaagatgcatctcctccgccaaaagaatgtgaccaaggaactctcagtgcatccctaaatccgagtaattcagagagtagtccttccagatgcccttcagacccagactccacctcccagccaaggtcaggggactctgcagatgtagctagagatgtaaagcaacccactgccacgccgaggagctaccggaacttcaggcatccagaaatagttggctactccgtaccaggacgaaatgggcaaagtcaagacctcgtcaaaggatgtgcaagaacagcccaggctccggaagacagaagtacagagccagatggcagtgaggcagaaggcaaccaggtctattttgctgtctacaccttcaaggcacgaaacccaaatgagctgagcgtgtcagccaatcagaaactcaagatcctcgagtttaaagatgttacaggaaatacagagtggtggttagctgaggttaacgggaagaagggctacgttccctccaattatatccgcaaaaccgagtacacctgagcccacgttgcctgccacccagccttgctgcctttgctttcagtccgccgagggttctggcggcccaccgagagggcgcctgctcctgagacacaggccctgtctgcgttgcttaaccatggcatggtggagcacaccacagatcttgttctcctcgattgggttgtaaaccttgatgctcactagaatctctagaatttgaaatggaccctggggctttgcaaatgacttagtgactatgagaagagagacaagtcttagagctggcttttggaaaggagaaacttgcagtcagaagcccagtgtcctatgtatgcaggaagctgtgctctagcaatagacagtgttggtaatggttgtgctgtacggcgtttggggtggccccatgttccatgctcagctgaccggatgccaactcagatgaaaagaattcatggctctgggcaccccgtgaggcagtgcttgcacatggctgggagtttgtcgggattgaaccaaacctagtgcttcaaagctcctgggacacctccagtgtccagcacacattctcatacatactgcccctaatttctaaagtccctaaagcactacattctgtaaccttgtttcttttactccattcccagattagttatgcaaaattcaactgcgttctacttttagaagtgtttagggtctttattttctgttgacccttcatctgaaagattctcttcccttgttaggtacaatcactgcccccccgcttttttttttgagatggggtcttgctatgttgcccaggctggtcttaaacgcctgggctcaagcaaccctcccgcctccctgctgagattacaggtgtaagccaccataccgcaacctcaatgacacctttctgatggtctttacacagtctgtgatgtctggtggcccccctgccctggactcaataattgatagattttcctagagtaacagtatgagagctccagccattccattaaaagtattagttctgctttgagctgaaaccagttgagcctaatggaagactggatgtctttcttcttcatccaagcaccctaatgactgtttagttacatccatagatgcagacaacataacacctgtgacttacttgaattgggataagccattccagaagtagcttatcctagacttggaaataagatttttttcaccactaacttccatgcttcagagatgacattcaaagccagattcccaagtgcctgatcatacctcccagtctcaggaagatatttgcttaccccttagaccaagaatcttaagatcttccccagctatgaagcctatcttggaatgggaaaccatgaaatttgtcttttaaaagaaagggaagaaatagccttacagcccctgttccctccaagtgcacatttagccttaaaatcctgggagtcgggagacaccgtggagtccttacatccacagtgtctgctggtcgtggtcagaaggcagtaatgcaagagtccttttgtgaagagtgtttctatgtagagatgtttatatttaagtagttcttttataaataaaagcatttctaatggcc

SEQ ID NO: 21967 - DNA, 5524 bp, Homo sapiens
tggatttcgaggtcggggataaaatccgaattctggcgaccttggaagatggctggctggaaggatccctgaagggcaggacaggcatctttccttaccggtttgtgaaattatgtcctgacacacgggtggaggaaaccatggctctgccccaggaaggcagccttgccaggatcccggaaacttctttggattgtttggagaacaccttaggagtagaggaacaaagacatgaaaccagtgaccatgaggccgaggagcctgactgcattatttctgaagcacccacttctcccctcggtcatctgacttcagagtatgacacagacagaaactcttatcaggacgaggacaccgcaggagggcccccgagaagcccaggcgtggagtgggaaatgcctcttgccacagactctcccacatctgaccctacagaagtagtcaatggtatttcctcccaacctcaggtcccttttcatcccaacttgcagaaaagccagtattattctacagtgggagggagccacccgcactcagaacagtaccccgaccttcttcccctagaagcaaggactagagactatgccagcctacctcccaaaagaatgtattcccagctaaaaactcttcagaagccagtgctccctctttacaggggctcttctgtttcagcttcaagggtagtcaaacccagacaatcaagtcctcagctccacaacctagcaagttatactaaaaagcaccacacgtccagtgtttactccatctcagagagattggagatgaagcctggtccgcaagcccaagggcttgttatggaagcagcaacacattcacagggagacggcagcactgacctggactcgaagctgacacaacagctgatcgagtttgagaagagcttggcagggcccggcacagagccagataaaattttacgccacttttcaatcatggactttaactctgagaaggatattgtccgaggttcctcaaagttaatcaccgagcaggagctgccggaaaggagaaaggccctaaggccaccgccacctcgtccctgtactccggtatccacttctccccatttgctggttgaccagaacctaaaacctgcaccacccttggtggtgcgaccctctcgcccagctcccctgcctccctcagcacagcagagaacgaatgcggtatcccccaagctcctatctcgacaccgtcctacctgtgagaccttagaaaaggagggccctggtcatatgggaaggagtctggaccagacctccccatgccccttagtgctggtgaggattgaggaaatggagcgggacttggatatgtacagtagagctcaagaagagctaaacctcatgctggaggagaagcaggatgaatcatcaagagcagagaccctcgaggatctcaagttctgtgaaagtaacattgaaagtttgaatatggaactccagcaactaagagaaatgacgctcctctcctcccagtcttcatcactggtggccccttctgggtctgtgtctgccgaaaatccagagcagaggatgctggagaagagagccaaggtcatagaagaacttcttcagacagaaagagactacattcgggatctggaaatgtgtattgagcggatcatggtacccatgcagcaggcacaggtaccaaacattgattttgagggactttttggaaatatgcagatggtgattaaggtctcgaagcaattattggctgctctggaaatcagcgatgctgtaggacctgtgtttcttggtcaccgggatgagcttgagggaacatacaagatttactgccagaatcatgatgaggccattgcgctgcttgaaatctacgagaaggatgagaagatccagaagcatcttcaggactccttggcagatctgaagagcctatacaacgaatggggatgcacaaattatattaacctgggctccttcctcatcaaaccagtacagagagtaatgcgttacccgctgttgctaatggagttgctgaattccaccccagaatcccacccagataaagtgcctttaaccaatgcagtccttgcggtcaaggaaatcaacgttaacattaatgaatataaacggcgaaaggacctggtcctcaagtaccgtaagggtgatgaagatagccttatggagaaaatttccaaactgaacatccactccatcatcaagaaatccaaccgagttagcagtcacctgaagcatctcactggctttgctcctcagataaaagatgaagtatttgaagaaacagaaaaaaacttccgaatgcaagaaagattgattaagtcttttatccgagacctgtctctctacctccaacacatccgggagtccgcatgtgtgaaagtggtggctgctgtgagcatgtgggatgtgtgcatggagagaggacaccgggacctggagcagtttgagagggtgcatcgctacatcagtgaccagctcttcacaaactttaaggagaggacagagcggcttgtcatctcccccttaaatcagttactgagcatgtttacagggccccataagctggtacagaaacgctttgacaagctcctggacttctataactgtacagaacgggcagaaaagctaaaggacaagaagaccctggaggagctgcagtcggcccggaacaactatgaggccctgaatgcacagctgctggatgagctgcccaagttccaccagtacgcccagggcctcttcaccaactgtgtccacggctatgctgaagcccactgtgactttgtgcaccaggctctggagcaattaaagccactgctttcgttactcaaagtggctggcagagagggaaaccttattgccatcttccacgaagagcacagcagagttctgcagcaactccaggtttttaccttcttcccggagtctcttccagctaccaagaagccatttgagaggaaaaccattgaccgccagtctgctcgaaagccactcctgggcctgccaagttacatgctacagtcagaagaactccgggcctccctcctggccaggtatccccctgaaaaactcttccaggcagaacggaacttcaatgctgctcaagacttggatgtctcacttttggaaggtgacctggtgggtgtgattaagaaaaaagaccccatgggcagccagaaccgctggctgattgacaatggagtcaccaaaggcttcgtgtacagctctttcctaaagccctacaatcctcgccgcagccactccgatgcctccgtgggtagccactcctccacagagtctgagcacggcagctcctcccccaggttcccacgccagaacagcggcagcaccctgaccttcaaccccagcagcatggctgtatcctttacctcggggtcttgccagaagcagcctcaagatgcatctcctccgccaaaagaatgtgaccaaggaactctcagtgcatccctaaatccgagtaattcagagagtagtccttccagatgcccttcagacccagactccacctcccagccaaggtcaggggactctgcagatgtagctagagatgtaaagcaacccactgccacgccgaggagctaccggaacttcaggcatccagaaatagttggctactccgtaccaggacgaaatgggcaaagtcaagacctcgtcaaaggatgtgcaagaacagcccaggctccggaagacagaagtacagagccagatggcagtgaggcagaaggcaaccaggtctattttgctgtctacaccttcaaggcacgaaacccaaatgagctgagcgtgtcagccaatcagaaactcaagatcctcgagtttaaagatgttacaggaaatacagagtggtggttagctgaggttaacgggaagaagggctacgttccctccaattatatccgcaaaaccgagtacacctgagcccacgttgcctgccacccagccttgctgcctttgctttcagtccgccgagggttctggcggcccaccgagagggcgcctgctcctgagacacaggccctgtctgcgttgcttaaccatggcatggtggagcacaccacagatcttgttctcctcgattgggttgtaaaccttgatgctcactagaatctctagaatttgaaatggaccctggggctttgcaaatgacttagtgactatgagaagagagacaagtcttagagctggcttttggaaaggagaaacttgcagtcagaagcccagtgtcctatgtatgcaggaagctgtgctctagcaatagacagtgttggtaatggttgtgctgtacggcgtttggggtggccccatgttccatgctcagctgaccggatgccaactcagatgaaaagaattcatggctctgggcaccccgtgaggcagtgcttgcacatggctgggagtttgtcgggattgaaccaaacctagtgcttcaaagctcctgggacacctccagtgtccagcacacattctcatacatactgcccctaatttctaaagtccctaaagcactacattctgtaaccttgtttcttttactccattcccagattagttatgcaaaattcaactgcgttctacttttagaagtgtttagggtctttattttctgttgacccttcatctgaaagattctcttcccttgttaggtacaatcactgcccccccgcttttttttttgagatggggtcttgctatgttgcccaggctggtcttaaacgcctgggctcaagcaaccctcccgcctccctgctgagattacaggtgtaagccaccataccgcaacctcaatgacacctttctgatggtctttacacagtctgtgatgtctggtggcccccctgccctggactcaataattgatagattttcctagagtaacagtatgagagctccagccattccattaaaagtattagttctgctttgagctgaaaccagttgagcctaatggaagactggatgtctttcttcttcatccaagcaccctaatgactgtttagttacatccatagatgcagacaacataacacctgtgacttacttgaattgggataagccattccagaagtagcttatcctagacttggaaataagatttttttcaccactaacttccatgcttcagagatgacattcaaagccagattcccaagtgcctgatcatacctcccagtctcaggaagatatttgcttaccccttagaccaagaatcttaagatcttccccagctatgaagcctatcttggaatgggaaaccatgaaatttgtcttttaaaagaaagggaagaaatagccttacagcccctgttccctccaagtgcacatttagccttaaaatcctgggagtcggcaccccccgccgagtccgtgcatgtacagtgggttggggtcgagttgaaaagacacagatgcaagagttcccctttcagtagtgctcccatgtactccaggaccctcccccgttgttaaaaattaattgctggcaagtgtgaaaa

SEQ ID NO: 21968 - DNA, 4629 bp, Homo sapiens
tggatttcgaggtcggggataaaatccgaattctggcgaccttggaagatggctggctggaaggatccctgaagggcaggacaggcatctttccttaccggtttgtgaaattatgtcctgacacacgggtggaggaaaccatggctctgccccaggaaggcagccttgccaggatcccggaaacttctttggattgtttggagaacaccttaggagtagaggaacaaagacatgaaaccagtgaccatgaggccgaggagcctgactgcattatttctgaagcacccacttctcccctcggtcatctgacttcagagtatgacacagacagaaactcttatcaggacgaggacaccgcaggagggcccccgagaagcccaggcgtggagtgggaaatgcctcttgccacagactctcccacatctgaccctacagaagtagtcaatggtatttcctcccaacctcaggtcccttttcatcccaacttgcagaaaagccagtattattctacagtgggagggagccacccgcactcagaacagtaccccgaccttcttcccctagaagcaaggactagagactatgccagcctacctcccaaaagaatgtattcccagctaaaaactcttcagaagccagtgctccctctttacaggggctcttctgtttcagcttcaagggtagtcaaacccagacaatcaagtcctcagctccacaacctagcaagttatactaaaaagcaccacacgtccagtgtttactccatctcagagagattggagatgaagcctggtccgcaagcccaagggcttgttatggaagcagcaacacattcacagggagacggcagcactgacctggactcgaagctgacacaacagctgatcgagtttgagaagagcttggcagggcccggcacagagccagataaaattttacgccacttttcaatcatggactttaactctgagaaggatattgtccgaggttcctcaaagttaatcaccgagcaggagctgccggaaaggagaaaggccctaaggccaccgccacctcgtccctgtactccggtatccacttctccccatttgctggttgaccagaacctaaaacctgcaccacccttggtggtgcgaccctctcgcccagctcccctgcctccctcagcacagcagagaacgaatgcggtatcccccaagctcctatctcgacaccgtcctacctgtgagaccttagaaaaggagggccctggtcatatgggaaggagtctggaccagacctccccatgccccttagtgctggtgaggattgaggaaatggagcgggacttggatatgtacagtagagctcaagaagagctaaacctcatgctggaggagaagcaggatgaatcatcaagagcagagaccctcgaggatctcaagttctgtgaaagtaacattgaaagtttgaatatggaactccagcaactaagagaaatgacgctcctctcctcccagtcttcatcactggtggccccttctgggtctgtgtctgccgaaaatccagagcagaggatgctggagaagagagccaaggtcatagaagaacttcttcagacagaaagagactacattcgggatctggaaatgtgtattgagcggatcatggtacccatgcagcaggcacaggtaccaaacattgattttgagggactttttggaaatatgcagatggtgattaaggtctcgaagcaattattggctgctctggaaatcagcgatgctgtaggacctgtgtttcttggtcaccgggatgagcttgagggaacatacaagatttactgccagaatcatgatgaggccattgcgctgcttgaaatctacgagaaggatgagaagatccagaagcatcttcaggactccttggcagatctgaagagcctatacaacgaatggggatgcacaaattatattaacctgggctccttcctcatcaaaccagtacagagagtaatgcgttacccgctgttgctaatggagttgctgaattccaccccagaatcccacccagataaagtgcctttaaccaatgcagtccttgcggtcaaggaaatcaacgttaacattaatgaatataaacggcgaaaggacctggtcctcaagtaccgtaagggtgatgaagatagccttatggagaaaatttccaaactgaacatccactccatcatcaagaaatccaaccgagttagcagtcacctgaagcatctcactggctttgctcctcagataaaagatgaagtatttgaagaaacagaaaaaaacttccgaatgcaagaaagattgattaagtcttttatccgagacctgtctctctacctccaacacatccgggagtccgcatgtgtgaaagtggtggctgctgtgagcatgtgggatgtgtgcatggagagaggacaccgggacctggagcagtttgagagggtgcatcgctacatcagtgaccagctcttcacaaactttaaggagaggacagagcggcttgtcatctcccccttaaatcagttactgagcatgtttacagggccccataagctggtacagaaacgctttgacaagctcctggacttctataactgtacagaacgggcagaaaagctaaaggacaagaagaccctggaggagctgcagtcggcccggaacaactatgaggccctgaatgcacagctgctggatgagctgcccaagttccaccagtacgcccagggcctcttcaccaactgtgtccacggctatgctgaagcccactgtgactttgtgcaccaggctctggagcaattaaagccactgctttcgttactcaaagtggctggcagagagggaaaccttattgccatcttccacgaagagcacagcagagttctgcagcaactccaggtttttaccttcttcccggagtctcttccagctaccaagaagccatttgagaggaaaaccattgaccgccagtctgctcgaaagccactcctgggcctgccaagttacatgctacagtcagaagaactccgggcctccctcctggccaggtatccccctgaaaaactcttccaggcagaacggaacttcaatgctgctcaagacttggatgtctcacttttggaaggtgacctggtgggtgtgattaagaaaaaagaccccatgggcagccagaaccgctggctgattgacaatggagtcaccaaaggcttcgtgtacagctctttcctaaagccctacaatcctcgccgcagccactccgatgcctccgtgggtagccactcctccacagagtctgagcacggcagctcctcccccaggttcccacgccagaacagcggcagcaccctgaccttcaaccccagcagcatggctgtatcctttacctcggggtcttgccagaagcagcctcaagatgcatctcctccgccaaaagaatgtgaccaaggaactctcagtgcatccctaaatccgagtaattcagagagtagtccttccagatgcccttcagacccagactccacctcccagccaaggtcaggggactctgcagatgtagctagagatgtaaagcaacccactgccacgccgaggagctaccggaacttcaggcatccagaaatagttggctactccgtaccaggacgaaatgggcaaagtcaagacctcgtcaaaggatgtgcaagaacagcccaggctccggaagacagaagtacagagccagatggcagtgaggcagaaggcaaccaggtctattttgctgtctacaccttcaaggcacgaaacccaaatgagctgagcgtgtcagccaatcagaaactcaagatcctcgagtttaaagatgttacaggaaatacagagtggtggttagctgaggttaacgggaagaagggctacgttccctccaattatatccgcaaaaccgagtacacctgagcccacgttgcctgccacccagccttgctgcctttgctttcagtccgccgagggttctggcggcccaccgagagggcgcctgctcctgagacacaggccctgtctgcgttgcttaaccatggcatggtggagcacaccacagatcttgttctcctcgattgggttgtaaaccttgatgctcactagaatctctagaatttgaaatggaccctggggctttgcaaatgacttagtgactatgagaagagagacaagtcttagagctggcttttggaaaggagaaacttgcagtcagaagcccagtgtcctatgtatgcaggaagctgtgctctagcaatagacagtgttggtaatggttgtgctgtacggcgtttggggtggccccatgttccatgctcagctgaccggatgccaactcagatgaaaagaattcatggctctgggcaccccgtgaggcagtgcttgcacatggctgggagtttgtcgggattgaaccaaacctagtgcttcaaagctcctgggacacctccagtgtccagcacacattctcatacatactgcccctaatttctaaagtccctaaagcactacattctgtaaccttgtttcttttactccattcccagattagttatgcaaaattcaactgggaatggagtaaaaaaaaccggcgcggccg

SEQ ID NO: 21969 - DNA, 1832 bp, Homo sapiens
tggatttcgaggtcggggataaaatccgaattctggcgaccttggaagatggctggctggaaggatccctgaagggcaggacaggcatctttccttaccggtttgtgaaattatgtcctgacacacgggtggaggaaaccatggctctgccccaggaaggcagccttgccaggatcccggaaacttctttggattgtttggagaacaccttaggagtagaggaacaaagacatgaaaccagtgaccatgaggccgaggagcctgactgcattatttctgaagcacccacttctcccctcggtcatctgacttcagagtatgacacagacagaaactcttatcaggacgaggacaccgcaggagggcccccgagaagcccaggcgtggagtgggaaatgcctcttgccacagactctcccacatctgaccctacagaagtagtcaatggtatttcctcccaacctcaggtcccttttcatcccaacttgcagaaaagccagtattattctacagtgggagggagccacccgcactcagaacagtaccccgaccttcttcccctagaagcaaggactagagactatgccagcctacctcccaaaagaatgtattcccagctaaaaactcttcagaagccagtgctccctctttacaggggctcttctgtttcagcttcaagggtagtcaaacccagacaatcaagtcctcagctccacaacctagcaagttatactaaaaagcaccacacgtccagtgtttactccatctcagagagattggagatgaagcctggtccgcaagcccaagggcttgttatggaagcagcaacacattcacagggagacggcagcactgacctggactcgaagctgacacaacagctgatcgagtttgagaagagcttggcagggcccggcacagagccagataaaattttacgccacttttcaatcatggactttaactctgagaaggatattgtccgaggttcctcaaagttaatcaccgagcaggagctgccggaaaggagaaaggccctaaggccaccgccacctcgtccctgtactccggtatccacttctccccatttgctggttgaccagaacctaaaacctgcaccacccttggtggtgcgaccctctcgcccagctcccctgcctccctcagcacagcagagaacgaatgcggtatcccccaagctcctatctcgacaccgtcctacctgtgagaccttagaaaaggagggccctggtcatatgggaaggagtctggaccagacctccccatgccccttagtgctggtgaggattgaggaaatggagcgggacttggatatgtacagtagagctcaagaagagctaaacctcatgctggaggagaagcaggatgaatcatcaagagcagagaccctcgaggatctcaagttctgtgaaagtaacattgaaagtttgaatatggaactccagcaactaagagaaatgacgctcctctcctcccagtcttcatcactggtggccccttctgggtctgtgtctgccgaaaatccagagcagaggatgctggagaagagagccaaggtcatagaagaacttcttcagacagaaagagactacattcgggatctggaaatgtgtattgagcggatcatggtacccatgcagcaggcacaggtgggaactgggagacagagttagtttgaccttgaatatggtcctccaggccagaagcattaggatataggagctttcgccacagatttattggatttgaaatagaaactgtgactgtgagtgctgctgctcttaatcaagggcctcaacatacgtgtgtca

SEQ ID NO: 21970 - DNA, 779 bp, Homo sapiens
catgggcacagtgaacataatgaactattcattcaagaaacttgactgtgaaaggaaggagggagagaaggtacagtagttagagaggagcaggggatcatggcaaagttttttgattctgtttaagagttgtttactgagtccctgcttatgtctctttattatctttctggctacccacgtttgctcccagttagaatcctggactctaaccatgggatggaaggtggtgttggcacaggccactgctctttagcagcctaaaggattatattctcatcaggtagaaactttgtggtcactgaagtccttacatgccccatgaagacttgtgtgtggatttgctgcctgcactgagctaacacgttcctgtcctgaaggcttcttccacagtgagctcatcacagcaccctgtggaatggtgcttctcagatgaggctgcacataagaatcacttagtgagctttcaagaaaaatgttccttcatgatggttctttctaggagtggggtgcaggagtctgggcttttgtcaagctcctcaggagatttgtttttttggacagcaggtttgaaaacgctagtcaattgcatgtctttattgtctgtgcttttctgtcagtgaaggttggttgtctttttgaatcatgctagatctttttccatttttgttacctaagatcacacctcctctaagatgaacataagtcattatatagttgtctgttttgtatataaaatatgtgcttaataaaacaaacaatggaaacaaaaaaaaaaa

SEQ ID NO: 21971 - DNA, 726 bp, Homo sapiens
gggagaaggaaatgtcaaggaagaagaaattgtgacttaaaattcaatttgggttctatattactgtgccatcaaaaatacttaagatgatccttttaggtgttcacaaatgtttgactggattcaatagcagtggtaattctttgaagaaatacttaattgaggccaggcacagtggctcctgcctgtaatcccagtacttcgggaagctgagacaggaggattacttgagaccaggagctcatgaccagcctgggcaacataggaagacctccgtctctacaaaaaaattaaaaaattagccaggcatggtgatacatgcttgtagtcccccagctacttgggaagcttaggcgggaggattgtttgagcccaggagtttaaggctgcattgagctgtgatcatgccactgcactccagcctgggtaacagagtgagactctcaaaagaaatacttggcgggggtggtggctctgtaatcctagcactttgggaggccgaggcgggcggatcacgaggtcaggagatcgagaccatcttggctaacatggtgaaaacctgtctctactaaaaattcagaaacaaaattagccaggtgtggtggcaggcgccggtagtcccagctatgccggaggctgaggcaggagaatggcgtgaacccgggaggcggagcttgctgggagccaagatcgtgccactgcactccatcctgggcaacagagtga

SEQ ID NO: 21972 - DNA, 486 bp, Homo sapiens
aggcgtgggttgtttcctaagtgtgggtgcaaagtaatgggcgctaggcgctggcgtcggtattcagcccagctgcacatctgaggcttggcagcttctcatagcgccttatcctctgccatacagcatccatctggagccctgtcttttaggatgagtggctttagggtcgggcattaaaccttaagcttcagtcgccatctgtgatgtaagtgggaggagagggtattggaaagagctctttctgggtcaaatagagttgggcttttcttgcaattgattttgagccagatgccacatatcttgaaaaagaaaaacggctgactttagtttgaagcgtaaataatagatattcgcacatgtcctttttagtagcagcccaaaaattgaatttcaacttaaaaaaaaatctgcgtcataataatagggatgttacttgctcttgctcatgcaccttttgcttagacctgctgtttctacgtcaga

SEQ ID NO: 21973 - DNA, 229 bp, Homo sapiens
tgagccaagattgtgccactgcattacagcctgggcagcagagcaagactctgtctcaaaaaaaaaaagctaagtcagatcatgatcatttctcctctactcaaaaccttccagggactccccatactcagaataaaagccaaagtcctaacaatggccaacaaaatcactacttcacctgtgccccctttacttctccgacttcacctcctactgttctctctctcaa

SEQ ID NO: 21974 - DNA, 431 bp, Homo sapiens
gaggtatttcctgagaatgaatttttttttttttggattactgtttttctctccatataccttgacttggattttgacaggagggagcctgggaaaataattttttcctccaagattctcagatccaggttaggaaaggattcagcactacagcatacccctctacaacatacagccctgtcacattgagatcataatccctcctgtcccactcctctctaccaaccccaccctactagctaggtcttcagtgttttacattgaatattggtacattttaattattttttctcataaatgggttatttatagaaattttgttaactcttgagccatatgcatgtgtagatactggcagggctatgtttgtttatgatgctctgcaaacatttcatattggccaataaacagaaatatatccaaaaaacttg

SEQ ID NO: 21975 - DNA, 341 bp, Homo sapiens
aaatgtaaagatgtaaagtatagagaaaggatgtaaaactgcccgacatatagtaagggccatttaaaagatgcctgttattgtccctcttcttgagagcatattaagggctcaaatctagccagagtctggcgggtacagaggtaaacaaataatggcaggttggttaagtactggacaccagtgatgtccaaggtctctaggatgccctggagaaataatgaactcttctaagattgtttggaagggatttataaaggacatctaggctgggttttgagtgaggtatgggagttcgctggtcaagaatgtaggaattacaaaagcagaaagtgcatatt

SEQ ID NO: 21976 - DNA, 589 bp, Homo sapiens
ctacagtcatttcttcatggaattagacacatagcagtggggaccaggagtgttttattagtgattgtcctcctgcaagtttccagggtatctcagcttagacacatgaattattttttcctgttgcttggagggtatacttttaattatattcattcaataacagagcagttcaggtttgtaaaatattttttctcccccaaccttttccccagcatacatccccgtcccgtaagtttctgggcagagacaatctcaggaacctaaaggttgctaaaaaattagctagttggccaggcgcatgactcatgccagtaatcccagcactttgggaggctgaggtgggtggatcgcttgagcccagaaattcgagaccagcctagacaacatggcaaaaccctgtctctacaaacaaaacaaaatctagctgggcatggtggtgcatgcctgtagtcccagctactggggaggctgaggtgggcgggcgattgagctcaggaggtccaggctgcagtgagccgtgattgtgccactgcactgcagcctggatgactgagtgggaccctgtctcaataataaataaataaat

SEQ ID NO: 21977 - DNA, 841 bp, Homo sapiens
cacccaccacttacccttctcgctggtgaagtggccaactgccatctgattctgcaggtgggacaccctattggatgaagtgtttctggagtggcccctgcacccagcagtgcctttgttggggatggagagtcagaatgcctgccatcggggacttgagattaatttggtggtggtcctagacggatgtgagggatttggagagagaccaggtgtggaggggctttggggcagagccgggggtggcctgacttggcttaatgggcaggaagagggggcatggagctctcagaccaggggaatgggcagccttccctgatgttgccagaaactgcttccatgtcctctcatctggtttaggggcccctaaacaaggggatctggaaggtcgggaaaagcccactgtctttcagaccctgggcttcagcacatccctcaggccagggccagggccagggggggtcgcagggtgggatgacaggttgtgatccaggcaggtgaggacctgtccccaccgtaagcagccaacccctggaaaagcccaggtggctgagttctgcctgtgttcaaaagatgtctctttgtaggggatgtgtgcgtgggaggctggaatttgctttggaaattaattgcctgttgaattcttcccaccacggccgtaaccgtgcaggatccagggcatgtgaggagggctgtgaatgggcttcctctggcccatttcatcagttattgccctatcatcgctcctctggcttcatttacccagcaggacattgcttttacaggctcatctgggcacttttaaaaaataaagtcagtgcattccaggaacccctcttcc

SEQ ID NO: 21978 - DNA, 378 bp, Homo sapiens
gtgtagggcagcagcaggaaacatggagatggattcatcacgtatcagtcacagaaacaatccccggagctcagcaagaagctgggccttttgcaaagaggccagccagttctagattgggcttctgaaggaactcacttctgactttagttctctgtatctttctgacctttgtatcttctttaaatcttcattttcatcatttcctccactatttatgaatgctccctctgggatctattctcaatcccttcctaataaggaaatgtccttccttaattgtctcaactatcttggtgcagatagtcattcccttcttgacatgtcctggccctactcaagaggctcatgtgtggtcatgtgggagcatatttcctt

SEQ ID NO: 21979 - DNA, 135 bp, Homo sapiens
atctcccatctgagatgggagagcccgtctcagaggcggaaaggctgacccaggaagtgcctgaacaagtgagcctctgtcggtgaccccaacggaggcagcccgagtttcagcaccactgggaggacagctccc

SEQ ID NO: 21980 - DNA, 395 bp, Homo sapiens
tttcttgaataccctctagatcaggtttttaaaagaagttgctcaactacatcaattctaagacttctttctggttcgcagattctgcggcttattggttgatatgattctgttcccagcccatgctttcagagcatttcatgagtcccaggccgctgagggaatatatgcaaacccgagactagtatctgctcctaaagaaagctgtgaattctcttgccacagatcgccatcattgtaagatgatatggaacttagaataggcacttacttaaagctgttagtttatttcttcttacgatgtgctgtctttgtgttgtagctcacacaatggtcacttgagctgttaactctattctggttttctggctgatctggaagatcctgcacccatg

SEQ ID NO: 21981 - DNA, 514 bp, Homo sapiens
ggtgattccagtgacacagacacacgtttggactgtcttgtactatgctatgcactgttctgctcttttttgaattggaacatgagaattgaggtccatgtaattttgagtttcagtagttttttgctcacattagtctcatttttgtttttcctcttgtagctgccatttatcaaatcgaaattatttcctcagagaaaaaggtttaggtatcctaagactttaaaatctcagtacgtttttttttaaagtatgttgtctcattctattgagaagttatacaacatacaggcttctaggtctagccaggccatctagtttagtcaagacagctgtgtaacaaacgtagccttgaggcctggcacggtggctcatgcctgtaatcccagctacttgggaggctgaggcgagagaatcacttgaactggggaggcagaggttgcagtggcccgagaccccaccattgcactccagtccgggaaacaagaacgaaactcccatctcaaaaaaaaaa

SEQ ID NO: 21982 - DNA, 650 bp, Homo sapiens
ggtgattccagtgacacagacacacgtttggactgtcttgtactatgctatgcactgttctgctcttttttgaattggaacatgagaattgaggtccatgtaattttgagtttcagtagttttttgctcacattagtctcatttttgtttttcctcttgtagctgccatttatcaaatcgaaattatttcctcagagaaaaaggtttaggtatcctaagactttaaaatctcagtacgtttttttttaaagtatgttgtctcattctattgagaagttatacaacatacaggcttctaggtctagccaggccatctagtttagtcaagacagctgtgtaacaaacgtagccttgaggcctggcacggtggctcatgcctgtaatcccagcacttttgaggctgaggcgggcggattacctgaagtcaggagttagagaccagcctgtccaacgtggtgaaaccccgtctgtactaaaaatacaaaaaagctagccgagtgtggtggcaggtgcctgtaatcccagctacttgggaggctgaggcgagagaatcacttgaactggggaggcagaggttgcagtggcccgagaccccaccattgcactccagtccgggaaacaagaacgaaactcccatctcaaaaaaaaaa

SEQ ID NO: 21983 - DNA, 319 bp, Homo sapiens
tgaggaaaagtgaacaaagctcaaggaaattgtgagatatcaataagtgaactgatatacacatttaggaatttacagaaagagagagaagaagaaagattattcaaacaaataatggccaaaaatttcccaagtttgataaaatgcataaatttacaaatccaatctaagaagtacaatgagctacaagtaggatacacctaaagagacccacatcaagacacattgtaagcatactgtcaaaaacaaaaaacgaagaaactcaaaagcagttaggttaactggggtgactacaacagtatcagacaaaatatacgtt

SEQ ID NO: 21984 - DNA, 490 bp, Homo sapiens
atggtgatgtggttttttttgtctgtttgttttgagacagggtctcgatttgctgctcaggctagagtgcagtggcatgatcatacctcactgtagccttgaactcttggattcaagagatgcttccacctcagcttcccaagtagctaggcctacagtcatgtacataccaccaggcttggctaacttttttttttttttttggtagagatggagtatccttatgttgcctaggctggtctagaactcctgaggtcaagtgatcctccagcctcagccttccaatgtgatgggattataggtatgagccactgcaccctgccaggaaagttgttgaaaaagactagcatgttggtgtgtgttggcagctcctcagatccttcagtatgggatataaaggggttgtaattgattggttggaaataatcagtgtgcaaacaacaatggaaatggaagagaatacatcttggtaataaaatctctgtctgtc

SEQ ID NO: 21985 - DNA, 427 bp, Homo sapiens
ctcattaattcagccctatgaaagagggtgcaaaggaagaaggtggaagttactttgccaagagtagcaggcttgggggaaactaaaatagaggcttcaggggaagggcagcagcatggtgtcagagattacacttggagtttgtgaagtctgggcaggcttcaatctaaagaaactttatgcacaaaagcccaaatccagggaaataaatgaaagtgattattcacttttctaaagtccttacagtagcgttcctctggtattgtttgaatacagtttaacctgaagggcacttggtttttgtgcagctcttcaagaacagaagcatctaagtaagtagaaagtctgagaaattaacagagaagattccctaaaagtcagccttcattacttgaccattattcataattctgcatttgtctattcc

SEQ ID NO: 21986 - DNA, 701 bp, Homo sapiens
aggatcgcttgaagccagaagttcaaggctacagtatgctatgatcatttctgtgaatggccactgcacttcagcctgagtaacgtagcaagacgctgtctccaacagaaaattgacatctgaagccttgactacagggggactatactggtttatgtgaagtgtggggagagagcaggattgtgcttctttgtacacatttgcttctcccaggatagtgtcatagtgcctaggaaggtgatgtgtgtgtcagatacaatgatagtgaaaagaagggattggaattttcatacctgtgtcagtctaaatgagcattaccttgtctgaattgtctaagtggtaagcttcgtgatttgaaacagttttcactttgaaaaactgcttccgtggattaaaagttgtcaccactaaagtgggctgtggtggagtcgatgctgatcctcacttagggcagtggcctccaaggggaagagggcacacaggatggctgggtgggggtgggaagaaaagattaggcctttgatttatattcattttgaggctcagccttatttagtttctcactttggatgtattttatatatatacatcaaatatacatcaatattagttcattagtacatgtaggtcattaatttataaataaaaggttgaaccacaaaaaactgctgataattgtttttgatctgtaaaaaaaaaaa

SEQ ID NO: 21987 - DNA, 657 bp, Homo sapiens
aggatcgcttgaagccagaagttcaaggctacagtatgctatgatcatttctgtgaatggccactgcacttcagcctgagtaacgtagcaagacgctgtctccaacagaaaattgacatctgaagccttgactacagggggactatactggtttatgtgaagtgtggggagagagcaggattgtgcttctttgtacacatttgcttctcccaggatagtgtcatagtgcctaggaaggtgatgtgtgtgtcagatacaatgatagtgaaaagaagggattggaattttcatacctgtgtcagtctaaatgagcattaccttgtctgaattgtctaagtggtaagcttcgtgatttgaaacagttttcactttgaaaaactgcttccgtggattaaaagttgtcaccactaaagtgggctgtggtggagtcgatgctgatcctcacttagggcagtggcctccaaggggaagagggcacacaggatggctgggtgggggtgggaagaaaagattaggcctttgatttatattcattttgaggctcagccttatttagtttctcactttggatgtattttatatatatacatcaaatatacatcaatattagttcattagtacatgtaggtcattaatttataaataaaaggttgaacc

SEQ ID NO: 21988 - DNA, 850 bp, Homo sapiens
ctcatcgcccgcgccgccgccgcgcctcagcttcagcttcggcctcagtcagccgcgcagggacgcggagcccggcgccgagccctgctcttgcgcttgccgggcgggcatggacgggcgagaggcgttctgcaagcgcgaaatcgcgatgaacgggatcgtgcacgatgtggacgtgctgggcgcgggcatccggctggtgaccctgctggtggatcgggacgggctgtacaagatgaaccgcctgtacctcacccccgacggcttcttcttccgagtccacatgttagccctggactcctccagctgcaataagccgtgtccagagtttaaacctggcagcaggtatattgtgatgggccacatctaccataagagacggcagctccctacagctctgctccaggtcctgagaggccgcctccgtccagggatggactgctaaggagcagcagcagctatgtgaaaaggttaatcgaacaaagggaagggcagataccacaggtgcaattcatacccaattgcattttgaaaacaaccatcctggccattttcttggaccgcaggagacttggaccgtcgggcaacaaggacatgaaagggtctacccttcatgtaatgggtgcctccctttccgaagagagccctcagcttacctctgtgaatgaatttgcttagctgcagctgtaatctcgacaggtgtaccttggttattacaagaatgctcttaatgggcatgattctgaactcaggggtcaagagaatcacaccgggatgccagaaatagattcaccagatcagatactgagacggtccaatacacaactgctctaggtcacaatatctatac

SEQ ID NO: 21989 - DNA, 441 bp, Homo sapiens
  misc_feature (22)..(22): n is a, c, g, or t
  misc_feature (25)..(25): n is a, c, g, or t
  misc_feature (68)..(68): n is a, c, g, or t
  misc_feature (408)..(408): n is a, c, g, or t
  misc_feature (429)..(429): n is a, c, g, or t
cggcgctgagcctgcgcgcgcnctngccggtccgatctggacgaacgcgaggcttctgcgagacgaanttcgcgatgaacgggatcgtgcacgatgtggacgtgctgggcgcgggcatccggctggtgaccctgctggtggatcgggacgggctgtacaagatgaaccgcctgtacctcacccccgacggcttcttcttccgagtccacatgttagccctggactcctccagctgcaataagccgtgtccagagtttaaacctggtattgaaactgacctgaatgacgctgcatatgtactttataccaccgtttgtaacgtggggtgccacagcccgggctgttaggttcgcccagcctttttttggggagcgatgggggaacaatgacatgaatggggattttagnacgacaggcaggcaggtatanttgttgatgggg

SEQ ID NO: 21990 - DNA, 514 bp, Homo sapiens
tacattgtattataagtaatctagacattaaagtgtatgggaggatgtatgtaggttacatgcaaatacttgtgtcattttatatcagggactggagcatctggggatcttgatatccaagggggtcctggatccacttcccctaagatatgcgaagtaaccgtactttcctctccaccaccacctcaggtaatcccagcactttgggaggccaaggtgggaggattgcttgagctccggagttcaagaccaatctcggcaacatagcgagaccccatctctataaataaaacaaaagtaaatgcattaaatggaaggttgacagtttatcataaacctacaaagatgtttgtaaaattttgttttagtcattttctttgaactcacatcattataccatcttcatttttgtatggagctggttcaattctaagtcctctagactttccctgcctatctttgttgttgttgttgttgttgtcgaagacagtaaaataagtgtttttcaagtcta

SEQ ID NO: 21991 - DNA, 507 bp, Homo sapiens
cagggcatggtggcatgcacttgtagtcctagctattcaggagtcattcagagtgagaccctgtctcttagaaaaaaattttaaaaagtgaatgagatcatgtcatttctctgttcagagccttccagttgcttcccatctcactcagaggaaaagccaaagtccttaccttgtcctgcaaagtaatcccagcactttgggaggccaaggtgggaggattgcttgagctccggagttcaagaccaatctcggcaacatagcgagaccccatctctataaataaaacaaaagtaaatgcattaaatggaaggttgacagtttatcataaacctacaaagatgtttgtaaaattttgttttagtcattttctttgaactcacatcattataccatcttcatttttgtatggagctggttcaattctaagtcctctagactttccctgcctatctttgttgttgttgttgttgttgtcgaagacagtaaaataagtgtttttcaagtcta

SEQ ID NO: 21992 - DNA, 356 bp, Homo sapiens
ctacccagctgagaattagatcaacccagaagaaaaggaacatgtttcactgaaacctacaaagtgctttagaacatcttcagtcgggcgcagtggctcacgcttttagtctcaacactgtgggaggatcacttgagcccaggagtttgagaccagcctgggcatagtgagaccccgtctctactaaaacattactttaaattaactggacatgatggcatgttcctgtggtcccagctacttgagagaccgaggcaggaggatcgtttgagcccaggagttggaggctgcagtgagctgttattgaaccactgctttccaggctggaagacagagcgaaactctatctcttaaaa

SEQ ID NO: 21993 - DNA, 343 bp, Homo sapiens
gttttaccatgttggccaggctggtcttgaactcctgacctcaggtgatcctcctgcctcggtcttccaaactgctgggattacaggtgctcctggccgacagttacatattttttatagaaagaaagtaaaagtatcttaggaaaatttaaataaattattattcttaacatctgtcatccatccatctgtttgtctatcggtgtgatggatgctcccaccaggtactttgctagtggacaccaaggatagaatgatgaataagacaaatacggcccttccctggtgcatagagtgggaaggtgaacattaagcagttccacagtaattatttaattacagt

SEQ ID NO: 21994 - DNA, 317 bp, Homo sapiens
ggaggcaaaaaggacaatagaaaaatcataattagccaaacataataactgttgtaaacaagatgtaccagggaatgctaaaactatgggcaaaagcttgacaaaaagcatgatatttgcatagtctcaaaatatctcccccaggatacttattagaagtggggaaatagcagctttatagtgaagaaactcaaaagacaccaccttcaccaagtgatgaaggttaacagcaccagtagaaagacatcaacatcctttaccctttgataggacacattgtgaagggaacatcacttctgtgatattcagaagtatgc

SEQ ID NO: 21995 - DNA, 647 bp, Homo sapiens
ctattaggaacttgtcatggtgaaattcaggactggcactggatcatggtcaatagttattctctaaagtataattgacacctgtgtaaacttataattagctttataccacacaaggtgccatatatttagaattgttgaaagattagtgaagagtgagtattttaataaccttaaacttgccagctttttgtcagtacctgggttaaatgggatatctgcagatttgctactcaggtatgattttatttgattcatttaattcagtctgtgattactgaatgcatactgtgttagatactcaaagtccaaaaatataactaaatattctgttccttttgaggtgctttagttatggtttttaaagcttttaaaattctgtacatagtactgtattaggcctacagtttgaaaatgatcattcattaatttattcactaattatttcaagcattctgtgtccttagcaaggtagcagaatatataatacatcaaaaataataatgctattctatattttaataagcaacttcagcaaagtctcaggatacaaaatcagtgtgcaaaaatcacaagcactcttatacaccaacaacagacaaacagagagccaaatcatgagtgaactcccattcacaattgcttca

SEQ ID NO: 21996 - DNA, 495 bp, Homo sapiens
gtcttcttaagctaggcaccgtggctcatgtctgtaatcccaacactttgggagaccaaggcaggtggatcacctgaggtcaggaatttgagaccagcctgaccaatatggtgaaacctcatctctaaaaaaaaaaaaaaagaaagaaagaaattgagggtcttcaagtgaactgcctagtgctctccatcaggtctatacctgcttcttcttggtctggagatttctaaactagaagagacatattcctttcctcctatacagacccaatatttaatgatggagtagggttaggacaactgcaataaatactttcacttttaaatggagagaatgaagacagataggggtaacaattttgaaatattcttaggctctgcacagtggcttatgtctgtaatcccaacaactttgggagactgaggcaggtggatcacctgatgtcaggagtttgagaccagtctgaccaatattatgaaaccccatctctaaaga

SEQ ID NO: 21997 - DNA, 412 bp, Homo sapiens
gatttttttatgctctcttctctcctcgcctgccgagagccattttcctgttctgaaagctgctgctgctgactgcctacccctcaccacaggtcttagatgctgcgtacctccctcttaacattcttgccatgtgtgcaaccacaggtgaatctacaatctgctcagcgcacagctgagagagggtgggaatatttaaacaagcctttactaaaagccagagcagtgaatctcaaactcatatgtctaagaatccatggaaggatattaaccgctttaatatcagataataagttcctaaacccaaagattccgtttcagtgggcctgggatggttttgagtgattctgagcaacatggtccgagaattacattttgagaaacactagcgaagagatttttttaaatgagg

SEQ ID NO: 21998 - DNA, 258 bp, Homo sapiens
atctatattgcccatttatggacattgcatggcatctcctgaattttggcccatgctaaaatgtgaagcgcgtaagaagcaaactagttcaaatttatgacagagatacttgcccctgtgatacgtcagtttaccttgaacaactgcagattttccacagtttaaaattagaggttgctatgttggtcctcattttttttctttctcagatgtttgattctgttgcaatatgactgttggatttacatgccagtgatg

SEQ ID NO: 21999 - DNA, 526 bp, Homo sapiens
  misc_feature (403)..(403): n is a, c, g, or t
  misc_feature (427)..(427): n is a, c, g, or t
  misc_feature (439)..(439): n is a, c, g, or t
  misc_feature (517)..(517): n is a, c, g, or t
ttcaaactctgtttaatggatgtgaataattcagtttcatcccactgaaatcttaaaactataaacctatctttgttctttatgttccttcagagatcatatgtcattactcatatatgaattatttgaagtatgggtgatcatgatgaaagtgaccaaatttctacttagctcctgtgggtttcaggagaggaggtggcctctagggtgaggctagggattaagtggagaaacaaattgggaaaagtccaggaaaagagaaaagggtgttaaattaggatttcttggcattatctttcctatcaagatatatgttcattatagacattttagaaaatataaacaagcaaaaagaagaaaataagttttcaacgtttttaatgtatttacttctggacacacncaccacaagaacatttcttaaganacatctcactcnactttcagacattttagattcatttcaacaagtagtgtccccccatacatggatatatatatgtgcacacgaataagngatcctcta

SEQ ID NO: 22000 - DNA, 775 bp, Homo sapiens
gtggaccagaaaggtgaggaggatgctcccttcgagggtggagagagtaagactggcattgcacatgggtgggggggcccgtcgaggcccctctttgcttctgagagtctgttttcatcgacagtcttctactaaatgtacatagcagcttttcagggcaagggtcaccgggattcatctttatgcctccccagcccgggagccaccacctccaccagacccatccacacagttgaatctcatctcaagttctctggtgcccgaccccccatgcacaccgtgctggtctgggcatctcacctgcatccgcacaagtgcctcaggagggtggagtgtctggtgctcggcgttggaggctcagcccacactgtgccgggcagtcgcaggcctcccagatgaatgaagcatgagtgaatcccgatcctgttatcacagcttctccctacgcatcccaggcagaatgttgtgcaaaaaccacaccaggattcgtacatgccagaggactgaacttctgcgtgttgcagataattcatcttcctgaatcactgcggatctaccatggtggttaaccacagaataaacataggggagagcgtaagcgctgtcctaacagaaacttatgcttcttccgttaccctttaaaagtaaagggtactgatttcataattgtgtttctcttgtaaatgagactctcatggaaaaatcagccatgtaggcgatagatttgtatacctttagattaaaatgtcacttcgattatttcaagtgtaaaagt

SEQ ID NO: 22001 - DNA, 343 bp, Homo sapiens
gtggaccagaaaggtgaggaggatgctcccttcgagggtggagagagtaagactggcattgcacatgggtgggggggcccgtcgaggcccctctttgcttctgagagtctgttttcatcgacagtcttctactaaatgtacatagcagcttttcagggcaagggtcaccgggattcatctttatgcctccccagcccgggagccaccacctccaccagacccatccacacagttgaatctcatctcaagttctctggtgcccgaccccccatgcacaccgtgctggtctgggcatctcacctgcatccgcacaagtgccagggatcctctagattacccagca

SEQ ID NO: 22002 - DNA, 814 bp, Homo sapiens
tcccaaagttctgggattacaggtgtgacccggccaagctggggtttcaccatgttggccaggctggtctcgaacccctgacctcagatgatccacccacctctgcctcccaaagtgctggggattacaggcgtgcactccgaacaggcctgggatgatttccgagaggtaagtgggttgctgcagagcgagagaaacctgctgtgtggggtcgtggggataggagtaaggggatttcggagttttgttttggcctattcaaaatatgaagccaagtcaccatggctcacacctgtgatcccagcattttggaaggctgaggtgggaggattgcttgaggccaggagttggagaccagcctgggcaacacagcgggtggatcacgaggtcaggagatcgagaccatcctggctaacacggtgaaaccccatctctaataaaaaatacaaaaaaattagccgggcgtggcggtgggtgcctgtaatcccagctactgaggaggctgaggcgggagaatggcgtgaacccgggaggcggagcttgcagtgagccaagattgcgccactgcactccagactgggcgacagaacaagactctgtctcaaaaaaaaaaaaaaaaaaagaaaaccccagctctactaaaatacaaaaattagccaggcatggtgataggcacctgtagtcccagctactctggaggcttaggcagaagaatcacttgaacctgggaggcggaggttgcagtgagtcgagattgtgccactgcacttcagccagggtgacacagcaagactctgtctcagaaaaaaaaaaa

SEQ ID NO: 22003 - DNA, 207 bp, Homo sapiens
tcttttaaaatgtataagccactctttcagtattttcttaatttttggtacaaaaaatactttttagatttatcttgtactttctgtgctccaggtcttgaatgagccttttctccagtgagctctgactcctcttagtggggaattggacatggacacacacacacacacacacacacacacacacacacacacacacacacacac

SEQ ID NO: 22004 - DNA, 341 bp, Homo sapiens
aaacattgtgtctgtagtcaacatgtatatttttgtcattattccttaaacaatagtgtaactatttacatagcacttacattataataggtattataagtaatctaaatattaacataagcgggaggatttgtgtagattgtatgcatatacaacatcattttattccagagacttgagcatctgcgaatttggatatccaaaggaagtcctagaaccagttcccgacaaataccaagagatgactttactttagacctaagatcttgctagacagcctttgagaggatgaaggataactagagcagaagcaaatcgcagcgaagtagactacaacaatc

SEQ ID NO: 22005 - DNA, 1055 bp, Homo sapiens
ggaaccttctgctgagctggcttctggggcctgagcttccagagctgtccccaagggctaggaaggccgacctgaaggatgagaacctcaaattcagttgctggtgggagccaaggaagacggcgggtgttctaacatggccctttctggctgagctggcggaagtgggcgttttggccgatgggatgtatctcggcgctgtgtctgtggcccagcaaaggtgcagggctgactggctgagccactgggttctacccgcaggctccccactgcactgggctttcacacagccatgctcttgggtttccctcccttgtaagcagagtcataataacacacgaatagtctaaggctgggtattctggtcagcagaggtccttgagtcacagtgttactgaaatggttctgagcctgagaatctctttggcctctgaaagggcagggcaggtgggcaccgacttcctgccagtcctttcaggtttcctgttcaaagccagtcctgttggtggaggggatcaccgagagtgtctgtatcattttgtagcccttttctctgacgttttctggtagaaaatgtcccttgtcaaaatgctaataattatcataataatctgctttccaaccaactcccacaagtgacaacctgtgtagaactgtgataaaggtttgcataatgtagggtttgtaccaagtgtgtgtaagtttctgttaaataaaaagtctgtttccaaaaaaaaaaaaaaaaaaaaaacaaaaaaagaaaaaaaataaaaaaaaaaaaaaaacaaaagaaaacgcaaaaacaagcaagaagacaagaacaacaacatagagaaacatcaaggcaagagaccccacacacaaaaaagtacatggggcgcggccggcgccggaaccacagtaagcccaccaccaccacttctgagtggggggccgcgccccggaagtgtagggggccacagggcgagcgaggctcgcgcgcacaccctacatgtgtgaatcgggtgggcaaacaaaaaaaaaccccggcgcgacgcgttcgcacagcacaccgg

SEQ ID NO: 22006 - DNA, 1247 bp, Homo sapiens
ccaccttggcctcgtaaagtgctgggattacaggcatgagtcaccgcacagggccaaacaaacaaacaaacaaacaaaaaaacacttaacacttaaaataaatccaagccagtcacagtggtgtgcacctgtagtcccagctactcaggaggctgaggcaagaggatcccttgagcccaggaaatggtttttcaatatggtgtgaagtagggatcaagtttcatcccctccagtatgtgtatccggttgtctcatctttttcacactgctctactgttctacattttttcattaattgggtccatatgtccatatttgagtggctgagttctctattctgttccattgttctctttgataccacactgtcttaatgagtatcgttttacattcatgctttatattcatgtccatatttgagtggctttgtttctgagctttatatattccgttccactgttctctttgtctttgattcaataccatactcccagctattcaggaggctaaggcaggagaatcgcttgaacccaggaggcggaggttgcagtgagccgaggtcgtgccattgcactccagcctgggcaataaaagcaaaactccatctcaaaaaaaaaaagggacataaaaaaaatctatattattataaacattgaaggcagaggagagtagactgaatttgcattgactctgaagtctacattaagtctactctgggtactctcctatcctgcgcaaatggcagatctgtctatttgatcatagcactctctcctggtgatcctaggcatagccccactatcctcagagtagggcttcctgtccttgttgttgcttgaggttaatcttttttgcttccctagttctgggttgctttagagcaacatgtaatgtaggatcctgtaagggattaactagggcaaatgaagctaacatcctcctatcctctgccccactccagattggacctggactttttcagcgatagggtatcactatgttgctctggctggcctccaactcctgggctcaagggaccctgattttttttttttaattgagtttaaattcatataacataaattaaccatttaaagcaaacaattaagtagcgttcagtacattcccagtgttgtacattcatcacatctatctagttccataacatttccatcaccccaaaatgaaaccccatgctgattaagcagtcattcccactccttcctccaacccctagcaaccattaa

SEQ ID NO: 22007 - DNA, 309 bp, Homo sapiens
agatggggtcttgctatatatccaggctggtctcgaactcctgggctcaagtgatcttccagccttggcctcccaaagtcctgggattacaggtgtgagtcatacccagcctgtattcctaatttttttaaaaaggaaacttttgcaacagtaatttattgtcatagggaaaatttttagcatttgttcatgctataaagtcacttttcacttaaatttaattatattaaatattagcttatcatgttgaacattggtccagagttctataatgacaaaaagaaataagatagaacaagggggggtgga

SEQ ID NO: 22008 - DNA, 437 bp, Homo sapiens
tccccaatattaatatcatctatgagtataatcttattagcaattagcttttaaactgtttgttctttgaaggtaacatttgcaaatcatttgaagaaattcatcaaatgactccccactgttggatttggcaaaaatggagtttaaagttgagggaaggggcaaggaatgcaggatctagggatctcgccaatttgggaaccaaaaaccaaaagagaaattcaagaaggaggtgccaaggcatatcctgagtcctggatcctgaatcagggagccagttggtgttgagaacccaatggagcattctgtcctggaaaccagacatggaatacagctgagaatgaggtttgcttgggggattttaagaaaaggaacacacttttgttccctggtgatgtccagtcctgcaccctctcccttctgctgggcaagagcca

SEQ ID NO: 22009 - DNA, 800 bp, Homo sapiens
tgatgttatacattcttagagccccttattttctattttgttccctgagatctcatgggagttactagtacaattctgaataggaatgaaattggagttcagtgtagagctgtagattaaagggaaagtagtgatggtttcctcttatttatacagagcactgccaagcatgtcatgttttggttcttctcatcctgacactaacatgcaattagcaactattgttaatccattttacagaggagaaaaactgaggctgagagaagcaagttgagttctctaacttcacatggctagcagatgacaaacctggattgaaacccaggtctggccgggcgcggtggctcacgcctgtaatcccagcactttgggaggtcgaggcgggtggatcacaaggtcaggagttcgagaccagcctggccaatatggtgaaaccatacaaaaaaaatacaaaaaaaattagccaggtgtggtggcacatgcctgtaatcccagctactcaggaggctgaggcaggagaattgcttgaatccgggaggcggaggttgcagtgagctgagatcacaccactgcactccggcttgggtgacagagcgagaccccgtctcaaaaaaaaaagaaacccaggtctgcctgggttgcttgttcttgtttttgccaagtgaacagaacttggctggttaggattttgacattaattcaagtctaattttgaacaacatataatataggggttcttaacctgagggtcacagactttcagagatagtccatgaactcctgcaagtgtatgcgtattc

SEQ ID NO: 22010 - DNA, 407 bp, Homo sapiens
ctcggctcactataacttctgcctcccgggttcaagcaattctcctgcctcagcctcctgagtagctggggttacaggtgtgcgccaccatgcctgtctaatttttatatttttagtagagacagggttttaccaggggtcaggctggtctcggactcctgacgtcgtgatctgcccatgtcagcctcccaaagtgctgggattacaggcatgagccaccgcgcctggccaacagtgctcctatcttaggcattttgcttttgtttcaggtcatccccatcgctcgctgctgatcttcctttctgagctgatcaatcccctcacgctggacatttcttctcaggtttcctctgaatcattttatttggtctaaacatgtccagtttttctgccttccttacagcact

SEQ ID NO: 22011 - DNA, 268 bp, Homo sapiens
cccttaaatatgccagctggaacccgtagatgccaatagaaggtacattacctcgtaagataaaggctcattacatgaaaagatgcagggccttgctgtacagtaagttgaaatcaattaattgtcctccctccccaccccaaatattgcatcctcccaaccacttatcttcatagggcaaaattaccattaaatggtgagtgaagaggactatctgagctacacctttcaccattcattcatcttggattgatggtccctaagctca

SEQ ID NO: 22012 - DNA, 605 bp, Homo sapiens
cagtctttggcattcttgagaaagagaagtggctgccccccacacccgtgggtgctaccagggagaccttttctgggacagtgtagggaaggacaaggaatcctttagcacagtggtggtaggtcgtggatagtgggtcatctaagcatgacattgcagagatcagagcaggttgagagagagagagagagagaccccctctccattcctgattatgttgtttgagtcacttgaagccagctaacagattccatttgcttaaaccagtttccattcattcatttctttgaccaatatatactgatcacttactatgtggacaatttctaggaaccatttgagctaggttttccatgagcataattctaaatctaatcttaacctaacccttagtcataaactagaactctgacccttttctagtgaagagcttttagtggcaagaaacaaagtcctggaccactcacactgacccagtccaaggggcattggtgtaagaatatgcatgaatcactaagtgaaattccaggaatattacaaagattttaccagcaatgggcctcatgagggacctaactgatgaggaattcaatccctccctacta

SEQ ID NO: 22013 - DNA, 515 bp, Homo sapiens
cagtctttggcattcttgagaaagagaagtggctgccccccacacccgtgggtgctaccagggagaccttttctgggacagtgtagggaaggacaaggaatcctttagcacagtggtggtaggtcgtggatagtgggtcatctaagcatgacattgcagagatcagagcaggttgagagagagagagagagagaccccctctccattcctgattatgttgtttgagtcacttgaagccagctaacagattccatttgcttaaaccagtttccattcattcatttctttgaccaatatatactgatcacttactatgtggacaatttctaggaaccatttgagctaggttttccatgagcataattctaaatctaatcttaacctaacccttagtcataaactagaactctgacccttttctagtgaagagcttttagtggcaagaaacaaagtcctggaccactcacactgacccagtccaggagcggtgggcaatcatgggatcctctagacta

SEQ ID NO: 22014 - DNA, 241 bp, Homo sapiens
gcttcccttcatccctgggatctggcttctcctccaaccactatggggaaactgttcttctgaggtcccctcaaaaacatcctaataaatgaatccaactgcagtttttcagtccgcatttcactgcagcatcagatacccttacctgtttggctcccaaggcactgcaccaacctgcttctcctttataaaccttctgtaattgattctttgctaactctttatcaaggtcctttgttct

SEQ ID NO: 22015 - DNA, 300 bp, Homo sapiens
ggcatcatggcatttggggcaggccccagaataatctgtgtgccatgaggaagcccaaatgtcctccagagatgaccctacctcctccagtgcgagcctttttcaagatgctctgtgtccaaagctgcctgcagagtgaggttgcgttactctaccacttctatttgcatcctcattgttccccccaaaaatgagtgaagactatggcaccagatgaagaataaacaaggaaaacaacttcaggttattaatattttcaaataatatgcatgctcccaataactgtacaaaacataagaa

SEQ ID NO: 22016 - DNA, 688 bp, Homo sapiens
tcagcactctccactttctggtggcttagggttggtggcgttggacctgggcagagatctccctccaggcaggcagctgtcaccactcggtgccccaggcttcagaagccacttctgtattttacaactacaaggccccaaaggacattccacacaaagctcaggacacagggtcgcaggtggcttctcactgtccccaaaagggccaggccgaatcactcctcctctcctctgcctacaccccctcccacttcccctccactcctcagagccggcttcagacccaacttaacgacacttgaagattgagatggacgaagccaaggcacaggggacccagatgggggccgagaacggggcgctgacaggtgcgttggggtgtaagggagtgggcagggatagaagtgggaggagcctaggtgaatcctagttatccaaacaagcacagttgcaaacgtaatgcaaataacacggatataaacgcaaaaacttatgaaaagaatgcaaacaacatgcagaggccatgcaaatgtcacaaaaacaaggcaaatgccacaaaacatgcaaactccttgtaaacgactcacgaaagcaatgcaaacctatgaaaagctatgcaaatggcacgtggaagccatgcaatggtacacactaatttaattcaaataaaggaaagcgtgcaaacggc

SEQ ID NO: 22017 - DNA, 245 bp, Homo sapiens
tcttgcatctatttttcacttctctgacattttgatggataaagtttcatttggaaggatttttatttcaaaatagaaatagcatataacatgagaatgggaactctgaaaggttcaactttctagtcattagtttcctaagattgtcatgaaagccacatatagtcaatcatgattggcctgtattaaaagtgagataacatcatgtacaacttaagcactgtactttctatcagatatagaaa

SEQ ID NO: 22018 - DNA, 285 bp, Homo sapiens
tttacctgctaggctcgtcccacctgtgtggagctcccatcgccctccagcgttgcgcagcctgaagggacaggacggacaagcgggtgcctccttctaattcatcttcaccattgtggttgtcaatatggcatgcagaattatccctctttccaggttttccccaaggaccctggacaatgctggtttttcctatgtgcaccaccaaagggcctatccagcttctggagtctacctggattcctgggctcatggccccttcctccatcttcaaaccagcaatgg

SEQ ID NO: 22019 - DNA, 1922 bp, Homo sapiens
taagcagaaattgctcaataatcttgcttttattcatcatggattaaattaactccagctgcttaaaatgcccattcaagatttaaatgcctggacgtgagtgtgcaaacctaggtcagaaatcacccctggcagtcttggagctttgagaggactctacaggaactacttcggcttaaatggtttgaggcaaagcagctgggtttactgattcatcaagactaaatgtgaaaggagaggtaatttattcaaaggaaattgtgggaaagactgttagacaaacaaaatctgacaaatgaccaggtggttacttgaagccctgacattgaaatatgttgggtgttgggtatatactaaatgaagggcaatattataacaagtggacatgctggaagtatgagcaacttacgtatgtagtttgtgtggacgggcctttagggactgctgcttcagatcccataagctccacttccacttgatgaatgctgcttggcttgccccactctgcctagatggatggtgagcaactttgcatggtaagcaaaggctgtcttgtgcaaatgaaatctcttaggcaacagctatcagaagaataggtgactgcctgtggtagtctctgttatagggaggtgtcagagctttatctttctttaggcagataaagggccttcagagagaaacctctgcttgcatcctctgtttagtaaggtggatagatgtaaatttcctttagaaatggacagcttttcagagctattcctgcctgcagttctcagaataatcaacttgaaatatgccaaagaagtatattctgaggtggcatattgtggcttcccctcattccatcaaacctttagacataagaacaattgactgacctggtgcctacccagtttgctggtttcctgcctataaggaaagttatgttgcagatcagtggtagacctgaaagtcacataatagaaaaaaaggaggataaggagaaaatgaattgctgttcccaagtaatcgagatttgtttcttcttgcagggaagatgattgggaaaatattgtgacctgataaaagtgttgatacatttaataagggtttgccaccatctgactaaatgataacatatgcctttcagagtcttttctgaaaaatatcctgaaacagtttggcatactccttcagcaacactgacatcttcatgtgtttacgtagacatatcccgccactttgccgtactaattggcactaggagccaccaagtaacatggggagaaaaaaggggactacaaatggcagctttgaattggctatttacatcagttgtatttggggtgaggatcagcagcaaaaaaaatgcatgaagcctttaggatagaagggaaggagggactcacggaaaaaagctgcaggcctgaaggctgctgaaagttttggtgggaacaggtaaccctttctgcattagaggtacaggggttgctgagagaaaaacccaactgcttccagccctactggtgaaactccttaggggcacttagagaataagatctgtgcctttgaagtaaagggaacaaagtagcttcatctcaaaaaaaaaaaaaaaaacaaaaaacaaacacctgtgatgaagttctgggctaaggaggccgctggacaacccagcaactaccaaaaatgtcattaagtgcttggctgagaccatgtatcttacacatctagagcacaatttagaatatgacaagaataggctgggcatggtggctcacatctgtaatcccagcactttgggaggctgaggcgggcagattgcttgagctcaggagttcaagaccagactagaccacatggcgaaaccccgtctctgccgaaagaaaaaaacaacaaaaattagccaggtgtggtggcgcacacctgtaatcccagctactctt

SEQ ID NO: 22020 - DNA, 1282 bp, Homo sapiens
ttttttgagatgaagctactttgttccctttacttcaaaggcacagatcttatcctctgtttagtaaggtggatagatgtaaatttcctttagaaatggacagcttttcagagctattcctgcctgcagttctcagaataatcaacttgaaatatgccaaagaagtatattctgaggtggcatattgtggcttcccctcattccatcaaacctttagacataagaacaattgactgacctggtgcctacccagtttgctggtttcctgcctataaggaaagttatgttgcagatcagtggtagacctgaaagtcacataatagaaaaaaaggaggataaggagaaaatgaattgctgttcccaagtaatcgagatttgtttcttcttgcagggaagatgattgggaaaatattgtgacctgataaaagtgttgatacatttaataagggtttgccaccatctgactaaatgataacatatgcctttcagagtcttttctgaaaaatatcctgaaacagtttggcatactccttcagcaacactgacatcttcatgtgtttacgtagacatatcccgccactttgccgtactaattggcactaggagccaccaagtaacatggggagaaaaaaggggactacaaatggcagctttgaattggctatttacatcagttgtatttggggtgaggatcagcagcaaaaaaaatgcatgaagcctttaggatagaagggaaggagggactcacggaaaaaagctgcaggcctgaaggctgctgaaagttttggtgggaacaggtaaccctttctgcattagaggtacaggggttgctgagagaaaaacccaactgcttccagccctactggtgaaactccttaggggcacttagagaataagatctgtgcctttgaagtaaagggaacaaagtagcttcatctcaaaaaaaaaaaaaaaaacaaaaaacaaacacctgtgatgaagttctgggctaaggaggccgctggacaacccagcaactaccaaaaatgtcattaagtgcttggctgagaccatgtatcttacacatctagagcacaatttagaatatgacaagaataggctgggcatggtggctcacatctgtaatcccagcactttgggaggctgaggcgggcagattgcttgagctcaggagttcaagaccagactagaccacatggcgaaaccccgtctctgccgaaagaaaaaaacaacaaaaattagccaggtgtggtggcgcacacctgtaatcccagctactctt

SEQ ID NO: 22021 - DNA, 811 bp, Homo sapiens
gttagtcacatctgctttttggctttcaaaaatttgatctctttgttccattactaattcttctcctgttttttggcgtttgtgccttttaaaattcttttactttgactttttctgggaggctggtatcaggagagagaaaagataaatgtatgtttaattcactgtatttaactgttttaactgtgcttttcctactaatagacatttacattttctataaataatgttatgataaaaatgattgcctaggttaggttcattaaaaaattttttttttcttttaagaataaataatttcttaagaacttcattttaaggtacttggaaattctgatcatttctaatttttcaaaaccacaattgagattaggaagtttttttttttaagtcttctcatagccttacctccaaagcctgtctgcactgtatgctacctctcctgcccccactattttaaaaatttacattccttctgctggttttgctactaatgaaccaattccctgtgcatgacccattgtccctaaatcctcctttgcaaaccagtaaaaggctagcgttgtttgtttctaagcagaatggtgataccaatctgccagactcctaccgtacatgcttccactttaatccttagagctactccgaaaggggtagacctgagccccgttttagacagggagcccagagctcacagagctgaggtggcaaggtctgctcgtaagcacagtgtagcgacccaggtttgtaagcttttgttcctgttgtaccccactgcctccctggaattgatgtgttctattcatgagga

SEQ ID NO: 22022 - DNA, 325 bp, Homo sapiens
gcctgcgccactatgcctggcctgaatttctttctaactgcctatctcagatatgttccttcctgcaaggcaacaacaaaatgtgattgtggtcatgtctagatactacaaagaatatcacagcctgctctaagcctgtatagagaaagtcaatgatttttccagataagtcaaacatgttaggggacattccctaggagtgttctaagtatgcctgggctctcaaattggcaatctcattgttggggaatttttatgtctgacacataaagtatgaggattcattcctggagtgataacagtcttaaaacactagataatggaa

SEQ ID NO: 22023 - DNA, 470 bp, Homo sapiens
agggcctttgagtttgtctggaatactctctctcctcagagagaggcttatttccctaggcttctgtgtcctcatgtatacaatgaagttcacttagatgacctctaaggtcttttccagccacaaaatagtattgctgtagtactctggaatatatacagctccagggttggaatcctgcctcaactcctcaaactaatgtctaaggccttctataatctaaccccacctaattatatgatgtatgtccaaccatttggacataatagtctgttctagttagactggtctctttactttatctttcccacagatgattcccatttggggttatgtgttctttttgttccttccacttagaatgcccattttttctctcactacaaataaccccctaggtctcagtcaaaatctcctatttccttgagaatcacttgatattatattttctcattatctcctacatgcaa

SEQ ID NO: 22024 - DNA, 838 bp, Homo sapiens
gtgagtagacttgctcactggagaaacttcaagcactaatgctttcggaatgtgaggcttttccttggacagcatgactttgttttgtagaaaagtacggctggctgggagtttgtgatataatttagttcagtggtattctaagtgttcttagtgttctttcagacttttgggccatctcccaaagggtgaatgggaagaataagctgggtgtggctgagtttaagccaaaagttttttgtgcttgtttcaatcagagaagacctgctttttcatgtttttactattataatactaagcaagagctcatttgaaaacagagttcttcatatttaaaaaaaaaaagtcttgaaaccattgatgggaagatggatatctatttatgtttaaaaacccatcataaagatgacattgtgggctgtcacagttggaaggccctggaattagatgagaccacactatttagcttacttagtaataacattgcaaagaaaaattccgacgaagttttttcagcctaggaatcaatagttcagagaagcactctatgagaatacccattcattcttaaccaaaaaatactggtgagcctgagcagtttggtcatcagagtgttttatatagttccagaacaaatatgtctctaggtgttctgagagctctggtgaaattcctctcgctaccccaaacatcatcatttaatatccaggattctggttttctactcaccagatagattctcttaaaaccagggaaagattcctggaggaaggatgtatctggaaagagatgttccttattataataaaatgaaattgtaatactcttggattttgtg

SEQ ID NO: 22025 - DNA, 354 bp, Homo sapiens
aaatgaaagaaggagagaaagctctctgctgcagagaggggccctgaaaaagggttgctattctatagtggaatacaagggtttttataaatgagctagtggggagggggtactttatttacataaggtgtgaaaaactggttaggactaggtgtgtcatttgcagaaggcatgaatttctgacaacccccacgctgtccttccagtgtgcatgtgggctcgtagcctaagttacttcatgttgtttgacttcccttactgtgcacgtgttggggatagaatcctccattgtggacatgcctagctcagtgtaactccccttatctgtgtagctgtaggcatgttccaagcatg

SEQ ID NO: 22026 - DNA, 400 bp, Homo sapiens
gcacctggccctccaggaaggcctgcctgcgaggagctgctctgcacagctggtctcgaccctccgctaggcaccaggagcgaagagggagaggctttgggaaggagacacaggtcagagagcttacagaaaagtcagcctcgatggacggcaagatgcacctgtcagccacgaaggagccccccgaggtgcagatccccacatccgccgcacccgtgtggagaaaacagcgctggatttcctgtcgtgggttttgtgactttgaaagccgaggctgctgattgggaattaaatcccagaggacgccgctcaacacactggaaacccagcagctgctgctgttcccagcaatttttctttctctaaattgaaacatcattttctatttttcttctgacac

SEQ ID NO: 22027 - DNA, 390 bp, Homo sapiens
acgcctggctaattttttcactttttgtagagatggggtcttgctatgttgccccgcctgggtctcaaactcctagactcaagcgatcttcctgcctcagcctcccaaagttctgggattacaggcgtgagccaccacacctggcccatcttttgtaatacaccagcaattgtaagtaaagtgtgttcctgagttctgtgagctattccagtaaattattgaacatgaggcggaagctgtgggaaaccccaaactattgccagtcggtcagaagcaccagcggctaggtaattgcaactcgtgtctgaagtgggagcagttttttgggactgagcccctttcacctgtggaatctgatgtgaactccaggtagccagcgtcagaattgct

SEQ ID NO: 22028 - DNA, 668 bp, Homo sapiens
gtatgtgtaacatacagcatggattcatttttctggtatcaataggaggattggtattgtgttagatatgtaataagttcttgcttctttcaataaatgggaagtttaaggtttaggattgtattttaacagcatttcaatgaacgtgagaaagcggcaaggttgcggtctgatttgcatttatgggtcatgatttttttcttgggaaaaattcatgcataggctgggcacacagttgttcacacctgtaatcccaacactttgggaggctgaggcaggaggatcacatgagcccaggagttggggcccaccctgagaaacatagtgggaccccatctctacaaaaaatacaaaaattcgccagggtggtggtgcacacctgtagtcctagtgactcgggagtctgaggtgggaggatcactcgagccagggaagtcaaggctgcagcagagtgagtcttcctccagcctgggctacagtgagaccctgtctccagaaaaaaggaaaagaaaaagaaaagaaaaattcatgcacacaaacataagcctaattgaaaaatttaggcatatgtttaagaaacagataataaagggaaattgtattcttaggaattcttagatatattttagaatctttatcaaggaagggttctatcatagatggaagat

SEQ ID NO: 22029 - DNA, 248 bp, Homo sapiens
gatgatgattggtaaaaggtctgattgcactgaatgtcacggtccctttgttgccctcaactcccagcagcccattttttccctcccgtcacatttaagtcatgtgtatgggatcatggagcagctgataatttgggattctgtcagtgtgtgtttctgagagtgatcggctcacagctgacgagtatccaacaaaaccagttacacaggagactgacgagtggcagtcatgggtgtgatggtgcatg

SEQ ID NO: 22030 - DNA, 695 bp, Homo sapiens
acagaagatttatgacatcatgagttgttaatttggaaaatatttgcttactgagttatacagatcttcaaatgttgatacatttcattacacaatatcacagaaattgtaactgttaatctcaccactgatctcatctgaaaaatctttaaatattaagaagctgtcaaagtttatggtagcagatacaaagttttccaaaattctgattttacttgaatgcttgaattttattattggcaacaaatattgtcagttgttttccttgaaatgacagttttactatgttaatttcagggaaaatatctgccaaatacctgtcagttgttttttcatgtaaaaaatggtattccatgacaaaagtggctacttcagccttccactcagtcacacaagtacttttcctctagacaaccattgtacttgggtatgcagtgaaatgctttatgtgtacttctcattttgtcacacagaatattaaaatgatgtatattcaagaatcaagattcaataaaattgattttgtttttgctgcttcataagggcattcctgagactggcttttattttttaaggtttgtttgtttgtttgcttgttttgagatggagtctcgccctgtcacccaggcagaggttgcagtgagctaaggtcatgccactgcactccagcctgggagacagagcaagaccctgcc

SEQ ID NO: 22031 - DNA, 650 bp, Homo sapiens
gcactgttgatttgttttgcagaatccttgcagcctttcctggaagcctgtagcaactctttattttttcgtacttgctctgtgctgcttcgagcccctaagcttgatcttcaaatactagaaaaactcagtattattttacagaaactttccaaaatcaagagtaataagaagctctttgaactttttacgattcatctgatgcttcaagaaatacaaaggacaacaaacccagagcatgcatttctctgtattaatctaaattcaactctgttcaatctgggtttaacaaaatgtaactccctggtctccagtgcaagcccttagactggctaattttttaatatagtatatgtggtgcttatttataaacatgtagaaattaccaaagtaactacaattctaccaagtaaagttatcagtagcatcatttatcatgaaaaataaataatttttttgaactgtaaaaatgaaatctgtagaaggtattggaacttttggaatgtttcagttcaggtaaggtagtactaatatacaagatggcgtttctagaatgtatgacactgaagtgactttttgtaaaaatatattaggaaaattatttcttaaaattatgtgaatatttggaataaaattggtgcttatgtgag

SEQ ID NO: 22032 - DNA, 1888 bp, Homo sapiens
  misc_feature (2)..(3): n is a, c, g, or t
gnnggggtttgatgaacgcggttcccggggagactggtacggttgctgtgtgctatggagccgagggtcgtcaagccaccggggcaggatttagtagtggagagtctcaaaagccgctacggactcgggggcagctgccccgacgagtatgatttttcaaatttttatcagtctaagtataagagaagaactctaacctccccaggtgatttggatatctactctggagataaagttggttcatcgttaaaatattctgatgaaagcaagcattgtagaacaccattgggcagcttattcaagcacgtaaatgtgaattgcctagatgatgaactggattctttccatgatttgaagaaacaggaaacagaagaagagttaattgaaaatgattatagagttagtacctcgaaaataaccaagcagtcttttaaagaaatagaaaaagttgccttgccaactaatacgacctcatcgagacctcggactgagtgttgtagtgatgcaggtgactctcctttgaaacctgtcagctgtccaaaatctaaagcatcagacaagcggagtttacttccacatcagatcagtcagatatatgacgaattatttcagatacatctgaaattgcagtgtgaaactgcagcacaacagaaatttgctgaagaacttcaaaagcgagaacgttttttacttgaaagagaacaactgcttttcagacatgaaaatgccttgagtaaaattaaaggtgttgaagaagaggttcttacaagatttcaaattataaaagagcagcatgatgcagaagttgaacacttaaccgaagttcttaaggaaaagaataaagaaaccaagagactgaggtcctcttttgatgcattgaaagaattgaatgataccttaaaaaaacagttaaatgaagcaagtgaagaaaacaggaagatagacattcaggctaaaagagttcaagcacgtttagataatttacagaggaagtacgagtttatgacaatacagagattgaaaggaagttcccatgctgttcatgaaatgaaaagtttaaaacaagaaaaagcaccagtttcaaaaacttacaaggtaccacttaatgggcaagtttatgaacttttaactgtcttcatggactggatttcggatcatcatcttagcaaagtgaaacatgaagaatctggaatggatggtaaaaaaccacaactcaaatttgcttcccagagaaatgatattcaggagaagtgtgtaaagaatccttgcagcctttcctggaagcctgtagcaactctttattttttcgtacttgctctgtgctgcttcgagcccctaagcttgatcttcaaatactagaaaaactcagtattattttacagaaactttccaaaatcaagagtaataagaagctctttgaactttttacgattcatctgatgcttcaagaaatacaaaggacaacaaacccagagcatgcatttctctgtattaatctaaattcaactctgttcaatctgggtttaacaaaatgtaactccctggtctccagtgcaagcccttagactggctaattttttaatatagtatatgtggtgcttatttataaacatgtagaaattaccaaagtaactacaattctaccaagtaaagttatcagtagcatcatttatcatgaaaaataaataatttttttgaactgtaaaaatgaaatctgtagaaggtattggaacttttggaatgtttcagttcaggtaaggtagtactaatatacaagatggcgtttctagaatgtatgacactgaagtgactttttgtaaaaatatattaggaaaattatttcttaaaattatgtgaatatttggaataaaattggtgcttatgtgag

SEQ ID NO: 22033 - DNA, 2421 bp, Homo sapiens
  misc_feature (2)..(3): n is a, c, g, or t
gnnggggtttgatgaacgcggttcccggggagactggtacggttgctgtgtgctatggagccgagggtcgtcaagccaccggggcaggatttagtagtggagagtctcaaaagccgctacggactcgggggcagctgccccgacgagtatgatttttcaaatttttatcagtctaagtataagagaagaactctaacctccccaggtgatttggatatctactctggagataaagttggttcatcgttaaaatattctgatgaaagcaagcattgtagaacaccattgggcagcttattcaagcacgtaaatgtgaattgcctagatgatgaactggattctttccatgatttgaagaaacaggaaacagaagaagagttaattgaaaatgattatagagttagtacctcgaaaataaccaagcagtcttttaaagaaatagaaaaagttgccttgccaactaatacgacctcatcgagacctcggactgagtgttgtagtgatgcaggtgactctcctttgaaacctgtcagctgtccaaaatctaaagcatcagacaagcggagtttacttccacatcagatcagtcagatatatgacgaattatttcagatacatctgaaattgcagtgtgaaactgcagcacaacagaaatttgctgaagaacttcaaaagcgagaacgttttttacttgaaagagaacaactgcttttcagacatgaaaatgccttgagtaaaattaaaggtgttgaagaagaggttcttacaagatttcaaattataaaagagcagcatgatgcagaagttgaacacttaaccgaagttcttaaggaaaagaataaagaaaccaagagactgaggtcctcttttgatgcattgaaagaattgaatgataccttaaaaaaacagttaaatgaagcaagtgaagaaaacaggaagatagacattcaggctaaaagagttcaagcacgtttagataatttacagaggaagtacgagtttatgacaatacagagattgaaaggaagttcccatgctgttcatgaaatgaaaagtttaaaacaagaaaaagcaccagtttcaaaaacttacaaggtaccacttaatgggcaagtttatgaacttttaactgtcttcatggactggatttcggatcatcatcttagcaaagtgaaacatgaagaatctggaatggatggtaaaaaaccacaactcaaatttgcttcccagagaaatgatattcaggagaagtgtgtaaagaatccttgcagcctttcctggaagcctgtagcaactctttattttttcgtacttgctctgtgctgcttcgagcccctaagcttgatcttcaaatactagaaaaactcagtattattttacagaaactttccaaaatcaagagtaataagaagctctttgaactttttacgattcatctgatgcttcaagaaatacaaaggacaacaaacccagagcatgcatttctctgtattaatctaaattcaactctgttcaatctgggtttaacaaaatgtaactccctggtctccagtgcaagcccttagactggctaattttttaatatagtatatgtggtgcttatttataaacatgtagaaattaccaaagtaactacaattctaccaagtaaagttatcagtagcatcatttatcatgaaaaataaataatttttttgaactgtaaaaatgaaatctgtagaaggtattggaacttttggaatgtttcagttcaggtaaggtagtactaatatacaagatggcgtttctagaatgtatgacactgaagtgactttttgtaaaaatatattaggaaaattatttcttaaaattatgtgaatatttggaataaaattggtgcttatgtgagaacagggttaaataatactgtctttctattttcctaatatattagaatccttgcttttgaaagcaaaaatgtatatctttaaactatcatcttgataccataacttttctatatactgtatcctagattaacagatgttgattttttttttattgtgctctttgtgggatagaaaaagttttttattatgctgttcacaggtttaaaaacttttgttttcaaaataattattactggagcatgtatatacaaggcaagacattttttaaacattgaaaggtaaacaaaaataatcgtcctgttaccagagatatctcttggtatagccaaagatgagtaaagtggccacaggtctgggtgaagtaaaggtggtaaaacttgggacttaggacaggatactgagaaacattgttttaaagagtcataaaatcatatatgatcagtgtataatctcagtttcaggagttagaagaaattttcaagaaactattgggcctcttcaaaaaaataccagaaaatgtgccatttttgaa

SEQ ID NO: 22034 - DNA, 1570 bp, Homo sapiens
  misc_feature (2)..(3): n is a, c, g, or t
gnnggggtttgatgaacgcggttcccggggagactggtacggttgctgtgtgctatggagccgagggtcgtcaagccaccggggcaggatttagtagtggagagtctcaaaagccgctacggactcgggggcagctgccccgacgagtatgatttttcaaatttttatcagtctaagtataagagaagaactctaacctccccaggtgatttggatatctactctggagataaagttggttcatcgttaaaatattctgatgaaagcaagcattgtagaacaccattgggcagcttattcaagcacgtaaatgtgaattgcctagatgatgaactggattctttccatgatttgaagaaacaggaaacagaagaagagttaattgaaaatgattatagagttagtacctcgaaaataaccaagcagtcttttaaagaaatagaaaaagttgccttgccaactaatacgacctcatcgagacctcggactgagtgttgtagtgatgcaggtgactctcctttgaaacctgtcagctgtccaaaatctaaagcatcagacaagcggagtttacttccacatcagatcagtcagatatatgacgaattatttcagatacatctgaaattgcagtgtgaaactgcagcacaacagaaatttgctgaagaacttcaaaagcgagaacgttttttacttgaaagagaacaactgcttttcagacatgaaaatgccttgagtaaaattaaaggtgttgaagaagaggttcttacaagatttcaaattataaaagagcagcatgatgcagaagttgaacacttaaccgaagttcttaaggaaaagaataaagaaaccaagagactgaggtcctcttttgatgcattgaaagaattgaatgataccttaaaaaaacagttaaatgaagcaagtgaagaaaacaggaagatagacattcaggctaaaagagttcaagcacgtttagataatttacagaggaagtacgagtttatgacaatacagagattgaaaggaagttcccatgctgttcatgaaatgaaaagtttaaaacaagaaaaagcaccagtttcaaaaacttacaaggtaccacttaatgggcaagtttatgaacttttaactgtcttcatggactggatttcggatcatcatcttagcaaagtgaaacatgaagaatctggaatggatggtaaaaaaccacaactcaaatttgcttcccagagaaatgatattcaggagaagtgtgtaaagcttttgcctctaatgacagagcagctacagtggatgccatttgtgaatatcaaacttcacgagccttttgtaaaatttatatattggtccctaaggcagctagatgctggagcacagcactcgactatgacatcaacattgaggagattgggtgaagacatttttaaaggagtggtaactaacaggaattcaggataattctccacagcattctgtggagaataaacaaagacagctgctttctttaagagctccaatttgccattgagatttttatcaaccttaattgttctcaaaacagtcactcaag

SEQ ID NO: 22035 - DNA, 1945 bp, Homo sapiens
gaaacgcggtatcacggggagacttggtagcgggggctgtgtagctatatggagacacgatggtcagtcaatggtactcggagggagagattttggtaagtgagaggagtgtctatgaagccgcatgcggatatcagggggcacggtgggcaaagacgagatagtgatgaattaaaaatttatgaaatcgagatctaaggtagtacatagaagagattcttataacatcggcagggtgagttgggactactctacttctggtagataacaggttgggtgcatcagttaaagatatttctgatgcaaagcaaggcattgtaggaacacacaattgggcaggcttagttcaaggcacgtaaaatggtgaatttgcctagaatgatgaacgtgggattctttccagtgatttgaagaaaacaggaaacagaagaagagttaattgaaaatgattatagagttagtacctcgaaaataaccaagcagtcttttaaagaaatagaaaaagttgccttgccaactaatacgacctcatcgagacctcggactgagtgttgtagtgatgcaggtgactctcctttgaaacctgtcagctgtccaaaatctaaagcatcagacaagcggagtttacttccacatcagatcagtcagatatatgacgaattatttcagatacatctgaaattgcagtgtgaaactgcagcacaacagaaatttgctgaagaacttcaaaagcgagaacgttttttacttgaaagagaacaactgcttttcagacatgaaaatgccttgagtaaaattaaaggtgttgaagaagaggttcttacaagatttcaaattataaaagagcagcatgatgcagaagttgaacacttaaccgaagttcttaaggaaaagaataaagaaaccaagagactgaggtcctcttttgatgcattgaaagaattgaatgataccttaaaaaaacagttaaatgaagcaagtgaagaaaacaggaagatagacattcaggctaaaagagttcaagcacgtttagataatttacagaggaagtacgagtttatgacaatacagagattgaaaggaagttcccatgctgttcatgaaatgaaaagtttaaaacaagaaaaagcaccagtttcaaaaacttacaaggtaccacttaatgggcaagtttatgaacttttaactgtcttcatggactggatttcggatcatcatcttagcaaagtgaaacatgaagaatctggaatggatggtaaaaaaccacaactcaaatttgcttcccagagaaatgatattcaggagaagtgtgtaaagaatccttgcagcctttcctggaagcctgtagcaactctttattttttcgtacttgctctgtgctgcttcgagcccctaagcttgatcttcaaatactagaaaaactcagtattattttacagaaactttccaaaatcaagagtaataagaagctctttgaactttttacgattcatctgatgcttcaagaaatacaaaggacaacaaacccagagcatgcatttctctgtattaatctaaattcaactctgttcaatctgggtttaacaaaatgtaactccctggtctccagtgcaagcccttagactggctaattttttaatatagtatatgtggtgcttatttataaacatgtagaaattaccaaagtaactacaattctaccaagtaaagttatcagtagcatcatttatcatgaaaaataaataatttttttgaactgtaaaaatgaaatctgtagaaggtattggaacttttggaatgtttcagttcaggtaaggtagtactaatatacaagatggcgtttctagaatgtatgacactgaagtgactttttgtaaaaatatattaggaaaattatttcttaaaattatgtgaatatttggaataaaattggtgcttatgtgag

SEQ ID NO: 22036 - DNA, 1777 bp, Homo sapiens
  misc_feature (2)..(3): n is a, c, g, or t
gnnggggtttgatgaacgcggttcccggggagactgtatgatttttcaaatttttatcagtctaagtataagagaagaactctaacctccccaggtgatttggatatctactctggagataaagttggttcatcgttaaaatattctgatgaaagcaagcattgtagaacaccattgggcagcttattcaagcacgtaaatgtgaattgcctagatgatgaactggattctttccatgatttgaagaaacaggaaacagaagaagagttaattgaaaatgattatagagttagtacctcgaaaataaccaagcagtcttttaaagaaatagaaaaagttgccttgccaactaatacgacctcatcgagacctcggactgagtgttgtagtgatgcaggtgactctcctttgaaacctgtcagctgtccaaaatctaaagcatcagacaagcggagtttacttccacatcagatcagtcagatatatgacgaattatttcagatacatctgaaattgcagtgtgaaactgcagcacaacagaaatttgctgaagaacttcaaaagcgagaacgttttttacttgaaagagaacaactgcttttcagacatgaaaatgccttgagtaaaattaaaggtgttgaagaagaggttcttacaagatttcaaattataaaagagcagcatgatgcagaagttgaacacttaaccgaagttcttaaggaaaagaataaagaaaccaagagactgaggtcctcttttgatgcattgaaagaattgaatgataccttaaaaaaacagttaaatgaagcaagtgaagaaaacaggaagatagacattcaggctaaaagagttcaagcacgtttagataatttacagaggaagtacgagtttatgacaatacagagattgaaaggaagttcccatgctgttcatgaaatgaaaagtttaaaacaagaaaaagcaccagtttcaaaaacttacaaggtaccacttaatgggcaagtttatgaacttttaactgtcttcatggactggatttcggatcatcatcttagcaaagtgaaacatgaagaatctggaatggatggtaaaaaaccacaactcaaatttgcttcccagagaaatgatattcaggagaagtgtgtaaagaatccttgcagcctttcctggaagcctgtagcaactctttattttttcgtacttgctctgtgctgcttcgagcccctaagcttgatcttcaaatactagaaaaactcagtattattttacagaaactttccaaaatcaagagtaataagaagctctttgaactttttacgattcatctgatgcttcaagaaatacaaaggacaacaaacccagagcatgcatttctctgtattaatctaaattcaactctgttcaatctgggtttaacaaaatgtaactccctggtctccagtgcaagcccttagactggctaattttttaatatagtatatgtggtgcttatttataaacatgtagaaattaccaaagtaactacaattctaccaagtaaagttatcagtagcatcatttatcatgaaaaataaataatttttttgaactgtaaaaatgaaatctgtagaaggtattggaacttttggaatgtttcagttcaggtaaggtagtactaatatacaagatggcgtttctagaatgtatgacactgaagtgactttttgtaaaaatatattaggaaaattatttcttaaaattatgtgaatatttggaataaaattggtgcttatgtgag

SEQ ID NO: 22037 - DNA, 1042 bp, Homo sapiens
  misc_feature (2)..(3): n is a, c, g, or t
gnnggggtttgatgaacgcggttcccggggagactggtacggttgctgtgtgctatggagccgagggtcgtcaagccaccggggcaggatttagtagtggagagtctcaaaagccgctacggactcgggggcagctgccccgacgagtatgatttttcaaatttttatcagtctaagtataagagaagaactctaacctccccaggtgatttggatatctactctggagataaagttggttcatcgttaaaatattctgatgaaagcaagcattgtagaacaccattgggcagcttattcaagcacgtaaatgtgaattgcctagatgatgaactggattctttccatgatttgaagaaacaggaaacagaagaagagttaattgaaaatgattatagagttagtacctcgaaaataaccaagcagtcttttaaagaaatagaaaaagttgccttgccaactaatacgacctcatcgagacctcggactgagtgttgtagtgatgcaggtgactctcctttgaaacctgtcagctgtccaaaatctaaagcatcagacaagcggagtttacttccacatcagatcagtcagatatatgacgaattatttcagatacatctgaaattgcagtgtgaaactgcagcacaacagaaatttgctgaagaacttcaaaagcgagaacgttttttacttgaaagagaacaactgcttttcagacatgaaaatgccttgagtaaaattaaaggtgttgaagaagaggttcttacaagatttcaaattataaaagagcagcatgatgcagaagttgaacacttaaccgaagttcttaaggaaaagaataaagaaaccaagagactgaggtcctcttttgatgcattgaaagaattgaatgataccttaaaaaaacagttaaatgaagcaagtgaagaaaacaggaagatagacattcaggctaaaagagttcaagcacgtttagataatttacagaggaagtacgagtttatgacaatacagagattgaaaggaagttcccatgctgttc

SEQ ID NO: 22038 - DNA, 1183 bp, Homo sapiens
gcactgttgatttgttttgcagaatccttgcagcctttcctggaagcctgtagcaactctttattttttcgtacttgctctgtgctgcttcgagcccctaagcttgatcttcaaatactagaaaaactcagtattattttacagaaactttccaaaatcaagagtaataagaagctctttgaactttttacgattcatctgatgcttcaagaaatacaaaggacaacaaacccagagcatgcatttctctgtattaatctaaattcaactctgttcaatctgggtttaacaaaatgtaactccctggtctccagtgcaagcccttagactggctaattttttaatatagtatatgtggtgcttatttataaacatgtagaaattaccaaagtaactacaattctaccaagtaaagttatcagtagcatcatttatcatgaaaaataaataatttttttgaactgtaaaaatgaaatctgtagaaggtattggaacttttggaatgtttcagttcaggtaaggtagtactaatatacaagatggcgtttctagaatgtatgacactgaagtgactttttgtaaaaatatattaggaaaattatttcttaaaattatgtgaatatttggaataaaattggtgcttatgtgagaacagggttaaataatactgtctttctattttcctaatatattagaatccttgcttttgaaagcaaaaatgtatatctttaaactatcatcttgataccataacttttctatatactgtatcctagattaacagatgttgattttttttttattgtgctctttgtgggatagaaaaagttttttattatgctgttcacaggtttaaaaacttttgttttcaaaataattattactggagcatgtatatacaaggcaagacattttttaaacattgaaaggtaaacaaaaataatcgtcctgttaccagagatatctcttggtatagccaaagatgagtaaagtggccacaggtctgggtgaagtaaaggtggtaaaacttgggacttaggacaggatactgagaaacattgttttaaagagtcataaaatcatatatgatcagtgtataatctcagtttcaggagttagaagaaattttcaagaaactattgggcctcttcaaaaaaataccagaaaatgtgccatttttgaa

SEQ ID NO: 22039 - DNA, 1830 bp, Homo sapiens
  misc_feature (2)..(3): n is a, c, g, or t
gnnggggtttgatgaacgcggttcccggggagactggtacggttgctgtgtgctatggagccgagggtcgtcaagccaccggggcaggatttagtagtggagagtctcaaaagccgctacggactcgggggcagctgccccgacgaggtgatttggatatctactctggagataaagttggttcatcgttaaaatattctgatgaaagcaagcattgtagaacaccattgggcagcttattcaagcacgtaaatgtgaattgcctagatgatgaactggattctttccatgatttgaagaaacaggaaacagaagaagagttaattgaaaatgattatagagttagtacctcgaaaataaccaagcagtcttttaaagaaatagaaaaagttgccttgccaactaatacgacctcatcgagacctcggactgagtgttgtagtgatgcaggtgactctcctttgaaacctgtcagctgtccaaaatctaaagcatcagacaagcggagtttacttccacatcagatcagtcagatatatgacgaattatttcagatacatctgaaattgcagtgtgaaactgcagcacaacagaaatttgctgaagaacttcaaaagcgagaacgttttttacttgaaagagaacaactgcttttcagacatgaaaatgccttgagtaaaattaaaggtgttgaagaagaggttcttacaagatttcaaattataaaagagcagcatgatgcagaagttgaacacttaaccgaagttcttaaggaaaagaataaagaaaccaagagactgaggtcctcttttgatgcattgaaagaattgaatgataccttaaaaaaacagttaaatgaagcaagtgaagaaaacaggaagatagacattcaggctaaaagagttcaagcacgtttagataatttacagaggaagtacgagtttatgacaatacagagattgaaaggaagttcccatgctgttcatgaaatgaaaagtttaaaacaagaaaaagcaccagtttcaaaaacttacaaggtaccacttaatgggcaagtttatgaacttttaactgtcttcatggactggatttcggatcatcatcttagcaaagtgaaacatgaagaatctggaatggatggtaaaaaaccacaactcaaatttgcttcccagagaaatgatattcaggagaagtgtgtaaagaatccttgcagcctttcctggaagcctgtagcaactctttattttttcgtacttgctctgtgctgcttcgagcccctaagcttgatcttcaaatactagaaaaactcagtattattttacagaaactttccaaaatcaagagtaataagaagctctttgaactttttacgattcatctgatgcttcaagaaatacaaaggacaacaaacccagagcatgcatttctctgtattaatctaaattcaactctgttcaatctgggtttaacaaaatgtaactccctggtctccagtgcaagcccttagactggctaattttttaatatagtatatgtggtgcttatttataaacatgtagaaattaccaaagtaactacaattctaccaagtaaagttatcagtagcatcatttatcatgaaaaataaataatttttttgaactgtaaaaatgaaatctgtagaaggtattggaacttttggaatgtttcagttcaggtaaggtagtactaatatacaagatggcgtttctagaatgtatgacactgaagtgactttttgtaaaaatatattaggaaaattatttcttaaaattatgtgaatatttggaataaaattggtgcttatgtgag

SEQ ID NO: 22040 - DNA, 1943 bp, Homo sapiens
  misc_feature (2)..(3): n is a, c, g, or t
gnnggggtttgatgaacgcggttcccggggagactggtacggttgctgtgtgctatggagccgagggtcgtcaagccaccggggcaggatttagtagtggagagtctcaaaagccgctacggactcgggggcagctgccccgacgagtatgatttttcaaatttttatcagtctaagtataagagaagaactctaacctccccaggtgatttggatatctactctggagataaagttggttcatcgttaaaatattctgatgaaagcaagcattgtagaacaccattgggcagcttattcaagcacgtaaatgtgaattgcctagatgatgaactggattctttccatgatttgaagaaacaggaaacagaagaagagttaattgaaaatgattatagagttagtacctcgaaaataaccaagcagtcttttaaagaaatagaaaaagttgccttgccaactaatacgacctcatcgagacctcggactgagtgttgtagtgatgcaggtgactctcctttgaaacctgtcagctgtccaaaatctaaagcatcagacaagcggagtttacttccacatcagatcagtcagatatatgacgaattatttcagatacatctgaaattgcagtgtgaaactgcagcacaacagaaatttgctgaagaacttcaaaagcgagaacgttttttacttgaaagagaacaactgcttttcagacatgaaaatgccttgagtaaaattaaaggtgttgaagaagaggttcttacaagatttcaaattataaaagagcagcatgatgcagaagttgaacacttaaccgaagttcttaaggaaaagaataaagaaaccaagagactgaggtcctcttttgatgcattgaaagaattgaatgataccttaaaaaaacagttaaatgaagcaagtgaagaaaacaggaagatagacattcaggctaaaagagttcaagcacgtttagataatttacagaggaagtacgagtttatgacaatacagagattgaaaggaagttcccatgctgttcatgaaatgaaaagtttaaaacaagaaaaagcaccagtttcaaaaacttacaaggtaccacttaatgggcaagtttatgaacttttaactgtcttcatggactggatttcggatcatcatcttagcaaagtgaaacatgaagaatctggaatggatggtaaaaaaccacaactcaaatttgcttcccagagaaatgatattcaggagaagtgtgtaaaggtttgttttttaatttgaaatatgtgattcagaatatatgaagattaaaaaaggaaaagccagggccaggcacagtggctcacgtctataatcccatcactttgggagttcgagctgggcagatcacctgaggtcaggagtttaagaccagcctgggcaacgtggtgcaaccccgtctctaccagaagaaataaaaaagaaaataagaaaaaagttgttgtgggcggtaggacgaagaaaagtttactacgacctggtgtggggggcgcggccccgtgaagtctattaagaatggctgtaaggtgtccaaaggaaacgggtgccgacgaagcggggctgcggttccaccccaggaaaaaaccgcgcgcgtggaccaccggcttgttgggtacaactgcagttgtggggtcgggaagggccagcaggagcgctcaacaaaggagggagcacggggaaagcgataatacggcgccgcgggggaagagaagttccacagcgtaagcctgcgataaaccaacgggtgcaacgcagtcccgactcataaaaaaaccaactcacgacacacaccagcttagaaaacacacaacagagccttggaggaacagcaatcaacaacgagaacacagaataccaacccgctcttagagaaaacggccaaaaaaagcatcggagacagttaacac

SEQ ID NO: 22041 - DNA, 809 bp, Homo sapiens
gatccccggccactctagtcagtggaatggaccctatttgtactcttaaaggggagtcattttcttataataagtatcagtagtagctctattgtttgctgtgatcaatggtgacaccttgactttatgtattgccatttatcaatcatttattcagtgaagatttattgaccattgactttattatggttggtgaaataatcgcaagaaaatttattcagttaggtatttataaaaatacctaggtattaaatgaagattgttctagttgatataagcaataaagcctgactatatggctcctaccctcaagaatcttacggtatagtagggatgatgaaatagtgtaagaatgatttatatgtgccagagtacatgacagagtttttactgtcttgaagagctacagagttcagaagagaaggggcttagtgaggaaaagttttgtgggagaagtagaattcaagttgaatactaaagaacttcagtaagtacagataaaatggagtgtattctaggcagtggaatggacaaaaaaatgaaaacatggacatataatgaacttgacatactcataaattggtgaagaaagtattagattatagatctacattttgaggaatgctgagtatgaggcagggagctttgagtttcatgtaagagaaggtaagatataaacaggaatacaatgataaattgggctgaaatgtagatttcctgactcccaattcttctccttagtgtagacagagatatacagtcatgcactgtataagaacgttttggtgaatgacagattgcatatacaa

SEQ ID NO: 22042 - DNA, 454 bp, Homo sapiens
agactatagagttgaccttaagatcatactatggaatgagttaagattttgggggctgttaggatgtaattaatatattttgcatgtgagaaggacatgaatttgctgtggccaggggtggaatgctatagcctgaatgtttgtttcctccgacccaccgaattcaaatgttaaaattctaaccctcagtgtgagggttattaggaggtgggacttcgaggggatgattaggtcaagagggttgtatcctaatgaatgtgattagtgcccttataaaagagaccctggagagctcccttgtcgctttcattatgcgagaacacaggaagaaggtggccatctatgaaccaggaaatgggtcctcaccagacaccaaatctgctagtgacttgatcctagacttcccagcctccagaactgtgagaataaatatctattgtttgtaagccatcca

SEQ ID NO: 22043 - DNA, 297 bp, Homo sapiens
gagctatcctcagaagggtaacagtgtctgatattgaacaaaggactaaaaaagaccaggtgatagatacctgcaggtctgaggcaagtacttgtctgttatggcaggatggaaagcaggggttactcacctggagagcttgctaatacactggtcctaatcctaatccccaaggtaaaggcaaactctccaggatgggctgttgggagaaagagtgtgtgtttaaacttcttaagcgattttacggagcactcagtggtttaaagaccattggagtagagaactgaaaactcaaat

SEQ ID NO: 22044 - DNA, 237 bp, Homo sapiens
tcctaatctcatccacttgagtcattgaatgagatgaacttagtttgccacttacctaaagtcagcctcttccttttctacatttacctacatttctttctagcactctcctagtctctaatctctccctctaccaaactctgtaaacatagctggatttgataaactcatttaaactaaagtaaaaagggtcggtaaaactgccacatctattctttaagtagcctttccacttca

SEQ ID NO: 22045 - DNA, 952 bp, Homo sapiens
cactctggtggcaaatcctgtcagttctggtcctgtctctgcctctgccatggccttcattgaggagggttaggggatttggtggcagcaggagcacactgctgatcccagaagcatagggttaagaactaactgccttgaatacgatcttagtgattttcagtggagccaaggagtttgaaatgcataggcaatgtaacttcatcaaacttcaaagagccaagcttgataatctttcagggttgtgagaaaaggatgagaaaggattgtagaggacatgggttagagagagcgagctggtttagcagaattgttgtgaggattaaagataaatattggtgggcatgtttgtatctatctctagaagaaactagagtccattctctgtttaccatattgtcaggcctaactaacatttttcactttttggtatcagttactagtaaagtgcctcatggttagtgtaaaccttcagcagcctgccgtgcttactcacctccacttgcaggaggcaggtgtgtctttattttgcttgctgagtccctgctattaaattgtcacttgcgcttggttctttatatgtgttacttttaactctttattccttctagatgagtgtgaggtagtcatcttgagatgaagcagctgggaagcagggaggcagtctggccatagcggttaggaagagggtcattaaggtggtcagaagtgggatagaaccttggtttgaccactgactagctgtctgaccttgggcaaattatctcacctttctaagctccagtttcttcacatgtaaaatgagaatcatactaaaattatcccggccgggtgcagtggctcatgcctgtagtcccagcatttatcactttgggaggccgaggcaagcagatcacctgaggtcaggagttcaagaccagccttgccaacatggtgaaaccccatctctcca

SEQ ID NO: 22046 - DNA, 526 bp, Homo sapiens
aggggagttttgtagtcctttgttgtaaaatcttggaatgttaaacctccaggtccaccgtcttacctgacagctaaggaaattaagctcagactagagaaatgatttactcaagaccacatgggaagtaaattagtggattgacactcctggctccagtgtcactccttgaagttttaaagcctacctgatctgaaaatcactccctttccctgccctccttgtcctttggtgaaaatgtaaaaaaccagggcactcaggcaaggagggataaagtgaggagcttgatcatgtcataaccaagctttggtgcctgcaaagctcatttattgggcagcaggacctactcatgtccctctgccagctgctgttctggtagaatataaaacaaatgtgtttggctgggcacagtggctcacgcctgtaatcctagcactttgagaggccaaggcagtggatcacttgaggccaggagttcaagaccagcctggccaacatagcaaaaccccatctctacttcaaaaaa

SEQ ID NO: 22047 - DNA, 481 bp, Homo sapiens
gttattcattgttgaaggttgaattgtgttcccctaaaagatgtgttgaagtcttaacccctggtacctgtgaatgtagctttatttggaaataaggtttgtgcagatgtaagcaagttaagatgaggtcatattgaattagggtgaaccctagagccaatgactaatgtccttataaggagagatttgcagacacagaagcggcacagagaaggccattgtgaagatcaaggcagaaaccggagttatggcatcataagccaaggaatgccaaggattgctggcaaccacctgatgttagaagagtcgaggacatgttcttctccagagcttttggatggtgtgtggccctgccaacctttacattttggacttccagcctccgaaatggtgagagattaaatttctgttgttttaagctacccagtttatggttatttgttacaacagccctaggtagctactacaccagtgaaaccat

SEQ ID NO: 22048 - DNA, 510 bp, Homo sapiens
tagtgatctcacctggcatcgaccttgctgatagggatcttaagccgggcagcgacttcctctgccgtctcagtgccttctgagatgatgcccacacccttggcaatggccttagctgtaatgggatgatctcctgttaccatgatcacctgggttgggaaggagagggaagaggagcagaatcatcttcagagcccggatccttcatttttctcctctgagaactgacagaccactgcttttttcaacaagggttttagtcgctcattcccaagaacttgtggtgtagaccaaaaaccatgctactgtgatttcaacccttgggagtgggtcaagaccatgagaccataaaacaggacaatttgggtcctagatttaccaggaataagccagagatttgactatattcagaatttcatttaattgctccagaagctattctgcttccttaagtgcaaagacagaaacacctacacatagaacaagtggtaataaaggaatgtctggaat

SEQ ID NO: 22049 - DNA, 3861 bp, Homo sapiens
gggggtgggcggagtcctctcgcaacatccgccaggtagcttcttagttgctgcccctagctctaggagctcctgagtgcacacgccgtacccgtcccttgtcgggaatcctgtcgcaggtttttaagcaacagtcctcaggagggccaagggagtctgacggtgatgtcttcccccaggctcattcccctgtggaaagatttaaaactcctcctaaatgacaccataaataaaagcaagcaaccttcggaagacccaaagaactgcctgattgtgctgagtgaccggtcccaggcactgttcaaagagtctcgctatcctcaaaatatgccgtgtgtatgctattacttcagtgatgcccacttcttcgcctccctctcttgggtgacatcaaacacaaaagaaatacaagctgtagcatggatgaagagcaaaactgaggacatggttgagaaaagaacattctccatgactgaacgattgccacccatccagtccatggtccatgcaggctcctttcatatcctcgtggtctactgtggtgacctgatcctgcgactctttggggaccactttcgggcattcaaacccctgggtaaagtgccctgccgcttcaacatcagctgcctctgctatgacccggaaatgaagatgcttcttgtctggcatcctgggggcagtggtgtcctgggtcattgagctaggtggcacgggcctccaaatagcccacatggtctccatgccaggtgatgagcttgtccaggacatcgtgctgaatggtcccagtggctccctcctggccctgtgtgagacggtggtgagggtccttatgcaccagggcaagggccagctgggagaggtaaagaggttcacgtccaccagcagcggctcctccatcacctgctgcttcacctgttttgatcagggctttctctatgctggaaaccaagctggggaaacccaagtttggagcctccagcagggccatccactccacagtttccaggcccatcaatcaggagtgatctgtatccgcagccgaccagaggcccacaccctgctaacagctggtagtgacagcctaatcaaggagtggaacctgacttcagggagcctgcttcggcggctagagcttggtgaggagctataccggctccagtttattgacagcattactttcttctgccaaactgcccatagtttttccttgcaccgcctgccctgcttctacagcctcttcaatgtctgtggctctgctccccagcagttgcgtcgggtctgctgtggaaataactggttccggatcctgtgtaccactgaggatggcttgttgcgctttgtgtccccagtaacaggggaccttctggttatcacctggcccttctcaatcctggaccaggctgtggattgggcctacgacccaggtaaagaggagctctttgtagcaacaggcagctcagaggttctggtatttgacacaacccgctgcccttgcccagccaagtatctcttaggcacctcaccaaattctcaggactttgtacaatgcctggcttatgggcatttcaacttggggcggggtctagagggactgatattctctgggcaccagagtggtgtgataagagtgctctcccagcacagctgtgctcgattagaaaaattcatgcactttggcgctgtactggcactctccacgctgtctggagggatttttggtggccaaggaaactctctgctctgttcctatggaatggatgactatgtgcacctgtcagaagctgtgcttgatggggtcaaagtacaactgcggcctctcgccagcattctcagcagctgtcacctaacacatctgatactcttgccccagtctgtaggtgccatcacagagacaaactgcctgcgtctctggaagttccatgattttctgtcctctgggtcacagaatggcttgaaattcatagaaacactgcccctgcacctgtgtgccatcacatcctttgatgtctgcctctccttgagtctttttgtcacaggttctgccgatggctctgttcggatctgggacttccatggcagactcatagccattctggactcatcactgcactttggcccagtctgttttgcaaatgaccggggtgacctgcttgtgacttttaaccagagtctttacctagtgtcctgtttaaaattgcttcccccagccctgctgactcgcctttcctttatgagcatatcagatgaagtactggaagtccctaagcctttcataccaagcttcttcttctcctttgagaccatgtttgtgcccaagtacatctaccctggacaagcgcaacagaaattagtgggtctggagaaacttgtcaacaaccgggccattgcctttgaccattctgtgccacatgtgatagaagaagatgaggaagggagcccagtgttactgcgttcctccatgcattattctttgcaggacatggaagattggatgcaggtgagcaaacgttaccaatgccattatgtgcttcctccccagctacaactgactagctgggatggactcaacccctatcagatattgcgatactactttggtcatgggcgggaatggctttttgcccctgactgctatatccccaattcagtgattcgtgcccgtctttggccagagggcaccccaatatacctacagtgcaacctgcatgcaccccagcgggagctggaatggaacagttctcaggattctttttctgacacagcagggtaagagctataagtaatacagaatatccaaagaataaggaggaggatgaacacttcctagaaatgagactttccaaggatgtaacctacagtgtccttacagatggagcaaaccgaagttggctgggaagaaagatgagtgaaataaccattaatagcatgattgagacaatgctcaatattatggtccatgcttccttgctgaagtaccagtgctgtgttggtgcactagggcaaatctttgcctcttaccaggtgtccccagccctacgctctgagacagcccgtcggctactgaatgatacaaccaattccaacccgctgatccgaggactagcttgggaagggctgaagcgtctaggaatgattactcatctttttgccatgcctctggctcaaggattaatggacaaggatgaaagagtgaggatcaagaccctaagcctcatggctgagattggaatccactctaggacctcactcttacagctgacccaaaaacaagagacttttcgggagatgcagcagcagatgatcggggaggaacccctggaccatctactggggatgcgggccacagatctccaaatcctttccactcaagtggagcagagattgaatgaaaacctgaccctgtcacatagagatgaaaagccggctttttctttagatgtctcaatgccttctgaacttaaatcctccctgaaacctcctacagtttctgaagaatctgaagtggccatcaagcccagcaaaggccaaagacgaggccaagcaggggtcaaaaagcatagccaaaaatggttgcggggtctcaagaagacgaaagagagagactctaaacagatgagcacagagccaggcctcttagaggatgaaagtgggactgaggccgcaccattgagatggaggaagcatccgtctattcccaagtggtcttcaagcaccagtgtaataaagctctcaaaagatgttgattctcaagagaaagatatctcgaaggatcacattgcattgaccctgaagaggctgcagaaaatacgtgacaaaagagacaagaaagcaacagctcagaaactcaaaaagaagcacaaa

SEQ ID NO: 22050 - DNA, 293 bp, Homo sapiens
tctaaacggccagatagtaaatattttagcctttgcctaaaatacagtctctaacttctatttagctctgcccttctagggaaagcagccatagataatatgtaaatgaatggacacagctctcccaggttggagtgcagtgacgagatctcagctcactgcaacctccacctcccaggagaatcgcttgaacctgggaggtggtggaggttgtagtgacccaggatcatgccattgtactccagcctaggtgacaagagcgaggctccatctcaaaaaaaaaaaaaaaaaaa

SEQ ID NO: 22051 - DNA, 391 bp, Homo sapiens
ctggagtagaaaatctttcacacataaaacttcaccattagctaagataaattcctttttgtgtggaataacatgattgtaaatataaactgcatttcacaaataacatggatttgaaatacttctcaatgtttgagtcatttacaaactgtgtaaactgagacctggagaccatctaaatcaaaatcctgagtggaacagtattcaaggtaggctttggggacagttcccccaaatgttacactgtttcagtagtgttggtacccatctataatacaaattgttttaaaaataagttttattgtgtatatatcaggtatattacatgatgttatgggacacatatagatagtcaaaatggttactatagtgaagcaaataaacatttcca

SEQ ID NO: 22052 - DNA, 228 bp, Homo sapiens
caacaggcttttcctagaagatggaattagctgaacagcccctgcagtctactgtttgcacctaaggaagctgctttacattttgattttgttgtatatcagaagactggctgacacaaaacaagaaggcttatcttatagcctctgatatgtcctgttacttcctgctgccaggaaaatgcttaagacagcatgttaatttaggagggattttcaaaactatacggt

SEQ ID NO: 22053 - DNA, 418 bp, Homo sapiens
tcgtctatagattcaatgcagtcccaatccaaatcccagtaagttgttttgtgggtattgacaaacattttaaagtttatatggagaggcaaaaagacccagaatagccaactcaatattgattgagaacaacaaagtcacaggattgacactacctttcttcaaggcatactataaagctacagtaatcaagaaagtgtgatattagcaaaagaacagacttacagcaactgttcttattagcaaaggaacagtttacagcaaaactgtaaaacttagaggataacatgggagaaaatgtagatgaccttctgtttggcgatgacttcttagttgcaacaccaaaggcatgaaccatagacgaaataattgataatctttacttcattaaaattaaaaattttgctttgtgaaagac

SEQ ID NO: 22054 - DNA, 526 bp, Homo sapiens
taaaaaattatttgttgattttctgaaatttaaatttaactgggcgtgctggttcattggtttgtttgttgctaaatctggcaactttactcccaccacatccactagtcattttttggcagaacactttgctgaggatttgactactccaaaaccccacaaatcagctggaccactggttaaagattagttctgtcttctggtcttttcttggcatcccatatccataagggagaaccaccctactcatgactccaagatcatttgtgaatcccaggagacatctatgttggtaccaatttattaggtaccaatactgaactcatctataaatgtaaattggcctacatggtatccccaaaagacaaggaaaactgaaaacgatcagcagattgaacaaaagagacctgacagaaaagaaagaaaaatggaatcactgagattcaaaggcaactacattgctaaaataaggccaggattccaagcaatgaaagaaatttgagaggaaaaatatgtattagaagta

SEQ ID NO: 22055 - DNA, 364 bp, Homo sapiens
tataggttcctctacaccttaaaagtagttaagagattcacctttccataatttggaatcactaagcatcagtctgtccactagagaagagttttcaccatctggcccttcttgtaaaccaacttgacataaaatccggcgaaggccatctttaaatagaaggaaaggtagaatgagatagcaacttcaaatattaaaatagtgacattttagtagatgttcaaatggatctgtagagttttaaatgttttcttaaagttcaaatttattcagaaaaggcaaacatattaactgttttattaatattttaacaaaaaggaaataaatttcaaatctcacatcacacaccattactcctgaaagt

SEQ ID NO: 22056 - DNA, 436 bp, Homo sapiens
ttataataggcagtcttcctcttattcaccaggggattccatccctctgattcaggaccatggtatatggaatcgccctgccttctcatcttcagcctctcgctgtacaggatccatcctcttagcactttttttcctcttagtaaactattgctgtgtaacacagagaaatactcatagctctgatcacaaatctgagtcagatgcctcttgaagaatggacttctgaggagcaccgtactcgccccagcacagctctcacacaggagtttgctgaaagtctcctgcctgtgtgcctcccagtatgagctctgtgagggccgtaaccccagggtataagtaactcaactagaatatgtgcaatacacttctctgtgtcctgatgttaaacttaaaatgaaatagttttcagaataaaaataaatttgtatatatt

SEQ ID NO: 22057 - DNA, 518 bp, Homo sapiens
cataatcatgaatatatgaaaaaaccttttttatgtgagaacatataacttatttaaactacttcaaatgcttttgaaaaatttcaggagatttttattcaaatataaaaatacagaaattgataaatgccagagcattaaagatatattaaatagtgaaagaaaaatattgtttttaacaatacctgagataaattacatgtttgtagaactatgttctatgatcaattataaatttttactgaatcttaaatgccagaattgagatataaattgctcctactacaatttcaaatttcgaagacatgttatttattgtcttatatcttacatgatccttttttctcaaatggtaatgaatggccagacacaggtatttcatttacaaagcaagcaggataatcataacgcaggatattacacttccactcttgattgtttcttcaaggcaagcttttctaggttatgagaagtgcactttcaaattaagtcaattacactgtagcttctagttaagc

SEQ ID NO: 22058 - DNA, 411 bp, Homo sapiens
cccggatgatggagagcagtcctgtctgggtggaaacgtttactgggttaacacatttttcctgccgcggtctttctgagggctgtaatattcctgcctgtctgtgtaggccccataccagcttggccactgtggggtcacttggaaagggagcctttcggcaggcctcccctcccactgggaggatgcttcagtccctctgcactcagacgtgttggaagcacattccacacgcagagtgtgtctcttctcccggctgctcctgctgctggcctgggacagaggagcctgttccatggcagggggtcctgagtgctgccacttgtagtatcgtggggaggctgctcggctcccagcctctctcatgcccactgcccatgggctgcactgacagatgtgtctcctcacttc

SEQ ID NO: 22059 - DNA, 170 bp, Homo sapiens
cttgacttgccttagcgtgagctgcagacagtctgcgaagaatctcccacctgtgctcatctcttgctccgggattcccctgagcaactgttctagggcctatgagggccacatggaaagatggtctggggtattaagattacaggccagaggccaactgtctagcatca

SEQ ID NO: 22060 - DNA, 235 bp, Homo sapiens
cactgggagagtcccactaaggggagccccatccctgtaaacaaacttgttcaagtccctatcactgaggccccctccctttggctggggagtgcttcctgcttcctctcccacaaatgccaaaggatgcagcagattgaggcactggggagaaagtgcccagcctgggagattgtgaagtggagtgcaaagccttacctgctagtagaggaccatgggaccttggtcagtttca

SEQ ID NO: 22061 - DNA, 824 bp, Homo sapiens
ctcctaatctgacacttctttcatgtggaccagggatctgaactgtgtttcttccaaacttttggagcttgcttccttggtggtaagctaaatagtggcccccaaaatatacccctttataacccctgtaacctgtgaatattatatgacataatggactttgcacatgtaattaaattaaggatcttgagatgaggggattatcctagattatctgggtggacccctaaatgcaatcccaagtgtccttatgagtgggggccagagagagagattggacacaggagaaggaggcaatgtgactactgcagcaagatgctacactgctggctttggaggtggaagagaaggccaaaaatgcaacgaacgtagctttggaagctggaaaaggcaaggaaactgttttcccttagaacctctggaggaagtgtgccctgccaacacactgattttagcccagtgaaactaattttgaatttctgacctctagaactgtaagagaataaatgtgttttgttttaagtcgctaagtttgtggtaatgtggtaatttgttacagtgcagtaggaaactaatacagggctcatctgcctccaggtacaagtggtggcttggctgatccctgttcttattttaaggcgtccctctcatggcacaaggagagcataggcccagcattttcctgaaccagtatttgaaacaatctgcactttgggggaacctgttggggagttcttggaagcaagagagaaagcctcatatggtacccgatccttgctttggaactctcccagcaccttcagtgatatcatgaacaaagagtt

SEQ ID NO: 22062 - DNA, 434 bp, Homo sapiens
aaatgccacttcatacccaccaggacggctataataaaaaagatggaaaataacaagtttgggccaggatgtagaaaattggaaccctcaaatattactagtgggaatgcaaaataatatagccacttttgaaaataatacagcagttcctcaaaaagtaagtatagttaccatataatccagcaattccacttctaggtataacccacaaaaactgaaaacaattttcagttcttttatgtccacacaaaaacttgtatatgaatggtattcataatggccaaaaaatgggaaacccaaatgtctatcgattaatggatggataaatgaaatgaaatggaatattattcaaccataaaaaaagtactgaaatatgttactatactgataaacttgagtatggattatgctaagtgacagatgctatacactaa

SEQ ID NO: 22063 - DNA, 393 bp, Homo sapiens
tggattacatcacacattgaacagcaaaacttaattcaaagccttgccattacaaggctatgagctgagctgtgtcctccaaattcacatgttgaagccctatcttccaatgtgatggtatttggaggtgggacctttgtaaggtaattaagtttggatgaggtcatgagggtggccctcatgatgggatgattgtcctcataagaagaaacatgagagagcttgcttcttcactttctaatatgtgaggacacagagaggaggcagctgtctccaaacaagaaggaaaacttttattggggaactgaatttgctggcaccttgatcttgaacttggccaattccagagccaagagaaataaatttctgttgtttaagccacctagactatgg

SEQ ID NO: 22064 - DNA, 377 bp, Homo sapiens
gggttgtgagagactcagctccccagtcttgctttaaaaccttgctgtgaaactttttgctgggaattcaaggccaagtgtctgaccctggaaacgtcctttgatggagtgccccaagtgaatgacttctcatggctcagtcacatttgccacgcagctgagctgggcacgtggccagaagtccctgcagtttcctttggggatgactggtgtctttccctgggggttgaatttcctgggcctttgcttattaattttattttaaaatacggaattataggcaaagcagtcatttaaaatgcaaatcccctaaacacttcctggaacaaagaaccacaccatcttctccatggtgtctccgtccttctttgtaccct

SEQ ID NO: 22065 - DNA, 499 bp, Homo sapiens
agaccttcttcagaagggtctttgtcttagctgtgtgtagggagggtttttagacctagaatctcacaactagacttgagaaaatcgattaatgaacaatgcaccggaggacgtgtccctgtacctaggagtattcctgctactgacaccgcgtgacgctggctctggttttccttggagtctcctcccatgttggaggtgtgtcccatcttgtgataagaacctgggcttctgccaaggaggggtgtggtcccaatgaagccacccaggaaagcaccttgcttagtcagtctggggcttatttgccagaagcatatcagtcctgacattgctccctggggtggccctaggacccgagagcagaagcaggaaggaggatagaaagaggccatgccgacccccttcccctttgtccctcttttcctcagcctccatagagagggtgccccctcttccagcccttgactggtgctggtccatgattcagaggaattctgga

SEQ ID NO: 22066 - DNA, 446 bp, Homo sapiens
ctgccccccagtattgcaggcctgacccctggcctttgtgagaacccttgttcagtaatggaggaaaagctgaggccagatgttgaggggccttcccgcatctgatatgtgccccctaaattggtgtgatacccacagccagcaaagaccctctctggattacagggttgatgctggtcccacactaccaaggacagaggtcacctgcaattgagcctttgatccacaggagagggctggttgcattggcctttgacctctccccaggcttggctcaaaatggtcaaactttgagccttttggtgtgaaggtcccctggtcgttactgcccttttattaagactcataactgggggccggacgcggtggctcacgcttgtaatcccagcactttgggaggccaaggcgggcagatcacttgaggccaggtgtttgagaccagcctg

SEQ ID NO: 22067 - DNA, 774 bp, Homo sapiens
ctgaaggacatgatactggccgagactgggttccctttttcactgaattagcttggacttcaaagcaatatcttaacaaagaatatgggccctagtacaacttctgactgtagcttagcctttttacttatttttaggtaataaggtgcatttttagagcttcaaatcttaggcaacatgtaaaaataatgaaaaacctttttttttcttaaatgaggactttgtctatatctgagctgtgaagaatatttacagtaaaaagaaacagtaagtgcaatttttaagaaaattttttaagtgaatttctgattagtgatttaaattgtatatttaatttgattaatgtcatattacctcaggggtcatattttttgtttctttgttgtatattctgaggactgtgctttggtgcacccgagatagatgtggctcttgattgtcagaggaagaagacttaatatgtcaataccactaaattgaaatggcagtgtctgtcttttcatgttcatatcagcttcagtgtcattccatcggtgttgtttcagaaacttcttcctctgttttcctgacatatcacatgttcaggttactatctttagggtatgagaatagttttagtggcaaggataaaaatgatttcaagaatactacccaaaataaaacctggtatttgggcatacacagttgtcttccctgttttccctgtactttctccttcccccgtctcctttgtctccttacccctcctttccctctatctcagatgtatgcaca

SEQ ID NO: 22068 - DNA, 563 bp, Homo sapiens
aggggagctcagggtaatggagtatcctcaagaacctgcagatattacctccctccagaaccgtggtctcagccctggctgcatattccttcaacgggagggctttagaaatgctgtgccagagctgcaccccagaccaacaaaatcagactctccaggatgcggccaaggcatcagtatgtggaaagctttcaggaaaactgagcaaaatgaaagccaattcaaagaagaaggaattaagtacataattgtgcagatgatacatggaaatggtaagaatggtgacaatgggacgtaagtgactgaaatttgggatacattggattagaagaaaataagcccccaagaaaccggaataagtctggagggcagcaagagtgactgtccagctaagaacctcatcagcaatacaaaacattgtcacagatgttgaaacagaccctgaggttaatgcattctttccaacattaggtcctaaaacttctcctgaaaagctaccttaaatctaacttttgaaagtgcacaataaaggtgaattaaataaaagcaacttgaaattttta

SEQ ID NO: 22069 - DNA, 651 bp, Homo sapiens
aggggagctcagggtaatggagtatcctcaagaacctgcagatattacctccctccagaaccgtggtctcagccctggctgcatattccttcaacgggagggctttagaaatgctgtgccagagctgcaccccagaccaacaaaatcagactctccaggatgcggccaaggcatcagtatgtggaaagctttcaggaaaactgagcaaaatgaaagccaattcaaagaagaaggaattaagtacataattgtgcagatgatacatggaaatggtaagaatggtgacaatgggacgtaagtgactgaaatttgggatacattggattagaagaaaataagcccccaagaaaccggtaagaaggatattgcaacagcacgagagattttaaactccttgatatcagaaagacttatcttctattaattttgttttcctctcaggaataagtctggagggcagcaagagtgactgtccagctaagaacctcatcagcaatacaaaacattgtcacagatgttgaaacagaccctgaggttaatgcattctttccaacattaggtcctaaaacttctcctgaaaagctaccttaaatctaacttttgaaagtgcacaataaaggtgaattaaataaaagcaacttgaaattttta

SEQ ID NO: 22070 - DNA, 393 bp, Homo sapiens
ccaaggcagggacaggacgcagccgtcctcatgcatatggggctgtggccgggccagctcctgcagccccagtgggaggcagggcagccctgaggttagagcccgggcccaaagcgcaccttcaaggccatgcctcttcctgctgtgtgactctggacactcacataacctctctgagtgcaccttcaaggacatgccccttcttgctatgtgaccctggacactcaacctccctgggccacacttcctctgctggaaactaggggctcttatgatgaaggagggatcacctcgcccctcccccgggactagtggcatagtggacactcgacagctatcgcctttgctattctgtcttccccggacgggtgttcgagagcaagtgagttctga

SEQ ID NO: 22071 - DNA, 622 bp, Homo sapiens
accatatatgggacaggtgctcataaaacattgaattggttgacactgatcttgtacttcccagcccctagaactgtgaggaataaatttctgttttttataaattacccagtctcaggtattttgatatagcagcaggaatggactaagacacgttttttattcacaataaacatttagttatacttctgaattttaagaagaatgttttatatgttccacattaacattttattttaaaatatgtacaatgttttctgatttattcattactgaatctcaactgttaaatcaagtttaacttaaagctgcctccttaaatattttaagttcagcctaaaggtttctctgtacatagtgaactataacctaaatggagttgtcaacagactgagtctactcttgtgccgatcaccaagttttggccaattaaaggggtcagttcaaactgttcaaataaggtaaattctgtgctgtaaccagtctggctgtttctgttactcatttccgttttctgtatgtcactttcctttttctgtctgtaactcttcatccatcacgtggctgcactggagtctctctgagtctatcattctttgctcaattaaagtctgttaaatat

SEQ ID NO: 22072 - DNA, 498 bp, Homo sapiens
tctacttttttgcactagcgcgccttgtgttggtccccgaattcggccattatggccgggacttctgaattttaagaagaatgttttatatgttccacattaacattttattttaaaatatgtacaatgttttctgatttattcattactgaatctcaactgttaaatcaagtttaacttaaagctgcctccttaaatattttaagttcagcctaaaggtttctctgtacatagtgaactataacctaaatggagttgtcaacagactgagtctactcttgtgccgatcaccaagttttggccaattaaaggggtcagttcaaactgttcaaataaggtaaattctgtgctgtaaccagtctggctgtttctgttactcatttccgttttctgtatgtcactttcctttttctgtctgtaactcttcatccatcacgtggctgcactggagtctctctgagtctatcattctttgctcaattaaagtctgttaaatat

SEQ ID NO: 22073 - DNA, 535 bp, Homo sapiens
acgtaattgaagggagaagtacaattctacattaatagttggagactttaatatcccaatctcagtagtggatagaaccatcaaaatctaagcaaggaaatataggactttcacaacacaataaaccaactagatctaacaaccatatacagaacactctacccaacaatgaaatacacattcttctcaagtatacataggataaattccaagataggtcataaattaagtctgaattgattttaaaagacagcaaaatatcttccctgaccacaatgggatgaacttagaaatcaaaaacaaaaagaaaactggaaaatttaaaaatcatagaaattaacacactcttaaccattagatcaaaaaagaaaccacccggcattggttgaaaatcaccccccggctttggccatggcagcgggtgagattcggcgcccagagcctccaggggcctcagctcaccgcgcgctgacacatgtgcggcggtgaaacccagccccaacaggccccgcggcctctccctgggtgcggccgc

SEQ ID NO: 22074 - DNA, 1315 bp, Homo sapiens
tagcttcttcatcccttactcagccaccttctatcttctcaactcttgttctaccattaattgacttattctctcaatatttcttaagttcttaagagacactgtagtccattcatgtttttcatgtcagcacttagattggcttcccttgaattagggagcccagccctggttcccttggttatggttggaagaaaggggcgaagcatagtacatgatagcatagtccttggaggagggcctgcggaatggttgaattctgtatttgtcagcttgggctgccataacaaattgtttagaaaggtgtaaaccatagaaatttattttcatggtattggaggttgaaaggtctaagatcaaggtctggtagggttctgcttctgatgagggttttgtctgtggctcgcaggtggctaccttcttgtgtgctcatgtggcctttcctcagtgcttgcacatagacagtgagacagattttcctctcttcctctttctagaagaccaccaattctattggatcagaaccccacccttatatcctcatttaacattaactgtttcctaaaagacctgtttccaaaatcagtcacactggagttagggcttcaacataggaattttgggcaacacagttcattccatagcaacatcgtaaggtactatactcagctattcaaactctattagggcagacatttctagaatagtcacaacactgacatgttccttgtagtattaccatccatcagtaaccaaagcccggaaaggtgggatttatcctaaacccatcttccttacctccatattaccatgtcacagtacttacatctcttaactaatcttaatctagctcccattttcctttattttccttttcttctctagttttgaaaatgcctcttacctggcttctttatccatagcttctcttgatttttgtatgtcctccataccattgccagagtgatctttctaaagatcactttgccaaaataaacttctaattaaatctaaactctttaatggctgggtgcagtggccacacctataatcccagctctttgggaggcctaggtgggtggatcacttgaggtcaggagttcaagaccagcctgaccaacatggcaaaactgtgtctctactaaaattacaaaaaaaaaaaaattagccgggcgtggtggcaggtgcctgtaatctcagctactcaggaggctgaggcacgagaatagcttgaacctgggaggcggaggttgcagtgagccgagattgtgccactgtactccagcctgagtgacaaagtgagactccatctcaa

SEQ ID NO: 22075 - DNA, 446 bp, Homo sapiens
aacctgggaggcggaggatgcagtgagccaagatcatgccactgtactccagcctgtgtgacagagccagattgctggaccctgtctgaaaaacaaaaacaaaaaaaaccagtcacctaattattacatgtaattctaagtacattcgtcaaaatgaacacagcagtgctataaaaataatactccaggccaagcacggtggctcatgcctgtaatcccagcactttgggaggctgaggtgggcggatcatctgaagtcaggagttcaagaccagcctggccaacatggtgaaaccctctctctactaaaaatacaaaaattagctgggggtgatggcgggtgcctgtaataccagctacttgggaggctgaggcaggagaatggcttgaacctgggaggcagaggttgcagtgagccaagatcgtgccactgcactcgagcctgg

SEQ ID NO: 22076 - DNA, 365 bp, Homo sapiens
taaagaaaatgcatactaattttcttatcttgctcaagggaaggatatgcttattgattcagtctagatacaaggaaaaagtaagtttctgtaaatgttaaaaatttaagggtagctagtagaagaatagaaactgaattcatgacttccaaactactggagaaaaaaataatgtaaatctgatcaagaaaatatatgaaaagagggtttaaaaaatgaaacaacctagaattttggcaaaataagtgcataaaatatcaggtagttcaaatagattaataatctcagtaaatgtgactaattttgactaacaagactaacttcaacccaactctaaaggacagagcctttcaggtaatgttaaa

SEQ ID NO: 22077 - DNA, 409 bp, Homo sapiens
gtagtatcagccctacaacttgtttttctccttcaatattgtcatattctttcttcaataaatacttattgagtacttgtatttactcttctatgagaaatagcagtgattgtgacagacaacagttctgcattcatgaaatttatcatctagtggggtttattagttctacatgcacacattgacttttagtatttaataaatacaagcatgaaaataagtagaggtacattgcatattataaatctcctggttgaatgttagtgtatagtaacatattcatgtacatgtaagcatgtgtacatgaaagtgaaataaactaagtgccttgattttttaaaatgaactctaatgatattttctataatcttgtctccccttgctttctcagtattttatttaaaaaaaa

SEQ ID NO: 22078 - DNA, 631 bp, Homo sapiens
  misc_feature (619)..(619): n is a, c, g, or t
  misc_feature (625)..(625): n is a, c, g, or t
  misc_feature (628)..(628): n is a, c, g, or t
tctgtgatcttgcaacttttacattgaaaaatccgcctgcgtcaaggcatgagccaccgcgcccggccctcatatgccctggagctcacttataataaggtaaagagaaaaagggcctgggaaggcttccatcagaaaggtcacatgaccactccaggtggtgttgccttactgaagttaagcaaaagagagtttcagaaaggcagtcatggtgtcaactgttattgatttatatctgccaggattgctgcttcattaaagtagtatgaatggaaatctggtcacaaggtaaagatgggtaatggggaagtagaagtatggagtatggaacatgcatttgaaaggctggtagccaggtgcagtgactcacgcctgtaatcccagcactttgggaggccgaggcgggtcgatcatctgaggtcaggagttggagaccagcctggccaaaatggtgaaacctctctctactaaaaacacaaaaattagccgggcatggtggtgcacgcctgtgatcccagcttctcatgaggctgagacaggagaatcgcttgaacccaggacatggaggttgcagtgagctgagatcacgccactgcactccagcctgggcaacagagcncccccncgncaa

SEQ ID NO: 22079 - DNA, 242 bp, Homo sapiens
cacctgcatttgttattgctatttttttatacagtatttttaaaactgcatgtttcccagcctgggcaacatggcaaaaccttatctctacaaaaaatacaaaaattagccaggggtggtggcacgcacctgtagtcctagctatgcaggaggctgaagtgggaggatcgcttgaacctgggaagcagaggttgcagtgagctgagatcttgtctaggcgacagagcgagaccctgtttcag

SEQ ID NO: 22080 - DNA, 547 bp, Homo sapiens
ccagctaagaaaagctgatgttcacaacaaaatgaagagacttgactacccaggaaggtagacataagaggaaacagccacaaacagcacaggcatacaagtgtcttgcttcccaagcacaggcaggtttttgtgcccacacttcagggctcgtctgactgcactggctctgccaggcgctgcccagcttcctgcttcccctcccagtcctgcttcttctgtcagtaaaacaaaattttagagtgatgctttgcttgatgctttgggggctgcatttttatcacaagtgtggaaattgtactttgctctggtttctacagatgcctaaacatgtctaggttgctgttgccttggcaactggctgagctgttggttgtgtgtgtggtgaaggttctggcaggggcttcatggaagcctctggtcatccttagagcttttcagctaagctggcggttactcccaagcccagaaccatatgctcttagctcccctttgtcgtttggagcttcccattttatttccctgagaaatccctgctcagctgccc

SEQ ID NO: 22081 - DNA, 208 bp, Homo sapiens
cattcgttaaattttatcccacaacaatcctacaggtgggtcttattatttccattctacacgtgaagagtctgaggctcagaggtcagcctgccaaagtcacacacacagctggggagcttgctggactccacaggccacacatcttccatgagagcacactgcctctttgaaaataaagctgcagagcaaaaacactaacatttta

SEQ ID NO: 22082 - DNA, 545 bp, Homo sapiens
gtttctatcacattctgactccatctgcggcctcattaaggtgatagaaacatactaggaatgaggccgcagatggagtcagaatgtgaaattacaaataatcactggatccatctactgttttccatcaccttccccactgatgctctgggcgagagagtgatgtgtcacttcaactgtgtgtaatatgtcagacacgtcctacaataacaggcgtcatatttgtattatttttagtttactgtagaaaataatgtcaccgccaaaggtgatgagagtcacgttttgtaggatctgttttcttatacttaaagacagacttctgctacggtaattgccagtattcatggcttcctttctgtgtcagaagagaagggatctgctttctcttggctgatttcacatagcattggtaatagacatgcatttctctttctaaaggggagtaactttttaaacccttcctgattttagcctggcaatgtaagtgtccttaatgtgactgttttgataattaaaaaaaggtatataatttaaaaaaaaaa

SEQ ID NO: 22083 - DNA, 1307 bp, Homo sapiens
cggtgggcgcctgtaatcccagctacttgggaggctgaggcaggagaatctcttgaacctggaaggtggaggttgcaataagccgagatagtgccactgcactccagcctagataacagagcaagactctgtctcaaaaaacaacaacaacaacaacaaaacaattctatgactgaaagtgactaaaaagctggctttatgccattaacactctgtactttgcagccaatcagaactgacgcagtctgggtgctagctgcttcaaaagcaacccacaccacacttttaccatttccatacatcaactgctgagaatatgaaaatgcacagtgacaggttttaggatcctgcttcaggatttccttttcctggtttggtcactagagttggctatttatctgtttctaaacaatagctattttatcgaatagtttagagaccactattaaatattgtgactgatgaaggatctgtgaatttttttatatatgttctaagagttaccattttgataccttttaaaaaccagcagctttctactatattcatgtaagacagcatgaataaaaccattttttgatacagggttttatttggctttaaactcaggaaccaagttaattatgccagattgaactttgatttttactaccttttcaaagatattttaaaaagtggattactacatatgatttctttggagcttacatttctttacttcacgaattctatgtcactgttacaagtttccattctgatggcttctgggcctttgtacctttgtttttggtgccttattcctagtatgtttctatcaccttaatgaggccgcagatggagtcagaatgtgaaattacaaataatcactggatccatctactgttttccatcaccttccccactgatgctctgggcgagagagtgatgtgtcacttcaactgtgtgtaatatgtcagacacgtcctacaataacaggcgtcatatttgtattatttttagtttactgtagaaaataatgtcaccgccaaaggtgatgagagtcacgttttgtaggatctgttttcttatacttaaagacagacttctgctacggtaattgccagtattcatggcttcctttctgtgtcagaagagaagggatctgctttctcttggctgatttcacatagcattggtaatagacatgcatttctctttctaaaggggagtaactttttaaacccttcctgattttagcctggcaatgtaagtgtccttaatgtgactgttttgataattaaaaaaaggtatataatttaaaaaaaaaa

SEQ ID NO: 22084 - DNA, 385 bp, Homo sapiens
ggggctgcttttttccttagaaaaatagttttttataagtattagaattttgtacatttgaaccctgcttgcttatcaataatttcttggtaagccattatgaattaaccttgcaccaaggattaaagtctaaggactatactttatatctgtatttaagagacagagtccattcacttctctttcaatgcctcagaaatacataagtatcatgacctgtttaagattatttctgcctgctattcaaatttcaaagaattgtaatttaagcctctgtgctacattttatttaattactatttagtatgagcttcttttgagttcctgcaaagtagacatgtatcaagacatccaattactattggactggaaaatgctgtgactt

SEQ ID NO: 22085 - DNA, 252 bp, Homo sapiens
atctgctgttgtattgttgataaacaccattataccagtgatttaacttatgccctggaggaagaagtgccttctagaatctcttaatggccataaaacattggcgttgatagattttagaggcaggcagccttcaaggcattcaatgatgaaaataaagaaacatttgtgaaaattcagtgaagatttcagaggccctacaggaactaggagcttcataccaagttcacatttgagtctgagttcagtttt

SEQ ID NO: 22086 - DNA, 567 bp, Homo sapiens
accataccaaatgttggaaatgtagtaatgagtaggacatgtgtatatggtccgtacctgaaaggaagttattctagtaggagaggtgatctatcaacacataattacaacatgtgatatgagctgtgaacacttatgaacaaacagggtgctgtgtaaaagaataaaggaacaaagatctatgtataggagttttctggaaaatgtttggattcggcagtcattttcaaaggcagagggcattgatagcagtatcttaacatggaaaacattaaaactaactagatattagtattctatttccaattcaaaaataaccagaagatagtgatgttgttttgaatataggatgtcaatctttgtgttaataatgtgttttgaaaaagcaagacttaattgaaaatatacatcaaattataatttcagtgtattaaaaaactgcctgtttaaatatgtcctttctttgctgtaaattttggttaaaatctattggagttatgtccttgtggtgaagtacaccctacccccaagagagcaaatgatgaataaatcagtagatgttccatg

SEQ ID NO: 22087 - DNA, 394 bp, Homo sapiens
gtcatctgtatggtccattgaccctttatgctgctgggtgtttatctgcccagtgttctgaggtctgacatgctaacaaatctcagcatagtaacagtcacttgggctggcgcggggcgcacgcctgcaaccccagcaccttgggaggaagaggcaggaggaggatcacttgagcccaggagtttgcgaccagcctgagaagcatggtgaaaccccatctctactaaaaaatacaaaaatcagccagatgtggtggtgcatgcctgtagtcccagctactcaggaggctgaagtgggaggatcgcttgagcccaggaaccagaggttgcagtgagccaagatagcaacactgcactccagcctgaatgacaaagcaagacccagtctcttaaaa

SEQ ID NO: 22088 - DNA, 202 bp, Homo sapiens
gaacatggtgctgaggatatagaaacaaataaaacgcattcttgctttcaagatttattattgattaagacagttaaaaacataaatgctggtcctgtttgatcaatgctttccagaagatatgggggaagaaagggcggggaatttttcaaacatgggtttatgaggtgaacaggaggggtgtaaccattttgtaaacacc

SEQ ID NO: 22089 - DNA, 474 bp, Homo sapiens
tcctccatatgtatattattaatttccaatggtaatattaatggccactgctttagaggaaacattcatgttcctacaatctgctaatctgtagactgagaagatatatcaccttgaaatttatcaaaacttactttcttcttgatcttttaaaattatcctaattacctcattgtattagtccattttcacactgctataaagaaatacccaagactgggttatttataaaggaaagagaactcactcactatcaggagagcagcatggggaaaaccgccccccatgatctaatcacttcccttcctccacatggagggattacaatgtgaggtgagatttgggtgtggacagaaagccaaaccatatcaccaattatttgatttcttttaactttgttttggcagaggttgcagtgtgccaagatcgcaccattgcactctagcctgggcaacaagtgcgaaactccgtctc

SEQ ID NO: 22090 - DNA, 421 bp, Homo sapiens
  misc_feature (2)..(2): n is a, c, g, or t
anttcggccgcgtcgacaagctatcggcccataccccgaaaatgttgttatacccttcccgtactaattattcccctagcccgtgaggattgtccagtcccatccagcaggacacatgcccctgccagagcttggatgtcagaagaggccaacgtcctgtttgggagctggcagctcagcccagccacatagcctgaggcccccaacagtggagctgctcagggtggatgtcccctctggtcacttgggaatgtcccctgtgacggcagaagctgcacagtgccctctgggaccaaagtgggatgtttgcccgctcctggctccatcagcctgtagaccctaccagtggatcccatagctgacaggagacttgcccagggccagccctggggccttggctgtccagcttttaacgagaggt

SEQ ID NO: 22091 - DNA, 2477 bp, Homo sapiens
gttaaactcgtcatttcctccagctagaggagctcaactgatctgttttctttcgcccagccaaaatcacagaatgaaggcggtgaagagcgaacgggagcgagggagccggcgaagacaccgggacggggacgtggtgctgccggcgggggtggtggtgaagcaggagcgtctcagcccagaagtcgcacctcccgcccaccgccgtccggaccactccggtggtagcccgtctccgccgaccagcgagccggcccgctcgggccaccgcgggaaccgagcccgaggagttagccggtccccacccaaaaagaaaaacaaggcctcagggagaagaagcaagtctcctcgcagtaagagaaaccgaagtcctcaccactcaacagtcaaagtgaagcaggagcgtgaggatcatccccggagaggacgggaggatcggcagcacagggaaccatcagaacaggaacacaggagagctaggaacagtgaccgggacagacaccggggccattcccaccaaaggagaacgtctaacgagaggcctgggagtgggcagggtcagggacgggatcgagacactcagaacctgcaggctcaggaagaagagcgggagttttataatgccaggcgacgggagcatcgccagaggaatgacgttggtggtggcggcagtgagtctcaggagttggttcctcggcctggtggcaacaacaaagaaaaagaggtgcccgctaaagaaaaaccaagctttgaactttctggggcacttcttgaggacaccaacactttccggggtgtagtcattaaatatagtgagcccccagaagcacgtatccccaaaaaacggtggcgtctctacccatttaaaaatgatgaggtgcttccagtcatgtacatacatcgacagagtgcgtacctactgggtcgacaccgccgcattgcagacattccaattgatcacccgtcttgttcaaagcagcatgcggtctttcaatatcggcttgtggaatatacccgtgctgatggcacagttggccgaagagtgaagccctacatcattgaccttggctcaggcaatggaaccttcttaaacaacaaacgtattgagccacagagatactatgaactaaaagaaaaggatgtactcaaatttggattcagtagcagagaatacgtcttgctccatgagtcgtcggacacttctgaaatagacaggaaagatgacgaggatgaggaggaggaggaagaagtgtctgacagctagcaaactaagaacccaaactattgatacacggtttccttcttggaagtctttgattgactcagagagcactatggtggtgggtccagcactatggtgctctctgtaatgcctcttactgccttaagtctttcctctgttgctgaccagattgtgttaccatttgaatacactgactaatgtttgttaaactttttctgtggcaccttggccacatgcctgcaggcatttgttttcagaacagtctcaccaattacaacacaccgtgttttagtagaagtgttgtggttttagttggtgctttcagaactgctgcctaggaaactataaacccttggttaaggggaaatcatggcttgttctctttgtacagttactttatttatataggtgttaagctttgtggaccaggtgtttttcttttggggcgaacccctgagcagagaatcttactaggctttggttatcaccaaaacaacctccagtatataccaaagctttgacttgtttgagctcttgagcttagaagttgattttgcacttatttttttggggggtgggaatgtactgcagtcagtaaacattattgactgtttaacttaaacagatgctttatggcacctgctcaagcccgtgactgtacagaaggatcctggttgctaccagtgggtgctgattcagcatcacaagtgactgaaattggctgtggatctgttctttgtgaaagaattcctgatttctccatggagcatgtacacaacaattttgatcatattaactgtacttcagttttgcatttttattcaaatgttatctctttttttctttgagaaataaactgtcactgatgtgacagcgttctttctttattctaataacatgtatagatctaaagcaggttgtgttgtttacatgtttctacacatttcatcctttaaaaagttgttgagagaggttgtatttaccttcccaaggttggaaagcaggggaatttcccagtgtcctagttttccaccagaggaatatgtgtaagtagcaaagtatttgctgcttacatatagtgtgtatgtatgtatatatgtaaattgtgtgttaaagagctgatactgattttcatatgacaatgttaggcaaaggcctccctgcatttgaagagcaggttttcatttatatgtatttttgggataaaaaaataaaatttgtaaatatagcccca

SEQ ID NO: 22092 - DNA, 2707 bp, Homo sapiens
gttaaactcgtcatttcctccagctagaggagctcaactgatctgttttctttcgcccagccaaaatcacagaatgaaggcggtgaagagcgaacgggagcgagggagccggcgaagacaccgggacggggacgtggtgctgccggcgggggtggtggtgaagcaggagcgtctcagcccagaagtcgcacctcccgcccaccgccgtccggaccactccggtggtagcccgtctccgccgaccagcgagccggcccgctcgggccaccgcgggaaccgagcccgaggagttagccggtccccacccaaaaagaaaaacaaggcctcagggagaagaagcaagtctcctcgcagtaagagaaaccgaagtcctcaccactcaacagtcaaagtgaagcaggagcgtgaggatcatccccggagaggacgggaggatcggcagcacagggaaccatcagaacaggaacacaggagagctaggaacagtgaccgggacagacaccggggccattcccaccaaaggagaacgtctaacgagaggcctgggagtgggcagggtcagggacgggatcgagacactcagaacctgcaggctcaggaagaagagcgggagttttataatgccaggcgacgggagcatcgccagaggaatgacgttggtggtggcggcagtgagtctcaggagttggttcctcggcctggtggcaacaacaaagaaaaagaggtgcccgctaaagaaaaaccaagctttgaactttctggggcacttcttgaggacaccaacactttccggggtgtagtcattaaatatagtgagcccccagaagcacgtatccccaaaaaacggtggcgtctctacccatttaaaaatgatgaggtgcttccagtcatgtacatacatcgacagagtgcgtacctactgggtcgacaccgccgcattgcagacattccaattgatcacccgtcttgttcaaagcagcatgcggtctttcaatatcggcttgtggaatatacccgtgctgatggcacagttggccgaagagtgaagccctacatcattgaccttggctcaggcaatggaaccttcttaaacaacaaacgtattgagccacagagatactatgaactaaaagaaaaggatgtactcaaatttggattcagtagcagagaatacgtcttgctccatgagtcgtcggacacttctgaaatagacaggaaagatgacgaggatgaggaggaggaggaagaagtgtctgacagctagcaaactaagaacccaaactattgatacacggtttccttcttggaagtctttgattgactcagagagcactatggtggtgggtccagcactatggtgctctctgtaatgcctcttactgccttaagtctttcctctgttgctgaccagattgtgttaccatttgaatacactgactaatgtttgttaaactttttctgtggcaccttggccacatgcctgcaggcatttgttttcagaacagtctcaccaattacaacacaccgtgttttagtagaagtgttgtggttttagttggtgctttcagaactgctgcctaggaaactataaacccttggttaaggggaaatcatggcttgttctctttgtacagttactttatttatataggtgttaagctttgtggaccaggtgtttttcttttggggcgaacccctgagcagagaatcttactaggctttggttatcaccaaaacaacctccagtatataccaaagctttgacttgtttgagctcttgagcttagaagttgattttgcacttatttttttggggggtgggaatgtactgcagtcagtaaacattattgactgtttaacttaaacagatgctttatggcacctgctcaagcccgtgactgtacagaaggatcctggttgctaccagtgggtgctgattcagcatcacaagtgactgaaattggctgtggatctgttctttgtgaaagaattcctgatttctccatggagcatgtacacaacaattttgatcatattaactgtacttcagttttgcatttttattcaaatgttatctctttttttctttgagaaataaactgtcactgatgtgacagcgttctttctttattctaataacatgtatagatctaaagcaggttgtgttgtttacatgtttctacacatttcatcctttaaaaagttgttgagagaggttgtatttaccttcccaaggttggaaagcaggggaatttcccagtgtcctagttttccaccagaggaatatgtgtaagtagcaaagtatttgctgcttacatatagtgtgtatgtatgtatatatgtaaattgtgtgttaaagagctgatactgattttcatatgacaatgttaggcaaaggcctccctgcatttgaagagcaggttttcatttatatgtatttttgggataaaaaaataaaatttgtaaatatagccccatttcaaagagtaatgctttcctagcgtagaggaccttgtgttcataggtctgtttgctgctaatggagccttctgtcagtacttttgagataaaagtaggtagctgttttagagtgttgtggggcaggttatatcgttggcctccaagtcagtggaatagcagatggtgacatggaggtgggttgtggggaaaggtggtgaagcagctcaatcagtgttactactaattg

SEQ ID NO: 22093 - DNA, 2576 bp, Homo sapiens
gttaaactcgtcatttcctccagctagaggagctcaactgatctgttttctttcgcccagccaaaatcacagaatgaaggcggtgaagagcgaacgggagcgagggagccggcgaagacaccgggacggggacgtggtgctgccggcgggggtggtggtgaagcaggagcgtctcagcccagaagtcgcacctcccgcccaccgccgtccggaccactccggtggtagcccgtctccgccgaccagcgagccggcccgctcgggccaccgcgggaaccgagcccgaggagttagccggtccccacccaaaaagaaaaacaaggcctcagggagaagaagcaagtctcctcgcagtaagagaaaccgaagtcctcaccactcaacagtcaaagtgaagcaggagcgtgaggatcatccccggagaggacgggaggatcggcagcacagggaaccatcagaacaggaacacaggagagctaggaacagtgaccgggacagacaccggggccattcccaccaaaggagaacgtctaacgagaggcctgggagtgggcagggtcagggacgggatcgagacactcagaacctgcaggctcaggaagaagagcgggagttttataatgccaggcgacgggagcatcgccagaggaatgacgttggtggtggcggcagtgagtctcaggagttggttcctcggcctggtggcaacaacaaagaaaaagaggtgcccgctaaagaaaaaccaagctttgaactttctggggcacttcttgaggacaccaacactttccggggtgtagtcattaaatatagtgagcccccagaagcacgtatccccaaaaaacggtggcgtctctacccatttaaaaatgatgaggtgcttccagtcatgtacatacatcgacagagtgcgtacctactgggtcgacaccgccgcattgcagacattccaattgatcacccgtcttgttcaaagcagcatgcggtctttcaatatcggcttgtggaatatacccgtgctgatggcacagttggccgaagagtgaagccctacatcattgaccttggctcaggcaatggaaccttcttaaacaacaaacgtattgagccacagagatactatgaactaaaagaaaaggatgtactcaaatttggattcagtagcagagaatacgtcttgctccatgagtcgtcggacacttctgaaatagacaggaaagatgacgaggatgaggaggaggaggaagaagtgtctgacagctagcaaactaagaacccaaactattgatacacggtttccttcttggaagtctttgattgactcagagagcactatggtggtgggtccagcactatggtgctctctgtaatgcctcttactgccttaagtctttcctctgttgctgaccagattgtgttaccatttgaatacactgactaatgtttgttaaactttttctgtggcaccttggccacatgcctgcaggcatttgttttcagaacagtctcaccaattacaacacaccgtgttttagtagaagtgttgtggttttagttggtgctttcagaactgctgcctaggaaactataaacccttggttaaggggaaatcatggcttgttctctttgtacagttactttatttatataggtgttaagctttgtggaccaggtgtttttcttttggggcgaacccctgagcagagaatcttactaggctttggttatcaccaaaacaacctccagtatataccaaagctttgacttgtttgagctcttgagcttagaagttgattttgcacttatttttttggggggtgggaatgtactgcagtcagtaaacattattgactgtttaacttaaacagatgctttatggcacctgctcaagcccgtgactgtacagaaggatcctggttgctaccagtgggtgctgattcagcatcacaagtgactgaaattggctgtggatctgttctttgtgaaagaattcctgatttctccatggagcatgtacacaacaattttgatcatattaactgtacttcagttttgcatttttattcaaatgttatctctttttttctttgagaaataaactgtcactgatgtgacagcgttctttctttattctaataacatgtatagatctaaagcaggttgtgttgtttacatgtttctacacatttcatcctttaaaaagttgttgagagaggttgtatttaccttcccaaggttggaaagcaggggaatttcccagtgtcctagttttccaccagaggaatatgtgtaagtagcaaagtatttgctgcttacatatagtgtgtatgtatgtatatatgtaaattgtgtgttaaagagctgatactgattttcatatgacaatgttaggtctacctgggacctaactagaagtgtgaaaacgtaggcttggattaaggcgacagcgatttctaggatagtcagtagaattagaattgtgaagatgataagtgtagaaggaaggttaatggttgatattgctagggtggcgcttcccattacgtgcatgagtatggtgcctgcatcatcgtacc

SEQ ID NO: 22094 - DNA, 2458 bp, Homo sapiens
gttaaactcgtcatttcctccagctagaggagctcaactgatctgttttctttcgcccagccaaaatcacagaatgaaggcggtgaagagcgaacgggagcgagggagccggtccccacccaaaaagaaaaacaaggcctcagggagaagaagcaagtctcctcgcagtaagagaaaccgaagtcctcaccactcaacagtcaaagtgaagcagtccgttttcatgctgttgataaagacatacccgagacccggcgatttacaaaagaaagaggtttaatggacttacagttccacatggctggagaggcctcacaatcatggtgggaagcaaggaggagcaaatcacacggatggcgtcaggcaaggagagataaaagagagcgtgaggatcatccccggagaggacgggaggatcggcagcacagggaaccatcagaacaggaacacaggagagctaggaacagtgaccgggacagacaccggggccattcccaccaaaggagaacgtctaacgagaggcctgggagtgggcagggtcagggacgggatcgagacactcagaacctgcaggctcaggaagaagagcgggagttttataatgccaggcgacgggagcatcgccagaggaatgacgttggtggtggcggcagtgagtctcaggagttggttcctcggcctggtggcaacaacaaagaaaaagaggtgcccgctaaagaaaaaccaagctttgaactttctggggcacttcttgaggacaccaacactttccggggtgtagtcattaaatatagtgagcccccagaagcacgtatccccaaaaaacggtggcgtctctacccatttaaaaatgatgaggtgcttccagtcatgtacatacatcgacagagtgcgtacctactgggtcgacaccgccgcattgcagacattccaattgatcacccgtcttgttcaaagcagcatgcggtctttcaatatcggcttgtggaatatacccgtgctgatggcacagttggccgaagagtgaagccctacatcattgaccttggctcaggcaatggaaccttcttaaacaacaaacgtattgagccacagagatactatgaactaaaagaaaaggatgtactcaaatttggattcagtagcagagaatacgtcttgctccatgagtcgtcggacacttctgaaatagacaggaaagatgacgaggatgaggaggaggaggaagaagtgtctgacagctagcaaactaagaacccaaactattgatacacggtttccttcttggaagtctttgattgactcagagagcactatggtggtgggtccagcactatggtgctctctgtaatgcctcttactgccttaagtctttcctctgttgctgaccagattgtgttaccatttgaatacactgactaatgtttgttaaactttttctgtggcaccttggccacatgcctgcaggcatttgttttcagaacagtctcaccaattacaacacaccgtgttttagtagaagtgttgtggttttagttggtgctttcagaactgctgcctaggaaactataaacccttggttaaggggaaatcatggcttgttctctttgtacagttactttatttatataggtgttaagctttgtggaccaggtgtttttcttttggggcgaacccctgagcagagaatcttactaggctttggttatcaccaaaacaacctccagtatataccaaagctttgacttgtttgagctcttgagcttagaagttgattttgcacttatttttttggggggtgggaatgtactgcagtcagtaaacattattgactgtttaacttaaacagatgctttatggcacctgctcaagcccgtgactgtacagaaggatcctggttgctaccagtgggtgctgattcagcatcacaagtgactgaaattggctgtggatctgttctttgtgaaagaattcctgatttctccatggagcatgtacacaacaattttgatcatattaactgtacttcagttttgcatttttattcaaatgttatctctttttttctttgagaaataaactgtcactgatgtgacagcgttctttctttattctaataacatgtatagatctaaagcaggttgtgttgtttacatgtttctacacatttcatcctttaaaaagttgttgagagaggttgtatttaccttcccaaggttggaaagcaggggaatttcccagtgtcctagttttccaccagaggaatatgtgtaagtagcaaagtatttgctgcttacatatagtgtgtatgtatgtatatatgtaaattgtgtgttaaagagctgatactgattttcatatgacaatgttaggcaaaggcctccctgcatttgaagagcaggttttcatttatatgtatttttgggataaaaaaataaaatttgtaaatatagcccca

SEQ ID NO: 22095 - DNA, 309 bp, Homo sapiens
cagtgagatcaccttgctgaccacgagcggtggctcccagcactgcaaagatatgtgtggggccggcctgcttttgtgactgcagcattcacccttcaggggacagacagcggctcttgctgtctcaatgccactggaagaactccaaagggtgcctggaggaccagcttggactttcagttctgttgcttacgagtgtgtgaccttggacatgttgtgcgtctctctgcctctcggttctgtgacctgggcatagttaacacctgcttttgaggtcttgtgaggaataaatgagacattttattgaaa

SEQ ID NO: 22096 - DNA, 481 bp, Homo sapiens
gaaattatctcctcgaattggccaacatatgcataaatcctttgttttgatctttataaccatttctaagatgagtaaaatggttactcttatttccaatttatagaatcagaaacggaggtttagctgagtcaagtggtatgtctcatataataaatggtaaatgaagatctgttacgtgtactatgtcaaaaataaagtcacctaaaagaaaacttaagcatgacaccaatacttgggaaaaaatggtttcaaatatactggttaactggtgtttttattaaaatattcctttatgcaacgtttgtatatatttttaaagaaattatgtcaagccagattttacatcaaattcttttcctaaatattaagatactgctccacagcattcctcatcccccaaaattttaagactactcaagtacagggtgggaggcagatgaagtcggccccagccactctgggtgtcatggtgccacag

SEQ ID NO: 22097 - DNA, 407 bp, Homo sapiens
atcctcaatatacgatatgatctactcttagtccagtattattataactagtatttctaaatagcatcagtaggccagtggcatgtacctttattgagttatgaacatctttgagaacctctctagcaaaatttccatgcataaatgccatacttaattgcagttattgccacccactgatgcccatatagacatacctagaccaaactaccccagatgaagaagtgctgcattagaaactgaaggaaagtatactcatttgtacatatagtccatctccatattgtgtaatgaaatttcaacacaggaaaacaacaaagtacagacagcaggggtatccaatcttttggcttccctgggccacagtggaagaggaagaactgtcttgtgtgacacataaaatacac

SEQ ID NO: 22098 - DNA, 740 bp, Homo sapiens
catggcacgtgcctgtaatcccagctactcaggaggctacagcaggacggtcacctgcacccaggagtttgaggttacagtaagctctgatcacaccacagcattccaacctgggtgacagaggccctattcatttaaaaaaaaaaaaaaaagaaagaaaaagaaaaaaatgaatgggactttccatttgtaaagtgagagtatttatttctacaactgtctccaattagctttttattagtagctgacttacctaaacgtgcccagtagcttttcaacttttgacttttttggttcagatcccagaagcttctaattaggttatttgggctaagaactcttttccaatcttttccaatctcacattcctatcttacacctctgaaatgacatggcaagtaaaggcactttcatcgtcaaaagaccccagcaaaagaggcagtaacaggctcactttttgtaagttactaaactgaagctcagaaggccaatgacttgaccaaaggccacacaacactgaggctgtgagaggcgggatttgggaagaggcccaactccaaggcttattcgcttcccaccaacaccataacatgcacccacacctgcagcacggcagccagggcaagccttcacgctcccatacataggccaccaatattttaataccaatcaggactaggcaagcaaacagttaaggcatttttttttttttttttttttttaagacagagtcttgaaaa

SEQ ID NO: 22099 - DNA, 3352 bp, Homo sapiens
cacgtcctgacgcagcttgggcccgcggcggcggcaagggcgggagggagcggtcgccgcgggatttggagctgcctagcctcgcggtcgtcagggaaccaagaaatgcaacaggactagccgcggacaagaacacctcagacaccaagttgtagaaggaaagggctttattcagctgggagcatcagtggactcacgtcttcaaaaaccgagctccccgactttggcagcatgtaagcagctgtttgccaagaacccaggtcactgctaagaaagggtgccttcgggagaagagtgtccagaggataccaatgccagatgcatctggagttacactcagcactcgcagtatgagacattgtgtgccagcatctctttccttctggcaaagactgtagctctccaggtaggaggatcctggaagctgtgagcaccaggagccttgccagaggaggatggggccagatatgaactctctaccatgaacatggttctcggcttatgaaggaattttaagtaaaacagttatttaatttccacatattcaagtcaaaagccttctgtgtgaagtgccagtgattacccctccacaggagttatcaggatttttctggcaccaagtttaattcttcttcgtacttctggtagtgacagatctgcaggacagatttatctgttgaatgctcttgggcaggaaaaccatgtaaaacctctggaagcagcatcaggacagcagagcagagcccccgtcctcactgctcacttgcacagaaactccatctggactcggatgcttttactgaagacccatctagcttcaatcatctttagagtccatccattctggagagacctggcgtttgcagttgcctcctgtggccgtgtttttctgtcattctgttcccaggccttctattcaggcggttgaagggtgtggactttggaatggggtttgctgttcttcgggaacttgcttcctttccctggctggtgctgtcaggaaggaccatctgaaggctgcaatttgttcttagggaggcaggtgctggcctggcctggatcttccaccatgttcctgttgctgccttttgatagcctgattgtcaaccttctgggcatctccctgactgtcctcttcaccctccttctcgttttcatcatagtgccagccatttttggagtctcctttggtatccgcaaactctacatgaaaagtctgttaaaaatctttgcgtgggctaccttgagaatggagcgaggagccaaggagaagaaccaccagctttacaagccctacaccaacggaatcattgcaaaggatcccacttcactagaagaagagatcaaagagattcgtcgaagtggtagtagtaaggctctggacaacactccagagttcgagctctctgacattttctacttttgccggaaaggaatggagaccattatggatgatgaggtgacaaagagattctcagcagaagaactggagtcctggaacctgctgagcagaaccaattataacttccagtacatcagccttcggctcacggtcctgtgggggttaggagtgctgattcggtactgctttctgctgccgctcaggatagcactggctttcacagggattagccttctggtggtgggcacaactgtggtgggatacttgccaaatgggaggtttaaggagttcatgagtaaacatgttcacttaatgtgttaccggatctgcgtgcgagcgctgacagccatcatcacctaccatgacagggaaaacagaccaagaaatggtggcatctgtgtggccaatcatacctcaccgatcgatgtgatcatcttggccagcgatggctattatgccatggtgggtcaagtgcacgggggactcatgggtgtgattcagagagccatggtgaaggcctgcccacacgtctggtttgagcgctcggaagtgaaggatcgccacctggtggctaagagactgactgaacatgtgcaagataaaagcaagctgcctatcctcatcttcccagaaggaacctgcatcaataatacatcggtgatgatgttcaaaaagggaagttttgaaattggagccacagtttaccctgttgctatcaagtatgaccctcaatttggcgatgccttctggaacagcagcaaatacgggatggtgacgtacctgctgcgaatgatgaccagctgggccattgtctgcagcgtgtggtacctgcctcccatgactagagaggcagatgaagatgctgtccagtttgcgaatagggtgaaatctgccattgccaggcagggaggacttgtggacctgctgtgggatgggggcctgaagagggagaaggtgaaggacacgttcaaggaggagcagcagaagctgtacagcaagatgatcgtggggaaccacaaggacaggagccgctcctgagcctgcctccagctggctggggccaccgtgcggggtgccaacgggctcagagctggagttgccgccgccgcccccactgctgtgtcctttccagactccagggctccccgggctgctctggatcccaggactccggctttcgccgagccgcagcgggatccctgtgcacccggcgcagcctacccttggtggtctaaacggatgctgctgggtgttgcgacccaggacgagatgccttgtttcttttacaataagtcgttggaggaatgccattaaagtgaactccccacctttgcacgctgtgcgggctgagtggttggggagatgtggccatggtcttgtgctagagatggcggtacaagagtctgttatgcaagcccgtgtgccagggatgtgctgggggcggccacccgctctccaggaaaggcacagctgaggcactgtggctggcttcggcctcaacatcgcccccagccttggagctctgcagacatgataggaaggaaactgtcatctgcaggggctttcagcaaaatgaagggttagatttttatgctgctgctgatggggttactaaagggaggggaagaggccaggtgggccgctgactgggccatggggagaacgtgtgttcgtactccaggctaaccctgaactccccatgtgatgcgcgctttgttgaatgtgtgtctcggtttccccatctgtaatatgagtcggggggaatggtggtgattcctacctcacagggctgttgtggggattaaagtgctgcgggtgagtgaaggacacatcacgttcagtgtttcaagtacaggcccacaaaacggggcacggcaggcctgagctcagagctgctgcactgggctttggatttgttcttgtgagtaaataaaactggctggtgaatga

SEQ ID NO: 22100 - DNA, 3176 bp, Homo sapiens
cgggggggggaaactataggctaggtacgaggctgggtggtggcgctttggcagcatgtaagcagctgtttgccaagaacccaggtcactgctaagaaagggtgccttcgggagaagagtgtccagaggataccaatgccagatgcatctggagttacactcagcactcgcagtatgagacattgtgtgccagcatctctttccttctggcaaagactgtagctctccaggtaggaggatcctggaagctgtgagcaccaggagccttgccagaggaggatggggccagatatgaactctctaccatgaacatggttctcggcttatgaaggaattttaagtaaaacagttatttaatttccacatattcaagtcaaaagccttctgtgtgaagtgccagtgattacccctccacaggagttatcaggatttttctggcaccaagtttaattcttcttcgtacttctggtagtgacagatctgcaggacagatttatctgttgaatgctcttgggcaggaaaaccatgtaaaacctctggaagcagcatcaggacagcagagcagagcccccgtcctcactgctcacttgcacagaaactccatctggactcggatgcttttactgaagacccatctagcttcaatcatctttagagtccatccattctggagagacctggcgtttgcagttgcctcctgtggccgtgtttttctgtcattctgttcccaggccttctattcaggcggttgaagggtgtggactttggaatggggtttgctgttcttcgggaacttgcttcctttccctggctggtgctgtcaggaaggaccatctgaaggctgcaatttgttcttagggaggcaggtgctggcctggcctggatcttccaccatgttcctgttgctgccttttgatagcctgattgtcaaccttctgggcatctccctgactgtcctcttcaccctccttctcgttttcatcatagtgccagccatttttggagtctcctttggtatccgcaaactctacatgaaaagtctgttaaaaatctttgcgtgggctaccttgagaatggagcgaggagccaaggagaagaaccaccagctttacaagccctacaccaacggaatcattgcaaaggatcccacttcactagaagaagagatcaaagagattcgtcgaagtggtagtagtaaggctctggacaacactccagagttcgagctctctgacattttctacttttgccggaaaggaatggagaccattatggatgatgaggtgacaaagagattctcagcagaagaactggagtcctggaacctgctgagcagaaccaattataacttccagtacatcagccttcggctcacggtcctgtgggggttaggagtgctgattcggtactgctttctgctgccgctcaggatagcactggctttcacagggattagccttctggtggtgggcacaactgtggtgggatacttgccaaatgggaggtttaaggagttcatgagtaaacatgttcacttaatgtgttaccggatctgcgtgcgagcgctgacagccatcatcacctaccatgacagggaaaacagaccaagaaatggtggcatctgtgtggccaatcatacctcaccgatcgatgtgatcatcttggccagcgatggctattatgccatggtgggtcaagtgcacgggggactcatgggtgtgattcagagagccatggtgaaggcctgcccacacgtctggtttgagcgctcggaagtgaaggatcgccacctggtggctaagagactgactgaacatgtgcaagataaaagcaagctgcctatcctcatcttcccagaaggaacctgcatcaataatacatcggtgatgatgttcaaaaagggaagttttgaaattggagccacagtttaccctgttgctatcaagtatgaccctcaatttggcgatgccttctggaacagcagcaaatacgggatggtgacgtacctgctgcgaatgatgaccagctgggccattgtctgcagcgtgtggtacctgcctcccatgactagagaggcagatgaagatgctgtccagtttgcgaatagggtgaaatctgccattgccaggcagggaggacttgtggacctgctgtgggatgggggcctgaagagggagaaggtgaaggacacgttcaaggaggagcagcagaagctgtacagcaagatgatcgtggggaaccacaaggacaggagccgctcctgagcctgcctccagctggctggggccaccgtgcggggtgccaacgggctcagagctggagttgccgccgccgcccccactgctgtgtcctttccagactccagggctccccgggctgctctggatcccaggactccggctttcgccgagccgcagcgggatccctgtgcacccggcgcagcctacccttggtggtctaaacggatgctgctgggtgttgcgacccaggacgagatgccttgtttcttttacaataagtcgttggaggaatgccattaaagtgaactccccacctttgcacgctgtgcgggctgagtggttggggagatgtggccatggtcttgtgctagagatggcggtacaagagtctgttatgcaagcccgtgtgccagggatgtgctgggggcggccacccgctctccaggaaaggcacagctgaggcactgtggctggcttcggcctcaacatcgcccccagccttggagctctgcagacatgataggaaggaaactgtcatctgcaggggctttcagcaaaatgaagggttagatttttatgctgctgctgatggggttactaaagggaggggaagaggccaggtgggccgctgactgggccatggggagaacgtgtgttcgtactccaggctaaccctgaactccccatgtgatgcgcgctttgttgaatgtgtgtctcggtttccccatctgtaatatgagtcggggggaatggtggtgattcctacctcacagggctgttgtggggattaaagtgctgcgggtgagtgaaggacacatcacgttcagtgtttcaagtacaggcccacaaaacggggcacggcaggcctgagctcagagctgctgcactgggctttggatttgttcttgtgagtaaataaaactggctggtgaatga

SEQ ID NO: 22101 - DNA, 3173 bp, Homo sapiens
cacgtcctgacgcagcttgggcccgcggcggcggcaagggcgggagggagcggtcgccgcgggatttggagctgcctagcctcgcggtcgctttggcagcatgtaagcagctgtttgccaagaacccaggtcactgctaagaaagggtgccttcgggagaagagtgtccagaggataccaatgccagatgcatctggagttacactcagcactcgcagtatgagacattgtgtgccagcatctctttccttctggcaaagactgtagctctccaggtaggaggatcctggaagctgtgagcaccaggagccttgccagaggaggatggggccagatatgaactctctaccatgaacatggttctcggcttatgaaggaattttaagtaaaacagttatttaatttccacatattcaagtcaaaagccttctgtgtgaagtgccagtgattacccctccacaggagttatcaggatttttctggcaccaagtttaattcttcttcgtacttctggtagtgacagatctgcaggacagatttatctgttgaatgctcttgggcaggaaaaccatgtaaaacctctggaagcagcatcaggacagcagagcagagcccccgtcctcactgctcacttgcacagaaactccatctggactcggatgcttttactgaagacccatctagcttcaatcatctttagagtccatccattctggagagacctggcgtttgcagttgcctcctgtggccgtgtttttctgtcattctgttcccaggccttctattcaggcggttgaagggtgtggactttggaatggggtttgctgttcttcgggaacttgcttcctttccctggctggtgctgtcaggaaggaccatctgaaggctgcaatttgttcttagggaggcaggtgctggcctggcctggatcttccaccatgttcctgttgctgccttttgatagcctgattgtcaaccttctgggcatctccctgactgtcctcttcaccctccttctcgttttcatcatagtgccagccatttttggagtctcctttggtatccgcaaactctacatgaaaagtctgttaaaaatctttgcgtgggctaccttgagaatggagcgaggagccaaggagaagaaccaccagctttacaagccctacaccaacggaatcattgcaaaggatcccacttcactagaagaagagatcaaagagattcgtcgaagtggtagtagtaaggctctggacaacactccagagttcgagctctctgacattttctacttttgccggaaaggaatggagaccattatggatgatgaggtgacaaagagattctcagcagaagaactggagtcctggaacctgctgagcagaaccaattataacttccagtacatcagccttcggctcacggtcctgtgggggttaggagtgctgattcggtactgctttctgctgccgctcaggatagcactggctttcacagggattagccttctggtggtgggcacaactgtggtgggatacttgccaaatgggaggtttaaggagttcatgagtaaacatgttcacttaatgtgttaccggatctgcgtgcgagcgctgacagccatcatcacctaccatgacagggaaaacagaccaagaaatggtggcatctgtgtggccaatcatacctcaccgatcgatgtgatcatcttggccagcgatggctattatgccatggtgggtcaagtgcacgggggactcatgggtgtgattcagagagccatggtgaaggcctgcccacacgtctggtttgagcgctcggaagtgaaggatcgccacctggtggctaagagactgactgaacatgtgcaagataaaagcaagctgcctatcctcatcttcccagaaggaacctgcatcaataatacatcggtgatgatgttcaaaaagggaagttttgaaattggagccacagtttaccctgttgctatcaagtatgaccctcaatttggcgatgccttctggaacagcagcaaatacgggatggtgacgtacctgctgcgaatgatgaccagctgggccattgtctgcagcgtgtggtacctgcctcccatgactagagaggcagatgaagatgctgtccagtttgcgaatagggtgaaatctgccattgccaggcagggaggacttgtggacctgctgtgggatgggggcctgaagagggagaaggtgaaggacacgttcaaggaggagcagcagaagctgtacagcaagatgatcgtggggaaccacaaggacaggagccgctcctgagcctgcctccagctggctggggccaccgtgcggggtgccaacgggctcagagctggagttgccgccgccgcccccactgctgtgtcctttccagactccagggctccccgggctgctctggatcccaggactccggctttcgccgagccgcagcgggatccctgtgttgcgacccaggacgagatgccttgtttcttttacaataagtcgttggaggaatgccattaaagtgaactccccacctttgcacgctgtgcgggctgagtggttggggagatgtggccatggtcttgtgctagagatggcggtacaagagtctgttatgcaagcccgtgtgccagggatgtgctgggggcggccacccgctctccaggaaaggcacagctgaggcactgtggctggcttcggcctcaacatcgcccccagccttggagctctgcagacatgataggaaggaaactgtcatctgcaggggctttcagcaaaatgaagggttagatttttatgctgctgctgatggggttactaaagggaggggaagaggccaggtgggccgctgactgggccatggggagaacgtgtgttcgtactccaggctaaccctgaactccccatgtgatgcgcgctttgttgaatgtgtgtctcggtttccccatctgtaatatgagtcggggggaatggtggtgattcctacctcacagggctgttgtggggattaaagtgctgcgggtgagtgaaggacacatcacgttcagtgtttcaagtacaggcccacaaaacggggcacggcaggcctgagctcagagctgctgcactgggctttggatttgttcttgtgagtaaataaaactggctggtgaatga

SEQ ID NO: 22102 - DNA, 3408 bp, Homo sapiens
cacgtcctgacgcagcttgggcccgcggcggcggcaagggcgggagggagcggtcgccgcgggatttggagctgcctagcctcgcggtcgctttggcagcatgtaagcagctgtttgccaagaacccaggtcactgctaagaaagggtgccttcgggagaagagtgtccagaggataccaatgccagatgcatctggagttacactcagcactcgcagtatgagacattgtgtgccagcatctctttccttctggcaaagactgtagctctccaggtaggaggatcctggaagctgtgagcaccaggagccttgccagaggaggatggggccagatatgaactctctaccatgaacatggttctcggcttatgaaggaattttaagtaaaacagttatttaatttccacatattcaagtcaaaagccttctgtgtgaagtgccagtgattacccctccacaggagttatcaggatttttctggcaccaagtttaattcttcttcgtacttctggtagtgacagatctgcaggacagatttatctgttgaatgctcttgggcaggaaaaccatgtaaaacctctggaagcagcatcaggacagcagagcagagcccccgtcctcactgctcacttgcacagaaactccatctggactcggatgcttttactgaagacccatctagcttcaatcatctttagagtccatccattctggagagacctggcgtttgcagttgcctcctgtggccgtgtttttctgtcattctgttcccaggccttctattcaggcggttgaagggtgtggactttggaatggggtttgctgttcttcgggaacttgcttcctttccctggctggtgctgtcaggaaggaccatctgaaggctgcaatttgttcttagggaggcaggtgctggcctggcctggatcttccaccatgttcctgttgctgccttttgatagcctgattgtcaaccttctgggcatctccctgactgtcctcttcaccctccttctcgttttcatcatagtgccagccatttttggagtctcctttggtatccgcaaactctacatgaaaagtctgttaaaaatctttgcgtgggctaccttgagaatggagcgaggagccaaggagaagaaccaccagctttacaagccctacaccaacggaatcattgcaaaggatcccacttcactagaagaagagatcaaagagattcgtcgaagtggtagtagtaaggctctggacaacactccagagttcgagctctctgacattttctacttttgccggaaaggaatggagaccattatggatgatgaggtgacaaagagattctcagcagaagaactggagtcctggaacctgctgagcagaaccaattataacttccagtacatcagccttcggctcacggtcctgtgggggttaggagtgctgattcggtactgctttctgctgccgctcaggatagcactggctttcacagggattagccttctggtggtgggcacaactgtggtgggatacttgccaaatgggaggtttaaggagttcatgagtaaacatgttcacttaatgtgttaccggatctgcgtgcgagcgctgacagccatcatcacctaccatgacaggtgagagcgctttgtattgataggaagggagatggcgctgcaggaaacaccacccacctatacttagccaaatgggaagacacttctgagcttttagttagagcagatgaagcatgtgaggtgagaggtgtgttacatgaactgtttcacactaattttggttgctttgcatacattttaaacccagggaaaacagaccaagaaatggtggcatctgtgtggccaatcatacctcaccgatcgatgtgatcatcttggccagcgatggctattatgccatggtgggtcaagtgcacgggggactcatgggtgtgattcagagagccatggtgaaggcctgcccacacgtctggtttgagcgctcggaagtgaaggatcgccacctggtggctaagagactgactgaacatgtgcaagataaaagcaagctgcctatcctcatcttcccagaaggaacctgcatcaataatacatcggtgatgatgttcaaaaagggaagttttgaaattggagccacagtttaccctgttgctatcaagtatgaccctcaatttggcgatgccttctggaacagcagcaaatacgggatggtgacgtacctgctgcgaatgatgaccagctgggccattgtctgcagcgtgtggtacctgcctcccatgactagagaggcagatgaagatgctgtccagtttgcgaatagggtgaaatctgccattgccaggcagggaggacttgtggacctgctgtgggatgggggcctgaagagggagaaggtgaaggacacgttcaaggaggagcagcagaagctgtacagcaagatgatcgtggggaaccacaaggacaggagccgctcctgagcctgcctccagctggctggggccaccgtgcggggtgccaacgggctcagagctggagttgccgccgccgcccccactgctgtgtcctttccagactccagggctccccgggctgctctggatcccaggactccggctttcgccgagccgcagcgggatccctgtgcacccggcgcagcctacccttggtggtctaaacggatgctgctgggtgttgcgacccaggacgagatgccttgtttcttttacaataagtcgttggaggaatgccattaaagtgaactccccacctttgcacgctgtgcgggctgagtggttggggagatgtggccatggtcttgtgctagagatggcggtacaagagtctgttatgcaagcccgtgtgccagggatgtgctgggggcggccacccgctctccaggaaaggcacagctgaggcactgtggctggcttcggcctcaacatcgcccccagccttggagctctgcagacatgataggaaggaaactgtcatctgcaggggctttcagcaaaatgaagggttagatttttatgctgctgctgatggggttactaaagggaggggaagaggccaggtgggccgctgactgggccatggggagaacgtgtgttcgtactccaggctaaccctgaactccccatgtgatgcgcgctttgttgaatgtgtgtctcggtttccccatctgtaatatgagtcggggggaatggtggtgattcctacctcacagggctgttgtggggattaaagtgctgcgggtgagtgaaggacacatcacgttcagtgtttcaagtacaggcccacaaaacggggcacggcaggcctgagctcagagctgctgcactgggctttggatttgttcttgtgagtaaataaaactggctggtgaatga

SEQ ID NO: 22103 - DNA, 1932 bp, Homo sapiens
tggaatcaaaaggatctctggttctgataggcctgcttacatttctaggtgaactctggtccaggtcccaggtgagcaggtcttgggggtggtttttgtgatgccccctttgattttcacaccttcagttctgtacttggtagaatgatttgctggctgtgctctaacttttcttcttcttacaggatagcactggctttcacagggattagccttctggtggtgggcacaactgtggtgggatacttgccaaatgggaggtttaaggagttcatgagtaaacatgttcacttaatgtgttaccggatctgcgtgcgagcgctgacagccatcatcacctaccatgacagggaaaacagaccaagaaatggtggcatctgtgtggccaatcatacctcaccgatcgatgtgatcatcttggccagcgatggctattatgccatggtgggtcaagtgcacgggggactcatgggtgtgattcagagagccatggtgaaggcctgcccacacgtctggtttgagcgctcggaagtgaaggatcgccacctggtggctaagagactgactgaacatgtgcaagataaaagcaagctgcctatcctcatcttcccagaaggaacctgcatcaataatacatcggtgatgatgttcaaaaagggaagttttgaaattggagccacagtttaccctgttgctatcaagtatgaccctcaatttggcgatgccttctggaacagcagcaaatacgggatggtgacgtacctgctgcgaatgatgaccagctgggccattgtctgcagcgtgtggtacctgcctcccatgactagagaggcagatgaagatgctgtccagtttgcgaatagggtgaaatctgccattgccaggcagggaggacttgtggacctgctgtgggatgggggcctgaagagggagaaggtgaaggacacgttcaaggaggagcagcagaagctgtacagcaagatgatcgtggggaaccacaaggacaggagccgctcctgagcctgcctccagctggctggggccaccgtgcggggtgccaacgggctcagagctggagttgccgccgccgcccccactgctgtgtcctttccagactccagggctccccgggctgctctggatcccaggactccggctttcgccgagccgcagcgggatccctgtgcacccggcgcagcctacccttggtggtctaaacggatgctgctgggtgttgcgacccaggacgagatgccttgtttcttttacaataagtcgttggaggaatgccattaaagtgaactccccacctttgcacgctgtgcgggctgagtggttggggagatgtggccatggtcttgtgctagagatggcggtacaagagtctgttatgcaagcccgtgtgccagggatgtgctgggggcggccacccgctctccaggaaaggcacagctgaggcactgtggctggcttcggcctcaacatcgcccccagccttggagctctgcagacatgataggaaggaaactgtcatctgcaggggctttcagcaaaatgaagggttagatttttatgctgctgctgatggggttactaaagggaggggaagaggccaggtgggccgctgactgggccatggggagaacgtgtgttcgtactccaggctaaccctgaactccccatgtgatgcgcgctttgttgaatgtgtgtctcggtttccccatctgtaatatgagtcggggggaatggtggtgattcctacctcacagggctgttgtggggattaaagtgctgcgggtgagtgaaggacacatcacgttcagtgtttcaagtacaggcccacaaaacggggcacggcaggcctgagctcagagctgctgcactgggctttggatttgttcttgtgagtaaataaaactggctggtgaatga

SEQ ID NO: 22104 - DNA, 2346 bp, Homo sapiens
cacgtcctgacgcagcttgggcccgcggcggcggcaagggcgggagggagcggtcgccgcgggatttggagctgcctagcctcgcggtcgctttggcagcatgtaagcagctgtttgccaagaacccaggtcactgctaagaaagggtgccttcgggagaagagtgtccagaggataccaatgccagatgcatctggagttacactcagcactcgcagtatgagacattgtgtgccagcatctctttccttctggcaaagactgtagctctccaggtaggaggatcctggaagctgtgagcaccaggagccttgccagaggaggatggggccagatatgaactctctaccatgaacatggttctcggcttatgaaggaattttaagtaaaacagttatttaatttccacatattcaagtcaaaagccttctgtgtgaagtgccagtgattacccctccacaggagttatcaggatttttctggcaccaagtttaattcttcttcgtacttctggtagtgacagatctgcaggacagatttatctgttgaatgctcttgggcaggaaaaccatgtaaaacctctggaagcagcatcaggacagcagagcagagcccccgtcctcactgctcacttgcacagaaactccatctggactcggatgcttttactgaagacccatctagcttcaatcatctttagagtccatccattctggagagacctggcgtttgcagttgcctcctgtggccgtgtttttctgtcattctgttcccaggccttctattcaggcggttgaagggtgtggactttggaatggggtttgctgttcttcgggaacttgcttcctttccctggctggtgctgtcaggaaggaccatctgaaggctgcaatttgttcttagggaggcaggtgctggcctggcctggatcttccaccatgttcctgttgctgccttttgatagcctgattgtcaaccttctgggcatctccctgactgtcctcttcaccctccttctcgttttcatcatagtgccagccatttttggagtctcctttggtatccgcaaactctacatgaaaagtctgttaaaaatctttgcgtgggctaccttgagaatggagcgaggagccaaggagaagaaccaccagctttacaagccctacaccaacggaatcattgcaaaggatcccacttcactagaagaagagatcaaagagattcgtcgaagtggtagtagtaaggctctggacaacactccagagttcgagctctctgacattttctacttttgccggaaaggaatggagaccattatggatgatgaggtgacaaagagattctcagcagaagaactggagtcctggaacctgctgacagaagctgtacagcaagatgatcgtggggaaccacaaggacaggagccgctcctgagcctgcctccagctggctggggccaccgtgcggggtgccaacgggctcagagctggagttgccgccgccgcccccactgctgtgtcctttccagactccagggctccccgggctgctctggatcccaggactccggctttcgccgagccgcagcgggatccctgtgcacccggcgcagcctacccttggtggtctaaacggatgctgctgggtgttgcgacccaggacgagatgccttgtttcttttacaataagtcgttggaggaatgccattaaagtgaactccccacctttgcacgctgtgcgggctgagtggttggggagatgtggccatggtcttgtgctagagatggcggtacaagagtctgttatgcaagcccgtgtgccagggatgtgctgggggcggccacccgctctccaggaaaggcacagctgaggcactgtggctggcttcggcctcaacatcgcccccagccttggagctctgcagacatgataggaaggaaactgtcatctgcaggggctttcagcaaaatgaagggttagatttttatgctgctgctgatggggttactaaagggaggggaagaggccaggtgggccgctgactgggccatggggagaacgtgtgttcgtactccaggctaaccctgaactccccatgtgatgcgcgctttgttgaatgtgtgtctcggtttccccatctgtaatatgagtcggggggaatggtggtgattcctacctcacagggctgttgtggggattaaagtgctgcgggtgagtgaaggacacatcacgttcagtgtttcaagtacaggcccacaaaacggggcacggcaggcctgagctcagagctgctgcactgggctttggatttgttcttgtgagtaaataaaactggctggtgaatga

SEQ ID NO: 22105 - DNA, 1692 bp, Homo sapiens
atcggacgcgagtcctggcaacatgaggtgaatggtgagagacaggtcggcggtggcccccaggttgagtggcatcattggtgctccgatgttcgcacagaattgaacagttctgtgaattaaatggtaacctgatttttctctatccatatacattttttcttgatgagcattagattatgggtttaaaaggatacagttatgcttgttaactttttataatcgaaactagtgtcacaaataaataggttatttataaacatattttgacgatgtgtataaggttgtctgaccctttattttattttcttctttgaaagactgactgaacatgtgcaagataaaagcaagctgcctatcctcatcttcccagaaggaacctgcatcaataatacatcggtgatgatgttcaaaaagggaagttttgaaattggagccacagtttaccctgttgctatcaagtatgaccctcaatttggcgatgccttctggaacagcagcaaatacgggatggtgacgtacctgctgcgaatgatgaccagctgggccattgtctgcagcgtgtggtacctgcctcccatgactagagaggcagatgaagatgctgtccagtttgcgaatagggtgaaatctgccattgccaggcagggaggacttgtggacctgctgtgggatgggggcctgaagagggagaaggtgaaggacacgttcaaggaggagcagcagaagctgtacagcaagatgatcgtggggaaccacaaggacaggagccgctcctgagcctgcctccagctggctggggccaccgtgcggggtgccaacgggctcagagctggagttgccgccgccgcccccactgctgtgtcctttccagactccagggctccccgggctgctctggatcccaggactccggctttcgccgagccgcagcgggatccctgtgcacccggcgcagcctacccttggtggtctaaacggatgctgctgggtgttgcgacccaggacgagatgccttgtttcttttacaataagtcgttggaggaatgccattaaagtgaactccccacctttgcacgctgtgcgggctgagtggttggggagatgtggccatggtcttgtgctagagatggcggtacaagagtctgttatgcaagcccgtgtgccagggatgtgctgggggcggccacccgctctccaggaaaggcacagctgaggcactgtggctggcttcggcctcaacatcgcccccagccttggagctctgcagacatgataggaaggaaactgtcatctgcaggggctttcagcaaaatgaagggttagatttttatgctgctgctgatggggttactaaagggaggggaagaggccaggtgggccgctgactgggccatggggagaacgtgtgttcgtactccaggctaaccctgaactccccatgtgatgcgcgctttgttgaatgtgtgtctcggtttccccatctgtaatatgagtcggggggaatggtggtgattcctacctcacagggctgttgtggggattaaagtgctgcgggtgagtgaaggacacatcacgttcagtgtttcaagtacaggcccacaaaacggggcacggcaggcctgagctcagagctgctgcactgggctttggatttgttcttgtgagtaaataaaactggctggtgaatga

SEQ ID NO: 22106 - DNA, 1382 bp, Homo sapiens
tggagaggggcttccacagtactcatgcaaggtcagggagcagcaccccagtaccagcacggcccagtggagtcactcacagcagtcactgtggactcgcaaacgttgtgagaactactcatgtcttacctccagctttccattgttttcagtatgaccctcaatttggcgatgccttctggaacagcagcaaatacgggatggtgacgtacctgctgcgaatgatgaccagctgggccattgtctgcagcgtgtggtacctgcctcccatgactagagaggcagatgaagatgctgtccagtttgcgaatagggtgaaatctgccattgccaggcagggaggacttgtggacctgctgtgggatgggggcctgaagagggagaaggtgaaggacacgttcaaggaggagcagcagaagctgtacagcaagatgatcgtggggaaccacaaggacaggagccgctcctgagcctgcctccagctggctggggccaccgtgcggggtgccaacgggctcagagctggagttgccgccgccgcccccactgctgtgtcctttccagactccagggctccccgggctgctctggatcccaggactccggctttcgccgagccgcagcgggatccctgtgcacccggcgcagcctacccttggtggtctaaacggatgctgctgggtgttgcgacccaggacgagatgccttgtttcttttacaataagtcgttggaggaatgccattaaagtgaactccccacctttgcacgctgtgcgggctgagtggttggggagatgtggccatggtcttgtgctagagatggcggtacaagagtctgttatgcaagcccgtgtgccagggatgtgctgggggcggccacccgctctccaggaaaggcacagctgaggcactgtggctggcttcggcctcaacatcgcccccagccttggagctctgcagacatgataggaaggaaactgtcatctgcaggggctttcagcaaaatgaagggttagatttttatgctgctgctgatggggttactaaagggaggggaagaggccaggtgggccgctgactgggccatggggagaacgtgtgttcgtactccaggctaaccctgaactccccatgtgatgcgcgctttgttgaatgtgtgtctcggtttccccatctgtaatatgagtcggggggaatggtggtgattcctacctcacagggctgttgtggggattaaagtgctgcgggtgagtgaaggacacatcacgttcagtgtttcaagtacaggcccacaaaacggggcacggcaggcctgagctcagagctgctgcactgggctttggatttgttcttgtgagtaaataaaactggctggtgaatga

SEQ ID NO: 22107 - DNA, 2701 bp, Homo sapiens
cacgtcctgacgcagcttgggcccgcggcggcggcaagggcgggagggagcggtcgccgcgggatttggagctgcctagcctcgcggtcgctttggcagcatgtaagcagctgtttgccaagaacccaggtcactgctaagaaagggtgccttcgggagaagagtgtccagaggataccaatgccagatgcatctggagttacactcagcactcgcagtatgagacattgtgtgccagcatctctttccttctggcaaagactgtagctctccaggtaggaggatcctggaagctgtgagcaccaggagccttgccagaggaggatggggccagatatgaactctctaccatgaacatggttctcggcttatgaaggaattttaagtaaaacagttatttaatttccacatattcaagtcaaaagccttctgtgtgaagtgccagtgattacccctccacaggagttatcaggatttttctggcaccaagtttaattcttcttcgtacttctggtagtgacagatctgcaggacagatttatctgttgaatgctcttgggcaggaaaaccatgtaaaacctctggaagcagcatcaggacagcagagcagagcccccgtcctcactgctcacttgcacagaaactccatctggactcggatgcttttactgaagacccatctagcttcaatcatctttagagtccatccattctggagagacctggcgtttgcagttgcctcctgtggccgtgtttttctgtcattctgttcccaggccttctattcaggcggttgaagggtgtggactttggaatggggtttgctgttcttcgggaacttgcttcctttccctggctggtgctgtcaggaaggaccatctgaaggctgcaatttgttcttagggaggcaggtgctggcctggcctggatcttccaccatgttcctgttgctgccttttgatagcctgattgtcaaccttctgggcatctccctgactgtcctcttcaccctccttctcgttttcatcatagtgccagccatttttggagtctcctttggtatccgcaaactctacatgaaaagtctgttaaaaatctttgcgtgggctaccttgagaatggagcgaggagccaaggagaagaaccaccagctttacaagccctacaccaacggaatcattgcaaaggatcccacttcactagaagaagagatcaaagagattcgtcgaagtggtagtagtaaggctctggacaacactccagagttcgagctctctgacattttctacttttgccggaaaggaatggagaccattatggatgatgaggtgacaaagagattctcagcagaagaactggagtcctggaacctgctgagcagaaccaattataacttccagtacatcagcggccgctgactgggccatggggagaacgtgtgttcgtactccaggctaaccctgaactccccatgtgatgcgcgctttgttgaatgtgtgtctcggtttccccatctgtaatatgagtcggggggaatggtggtgattcctacctcacagggctgttgtggggattaaagtgctgcgggtgagtgaaggacacatcacgttcagtgtttcaagtacaggcccacaaaacggggcacggcaggcctgagctcagagctgctgcactgggctttggatttgttcttgtgagtaaataaaactggctggtgaatgaaacaaggggacttctccctttactttctcccctggctgtggccctgagtagcaggcttctcgtgaggattcccgttctcttctgggagcatggccctggggctgcggagaagccaactgactgctggagcgaggaaccctgcagctcagaaggtgaacagctcgtctcagatgcttgcagatctttggttaatttagaatttccagcacagacgtggatttctccagagacggggtgtgtgcgggtcgctgatgtgaggcctaggggaagcaatgagtaaactccagggtgggggaggagcaagggcccggggagggctgcagaggggccggggcggggcagggcctgtgctgcatggtggcttctgcaggggagggacaggggagggctgcagaggggcagggtgggcagggcatgtgctgcatggcagcttctgcacagccagagcaggcaccacaggaaacgagtcggccactggtgcctgctgtacagtcacagtggaggcagagccaaggccaagcagcccctgtgggttctggggtttcaccagtttcatgctcctcagctccccattcatgccccaccagccctcacttgggacccatgctccctcgtggcacagtcatgatgcctctcaggattttgtgcctgtggtgctgagtgtcacgtccccaaggtcgccctctggcctgcagttcagggagtgggtgggagtgaagctgtgctcctggggctgcagacagatccactttgcatgtggtacctgctgggttggccctgcaatctccttttctctgcacctacctgtgacctccctgggagagcctcccatttcctcacctgccctgttgccagcccgggggaaatctttttgctctcaaatgaagactgaaaaaataaagtcagtgttatgactaataagtctcttaggaactgttttacaaaatgcttaagaataaaaagtgattttcagctttta

SEQ ID NO: 22108 - DNA, 809 bp, Homo sapiens
gagcatcagtggactcacgtcttcaaaaaccgagctccccgagtaagcaattcctgtcccttttaacggcttacaactccaagggggtccgcatgagaaggtcatgatcgattgaacaagcagggagtacgtgactgggagctgcatgcaccggtaatcagaatggaacagaacttgacaggggttttcactatgcttttccatacagtgtctgacatctatagataacacccagggtttcgtcaggggttgacttttaactactaggcccatggcaccatgctgggctatctgcctgtggattccagtactgccttttaaattttatgtcttctttctttggaggcagaaattgggcataagacaatatgaagggtggtctcctccctttaaaacattgcgctgattttaaggcgaagtcagtacttgttcatttgttcaatttcttgtacttctaagtgtttggaatagcctgaaggtgattagtgtgaagccaaaatatttgccagagagacttgataggatactcccaagttcagggatttggaatgtgcgatgtaaaattggaatacttttgtgagatatttgaaatagtggaatttcacaatgagtggccagtgtggggagaggctggaggagtttaatctctatgtggaaaatatggcaaggtcttgcaaatttaaaaatgtgtattttcttttcctctgcaattccatttctaggaatttaccccgaaaatatatttgctaagcacattttgtgtactaagtcatgcatgtacctggttattcgttacaacattatacaaa

SEQ ID NO: 22109 - DNA, 442 bp, Homo sapiens
aatcggaggcaccatcttgcctgtctctgttaagtgtttgtttttaagttagggagatgacagatgtatcttactggaggaaccattagaagaattttgactattatacttagtctttaagaaacgcctaatatctggggtaaagggccaacagaaatagcattttattgtctcctgcattttaggaacctgcatcaataatacatcggtgatgatgttcaaaaagggaagttttgaaattggagccacagtttaccctgttgctatcaaggtataagacctccgatggtacacactgtcattactggagctgctgtgagtggggtgcagcaggaggaggtagaggaaggagctggggtcaccagtctgtggtcgatgccctcagcagagtggcgtggggctgggttgacgtgggtcaagtgctgccggaggaggatggtga

SEQ ID NO: 22110 - DNA, 3221 bp, Homo sapiens
cacgtcctgacgcagcttgggcccgcggcggcggcaagggcgggagggagcggtcgccgcgggatttggagctgcctagcctcgcggtcgctttggcagcatgtaagcagctgtttgccaagaacccaggtcactgctaagaaagggtgccttcgggagaagagtgtccagaggataccaatgccagatgcatctggagttacactcagcactcgcagtatgagacattgtgtgccagcatctctttccttctggcaaagactgtagctctccaggtaggaggatcctggaagctgtgagcaccaggagccttgccagaggaggatggggccagatatgaactctctaccatgaacatggttctcggcttatgaaggaattttaagtaaaacagttatttaatttccacatattcaagtcaaaagccttctgtgtgaagtgccagtgattacccctccacaggagttatcaggatttttctggcaccaagtttaattcttcttcgtacttctggtagtgacagatctgcaggacagatttatctgttgaatgctcttgggcaggaaaaccatgtaaaacctctggaagcagcatcaggacagcagagcagagcccccgtcctcactgctcacttgcacagaaactccatctggactcggatgcttttactgaagacccatctagcttcaatcatctttagagtccatccattctggagagacctggcgtttgcagttgcctcctgtggccgtgtttttctgtcattctgttcccaggccttctattcaggcggttgaagggtgtggactttggaatggggtttgctgttcttcgggaacttgcttcctttccctggctggtgctgtcaggaaggaccatctgaaggctgcaatttgttcttagggaggcaggtgctggcctggcctggatcttccaccatgttcctgttgctgccttttgatagcctgattgtcaaccttctgggcatctccctgactgtcctcttcaccctccttctcgttttcatcatagtgccagccatttttggagtctcctttggtatccgcaaactctacatgaaaagtctgttaaaaatctttgcgtgggctaccttgagaatggagcgaggagccaaggagaagaaccaccagctttacaagccctacaccaacggaatcattgcaaaggatcccacttcactagaagaagagatcaaagagattcgtcgaagtggtagtagtaaggctctggacaacactccagagttcgagctctctgacattttctacttttgccggaaaggaatggagaccattatggatgatgaggtgacaaagagattctcagcagaagaactggagtcctggaacctgctgagcagaaccaattataacttccagtacatcagccttcggctcacggtcctgtgggggttaggagtgctgattcggtactgctttctgctgccgctcaggatagcactggctttcacagggattagccttctggtggtgggcacaactgtggtgggatacttgccaaatgggaggtttaaggagttcatgagtaaacatgttcacttaatgtgttaccggatctgcgtgcgagcgctgacagccatcatcacctaccatgacagggaaaacagaccaagaaatggtggcatctgtgtggccaatcatacctcaccgatcgatgtgatcatcttggccagcgatggctattatgccatggtgggtcaagtgcacgggggactcatgggtgtgattcagagagccatggtgaaggcctgcccacacgtctggtttgagcgctcggaagtgaaggatcgccacctggtggctaagagactgactgaacatgtgcaagataaaagcaagctgcctatcctcatcttcccagaaggaacctgcatcaataatacatcggtgatgatgttcaaaaagggaagttttgaaattggagccacagtttaccctgttgctatcaagtatgaccctcaatttggcgatgccttctggaacagcagcaaatacgggatggtgacgtacctgctgcgaatgatgaccagctgggccattgtctgcagcgtgtggtacctgcctcccatgactagagaggcagatgaagatgctgtccagtttgcgaatagggtgaaatctgccattgccaggcagggaggacttgtggacctgctgtgggatgggggcctgaagagggagaaggtgaaggacacgttcaaggaggagcagcagaagctgtacagcaagatgatcgtggggaaccacaaggacaggagccgctcctgagcctgcctccagctggctggggccaccgtgcggggtgccaacgggctcagagctggagttgccgccgccgcccccactgctgtgtcctttccagactccagggctccccgggctgctctggatcccaggactccggctttcgccgagccgcagcgggatccctgtgcacccggcgcagcctacccttggtggtctaaacggatgctgctgggtgttgcgacccaggacgagatgccttgtttcttttacaataagtcgttggaggaatgccattaaagtgaactccccacctttgcacgctgtgcgggctgagtggttggggagatgtggccatggtcttgtgctagagatggcggtacaagagtctgttatgcaagcccgtgtgccagggatgtgctgggggcggccacccgctctccaggaaaggcacagctgaggcactgtggctggcttcggcctcaacatcgcccccagccttggagctctgcagacatgataggaaggaaactgtcatctgcaggggctttcagcaaaatgaagggttagatttttatgctgctgctgatggggttactaaagggaggggaagaggccaggtgggccgctgactgggccatggggagaacgtgtgttcgtactccaggctaaccctgaactccccatgtgatgcgcgctttgttgaatgtgtgtctcggtttccccatctgtaatatgagtcggggggaatggtggtgattcctacctcacagggctgttgtggggattaaagtgctgcgggtgagtgaaggacacatcacgttcagtgtttcaagtacaggcccacaaaacggggcacggcaggcctgagctcagagctgctgcactgggctttggatttgttcttgtgagtaaataaaactggctggtgaatga

SEQ ID NO: 22111 - DNA, 3366 bp, Homo sapiens
cacgtcctgacgcagcttgggcccgcggcggcggcaagggcgggagggagcggtcgccgcgggatttggagctgcctagcctcgcggtcgcttcaagagatggttccgttgctttggggtgaacttggtaccagtgccgtgttacttatccagttctaactcaagaaagttctggagggcataatgatcttagataagaccaaggccccgaacctgaccatgttctgtcttctctctttggcagcatgtaagcagctgtttgccaagaacccaggtcactgctaagaaagggtgccttcgggagaagagtgtccagaggataccaatgccagatgcatctggagttacactcagcactcgcagtatgagacattgtgtgccagcatctctttccttctggcaaagactgtagctctccaggtaggaggatcctggaagctgtgagcaccaggagccttgccagaggaggatggggccagatatgaactctctaccatgaacatggttctcggcttatgaaggaattttaagtaaaacagttatttaatttccacatattcaagtcaaaagccttctgtgtgaagtgccagtgattacccctccacaggagttatcaggatttttctggcaccaagtttaattcttcttcgtacttctggtagtgacagatctgcaggacagatttatctgttgaatgctcttgggcaggaaaaccatgtaaaacctctggaagcagcatcaggacagcagagcagagcccccgtcctcactgctcacttgcacagaaactccatctggactcggatgcttttactgaagacccatctagcttcaatcatctttagagtccatccattctggagagacctggcgtttgcagttgcctcctgtggccgtgtttttctgtcattctgttcccaggccttctattcaggcggttgaagggtgtggactttggaatggggtttgctgttcttcgggaacttgcttcctttccctggctggtgctgtcaggaaggaccatctgaaggctgcaatttgttcttagggaggcaggtgctggcctggcctggatcttccaccatgttcctgttgctgccttttgatagcctgattgtcaaccttctgggcatctccctgactgtcctcttcaccctccttctcgttttcatcatagtgccagccatttttggagtctcctttggtatccgcaaactctacatgaaaagtctgttaaaaatctttgcgtgggctaccttgagaatggagcgaggagccaaggagaagaaccaccagctttacaagccctacaccaacggaatcattgcaaaggatcccacttcactagaagaagagatcaaagagattcgtcgaagtggtagtagtaaggctctggacaacactccagagttcgagctctctgacattttctacttttgccggaaaggaatggagaccattatggatgatgaggtgacaaagagattctcagcagaagaactggagtcctggaacctgctgagcagaaccaattataacttccagtacatcagccttcggctcacggtcctgtgggggttaggagtgctgattcggtactgctttctgctgccgctcaggatagcactggctttcacagggattagccttctggtggtgggcacaactgtggtgggatacttgccaaatgggaggtttaaggagttcatgagtaaacatgttcacttaatgtgttaccggatctgcgtgcgagcgctgacagccatcatcacctaccatgacagggaaaacagaccaagaaatggtggcatctgtgtggccaatcatacctcaccgatcgatgtgatcatcttggccagcgatggctattatgccatggtgggtcaagtgcacgggggactcatgggtgtgattcagagagccatggtgaaggcctgcccacacgtctggtttgagcgctcggaagtgaaggatcgccacctggtggctaagagactgactgaacatgtgcaagataaaagcaagctgcctatcctcatcttcccagaaggaacctgcatcaataatacatcggtgatgatgttcaaaaagggaagttttgaaattggagccacagtttaccctgttgctatcaagtatgaccctcaatttggcgatgccttctggaacagcagcaaatacgggatggtgacgtacctgctgcgaatgatgaccagctgggccattgtctgcagcgtgtggtacctgcctcccatgactagagaggcagatgaagatgctgtccagtttgcgaatagggtgaaatctgccattgccaggcagggaggacttgtggacctgctgtgggatgggggcctgaagagggagaaggtgaaggacacgttcaaggaggagcagcagaagctgtacagcaagatgatcgtggggaaccacaaggacaggagccgctcctgagcctgcctccagctggctggggccaccgtgcggggtgccaacgggctcagagctggagttgccgccgccgcccccactgctgtgtcctttccagactccagggctccccgggctgctctggatcccaggactccggctttcgccgagccgcagcgggatccctgtgcacccggcgcagcctacccttggtggtctaaacggatgctgctgggtgttgcgacccaggacgagatgccttgtttcttttacaataagtcgttggaggaatgccattaaagtgaactccccacctttgcacgctgtgcgggctgagtggttggggagatgtggccatggtcttgtgctagagatggcggtacaagagtctgttatgcaagcccgtgtgccagggatgtgctgggggcggccacccgctctccaggaaaggcacagctgaggcactgtggctggcttcggcctcaacatcgcccccagccttggagctctgcagacatgataggaaggaaactgtcatctgcaggggctttcagcaaaatgaagggttagatttttatgctgctgctgatggggttactaaagggaggggaagaggccaggtgggccgctgactgggccatggggagaacgtgtgttcgtactccaggctaaccctgaactccccatgtgatgcgcgctttgttgaatgtgtgtctcggtttccccatctgtaatatgagtcggggggaatggtggtgattcctacctcacagggctgttgtggggattaaagtgctgcgggtgagtgaaggacacatcacgttcagtgtttcaagtacaggcccacaaaacggggcacggcaggcctgagctcagagctgctgcactgggctttggatttgttcttgtgagtaaataaaactggctggtgaatga

SEQ ID NO: 22112 - DNA, 4200 bp, Homo sapiens
cacgtcctgacgcagcttgggcccgcggcggcggcaagggcgggagggagcggtcgccgcgggatttggagctgcctagcctcgcggtcgctttggcagcatgtaagcagctgtttgccaagaacccaggtcactgctaagaaagggtgccttcgggagaagagtgtccagaggataccaatgccagatgcatctggagttacactcagcactcgcagtatgagacattgtgtgccagcatctctttccttctggcaaagactgtagctctccaggtaggaggatcctggaagctgtgagcaccaggagccttgccagaggaggatggggccagatatgaactctctaccatgaacatggttctcggcttatgaaggaattttaagtaaaacagttatttaatttccacatattcaagtcaaaagccttctgtgtgaagtgccagtgattacccctccacaggagttatcaggatttttctggcaccaagtttaattcttcttcgtacttctggtagtgacagatctgcaggacagatttatctgttgaatgctcttgggcaggaaaaccatgtaaaacctctggaagcagcatcaggacagcagagcagagcccccgtcctcactgctcacttgcacagaaactccatctggactcggatgcttttactgaagacccatctagcttcaatcatctttagagtccatccattctggagagacctggcgtttgcagttgcctcctgtggccgtgtttttctgtcattctgttcccaggccttctattcaggcggttgaagggtgtggactttggaatggggtttgctgttcttcgggaacttgcttcctttccctggctggtgctgtcaggaaggaccatctgaaggctgcaatttgttcttagggaggcaggtgctggcctggcctggatcttccaccatgttcctgttgctgccttttgatagcctgattgtcaaccttctgggcatctccctgactgtcctcttcaccctccttctcgttttcatcatagtgccagccatttttggagtctcctttggtatccgcaaactctacatgaaaagtctgttaaaaatctttgcgtgggctaccttgagaatggagcgaggagccaaggagaagaaccaccagctttacaagccctacaccaacggaatcattgcaaaggatcccacttcactagaagaagagatcaaagagattcgtcgaagtggtagtagtaaggctctggacaacactccagagttcgagctctctgacattttctacttttgccggaaaggaatggagaccattatggatgatgaggtgacaaagagattctcagcagaagaactggagtcctggaacctgctgagcagaaccaattataacttccagtacatcagccttcggctcacggtcctgtgggggttaggagtgctgattcggtactgctttctgctgccgctcaggatagcactggctttcacagggattagccttctggtggtgggcacaactgtggtgggatacttgccaaatgggaggtttaaggagttcatgagtaaacatgttcacttaatgtgttaccggatctgcgtgcgagcgctgacagccatcatcacctaccatgacagggaaaacagaccaagaaatggtggcatctgtgtggccaatcatacctcaccgatcgatgtgatcatcttggccagcgatggctattatgccatggtgggtcaagtgcacgggggactcatgggtgtgattcagagagccatggtgaaggcctgcccacacgtctggtttgagcgctcggaagtgaaggatcgccacctggtggctaagagactgactgaacatgtgcaagataaaagcaagctgcctatcctcatcttcccagaaggaacctgcatcaataatacatcggtgatgatgttcaaaaagggaagttttgaaattggagccacagtttaccctgttgctatcaagtatgaccctcaatttggcgatgccttctggaacagcagcaaatacgggatggtgacgtacctgctgcgaatgatgaccagctgggccattgtctgcagcgtgtggtacctgcctcccatgactagagaggcagatgaagatgctgtccagtttgcgaatagggtgaaatctgccattgccaggcagggaggacttgtggacctgctgtgggatgggggcctgaagagggagaaggtgaaggacacgttcaaggaggagcagcagaagctgtacagcaagatgatcgtggggaaccacaaggacaggagccgctcctgagcctgcctccagctggctggggccaccgtgcggggtgccaacgggctcagagctggagttgccgccgccgcccccactgctgtgtcctttccagactccagggctccccgggctgctctggatcccaggactccggctttcgccgagccgcagcgggatccctgtgcacccggcgcagcctacccttggtggtctaaacggatgctgctgggtgttgcgacccaggacgagatgccttgtttcttttacaataagtcgttggaggaatgccattaaagtgaactccccacctttgcacgctgtgcgggctgagtggttggggagatgtggccatggtcttgtgctagagatggcggtacaagagtctgttatgcaagcccgtgtgccagggatgtgctgggggcggccacccgctctccaggaaaggcacagctgaggcactgtggctggcttcggcctcaacatcgcccccagccttggagctctgcagacatgataggaaggaaactgtcatctgcaggggctttcagcaaaatgaagggttagatttttatgctgctgctgatggggttactaaagggaggggaagaggccaggtgggccgctgactgggccatggggagaacgtgtgttcgtactccaggctaaccctgaactccccatgtgatgcgcgctttgttgaatgtgtgtctcggtttccccatctgtaatatgagtcggggggaatggtggtgattcctacctcacagggctgttgtggggattaaagtgctgcgggtgagtgaaggacacatcacgttcagtgtttcaagtacaggcccacaaaacggggcacggcaggcctgagctcagagctgctgcactgggctttggatttgttcttgtgagtaaataaaactggctggtgaatgaaacaaggggacttctccctttactttctcccctggctgtggccctgagtagcaggcttctcgtgaggattcccgttctcttctgggagcatggccctggggctgcggagaagccaactgactgctggagcgaggaaccctgcagctcagaaggtgaacagctcgtctcagatgcttgcagatctttggttaatttagaatttccagcacagacgtggatttctccagagacggggtgtgtgcgggtcgctgatgtgaggcctaggggaagcaatgagtaaactccagggtgggggaggagcaagggcccggggagggctgcagaggggccggggcggggcagggcctgtgctgcatggtggcttctgcaggggagggacaggggagggctgcagaggggcagggtgggcagggcatgtgctgcatggcagcttctgcacagccagagcaggcaccacaggaaacgagtcggccactggtgcctgctgtacagtcacagtggaggcagagccaaggccaagcagcccctgtgggttctggggtttcaccagtttcatgctcctcagctccccattcatgccccaccagccctcacttgggacccatgctccctcgtggcacagtcatgatgcctctcaggattttgtgcctgtggtgctgagtgtcacgtccccaaggtcgccctctggcctgcagttcagggagtgggtgggagtgaagctgtgctcctggggctgcagacagatccactttgcatgtggtacctgctgggttggccctgcaatctccttttctctgcacctacctgtgacctccctgggagagcctcccatttcctcacctgccctgttgccagcccgggggaaatctttttgctctcaaatgaagactgaaaaaataaagtcagtgttatgactaataagtctcttaggaactgttttacaaaatgcttaagaataaaaagtgattttcagctttta

SEQ ID NO: 22113 - DNA, 3202 bp, Homo sapiens
cacgtcctgacgcagcttgggcccgcggcggcggcaagggcgggagggagcggtcgccgcgggatttggagctgcctagcctcgcggtcgctttggcagcatgtaagcagctgtttgccaagaacccaggtcactgctaagaaagggtgccttcgggagaagagtgtccagaggataccaatgccagatgcatctggagttacactcagcactcgcagtatgagacattgtgtgccagcatctctttccttctggcaaagactgtagctctccaggtaggaggatcctggaagctgtgagcaccaggagccttgccagaggaggatggggccagatatgaactctctaccatgaacatggttctcggcttatgaaggaattttaagtaaaacagttatttaatttccacatattcaagtcaaaagccttctgtgtgaagtgccagtgattacccctccacaggagttatcaggatttttctggcaccaagtttaattcttcttcgtacttctggtagtgacagatctgcaggacagatttatctgttgaatgctcttgggcaggaaaaccatgtaaaacctctggaagcagcatcaggacagcagagcagagcccccgtcctcactgctcacttgcacagaaactccatctggactcggatgcttttactgaagacccatctagcttcaatcatctttagagtccatccattctggagagacctggcgtttgcagttgcctcctgtggccgtgtttttctgtcattctgttcccaggccttctattcaggcggttgaagggtgtggactttggaatggggtttgctgttcttcgggaacttgcttcctttccctggctggtgctgtcaggaaggaccatctgaaggctgcaatttgttcttagggaggcaggtgctggcctggcctggatcttccaccatgttcctgttgctgccttttgatagcctgattgtcaaccttctgggcatctccctgactgtcctcttcaccctccttctcgttttcatcatagtgccagccatttttggagtctcctttggtatccgcaaactctacatgaaaagtctgttaaaaatctttgcgtgggctaccttgagaatggagcgaggagccaaggagaagaaccaccagctttacaagccctacaccaacggaatcattgcaaaggatcccacttcactagaagaagagatcaaagagattcgtcgaagtggtagtagtaaggctctggacaacactccagagttcgagctctctgacattttctacttttgccggaaaggaatggagaccattatggatgatgaggtgacaaagagattctcagcagaagaactggagtcctggaacctgctgagcagaaccaattataacttccagtacatcagccttcggctcacggtcctgtgggggttaggagtgctgattcggtactgctttctgctgccgctcaggatagcactggctttcacagggattagccttctggtggtgggcacaactgtggtgggatacttgccaaatgggaggtttaaggagttcatgagtaaacatgttcacttaatgtgttaccggatctgcgtgcgagcgctgacagccatcatcacctaccatgacagggaaaacagaccaagaaatggtggcatctgtgtggccaatcatacctcaccgatcgatgtgatcatcttggccagcgatggctattatgccatggtgggtcaagtgcacgggggactcatgggtgtgattcagagagccatggtgaaggcctgcccacacgtctggtttgagcgctcggaagtgaaggatcgccacctggtggctaagagactgactgaacatgtgcaagataaaagcaagctgcctatcctcatcttcccagaaggaacctgcatcaataatacatcggtgatgatgttcaaaaagggaagttttgaaattggagccacagtttaccctgttgctatcaagtatgaccctcaatttggcgatgccttctggaacagcagcaaatacgggatggtgacgtacctgctgcgaatgatgaccagctgggccattgtctgcagcgtgtggtacctgcctcccatgactagagaggcagatgaagatgctgtccagtttgcgaatagggtgaaatctgccattgccaggcagggaggacttgtggacctgctgtgggatgggggcctgaagagggagaaggtgaaggacacgttcaaggaggagcagcagaagctgtacagcaagatgatcgtggggaaccacaaggacaggagccgctcctgagcctgcctccagctggctggggccaccgtgcggggtgccaacgggctcagagctggagttgccgccgccgcccccactgctgtgtcctttccagactccagggctccccgggctgctctggatcccaggactccggctttcgccgagccgcagcgggatccctgtgcacccggcgcagcctacccttggtggtctaaacggatgctgctgggtgttgcgacccaggacgagatgccttgtttcttttacaataagtcgttggaggaatgccattaaagtgaactccccacctttgcacgctgtgcgggctgagtggttggggagatgtggccatggtcttgtgctagagatggcggtacaagagtctgttatgcaagcccgtgtgccagggatgtgctgggggcggccacccgctctccaggaaaggcacagctgaggcactgtggctggcttcggcctcaacatcgcccccagccttggagctctgcagacatgataggaaggaaactgtcatctgcaggggctttcagcaaaatgaagggttagatttttatgctgctgctgatggggttactaaagggaggggaagaggccaggtgggccgctgactgggccatggggagaacgtgtgttcgtatccccatgtgatgcgcgctttgttgaatgtgtgtctcggtttccccatctgtaatatgagtcggggggaatggtggtgattcctacctcacagggctgttgtggggattaaagtgctgcgggtgagtgaaggacacatcacgttcagtgtttcaagtacaggcccacaaaacggggcacggcaggcctgagctcagagctgctgcactgggctttggatttgttcttgtgagtaaataaaactggctggtgaatga

SEQ ID NO: 22114 - DNA, 2589 bp, Homo sapiens
cacgtcctgacgcagcttgggcccgcggcggcggcaagggcgggagggagcggtcgccgcgggatttggagctgcctagcctcgcggtcgctttggcagcatgtaagcagctgtttgccaagaacccaggtcactgctaagaaagggtgccttcgggagaagagtgtccagaggataccaatgccagatgcatctggagttacactcagcactcgcagtatgagacattgtgtgccagcatctctttccttctggcaaagactgtagctctccaggtaggaggatcctggaagctgtgagcaccaggagccttgccagaggaggatggggccagatatgaactctctaccatgaacatggttctcggcttatgaaggaattttaagtaaaacagttatttaatttccacatattcaagtcaaaagccttctgtgtgaagtgccagtgattacccctccacaggagttatcaggatttttctggcaccaagtttaattcttcttcgtacttctggtagtgacagatctgcaggacagatttatctgttgaatgctcttgggcaggaaaaccatgtaaaacctctggaagcagcatcaggacagcagagcagagcccccgtcctcactgctcacttgcacagaaactccatctggactcggatgcttttactgaagacccatctagcttcaatcatctttagagtccatccattctggagagacctggcgtttgcagttgcctcctgtggccgtgtttttctgtcattctgttcccaggccttctattcaggcggttgaagggtgtggactttggaatggggtttgctgttcttcgggaacttgcttcctttccctggctggtgctgtcaggaaggaccatctgaaggctgcaatttgttcttagggaggcaggtgctggcctggcctggatcttccaccatgttcctgttgctgccttttgatagcctgattgtcaaccttctgggcatctccctgactgtcctcttcaccctccttctcgttttcatcatagtgccagccatttttggagtctcctttggtatccgcaaactctacatgaaaagtctgttaaaaatctttgcgtgggctaccttgagaatggagcgaggagccaaggagaagaaccaccagctttacaagccctacaccaacggaatcattgcaaaggatcccacttcactagaagaagagatcaaagagattcgtcgaagtggtagtagtaaggctctggacaacactccagagttcgagctctctgacattttctacttttgccggaaaggaatggagaccattatggatgatgaggtgacaaagagattctcagcagaagaactggagtcctggaacctgctgagcagaaccaattataacttccagtacatcagccttcggctcacggtcctgtgggggttaggagtgctgattcggtactgctttctgctgccgctcaggatagcactggctttcacagggattagccttctggtggtgggcacaactgtggtgggatacttgccaaatgggaggtttaaggagttcatgagtaaacatgttcacttaatgtgttaccggatctgcgtgcgagcgctgacagccatcatcacctaccatgacagggaaaacagaccaagaaatggtggcatctgtgtggccaatcatacctcaccgatcgatgtgatcatcttggccagcgatggctattatgccatggtgggtcaagtgcacgggggactcatgggtgtgattcagagagccatggtgaaggcctgcccacacgtctggtttgagcgctcggaagtgaaggatcgccacctggtggctaagagactgactgaacatgtgcaagataaaagcaagctgcctatcctcatcttcccagaaggaacctgcatcaataatacatcggtgatgatgttcaaaaagggaagttttgaaattggagccacagtttaccctgttgctatcaagtatgaccctcaatttggcgatgccttctggaacagcagcaaatacgggatggtgacgtacctgctgcgaatgatgaccagctgggccattgtctgcagcgtgtggtacctgcctcccatgactagagaggcagatgaagatgctgtccagtttgcgaatagggtgaaatctgccattgccaggcagggaggacttgtggacctgctgtgggatgggggcctgaagagggagaaggtgaaggacacgttcaaggaggagcagcagaagctgtacagcaagatgatcggccgctgactgggccatggggagaacgtgtgttcgtactccaggctaaccctgaactccccatgtgatgcgcgctttgttgaatgtgtgtctcggtttccccatctgtaatatgagtcggggggaatggtggtgattcctacctcacagggctgttgtggggattaaagtgctgcgggtgagtgaaggacacatcacgttcagtgtttcaagtacaggcccacaaaacggggcacggcaggcctgagctcagagctgctgcactgggctttggatttgttcttgtgagtaaataaaactggctggtgaatga

SEQ ID NO: 22115 - DNA, 1517 bp, Homo sapiens
ctactaatgagtcctgtgcctgcgcttaggtgggtcaagtgcacgggggactcatgggtgtgattcagagagccatggtgaaggcctgcccacacgtctggtttgagcgctcggaagtgaaggatcgccacctggtggctaagagactgactgaacatgtgcaagataaaagcaagctgcctatcctcatcttcccagaaggaacctgcatcaataatacatcggtgatgatgttcaaaaagggaagttttgaaattggagccacagtttaccctgttgctatcaagtatgaccctcaatttggcgatgccttctggaacagcagcaaatacgggatggtgacgtacctgctgcgaatgatgaccagctgggccattgtctgcagcgtgtggtacctgcctcccatgactagagaggcagatgaagatgctgtccagtttgcgaatagggtgaaatctgccattgccaggcagggaggacttgtggacctgctgtgggatgggggcctgaagagggagaaggtgaaggacacgttcaaggaggagcagcagaagctgtacagcaagatgatcgtggggaaccacaaggacaggagccgctcctgagcctgcctccagctggctggggccaccgtgcggggtgccaacgggctcagagctggagttgccgccgccgcccccactgctgtgtcctttccagactccagggctccccgggctgctctggatcccaggactccggctttcgccgagccgcagcgggatccctgtgcacccggcgcagcctacccttggtggtctaaacggatgctgctgggtgttgcgacccaggacgagatgccttgtttcttttacaataagtcgttggaggaatgccattaaagtgaactccccacctttgcacgctgtgcgggctgagtggttggggagatgtggccatggtcttgtgctagagatggcggtacaagagtctgttatgcaagcccgtgtgccagggatgtgctgggggcggccacccgctctccaggaaaggcacagctgaggcactgtggctggcttcggcctcaacatcgcccccagccttggagctctgcagacatgataggaaggaaactgtcatctgcaggggctttcagcaaaatgaagggttagatttttatgctgctgctgatggggttactaaagggaggggaagaggccaggtgggccgctgactgggccatggggagaacgtgtgttcgtactccaggctaaccctgaactccccatgtgatgcgcgctttgttgaatgtgtgtctcggtttccccatctgtaatatgagtcggggggaatggtggtgattcctacctcacagggctgttgtggggattaaagtgctgcgggtgagtgaaggacacatcacgttcagtgtttcaagtacaggcccacaaaacggggcacggcaggcctgagctcagagctgctgcactgggctttggatttgttcttgtgagtaaataaaactggctggtgaatga

SEQ ID NO: 22116 - DNA, 1722 bp, Homo sapiens
cacgtcctgacgcagcttgggcccgcggcggcggcaagggcgggagggagcggtcgccgcgggatttggagctgcctagcctcgcggtcgctttggcagcatgtaagcagctgtttgccaagaacccaggtcactgctaagaaagggtgccttcgggagaagagtgtccagaggataccaatgccagatgcatctggagttacactcagcactcgcagtatgagacattgtgtgccagcatctctttccttctggcaaagactgtagctctccaggtaggaggatcctggaagctgtgagcaccaggagccttgccagaggaggatggggccagatatgaactctctaccatgaacatggttctcggcttatgaaggaattttaagtaaaacagttatttaatttccacatattcaagtcaaaagccttctgtgtgaagtgccagtgattacccctccacaggagttatcaggatttttctggcaccaagtttaattcttcttcgtacttctggtagtgacagatctgcaggacagatttatctgttgaatgctcttgggcaggaaaaccatgtaaaacctctggaagcagcatcaggacagcagagcagagcccccgtcctcactgctcacttgcacagaaactccatctggactcggatgcttttactgaagacccatctagcttcaatcatctttagagtccatccattctggagagacctggcgtttgcagttgcctcctgtggccgtgtttttctgtcattctgttcccaggccttctattcaggcggttgaagggtgtggactttggaatggggtttgctgttcttcgggaacttgcttcctttccctggctggtgctgtcaggaaggaccatctgaaggctgcaatttgttcttagggaggcaggtgctggcctggcctggatcttccaccatgttcctgttgctgccttttgatagcctgattgtcaaccttctgggcatctccctgactgtcctcttcaccctccttctcgttttcatcatagtgccagccatttttggagtctcctttggtatccgcaaactctacatgaaaagtctgttaaaaatctttgcgtgggctaccttgagaatggagcgaggagccaaggagaagaaccaccagctttacaagccctacaccaacggaatcattgcaaaggatcccacttcactagaagaagagatcaaagagattcgtcgaagtggtagtagtaaggctctggacaacactccagagttcgagctctctgacattttctacttttgccggaaaggaatggagaccattatggatgatgaggtgacaaagagattctcagcagaagaactggagtcctggaacctgctgagcagaaccaattataacttccagtacatcagcggccgctgactgggccatggggagaacgtgtgttcgtactccaggctaaccctgaactccccatgtgatgcgcgctttgttgaatgtgtgtctcggtttccccatctgtaatatgagtcggggggaatggtggtgattcctacctcacagggctgttgtggggattaaagtgctgcgggtgagtgaaggacacatcacgttcagtgtttcaagtacaggcccacaaaacggggcacggcaggcctgagctcagagctgctgcactgggctttggatttgttcttgtgagtaaataaaactggctggtgaatga

SEQ ID NO: 22117 - DNA, 868 bp, Homo sapiens
ccagtcctgtgtttaccgatagaccggaagtgtggcttcgtttacagttcggcacgtaggacggagggtagtgcgtctagagacacatattcccaacggatttgacgatggtgttcggtcttgaatggaaatgtagtcttaggccagtcttaggtttttgaacaggatagtaggtatccggagtcgattgagggccagagcaggcactggggttcggatcctgggcaaagtttcccacgttgagggtctcgaggacgcctagatctctttcccagggccatggcgaacccgaagctgctgggactggagctaagcgaggcggaggcgatcggtgctgattcggcgcgatttgaggagctgctgctgcaggcctcgaaggagctccagcaagcccagacaaccagaccagaatcgacacaaatccagcctcagcctggtttctgcataaagaccaactcctcggaagggaaggttttcatcaacatctgccactccccctctatccctcctcccgccgacgtgaccgaggaggagctgcttcagatgctagaggaggaccaagctgggtttcgcatccccatgagtctgggagagcctcatgcagaactggatgcaaaaggccagggatgtaccgcctacgacgtagctgtcaacagcgacttctaccggaggatgcagacagggattcttgcggagctcggatcacatcgcagggagggcttggggcgatacattggcgtgaatcggatggggttgtgaaaccggctcaaggggcatccgtggaaaactcgcggaacagccgaccaaaggggggggtcccccccccacgagactggcgaacctccactgcggacccccacgatggctg

SEQ ID NO: 22118 - DNA, 614 bp, Homo sapiens
ccagtcctgtgtttaccgatagaccggaagtgtggcttcgtttacagttcggcacgtaggacggagggtagtgcgtctagagacacatattcccaacggatttgacgatggtgttcggtcttgaatggaaatgtagtcttaggccagtcttaggtttttgaacaggatagtaggtatccggagtcgattgagggccagagcaggcactggggttcggatccggagctgggggacctgtacacgcccgcccccgggagagctgagtcaggccctgaaaagcctcacctgaacctgtggctggaagcccccgacctcctcttggccgaaattgacctccccaaactggatggagccctggggctgtcgctggagatcggggagaaccgcctggtgatggggggcccccagcagctgtatcatctagacgcttatatcccgctgcagatcaactctcatgagagcaaggcagccttccaccggaagagaaagcaattaatggtggccatgccgcttctgccggtgccttcttgatcagggtgtctccttgtgcttctgagatgtggagaagaggctgctggctaccctaaaagttgaaataaaagatttttgccttt

SEQ ID NO: 22119 - DNA, 1233 bp, Homo sapiens
tcccaagcagctgggattacaggtgtgctccaccacacccagctaatttttgtatttttaatagagacggggtttcgccacgttggcctggctggtctcagactcctgacctcaggtgatccaccgcctcagcctccgaaagtgctgggattacaggtgtgagccactgcacccagcctgcggctctctctttcatcctgttttctcctctgcccttctccctttctccatctctgtcttgcctcacctctgtccctgtttctgcctctatatccttttttcaatatgtctcttgaagctttctgggaccaagctctaggcagtgccccggggaataaggacctatgaaatgcacattccacgttccagaaactcgctgtcatgggtggggctcaaggagatggatgcagtatcaatagggtgtgattcacgctgctttggaggggggcacccagcacagccttgagagggctcgtcacccacatgaaggggtcagggaaggcttcctggaggagggggtgtgggataagatttgaaggaacaggaggagttcagcaggcagacagaagaaggttctaggtagagcggcccagagctgggagagaatgattggattggatcagccagtaatggagagtgactgaaagaaattcagtgggccgaggttgctagaagaatgaggtcttctccagaggtgggaggggcagaccacacagggtctccaacgccaggcttgtggggctcagaccttcacttgggagcactggggagccagagaagagctgtgagcagggaagggatagggtcaactctagtgacatcacactgatggacaggagataagaggccagggaggaggctgggcggagagtccagagcggaaagtgagtgcccagctctcacttccttatgtctctctctgcttcttacggccgctgtccctgaatgtttcttccctgtctgggtctgggctgtgggcttcctgcagagggctggggggtcctcaccccctttttctccccgcagaaggccagggatgtaccgcctacgacgtagctgtcaacagcgacttctaccggaggatgcagaacagcgatttcttgcgggagctcgtgatcaccatcgccagggagggccttgaggacaaatacaacttgcagctgaatccggatgggctggtgagaacggcattaggggccattcgcgaaaaaaacgcgtggaaaggccggcacg

SEQ ID NO: 22120 - DNA, 450 bp, Homo sapiens
ccagtcctgtgtttaccgatagaccggaagtgtggcttcgtttacagttcggcacgtaggacggagggtagtgcgtctagagacacatattcccaacggatttgacgatggtgttcggtcttgaatggaaatgtagtcttaggccagtcttaggtttttgaacaggatagtaggtatccggagtcgattgagggccagagcaggcactggggttcggatcctgggcaaagtttcccacgttgaggagctgtatcatctagacgcttatatcccgctgcagatcaactctcatgagagcaaggcagccttccaccggaagagaaagcaattaatggtggccatgccgcttctgccggtgccttcttgatcagggtgtctccttgtgcttctgagatgtggagaagaggctgctggctaccctaaaagttgaaataaaagatttttgccttt

SEQ ID NO: 22121 - DNA, 388 bp, Homo sapiens
ccagtcctgtgtttaccgatagaccggaagtgtggcttcgtttacagttcggcacgtaggacggagggtagtgcgtctagagacacatattcccaacggatttgacgatggtgttcggtcttgaatggaaatgtagtcttaggccagtcttaggtttttgaacaggatagtaggtatccggagtcgattgagggccagagcaggcactggggttcggatcctgggcaaagtttcccacgttgagggtctcgaggacgcctagatctctttcccagggccatggcgaacccgaagctgctgggactggagctaagcgaggcggaggcgatcggtgctgattcgtgctggagctccttcgaggcctgcagcagcagaaactcaaatcgcg

SEQ ID NO: 22122 - DNA, 751 bp, Homo sapiens
tgctagtcgcgcgattgagggctgctccgcctctcatgcataagaattgctccatttgaggaacaaatgaggggtctgatggcacagactccgagcctggaggtagttttcctttatacaggcctcgaaggagctccagcaagcccagacaaccagaccagaatcgacacaaatccagcctcagcctggtttctgcataaagaccaactcctcggaagggaaggttttcatcaacatctgccactccccctctatccctcctcccgccgacgtgaccgaggaggagctgcttcagatgctagaggaggaccaagctgggtttcgcatccccatgagtctgggagagcctcatgcagaactggatgcaagtcagtgccctcagaggacccaggagtctggcccgctaggccccttcttccctagaacccaagaatcctgggcccaggaccctcctccctcagctcctggagatctggcccctcgatctgattcttttccctatggtagatctctagtgccctggacatcccacacccgggcagtcctggttctgccacctggccaggctggcacttttccatgccccactccagggccgggaggcctgggcagagtgctcttcgtgcattagcggatctcctggctttagtcctgagcctgctgtctccttcttttttctttctttctttttttttttcttgtgatggagtttcgctcttgttgcccaggttcagacgattctcctgtctca

SEQ ID NO: 22123 - DNA, 1257 bp, Homo sapiens
ccagtcctgtgtttaccgatagaccggaagtgtggcttcgtttacagttcggcacgtaggacggagggtagtgcgtctagagacacatattcccaacggatttgacgatggtgttcggtcttgaatggaaatgtagtcttaggccagtcttaggtttttgaacaggatagtaggtatccggagtcgattgagggccagagcaggcactggggttcggatcctgggcaaagtttcccacgttgagggtctcgaggacgcctagatctctttcccagggccatggcgaacccgaagctgctgggactggagctaagcgaggcggaggcgatcggtgctgattcggcgcgatttgaggagctgctgctgcaggcctcgaaggagctccagcaagcccagacaaccagaccagaatcgacacaaatccagcctcagcctggtttctgcataaagaccaactcctcggaagggaaggttttcatcaacatctgccactccccctctatccctcctcccgccgacgtgaccgaggaggagctgcttcagatgctagaggaggaccaagctgggtttcgcatccccatgagtctgggagagcctcatgcagaactggatgcaaaaggccagggatgtaccgcctacgacgtagctgtcaacagcgacttctaccggaggatgcagaacagcgatttcttgcgggagctcgtgatcaccatcgccagggagggccttgaggacaaatacaacttgcagctgaatccggaatggcgcatgatgaagaaccggccattcatgggctccatctcgcagcagaacatccgctcggagcagcgtcctcggatccaggagctgggggacctgtacacgcccgcccccgggagagctgagtcaggccctgaaaagcctcacctgaacctgtggctggaagcccccgacctcctcttggccgaaattgacctccccaaactggatggagccctggggctgtcgctggagatcggggagaaccgcctggtgatggggggcccccagcagctgtatcatctagacgcttatatcccgctgcagatcaactctcatgagagcaaggcagccttccaccggaagagaaagcaattaatggtggccatgccgcttctgccggtgccttcttgatcagggtgtctccttgtgcttctgagatgtggagaagaggctgctggctaccctaaaagttgaaataaaagatttttgcctttaaaaaaaaaacacaaaaaacac

SEQ ID NO: 22124 - DNA, 1259 bp, Homo sapiens
ccagtcctgtgtttaccgatagaccggaagtgtggcttcgtttacagttcggcacgtaggacggagggtagtgcgtctagagacacatattcccaacggatttgacgatggtgttcggtcttgaatggaaatgtagtcttaggccagtcttaggtttttgaacaggatagtaggtatccggagtcgattgagggccagagcaggcactggggttcggatcctgggcaaagtttcccacgttgagggtctcgaggacgcctagatctctttcccagggccatggcgaacccgaagctgctgggactggagctaagcgaggcggaggcgatcggtgctgattcggcgcgatttgaggagctgctgctgcaggcctcgaaggagctccagcaagcccagacaaccagaccagaatcgacacaaatccagcctcagcctggtttctgcataaagaccaactcctcggaagggaaggttttcatcaacatctgccactccccctctatccctcctcccgccgacgtgaccgaggaggagctgcttcagatgctagaggaggaccaagctgggtttcgcatccccatgagtctgggagagcctcatgcagaactggatgcaaaaggccagggatgtaccgcctacgacgtagctgtcaacagcgacttctaccggaggatgcagaacagcgatttcttgcgggagctcgtgatcaccatcgccagggagggccttgaggacaaatacaacttgcagctgaatccggaatggcgcatgatgaagaaccggccattcatgggctccatctcgcagcagaacatccgctcggagcagcgtcctcggatccaggagctgggggacctgtacacgcccgcccccgggagagctgagtcaggccctgaaaagcctcacctgaacctgtggctggaagcccccgacctcctcttggccgaaattgacctccccaaactggatggagccctggggctgtcgctggagatcggggagaaccgcctggtgatggggggcccccagcagctgtatcatctagacgcttatatcccgctgcagatcaactctcatgagagcaaggcagccttccaccggaagagaaagcaattaatggtggccatgccgcttctgccggtgccttcttgatcagggtgtctccttgtgcttctgagatgtggagaagaggctgctggctaccctaaaagttgaaataaaagatttttgcctttaaaaacaaaaaaaacaaaaacaag

SEQ ID NO: 22125 - DNA, 1564 bp, Homo sapiens
ccagtcctgtgtttaccgatagaccggaagtgtggcttcgtttacagttcggcacgtaggacggagggtagtgcgtctagagacacatattcccaacggatttgacgatggtgttcggtcttgaatggaaatgtagtcttaggccagtcttaggtttttgaacaggatagtaggtatccggagtcgattgagggccagagcaggcactggggttcggatcctgggcaaagtttcccacgttgagggtctcgaggacgcctagatctctttcccagggccatggcgaacccgaagctgctgggactggagctaagcgaggcggaggcgatcggtgctgattcggcgcgatttgaggagctgctgctgcaggcctcgaaggagctccagcaagcccagacaaccagaccagaatcgacacaaatccagcctcagcctggtttctgcataaagaccaactcctcggaagggaaggttttcatcaacatctgccactccccctctatccctcctcccgccgacgtgaccgaggaggagctgcttcagatgctagaggaggaccaagctgggtttcgcatccccatgagtctgggagagcctcatgcagaactggatgcaaaaggccagggatgtaccgcctacgacgtagctgtcaacagcgacttctaccggaggatgcagaacagcgatttcttgcgggagctcgtgatcaccatcgccagggagggccttgaggacaaatacaacttgcagctgaatccggaatggcgcatgatgaagaaccggccattcatgggctccatctcgcagcagaacatccgctcggagcagcgtcctcggatccaggagctgggggacctgtacacgcccgcccccgggagagctgagtcaggccctgaaaagcctcacctgaacctgtggctggaagcccccgacctcctcttggccgaaattgacctccccaaactggtgagttttgcgcgctggaccagagcaggggaatgaggtctggaaaggtcagggactgtctctgagtgtgagtgacaaggggttgttgctggacttgtcagttgcgtcctctctgccaggaggcccacaggccaccttctggtgctgtcctgagggcgcccaagggattgtaagtgctcggtcgttgagacttgtaattgctgtcttctgtctcttcctgggagattagacccttcaaatatagtttcccagcgtgtgaggctaccatgcctggtccaggtgatcatcctgttgctggggagggtgacctgattccgccacctctccaggatggagccctggggctgtcgctggagatcggggagaaccgcctggtgatggggggcccccagcagctgtatcatctagacgcttatatcccgctgcagatcaactctcatgagagcaaggcagccttccaccggaagagaaagcaattaatggtggccatgccgcttctgccggtgccttcttgatcagggtgtctccttgtgcttctgagatgtggagaagaggctgctggctaccctaaaagttgaaataaaagatttttgccttt

SEQ ID NO: 22126 - DNA, 1335 bp, Homo sapiens
ccagtcctgtgtttaccgatagaccggaagtgtggcttcgtttacagttcggcacgtaggacggagggtagtgcgtctagagacacatattcccaacggatttgacgatggtgttcggtcttgaatggaaatgtagtcttaggccagtcttaggtttttgaacaggatagtaggtatccggagtcgattgagggccagagcaggcactggggttcggatcctgggcaaagtttcccacgttgagggtctcgaggacgcctagatctctttcccagggccatggcgaacccgaagctgctgggactggagctaagcgaggcggaggcgatcggtgctgattcggcgcgatttgaggagctgctgctgcaggcctcgaaggagctccagcaagcccagacaaccagaccagaatcgacacaaatccagcctcagcctggtttctgcataaagaccaactcctcggaagggaaggttttcatcaacatctgccactccccctctatccctcctcccgccgacgtgaccgaggaggagctgcttcagatgctagaggaggaccaagctgggtttcgcatccccatgagtctgggagagcctcatgcagaactggatgcaaaaggccagggatgtaccgcctacgacgtagctgtcaacagcgacttctaccggaggatgcagaacagcgatttcttgcgggagctcgtgatcaccatcgccagggagggccttgaggacaaatacaacttgcagctgaatccggaatggcgcatgatgaagaaccggccattcatgggctccatctcgcagcagaacatccgctcggagcagcgtcctcggatccaggagctgggggacctgtacacgcccgcccccgggagagctgagtcaggccctgaaaagcctcacctgaacctgtggctggaagcccccgacctcctcttggccgaaattgacctccccaaactgacccttcaaatatagtttcccagcgtgtgaggctaccatgcctggtccaggtgatcatcctgttgctggggagggtgacctgattccgccacctctccaggatggagccctggggctgtcgctggagatcggggagaaccgcctggtgatggggggcccccagcagctgtatcatctagacgcttatatcccgctgcagatcaactctcatgagagcaaggcagccttccaccggaagagaaagcaattaatggtggccatgccgcttctgccggtgccttcttgatcagggtgtctccttgtgcttctgagatgtggagaagaggctgctggctaccctaaaagttgaaataaaagatttttgccttt

SEQ ID NO: 22127 - DNA, 1186 bp, Homo sapiens
ccagtcctgtgtttaccgatagaccggaagtgtggcttcgtttacagttcggcacgtaggacggagggtagtgcgtctagagacacatattcccaacggatttgacgatggtgttcggtcttgaatggaaatgtagtcttaggccagtcttaggtttttgaacaggatagtaggtatccggagtcgattgagggccagagcaggcactggggttcggatcctgggcaaagtttcccacgttgagggtctcgaggacgcctagatctctttcccagggccatggcgaacccgaagctgctgggactggagctaagcgaggcggaggcgatcggtgctgattcggcgcgatttgaggagctgctgctgcaggcctcgaaggagctccagcaagcccagacaaccagaccagaatcgacacaaatccagcctcagcctggtttctgcataaagaccaactcctcggaagggaaggttttcatcaacatctgccactccccctctatccctcctcccgccgacgtgaccgaggaggagctgcttcagatgctagaggaggaccaagctgggtttcgcatccccatgagtctgggagagcctcatgcagaactggatgcaaaaggccagggatgtaccgcctacgacgtagctgtcaacagcgacttctaccggaggatgcagaacagcgatttcttgcgggagctcgtgatcaccatcgccagggagggccttgaggacaaatacaacttgcagctgaatccgggaacatccgctcggagcagcgtcctcggatccaggagctgggggacctgtacacgcccgcccccgggagagctgagtcaggccctgaaaagcctcacctgaacctgtggctggaagcccccgacctcctcttggccgaaattgacctccccaaactggatggagccctggggctgtcgctggagatcggggagaaccgcctggtgatggggggcccccagcagctgtatcatctagacgcttatatcccgctgcagatcaactctcatgagagcaaggcagccttccaccggaagagaaagcaattaatggtggccatgccgcttctgccggtgccttcttgatcagggtgtctccttgtgcttctgagatgtggagaagaggctgctggctaccctaaaagttgaaataaaagatttttgccttt

SEQ ID NO: 22128 - DNA, 965 bp, Homo sapiens
ccagtcctgtgtttaccgatagaccggaagtgtggcttcgtttacagttcggcacgtaggacggagggtagtgcgtctagagacacatattcccaacggatttgacgatggtgttcggtcttgaatggaaatgtagtcttaggccagtcttaggtttttgaacaggatagtaggtatccggagtcgattgagggccagagcaggcactggggttcggatcctgggcaaagtttcccacgttgagggtctcgaggacgcctagatctctttcccagggccatggcgaacccgaagctgctgggactggagctaagcgaggcggaggcgatcggtgctgattcggcgcgatttgaggagctgctgctgcaggcctcgaaggagctccagcaagcccagacaaccagaccagaatcgacacaaatccagcctcagcctggtttctgcataaagaccaactcctcggaagggaaggttttcatcaacatctgccactccccctctatccctcctcccgccgacgtgaccgaggaggagctgcttcagatgctagaggaggaccaagctgggtttcgcatccccatgagtctgggagagcctcatgcagaactggatgcaaaaggccagggatgtaccgcctacgacgtagctgtcaacagcgacttctaccggaggatgcagaacagcgatttcttgcgggagctcgtgatcaccatcgccagggagggccttgaggacaaatacaacttgcagctgaatccggagctgtatcatctagacgcttatatcccgctgcagatcaactctcatgagagcaaggcagccttccaccggaagagaaagcaattaatggtggccatgccgcttctgccggtgccttcttgatcagggtgtctccttgtgcttctgagatgtggagaagaggctgctggctaccctaaaagttgaaataaaagatttttgccttt

SEQ ID NO: 22129 - DNA, 1105 bp, Homo sapiens
ccagtcctgtgtttaccgatagaccggaagtgtggcttcgtttacagttcggcacgtaggacggagggtagtgcgtctagagacacatattcccaacggatttgacgatggtgttcggtcttgaatggaaatgtagtcttaggccagtcttaggtttttgaacaggatagtaggtatccggagtcgattgagggccagagcaggcactggggttcggatcctgggcaaagtttcccacgttgagggtctcgaggacgcctagatctctttcccagggccatggcgaacccgaagctgctgggactggagctaagcgaggcggaggcgatcggtgctgattcggcgcgatttgaggagctgctgctgcaggcctcgaaggagctccagcaagcccagacaaccagaccagaatcgacacaaatccagcctcagcctggtttctgcataaagaccaactcctcggaagggaaggttttcatcaacatctgccactccccctctatccctcctcccgccgacgtgaccgaggaggagctgcttcagatgctagaggaggaccaagctgggtttcgcatccccatgagtctgggagagcctcatgcagaactggatgcaaaaggccagggatgtaccgcctacgacgtagctgtcaacagcgacttctaccggaggatgcagaacagcgatttcttgcgggagctcgtgatcaccatcgccagggagggccttgaggacaaatacaacttgcagctgaatccggccctgaaaagcctcacctgaacctgtggctggaagcccccgacctcctcttggccgaaattgacctccccaaactggatggagccctggggctgtcgctggagatcggggagaaccgcctggtgatggggggcccccagcagctgtatcatctagacgcttatatcccgctgcagatcaactctcatgagagcaaggcagccttccaccggaagagaaagcaattaatggtggccatgccgcttctgccggtgccttcttgatcagggtgtctccttgtgcttctgagatgtggagaagaggctgctggctaccctaaaagttgaaataaaagatttttgccttt

SEQ ID NO: 22130 - DNA, 1326 bp, Homo sapiens
ccagtcctgtgtttaccgatagaccggaagtgtggcttcgtttacagttcggcacgtaggacggagggtagtgcgtctagagacacatattcccaacggatttgacgatggtgttcggtcttgaatggaaatgtagtcttaggccagtcttaggtttttgaacaggatagtaggtatccggagtcgattgagggccagagcaggcactggggttcggatcctgggcaaagtttcccacgttgagggtctcgaggacgcctagatctctttcccagggccatggcgaacccgaagctgctgggactggagctaagcgaggcggaggcgatcggtgctgattcggcgcgatttgaggagctgctgctgcagctctcatgcataagaattgctccatttgaggaacaaatgaggggtctgatggcacagactccgagcctggaggtagttttcctttatacaggcctcgaaggagctccagcaagcccagacaaccagaccagaatcgacacaaatccagcctcagcctggtttctgcataaagaccaactcctcggaagggaaggttttcatcaacatctgccactccccctctatccctcctcccgccgacgtgaccgaggaggagctgcttcagatgctagaggaggaccaagctgggtttcgcatccccatgagtctgggagagcctcatgcagaactggatgcaaaaggccagggatgtaccgcctacgacgtagctgtcaacagcgacttctaccggaggatgcagaacagcgatttcttgcgggagctcgtgatcaccatcgccagggagggccttgaggacaaatacaacttgcagctgaatccggaatggcgcatgatgaagaaccggccattcatgggctccatctcgcagcagaacatccgctcggagcagcgtcctcggatccaggagctgggggacctgtacacgcccgcccccgggagagctgagtcaggccctgaaaagcctcacctgaacctgtggctggaagcccccgacctcctcttggccgaaattgacctccccaaactggatggagccctggggctgtcgctggagatcggggagaaccgcctggtgatggggggcccccagcagctgtatcatctagacgcttatatcccgctgcagatcaactctcatgagagcaaggcagccttccaccggaagagaaagcaattaatggtggccatgccgcttctgccggtgccttcttgatcagggtgtctccttgtgcttctgagatgtggagaagaggctgctggctaccctaaaagttgaaataaaagatttttgccttt

SEQ ID NO: 22131 - DNA, 1251 bp, Homo sapiens
ccagtcctgtgtttaccgatagaccggaagtgtggcttcgtttacagttcggcacgtaggacggagggtagtgcgtctagagacacatattcccaacggatttgacgatggtgttcggtcttgaatggaaatgtagtcttaggccagtcttaggtttttgaacaggatagtaggtatccggagtcgattgagggccagagcaggcactggggttcggatcctgggcaaagtttcccacgttgagggtctcgaggacgcctagatctctttcccagggccatggcgaacccgaagctgctgggactggagctaagcgaggcggaggcgatcggtgctgattcggcgcgatttgaggagctgctgctgcaggcctcgaaggagctccagcaagcccagacaaccagaccagaatcgacacaaatccagcctcagcctggtttctgcataaagaccaactcctcggaagggaaggttttcatcaacatctgccactccccctctatccctcctcccgccgacgtgaccgaggaggagctgcttcagatgctagaggaggaccaagctgggtttcgcatccccatgagtctgggagagcctcatgcagaactggatgcaaaaggccagggatgtaccgcctacgacgtagctgtcaacagcgacttctaccggaggatgcagaacagcgatttcttgcgggagctcgtgatcaccatcgccagggagggccttgaggacaaatacaacttgcagctgaatccgggaacatccgctcggagcagcgtcctcggatccaggagctgggggacctgtacacgcccgcccccgggagagctgagtcaggccctgaaaagcctcacctgaacctgtggctggaagcccccgacctcctcttggccgaaattgacctccccaaactggatggagccctggggctgtcgctggagatcggggagaaccgcctggtgatggggggcccccagcagctgtatcatctagacgcttatatcccgctgcagatcaactctcatgagagcaaggcagccttccaccggaagagaaagcaattaatggtggccatgccgcttctgccggtgccttcttgatcagggtgtctccttgtgcttctgagatgtggagaagaggctgctggctaccctaaaagttgaaataaaagatttttgcctttaaacaacaatacacaggaaaacaacaaacaccaccacacaggccagagcacaccacagcacaaag

SEQ ID NO: 22132 - DNA, 1419 bp, Homo sapiens
ccagtcctgtgtttaccgatagaccggaagtgtggcttcgtttacagttcggcacgtaggacggagggtagtgcgtctagagacacatattcccaacggatttgacgatggtgttcggtcttgaatggaaatgtagtcttaggccagtcttaggtttttgaacaggatagtaggtatccggagtcgattgagggccagagcaggcactggggttcggatcctgggcaaagtttcccacgttgagggtctcgaggacgcctagatctctttcccagggccatggcgaacccgaagctgctgggactggagctaagcgaggcggaggcgatcggtgctgattcggcgcgatttgaggagctgctgctgcagctctcatgcataagaattgctccatttgaggaacaaatgaggggtctgatggcacagactccgagcctggaggtagttttcctttatacaggcctcgaaggagctccagcaagcccagacaaccagaccagaatcgacacaaatccagcctcagcctggtttctgcataaagaccaactcctcggaagggaaggttttcatcaacatctgccactccccctctatccctcctcccgccgacgtgaccgaggaggagctgcttcagatgctagaggaggaccaagctgggtttcgcatccccatgagtctgggagagcctcatgcagaactggatgcaaaaggccagggatgtaccgcctacgacgtagctgtcaacagcgacttctaccggaggatgcaggttggggggcggggctgcggttgaggcctgggcaggggtctctacccctaccctccccgccaccgcctgtcttttccctctctgtcaccccagaacagcgatttcttgcgggagctcgtgatcaccatcgccagggagggccttgaggacaaatacaacttgcagctgaatccggaatggcgcatgatgaagaaccggccattcatgggctccatctcgcagcagaacatccgctcggagcagcgtcctcggatccaggagctgggggacctgtacacgcccgcccccgggagagctgagtcaggccctgaaaagcctcacctgaacctgtggctggaagcccccgacctcctcttggccgaaattgacctccccaaactggatggagccctggggctgtcgctggagatcggggagaaccgcctggtgatggggggcccccagcagctgtatcatctagacgcttatatcccgctgcagatcaactctcatgagagcaaggcagccttccaccggaagagaaagcaattaatggtggccatgccgcttctgccggtgccttcttgatcagggtgtctccttgtgcttctgagatgtggagaagaggctgctggctaccctaaaagttgaaataaaagatttttgccttt

SEQ ID NO: 22133 - DNA, 1645 bp, Homo sapiens
tcccaagcagctgggattacaggtgtgctccaccacacccagctaatttttgtatttttaatagagacggggtttcgccacgttggcctggctggtctcagactcctgacctcaggtgatccaccgcctcagcctccgaaagtgctgggattacaggtgtgagccactgcacccagcctgcggctctctctttcatcctgttttctcctctgcccttctccctttctccatctctgtcttgcctcacctctgtccctgtttctgcctctatatccttttttcaatatgtctcttgaagctttctgggaccaagctctaggcagtgccccggggaataaggacctatgaaatgcacattccacgttccagaaactcgctgtcatgggtggggctcaaggagatggatgcagtatcaatagggtgtgattcacgctgctttggaggggggcacccagcacagccttgagagggctcgtcacccacatgaaggggtcagggaaggcttcctggaggagggggtgtgggataagatttgaaggaacaggaggagttcagcaggcagacagaagaaggttctaggtagagcggcccagagctgggagagaatgattggattggatcagccagtaatggagagtgactgaaagaaattcagtgggccgaggttgctagaagaatgaggtcttctccagaggtgggaggggcagaccacacagggtctccaacgccaggcttgtggggctcagaccttcacttgggagcactggggagccagagaagagctgtgagcagggaagggatagggtcaactctagtgacatcacactgatggacaggagataagaggccagggaggaggctgggcggagagtccagagcggaaagtgagtgcccagctctcacttccttatgtctctctctgcttcttacggccgctgtccctgaatgtttcttccctgtctgggtctgggctgtgggcttcctgcagagggctggggggtcctcaccccctttttctccccgcagaaggccagggatgtaccgcctacgacgtagctgtcaacagcgacttctaccggaggatgcagaacagcgatttcttgcgggagctcgtgatcaccatcgccagggagggccttgaggacaaatacaacttgcagctgaatccggaatggcgcatgatgaagaaccggccattcatgggctccatctcgcagcagaacatccgctcggagcagcgtcctcggatccaggagctgggggacctgtacacgcccgcccccgggagagctgagtcaggccctgaaaagcctcacctgaacctgtggctggaagcccccgacctcctcttggccgaaattgacctccccaaactggatggagccctggggctgtcgctggagatcggggagaaccgcctggtgatggggggcccccagcagctgtatcatctagacgcttatatcccgctgcagatcaactctcatgagagcaaggcagccttccaccggaagagaaagcaattaatggtggccatgccgcttctgccggtgccttcttgatcagggtgtctccttgtgcttctgagatgtggagaagaggctgctggctaccctaaaagttgaaataaaagatttttgccttt

SEQ ID NO: 22134 - DNA, 1232 bp, Homo sapiens
ccagtcctgtgtttaccgatagaccggaagtgtggcttcgtttacagttcggcacgtaggacggagggtagtgcgtctagagacacatattcccaacggatttgacgatggtgttcggtcttgaatggaaatgtagtcttaggccagtcttaggtttttgaacaggatagtaggtatccggagtcgattgagggccagagcaggcactggggttcggatcctgggcaaagtttcccacgttgaggatcaccgcctattagtcgtctttctccagcggacactggtgaaacccgtaaagcttgcggggacctggaagcgtaaggacgagtgccggccgcgtggacatcgagtgcatgagattcgggcgccgaccctcgatggatgctgctgggtggcagggtctcaaaggaaggctccggtcatatgggccaaaaaaaaagcatgaaccatgaattggagcacaaatccgagcctccggtctggtttctgcataaagaccaactcctcggaagggaaggttttcatcaacatctgccactccccctctatccctcctcccgccgacgtgaccgaggaggagctgcttcagatgctagaggaggaccaagctgggtttcgcatccccatgagtctgggagagcctcatgcagaactggatgcaaaaggccagggatgtaccgcctacgacgtagctgtcaacagcgacttctaccggaggatgcagaacagcgatttcttgcgggagctcgtgatcaccatcgccagggagggccttgaggacaaatacaacttgcagctgaatccgggaacatccgctcggagcagcgtcctcggatccaggagctgggggacctgtacacgcccgcccccgggagagctgagtcaggccctgaaaagcctcacctgaacctgtggctggaagcccccgacctcctcttggccgaaattgacctccccaaactggatggagccctggggctgtcgctggagatcggggagaaccgcctggtgatggggggcccccagcagctgtatcatctagacgcttatatcccgctgcagatcaactctcatgagagcaaggcagccttccaccggaagagaaagcaattaatggtggccatgccgcttctgccggtgccttcttgatcagggtgtctccttgtgcttctgagatgtggagaagaggctgctggctaccctaaaagttgaaataaaagatttttgccttt

SEQ ID NO: 22135 - DNA, 804 bp, Homo sapiens
ccagtcctgtgtttaccgatagaccggaagtgtggcttcgtttacagttcggcacgtaggacggagggtagtgcgtctagagacacatattcccaacggatttgacgatggtgttcggtcttgaatggaaatgtagtcttaggccagtcttaggtttttgaacaggatagtaggtatccggagtcgattgagggccagagcaggcactggggttcggatcctgggcaaagtttcccacgttgagggtctcgaggacgcctagatctctttcccagggccatggcgaacccgaagctgctgggactggagctaagcgaggcggaggcgatcggtgctgattcggcgcgatttgaggagctgctgctgcaggcctcgaaggagctccagcaagcccagacaaccagaccagaatcgacacaaatccagcctcagcctgccctggaccttgttcctcctcagccctgaaaagcctcacctgaacctgtggctggaagcccccgacctcctcttggccgaaattgacctccccaaactggatggagccctggggctgtcgctggagatcggggagaaccgcctggtgatggggggcccccagcagctgtatcatctagacgcttatatcccgctgcagatcaactctcatgagagcaaggcagccttccaccggaagagaaagcaattaatggtggccatgccgcttctgccggtgccttcttgatcagggtgtctccttgtgcttctgagatgtggagaagaggctgctggctaccctaaaagttgaaataaaagatttttgccttt

SEQ ID NO: 22136 - DNA, 317 bp, Homo sapiens
gtttgacggcgctcctgaccctcagaatggcgcatgatgaagaaccggccattcatgggctccatctcgcagcagaacatccgctcggagcagcgtcctcggatccaggagctgggggacctgtacacgcccgcccccgggagagctgagtcagggtgggccttcggtagatccccggtctgatgtttcctcaacgctcttgggaatccctccctccatcctcccacactgggtgatgtcctggggccctgggcactgagagagggaggagagagaactcctgactgggaaggcgtcctgaggccaatagggctggt

SEQ ID NO: 22137 - DNA, 926 bp, Homo sapiens
ccagtcctgtgtttaccgatagaccggaagtgtggcttcgtttacagttcggcacgtaggacggagggtagtgcgtctagagacacatattcccaacggatttgacgatggtgttcggtcttgaatggaaatgtagtcttaggccagtcttaggtttttgaacaggatagtaggtatccggagtcgattgagggccagagcaggcactggggttcggatcctgggcaaagtttcccacgttgagggtctcgaggacgcctagatctctttcccagggccatggcgaacccgaagctgctgggactggagctaagcgaggcggaggcgatcggtgctgattcggcgcgatttgaggagctgctgctgcaggcctcgaaggagctccagcaagcccagacaaccagaccagaatcgacacaaatccagcctcagcctggtttctgcataaagaccaactcctcggaagggaaggttttcatcaacatctgccactccccctctatccctcctcccgccgacgtgaccgaggaggagctgcttcagatgctagaggaggaccaagctgggtttcgcatccccatgagtctgggagagcctcatgcagaactggatgcaaaaggccagggatgtaccgcctacgacgtagctgtcaacagcgacttctaccggaggatgcagaacagcgatttcttgcgggagctcgtgatggggggcccccagcagctgtatcatctagacgcttatatcccgctgcagatcaactctcatgagagcaaggcagccttccaccggaagagaaagcaattaatggtggccatgccgcttctgccggtgccttcttgatcagggtgtctccttgtgcttctgagatgtggagaagaggctgctggctaccctaaaagttgaaataaaagatttttgccttt

SEQ ID NO: 22138 - DNA, 1235 bp, Homo sapiens
ccagtcctgtgtttaccgatagaccggaagtgtggcttcgtttacagttcggcacgtaggacggagggtagtgcgtctagagacacatattcccaacggatttgacgatggtgttcggtcttgaatggaaatgtagtcttaggccagtcttaggtttttgaacaggatagtaggtatccggagtcgattgagggccagagcaggcactggggttcggatcctgggcaaagtttcccacgttgagggtctcgaggacgcctagatctctttcccagggccatggcgaacccgaagctgctgggactggagctaagcgaggcggaggcgatcggtgctgattcggcgcgatttgaggagctgctgctgcaggcctcgaaggagctccagcaagcccagacaaccagaccagaatcgacacaaatccagcctcagcctggtttctgcataaagaccaactcctcggaagggaaggttttcatcaacatctgccactccccctctatccctcctcccgccgacgtgaccgaggaggagctgcttcagatgctagaggaggaccaagctgggtttcgcatccccatgagtctgggagagcctcatgcagaactggatgcaaaaggccagggatgtaccgcctacgacgtagctgtcaacagcgacttctaccggaggatgcagaacagcgatttcttgcgggagctcgtgatcaccatcgccagggagggccttgaggacaaatacaacttgcagctgaatccggaatggcgcatgatgaagaaccggccattcatgggctccatctcgcagcagaacatccgctcggagcagcgtcctcggatccaggagctgggggacctgtacacgcccgcccccgggagagctgagtcaggccctgaaaagcctcacctgaacctgtggctggaagcccccgacctcctcttggccgaaattgacctccccaaactggatggagccctggggctgtcgctggagatcggggagaaccgcctggtgatggggggcccccagcagctgtatcatctagacgcttatatcccgctgcagatcaactctcatgagagcaaggcagccttccaccggaagagaaagcaattaatggtggccatgccgcttctgccggtgccttcttgatcagggtgtctccttgtgcttctgagatgtggagaagaggctgctggctaccctaaaagttgaaataaaagatttttgccttt

SEQ ID NO: 22139 - DNA, 999 bp, Homo sapiens
ccagtcctgtgtttaccgatagaccggaagtgtggcttcgtttacagttcggcacgtaggacggagggtagtgcgtctagagacacatattcccaacggatttgacgatggtgttcggtcttgaatggaaatgtagtcttaggccagtcttaggtttttgaacaggatagtaggtatccggagtcgattgagggccagagcaggcactggggttcggatcctgggcaaagtttcccacgttgagggtctcgaggacgcctagatctctttcccagggccatggcgaacccgaagctgctgggactggagctaagcgaggcggaggcgatcggtgctgattcggcgcgatttgaggagctgctgctgcaggcctcgaaggagctccagcaagcccagacaaccagaccagaatcgacacaaatccagcctcagcctggtttctgcataaagaccaactcctcggaagggaaggttttcatcaacatctgccactccccctctatccctcctcccgccgacgtgaccgaggaggagctgcttcagatgctagaggaggaccaagctgggtttcgcatccccatgagtctgggagagcctcatgcagaactggatgcaagtcagtgccctcagaggacccaggagtctggcccgctaggccccttcttccctagaacccaagaatcctgggcccaggaccctcctccctcagctcctggagatctggcccctcgatctgattcttttccctatggtagatctctagtgccctggacatcccacacccgggcagtcctggttctgccacctggccaggctggcacttttccatgccccactccagggccgggaggcctgggcagagtgctcttcgtgcattagcggatctcctggctttagtcctgagcctgctgtctccttcttttttctttctttctttttttttttcttgtgatggagtttcgctcttgttgcccaggttcagacgattctcctgtctca

SEQ ID NO: 22140 - DNA, 423 bp, Homo sapiens
gttggagggagaaaagggacagcacgccaggcaaagacctggcagctgtgctcagccctggaccttgttcctcctcagccctgaaaagcctcacctgaacctgtggctggaagcccccgacctcctcttggccgaaattgacctccccaaactggatggagccctggggctgtcgctggagatcggggagaaccgcctggtgatggggggcccccagcagctgtatcatctagacgcttatatcccgctgcagatcaactctcatgagagcaaggcagccttccaccggaagagaaagcaattaatggtggccatgccgcttctgccggtgccttcttgatcagggtgtctccttgtgcttctgagatgtggagaagaggctgctggctaccctaaaagttgaaataaaagatttttgccttt

SEQ ID NO: 22141 - DNA, 416 bp, Homo sapiens
ccagtcctgtgtttaccgatagaccggaagtgtggcttcgtttacagttcggcacgtaggacggagggtagtgcgtctagagacacatattcccaacggatttgacgatggtgttcggtcttgaatggaaatgtagtcttaggccagtcttaggtttttgaacaggatagtaggtatccggagtcgattgagggccagagcaggcactggggttcggatcctgggcaaagtttcccacgttgagggtctcgaggacgcctagatctctttcccagggccatggcgaacccgaagctgctgggactggagctaagcgaggcggaggcgatcggtgctgattcggtattaaagctccgttgcagccatgcaaggagctgcaccgagccgcggggggattctctagaaacggcctgcag

SEQ ID NO: 22142 - DNA, 1362 bp, Homo sapiens
ccagtcctgtgtttaccgatagaccggaagtgtggcttcgtttacagttcggcacgtaggacggagggtagtgcgtctagagacacatattcccaacggatttgacgatggtgttcggtcttgaatggaaatgtagtcttaggccagtcttaggtttttgaacaggatagtaggtatccggagtcgattgagggccagagcaggcactggggttcggatcctgggcaaagtttcccacgttgagggtctcgaggacgcctagatctctttcccagggccatggcgaacccgaagctgctgggactggagctaagcgaggcggaggcgatcggtgctgattcggcgcgatttgaggagctgctgctgcaggcctcgaaggagctccagcaagcccagacaaccagaccagaatcgacacaaatccagcctcagcctggtttctgcataaagaccaactcctcggaagggaaggttttcatcaacatctgccactccccctctatccctcctcccgccgacgtgaccgaggaggagctgcttcagatgctagaggaggaccaagctgggtttcgcatccccatgagtctgggagagcctcatgcagaactggatgcaaaaggccagggatgtaccgcctacgacgtagctgtcaacagcgacttctaccggaggatgcagaacagcgatttcttgcgggagctcgtgatcaccatcgccagggagggccttgaggacaaatacaacttgcagctgaatccggaatggcgcatgatgaagaaccggccattcatgggctccatctcgcagcagaacatccgctcggagcagcgtcctcggatccaggagctgggggacctgtacacgcccgcccccgggagagctgagtcaggccctgaaaagcctcacctgaacctgtggctggaagcccccgacctcctcttggccgaaattgacctccccaaactggatggagccctggggctgtcgctggagatcggggagaaccgcctggtgatggggggcccccagcagctgtatcatctagacgcttatatcccgctgcagatcaactctcatgagagcaaggcagccttccaccggaagagaaaggtgcctgggggaggggcttggggaagctgggacattggcggggcctggactctgtctcccagggaggggggctgggagctggacttctgggtcctggatcctcattctctttgctctgtctcctcagcaattaatggtggccatgccgcttctgccggtgccttcttgatcagggtgtctccttgtgcttctgagatgtggagaagaggctgctggctaccctaaaagttgaaataaaagatttttgccttt

SEQ ID NO: 22143 - DNA, 1136 bp, Homo sapiens
ccagtcctgtgtttaccgatagaccggaagtgtggcttcgtttacagttcggcacgtaggacggagggtagtgcgtctagagacacatattcccaacggatttgacgatggtgttcggtcttgaatggaaatgtagtcttaggccagtcttaggtttttgaacaggatagtaggtatccggagtcgattgagggccagagcaggcactggggttcggatcctgggcaaagtttcccacgttgagggtctcgaggacgcctagatctctttcccagggccatggcgaacccgaagctgctgggactggagctaagcgaggcggaggcgatcggtgctgattcggcgcgatttgaggagctgctgctgcaggcctcgaaggagctccagcaagcccagacaaccagaccagaatcgacacaaatccagcctcagcctggtttctgcataaagaccaactcctcggaagggaaggttttcatcaacatctgccactccccctctatccctcctcccgccgacgtgaccgaggaggagctgcttcagatgctagaggaggaccaagctgggtttcgcatccccatgagtctgggagagcctcatgcagaactggatgcaaaaggccagggatgtaccgcctacgacgtagctgtcaacagcgacttctaccggaggatgcagaacagcgatttcttgcgggagctcgtgatcaccatcgccagggagggccttgaggacaaatacaacttgcagctgaatccggaatggcgcatgatgaagaaccggccattcatgggctccatctcgcagcagaacatccgctcggagcagcgtcctcggatccaggagctgggggacctgtacacgcccgcccccgggagagctgagtcaggccctgaaaagcctcacctgaacctgtggctggaagcccccgacctcctcttggccgaaattgacctccccaaactgatcaactctcatgagagcaaggcagccttccaccggaagagaaagcaattaatggtggccatgccgcttctgccggtgccttcttgatcagggtgtctccttgtgcttctgagatgtggagaagaggctgctggctaccctaaaagttgaaataaaagatttttgccttt

SEQ ID NO: 22144 - DNA, 1014 bp, Homo sapiens
ccagtcctgtgtttaccgatagaccggaagtgtggcttcgtttacagttcggcacgtaggacggagggtagtgcgtctagagacacatattcccaacggatttgacgatggtgttcggtcttgaatggaaatgtagtcttaggccagtcttaggtttttgaacaggatagtaggtatccggagtcgattgagggccagagcaggcactggggttcggatcctgggcaaagtttcccacgttgagggtctcgaggacgcctagatctctttcccagggccatggcgaacccgaagctgctgggactggagctaagcgaggcggaggcgatcggtgctgattcggcgcgatttgaggagctgctgctgcaggcctcgaaggagctccagcaagcccagacaaccagaccagaatcgacacaaatccagcctcagcctggtttctgcataaagaccaactcctcggaagggaaggttttcatcaacatctgccactccccctctatccctcctcccgccgacgtgaccgaggaggagctgcttcagatgctagaggaggaccaagctgggtttcgcatccccatgagtctgggagagcctcatgcagaactggatgcaaaaggccagggatgtaccgcctacgacgtagctgtcaacagcgacttctaccggaggatgcagaacagcgatttcttgcgggagctcgtgatcaccatcgccagggagggccttgaggacaaatacaacttgcagctgaatccggaatggcgcatgatgaagaaccggccattcatgggctccatctcgcagcaagctgtatcatctagacgcttatatcccgctgcagatcaactctcatgagagcaaggcagccttccaccggaagagaaagcaattaatggtggccatgccgcttctgccggtgccttcttgatcagggtgtctccttgtgcttctgagatgtggagaagaggctgctggctaccctaaaagttgaaataaaagatttttgccttt

SEQ ID NO: 22145 - DNA, 1220 bp, Homo sapiens
agtacatccacgattctcaccggtatcgttcaagctggttgagcacacaattatacgcactacggaatttggagatagtgtgcgtgtctagacatgagaaactagtgcgtactagaagtcgcaggtgctccagggtatgtctcgaaccaggatagtaggtatccggagtcgattgagggccagagcaggcactggggttcggatcctgggcaaagtttcccacgttgagggtctcgaggacgcctagatctctttcccagggccatggcgaacccgaagctgctgggactggagctaagcgaggcggaggcgatcggtgctgattcggcgcgatttgaggagctgctgctgcaggcctcgaaggagctccagcaagcccagacaaccagaccagaatcgacacaaatccagcctcagcctggtttctgcataaagaccaactcctcggaagggaaggttttcatcaacatctgccactccccctctatccctcctcccgccgacgtgaccgaggaggagctgcttcagatgctagaggaggaccaagctgggtttcgcatccccatgagtctgggagagcctcatgcagaactggatgcaaaaggccagggatgtaccgcctacgacgtagctgtcaacagcgacttctaccggaggatgcagaacagcgatttcttgcgggagctcgtgatcaccatcgccagggagggccttgaggacaaatacaacttgcagctgaatccggaatggcgcatgatgaagaaccggccattcatgggctccatctcgcagcagaacatccgctcggagcagcgtcctcggatccaggagctgggggacctgtacacgcccgcccccgggagagctgagtcaggccctgaaaagcctcacctgaacctgtggctggaagcccccgacctcctcttggccgaaattgacctccccaaactggatggagccctggggctgtcgctggagatcggggagaaccgcctggtgatggggggcccccagcagctgtatcatctagacgcttatatcccgctgcagatcaactctcatgagagcaaggcagccttccaccggaagagaaagcaattaatggtggccatgccgcttctgccggtgccttcttgatcagggtgtctccttgtgcttctgagatgtggagaagaggctgctggctaccctaaaagttgaaataaaagatttttgccttt

SEQ ID NO: 22146 - DNA, 1328 bp, Homo sapiens
ccagtcctgtgtttaccgatagaccggaagtgtggcttcgtttacagttcggcacgtaggacggagggtagtgcgtctagagacacatattcccaacggatttgacgatggtgttcggtcttgaatggaaatgtagtcttaggccagtcttaggtttttgaacaggatagtaggtatccggagtcgattgagggccagagcaggcactggggttcggatcctgggcaaagtttcccacgttgagggtctcgaggacgcctagatctctttcccagggccatggcgaacccgaagctgctgggactggagctaagcgaggcggaggcgatcggtgctgattcggcgcgatttgaggagctgctgctgcaggcctcgaaggagctccagcaagcccagacaaccagaccagaatcgacacaaatccagcctcagcctggtttctgcataaagaccaactcctcggaagggaaggttttcatcaacatctgccactccccctctatccctcctcccgccgacgtgaccgaggaggagctgcttcagatgctagaggaggaccaagctgggtttcgcatccccatgagtctgggagagcctcatgcagaactggatgcaaaaggccagggatgtaccgcctacgacgtagctgtcaacagcgacttctaccggaggatgcaggttggggggcggggctgcggttgaggcctgggcaggggtctctacccctaccctccccgccaccgcctgtcttttccctctctgtcaccccagaacagcgatttcttgcgggagctcgtgatcaccatcgccagggagggccttgaggacaaatacaacttgcagctgaatccggaatggcgcatgatgaagaaccggccattcatgggctccatctcgcagcagaacatccgctcggagcagcgtcctcggatccaggagctgggggacctgtacacgcccgcccccgggagagctgagtcaggccctgaaaagcctcacctgaacctgtggctggaagcccccgacctcctcttggccgaaattgacctccccaaactggatggagccctggggctgtcgctggagatcggggagaaccgcctggtgatggggggcccccagcagctgtatcatctagacgcttatatcccgctgcagatcaactctcatgagagcaaggcagccttccaccggaagagaaagcaattaatggtggccatgccgcttctgccggtgccttcttgatcagggtgtctccttgtgcttctgagatgtggagaagaggctgctggctaccctaaaagttgaaataaaagatttttgccttt

SEQ ID NO: 22147 - DNA, 1087 bp, Homo sapiens
ccagtcctgtgtttaccgatagaccggaagtgtggcttcgtttacagttcggcacgtaggacggagggtagtgcgtctagagacacatattcccaacggatttgacgatggtgttcggtcttgaatggaaatgtagtcttaggccagtcttaggtttttgaacaggatagtaggtatccggagtcgattgagggccagagcaggcactggggttcggatcctgggcaaagtttcccacgttgagggtctcgaggacgcctagatctctttcccagggccatggcgaacccgaagctgctgggactggagctaagcgaggcggaggcgatcggtgctgattcggcgcgatttgaggagctgctgctgcaggcctcgaaggagctccagcaagcccagacaaccagaccagaatcgacacaaatccagcctcagcctggtttctgcataaagaccaactcctcggaagggaaggttttcatcaacatctgccactccccctctatccctcctcccgccgacgtgaccgaggaggagctgcttcagatgctagaggaggaccaagctgggtttcgcatccccatgagtctgggagagcctcatgcagaactggatgcaaaaggccagggatgtaccgcctacgacgtagctgtcaacagcgacttctaccggaggatgcagaacagcgatttcttgcgggagctcgtgatcaccatcgccagggagggccttgaggacaaatacaacttgcagctgaatccgggaacatccgctcggagcagcgtcctcggatccaggagctgggggacctgtacacgcccgcccccgggagagctgagtcaggccctgaaaagcctcacctgaacctgtggctggaagcccccgacctcctcttggccgaaattgacctccccaaactgatcaactctcatgagagcaaggcagccttccaccggaagagaaagcaattaatggtggccatgccgcttctgccggtgccttcttgatcagggtgtctccttgtgcttctgagatgtggagaagaggctgctggctaccctaaaagttgaaataaaagatttttgccttt

SEQ ID NO: 22148 - DNA, 1738 bp, Homo sapiens
tcccaagcagctgggattacaggtgtgctccaccacacccagctaatttttgtatttttaatagagacggggtttcgccacgttggcctggctggtctcagactcctgacctcaggtgatccaccgcctcagcctccgaaagtgctgggattacaggtgtgagccactgcacccagcctgcggctctctctttcatcctgttttctcctctgcccttctccctttctccatctctgtcttgcctcacctctgtccctgtttctgcctctatatccttttttcaatatgtctcttgaagctttctgggaccaagctctaggcagtgccccggggaataaggacctatgaaatgcacattccacgttccagaaactcgctgtcatgggtggggctcaaggagatggatgcagtatcaatagggtgtgattcacgctgctttggaggggggcacccagcacagccttgagagggctcgtcacccacatgaaggggtcagggaaggcttcctggaggagggggtgtgggataagatttgaaggaacaggaggagttcagcaggcagacagaagaaggttctaggtagagcggcccagagctgggagagaatgattggattggatcagccagtaatggagagtgactgaaagaaattcagtgggccgaggttgctagaagaatgaggtcttctccagaggtgggaggggcagaccacacagggtctccaacgccaggcttgtggggctcagaccttcacttgggagcactggggagccagagaagagctgtgagcagggaagggatagggtcaactctagtgacatcacactgatggacaggagataagaggccagggaggaggctgggcggagagtccagagcggaaagtgagtgcccagctctcacttccttatgtctctctctgcttcttacggccgctgtccctgaatgtttcttccctgtctgggtctgggctgtgggcttcctgcagagggctggggggtcctcaccccctttttctccccgcagaaggccagggatgtaccgcctacgacgtagctgtcaacagcgacttctaccggaggatgcaggttggggggcggggctgcggttgaggcctgggcaggggtctctacccctaccctccccgccaccgcctgtcttttccctctctgtcaccccagaacagcgatttcttgcgggagctcgtgatcaccatcgccagggagggccttgaggacaaatacaacttgcagctgaatccggaatggcgcatgatgaagaaccggccattcatgggctccatctcgcagcagaacatccgctcggagcagcgtcctcggatccaggagctgggggacctgtacacgcccgcccccgggagagctgagtcaggccctgaaaagcctcacctgaacctgtggctggaagcccccgacctcctcttggccgaaattgacctccccaaactggatggagccctggggctgtcgctggagatcggggagaaccgcctggtgatggggggcccccagcagctgtatcatctagacgcttatatcccgctgcagatcaactctcatgagagcaaggcagccttccaccggaagagaaagcaattaatggtggccatgccgcttctgccggtgccttcttgatcagggtgtctccttgtgcttctgagatgtggagaagaggctgctggctaccctaaaagttgaaataaaagatttttgccttt

SEQ ID NO: 22149 - DNA, 1107 bp, Homo sapiens
ccagtcctgtgtttaccgatagaccggaagtgtggcttcgtttacagttcggcacgtaggacggagggtagtgcgtctagagacacatattcccaacggatttgacgatggtgttcggtcttgaatggaaatgtagtcttaggccagtcttaggtttttgaacaggatagtaggtatccggagtcgattgagggccagagcaggcactggggttcggatcctgggcaaagtttcccacgttgagggtctcgaggacgcctagatctctttcccagggccatggcgaacccgaagctgctgggactggagctaagcgaggcggaggcgatcggtgctgattcggcgcgatttgaggagctgctgctgcaggcctcgaaggagctccagcaagcccagacaaccagaccagaatcgacacaaatccagcctcagcctggtttctgcataaagaccaactcctcggaagggaaggttttcatcaacatctgccactccccctctatccctcctcccgccgacgtgaccgaggaggagctgcttcagatgctagaggaggaccaagctgggtttcgcatccccatgagtctgggagagcctcatgcagaactggatgcaaaaggccagggatgtaccgcctacgacgtagctgtcaacagcgacttctaccggaggatgcaggttggggggcggggctgcggttgaggcctgggcaggggtctctacccctaccctccccgccaccgcctgtcttttccctctctgtcaccccagaacagcgatttcttgcgggagctcgtgatcaccatcgccagggagggccttgaggacaaatacaacttgcagctgaatccggaatggcgcatgatgaagaaccggccattcatgggctccatctcgcagcagaacatccgctcggagcagcgtcctcggatccaggagctgggggacctgtacacgcccgcccccgggagagctgagtcagggtgggccttcggtagatccccggtctgatgtttcctcaacgctcttgggaatccctccctccatcctcccacactgggtgatgtcctggggccctgggcactgagagagggaggagagagaact

SEQ ID NO: 22150 - DNA, 1017 bp, Homo sapiens
  misc_feature (13)..(13): n is a, c, g, or t
acttagaggatcntcccccgactagccgacagcaacctgggtgctgggccctgtgtctcctggagccaagggttagggcctgagcagctgtcactctctgggaagcccagtgagtggggctgactgagcaggtgccatagagcctagtaagggaagagggagctggcaaggagcccaggtagggaggctctgtgaattgtctctgattcctttcctggagcccctgcctcgtcacctcctgggatgcgtctcaaggtcatggaggttgtagtggaggagccctggggctgtcgctggagctgggggacctgtacacgcccgcccccgggagagctgagtcaggccctgaaaagcctcacctgaacctgtggctggaagcccccgacctcctcttggccgaaattgacctccccaaactggtgagttttgcgcgctggaccagagcaggggaatgaggtctggaaaggtcagggactgtctctgagtgtgagtgacaaggggttgttgctggacttgtcagttgcgtcctctctgccaggaggcccacaggccaccttctggtgctgtcctgagggcgcccaagggattgtaagtgctcggtcgttgagacttgtaattgctgtcttctgtctcttcctgggagattagacccttcaaatatagtttcccagcgtgtgaggctaccatgcctggtccaggtgatcatcctgttgctggggagggtgacctgattccgccacctctccaggatggagccctggggctgtcgctggagatcggggagaaccgcctggtgatggggggcccccagcagctgtatcatctagacgcttatatcccgctgcagatcaactctcatgagagcaaggcagccttccaccggaagagaaagcaattaatggtggccatgccgcttctgccggtgccttcttgatcagggtgtctccttgtgcttctgagatgtggagaagaggctgctggctaccctaaaagttgaaataaaagatttttgccttt

SEQ ID NO: 22151 - DNA, 150 bp, Homo sapiens
gtcgacgcagatggttatacatgtctcaaacagcaggcacaattcagaactagaagtaacagagtctatgggaggaaccagttggaatgacgggatggggaaaagcatgtgttctacttcggataagttgttttaactgcctactcatca

SEQ ID NO: 22152 - DNA, 386 bp, Homo sapiens
gaagcacaaacaggaagaacaaagctgctagttggtctttttcgctgtccctttaatctgtaatctgacaagatttggtagagagataacttagtcaccaactctgttttcttttttgggagaccaaatccagatatacagcttgagacttaatcccatatgaggtgttcattctacctaatacagcacccattaatttgtcatgagctgggtggtttgtcaagaaaacctaatacacatgtgcatggaaaaacacacatcaatgtgtactttatcctttggtttactttaacttatttgcttagagaaacatgctatggttattaggttaaccatgcatacattgcgttagtctggaaaagaggttttaatgtcttaaccagtga

SEQ ID NO: 22153 - DNA, 415 bp, Homo sapiens
gtcttttataattttaaaaatactaatattggatacttttataatttagaaaaaaaaattgatgtttaaaagcctgaaaatgtgtacagaaatgtttctaccaaagctttaatttaaaggactaaatatcatctatatagaaataatatatttaggctgggcactgttgtcacgcctgtaatcccagcactttgggaggccgaggtgggcagatcacctgaggtgaagagtttgagaccagcctggccaacatggtaaaaccccgtctctactaaaaatacagaaattagccaggcatggtgacaggtgcctgtagtgccagctacttgggaggctgaggtaggagaatcgcttgatcctgggagacagaggttgcagtgagccaagatcgcaccactgcactccagcctaggca

SEQ ID NO: 22154 - DNA, 449 bp, Homo sapiens
cccatggccagcaggtccctccatttggcctgcacacacagcctcttgagaagcagaagaaaggacccccgcttcctcccctcagtggggggcagatacagcagctggccaggtgccagttgatgcacatgcttaagtggaacaaaggggtacacaccaagtctgatcgggggaaagatactcccacacaaggaggtgagtccagcacaggctgtgatgactccttatctctcaggaaggaagtgctccaggcccaaggcccattcctacgtggcagagtggaggtggaaagacccctggcaccagattgcctttcctcacactttgctgttggcatacaaacttggtgacgggcacagagacaagccattgtaggccacaacaaagagtttggagtttaaagtcattaaaagcttcttgtcgtttcgtgtgtaacagccccagtgact

SEQ ID NO: 22155 - DNA, 175 bp, Homo sapiens
ggaggttgcagtgagccgagatcaggccactgcactccagcctgggtgacagagtgagactccgtctcaaaaaaaataataataatcattgtgtagagaaaaggataaggcagaaggggaaggagattcaaaataaaatcactgtatctaaataccctgaatttatactcttaaa

SEQ ID NO: 22156 - DNA, 179 bp, Homo sapiens
tgattccttttatattttctccctttccttcacccatccccaggcaactattgatccgttgtcactgtagatttgtttgtatttcctagaattctacagagatagagtaatttaatatgtattctaatgtttttggcttcttaaactctgaaattaaggctcatggtggtgttctgtgt

SEQ ID NO: 22157 - DNA, 405 bp, Homo sapiens
tattaagacaggtttaattggtcctgcctggaaaactgaaacataaaacaaagtcactgatttctctgactgtgcagatctcttggatgtgctctttaaattcctctgcttctgtatctcattgctgaggacatttgcaagaaaacataatatttattgtgtttgagtacatctagtcttgctgctttttcttttcctacatcataattgtctcttttcaggcagaggtggacagttaagcaagttctgcacgtacccaaataaactctgaacagattgattccctctgcaccccagtaagggtgtgctccactgtgttcccttgtccccaggcccagattcttcctaaagtaaactgggccactgaactgtgcccattagtgagccaaaagattggcatctgct

SEQ ID NO: 22158 - DNA, 304 bp, Homo sapiens
aacggaagatgaggtgtttgcagcaggcgtctgtcttgcagctcagcaggtgaggggacctcgagcaggctctcgcattttccggctgatccttccgagtctgctactgcagggccctcgtaggtgggagcagcctcatcgtcgcctttcacactgtgagcttttcctttccacggtcagatggacttagtgagttaccagcgatggatgttaagacctaagacaccgcagaaagttacagagtggaaaatgaggggcagagaaaagagggtctgagaggaacgcaagcattccggaatacagt

SEQ ID NO: 22159 - DNA, 1048 bp, Homo sapiens
tagcctccaaactgtgagacaatacatttctgttgcttaagccactcagttagtgtgctttattttggcagtcttagcaaactaatacatcccccaatccagaactgtcctcctttggataataaaaacagcaataattatagtgtcattaccctgagtgactggtcccactgttggtcattctttgtagatgtgagttattgccctattgagatcagaagtcctctcacttagaggcatatctaagacttttttcttgtggagggagctcactcaactgtaggtaaggtttgactcatctgggttagtagtaagaacaaacttccaagtgggcaccatcttaaaggtgcaagcccatgtgggcgatgaccaggtctggtatattaagaggctcttggtagcacattagaaacacctggagagattttaaaatttacaaagcctagccaaaccccagacccattaaccctgactctctgagaataggaccctggcacctgtgttttaaggattctaggtgatttcaatgtgtagccaaggttcactgccatagcctgtcctggaatgcaggtaactaaaacttcagcagattatgaaaaacaaaagttactttcttggatgcatatattcttatagcctcaaaactgaaactgcaaactgaacaatgctgcagtcagatacacacacatatttcaactgcataacttcctttaataatacttttatttttccaaatttgaagactgtccctaagtcatttcttctaaaagttagtaataatcccaccaactcacatttacatagaagttacagtttaaagtttgcatctcgtaataacttggtgagatagggcaagcattatttctaatttgcatatgagaaaaaactaaggctcggatgagttatgtgacttccctgagtcatgttagagtaactaactcctgatttgtaaactgaagtcccaaatcctgggaactccctcagctctgggcaagccaggacaggtaggtcaccctgcacctacacaaggactgagctgagttctagt

SEQ ID NO: 22160 - DNA, 309 bp, Homo sapiens
gaataaggaatgtgtagttttatagaaaggattttcatttttggttcagtttgtgacctgtgaggaatatccttagagctgctgatgtaaatttggagaatcctcgagttagaaaagtagggataagaaaacttgtctaccttctccatgtcctttgatggggccaaaaaggaaaaagaagagtggtggtggttggtgtagtttgtcttttcagtcttacgggaaacaatgttccatgggtggtcctttgtaagcctatggaggattttctgattggctttcaagacttgatcctgcatctgtgagctg

SEQ ID NO: 22161 - DNA, 397 bp, Homo sapiens
tacaaactgctttgctccaccttccctctcccagcctccctgcactgccccttggggccaccatcggctgctccatgctgagaaatgcggctgtgacacccagcgctgtggaatgggactctccatgttgccaaattcaagccaaacaaactttctcatttctcatcagttgttctcagcattaaatagcgtgcacagctcctgtaaaagctctgagagtcactggcaccaccccataggtccctggcagaggagatagtggagcaagcacaccctcggccagctctgttcctccagagagccaagctgattcctccggagagccaagcagatttggatactctaggactattccatacatttcaaatgccgtaataaaagtataccaaatgcgcct

SEQ ID NO: 22162 - DNA, 649 bp, Homo sapiens
taatgggatgtcttttataaaatggggtaattttacctgatgacagtattgaagactttacttggaaaaattaagaagttgacagctctactttagacctcagaattatttttgaaatactgttttcccagataacaaaagaattatctagagaatgttaaatgtatgactttgtttttctcaataaatgtcagcataataagcaaaggtgtccagttagtccactgagaaacaaacattttgaacttgcagttccctccttttgccacttgatggaaggttcttagaagtctagctatacaacatacttacaagcatatgcttaaacaataaaagttccagagtggcaatagaaaggcatacatagacatctcgctgtttctactattgcaacagagaaggaaagttagtcccatggatctttcaggagcagcaaaaaataaccagagctttactgttgccctgacaagaacccaccatccagagaggtatttcctgagcacctacaagaattccggcactgaggatgggcatcagagtgaggaacaggcaggtagccctgcattttcatcacagtatcaaaaggagaccatattctcctccaggaaaaaataacatagtattaaacaagcagtgaaaccccgtctct

SEQ ID NO: 22163 - DNA, 584 bp, Homo sapiens
cttttcaaaagatctctttcttagattcaaaataactttttaaatcaatttcaaaagaagagtgttttaattcctcacaatctgagacattcaacgagatccaatgctgtcaatgagagcctagccttatacactagtgggaaaaaaaaaaatggccttgtctgaaacacttttcacttgtcaatggttattttaactcagttaaaagtacaaaggtagtttgaaagaaggtttcagtgctaattcctaacctatttctaggcaaagtcaccaatgattaacactttttttttttttttgagacatctcgctgtttctactattgcaacagagaaggaaagttagtcccatggatctttcaggagcagcaaaaaataaccagagctttactgttgccctgacaagaacccaccatccagagaggtatttcctgagcacctacaagaattccggcactgaggatgggcatcagagtgaggaacaggcaggtagccctgcattttcatcacagtatcaaaaggagaccatattctcctccaggaaaaaataacatagtattaaacaagcagtgaaaccccgtctct

SEQ ID NO: 22164 - DNA, 2368 bp, Homo sapiens
  misc_feature (760)..(760): n is a, c, g, or t
  misc_feature (1153)..(1153): n is a, c, g, or t
  misc_feature (2298)..(2298): n is a, c, g, or t
gttttctaagacctccctggcccgccatacgccgatcctgaacctacgaaaacccaagactgcgggcacggtggctcatgcctgtaatcccagcactttgggaggccgaggcgggcagatcacgaggtcaagaagtcgagaccagccttgctaacatggcgaaaccctgactctactgaaaatacaaaaattagctgggcgtgatggcgtgcgcgcctgtagtcccagctgctcgggaggctgaggtaggagaatcgcttcaatccgggaggtggaggttgcggtaagcagagattgcgccactgcactctagcctggcgacagagactccttcaaaaacaacaacaacaacaacaacaacaacaaaacaaaacctcccaagaccctagtgggcagacacacagccagccagacatggagaggagcacattagcagaagaagacgcaagtggctggtcctcgagaggacgttgagaggagcatgccagcagaagagcacacaacgacaggcaccgacacaccaccggcaggccatgcaccagcagaatgatgcggagtttgacggggcagtcagagaagagcctgggccgccaaggggcccgactccaggggaaaaccatctcccttctggctcccccatctgctgagagctacttctactcaataaaaccttgcactcattctccaagcccacgtgtaatccgattcttcagtgtcacctcccaaatgtggaaatgcattgtctttcttctttcctagnccagtggtcctcaaacttgagcaggtttaagcatggtcatagcagaatcaatgtgctcaccccatcatgaaaaaaaaaatgtgttaatgaattgattactactttgagtgtgccatattttaaagacgaagagaaactaatcaagttagtttttatttggtcagaggcttgtttgtgcctgcttatctaaagttataaaggccccaaatatggctccgtgttgcagagggactgtctcttcttatatcgacagagcccatattcacaatgtatcacacttacctcgatgtattgtctggagtttcctaggctgtgtcctttgcctggaatgctctctcttgctggctggcttcttcccaccagctgtggccagggctgctccttattccttcntcaaaactccgtctgctgggtgtggtgcctcacacctgtaatcccagcactttgagaggccaaggtgggagtatcgtttgagcccaggagttcaagacaagcctggacaacagagcaagaccctgtctctaccaaagaaaagaaaagaaaagaaaagaaacagccactttctcttccatgagccagtttatgttttcttcacggcatttgttacaaatcacaaatgtggaggaaaaatgaaggcaaagcaaaataacaggcaagtctgaaaacaaaagtgttgccagtcacgctaagcctcaggcacgcattctgaatgaagctaaagtttaaagtcccctctgatagatttgtgacttaaatgtccacactagcaagtgtgtttctcacatggagaagtagcacgattttatgtcaggaaagggatgagaacatgcttcttgaacacatacaatgctgaagacatttcctggaaaaccattggcctttgcttaggacagttgcatcacacagagatgtttgtggttcagatttataagaaacatgggaactgaagccaaagcactacttttgctcagtataaccaggtgccagatctaaagtgttaggcaggttcctatatgtatgttagaaaaaagttgcccaagttttggacaattccttttccatctctcttacaagtcaacaaatcgaagcaataaactattctctgaagaaaacaaatttatttggttgattcaaacttttaatgagactattactcccctgtgtgcctttcctttctctggttctagaaatacatctagaaagggggaaaatgttaatatattttctactgactttatatcacaaatgcttagcttagagggtggactctgaggaacagtgtcctttccaaatattataaaactttgtgttcattctggaaaaacaaacaaaattaatcacaatgatttcctgctttggagcaatgagaaatgggagggaaacttcaccttttcatagcttttgatgtttgcaccatgtgaattacccacccccaaatttaaaatacgaatttttgaaaaagtgtttacctctgagaagagaaactagtagtgaagaatgaggagctgtagatttttaacgattctgatgtatttgcntttttcccaatgttcatgaataaataaatgtgcattcataattaaaaagaataaacaacctggaaaaaac

SEQ ID NO: 22165 - DNA, 285 bp, Homo sapiens
actacgacagggggatggggacactgattgcagcgggtgtttttttcttttttaagtacagaagaaatactttctcattaaaagtaattccacatagagatgtatgtgaattacagggagaaagccttcagcttccctccggctctgccccgagcccaccccataggtggccatcagtaaggatttcttgggaatccttccagataatttctacttctacaagcacacacctctacgaatgggaaaatattgtgggtaattttctaccgtttgctgttttgtgct

SEQ ID NO: 22166 - DNA, 468 bp, Homo sapiens
tttcttcatcccttccatagtatggagatgttgctggacaatggctgccccttcaaggactattatttcccagcctctcccccttgcatccaggtagaccctgttaccgatgcatgtctacgttacctctaggagacaggtggctgacccatgcattgtactgtatgtccacgggctttccaggttaattctgcatacgggacataataaaaagcactattgccaattcatgcactgaaacctcccatgaacataactttgaaacagattgaggatcttcgagaaatggtgtctcttgcctgtcatcccagcagtttaggagtctgagctgggaggatcacttgagaccagaagtttgagaccagcctgggaaacatagtgagaccctgtctctacaaaaagtaaaataaattagccagtcatcctagctgctagagaggctaaggcaagggtactgcttgagcccag

SEQ ID NO: 22167 - DNA, 774 bp, Homo sapiens
ggaagggcatgcctggagctaattactacaactagcgtgtagttttctgagagtggccctggcatttgcctaatgtttcattcttaaaggtttttgaaattattttggggctttgaagtgcttgctgtaataaatttattgagcatttaccaccccttatcagttatttagtcttcacaacattctcttgaggttaggtactgttgacccattttacagatgagaaaataaaggctcagtaaagctaaataacttaggtcagtcatatccatgagaggagtgaggcttggaatcgaggtcatttcaaagtttattctagtagtgactgctagtgctttccttgtgattttgtattaaagtagactgagactctccagaaactggacctgtgagcttggaccatggcatttctctgtgttctgtctcagtagtagcagaatgacatttgtcataagtaggcagtgctctgatttaaagcaatattttgaaattacttctttttacattttagcaagtgttgatgtaaaatactttaaaacagctctgttcaccactgtctgtaccgagcctttttatttttagagtgttaggtaattaaggcaaaaccatccacattgttttatgtgttctgtagacttctttctggtgtttgcttttactgtttttcagtattgtctacgggagaaaaaaagaaaaacctcagcttgcaaatttttgttcagagatgggatcgttctttgttgttggagggatttacattaaaaaaattcaaga

SEQ ID NO: 22168 - DNA, 439 bp, Homo sapiens
acacatatacaggagagctggttaatccctgcgagttgagctgatgggtggagacacagcaggggaacgaatattagcatcttctatgtgcatggtactgtcctaagtatttgtcagtcagtattctagacacactggagaagaacaaactcaaaaagaaaagtcacacttgagatttaactccagtgtttgttacaacacacagtatgaaatccatcccccccagttcctgcccctcccccactgccccacaccagactaacaggcattaaaagaactataactttcctacagcagtgccactagcaacacccaaatttaaaatcataccccactgttcctgctacttacagggacacattaacagtgaacgtcttgcccacttcaacatcctcctccaatgtaaggggacattattctcagtgtcattgataaggtt

SEQ ID NO: 22169 - DNA, 385 bp, Homo sapiens
actgttctaggtcccggagatgcaacagcgaattgagcaaaccagaattttattctcctacagcttgtgtcctaattggagggatatgttggtcaggattctccagagaagcagaaccagcaggagatatatagaaatggagatatagatacaggtggagatttcaaggaattggcttatgtgattgtaagatctggcaagcctgaagtcttcaggacaggcctataagccggaaactcttggcaggagctgatgctatagtcttgagcagaatttcctctcagagaagcctcagggttgtttggttggtgggttggttggttggttttgaggtagagtctcactactgcactccagctgggcggcagagcaaaactccatctca

SEQ ID NO: 22170 - DNA, 414 bp, Homo sapiens
atgtcagattttctagcaaagatatttcacaattaatagtactaaactttgcttactaaaagtatttaggattcagtgtattaacaaaactctatagtagttaatataaataatattcgttttttaaaaattagtcttaattgcacattcctggaaagtattgtgtttttttaatctctgcaaaaacaggattttaaatattttatgtcataaaacttctgttcattttcttttgctgtatgaaaaaaattaataggattgatagagtctccatttttcttttatgattgcgttttagcggggccaatttaattttaaactgtagatatatttttttactgtatttgctgcattctgtggaattgaattgacagggtatagagttgtacacaagggagtcagaaggtacaatta

SEQ ID NO: 22171 - DNA, 830 bp, Homo sapiens
caggtgcctctccactagacagtcagacaaaggcaaataatggaggatagagagacaggtgttcattaggctggccatagggagaggaagggggtgacagcaggggaaaagaaactgtagtatcagttgtcacaagtagagctcggcccagctttccctcccttcccagccaccctagaattgagagtcccagtgcccctagtgtcgactttctatgtacatcctaggggtgagggagtgcggggcaatgggtaggatataaagcgtaaaggacaaattgccgcagtcttctaattgatgcttccaaactcaggaagggcttatccagtgtaaaatagccccaagcccagcaaccttctagagggctctggctgggcagatagcttttgtttttgagtctccagccctcagtcaaggaaaatataccatagctgctttcttgtcagtggcctttgagagaaagagaaaacaaatctagaattctgttcatctgatagaccgggggagctttgctatggtaggaggtttaggaagggcctttcacgcatagaaaccattgttgatattgccactcccctctcctctgcctcacagaactcctgattctgtcttctttctctctctatatatatattttaaaatgtttaaatggctctaattttttgttttgaattttgaatttaccttttggagttcttctcatgtgaatctacttgttagattgtattaatgagtgtttctggtttgggcatgggaagtgatgggggcctgaagttattttgcagtggctaatggcactgaggaatttcttttttggtgcatttggttta

SEQ ID NO: 22172 - DNA, 118 bp, Homo sapiens
catgaatcattttacttaggcaatcttcagttgaacataccttgttaggaaggaccaaatctcccagatggttgaaaggcaatatgcattgaaatgtttataacattttttaaagaac

SEQ ID NO: 22173 - DNA, 262 bp, Homo sapiens
gaagcacaaagccatcctgattcccgcttcgtatgtaacctattctcatccttctgaaggtgtgtaggatgctgtctttaccctgatatttggggtccagcaacatgccatggcaatggtctttgatcacagacgttcatccactggactgggtacttggtggctccttcagtctagaagaggatgacgctcaagagagggtttttcaattgtttcattatgctgtcctccccgccgtttctttgcggtacttgttgaatgt

SEQ ID NO: 22174 - DNA, 382 bp, Homo sapiens
cgcgtgccacatacctgagatagaggaagcacattaaaagtaagtcatggacagaggcctgggtgaggactaattgtggtgagctggtatagcagtttattgtttgatatagtagactgcagagaatcattttaggtttttgaccaggggagtagtaggaaaatttagcccatctccagtggagatcatagaaccttagaagtaagggatttctggaaacatcttatccaatatcccatttttacttaggccagagaagtgaaataacttgctcaaaaggtcacccagttagaaaagagcaaatctgtgtctcagatttatcctttaccttgtagtccgatgatctttctttcatatcacagtcctccaaaagatattagag

SEQ ID NO: 22175 - DNA, 391 bp, Homo sapiens
ggattatggagtcagagaatctagattcagatttgagctattcccttaactgagaaaatggggcaaggttcttaactcctgtgaactttagtttcctcacctgtaaagggaggataatgatgctgacctcattggattgtcaagatgatgaaatcctagttaatgcatctaacatggcacttggcacgtgggagctcaataaattctcatcatccaaagaacaggattccttttctatcatctaaagatgacctttgcatagtataaacccaggttattttataatccatatactttttttaaaaaaaaagatgaaaacaatcatttttgaataaagatgctctaaaattttggggaggtaggtaaactgttaataaaatcttgtctacat

SEQ ID NO: 22176 - DNA, 321 bp, Homo sapiens
actcctcacccacaactgtgatatcacaaatgtgtcttggtcttgctttaagcgactaaatttgcggtatttttttccatagcaatagaaaatcactatagtactattcactcatgtggacagtgaagttgttttactttgtttaaaattaagaaataacagtaaaatccacatatcttaagtattaatctcaatggatttttatatatacattcccttgataaagaaacaaataattttgttaaacagtttttaatattgctattgttttcttcctaaaattttcataataatttaacattaaagtcctatgcaactaga

SEQ ID NO: 22177 - DNA, 732 bp, Homo sapiens
actcacaaaaaacagctccaggcttgttataatggaataaatgagtcctaagtcttaggccaatgaaacctgacataacttcggaggctaaggtgggataatcccttggccccaggagtttgaggccaacctgggcaacacagcgagaccccatgtctatattttctttagaaactgacatacttctgttttcatccaacctgaactttaaatatttaaagttcattaacaaattcatcaaagatgtcccccagtttataatttcttctttcaaagaagcatccacagtgcaaacccccaaaatctttaataaaccaataggttcttagctataccgtgatgaaaatacctaatgctttcagtgtttctctaacaaggagaataaacatctattaactttctcatacgacagtggatgttatttgccagttacaaaaaagagattactcaactgaataattttgaaataagatgagataaagtattttttagatagatcaagttatttactagacatataagcttactaaatgtccttgtaacaaccatagtaatcctaagaatttctgtcatttgaattacatccataattagcaggcagaataaaataaaaatctacagttcctcaatgttgtcattattacattattattgataccttcacaagtaacaagagaccatcagagtcgggaaaaaaacatttttaatctcgaaatggcatattaactttag

SEQ ID NO: 22178 - DNA, 334 bp, Homo sapiens
tggcctgtgccagactagcgaggtgccaggaggacctgcccagagccagcgtttgcggaaccgacttgccttcccagaggccctttgtgaactcaggaggctaatgaaatgcacgagaatgttattaaaatacgttcgcacacgtttggagagtcttgccttagatggattgctgcttcagtgccctccttgcctcactttttgcctttcgctctgtaaagctgccttgaggacctcctgctcgaggggcacacatccttgtgtcacccttattccaagggctgggcacagtgcatcattttgctcttgtctctctttatggttcaggacttaa

SEQ ID NO: 22179 - DNA, 230 bp, Homo sapiens
ttctttatttttatttagtttaaagagttaggagattctgtggtactggccaaagtagttttaatacatccgctatccaaatgtatgagagaaatactttccacacagtattggttaggaactgagaatatgcatatatgatatatagaaactgtacctcaaagatctggacaccacatggatataacttgtgcttgtgctgaacaaattggacctactctttattgaaa

SEQ ID NO: 22180 - DNA, 557 bp, Homo sapiens
ccattagcagtcactctgcatttcaaccacagatacttctgctctaggcaattaccaggctactttctgtctctgtggattttttcattctggacatttcctagaaatggaatcatataatatgtgatcttttgtaactggttgcttttacttagcataatgttgttaaaggctcatccatgttgtatcatgaatcagtactttattcatttttatggccgaataatattccagtgtgtggatataccacatctagtttattcattgaccagttaatagacactgggtcatttccacttttcggctatcataaatatgcctgtattaatatttatatgcaagtttttgggtagacatatgttttcatttctctttgatttctgagttaaatgataactcgatgtttaacttttaaggaactgacagactctcttccaaagtggctgtacccatttataaatattttttgaatgaaagaattctgtcatgctgaaaatgctttttattcaacaaatactcatttagaatatgtggaaaaaggcaaatagcaaaggaat

SEQ ID NO: 22181 - DNA, 601 bp, Homo sapiens
cagtttaaactgattttctctcatctccattttacccctctccccgattaaaaaaaaagtcaccaagtaaacaatgacgtagttacagctagggcctatgaattcattattcacctctgtagtagtgttatctcagaaggtttcataaaggtatatgaaaaaatgtttatgtgagggggcaggcttctctgataagctttagaatttaggaaaaataacattaccagactttttgttaaaaggagctagattttctgagtttggggtttattttgtttggaagtgaattactagccctatttaatcagatttgcagcacagcattcaaaatttttcatttgattaaatcgcaaagtttctagttttaaagcctcagagcttcctgtgttcccctgtacgaaactaaaaatcaagatataaacaaaaggataccacagatgccttcagattgtttttcagccttttcctggcctctcttttgagtctgtcatttatctaattcaggcatacctttcttgacctagtagatgtctatcaactgttgtgtccacacctagaaaatcaagtgccctattaagaagctgtactttacaaaaaaaaa

SEQ ID NO: 22182 - DNA, 508 bp, Homo sapiens
aatcactacactgtttccacaactgctgtggaagttatatcaaaataagagagaaccaattcattccttttcagaaaagtaatgtcagggagttcccaagccaccctgtgtggatatggttaaaatggactgaaggatggtggtgatcattgcacaacaatgtaaacatacttaaagccactgagctgtgtgcttaaacattaaaatgataaaaaaaaattgtatatctcaccacaatttaaaaagaaaacagggctgggtgcggtggctcacacctgtaatcccagcactttgggaggcggaggcaggcagatcacctgaggtcgggagttcgagatcagcctagccaacatgatgaaaccctgtctctactaaaaatacaaaattaggctggcgaggtggcacacacctgtaatcccagctactcaggaggctaaggcagtagaatcttttgaaccctggaggtggaggttgcagtgaaccgagatcgcaccattgcactccagcc

SEQ ID NO: 22183 - DNA, 416 bp, Homo sapiens
tatagtcttatttctgggtctcaagctccctaatcaaatacctgtttttactgggactgacttttatcatcagaacatcccttaaagtagttggaagctagcagccttggattaaaagctggctgatagaattcaagtctcatacagtggtgtgagttgtggcaccaaagctgtgtttgaaacataagaatgtggttgacttttcaatctatttttaaaaggctggtgaactacttcattcttgggtagccctagacctttacttctccttgctggcaataaaattcaggatggccgggcatggtggctcacgcctgtaatcccagcacttcgggaggccgaggcgggcagatcatgagatcaggagtttgagaccaatctgaccaacatagtgaaaccctgtttctactaaaaaa

SEQ ID NO: 22184 - DNA, 364 bp, Homo sapiens
agaaaacattggtctgcagaagtaggtgatgtttgcagaatctagaatggatagcattctaggatgttttaatgggaagagcctagaactgggggtcaggaaaagtaggttgtggcacagcttcttccttagtttggttcattaaaaaccctgtgggcccagtgatgggtgttgagaaggaattcagaaatgcttacacttgtctctgcccttgaggaccttgtgttctagaaaagagaataagaagcatgcactaataacagtaacatggtagtaaactcaatacgggagggccagagaaggtgccaagggcatcaaaggaaggacccaacactttctttctccctgggagagaggaaagctg

SEQ ID NO: 22185 - DNA, 402 bp, Homo sapiens
tcactgaagtatcccaacatctagaacgtgacctgtggtgtatggtaggcattagatattaatatttgtggaatatgtgaatgaactaactcacaacttattttctctctctggcatattaagtacatgttctgcacacgcttgtgtattcctgattacagctgttggtgacattagaagctgctgttgtggaaggatagcaatggaaggcaggcagcagggaccaaggaataagtgatcagtgaggaaatgaaagcaaaatgtagagcccttgttcacataggccggagtgaagggaaaatattggcttgctagaggggattccagggcaagacatgagttggttattttattttttttcttgttctacaactgcagagacttgaacttatttatatgttg

SEQ ID NO: 22186 - DNA, 279 bp, Homo sapiens
  misc_feature (55)..(55): n is a, c, g, or t
  misc_feature (66)..(66): n is a, c, g, or t
aagagggaaggcttagcatcgtcgtccttgatcagaagggtgatcagcaccgcanaaccccagggncaattggacctacagtggtagcatttagaaaaacatctttacctccaaacaagagggacacaaccaaatcaaagtgattattagagacactttgtcctggagcctgctaaagagcataccccttccttgacctatttagagatactctgtggactttgttcaggaaagaaagcataacagtaatgttcctggttgacttgaaggtaggtggga

SEQ ID NO: 22187 - DNA, 196 bp, Homo sapiens
aaaacaatattaactttggatttttaaaaattatcccaagagaaaattcttttaaaaagattctaagatctatctatatcttactacttatgtatatctatatcttacttatcaaaataatacttttggtacagaattcattttccatttcagtatctgttctgtcccatttttattgagaaagtccaaattctgt

SEQ ID NO: 22188 - DNA, 452 bp, Homo sapiens
cccttttgtcacccacgctggagtatagtggcacaatctcggctcactgcaacctctgcctcctgggttcaagcgattctcctgcttcagcctcctgagtatctgggattacaggcctgtgccaccacacctggctaattttgtatttttagcagagacagggtttcaccatgttggccaggctggtctcgaactcttgacctcaagtgacccacccactttggcctcccaaagtgctgggattacaggcgtgaggcactgtgcccgcccgagaatctgtgtttttcactcatagtttgggattgttcttgcagctgaatacctctgaaataataatcaatgaatatttcattcaataaatatttactatcctcttccgtgtgccagtctcctaagttgtcttaggataataattattatcctaaatcatcccattacttcttagatattta

SEQ ID NO: 22189 - DNA, 1412 bp, Homo sapiens
ctgcactgaggcatggggcggggtgcactgaggatccgagcgagcagccagggctgcaggaaggcagctttggagcacaaagggggtggggcaactcctggcttctgcgggaaggtgtaatcagcttgtttcatcatgctgcaggctggcgagaaacggagccttacaagcgtagggataagaggaacccctcttggtcccctcgatgagggttgttgggccggggagcctcatccacagggcggagtgaaaggggagaaggggagctcacaggcaggcctgccaaggccttctggctttgccagatgtcaagggcagcacctaatactgaaccttaactttcggctttcaaccaaacggcacccttttgctgtttgttttctggaggggacaccttttcttgattcatgcccagacctcccttgtccaggccatgaaaactctgggatggtcgaggccggctgcccatctcagatgggcaaggaagcaaaagtgcagagtggtggaggggccagcttgcagaaacacggccgaacccggccctggatcctagcccagggtctttccagcacaggaggctcctagccctcgtctccaaccctccatgccactgatatctgtggccctgccacaaagttaccctcatgcccttccctggagaccccactctgggccacctcaatctcaggcccctcaactcacctctttcaccctgtgtacactgggtcaatcactcctgcctcctcacagctcccaaatccacctacttcccttcactctggctacaccctggttcacaccacggttgtagctccaaactggtccctgatgtctacattgcactctgcacaacagccaccatgcttattaagaaacgcaatccaaaccaaatccctccctgctgaaagccctccagtggctcacaataaggatcacacttctccccctgcctggtcaggcagccatgggaccccagcctttcctcccacttcggtaaattttaaaggattcggatcatacaaagaatgttcttgaaccagcatggaattaaattagaaatcaattatggaaagagatatagaaaacctcttcaaactatacaacacacttctaagtaacccacgggtcaaagagggaatctcaaaggaaatgagaaaagattttgaactgagtgaaaatgaaaaaatggcatatcaaaatttgtgagatgaagctaaagtaatgattatggggaaattgatatcattaaacactaacattagaagagaagaacgttccaaatcaaatacctcagctttcacctggaaagtagcaaaagaagagtttattaaacttatagtaagcagaagaaataatacacaagagaaatcagagaattgaaaaaacaataaagaaaattagcgaaacctaca

SEQ ID NO: 22190 - DNA, 358 bp, Homo sapiens
tcaatgtagttttcaaatcttcactaaataaactcaagctttttagtttgagtgagcctctattatttaattatattagcaatatattgacgaaaagtctctggaaatagtaaatcaactgggaagttaaaattatttcaggattaggtgttggaagtcctgttttcaccccctggggtttcacttacagaggaagtcaaagacatatgtgtccaggtgtaccagccatctggatcaaagccagaccacttggtctaccacagagcagttagcagttcctgcttctggaaaaatgtgttggtttttcacacaggtgctgcgagatgttttccttttcaccttaactgatagaaagtca

SEQ ID NO: 22191 - DNA, 140 bp, Homo sapiens
ctagtactttggcacaaaatgggcagcagcgggcagaggacgctcctctggacttccctgcggggaaggacatgaggtcaagcctcactttgcttagtgctggccagctcatcctttagcttctgcagctcagccttcag

SEQ ID NO: 22192 - DNA, 453 bp, Homo sapiens
cagatgtagccgttctgtctggggccaagcgtggagataattctggttgtggatcctgaaacgtgataaagctggagaaagggagtttccaaggcaaccagccccttctttgaggggtgtgggtggtgcttcctccccacaccttatgagccgacatccttggagggcagatcacccgtgacccccaaatatcttctcttttcacgaactctgctttgcttgttctccaatgttatttttagcatattgtgagagagaggagagagagagagaaagagagagagaggagcaggaaactgagaaaaagtgaaaataggtaggaaaaaagcaaagcagagtggtattcaagacgccaagagaggagtcgcaaagggtgatcccaggacacacatcaagggataaacggagttattcaagggtaaatagcacagagggggcaagagattaaatagg

SEQ ID NO: 22193 - DNA, 304 bp, Homo sapiens
cagatgtagccgttctgtctggggccaagcgtggagataattctggttgtggatcctgaaacgtgataaagctggagaaagggagtttccaaggcaaccagccccttctttgaggggtgtgggtggtgcttcctccccacaccttatgagccgacatccttggagggcagatcacccgtgacccccaaatatcttctcttttcacgaactctgctttgcttgttctccaaacaaaggccccagatttgaggtctgatcacccaccctaagcctcagaaaaaggctgtgcagagaactggtgatt

SEQ ID NO: 22194 - DNA, 743 bp, Homo sapiens
ctgctgcctccaactgagggcactgggccaagacataaaggaaggcaagtagagatcagcaaaggaggaagggtaggacagcaagatggaagatatttggggaaagatgatgcaaaagccaggaatgtatcctattctcctgtttgttaggtaggcaatagagccaacaccaagacacccaacattctggtctacacatacacaggaacaagtcctcaaatactagtgataaaggagacagggataagcattcagagggccataaatgtctgtctaggacacttgcacatcattgcatacaagcacaacagaagattatctggaaacgttgtgaccaagggataatgcaaatatacttagttttaatttttccccgaaaagaataaagaactctttgaggatactttgggtaccctatagcctatagatcttgacacccctatggtccctttcccctaaacaattgtttctcacactttaaggcattacaaatcccttggggatcttgttaaagtgcagattgctatggtttgaatgtttgtctcctcaaaaactcatgttgaaattttacctggccaacatggtgaaaccccgtctctactaaaaaattacaaaaattggccgggcgcggtggctcacgcctgtaatcccagcactttgggaggccgaggcgggtggatcatgaggtcaggagatcaagaccatcctggctaacacggtgaaaccccgtctctactaaaaaa

SEQ ID NO: 22195 - DNA, 472 bp, Homo sapiens
taatatacaatttttgtaaggatgtgaccaaatttgttcccttacactctaggattataaaatattataacgtctctggagaacagtttggcagtatatttcaaaaaccttaaaagtatgcgtgccttctaattcagcaattctgtttttgagaattttcacggaggaagtagattgcctgcagaggcttacttacttttgacagggggtaacggggcatatcataatgtcatttataataatagaaagtggtaagcaatctaaatgtcattaggggtttggataattgaaatatataaaatacatatcatggagtactatgtcttcattaaaaatagttttgtagaagaatataatggcattaaaatgttttataagatattaaatgaaaaaattctggcttccaaaccatatatatagtatgagcccaagttttgtttttgggtttttctatcaatgatttgttatctga

SEQ ID NO: 22196 - DNA, 481 bp, Homo sapiens
ctaataggtagactgcttctgtgtgattcatcacatgaccaagaagaacaaaggattgtctctttcgagtgacattaagggggaaataaatctgttttgtcacccttgcattagggccctgcttttcagcagatgttcccgagttcatcagcttctctttggaccaaagaatttctcagtaaaggttaaaaataatctggccgggtgcggtggctcacgcctgtaatcccagcactttgggaggctgaggcggtcggatcatgaggtcaggagttcaaaccagcctgaccaatgtagtgaaaccccatctctactaaatatacaaaaaataattagctgggcttggtggtacacgcctgtagtcccagctactcaggaggctgaggcagaagaatcacttgaacttgggaggcagaggttgcagtaagctgagatcgcagcactgcactccagcctgggtgacagagcaagactccatctc

SEQ ID NO: 22197 - DNA, 905 bp, Homo sapiens
ctccacccgacggggtggagtggggtctgaaggctgagaagggagccaagggccagctcagcagcacacacaacaccagggcagttagcttgtttctctcttcccctgtcgcacaggataccttcctgctgtccttcctgagcacaacctggctgaaaacctggaggtcacaacagtacaaagaatcaaagtcaagatcttgtgccagagagcaaatgaactcttcctcttgctgagaaaacccaccctgctcacctaaaccctggccttgcctggtaattccatccatgcgcctggaaggccccagacatcaaggctctgaggggccaggcacggggagaacccagcagtgccctgccctgcagtctgagctaccagattccttgtgaagataatttgaggaccatgactcacccaaccacatttcctggggcctcaaattgaaaattcaggatgggcttttctatatgactggctgatatccaactatgccatggtctttacatgccatgaacattctttcctgccagagttctaagaatctgtgttctctgccttagaccttctgcagatgagcccacaggaagctccacgtgtagctgagctacatgcaccaggcctcagtttgccccaagtcccctgtgtactctctcatggcctgtggccaagaaatgtattctctcactttggacttaggagtccaaagagaagcccagaaacaaaattgcttgaacttgaatttgtgtgcgtgcgcacgtgtgcacgtggtggtgaaggtgtatgttttcggctgttctatgcgtcactgtcaccaaactcccaaataatagtaacatttgtttagatgatgtctgctgacaaatcacaaacacgacgctaactcgcaactctctgctccactggca

SEQ ID NO: 22198 - DNA, 381 bp, Homo sapiens
atggacattgaacttgcctagaaaactgtctggttttatttcaaaacgctaagcctcagtaaaggagagaaatagcaggccacagctgaactacattttctagcaatcctcagaataagatgtggtcattgactgaattctggacaatggaatggagtagagtgaaatacatcactcctaggtttggcctgtcaaatctcatgcacaattctgtacattcatgtgccagcctctcctcgggtggggactccaagcactttggagttggtggagccacaagatggatctgagatctttgctaaggtagggtttccctggctggcctatagctgactgtgacataagagagaaataaattttgattttcttaagctcccaaaa

SEQ ID NO: 22199 - DNA, 266 bp, Homo sapiens
cctttaaaagtttctggccttgcttaaggagataagctacataaaagtcagaacctgagtttatgccattttgcttctttcttatttaacagcacactatataactacaaggcttttaataagttatttctgatgctgttaacaccatttggggctttaaagattgaagtttcctaatcagagacttgttttctatctatctatctatctatcaatctatctatctatctatctatctatctatctatctatctatcatctgtcta

SEQ ID NO: 22200 - DNA, 827 bp, Homo sapiens
  misc_feature (13)..(13): n is a, c, g, or t
gggggctggtccnctagtgtctgggctgggctgcatgggctgcagtggcgccgacctgctggatgatggtggtgccccgtggctgctgaggctgtgagtccctggctgctgcatgccatgtgctgtgtgtgtgtgtgccccctgtgcatggctttgcatgaattcgcctcctgtcgctcctgtgtgatgcctgcatgcatgtgacctgtgccagtgatggctgccatagaaggtggagccccatccctggtgctgacagtgcccaccgctgccctactgatggaccatgcgtgcctgtcctggcggctgtgggtgtcttgcgtgtgacccaccggcctcttctgagtggccatgctgcaactacctgcccaactttatccatgagctgtgctgtcgtccatctgacctgcgctgaccgtcatgggctgcaccatgtgtggttgggcatgcgactggcaggtactttagcatggactggccatcgagatcgtggtgcagatggcctgtggccaacgggcattggatgactgattattggacagaatggcatcttgtcaacacctgcggtctcctgcattatcaggaagatcaaggcagctggtggaatcattctaacagccagccactgccctggaggaccagggggagagtttggagtgaagtttaatgttgccaatggaggtcctgcacccgatgttgtctcagacaaaatctaccaaatcagcaaaacgattgaggaatatgctatatgtcctgatctccaaatcgacctatctcgactaggaagacaagaatttgacctagagaacaaattcaaaccattcaga

SEQ ID NO: 22201 - DNA, 463 bp, Homo sapiens
agtaagaattatccaaaatatgaaaaatattttttaaaaaggtaacaatccaaaagggaaatgtgaaaggatttgaataggcaattcacaaaataggaaacctgtatggttgatacatacttgaaaagatgcatccttaaacaaagaaatgcttgaaagaaggataaaaaatgttttggatggtcttacattagcaattaaatgctgtggccagaagtaacactttacttaggccctgagtgattaggatgatcagagcttgcctggtgacccataggaaatagaacacgagcaagaaataaacttctgttatttaaagccactgagattttgggattgttattgcatataatttagtttatggccgggtacgtggctcacgcctgtaatcccagcactttgggaggtcatagtgggctgatcacctgaggtcaggagtttgaaaccagcctggccaacatgg

SEQ ID NO: 22202 - DNA, 402 bp, Homo sapiens
acgtagtaggagaggctagccaagatctctggtgtcttataaaggtactaatcccaaatgtcagggctacaatctcatgacctaatcaccttgaaagcgtctacctcctaatactatcaccttgggatgtgagtaggatttcatcttactagttttggggggagacaaacattcagacatcctccttccctttttttccttctaagaatgcattccgttcttcttactaatagactgcaaactaaggggagtttcttatcctgttggagaatattctcaaatcattttctataaatggattactgtaggccagcagctacctttttctgcaatggtttagtggcccacatgtgggtcagggtttcccttcttgggacccttttttggtctggagtttgaact

SEQ ID NO: 22203 - DNA, 978 bp, Homo sapiens
gataagcaaacagcaaaaaattaccaatgaaaagttaggagttcaaaagaagtagtctgaactagatagattagatgtcatcctgtgaaataggtttaccacatgatagggaagaactttcaaacagtacagggtctattttcagttattcactatgaaatgagaacatttcacagttgttaaaggttgctttcagaagaaaagcccaactgatgaatgtttttaaaaatgcactattgagagcgaacaacagactggatgccataattttatagtcaagtttgggacaagttttaagaaactgtgttacaattcagagaaaagacagttggtgagcatattaagagatatagggaacagatttagatgatccaatatgcttattatcagaattccagaaaaaggcatgaaatcataaagaagacagaataccaggcaaaattaatgaaaaaatattaatccaaacacatataataaaaagtatcaatttcaagaataaaagaattatataagcatttaacacacataaacattggttacctgtaaaaggtgaaaaaaaaaaacaggttcagattttctgcttaaatatcaaagggcaaatggaacatttttacgatcacctaaaattcttgaaataggccaagatttttcatatacaaaggcaacagccttcttgccacaactaagttcagtgtacaagggtgcatggactcttcctgaaagaaattactagaaataggattctgtatgataagagattaatctactgaagatcttaagaatgggaaagatgtgatatgaaagaaatggtggtaagcagtaaaccagtaagactcaggatgaatgtcaaaataattgtaattttctgaaacaaccagaaaatcttaattattaatagaagttacaagaaaatgatctggacttaaaagtccaggaggttaagatagtataaaaagtatatatatgcaaactctgtta

SEQ ID NO: 22204 - DNA, 947 bp, Homo sapiens
gataagcaaacagcaaaaaattaccaatgaaaagttaggagttcaaaagaagtagtctgaactagatagattagatgtcatcctgtgaaataggtttaccacatgatagggaagaactttcaaacagtacagggtctattttcagttattcactatgaaatgagaacatttcacagttgttaaaggttgctttcagaagaaaagcccaactgatgaatgtttttaaaaatgcactattgagagcgaacaacagactggatgccataattttatagtcaagtttgggacaagttttaagaaactgtgttacaattcagagaaaagacagttggtgagcatattaagagatatagggaacagatttagatgatccaatatgcttattatcagaattccagaaaaaggcatgaaatcataaagaagacagaataccaggcaaaattaatgaaaaaatattaatccaaacacatataataaaaagtatcaatttcaagaataaaagaattatataagcatttaacacacataaacattggttacctgtaaaaggtgaaaaaaaaaaacaggttcagattttctgcttaaatatcaaagggcaaatggaacatttttacgatcacctaaaattcttgaaataggccaagatttttcatatacaaaggcaacagccttcttgccacaactaagttcagtgtacaagggtgcatggactcttcctgaaagaaattactagaaataggattctgtatgataagagattaatctactgaagatcttaagaatgggaaagatgtgatatgaaagaaatggtggtaagcagtaaaccagtaagactcaggatgaaagcactttgggaggccataggcaggcgaatcacttgaagtcaggagttcaaggatctgcctggcaaaatatggtgaacacaaatgtctctaccaaaaaatagg

SEQ ID NO: 22205 - DNA, 3140 bp, Homo sapiens
ggcacgagggtcctctgttaagagtgctactcgcccggggttgatctgtgcatgccactcctgggtcagacggtgaggtcggcgtctgcgaggacgcggcggtggagtagaagggcagccggagacaggcccggcgccccttccgaggctagacggccccagcttcgcggggatcatggcattgctggtggaccgagtgcggggccactggcgaatcgccgccgggctcctgttcaacctgctggtgtccatctgcattgtgttcctcaacaaatggatttatgtgtaccacggcttccccaacatgagcctgaccctggtgcacttcgtggtcacctggctgggcttgtatatctgccagaagctggacatctttgcccccaaaagtctgccgccctccaggctcctcctcctggccctcagcttctgtggctttgtggtcttcactaacctttctctgcagaacaacaccataggcacctatcagctggccaaggccatgaccacgccggtgatcatagccatccagaccttctgctaccagaaaaccttctccaccagaatccagctcacgctgattcctataactttaggtgtaatcctaaattcttattacgatgtgaagtttaatttccttggaatggtgtttgctgctcttggtgttttagttacatccctttatcaagtgtgggtaggagccaaacagcatgaattacaagtgaactcaatgcagctgctgtactaccaggctccgatgtcatctgccatgttgctggttgctgtgcccttctttgagccagtgtttggagaaggaggaatatttggtccctggtcagtttctgctttgcttatggtgctgctatctggagtaatagctttcatggtgaacttatcaatttattggatcattgggaacacttcacctgtcacctataacatgttcggacacttcaagttctgcattactttattcggaggatatgttttatttaaggatccactgtccattaatcaggcccttggcattttatgtacattatttggcattctcgcctatacccactttaagctcagtgaacaggaaggaagtaggagtaaactggcacaacgtccttaattgggtttttgtggagaaaagaatgttgtcccaagaagataaaaaatattgttaagtgtgcaagttattaaaaaaaaaaaaaaaaactcgagactagttctggcgagtttgtagcctctggttcccaggacacaaacatcaagctctgggacatcaggaggaaaggctgtgtcttccgatacagggggcacagccaggccgtgcggtgtctccggttcagccccgatgggaagtggttggcgtcggccgcagatgaccacaccgtgaagctctgggatctcactgccggcaagatgatgtctgagttccctggtcacacggggcctgtcaacgtggtcgagtttcaccccaacgagtacctcctggcctccggcagctctgacaggacaatccgcttctgggacctggagaagttccaggtggtgagctgcatcgaaggggagcctgggcccgtcaggagcgtcctcttcaacccagacggctgctgcctgtacagcggctgccaggactcactgcgtgtctacggctgggaacctgagcggtgctttgatgtggtcctcgtcaactggggcaaggtggccgacctggccatctgcaatgaccagttgataggtgtggccttctcccagagcaacgtctcctcctacgtggtggatctgacgcgtgtcaccaggactggcacggtggcccgggaccctgtgcaggaccaccggcccctggcacagccactgcccaaccccagcgcccccctccggcgcatctatgagcggcccagcacaacctgcagcaagcctcagagggtgaagcagaactcagagagcgagcgccgcagccccagcagcgaggatgaccgggacgagcgcgagtcccgcgcggagatccagaacgccgaggactacaacgagatcttccagcccaagaacagcatcagtcggacgccaccccggagaagtgagcccttccctgcacccccagaggacgacgcagccacagcaaaggaggcagcaaagcccagccctgccatggatgtgcagttcccggtgccaaatctggaggtcctgccccggcccccagtggttgcttccacacctgcacccaaggctgagcctgccatcatccctgccacccggaacgagcccatcgggctgaaggcctccgacttcctgcccgccgtgaagatcccccagcaggccgagctggtggacgaggatgccatgtcacagatccgcaaaggccacgacaccatgtgtgtggtgctcaccagccgccacaagaacctggacactgtgcgggctgtgtggaccatgggcgacatcaagacgtcggtggactccgctgtggccatcaacgacctgtcggtggtggtggacctcctgaacatcgtcaaccagaaagcctccctgtggaagctggacctgtgcaccaccgtcctgccacagattgagaagcttctgcagagcaagtatgagagctacgtccagacgggctgcacctccctgaagctgatcctgcagcggtttctgcccctcatcacagacatgctggcggccccaccctctgtgggtgtggatatcagcagggaggagaggctgcataagtgccggctctgctacaagcagcttaagagcatcagcggcctggtcaagagcaagtcaggcctgagcggccgccatggcagtaccttccgcgagctgcacctgctcatggccagtctggactgaggaaagcagtgggcaggggcgctcggcagcccacagggcctggcctcagcccccactcctgttccttgtgcacccactggcccatgagcctctgcctggcccctgctgctgtcctgtggccgtcctggaggaggtgatgctggtccctggccacctctacagccctgaactcttgagacaactctctccagcaatagctgcccagctttgcccaactgttgcttcttggggcagcgaactgagccctggggctgctgctgtaatttataaggcaaattttattaaatttgtaactattacca

SEQ ID NO: 22206 - DNA, 923 bp, Homo sapiens
  misc_feature (805)..(805): n is a, c, g, or t
  misc_feature (817)..(817): n is a, c, g, or t
  misc_feature (820)..(820): n is a, c, g, or t
  misc_feature (824)..(824): n is a, c, g, or t
  misc_feature (840)..(840): n is a, c, g, or t
  misc_feature (851)..(851): n is a, c, g, or t
gggacgaggtggcgaggggacggtgggccctgggctgggccgagccaggcggggctggctgggcttgcgggcagagagctctgagcgtggggaggctagagcccgtactccgcaagcagagggttgggaggatcagccgtggccgagggacctgcccccgcccccggacgagaggggtcggggtggaggccggagggggcaaaaccaggaggccggaagcagagctgggggtctgcagaaggacagccctgtattgagctgagatggctcgagcctaacattccatgatccaggatcgtgacagatgtgcacaggctgctgctgttgctgctgtgggtaatttggaaccacgaggcaccccagggccagaagacgaggcattctgtctgcctggatgtgtgggaactctctgccaacttgattggtggatctggggggggatccacccccaccccacgaggaaagcacagtttattttgtgggtggggcttcaggtgccagccagctgaaggatggccacccctgtggtcaccaagacagcctggaagttgcaagagatcgtcgcgcatgccagcaacgtgtcctcactggtgctgggcaaagcctccgggcggctgctggctacaggcggggatgactgccgcgtcaacctgtggtccatcaacaagcccaactgcatcatgagcctgacgggccacacatccccagtggagagcgtccgcctcaacacccccgaggagctcatcgtggccggctctcagtcgggctccatccgtgtctgggacctggaagctgccaaaatttngccctctgggcncangccnttggctggttcacgtnggagttgtgcntggtcccgagagaacatacctggactcggggagggggttccaaggggcgcccgcgggcgggcacgttctcgc

SEQ ID NO: 22207 - DNA, 1122 bp, Homo sapiens
gcagctgattggtgcgggaggcaaggtgggcggggctctgagccggaggtttgttgtgagggtcggttgtcaagcagcggccaatcaaggcaggggatggaggcaagtgggggtcgcgcctggagcggagcctcggcctccggagccgcagctgcagccctgtattgagctgagatggctcgagcctaacattccatgatccaggatcgtgacagatgtgcacaggctgctgctgttgctgctgtgtgccagccagctgaaggatggccacccctgtggtcaccaagacagcctggaagttgcaagagatcgtcgcgcatgccagcaacgtgtcctcactggtgctgggcaaagcctccgggcggctgctggctacaggcggggatgactgccgcgtcaacctgtggtccatcaacaagcccaactgcatcatgagcctgacgggccacacatccccagtggagagcgtccgcctcaacacccccgaggagctcatcgtggccggctctcagtcgggctccatccgtgtctgggacctggaagctgccaaaattcttcgcacactcatgggacacaaagccaacatctgcagcctggatttccacccgtacggcgagtttgtagcctctggttcccaggacacaaacatcaagctctgggacatcaggaggaaaggctgtgtcttccgatacagggggcacagccaggccgtgcggtgtctccggttcagccccgatgggaagtggttggcgtcggccgcagatgaccacaccgtgaagctctgggatctcactgccggcaagatgatgtctgagttccctggtcacacggggcctgtcaacgtggtcgagtttcaccccaacgagtacctcctggcctccggcagctctgacaggacatcagttagtggaccgtggggcaagtcccagatgagtggctgggcttcacaggtaaaccctagccggacagacaacgccactttcacccagaggatatgcactttacagcaggtggccggcacccaggtgtcttaaggttggcagctagtagagcttcaagttacccacacatgtgaaccgtcccagtcgcacctttgcacgacgagagggaccaaaagcacaa

SEQ ID NO: 22208 - DNA, 613 bp, Homo sapiens
tgcatgggtcaattttttttatttcaataattgtttttctttttgtatcatagaaagagtatcatgagtatatcaaacttgtaatttcatggacattgcttaagcccaagctaataaaaatagcaagtcaattttaaaaattgcgtataactagtcaatattaccaggtgatgtgcagaaacaggaagaaaatcgtgaagtctaaaggtaggaaggacaggcatgatgaaagttgagaaacagtgatttccgtctcaggcccatgccctgccctgtctgctggtcctgcagctcatggtggacaccaaagggggagctgaaggaggcagatccttccactgggcttcaggttccaaagcgggtagccgagcagggtcacccctccttcacaaggccccatcgggccgccctgatggcctctccctctccttccctgtgtagaagagatcgtcgcgcatgccagcaacgtgtcctcactggtgctgggcaaagcctccgggcggctgctggctacaggcggggatgactgccgcgtcaacctgtggtccatcaacaagcccaactgcatcatggtgagccccgacagctggcggggggtcaggacaagggcctg

SEQ ID NO: 22209 - DNA, 847 bp, Homo sapiens
actacggctagtgtacgaggcccggtgtctaatcggccgaggccagtctggactgaggaaagcagtgggcaggggcgctcggcagcccacagggcctggcctcagcccccactcctgttccttgtgcacccactggcccatgagcctctgcctggcccctgctgctgtcctgtggccgtcctggaggaggtgatgctggtccctggccacctctacagccctgaactcttgagacaactctctccagcaatagctgcccagctttgcccaactgttgcttcttggggcagcgaactgagccctggggctgctgctgtaatttataaggcaaattttattaaatttgtaactattaccaaaaaaaaaaaaaaaaaacccgcaagtttttttttctttttcttattttctttttttgtttctttttatgtgtgaggggagaggagagaggagtcgtgtgtgttctttacggcagggtgaggtggcggaatatatgagggcggagtgcccccgcgagagaatatatcatttgtatgtagaaacaggaggataccctccccgacgggagaatgagaggtgaactacaacgagcgcacagacagagaggggtgatcccaatggagaagaacccaaccactattatccagtcagagagagaaagacgcgagtcaccacatagaatgcatgcgggtgatgaaacaaaaagacccccgcgaggggaccgcagactaacgatatacacaacacagcggggacataaacaaatagccaagaaaatgaataatatgggaagggccggaaaaaaacgcctctggtagaaagaagggtcaaaacaattaaaaccaacaat

SEQ ID NO: 22210 - DNA, 2693 bp, Homo sapiens
gcagctgattggtgcgggaggcaaggtgggcggggctctgagccggaggtttgttgtgagggtcggttgtcaagcagcggccaatcaaggcaggggatggaggcaagtgggggtcgcgcctggagcggagcctcggcctccggagccgcagctgcagccctgtattgagctgagatggctcgagcctaacattccatgatccaggatcgtgacagatgtgcacaggctgctgctgttgctgctgtgggtaatttggaaccacgaggcaccccagggccagaagacgaggcattctgtctgcctggatgtgtgggaactctctgccaacttgattggtggatctggggggggatccacccccaccccacgaggaaagcacagtttattttgtgggtggggcttcaggtgccagccagctgaaggatggccacccctgtggtcaccaagacagcctggaagttgcaagagatcgtcgcgcatgccagcaacgtgtcctcactggtgctgggcaaagcctccgggcggctgctggctacaggcggggatgactgccgcgtcaacctgtggtccatcaacaagcccaactgcatcatgagcctgacgggccacacatccccagtggagagcgtccgcctcaacacccccgaggagctcatcgtggccggctctcagtcgggctccatccgtgtctgggacctggaagctgccaaaattcttcgcacactcatgggacacaaagccaacatctgcagcctggatttccacccgtacggcgagtttgtagcctctggttcccaggacacaaacatcaagctctgggacatcaggaggaaaggctgtgtcttccgatacagggggcacagccaggccgtgcggtgtctccggttcagccccgatgggaagtggttggcgtcggccgcagatgaccacaccgtgaagctctgggatctcactgccggcaagatgatgtctgagttccctggtcacacggggcctgtcaacgtggtcgagtttcaccccaacgagtacctcctggcctccggcagctctgacaggacaatccgcttctgggacctggagaagttccaggtggtgagctgcatcgaaggggagcctgggcccgtcaggagcgtcctcttcaacccagacggctgctgcctgtacagcggctgccaggactcactgcgtgtctacggctgggaacctgagcggtgctttgatgtggtcctcgtcaactggggcaaggtggccgacctggccatctgcaatgaccagttgataggtgtggccttctcccagagcaacgtctcctcctacgtggtggatctgacgcgtgtcaccaggactggcacggtggcccgggaccctgtgcaggaccaccggcccctggcacagccactgcccaaccccagcgcccccctccggcgcatctatgagcggcccagcacaacctgcagcaagcctcagagggtgaagcagaactcagagagcgagcgccgcagccccagcagcgaggatgaccgggacgagcgcgagtcccgcgcggagatccagaacgccgaggactacaacgagatcttccagcccaagaacagcatcagtcggacgccaccccggagaagtgagcccttccctgcacccccagaggacgacgcagccacagcaaaggaggcagcaaagcccagccctgccatggatgtgcagttcccggtgccaaatctggaggtcctgccccggcccccagtggttgcttccacacctgcacccaaggctgagcctgccatcatccctgccacccggaacgagcccatcgggctgaaggcctccgacttcctgcccgccgtgaagatcccccagcaggccgagctggtggacgaggatgccatgtcacagatccgcaaaggccacgacaccatgtgtgtggtgctcaccagccgccacaagaacctggacactgtgcgggctgtgtggaccatgggcgacatcaagacgtcggtggactccgctgtggccatcaacgacctgtcggtggtggtggacctcctgaacatcgtcaaccagaaagcctccctgtggaagctggacctgtgcaccaccgtcctgccacagattgagaagcttctgcagagcaagtatgagagctacgtccagacgggctgcacctccctgaagctgatcctgcagcggtttctgcccctcatcacagacatgctggcggccccaccctctgtgggtgtggatatcagcagggaggagaggctgcataagtgccggctctgctacaagcagcttaagagcatcagcggcctggtcaagagcaagtcaggcctgagcggccgccatggcagtaccttccgcgagctgcacctgctcatggccagtctggactgaggaaagcagtgggcaggggcgctcggcagcccacagggcctggcctcagcccccactcctgttccttgtgcacccactggcccatgagcctctgcctggcccctgctgctgtcctgtggccgtcctggaggaggtgatgctggtccctggccacctctacagccctgaactcttgagacaactctctccagcaatagctgcccagctttgcccaactgttgcttcttggggcagcgaactgagccctggggctgctgctgtaatttataaggcaaattttattaaatttgtaactattacca

SEQ ID NO: 22211 - DNA, 2744 bp, Homo sapiens
gcagctgattggtgcgggaggcaaggtgggcggggctctgagccggaggtttgttgtgagggtcggttgtcaagcagcggccaatcaaggcaggggatggaggcaagtgggggtcgcgcctggagcggagcctcggcctccggagccgcagctgcagccctgtattgagctgagatggctcgagcctaacattccatgatccaggatcgtgacagatgtgcacaggctgctgctgttgctgctgtgggtaatttggaaccacgaggcaccccagggccagaagacgaggcattctgtctgcctggatgtgtgggaactctctgccaacttgattggtggatctggggggggatccacccccaccccacgaggaaagcacagtttattttgtgggtggggcttcaggtgccagccagctgaaggatggccacccctgtggtcaccaagacagcctggaagttgcaagagatcgtcgcgcatgccagcaacgtgtcctcactggtgctgggcaaagcctccgggcggctgctggctacaggcggggatgactgccgcgtcaacctgtggtccatcaacaagcccaactgcatcatgagcctgacgggccacacatccccagtggagagcgtccgcctcaacacccccgaggagctcatcgtggccggctctcagtcgggctccatccgtgtctgggacctggaagctgccaaaattcttcgcacactcatgggacacaaagccaacatctgcagcctggatttccacccgtacggcgagtttgtagcctctggttcccaggacacaaacatcaagctctgggacatcaggaggaaaggctgtgtcttccgatacagggggcacagccaggccgtgcggtgtctccggttcagccccgatgggaagtggttggcgtcggccgcagatgaccacaccgtgaagctctgggatctcactgccggcaagatgatgtctgagttccctggtcacacggggcctgtcaacgtggtcgagtttcaccccaacgagtacctcctggcctccggcagctctgacaggacaatccgcttctgggacctggagaagttccaggtggtgagctgcatcgaaggggagcctgggcccgtcaggagcgtcctcttcaacccagacggctgctgcctgtacagcggctgccaggactcactgcgtgtctacggctgggaacctgagcggtgctttgatgtggtcctcgtcaactggggcaaggtggccgacctggccatctgcaatgaccagttgataggtgtggccttctcccagagcaacgtctcctcctacgtggtggatctgacgcgtgtcaccaggactggcacggtggcccgggaccctgtgcaggaccaccggcccctggcacagccactgcccaaccccagcgcccccctccggcgcatctatgagcggcccagcacaacctgcagcaagcctcagagggtgaagcagaactcagagagcgagcgccgcagccccagcagcgaggatgaccgggacgagcgcgagtcccgcgcggagatccagaacgccgaggactacaacgagatcttccagcccaagaacagcatcagtcggacgccaccccggagaagtgagcccttccctgcacccccagaggacgacgcagccacagcaaaggaggcagcaaagcccagccctgccatggatgtgcagttcccggtgccaaatctggaggtcctgccccggcccccagtggttgcttccacacctgcacccaaggctgagcctgccatcatccctgccacccggaacgagcccatcgggctgaaggcctccgacttcctgcccgccgtgaagatcccccagcaggccgagctggtggacgaggatgccatgtcacagatccgcaaaggccacgacaccatgtgtgtggtgctcaccagccgccacaagaacctggacactgtgcgggctgtgtggaccatgggcgacatcaagggccacactgtcccccactgccccacccctgacggtgctctgtttgcacagacgtcggtggactccgctgtggccatcaacgacctgtcggtggtggtggacctcctgaacatcgtcaaccagaaagcctccctgtggaagctggacctgtgcaccaccgtcctgccacagattgagaagcttctgcagagcaagtatgagagctacgtccagacgggctgcacctccctgaagctgatcctgcagcggtttctgcccctcatcacagacatgctggcggccccaccctctgtgggtgtggatatcagcagggaggagaggctgcataagtgccggctctgctacaagcagcttaagagcatcagcggcctggtcaagagcaagtcaggcctgagcggccgccatggcagtaccttccgcgagctgcacctgctcatggccagtctggactgaggaaagcagtgggcaggggcgctcggcagcccacagggcctggcctcagcccccactcctgttccttgtgcacccactggcccatgagcctctgcctggcccctgctgctgtcctgtggccgtcctggaggaggtgatgctggtccctggccacctctacagccctgaactcttgagacaactctctccagcaatagctgcccagctttgcccaactgttgcttcttggggcagcgaactgagccctggggctgctgctgtaatttataaggcaaattttattaaatttgtaactattacca

SEQ ID NO: 22212 - DNA, 2590 bp, Homo sapiens
  misc_feature (14)..(14): n is a, c, g, or t
  misc_feature (26)..(26): n is a, c, g, or t
caggctggtactgncccgggaagtanggcatcggctccggagccgcagctgcagccctgtattgagctgagatggctcgagcctaacattccatgatccaggatcgtgacagatgtgcacaggctgctgctgttgctgctgtgggtaatttggaaccacgaggcaccccagggccagaagacgaggcattctgtctgcctggatgtgtgggaactctctgccaacttgattggtggatctggggggggatccacccccaccccacgaggaaagcacagtttattttgtgggtggggcttcaggtgccagccagctgaaggatggccacccctgtggtcaccaagacagcctggaagttgcaagagatcgtcgcgcatgccagcaacgtgtcctcactggtgctgggcaaagcctccgggcggctgctggctacaggcggggatgactgccgcgtcaacctgtggtccatcaacaagcccaactgcatcatgagcctgacgggccacacatccccagtggagagcgtccgcctcaacacccccgaggagctcatcgtggccggctctcagtcgggctccatccgtgtctgggacctggaagctgccaaaattcttcgcacactcatgggacacaaagccaacatctgcagcctggatttccacccgtacggcgagtttgtagcctctggttcccaggacacaaacatcaagctctgggacatcaggaggaaaggctgtgtcttccgatacagggggcacagccaggccgtgcggtgtctccggttcagccccgatgggaagtggttggcgtcggccgcagatgaccacaccgtgaagctctgggatctcactgccggcaagatgatgtctgagttccctggtcacacggggcctgtcaacgtggtcgagtttcaccccaacgagtacctcctggcctccggcagctctgacaggacaatccgcttctgggacctggagaagttccaggtggtgagctgcatcgaaggggagcctgggcccgtcaggagcgtcctcttcaacccagacggctgctgcctgtacagcggctgccaggactcactgcgtgtctacggctgggaacctgagcggtgctttgatgtggtcctcgtcaactggggcaaggtggccgacctggccatctgcaatgaccagttgataggtgtggccttctcccagagcaacgtctcctcctacgtggtggatctgacgcgtgtcaccaggactggcacggtggcccgggaccctgtgcaggaccaccggcccctggcacagccactgcccaaccccagcgcccccctccggcgcatctatgagcggcccagcacaacctgcagcaagcctcagagggtgaagcagaactcagagagcgagcgccgcagccccagcagcgaggatgaccgggacgagcgcgagtcccgcgcggagatccagaacgccgaggactacaacgagatcttccagcccaagaacagcatcagtcggacgccaccccggagaagtgagcccttccctgcacccccagaggacgacgcagccacagcaaaggaggcagcaaagcccagccctgccatggatgtgcagttcccggtgccaaatctggaggtcctgccccggcccccagtggttgcttccacacctgcacccaaggctgagcctgccatcatccctgccacccggaacgagcccatcgggctgaaggcctccgacttcctgcccgccgtgaagatcccccagcaggccgagctggtggacgaggatgccatgtcacagatccgcaaaggccacgacaccatgtgtgtggtgctcaccagccgccacaagaacctggacactgtgcgggctgtgtggaccatgggcgacatcaagacgtcggtggactccgctgtggccatcaacgacctgtcggtggtggtggacctcctgaacatcgtcaaccagaaagcctccctgtggaagctggacctgtgcaccaccgtcctgccacagattgagaagcttctgcagagcaagtatgagagctacgtccagacgggctgcacctccctgaagctgatcctgcagcggtttctgcccctcatcacagacatgctggcggccccaccctctgtgggtgtggatatcagcagggaggagaggctgcataagtgccggctctgctacaagcagcttaagagcatcagcggcctggtcaagagcaagtcaggcctgagcggccgccatggcagtaccttccgcgagctgcacctgctcatggccagtctggactgaggaaagcagtgggcaggggcgctcggcagcccacagggcctggcctcagcccccactcctgttccttgtgcacccactggcccatgagcctctgcctggcccctgctgctgtcctgtggccgtcctggaggaggtgatgctggtccctggccacctctacagccctgaactcttgagacaactctctccagcaatagctgcccagctttgcccaactgttgcttcttggggcagcgaactgagccctggggctgctgctgtaatttataaggcaaattttattaaatttgtaactattacca

SEQ ID NO: 22213 - DNA, 2782 bp, Homo sapiens
gggacgaggtggcgaggggacggtgggccctgggctgggccgagccaggcggggctggctgggcttgcgggcagagagctctgagcgtggggaggctagagcccgtactccgcaagcagagggttgggaggatcagccgtggccgagggacctgcccccgcccccggacgagaggggtcggggtggaggccggagggggcaaaaccaggaggccggaagcagagctgggggtctgcagaaggacagccctgtattgagctgagatggctcgagcctaacattccatgatccaggatcgtgacagatgtgcacaggctgctgctgttgctgctgtgggtaatttggaaccacgaggcaccccagggccagaagacgaggcattctgtctgcctggatgtgtgggaactctctgccaacttgattggtggatctggggggggatccacccccaccccacgaggaaagcacagtttattttgtgggtggggcttcaggtgccagccagctgaaggatggccacccctgtggtcaccaagacagcctggaagttgcaagagatcgtcgcgcatgccagcaacgtgtcctcactggtgctgggcaaagcctccgggcggctgctggctacaggcggggatgactgccgcgtcaacctgtggtccatcaacaagcccaactgcatcatgagcctgacgggccacacatccccagtggagagcgtccgcctcaacacccccgaggagctcatcgtggccggctctcagtcgggctccatccgtgtctgggacctggaagctgccaaaattcttcgcacactcatgggacacaaagccaacatctgcagcctggatttccacccgtacggcgagtttgtagcctctggttcccaggacacaaacatcaagctctgggacatcaggaggaaaggctgtgtcttccgatacagggggcacagccaggccgtgcggtgtctccggttcagccccgatgggaagtggttggcgtcggccgcagatgaccacaccgtgaagctctgggatctcactgccggcaagatgatgtctgagttccctggtcacacggggcctgtcaacgtggtcgagtttcaccccaacgagtacctcctggcctccggcagctctgacaggacaatccgcttctgggacctggagaagttccaggtggtgagctgcatcgaaggggagcctgggcccgtcaggagcgtcctcttcaacccagacggctgctgcctgtacagcggctgccaggactcactgcgtgtctacggctgggaacctgagcggtgctttgatgtggtcctcgtcaactggggcaaggtggccgacctggccatctgcaatgaccagttgataggtgtggccttctcccagagcaacgtctcctcctacgtggtggatctgacgcgtgtcaccaggactggcacggtggcccgggaccctgtgcaggaccaccggcccctggcacagccactgcccaaccccagcgcccccctccggcgcatctatgagcggcccagcacaacctgcagcaagcctcagagggtgaagcagaactcagagagcgagcgccgcagccccagcagcgaggatgaccgggacgagcgcgagtcccgcgcggagatccagaacgccgaggactacaacgagatcttccagcccaagaacagcatcagtcggacgccaccccggagaagtgagcccttccctgcacccccagaggacgacgcagccacagcaaaggaggcagcaaagcccagccctgccatggatgtgcagttcccggtgccaaatctggaggtcctgccccggcccccagtggttgcttccacacctgcacccaaggctgagcctgccatcatccctgccacccggaacgagcccatcgggctgaaggcctccgacttcctgcccgccgtgaagatcccccagcaggccgagctggtggacgaggatgccatgtcacagatccgcaaaggccacgacaccatgtgtgtggtgctcaccagccgccacaagaacctggacactgtgcgggctgtgtggaccatgggcgacatcaagacgtcggtggactccgctgtggccatcaacgacctgtcggtggtggtggacctcctgaacatcgtcaaccagaaagcctccctgtggaagctggacctgtgcaccaccgtcctgccacagattgagaagcttctgcagagcaagtatgagagctacgtccagacgggctgcacctccctgaagctgatcctgcagcggtttctgcccctcatcacagacatgctggcggccccaccctctgtgggtgtggatatcagcagggaggagaggctgcataagtgccggctctgctacaagcagcttaagagcatcagcggcctggtcaagagcaagtcaggcctgagcggccgccatggcagtaccttccgcgagctgcacctgctcatggccagtctggactgaggaaagcagtgggcaggggcgctcggcagcccacagggcctggcctcagcccccactcctgttccttgtgcacccactggcccatgagcctctgcctggcccctgctgctgtcctgtggccgtcctggaggaggtgatgctggtccctggccacctctacagccctgaactcttgagacaactctctccagcaatagctgcccagctttgcccaactgttgcttcttggggcagcgaactgagccctggggctgctgctgtaatttataaggcaaattttattaaatttgtaactattacca

SEQ ID NO: 22214 - DNA, 2767 bp, Homo sapiens
gcagctgattggtgcgggaggcaaggtgggcggggctctgagccggaggtttgttgtgagggtcggttgtcaagcagcggccaatcaaggcaggggatggaggcaagtgggggtcgcgcctggagcggagcctcggcctccggagccgcagctgcagccctgtattgagctgagatggctcgagcctaacattccatgatccaggatcgtgacagatgtgcacaggctgctgctgttgctgctgtgggtaatttggaaccacgaggcaccccagggccagaagacgaggcattctgtctgcctggatgtgtgggaactctctgccaacttgattggtggatctggggggggatccacccccaccccacgaggaaagcacagtttattttgtgggtggggcttcaggtgccagccagctgaaggatggccacccctgtggtcaccaagacagcctggaagttgcaagagatcgtcgcgcatgccagcaacgtgtcctcactggtgctgggcaaagcctccgggcggctgctggctacaggcggggatgactgccgcgtcaacctgtggtccatcaacaagcccaactgcatcatgagcctgacgggccacacatccccagtggagagcgtccgcctcaacacccccgaggagctcatcgtggccggctctcagtcgggctccatccgtgtctgggacctggaagctgccaaaattcttcgcacactcatgggacacaaagccaacatctgcagcctggatttccacccgtacggcgagtttgtagcctctggttcccaggacacaaacatcaagctctgggacatcaggaggaaaggctgtgtcttccgatacagggggcacagccaggccgtgcggtgtctccggttcagccccgatgggaagtggttggcgtcggccgcagatgaccacaccgtgaagctctgggatctcactgccggcaagatgatgtctgagttccctggtcacacggggcctgtcaacgtggtcgagtttcaccccaacgagtacctcctggcctccggcagctctgacaggacaatccgcttctgggacctggagaagttccaggtggtgagctgcatcgaaggggagcctgggcccgtcaggagcgtcctcttcaacccagacggctgctgcctgtacagcggctgccaggactcactgcgtgtctacggctgggaacctgagcggtgctttgatgtggtcctcgtcaactggggcaaggtggccgacctggccatctgcaatgaccagttgataggtgtggccttctcccagagcaacgtctcctcctacgtggtggatctgacgcgtgtcaccaggactggcacggtggcccgggaccctgtgcaggaccaccggcccctggcacagccactgcccaaccccagcgcccccctccggcgcatctatgagcggcccagcacaacctgcagcaagcctcagagggtgaagcagaactcagagagcgagcgccgcagccccagcagcgaggatgaccgggacgagcgcgagtcccgcgcggagatccagaacgccgaggactacaacgagatcttccagcccaagaacagcatcagtcggacgccaccccggagaagtgagcccttccctgcacccccagaggacgacgcagccacagcaaaggaggcagcaaagcccagccctgccatggatgtgcagttcccggtgccaaatctggaggtcctgccccggcccccagtggttgcttccacacctgcacccaaggctgagcctgccatcatccctgccacccggaacgagcccatcgggctgaaggcctccgacttcctgcccgccgtgaagatcccccagcaggccgagctggtggacgaggatgccatgtcacagatccgcaaaggccacgacaccatgtgtgtggtgctcaccagccgccacaagaacctggacactgtgcgggctgtgtggaccatgggcgacatcaagacgtcggtggactccgctgtggccatcaacgacctgtcggtggtggtggacctcctgaacatcgtcaaccagaaagcgtaagtggctgcagagggggagtgggcggaggggcagggctgggctgatggcagcatgtcctggcctctcctagctccctgtggaagctggacctgtgcaccaccgtcctgccacagattgagaagcttctgcagagcaagtatgagagctacgtccagacgggctgcacctccctgaagctgatcctgcagcggtttctgcccctcatcacagacatgctggcggccccaccctctgtgggtgtggatatcagcagggaggagaggctgcataagtgccggctctgctacaagcagcttaagagcatcagcggcctggtcaagagcaagtcaggcctgagcggccgccatggcagtaccttccgcgagctgcacctgctcatggccagtctggactgaggaaagcagtgggcaggggcgctcggcagcccacagggcctggcctcagcccccactcctgttccttgtgcacccactggcccatgagcctctgcctggcccctgctgctgtcctgtggccgtcctggaggaggtgatgctggtccctggccacctctacagccctgaactcttgagacaactctctccagcaatagctgcccagctttgcccaactgttgcttcttggggcagcgaactgagccctggggctgctgctgtaatttataaggcaaattttattaaatttgtaactattacca

SEQ ID NO: 22215 - DNA, 2818 bp, Homo sapiens
gcagctgattggtgcgggaggcaaggtgggcggggctctgagccggaggtttgttgtgagggtcggttgtcaagcagcggccaatcaaggcaggggatggaggcaagtgggggtcgcgcctggagcggagcctcggcctccggagccgcagctgcagccctgtattgagctgagatggctcgagcctaacattccatgatccaggatcgtgacagatgtgcacaggctgctgctgttgctgctgtgggtaatttggaaccacgaggcaccccagggccagaagacgaggcattctgtctgcctggatgtgtgggaactctctgccaacttgattggtggatctggggggggatccacccccaccccacgaggaaagcacagtttattttgtgggtggggcttcaggtgccagccagctgaaggatggccacccctgtggtcaccaagacagcctggaagttgcaagagatcgtcgcgcatgccagcaacgtgtcctcactggtgctgggcaaagcctccgggcggctgctggctacaggcggggatgactgccgcgtcaacctgtggtccatcaacaagcccaactgcatcatgagcctgacgggccacacatccccagtggagagcgtccgcctcaacacccccgaggagctcatcgtggccggctctcagtcgggctccatccgtgtctgggacctggaagctgccaaaattcttcgcacactcatgggacacaaagccaacatctgcagcctggatttccacccgtacggcgagtttgtagcctctggttcccaggacacaaacatcaagctctgggacatcaggaggaaaggctgtgtcttccgatacagggggcacagccaggccgtgcggtgtctccggttcagccccgatgggaagtggttggcgtcggccgcagatgaccacaccgtgaagctctgggatctcactgccggcaagatgatgtctgagttccctggtcacacggggcctgtcaacgtggtcgagtttcaccccaacgagtacctcctggcctccggcagctctgacaggacaatccgcttctgggacctggagaagttccaggtggtgagctgcatcgaaggggagcctgggcccgtcaggagcgtcctcttcaacccagacggctgctgcctgtacagcggctgccaggactcactgcgtgtctacggctgggaacctgagcggtgctttgatgtggtcctcgtcaactggggcaaggtggccgacctggccatctgcaatgaccagttgataggtgtggccttctcccagagcaacgtctcctcctacgtggtggatctgacgcgtgtcaccaggactggcacggtggcccgggaccctgtgcaggaccaccggcccctggcacagccactgcccaaccccagcgcccccctccggcgcatctatgagcggcccagcacaacctgcagcaagcctcagagggtgaagcagaactcagagagcgagcgccgcagccccagcagcgaggatgaccgggacgagcgcgagtcccgcgcggagatccagaacgccgaggactacaacgagatcttccagcccaagaacagcatcagtcggacgccaccccggagaagtgagcccttccctgcacccccagaggacgacgcagccacagcaaaggaggcagcaaagcccagccctgccatggatgtgcagttcccggtgccaaatctggaggtcctgccccggcccccagtggttgcttccacacctgcacccaaggctgagcctgccatcatccctgccacccggaacgagcccatcgggctgaaggcctccgacttcctgcccgccgtgaagatcccccagcaggccgagctggtggacgaggatgccatgtcacagatccgcaaaggccacgacaccatgtgtgtggtgctcaccagccgccacaagaacctggacactgtgcgggctgtgtggaccatgggcgacatcaagggccacactgtcccccactgccccacccctgacggtgctctgtttgcacagacgtcggtggactccgctgtggccatcaacgacctgtcggtggtggtggacctcctgaacatcgtcaaccagaaagcgtaagtggctgcagagggggagtgggcggaggggcagggctgggctgatggcagcatgtcctggcctctcctagctccctgtggaagctggacctgtgcaccaccgtcctgccacagattgagaagcttctgcagagcaagtatgagagctacgtccagacgggctgcacctccctgaagctgatcctgcagcggtttctgcccctcatcacagacatgctggcggccccaccctctgtgggtgtggatatcagcagggaggagaggctgcataagtgccggctctgctacaagcagcttaagagcatcagcggcctggtcaagagcaagtcaggcctgagcggccgccatggcagtaccttccgcgagctgcacctgctcatggccagtctggactgaggaaagcagtgggcaggggcgctcggcagcccacagggcctggcctcagcccccactcctgttccttgtgcacccactggcccatgagcctctgcctggcccctgctgctgtcctgtggccgtcctggaggaggtgatgctggtccctggccacctctacagccctgaactcttgagacaactctctccagcaatagctgcccagctttgcccaactgttgcttcttggggcagcgaactgagccctggggctgctgctgtaatttataaggcaaattttattaaatttgtaactattacca

SEQ ID NO: 22216 - DNA, 1654 bp, Homo sapiens
gcagctgattggtgcgggaggcaaggtgggcggggctctgagccggaggtttgttgtgagggtcggttgtcaagcagcggccaatcaaggcaggggatggaggcaagtgggggtcgcgcctggagcggagcctcggcctccggagccgcagctgcagccctgtattgagctgagatggctcgagcctaacattccatgatccaggatcgtgacagatgtgcacaggctgctgctgttgctgctgtgggtaatttggaaccacgaggcaccccagggccagaagacgaggcattctgtctgcctggatgtgtgggaactctctgccaacttgattggtggatctggggggggatccacccccaccccacgaggaaagcacagtttattttgtgggtggggcttcaggtgccagccagctgaaggatggccacccctgtggtcaccaagacagcctggaagttgcaagagatcgtcgcgcatgccagcaacgtgtcctcactggtgctgggcaaagcctccgggcggctgctggctacaggcggggatgactgccgcgtcaacctgtggtccatcaacaagcccaactgcatcatgagcctgacgggccacacatccccagtggagagcgtccgcctcaacacccccgaggagctcatcgtggccggctctcagtcgggctccatccgtgtctgggacctggaagctgccaaaattcttcgcacactcatgggacacaaagccaacatctgcagcctggatttccacccgtacggcgagtttgtagcctctggttcccaggacacaaacatcaagctctgggacatcaggaggaaaggctgtgtcttccgatacagggggcacagccaggccgtgcggtgtctccggttcagccccgatgggaagtggttggcgtcggccgcagatgaccacaccgtgaagctctgggatctcactgccggcaagatgatgtctgagttccctggtcacacggggcctgtcaacgtggtcgagtttcaccccaacgagtacctcctggcctccggcagctctgacaggacaatccgcttctgggacctggagaagttccaggtggtgagctgcatcgaaggggagcctgggcccgtcaggagcgtcctcttcaacccagacggctgctgcctgtacagcggctgccaggactcactgcgtgtctacggctgggaacctgagcggtgctttgatgtggtcctcgtcaactggggcaaggtggccgacctggccatctgcaatgaccagttgataggtgtggccttctcccagagcaacgtctcctcctacgtggtggatctgacgcgtgtcaccaggactggcacggtggcccgggaccctgtgcaggaccaccggcccctggcacagccactgcccaaccccagcgcccccctccggcgcatctatgagcggcccagcacaacctgcagcaagcctcagagggtgaagcagaactcagagagcgagcgccgcagccccagcagcgaggatgaccgggacgagcgcgagtcccgcgcggagatccagaacgccgaggactacaacgagatcttccagcccaagaacagcatcagtccggaacggccaaccccgggaagaagtgaaggccctttcccctgaaaccccc

SEQ ID NO: 22217 - DNA, 1300 bp, Homo sapiens
gcagctgattggtgcgggaggcaaggtgggcggggctctgagccggaggtttgttgtgagggtcggttgtcaagcagcggccaatcaaggcaggggatggaggcaagtgggggtcgcgcctggagcggagcctcggcctccggagccgcagctgcagccctgtattgagctgagatggctcgagcctaacattccatgatccaggatcgtgacagatgtgcacaggctgctgctgttgctgctgtgggtaatttggaaccacgaggcaccccagggccagaagacgaggcattctgtctgcctggatgtgtgggaactctctgccaacttgattggtggatctggggggggatccacccccaccccacgaggaaagcacagtttattttgtgggtggggcttcaggtgccagccagctgaaggatggccacccctgtggtcaccaagacagcctggaagttgcaagagatcgtcgcgcatgccagcaacgtgtcctcactggtgctgggcaaagcctccgggcggctgctggctacaggcggggatgactgccgcgtcaacctgtggtccatcaacaagcccaactgcatcatgagcctgacgggccacacatccccagtggagagcgtccgcctcaacacccccgaggagctcatcgtggccggctctcagtcgggctccatccgtgtctgggacctggaagctgccaaaattcttcgcacactcatgggacacaaagccaacatctgcagcctggatttccacccgtacggcgagtttgtagcctctggttcccaggacacaaacatcaagctctgggacatcaggaggaaaggctgtgtcttccgatacagggggcacagccaggccgtgcggtgtctccggttcagccccgatgggaagtggttggcgtcggccgcagatgaccacaccgtgaagctctgggatctcactgccggcaagatgatgtctgagttccctggtcacacggggcctgtcaacgtggtcgagtttcaccccaacgagtacctcctggcctccggcagctctgacaggacaatccgcttctgggacctggagaagttccaggtggtgagctgcatcgaaggggagcctgggcccgtcaggagcgtcctcttcaacccagacggctgctgcctgtacagcggctgccaggactcactgcgtgtctacggctgggaacctgagcggtgctttgatgtggtcctcgtcaactggggcaaggtggccgacctggccatctgcaatgaccagttggtgagagagccatggcacccac

SEQ ID NO: 22218 - DNA, 1282 bp, Homo sapiens
gcagctgattggtgcgggaggcaaggtgggcggggctctgagccggaggtttgttgtgagggtcggttgtcaagcagcggccaatcaaggcaggggatggaggcaagtgggggtcgcgcctggagcggagcctcggcctccggagccgcagctgcagccctgtattgagctgagatggctcgagcctaacattccatgatccaggatcgtgacagatgtgcacaggctgctgctgttgctgctgtgggtaatttggaaccacgaggcaccccagggccagaagacgaggcattctgtctgcctggatgtgtgggaactctctgccaacttgattggtggatctggggggggatccacccccaccccacgaggaaagcacagtttattttgtgggtggggcttcaggtgccagccagctgaaggatggccacccctgtggtcaccaagacagcctggaagttgcaagagatcgtcgcgcatgccagcaacgtgtcctcactggtgctgggcaaagcctccgggcggctgctggctacaggcggggatgactgccgcgtcaacctgtggtccatcaacaagcccaactgcatcatgagcctgacgggccacacatccccagtggagagcgtccgcctcaacacccccgaggagctcatcgtggccggctctcagtcgggctccatccgtgtctgggacctggaagctgccaaaattcttcgcacactcatgggacacaaagccaacatctgcagcctggatttccacccgtacggcgagtttgtagcctctggttcccaggacacaaacatcaagctctgggacatcaggaggaaaggctgtgtcttccgatacagggggcacagccaggccgtgcggtgtctccggttcagccccgatgggaagtggttggcgtcggccgcagatgaccacaccgtgaagctctgggatctcactgccggcaagatgatgtctgagttccctggtcacacggggcctgtcaacgtggtcgagtttcaccccaacgagtacctcctggcctccggcagctctgacaggacatcagttagtggaccgtggggcaagtcccagatgagtggctgggcttcacaggtaaaccctagccggacagacaacgccactttcacccagaggatatgcactttacagcaggtggccggcacccaggtgtcttaaggttggcagctagtagagcttcaagttacccacacatgtgaaccgtcccagtcgcacctttgcacgacgagagggaccaaaagcacaa

SEQ ID NO: 22219 - DNA, 980 bp, Homo sapiens
gcagctgattggtgcgggaggcaaggtgggcggggctctgagccggaggtttgttgtgagggtcggttgtcaagcagcggccaatcaaggcaggggatggaggcaagtgggggtcgcgcctggagcggagcctcggcctccggagccgcagctgcagccctgtattgagctgagatggctcgagcctaacattccatgatccaggatcgtgacagatgtgcacaggctgctgctgttgctgctgtgggtaatttggaaccacgaggcaccccagggccagaagacgaggcattctgtctgcctggatgtgtgggaactctctgccaacttgattggtggatctggggggggatccacccccaccccacgaggaaagcacagtttattttgtgggtggggcttcaggtgccagccagctgaaggatggccacccctgtggtcaccaagacagcctggaagttgcaagagatcgtcgcgcatgccagcaacgtgtcctcactggtgctgggcaaagcctccgggcggctgctggctacaggcggggatgactgccgcgtcaacctgtggtccatcaacaagcccaactgcatcatgagcctgacgggccacacatccccagtggagagcgtccgcctcaacacccccgaggagctcatcgtggccggctctcagtcgggctccatccgtgtctgggacctggaagctgccaaaattcttcgcacactcatgggacacaaagccaacatctgcagcctggatttccacccgtacggcgagtttgtagcctctggttcccaggacacaaacatcaagctctgggacatcaggaggaaaggctgtgtcttccgatacagggggcacagccaggccgtgcggtgtctccggttcagccccgatgggaagtggttggcgtcggccgcagatgaccacaccgtgaagctctggatctcacgtctagctattcgggggggatccttaag

SEQ ID NO: 22220 - DNA, 2592 bp, Homo sapiens
gcagctgattggtgcgggaggcaaggtgggcggggctctgagccggaggtttgttgtgagggtcggttgtcaagcagcggccaatcaaggcaggggatggaggcaagtgggggtcgcgcctggagcggagcctcggcctccggagccgcagctgcagccctgtattgagctgagatggctcgagcctaacattccatgatccaggatcgtgacagatgtgcacaggctgctgctgttgctgctgtgggtaatttggaaccacgaggcaccccagggccagaagacgaggcattctgtctgcctggatgtgtgggaactctctgccaacttgattggtggatctggggggggatccacccccaccccacgaggaaagcacagtttattttgtgggtggggcttcaggtgccagccagctgaaggatggccacccctgtggtcaccaagacagcctggaagttgcaagagatcgtcgcgcatgccagcaacgtgtcctcactggtgctgggcaaagcctccgggcggctgctggctacaggcggggatgactgccgcgtcaacctgtggtccatcaacaagcccaactgcatcatgagcctgacgggccacacatccccagtggagagcgtccgcctcaacacccccgaggagctcatcgtggccggctctcagtcgggctccatccgtgtctgggacctggaagctgccaaaactctgggacatcaggaggaaaggctgtgtcttccgatacagggggcacagccaggccgtgcggtgtctccggttcagccccgatgggaagtggttggcgtcggccgcagatgaccacaccgtgaagctctgggatctcactgccggcaagatgatgtctgagttccctggtcacacggggcctgtcaacgtggtcgagtttcaccccaacgagtacctcctggcctccggcagctctgacaggacaatccgcttctgggacctggagaagttccaggtggtgagctgcatcgaaggggagcctgggcccgtcaggagcgtcctcttcaacccagacggctgctgcctgtacagcggctgccaggactcactgcgtgtctacggctgggaacctgagcggtgctttgatgtggtcctcgtcaactggggcaaggtggccgacctggccatctgcaatgaccagttgataggtgtggccttctcccagagcaacgtctcctcctacgtggtggatctgacgcgtgtcaccaggactggcacggtggcccgggaccctgtgcaggaccaccggcccctggcacagccactgcccaaccccagcgcccccctccggcgcatctatgagcggcccagcacaacctgcagcaagcctcagagggtgaagcagaactcagagagcgagcgccgcagccccagcagcgaggatgaccgggacgagcgcgagtcccgcgcggagatccagaacgccgaggactacaacgagatcttccagcccaagaacagcatcagtcggacgccaccccggagaagtgagcccttccctgcacccccagaggacgacgcagccacagcaaaggaggcagcaaagcccagccctgccatggatgtgcagttcccggtgccaaatctggaggtcctgccccggcccccagtggttgcttccacacctgcacccaaggctgagcctgccatcatccctgccacccggaacgagcccatcgggctgaaggcctccgacttcctgcccgccgtgaagatcccccagcaggccgagctggtggacgaggatgccatgtcacagatccgcaaaggccacgacaccatgtgtgtggtgctcaccagccgccacaagaacctggacactgtgcgggctgtgtggaccatgggcgacatcaagacgtcggtggactccgctgtggccatcaacgacctgtcggtggtggtggacctcctgaacatcgtcaaccagaaagcctccctgtggaagctggacctgtgcaccaccgtcctgccacagattgagaagcttctgcagagcaagtatgagagctacgtccagacgggctgcacctccctgaagctgatcctgcagcggtttctgcccctcatcacagacatgctggcggccccaccctctgtgggtgtggatatcagcagggaggagaggctgcataagtgccggctctgctacaagcagcttaagagcatcagcggcctggtcaagagcaagtcaggcctgagcggccgccatggcagtaccttccgcgagctgcacctgctcatggccagtctggactgaggaaagcagtgggcaggggcgctcggcagcccacagggcctggcctcagcccccactcctgttccttgtgcacccactggcccatgagcctctgcctggcccctgctgctgtcctgtggccgtcctggaggaggtgatgctggtccctggccacctctacagccctgaactcttgagacaactctctccagcaatagctgcccagctttgcccaactgttgcttcttggggcagcgaactgagccctggggctgctgctgtaatttataaggcaaattttattaaatttgtaactattacca

SEQ ID NO: 22221 - DNA, 2671 bp, Homo sapiens
tgcatgggtcaattttttttatttcaataattgtttttctttttgtatcatagaaagagtatcatgagtatatcaaacttgtaatttcatggacattgcttaagcccaagctaataaaaatagcaagtcaattttaaaaattgcgtataactagtcaatattaccaggtgatgtgcagaaacaggaagaaaatcgtgaagtctaaaggtaggaaggacaggcatgatgaaagttgagaaacagtgatttccgtctcaggcccatgccctgccctgtctgctggtcctgcagctcatggtggacaccaaagggggagctgaaggaggcagatccttccactgggcttcaggttccaaagcgggtagccgagcagggtcacccctccttcacaaggccccatcgggccgccctgatggcctctccctctccttccctgtgtagaagagatcgtcgcgcatgccagcaacgtgtcctcactggtgctgggcaaagcctccgggcggctgctggctacaggcggggatgactgccgcgtcaacctgtggtccatcaacaagcccaactgcatcatgagcctgacgggccacacatccccagtggagagcgtccgcctcaacacccccgaggagctcatcgtggccggctctcagtcgggctccatccgtgtctgggacctggaagctgccaaaattcttcgcacactcatgggacacaaagccaacatctgcagcctggatttccacccgtacggcgagtttgtagcctctggttcccaggacacaaacatcaagctctgggacatcaggaggaaaggctgtgtcttccgatacagggggcacagccaggccgtgcggtgtctccggttcagccccgatgggaagtggttggcgtcggccgcagatgaccacaccgtgaagctctgggatctcactgccggcaagatgatgtctgagttccctggtcacacggggcctgtcaacgtggtcgagtttcaccccaacgagtacctcctggcctccggcagctctgacaggacaatccgcttctgggacctggagaagttccaggtggtgagctgcatcgaaggggagcctgggcccgtcaggagcgtcctcttcaacccagacggctgctgcctgtacagcggctgccaggactcactgcgtgtctacggctgggaacctgagcggtgctttgatgtggtcctcgtcaactggggcaaggtggccgacctggccatctgcaatgaccagttgataggtgtggccttctcccagagcaacgtctcctcctacgtggtggatctgacgcgtgtcaccaggactggcacggtggcccgggaccctgtgcaggaccaccggcccctggcacagccactgcccaaccccagcgcccccctccggcgcatctatgagcggcccagcacaacctgcagcaagcctcagagggtgaagcagaactcagagagcgagcgccgcagccccagcagcgaggatgaccgggacgagcgcgagtcccgcgcggagatccagaacgccgaggactacaacgagatcttccagcccaagaacagcatcagtcggacgccaccccggagaagtgagcccttccctgcacccccagaggacgacgcagccacagcaaaggaggcagcaaagcccagccctgccatggatgtgcagttcccggtgccaaatctggaggtcctgccccggcccccagtggttgcttccacacctgcacccaaggctgagcctgccatcatccctgccacccggaacgagcccatcgggctgaaggcctccgacttcctgcccgccgtgaagatcccccagcaggccgagctggtggacgaggatgccatgtcacagatccgcaaaggccacgacaccatgtgtgtggtgctcaccagccgccacaagaacctggacactgtgcgggctgtgtggaccatgggcgacatcaagacgtcggtggactccgctgtggccatcaacgacctgtcggtggtggtggacctcctgaacatcgtcaaccagaaagcctccctgtggaagctggacctgtgcaccaccgtcctgccacagattgagaagcttctgcagagcaagtatgagagctacgtccagacgggctgcacctccctgaagctgatcctgcagcggtttctgcccctcatcacagacatgctggcggccccaccctctgtgggtgtggatatcagcagggaggagaggctgcataagtgccggctctgctacaagcagcttaagagcatcagcggcctggtcaagagcaagtcaggcctgagcggccgccatggcagtaccttccgcgagctgcacctgctcatggccagtctggactgaggaaagcagtgggcaggggcgctcggcagcccacagggcctggcctcagcccccactcctgttccttgtgcacccactggcccatgagcctctgcctggcccctgctgctgtcctgtggccgtcctggaggaggtgatgctggtccctggccacctctacagccctgaactcttgagacaactctctccagcaatagctgcccagctttgcccaactgttgcttcttggggcagcgaactgagccctggggctgctgctgtaatttataaggcaaattttattaaatttgtaactattacca

SEQ ID NO: 22222 - DNA, 2475 bp, Homo sapiens
gcagctgattggtgcgggaggcaaggtgggcggggctctgagccggaggtttgttgtgagggtcggttgtcaagcagcggccaatcaaggcaggggatggaggcaagtgggggtcgcgcctggagcggagcctcggcctccggagccgcagctgcagccctgtattgagctgagatggctcgagcctaacattccatgatccaggatcgtgacagatgtgcacaggctgctgctgttgctgctgtaagagatcgtcgcgcatgccagcaacgtgtcctcactggtgctgggcaaagcctccgggcggctgctggctacaggcggggatgactgccgcgtcaacctgtggtccatcaacaagcccaactgcatcatgagcctgacgggccacacatccccagtggagagcgtccgcctcaacacccccgaggagctcatcgtggccggctctcagtcgggctccatccgtgtctgggacctggaagctgccaaaattcttcgcacactcatgggacacaaagccaacatctgcagcctggatttccacccgtacggcgagtttgtagcctctggttcccaggacacaaacatcaagctctgggacatcaggaggaaaggctgtgtcttccgatacagggggcacagccaggccgtgcggtgtctccggttcagccccgatgggaagtggttggcgtcggccgcagatgaccacaccgtgaagctctgggatctcactgccggcaagatgatgtctgagttccctggtcacacggggcctgtcaacgtggtcgagtttcaccccaacgagtacctcctggcctccggcagctctgacaggacaatccgcttctgggacctggagaagttccaggtggtgagctgcatcgaaggggagcctgggcccgtcaggagcgtcctcttcaacccagacggctgctgcctgtacagcggctgccaggactcactgcgtgtctacggctgggaacctgagcggtgctttgatgtggtcctcgtcaactggggcaaggtggccgacctggccatctgcaatgaccagttgataggtgtggccttctcccagagcaacgtctcctcctacgtggtggatctgacgcgtgtcaccaggactggcacggtggcccgggaccctgtgcaggaccaccggcccctggcacagccactgcccaaccccagcgcccccctccggcgcatctatgagcggcccagcacaacctgcagcaagcctcagagggtgaagcagaactcagagagcgagcgccgcagccccagcagcgaggatgaccgggacgagcgcgagtcccgcgcggagatccagaacgccgaggactacaacgagatcttccagcccaagaacagcatcagtcggacgccaccccggagaagtgagcccttccctgcacccccagaggacgacgcagccacagcaaaggaggcagcaaagcccagccctgccatggatgtgcagttcccggtgccaaatctggaggtcctgccccggcccccagtggttgcttccacacctgcacccaaggctgagcctgccatcatccctgccacccggaacgagcccatcgggctgaaggcctccgacttcctgcccgccgtgaagatcccccagcaggccgagctggtggacgaggatgccatgtcacagatccgcaaaggccacgacaccatgtgtgtggtgctcaccagccgccacaagaacctggacactgtgcgggctgtgtggaccatgggcgacatcaagacgtcggtggactccgctgtggccatcaacgacctgtcggtggtggtggacctcctgaacatcgtcaaccagaaagcctccctgtggaagctggacctgtgcaccaccgtcctgccacagattgagaagcttctgcagagcaagtatgagagctacgtccagacgggctgcacctccctgaagctgatcctgcagcggtttctgcccctcatcacagacatgctggcggccccaccctctgtgggtgtggatatcagcagggaggagaggctgcataagtgccggctctgctacaagcagcttaagagcatcagcggcctggtcaagagcaagtcaggcctgagcggccgccatggcagtaccttccgcgagctgcacctgctcatggccagtctggactgaggaaagcagtgggcaggggcgctcggcagcccacagggcctggcctcagcccccactcctgttccttgtgcacccactggcccatgagcctctgcctggcccctgctgctgtcctgtggccgtcctggaggaggtgatgctggtccctggccacctctacagccctgaactcttgagacaactctctccagcaatagctgcccagctttgcccaactgttgcttcttggggcagcgaactgagccctggggctgctgctgtaatttataaggcaaattttattaaatttgtaactattacca

SEQ ID NO: 22223 - DNA, 2262 bp, Homo sapiens
gcagctgattggtgcgggaggcaaggtgggcggggctctgagccggaggtttgttgtgagggtcggttgtcaagcagcggccaatcaaggcaggggatggaggcaagtgggggatgactgccgcgtcaacctgtggtccatcaacaagcccaactgcatcatgagcctgacgggccacacatccccagtggagagcgtccgcctcaacacccccgaggagctcatcgtggccggctctcagtcgggctccatccgtgtctgggacctggaagctgccaaaattcttcgcacactcatgggacacaaagccaacatctgcagcctggatttccacccgtacggcgagtttgtagcctctggttcccaggacacaaacatcaagctctgggacatcaggaggaaaggctgtgtcttccgatacagggggcacagccaggccgtgcggtgtctccggttcagccccgatgggaagtggttggcgtcggccgcagatgaccacaccgtgaagctctgggatctcactgccggcaagatgatgtctgagttccctggtcacacggggcctgtcaacgtggtcgagtttcaccccaacgagtacctcctggcctccggcagctctgacaggacaatccgcttctgggacctggagaagttccaggtggtgagctgcatcgaaggggagcctgggcccgtcaggagcgtcctcttcaacccagacggctgctgcctgtacagcggctgccaggactcactgcgtgtctacggctgggaacctgagcggtgctttgatgtggtcctcgtcaactggggcaaggtggccgacctggccatctgcaatgaccagttgataggtgtggccttctcccagagcaacgtctcctcctacgtggtggatctgacgcgtgtcaccaggactggcacggtggcccgggaccctgtgcaggaccaccggcccctggcacagccactgcccaaccccagcgcccccctccggcgcatctatgagcggcccagcacaacctgcagcaagcctcagagggtgaagcagaactcagagagcgagcgccgcagccccagcagcgaggatgaccgggacgagcgcgagtcccgcgcggagatccagaacgccgaggactacaacgagatcttccagcccaagaacagcatcagtcggacgccaccccggagaagtgagcccttccctgcacccccagaggacgacgcagccacagcaaaggaggcagcaaagcccagccctgccatggatgtgcagttcccggtgccaaatctggaggtcctgccccggcccccagtggttgcttccacacctgcacccaaggctgagcctgccatcatccctgccacccggaacgagcccatcgggctgaaggcctccgacttcctgcccgccgtgaagatcccccagcaggccgagctggtggacgaggatgccatgtcacagatccgcaaaggccacgacaccatgtgtgtggtgctcaccagccgccacaagaacctggacactgtgcgggctgtgtggaccatgggcgacatcaagacgtcggtggactccgctgtggccatcaacgacctgtcggtggtggtggacctcctgaacatcgtcaaccagaaagcctccctgtggaagctggacctgtgcaccaccgtcctgccacagattgagaagcttctgcagagcaagtatgagagctacgtccagacgggctgcacctccctgaagctgatcctgcagcggtttctgcccctcatcacagacatgctggcggccccaccctctgtgggtgtggatatcagcagggaggagaggctgcataagtgccggctctgctacaagcagcttaagagcatcagcggcctggtcaagagcaagtcaggcctgagcggccgccatggcagtaccttccgcgagctgcacctgctcatggccagtctggactgaggaaagcagtgggcaggggcgctcggcagcccacagggcctggcctcagcccccactcctgttccttgtgcacccactggcccatgagcctctgcctggcccctgctgctgtcctgtggccgtcctggaggaggtgatgctggtccctggccacctctacagccctgaactcttgagacaactctctccagcaatagctgcccagctttgcccaactgttgcttcttggggcagcgaactgagccctggggctgctgctgtaatttataaggcaaattttattaaatttgtaactattacca

SEQ ID NO: 22224 - DNA, 648 bp, Homo sapiens
agatgtgatctgctccattattttccataaacgttttgattataaagatcagcaatttcttaacttaatggaaaagttgaatggcaagtatgagagctacgtccagacgggctgcacctccctgaagctgatcctgcagcggtttctgcccctcatcacagacatgctggcggccccaccctctgtgggtgtggatatcagcagggaggagaggctgcataagtgccggctctgctacaagcagcttaagagcatcagcggcctggtcaagagcaagtcaggcctgagcggccgccatggcagtaccttccgcgagctgcacctgctcatggccagtctggactgaggaaagcagtgggcaggggcgctcggcagcccacagggcctggcctcagcccccactcctgttccttgtgcacccactggcccatgagcctctgcctggcccctgctgctgtcctgtggccgtcctggaggaggtgatgctggtccctggccacctctacagccctgaactcttgagacaactctctccagcaatagctgcccagctttgcccaactgttgcttcttggggcagcgaactgagccctggggctgctgctgtaatttataaggcaaattttattaaatttgtaactattacca

SEQ ID NO: 22225 - DNA, 450 bp, Homo sapiens
gcggccgccatggcagtaccttccgcgagctgcacctgctcatggccagtctggactgaggaaagcagtgggcaggggcgctcggcagcccacagggcctggcctcagcccccactcctgttccttgtgcacccactggcccatgagcctctgcctggcccctgctgctgtcctgtggccgtcctggaggaggtgatgctggtccctggccacctctacagccctgaactcttgagacaactctctccagcaatagctgcccagctttgcccaactgttgcttcttggggcagcgaactgagccctggggctgctgctgtaatttataaggcaaattttattaaatttgtaactattaccaggtttccttgtggggaatgttttctgctggccacagggctccccgggcccaggagtgcctgccccatggtttgagatgaggccacaccc

SEQ ID NO: 22226 - DNA, 1194 bp, Homo sapiens
cctagaggatcccatctcaggccgggacgagcgcgagtcccgcgcggagatccagaacgccgaggactacaacgagatcttccagcccaagaacagcatcagtcggacgccaccccggagaagtgagcccttccctgcacccccagaggacgacgcagccacagcaaaggaggcagcaaagcccagccctgccatggatgtgcagttcccggtgccaaatctggaggtcctgccccggcccccagtggttgcttccacacctgcacccaaggctgagcctgccatcatccctgccacccggaacgagcccatcgggctgaaggcctccgacttcctgcccgccgtgaagatcccccagcaggccgagctggtggacgaggatgccatgtcacagatccgcaaaggccacgacaccatgtgtgtggtgctcaccagccgccacaagaacctggacactgtgcgggctgtgtggaccatgggcgacatcaagacgtcggtggactccgctgtggccatcaacgacctgtcggtggtggtggacctcctgaacatcgtcaaccagaaagcctccctgtggaagctggacctgtgcaccaccgtcctgccacagattgagaagcttctgcagagcaagtatgagagctacgtccagacgggctgcacctccctgaagctgatcctgcagcggtttctgcccctcatcacagacatgctggcggccccaccctctgtgggtgtggatatcagcagggaggagaggctgcataagtgccggctctgctacaagcagcttaagagcatcagcggcctggtcaagagcaagtcaggcctgagcggccgccatggcagtaccttccgcgagctgcacctgctcatggccagtctggactgaggaaagcagtgggcaggggcgctcggcagcccacagggcctggcctcagcccccactcctgttccttgtgcacccactggcccatgagcctctgcctggcccctgctgctgtcctgtggccgtcctggaggaggtgatgctggtccctggccacctctacagccctgaactcttgagacaactctctccagcaatagctgcccagctttgcccaactgttgcttcttggggcagcgaactgagccctggggctgctgctgtaatttataaggcaaattttattaaatttgtaactattacca

SEQ ID NO: 22227 - DNA, 619 bp, Homo sapiens
gcagctgattggtgcgggaggcaaggtgggcggggctctgagccggaggtttgttgtgagggtcggttgtcaagcagcggccaatcaaggcaggggatggaggcaagtgggggtcgcgcctggagcggagcctcggcctccggagccgcagctgcagccctgtattgagctgagatggctcgagcctaacattccatgatccaggatcgtgacagatgtgcacaggctgctgctgttgctgctgtgggtaatttggaaccacgaggcaccccagggccagaagacgaggcattctgtctgcctggatgtgtgggaactctctgccaacttgattggtggatctggggggggatccacccccaccccacgaggaaagcacagtttattttgtgggtggggcttcaggtgccagccagctgaaggatggccacccctgtggtcaccaagacagcctggaagttgcaagagatcgtcgcgcatgccagcaacgtgtcctcactggtgctgggcaaagcctccgggcggctgctggctacaggcggggatgactgccgcgtcaacctgtggtccatcaacaagcccaactgcatcatgtcgagattcgggatcctctataatc

SEQ ID NO: 22228 - DNA, 3035 bp, Homo sapiens
ctttctcttttaaaaaaagtcaactagaattgagaagaggtgattttttttcagatcgcttctcgagtttaatattttcacattcttttcaccctttttctcaatctagatttaaaattaggatatatgtcatttccttgtctgtatttgtagctccttagttaccagtatgcctctccattttctacaaataagaggttataacacatatacataattctaaccttaagggaacacacgtttacatactttacttcccaagcccttcctgtttggggtacagattgagagagtcatgaatcaacacatctagcaagaccacaggtgtaagagtctaagatcgtcttcaaaattctgaagtcccagtctttacctgtccagtgaatgaatattcagagcagcttttcctgggcttcccagtggtgatagctgaggtcaaaccacaaaaaataagaaagcaagagtgaaatgcacccctccagagaaacactttgtagtgtttaattctgttaatagagaagagctgcttctgtttgcgctcacttcatcagtggcacccttctgcagaattttaatataaaaacattatggatataatagaactggattttctgacttaaaaatgtaagttttattttaatcttgaaacgtggattgtttctgtggagctcttaaacatgagaagaatacttacggttgataatgtgtaacatgatctgaaatgtgactcatttgagcctctttgtcccatcgtcctgtttttgaattattgacattgtcagtctctttgcttcctgggtgagacttggggtttgagggacagggaatgaccttcttggtgaaacttaaaatataacattgcaattgcagtgactttacagtgttaaattagagaaaatagtctgattttttaaaccttccttaactggaaaaaagtcacatggttttaccaggattgaaataaacagtcaatgtgacttttaacatgtgtttttttgaaataaaggacacgtactcttcaattaaaaagttccttatagggactctggcaaatgctaacacagttgctttacaatgtttacaattcagacaatacgacttataatagaaaatcctcattcatttagcattgaaaagctggaagttgcttctttaatgttgaatagtatacagtggtattgagcatggactttctaaatgttttatatatacatataaaaatatattggtgtctcacacccagaaagatgttatattgtagatattattaggaaaacagtgtttctcaggaacgttgtaaattttaaatgatatatgtacttcccgtcctcccacctccactctgtgctctaatgtgagactgcttcagcagtgttgctaagttaatggaaaactttttctaatcaagtcaggtgaatgtgtattctgctaaataatgttagccatttacatgaattgtatggtcattaaatggaatcagtgattcctctttaatttccagaggggaaatgaattatggaaatcagtcagcattctgatcattaaattttatactttaattttgccgttcagcattctaaatatccaatgtgaaagtcacatgataatttgttttgcattgcgtgcactgtacaacacttacaacttgtcatttaaaatgttttctcgggaaatgaatgctagtcagaaagtaatagattgtattattcatagttttaaaattatgacaatgtcataattactacaaagctaaataatcgtgtttatttttgtgcagttgccctttgatagttcctggttttaaaacctattaagtgtataatcttacaaatagtcatctacaaaatttatggagaaagtgcccagcccattcacatcacatggaccaggaattcttttgtaaatgacttaaggtaacatcatgcagttcagtgcctaataaatgctttttaatgatgaacatttctataatgactcgtaagataccatagtctgatttttctcacattaaaataactgaagtcacttgtgtaacgtagttatactttgctgcattttaattaaccttcaacagctattaaagtggaatgtaagttaaattttgaaggaaaggaaataaatgttttccatatttcgtcttgatttactttctgtatgagaacagctgtgtttttgataggtttatggtttgcatgagttcatatttaaagtgatccaggccaatgcatggctattgctgtaaatcttgatgtttatttctgccttgtaaagttctatcacggcctacctggaatttaaaattcagtagacaaattaattggtcctctgcacaacttttttaataagtagattattttacaaagaaatttgaacaaatttaattgaatcttttgtttagcttgcctctaagaacttttcttaataaagctcccaaaacttctcagcaaataaatctcccttaagtaggaaaactagatttcatatttgcttactttgaattaacagcaactttccacaggtaaatctgttcttgcaaagatgtgagcagaatagttaaaaataatatttttatgtttcatggttctaaatggaagccataaatgcagtaaatactatctgttgtttaactactttaatcgtcattttttacattttcaagtttattaggttaagaaaaacagggcagccttggaaggcagctactacagaaaactgcagttttgcgttaaagataaagtagtattttcagctccctgaaaaaccattcctgctgaaactgctgtagaaattgtgaagctgcatgagtggagagtattgaatctgtggttatagtagttttctcaggtttgtttatcttgatgtttgatgcactgtgttttatagttattaaaattgagtaatattatttctatgcagtgttatgtgtcattggccttttgtgaatgtgcatgttttaaactgcaaattttaaacattttgtcctctaattgttattaaaaatgaaataaactttaccattacttaaaaaaaaaaaa

SEQ ID NO: 22229 - DNA, 2980 bp, Homo sapiens
ctttctcttttaaaaaaagtcaactagaattgagaagaggtgattttttttcagatcgcttctcgagtttaatattttcacattcttttcaccctttttctcaatctagatttaaaattaggatatatgtcatttccttgtctgtatttgtagctccttagttaccagtatgcctctccattttctacaaataagaggttataacacatatacataattctaaccttaagggaacacacgtttacatactttacttcccaagcccttcctgtttggggtacagattgagagagtcatgaatcaacacatctagcaagaccacaggtgtaagagtctaagatcgtcttcaaaattctgaagtcccagtctttacctgtccagtgaatgaatattcagagcagcttttcctgggcttcccagtggtgatagctgaggtcaaaccacaaaaaataagaaagcaagagtgaaatgcacccctccagagaaacactttgtagtgtttaattctgttaatagagaagagctgcttctgtttgcgctcacttcatcagtggcacccttctgcagaattttaatataaaaacattatggatataatagaactggattttctgacttaaaaatgtaagttttattttaatcttgaaacgtggattgtttctgtggagctcttaaacatgagaagaatacttacggttgataatgtgtaacatgatctgaaatgtgactcatttgagcctctttgtcccatcgtcctgtttttgaattattgacattgtcagtctctttgcttcctgggtgagacttggggtttgagggacagggaatgaccttcttggtgaaacttaaaatataacattgcaattgcagtgactttacagtgttaaattagagaaaatagtctgattttttaaaccttccttaactggaaaaaagtcacatggttttaccaggattgaaataaacagtcaatgtgacttttaacatgtgtttttttgaaataaaggacacgtactcttcaattaaaaagttccttatagggactctggcaaatgctaacacagttgctttacaatgtttacaattcagacaatacgacttataatagaaaatcctcattcatttagcattgaaaagctggaagttgcttctttaatgttgaatagtatacagtggtattgagcatggactttctaaatgttttatatatacatataaaaatatattggtgtctcacacccagaaagatgttatattgtagatattattaggaaaacagtgtttctcaggaacgttgtaaattttaaatgatatatgtacttcccgtcctcccacctccactctgtgctctaatgtgagactgcttcagcagtgttgctaagttaatggaaaactttttctaatcaagtcaggtgaatgtgtattctgctaaataatgttagccatttacatgaattgtatggtcattaaatggaatcagtgattcctctttaatttccagaggggaaatgaattatggaaatcagtcagcattctgatcattaaattttatactttaattttgccgttcagcattctaaatatccaatgtgaaagtcacatgataatttgttttgcattgcgtgcactgtacaacacttacaacttgtcatttaaaatgttttctcgggaaatgaatgctagtcagaaagtaatagattgtattattcatagttttaaaattatgacaatgtcataattactacaaagctaaataatcgtgtttatttttgtgcagttgccctttgatagttcctggttttaaaacctattaagtgtataatcttacaaatagtcatctacaaaatttatggagaaagtgcccagcccattcacatcacatggaccaggaattcttttgtaaatgacttaaggtaacatcatgcagttcagtgcctaataaatgctttttaatgatgaacatttctataatgactcgtaagataccatagtctgatttttctcacattaaaataactgaagtcacttgtgtaacgtagttatactttgctgcattttaattaaccttcaacagctattaaagtggaatgtaagttaaattttgaaggaaaggaaataaatgttttccatatttcgtcttgatttactttctgtatgagaacagctgtgtttttgataggtttatggtttgcatgagttcatatttaaagtgatccaggccaatgcatggctattgctgtaaatcttgatgtttatttctgccttgtaaagttctatcacggcctacctggaatttaaaattcagtagacaaattaattggtcctctgcacaacttttttaataagtagattattttacaaagaaatttgaacaaatttaattgaatcttttgtttagcttgcctctaagaacttttcttaataaagctcccaaaacttctcagcaaataaatctcccttaagtaggaaaactagatttcatatttgcttactttgaattaacagcaactttccacaggtaaatctgttcttgcaaagatgtgagcagaatagttaaaaataatatttttatgtttcatggttctaaatggaagccataaatgcagtaaatactatctgttgtttaactactttaatcgtcattttttacattttcaagtttattaggttaagaaaaacagggcagccttggaaggcagctactacagaaaactgcagttttgcgttaaagataaagtagtattttcagctccctgaaaaaccattcctgctgaaactgctgtagaaattgtgaagctgcatgagtggagagtattgaatctgtggttatagtagttttctcaggtttgtttatcttgatgtttgatgcactgtgttttatagttatttgtgcatgttttaaactgcaaattttaaacattttgtcctctaattgttattaaaaatgaaataaactttaccattacttaaaaaaaaaaaa

SEQ ID NO: 22230 - DNA, 801 bp, Homo sapiens
cagatattttctatgtgatttagagagtaggagtttagtgtgtagagtttaataagatgaaagtgttcttggggtcttgtgagactaatagaacaagagttactactggttccactgtggaaaaatttataggaactgtagtctttataataatccctttaaggacaaaattcgtttattgcctgtcttctcacacttcggagcaaaacttaactgaatgaaccttgaagattgagttaatcatttctagaaaagaattaaattaggaagaaaacctgctaaaacttttgtctgtcagtcagcatttatttggctctcctgtgggtagatttgtaatggagaaacaggagcactagaaaccttgcctcattcttgtttcagagaaaacctaaaatcccagctgggatccaaacctgtatgcacacaaatatcagcaaatcttaatgctctagagtacagacttcctgacttcaaagttgattcatcatagcaaaattaaaactataacttggcaaaaaagtgatcgacattctaaagatttgaaagcattggctgggtgcagtggctcatgcctgtgatgccagcactttgagaggctgagacgggaggatcacttgagcccaggagttcaagaacagcctggggaatgtggggaaacctcatctctacaaaaaaaatacaaaaaattaggtgggtttggtggtgagagcctgtagttccagctactcaggaggctaaggcgggaggatcacttgagcctggggaggtcaaggcctgcatgacagagcaagaccctgtctc

SEQ ID NO: 22231 - DNA, 416 bp, Homo sapiens
aaacgtctcaaatgcataattttattattttatttgttgtctccagattggtctgaggactccgctttcttcactgcccattcatcttcatactgttctcatatttttttttaaattgggatatgcaatgatccttagtttataaattcaactccactttgccacacacagtgttacgcttggggaaacaattagaacttgcccttcttggccaggcgcggtggctcccgcctgtgatcccagcactttgggaggccaaggtgggcagatcacgaggtcaagagatggagaccatcctggccaacatggtgaaaccccgtctctactaaaaatacaaaaattagctgggcatggtggcgcgcgcctgtagtcccagctatttgggaggctgaggcaggagaatcgcttgaacccgg

SEQ ID NO: 22232 - DNA, 907 bp, Homo sapiens
gtggtatttgttatggcccctgtacactcccttccctccctctcccaagtccagtccgcagctcgctcatcaccaggctcctttccatgactctttcttgatcaggcctttttatcgtcctcaccacaggttagagcacagcagagtaatccctccccggaaagagaagatcacagattttgtcatattaaatacattgtagaaattcatggtagcaggggcaagatcatttaaacaaaacagaaagtttcagagagagaaaaagccaaggacaaagattaatcatttttctgcttaaaaaaaatggctttgatttgcaaccatggaatgctccactgtttctcttctcttcaaagacatctactgaaaggattccttaaccttaccaagtggccaaaatacttttctgagaagagtcacagagcataggcccccctagggtacacagagatttcattagtccctagatgtttcctgatccttttaaaaactggttaaattcagagactctaggcaattacttctttcagaacctgtgaggcaaaaacgaaagaagaaggcaggacacgcagtgtaacaaaccttggaatggtaagtaggaaatatgagttagttttttggctaagctatgaatttaccttgtgcctgccagaaatcactcagtcttttgtgactgtaaattttctgtaagtgttaattggtttggtttattattgcaagaagcaagggagcaatgttgtgtattataatttcattgtgtcaattttgccaaattatcttgcattttgttattctatgaactcataatgggataaggagtataggctttgattcagaacatatgtgatgttgctataaatgcttcatggaaaaccctaaatatattttgaagcctacatagtcaaaa

SEQ ID NO: 22233 - DNA, 961 bp, Homo sapiens
gtggtatttgttatggcccctgtacactcccttccctccctctcccaagtccagtccgcagctcgctcatcaccaggctcctttccatgactctttcttgatcaggcctttttatcgtcctcaccacaggttagagcacagcagagtaatccctccccggaaagagaagatcacagattttgtcatattaaatacattgtagaaattcatggtagcaggggcaagatcatttaaacaaaacagaaagtttcagagagagaaaaagccaaggacaaagattaatcatttttctgcttaaaaaaaatggctttgatttgcaaccatggaatgctccactgtttctcttctcttcaaagacatctactgaaaggattccttaaccttaccaagtggccaaaatacttttctgagaagagtcacagagcataggcccccctagggtacacagagatttcattagtccctagatgtttcctgatccttttaaaaactggttaaattcagagactctaggcaattacttctttcagaacctgtgaggcaaaaacgaaagaagaaggcaggacacgcagtgtaacaaaccttggaatgattggtctgaggactccgctttcttcactgcccattcatcttcatactgttctcatatttttttttaaattgggatatgcaatgatccttagtttataaattcaactccactttgccacacacagtgttacgcttggggaaacaattagaacttgcccttcttggccaggcgcggtggctcccgcctgtgatcccagcactttgggaggccaaggtgggcagatcacgaggtcaagagatggagaccatcctggccaacatggtgaaaccccgtctctactaaaaatacaaaaattagctgggcatggtggcgcgcgcctgtagtcccagctatttgggaggctgaggcaggagaatcgcttgaacccgg

SEQ ID NO: 22234 - DNA, 886 bp, Homo sapiens
gtggtatttgttatggcccctgtacactcccttccctccctctcccaagtccagtccgcagctcgctcatcaccaggctcctttccatgactctttcttgatcaggcctttttatcgtcctcaccacaggttagagcacagcagagtaatccctccccggaaagagaagatcacagattttgtcatattaaatacattgtagaaattcatggtagcaggggcaagatcatttaaacaaaacagaaagtttcagagagagaaaaagccaaggacaaagattaatcatttttctgcttaaaaaaaatggctttgatttgcaaccatggaatgctccactgtttctcttctcttcaaagacatctactgaaaggattccttaaccttaccaagtggccaaaatacttttctgagaagagtcacagagcataggcccccctagggtacacagagatttcattagtccctagatgtttcctgatccttttaaaaactggttaaattcagagactctaggcaattacttctttcagaacctgtgaggcaaaaacgaaagaagaaggcaggacacgcagtgtaacaaaccttggaatggacttcgccagacttcatcagaagaaagcagtgcaagaggggactgcagaggaaagctggggcttgggaaaccagcagcaggggccacgtgggcaggtggtttctgtgtgaacctctgatctgtgcaacataaacaggaaatgttgaaggcttccagtgctcttttttgatgtcgagaacattctacggcacaaaagagtttgcctctcactgtttctcatatatggaggttctctaatcagcatcctgaacagatttgatttagactaaaaacccaagtaaaactagctttatc

SEQ ID NO: 22235 - DNA, 558 bp, Homo sapiens
gcagctagtgagtagaaccaacagggtgcccatttttgatggtgttgtctgtctttcacattttcccagtggtcagggagagagtccagatgggacaggatgtgtcctggtaggtaagggcacccccaggtgtacctgccaatccagctgtaaggtaagtaagaccagctatgactgcctcacacccatagctaactccaggagaaaggataggccccatcatgtagcttgatactattttgccatcctagccacatattattattcagttgatgggtttggccacattactaagaggtaaccatcccttagcctggctgctagtgtggggtgtgttgctcttgtgtttttggatgcgtagaggtgcctgacccattgcctgaatttgcaccatcatcagccatcctatgttgtcatgtacagcatagtctatagagggggtgatattaacctgcttacaagccacatggaagaaatgtttccaggtttctccaaaagtggagcactcatggtgagtggtactgtaatcatagatgggaaatgggtgagaatttttac

SEQ ID NO: 22236 - DNA, 576 bp, Homo sapiens
aataggctgaatagataaatatatatgtgaatgcacaaagactggaaatgtacatcagatgttatttaaatatattttaagttacaaaatatccccttgcttaaacctgtcgacttcagattcagaagagtcataccgtgatgagatttactgagcagctatcagcctagcccttccagcacagccctatttgttgactcactccctaggaaggatcagaaacaaagttactgaagtgtagccaagaatttagttattaagaatatttattctggctgggttcagtgactcatgtctataatcccagcactttgggaggccgaggttggagaatcacttgagctcaggatttcaagaactgagcaacaggagttcaccctgggcaacatagtaaggcctgttctccactaaaaattaaaaaaaaaaaaaaagttaggtgtggtggtgtgtgcctgtagtcacagttacttgggaggctgaggcaggaggatcacttgagcctgggaggtcaagactacagtgagctatgattgccctactattctccagcctgggtaacagtgagaccctgtctca

SEQ ID NO: 22237 - DNA, 276 bp, Homo sapiens
ttttttttttaaagaaggagctatttcagctcacgatctaaaattatatagatgaagacaacactgaagaagaaaaatggcatgatgattaggatacatctagaggcaaggaaacacaacaaaacgggaaaactattaaagggaaaggaagaagagaataatcatgaacaaagaaaattgaaaatatattaaggatattctgagacacagacgtatgcacacatacatgtatgtgcacacatacacacatacacacacaaaatgaagagaagggag

SEQ ID NO: 22238 - DNA, 268 bp, Homo sapiens
gctggtctcgaactcctaacctcatgatccaccaacctcggcctcccaaagtgctgggattacaggcgtgagctactgcatccagcctgttttgttttttgagacagtctcactctgttgcccaggctgattgcagtggtgcaatcgctgctcactgtagcctcgacctccctagactcagctgatccttgcacttcagcctctagaggagttgggaccacaggcgtgctctagcatgcccggctaatttttgttttttgtttttttt

SEQ ID NO: 22239 - DNA, 415 bp, Homo sapiens
tcaagtgaatatgatgattgtacatgtaattgggaaatatggcctagtgtgcatagagtgctttatagctcagtgcccagcacaggtgaaacactgaaatgtttggtaatggtcagctgtcataataatagttttttgtttctttgcttttatcttttgtttttttgagcctgggcaacagagtgagaggctatctcaaaaaaaaaaaaaaaaaaaaagcaaggacaccatggaccagagaggtgaagtaacctgctcaaagtcacactacttggaagaagtgggaagggtgggcacagttgctcatgcctataatcccagtactttggaagaccaaggtaggaggatgaggccaggagtttgaaaccaccctgggcaatgtagtgagactccatctctccaaaaatttacaaga

SEQ ID NO: 22240 - DNA, 583 bp, Homo sapiens
ccaggctggtctcagactcctgggctcaagcaatcctcctgcctcagctcctaaagtattttattactgttaacaagtaagggctgggtgcggtggctcatgtctttaatcctagcactttgggaggccaaggaaggtggatcacctgaggtcaggagttccagaccagcctggccaacatagtggaaccccacctctactaaaattacaaaaaattagccaggtgtggtggcgggtgcctgtaatcccaggcaacttgggagactaaggcagaagaattgcttgaacctgggaggctgaggttgcagtgagccaagatcatgccactgcactccagcctgggcaacagagtgagaggctatctcaaaaaaaaaaaaaaaaaaaaagcaaggacaccatggaccagagaggtgaagtaacctgctcaaagtcacactacttggaagaagtgggaagggtgggcacagttgctcatgcctataatcccagtactttggaagaccaaggtaggaggatgaggccaggagtttgaaaccaccctgggcaatgtagtgagactccatctctccaaaaatttacaaga

SEQ ID NO: 22241 - DNA, 245 bp, Homo sapiens
aacccaggagacagaggttgcattgagctgagatcatgcaactgcactccagcctgggcgacagaatgagactgcatctcaaaaaaaaaaaaaaaaaaaatccatgtactccaaagggactctccaaggctctcatcaaaatacttttcattcttgttctaatataattttaatactcttggctgaggccggtggatcacttgagcccaggagttccagactagcctgggcaaatggcaaaaccc

SEQ ID NO: 22242 - DNA, 211 bp, Homo sapiens
tccagttcagcaagaagatattacaattgtaaatatatacgtacccaacttcagagcagctacatatgtaaagtaaatattgatagcagtaaagatcagagaaaaagataaaatagagattaaaaaatagaaaagattaatgaaacaaagagttggctttttgaggaggtcaactaaattgacaaatctttaactacactaaaaaaaaaaa

SEQ ID NO: 22243 - DNA, 333 bp, Homo sapiens
gctcagatgcttgaccctctctccctcttcatggaatagtaggacttagggtcagctacagagccagcccagatacaagaggataggaaataaaggatacctctcaatggaggagtgacaaataatttgcttccatcttacatctactacagatcataatggttttaatgtgacttaaaagtattttttgaagtgtgtcatatgccctttaactttcatatggattcgatgtgtagatgattttaaattatacacagtaaaatttgtcagtcacttctgagattatcccaacttctcgcccatatacaaaattttcttcttaaatgaaaagca

SEQ ID NO: 22244 - DNA, 1273 bp, Homo sapiens
ggcttctctgtgtcttaacagctgccccttgcctggcttttcagcttcttaccccatgctaagaattggcatataccctaaataggaaaatgggcttgcagaaagtcaggctcacctcagtgagcctcccctctctccaagatctggttcctcaaatcgtggctgattagtagctttcctattacttcacacagatgtttaaaaattttatctggcttttctaatttccctcatcagaaccagtctgctacaacctactctattaaagctggaagttaaacacgtctgtttttttttgtttgttttaagtggattatgttaaaaaataaaaatcacaggccaaaaaccaaggtaacaatgtcattttaaacatgtaaatttaataaaggatatatgttgatttttagttactctttcttgccttattaaaagcttgtcagtaccttttttcatatgtactctgaaattcttacaaatatatgttgctttgttccagagaatatgtgtactaaaagactataatttttctgagtctggttctccattcaaatgttttaatacttttgtgattttatgatttgtaattgtcgactctcacctcccaattcaacatgatcctaaaatgtacaaaataatttgaatgattgagtttcaaaaagttttagaaaacttgatcttgtaacttttattccaaagctttgttgagggggagaagtacaggcttctgcctttaagggtactgcttcacttttggggcaaaaaagcaagggttttcaaagggggacttgacatgaatggcatgcaggggagggggtgagccagtgggggtctcaatgacttgctttggtgctttatctaccaggtggttgagctggtgccctcgcgggcagaactaggtggtaaggtggccagagtcttgagatactctccaagtgggagtgagtttcatcatgggcatactttaggttataatttgttatctctcgaggcagtctcctggtcgaagagacgtctggctctggagcttctaagtaagcaagagcttccaagtaagcacacagataagcttgccctacagggagtgtctggtgaaggaaaggtaaatgttataattgcatttctaaagagctaagtaggaagtggggaacaagggaaaaggaggaaacagaaaagaagaaaaaagtattttttaaaaaagtaattctttctcttagaaaaaggtgggtacttggttacagtctaaaccctttaccgtggctgagtaggtattttt

SEQ ID NO: 22245 - DNA, 289 bp, Homo sapiens
atctatctttattgctgagttttcctcattttttattctttattgtcctttttattcttttgtctttttctttaatctttatgtttttaaaattttagatgccaaagtgtttcataacacagcatccaacaacctccaaaccataagttgtaggcagaaggaaggaaaatgagaatgaagtagtttggtagctttattcttcagcatctgtttgagagtaatctctgaatctgtttgtttttatcacaagctatgcgcacatttttatttgtgcattacttctttcata

SEQ ID NO: 22246 - DNA, 402 bp, Homo sapiens
aattttgcaataactaaaatattgcacctataaaaagggaagctttgtcccttccacagggctcttcgaatgtggtgatgccatgtggaagctggggcttttggaagttggttatgattgagtggtgagatctcttcactctccctctcactacttcttcattctagaaagagtagtaaatacttatttttctaactgactaaagactcttatatttatttgttctattgatggtagaccttgcgtgatgctttcctatatctctattgaaatcttctgaaagtgacagaatgttcccattaaaaacaatttactgccactttgcttcaagacactggaccaaactataattaatagtgagttagagagaatggagttagtaggtactggtgactagaggtg

SEQ ID NO: 22247 - DNA, 212 bp, Homo sapiens
tctggttatggaaatagttggttctaattttaaccaacacctactactgtttcagcacattcctctaggttcaaggaaatgatgactttccagtcagggtctacagtgacacagacatgaacttggaaatttaagcttccaattttcagccactccaccatgtttctgtttgcgtgtgtgtttttttaaagagtcaaaataccatgaaaaac

SEQ ID NO: 22248 - DNA, 3935 bp, Homo sapiens
caggctcagaggctgaagcaggaggaaggaaggactggaaggaaaaagagacaggttagagggaaagaggcttgggaagaaaacagcagaaaagaaactgctcattacacttacagagaggcaagtaacggtggagatgaggacagagggaaccaagactctgaaagacaaaaaatacaaatagagcgaaagaggaaaaaaatgtcaagaagaacatccatccggagaaatgaagagaatgaaagttttaaactgcagagccgttctgtgcttttccggcacaaaattatatcgctgattttaagcccttttgcatttgccagccgttgacattaagaggcatgtttaacggtgccaacagcatctccttttccttctcctcttcctcttcttcttcttcctcctcctcctcctctttttcctcctcctcgttctcctcccatcagcaagaagacaaaccgaggacagtcttgaaatatcgaaatttcctctttgggatttgccagcgccaagactgtcggaataaaggacgctgactattgtattattgttattttattaattagtcagtggaaagattacagatgaggaaaggggacgcctgtcacccttcctgtgctaagatttaaaaaaaaatgaggctggattgcgggaagctctaaaatgaagcaaaaggagtaagatttttaaagacagaaagccacaggagcccccacgtagcgcacttttatttgtattttttcagatttttttttgtttcgtggtggtgggggaggtgattgggtggctgactggctgcgggaagctacttcctttccttttggagatgattgtgctattattgtttgccttgctctggatggtggaaggagtcttttcccagcttcactacacggtacaggaggagcaggaacatggcactttcgtggggaatatcgctgaagatctgggtctggacattacaaaactttcggctcgcgggtttcagacggtgcccaactcaaggaccccttacttagacctcaacctggagacaggggtgctgtacgtgaacgagaaaatagaccgcgaacaaatctgcaaacagagcccctcctgtgtcctgcacctggaggtctttctggagaaccccctggagctgttccaggtggagatcgaggtgctggacattaatgacaaccccccctctttcccggagccagacctgacggtggaaatctctgagagcgccacgccaggcactcgcttccccttggagagcgcattcgacccagacgtgggcaccaactccttgcgcgactacgagatcacccccaacagctacttctccctggacgtgcagacccagggggatggcaaccgattcgctgagctggtgctggagaagccactggaccgagagcagcaagcggtgcaccgctacgtgctgaccgcggtggacggaggaggtgggggaggagtaggagaaggagggggaggtggcgggggagcaggcctgcccccccagcagcagcgcaccggcacggccctactcaccatccgagtgctggactccaatgacaatgtgcccgctttcgaccaacccgtctacactgtgtccctaccagagaactctcccccaggcactctcgtgatccagctcaacgccaccgacccggacgagggccagaacggtgaggtcgtgtactccttcagcagccacatttcgccccgggcgcgggagcttttcggactctcgccgcgcactggcagactggaggtaagcggcgagttggactatgaagagagcccagtgtaccaagtgtacgtgcaagccaaggacctgggccccaacgccgtgcctgcgcactgcaaggtgctagtgcgagtactggatgctaatgacaacgcgccagagatcagcttcagcaccgtgaaggaagcggtgagtgagggcgcggcgcccggcactgtggtggcccttttcagcgtgactgaccgcgactcagaggagaatgggcaggtgcagtgcgagctactgggagacgtgcctttccgcctcaagtcttcctttaagaattactacaccatcgttaccgaagcccccctggaccgagaggcgggggactcctacaccctgactgtagtggctcgggaccggggcgagcctgcgctctccaccagtaagtcgatccaggtacaagtgtcggatgtgaacgacaacgcgccgcgtttcagccagccggtctacgacgtgtatgtgactgaaaacaacgtgcctggcgcctacatctacgcggtgagcgccaccgaccgggatgagggcgccaacgcccagcttgcctactctatcctcgagtgccagatccagggcatgagcgtcttcacctacgtttctatcaactctgagaacggctacttgtacgccctgcgctccttcgactatgagcagctgaaggacttcagttttcaggtggaagcccgggacgctggcagcccccaggcgctggctggtaacgccactgtcaacatcctcatagtggatcaaaatgacaacgcccctgccatcgtggcgcctctaccagggcgcaacgggactccagcgcgtgaggtgctgccccgctcggcggagccgggttacctgctcacccgcgtggccgccgtggacgcggacgacggcgagaacgcccggctcacttacagcatcgtgcgtggcaacgaaatgaacctctttcgcatggactggcgcaccggggagctgcgcacagcacgccgagtcccggccaagcgcgacccccagcggccttatgagctggtgatcgaggtgcgcgaccatgggcagccgcccctttcctccaccgccaccctggtggttcagctggtggatggcgccgtggagccccagggcgggggcgggagcggaggcggagggtcaggagagcaccagcgccccagtcgctctggcggcggggaaacctcgctagacctcaccctcatcctcatcatcgcgttgggctcggtgtccttcatcttcctgctggccatgatcgtgctggccgtgcgttgccaaaaagagaagaagctcaacatctatacttgtctggccagcgattgctgcctctgctgctgctgctgcggtggcggaggttcgacctgctgtggccgccaagcccgggcgcgcaagaagaaactcagcaagtcagacatcatgctggtgcagagctccaatgtacccagtaacccggcccaggtgccgatagaggagtccgggggctttggctcccaccaccacaaccagaattactgctatcaggtatgcctgacccctgagtccgccaagaccgacctgatgtttcttaagccctgcagcccttcgcggagtacggacactgagcacaacccctgcggggccatcgtcaccggttacaccgaccagcagcctgatatcatctccaacggaagcattttgtccaacgaggtaaggctgaagcgaaaggaccaccatctctcatctcctccatcagaaagcctcctctagcccggcccttgtatctctggtgcactgtatctatttttaggatattagcttatgtgtatcgttgtgggagcagagatgggcggtcaccttctcccactccttcgtgtgtaacctaactttcgcgttgttccaccctttcacatttattttcattccgtccccttggtactttgccaccttggagctccctcctttgctcttccatcctgtcagtcctttcccttctcagtaacctgggcatgaagggaaactgcgtgaagggagagggaaatgtggaggagggacttactttctagcactggcaaaggtcttttttctttgcgtctgtcccaggcattaataaagttggctctattttgctttgtttaacgatgcttttagtcgcgtgtacaagtaagctatagattgtttaacttta

SEQ ID NO: 22249 - DNA, 613 bp, Homo sapiens
ctttttcacagcacgggcacggaaaaggatatgctagtcaattctacaggacttacctgaagcagcatgatttgcacaaacatcaacttttcaacttcattatcttggccatccagttagtcatgtgtaactgagtattagatttcggatggagtcatcactaattgctctcagcaggcctgagaaatgagttgaaatgtgcagaactgtagaaactttagaggcaacagattttgcctccccgttacagcactatctatctttctctctccaaatgtcactgagccctttagatgtttatattcaccacgagaagccagtcataaagatataaatgcaatatcactgttttaaacttgactgttttatattatttttgtgtgatcaagtgttccgcaagctattccaactttacaagagaaattctgtgggttataaaaaatgttgtattctgaagacccacaaaatatcaaagacattctgtagtttatacaccgtgttgcaaagtgtttactgtactatttcaaagcttctaaataaatataaaatatatatattatattatataattttcctaaaacaaaaaaaagaaaatggcctcgtttgtcctcac

SEQ ID NO: 22250 - DNA, 708 bp, Homo sapiens
  misc_feature (40)..(40): n is a, c, g, or t
gggaaagtggacgcaggaggcatacgagcacaaggagatncagagctcacggaaaaggatatgctagtcaattctacaggacttacctgaagcagcatgatttgcacaaagtcgaccaacaaaagcatcaacttttcaacttcattatcttggccatccagttagtcatgtgtaactgagtattagatttcggatggagtcatcatggccaattataggacctaattgctctcagcaggcctgagaaatgagttgaaatgtgcagaactgtagaaactttagaggcaacagattttgcctccccgatcagtgtgtgcctgtttacagcactatctatctttctctctccaaatgtcactgagccctttagatgtttatattcaccacgagaagccagtcataaagataaaggaaatttgtgcattataaatgcaatatcactgttttaaacttgactgttttatattatttttgtgtgatcaagtgttccgcaagctattccaactttacaagagaaattgtgattatgttcttttcacctgtgggttataaaaaatgttgtattctgaagacccacaaaatatcaaagacattctgtagtttatacaccgtgttgcaaagtgtttactgtactatttcaaagcttctaaataaatatgattttcttctctcaatcaaaaacacaacacactggcctcctggcctcaa

SEQ ID NO: 22251 - DNA, 1507 bp, Homo sapiens
  misc_feature (45)..(45): n is a, c, g, or t
ggcagggggggctgttagggcagtaagattaagttttggaaaggncttgcgaggcgggcaaacacggaaaaggatatgctagtcaattctacaggacttacctgaagcagcatgatttgcacaaagtcgaccaacaaaagcatcaacttttcaacttcattatcttggccatccagttagtcatgtgtaactgagtattagatttcggatggagtcatcatggccaattataggacctaattgctctcagcaggcctgagaaatgagttgaaatgtgcagaactgtagaaactttagaggcaacagattttgcctccccgatcagtgtgtgcctgtttacagcactatctatctttctctctccaaatgtcactgagccctttagatgtttatattcaccacgagaagccagtcataaagataaaggaaatttgtgcattataaatgcaatatcactgttttaaacttgactgttttatattatttttgtgtgatcaagtgttccgcaagctattccaactttacaagagaaattgtgattatgttcttttcacctgtgggttataaaaaatgttgtattctgaagacccacaaaatatcaaagacattctgtagtttatacaccgtgttgcaaagtgtttactgtactatttcaaagcttctaaataaatataaaatatatatattatattatataattttcctaaaatgtggtacaactcagttggtttttaaatggatgcatacagtccacatcatacaataaaataaaaggtaattcagggtcccaaagacaaacttactaagaaaaaatcattaatagttttctcccaatttccatatcttactcaaccgtgtttttccttgtttaaaagaaaatgatgctctaagctacaaaattttgtcaaaaactcatattgaattttcaatgccaaagatgtagctattgatgttatcagacagagcactgactatgtactatcaaactatctaacaatctgcataagtctgattctatttctatgactttgaatttagaatcacttaaagcttttataaagaatcgataaattcacctgtatttgttgttagaaaaaaactgggtgtctgtacattttgtggtgtaaaatatgtaattgaagattactattttaagaagtcatcagtcatatcactcacacagaattttattttacatagttttgtgacttaattacacatgaatataaaatctataattctatatgaatatatagagatatagaaacatctgaactggtaaagaataactataaaatatgaaagctctaaatttaaaataaatttagagatagaatcatggtacattattgtttcagtattccatgtaaaaattttatagcttaaatgtagtcagtgtttgattaatgaaaaaattcttcatgagtcagccttcaaaagttaagcttgccttttacttttatgtcaacaatattaattattaaatttagtaagacgcactttcctt

SEQ ID NO: 22252 - DNA, 1492 bp, Homo sapiens
acccgctctcccatatagtcgcaccgcacccacaaacaacacccttacacggaaaaggatatgctagtcaattctacaggacttacctgaagcagcatgatttgcacaaagtcgaccaacaaaagcatcaacttttcaacttcattatcttggccatccagttagtcatgtgtaactgagtattagatttcggatggagtcatcatggccaattataggacctaattgctctcagcaggcctgagaaatgagttgaaatgtgcagaactgtagaaactttagaggcaacagattttgcctccccgatcagtgtgtgcctgtttacagcactatctatctttctctctccaaatgtcactgagccctttagatgtttatattcaccacgagaagccagtcataaagataaaggaaatttgtgcattataaatgcaatatcactgttttaaacttgactgttttatattatttttgtgtgatcaagtgttccgcaagctattccaactttacaagagaaattgtgattatgttcttttcacctgtgggttataaaaaatgttgtattctgaagacccacaaaatatcaaagacattctgtagtttatacaccgtgttgcaaagtgtttactgtactatttcaaagcttctaaataaatataaaatatatatattatattatataattttcctaaaatgtggtacaactcagttggtttttaaatggatgcatacagtccacatcatacaataaaataaaaggtaattcagggtcccaaagacaaacttactaagaaaaaatcattaatagttttctcccaatttccatatcttactcaaccgtgtttttccttgtttaaaagaaaatgatgctctaagctacaaaattttgtcaaaaactcatattgaattttcaatgccaaagatgtagctattgatgttatcagacagagcactgactatgtactatcaaactatctaacaatctgcataagtctgattctatttctatgactttgaatttagaatcacttaaagcttttataaagaatcgataaattcacctgtatttgttgttagaaaaaaactgggtgtctgtacattttgtggtgtaaaatatgtaattgaagattactattttaagaagtcatcagtcatatcactcacacagaattttattttacatagttttgtgacttaattacacatgaatataaaatctataattctatatgaatatatagagatatagaaacatctgaactggtaaagaataactataaaatatgaaagctctaaatttaaaataaatttagagatagaatcatggtacattattgtttcagtattccatgtaaaaattttatagcttaaatgtagtcagtgtttgattaatgaaaaaattcttcatgagtcagccttcaaaagttaagcttgccttttacttttatgtcaacaatattaattattaaatttagtaagacgcactttcctt

SEQ ID NO: 22253 - DNA, 707 bp, Homo sapiens
  misc_feature (45)..(45): n is a, c, g, or t
ggcagggggggctgttagggcagtaagattaagttttggaaaggncttgcgaggcgggcaaacacggaaaaggatatgctagtcaattctacaggacttacctgaagcagcatgatttgcacaaagtcgaccaacaaaagcatcaacttttcaacttcattatcttggccatccagttagtcatgtgtaactgagtattagatttcggatggagtcatcatggccaattataggacctaattgctctcagcaggcctgagaaatgagttgaaatgtgcagaactgtagaaactttagaggcaacagattttgcctccccgatcagtgtgtgcctgtttacagcactatctatctttctctctccaaatgtcactgagccctttagatgtttatattcaccacgagaagccagtcataaagataaaggaaatttgtgcattataaatgcaatatcactgttttaaacttgactgttttatattatttttgtgtgatcaagtgttccgcaagctattccaactttacaagagaaattgtgattatgttcttttcacctgtgggttataaaaaatgttgtattctgaagacccacaaaatatcaaagacattctgtagtttatacaccgtgttgcaaagtgtttactgtactatttcaaagcttctaaataaatataaaaaaaaaaaaaatggccctcgtggcctaagca

SEQ ID NO: 22254 - DNA, 723 bp, Homo sapiens
  misc_feature (45)..(45): n is a, c, g, or t
ggcagggggggctgttagggcagtaagattaagttttggaaaggncttgcgaggcgggcaaacacggaaaaggatatgctagtcaattctacaggacttacctgaagcagcatgatttgcacaaagtcgaccaacaaaagcatcaacttttcaacttcattatcttggccatccagttagtcatgtgtaactgagtattagatttcggatggagtcatcatggccaattataggacctaattgctctcagcaggcctgagaaatgagttgaaatgtgcagaactgtagaaactttagaggcaacagattttgcctccccgatcagtgtgtgcctgtttacagcactatctatctttctctctccaaatgtcactgagccctttagatgtttatattcaccacgagaagccagtcataaagataaaggaaatttgtgcattataaatgcaatatcactgttttaaacttgactgttttatattatttttgtgtgatcaagtgttccgcaagctattccaactttacaagagaaattgtgattatgttcttttcacctgtgggttataaaaaatgttgtattctgaagacccacaaaatatcaaagacattctgtagtttatacaccgtgttgcaaagtgtttactgtactatttcaaagcttctaaataaatatgattttcttctctcaatcaaaaacacaacacactggcctcctggcctcaa

SEQ ID NO: 22255 - DNA, 720 bp, Homo sapiens
  misc_feature (45)..(45): n is a, c, g, or t
ggcagggggggctgttagggcagtaagattaagttttggaaaggncttgcgaggcgggcaaacacggaaaaggatatgctagtcaattctacaggacttacctgaagcagcatgatttgcacaaagtcgaccaacaaaagcatcaacttttcaacttcattatcttggccatccagttagtcatgtgtaactgagtattagatttcggatggagtcatcatggccaattataggacctaattgctctcagcaggcctgagaaatgagttgaaatgtgcagaactgtagaaactttagaggcaacagattttgcctccccgatcagtgtgtgcctgtttacagcactatctatctttctctctccaaatgtcactgagccctttagatgtttatattcaccacgagaagccagtcataaagataaaggaaatttgtgcattataaatgcaatatcactgttttaaacttgactgttttatattatttttgtgtgatcaagtgttccgcaagctattccaactttacaagagaaattgtgattatgttcttttcacctgtgggttataaaaaatgttgtattctgaagacccacaaaatatcaaagacattctgtagtttatacaccgtgttgcaaagtgtttactgtactatttcaaagcttctaaataaatataaaaaacaaaacccaacaagaccaaccggtggcctcgttggcctcaa

SEQ ID NO: 22256 - DNA, 726 bp, Homo sapiens
  misc_feature (45)..(45): n is a, c, g, or t
ggcagggggggctgttagggcagtaagattaagttttggaaaggncttgcgaggcgggcaaacacggaaaaggatatgctagtcaattctacaggacttacctgaagcagcatgatttgcacaaagtcgaccaacaaaagcatcaacttttcaacttcattatcttggccatccagttagtcatgtgtaactgagtattagatttcggatggagtcatcatggccaattataggacctaattgctctcagcaggcctgagaaatgagttgaaatgtgcagaactgtagaaactttagaggcaacagattttgcctccccgatcagtgtgtgcctgtttacagcactatctatctttctctctccaaatgtcactgagccctttagatgtttatattcaccacgagaagccagtcataaagataaaggaaatttgtgcattataaatgcaatatcactgttttaaacttgactgttttatattatttttgtgtgatcaagtgttccgcaagctattccaactttacaagagaaattgtgattatgttcttttcacctgtgggttataaaaaatgttgtattctgaagacccacaaaatatcaaagacattctgtagtttatacaccgtgttgcaaagtgtttactgtactatttcaaagcttctaaataaatatttagttttagattttagcaaaaaaaacatcttggtctctttggctataaaggg

SEQ ID NO: 22257 - DNA, 5374 bp, Homo sapiens
caggctcagaggctgaagcaggaggaaggaaggactggaaggaaaaagagacaggttagagggaaagaggcttgggaagaaaacagcagaaaagaaactgctcattacacttacagagaggcaagtaacggtggagatgaggacagagggaaccaagactctgaaagacaaaaaatacaaatagagcgaaagaggaaaaaaatgtcaagaagaacatccatccggagaaatgaagagaatgaaagttttaaactgcagagccgttctgtgcttttccggcacaaaattatatcgctgattttaagcccttttgcatttgccagccgttgacattaagaggcatgtttaacggtgccaacagcatctccttttccttctcctcttcctcttcttcttcttcctcctcctcctcctctttttcctcctcctcgttctcctcccatcagcaagaagacaaaccgaggacagtcttgaaatatcgaaatttcctctttgggatttgccagcgccaagactgtcggaataaaggacgctgactattgtattattgttattttattaattagtcagtggaaagattacagatgaggaaaggggacgcctgtcacccttcctgtgctaagatttaaaaaaaaatgaggctggattgcgggaagctctaaaatgaagcaaaaggagtaagatttttaaagacagaaagccacaggagcccccacgtagcgcacttttatttgtattttttcagatttttttttgtttcgtggtggtgggggaggtgattgggtggctgactggctgcgggaagctacttcctttccttttggagatgattgtgctattattgtttgccttgctctggatggtggaaggagtcttttcccagcttcactacacggtacaggaggagcaggaacatggcactttcgtggggaatatcgctgaagatctgggtctggacattacaaaactttcggctcgcgggtttcagacggtgcccaactcaaggaccccttacttagacctcaacctggagacaggggtgctgtacgtgaacgagaaaatagaccgcgaacaaatctgcaaacagagcccctcctgtgtcctgcacctggaggtctttctggagaaccccctggagctgttccaggtggagatcgaggtgctggacattaatgacaaccccccctctttcccggagccagacctgacggtggaaatctctgagagcgccacgccaggcactcgcttccccttggagagcgcattcgacccagacgtgggcaccaactccttgcgcgactacgagatcacccccaacagctacttctccctggacgtgcagacccagggggatggcaaccgattcgctgagctggtgctggagaagccactggaccgagagcagcaagcggtgcaccgctacgtgctgaccgcggtggacggaggaggtgggggaggagtaggagaaggagggggaggtggcgggggagcaggcctgcccccccagcagcagcgcaccggcacggccctactcaccatccgagtgctggactccaatgacaatgtgcccgctttcgaccaacccgtctacactgtgtccctaccagagaactctcccccaggcactctcgtgatccagctcaacgccaccgacccggacgagggccagaacggtgaggtcgtgtactccttcagcagccacatttcgccccgggcgcgggagcttttcggactctcgccgcgcactggcagactggaggtaagcggcgagttggactatgaagagagcccagtgtaccaagtgtacgtgcaagccaaggacctgggccccaacgccgtgcctgcgcactgcaaggtgctagtgcgagtactggatgctaatgacaacgcgccagagatcagcttcagcaccgtgaaggaagcggtgagtgagggcgcggcgcccggcactgtggtggcccttttcagcgtgactgaccgcgactcagaggagaatgggcaggtgcagtgcgagctactgggagacgtgcctttccgcctcaagtcttcctttaagaattactacaccatcgttaccgaagcccccctggaccgagaggcgggggactcctacaccctgactgtagtggctcgggaccggggcgagcctgcgctctccaccagtaagtcgatccaggtacaagtgtcggatgtgaacgacaacgcgccgcgtttcagccagccggtctacgacgtgtatgtgactgaaaacaacgtgcctggcgcctacatctacgcggtgagcgccaccgaccgggatgagggcgccaacgcccagcttgcctactctatcctcgagtgccagatccagggcatgagcgtcttcacctacgtttctatcaactctgagaacggctacttgtacgccctgcgctccttcgactatgagcagctgaaggacttcagttttcaggtggaagcccgggacgctggcagcccccaggcgctggctggtaacgccactgtcaacatcctcatagtggatcaaaatgacaacgcccctgccatcgtggcgcctctaccagggcgcaacgggactccagcgcgtgaggtgctgccccgctcggcggagccgggttacctgctcacccgcgtggccgccgtggacgcggacgacggcgagaacgcccggctcacttacagcatcgtgcgtggcaacgaaatgaacctctttcgcatggactggcgcaccggggagctgcgcacagcacgccgagtcccggccaagcgcgacccccagcggccttatgagctggtgatcgaggtgcgcgaccatgggcagccgcccctttcctccaccgccaccctggtggttcagctggtggatggcgccgtggagccccagggcgggggcgggagcggaggcggagggtcaggagagcaccagcgccccagtcgctctggcggcggggaaacctcgctagacctcaccctcatcctcatcatcgcgttgggctcggtgtccttcatcttcctgctggccatgatcgtgctggccgtgcgttgccaaaaagagaagaagctcaacatctatacttgtctggccagcgattgctgcctctgctgctgctgctgcggtggcggaggttcgacctgctgtggccgccaagcccgggcgcgcaagaagaaactcagcaagtcagacatcatgctggtgcagagctccaatgtacccagtaacccggcccaggtgccgatagaggagtccgggggctttggctcccaccaccacaaccagaattactgctatcaggtatgcctgacccctgagtccgccaagaccgacctgatgtttcttaagccctgcagcccttcgcggagtacggacactgagcacaacccctgcggggccatcgtcaccggttacaccgaccagcagcctgatatcatctccaacggaagcattttgtccaacgagactaaacaccagcgagcagagctcagctatctagttgacagacctcgccgagttaacagttctgcattccaggaagccgacatagtaagctctaaggacagtggtcatggagacagtgaacagggagatagtgatcatgatgccaccaaccgtgcccagtcagctggtatggatctcttctccaattgcactgaggaatgtaaagctctgggccactcagatcggtgctggatgccttcttttgtcccttctgatggacgccaggctgctgattatcgcagcaatctgcatgttcctggcatggactctgttccagacactgaggtgtttgaaactccagaagcccagcctggggcagagcggtccttttccacctttggcaaagagaaggcccttcacagcactctggagaggaaggagctggatggactgctgactaatacgcgagcgccttacaaaccaccatatttgacacggaaaaggatatgctagtcaattctacaggacttacctgaagcagcatgatttgcacaaagtcgaccaacaaaagcatcaacttttcaacttcattatcttggccatccagttagtcatgtgtaactgagtattagatttcggatggagtcatcatggccaattataggacctaattgctctcagcaggcctgagaaatgagttgaaatgtgcagaactgtagaaactttagaggcaacagattttgcctccccgatcagtgtgtgcctgtttacagcactatctatctttctctctccaaatgtcactgagccctttagatgtttatattcaccacgagaagccagtcataaagataaaggaaatttgtgcattataaatgcaatatcactgttttaaacttgactgttttatattatttttgtgtgatcaagtgttccgcaagctattccaactttacaagagaaattgtgattatgttcttttcacctgtgggttataaaaaatgttgtattctgaagacccacaaaatatcaaagacattctgtagtttatacaccgtgttgcaaagtgtttactgtactatttcaaagcttctaaataaatataaaatatatatattatattatataattttcctaaaatgtggtacaactcagttggtttttaaatggatgcatacagtccacatcatacaataaaataaaaggtaattcagggtcccaaagacaaacttactaagaaaaaatcattaatagttttctcccaatttccatatcttactcaaccgtgtttttccttgtttaaaagaaaatgatgctctaagctacaaaattttgtcaaaaactcatattgaattttcaatgccaaagatgtagctattgatgttatcagacagagcactgactatgtactatcaaactatctaacaatctgcataagtctgattctatttctatgactttgaatttagaatcacttaaagcttttataaagaatcgataaattcacctgtatttgttgttagaaaaaaactgggtgtctgtacattttgtggtgtaaaatatgtaattgaagattactattttaagaagtcatcagtcatatcactcacacagaattttattttacatagttttgtgacttaattacacatgaatataaaatctataattctatatgaatatatagagatatagaaacatctgaactggtaaagaataactataaaatatgaaagctctaaatttaaaataaatttagagatagaatcatggtacattattgtttcagtattccatgtaaaaattttatagcttaaatgtagtcagtgtttgattaatgaaaaaattcttcatgagtcagccttcaaaagttaagcttgccttttacttttatgtcaacaatattaattattaaatttagtaagacgcactttcctt

SEQ ID NO: 22258 - DNA, 3248 bp, Homo sapiens
  misc_feature (47)..(48): n is a, c, g, or t
  misc_feature (53)..(54): n is a, c, g, or t
agagcggcggcgggaagtgttgcgcaggcgcatccgatcgactcggnnggtgnngatctcttggagacggcgacccaggcatctggggagccacagaagtcgtactcccttaaaccctgctttgctccccctgtggatgtaaccccttagctggcattttgcatctcaattggcttgtgatggaggcgtctttggggattcagatggatgagccaatggctttttctccccagcgtgaccggtttcaggctgaaggctctttaaaaaaaaacgagcagaattttaaacttgcaggtgttaaaaaagatattgagaagctttatgaagctgtaccacagcttagtaatgtgtttaagattgaggacaaaattggagaaggcactttcagctctgtttatttggccacagcacagttacaagtaggacctgaagagaaaattgctctaaaacacttgattccaacaagtcatcctataagaattgcagctgaacttcagtgcctaacagtggctggggggcaagataatgtcatgggagttaaatactgctttaggaagaatgatcatgtagttattgctatgccatatctggagcatgagtcgtttttggacattctgaattctctttcctttcaagaagtacgggaatatatgcttaatctgttcaaagctttgaaacgcattcatcagtttggtattgttcaccgtgatgttaagcccagcaattttttatataataggcgcctgaaaaagtatgccttggtagactttggtttggcccaaggaacccatgatacgaaaatagagcttcttaaatttgtccagtctgaagctcagcaggaaaggtgttcacaaaacaaatcccacataatcacaggaaacaagattccactgagtggcccagtacctaaggagctggatcagcagtccaccacaaaagcttctgttaaaagaccctacacaaatgcacaaattcagattaaacaaggaaaagacggaaaggagggatctgtaggcctttctgtccagcgctctgtttttggagaaagaaatttcaatatacacagctccatttcacatgagagccctgcagtgaaactcatgaagcagtcaaagactgtggatgtactgtctagaaagttagcaacaaaaaagaaggctatttctacgaaagttatgaatagtgctgtgatgaggaaaactgccagttcttgcccagctagcctgacctgtgactgctatgcaacagataaagtttgtagtatttgcctttcaaggcgtcagcaggttgcccctagggcaggtacaccaggattcagagcaccagaggtcttgacaaagtgccccaatcaaactacagcaattgacatgtggtctgcaggtgtcatatttctttctttgcttagtggacgatatccattttataaagcaagtgatgatttaactgctttggcccaaattatgacaattaggggatccagagaaactatccaagctgctaaaacttttgggaaatcaatattatgtagcaaagaagttccagcacaagacttgagaaaactctgtgagagactcaggggtatggattctagcactcccaagttaacaagtgatatacaagggcatgcttctcatcaaccagctatttcagagaagactgaccataaagcttcttgcctcgttcaaacacctccaggacaatactcagggaattcatttaaaaagggggatagtaatagctgtgagcattgttttgatgagtataataccaatttagaaggctggaatgaggtacctgatgaagcttatgacctgcttgataaacttctagatctaaatccagcttcaagaataacagcagaagaagctttgttgcatccattttttaaagatatgagcttgtgataatggatcttcatttaatgtttactgttatgaggtagaataaaaaagaatactttgtaatagccacaagttcttgtttagagaccagagcaggattaataatttattttaacattttagtgtttggtggcacattctaaaatatagattaagaatacttaaaatgcctgggatagttcttgggactaacaacatgatcttctttgagttaaacctacctaagtagattttaggtgggttcctattaggtcagatttttagcttccctaattacctttcactgacatatacagaaaaaggagcagttttagttttaattaattaaaattaacagatgtgatgaggattaaatgaatcaaaagacttaatttgtagattcttttagagttatgagctaggtatagtttggggaaactcaacctggtgctggtgctcttaacaattttgtaaataaagaagataatttccttttctagaggtacatattaggccttttatgaacactaaaacaatgaggaaatgttggtcatggggcaaagtatcacttaaaattgaattcatccatttttaaaaaacacttcatgaaagcattctggtgtgaattgccatttttttcttactggcttctcaattttcttccttctctgcccctacctaaaacattctcctcggaaattacatggtgctgaccacaaagtttctggatgttttattaaatattgtacgtgtttacagttgggaatttaaaataatacatacactggttgataaagggaagctgcaggaccaaggtgaagattgatagtccaaatgcttttcttttttgagttgtatattttttcacaccatcttagatataattaggtagctgctgaaaggaaaagtgaatacagaattgacggtattattggagatttttcctctgcgtagagccatccagatctctgtatcctgttttgactaagtcttaggtgggttgggaagacagataatgaagtaggcaaagagaaaaggacccaagatagaggtttatattcagaaatggtatatatcaatgacagcatatcaaacttcctatgggaaaaagtctggtgggtggtcagctgacagatttcccatttagtagtcatagaatacagaaatagtttagggacatgtattcattttgttattttgagcattgataggtcagtatatctacctaatctgtttggtaagtataggatatataaaccattaccattgatctgtcttatgccataatcttaaaaaaaaattgaatgctcttgaatttgtatattcaataaagttatccttttataaaaaaaaagtcgacgcggccgc

SEQ ID NO: 22259 - DNA, 3177 bp, Homo sapiens
agagcggcggcgggaagtgttgcgcaggcgcatccgatcgactcgctgctttgctccccctgtggatgtaaccccttagctggcattttgcatctcaattggcttgtgatggaggcgtctttggggattcagatggatgagccaatggctttttctccccagcgtgaccggtttcaggctgaaggctctttaaaaaaaaacgagcagaattttaaacttgcaggtgttaaaaaagatattgagaagctttatgaagctgtaccacagcttagtaatgtgtttaagattgaggacaaaattggagaaggcactttcagctctgtttatttggccacagcacagttacaagtaggacctgaagagaaaattgctctaaaacacttgattccaacaagtcatcctataagaattgcagctgaacttcagtgcctaacagtggctggggggcaagataatgtcatgggagttaaatactgctttaggaagaatgatcatgtagttattgctatgccatatctggagcatgagtcgtttttggacattctgaattctctttcctttcaagaagtacgggaatatatgcttaatctgttcaaagctttgaaacgcattcatcagtttggtattgttcaccgtgatgttaagcccagcaattttttatataataggcgcctgaaaaagtatgccttggtagactttggtttggcccaaggaacccatgatacgaaaatagagcttcttaaatttgtccagtctgaagctcagcaggaaaggtgttcacaaaacaaatcccacataatcacaggaaacaagattccactgagtggcccagtacctaaggagctggatcagcagtccaccacaaaagcttctgttaaaagaccctacacaaatgcacaaattcagattaaacaaggaaaagacggaaaggagggatctgtaggcctttctgtccagcgctctgtttttggagaaagaaatttcaatatacacagctccatttcacatgagagccctgcagtgaaactcatgaagcagtcaaagactgtggatgtactgtctagaaagttagcaacaaaaaagaaggctatttctacgaaagttatgaatagtgctgtgatgaggaaaactgccagttcttgcccagctagcctgacctgtgactgctatgcaacagataaagtttgtagtatttgcctttcaaggcgtcagcaggttgcccctagggcaggtacaccaggattcagagcaccagaggtcttgacaaagtgccccaatcaaactacagcaattgacatgtggtctgcaggtgtcatatttctttctttgcttagtggacgatatccattttataaagcaagtgatgatttaactgctttggcccaaattatgacaattaggggatccagagaaactatccaagctgctaaaacttttgggaaatcaatattatgtagcaaagaagttccagcacaagacttgagaaaactctgtgagagactcaggggtatggattctagcactcccaagttaacaagtgatatacaagggcatgcttctcatcaaccagctatttcagagaagactgaccataaagcttcttgcctcgttcaaacacctccaggacaatactcagggaattcatttaaaaagggggatagtaatagctgtgagcattgttttgatgagtataataccaatttagaaggctggaatgaggtacctgatgaagcttatgacctgcttgataaacttctagatctaaatccagcttcaagaataacagcagaagaagctttgttgcatccattttttaaagatatgagcttgtgataatggatcttcatttaatgtttactgttatgaggtagaataaaaaagaatactttgtaatagccacaagttcttgtttagagaccagagcaggattaataatttattttaacattttagtgtttggtggcacattctaaaatatagattaagaatacttaaaatgcctgggatagttcttgggactaacaacatgatcttctttgagttaaacctacctaagtagattttaggtgggttcctattaggtcagatttttagcttccctaattacctttcactgacatatacagaaaaaggagcagttttagttttaattaattaaaattaacagatgtgatgaggattaaatgaatcaaaagacttaatttgtagattcttttagagttatgagctaggtatagtttggggaaactcaacctggtgctggtgctcttaacaattttgtaaataaagaagataatttccttttctagaggtacatattaggccttttatgaacactaaaacaatgaggaaatgttggtcatggggcaaagtatcacttaaaattgaattcatccatttttaaaaaacacttcatgaaagcattctggtgtgaattgccatttttttcttactggcttctcaattttcttccttctctgcccctacctaaaacattctcctcggaaattacatggtgctgaccacaaagtttctggatgttttattaaatattgtacgtgtttacagttgggaatttaaaataatacatacactggttgataaagggaagctgcaggaccaaggtgaagattgatagtccaaatgcttttcttttttgagttgtatattttttcacaccatcttagatataattaggtagctgctgaaaggaaaagtgaatacagaattgacggtattattggagatttttcctctgcgtagagccatccagatctctgtatcctgttttgactaagtcttaggtgggttgggaagacagataatgaagtaggcaaagagaaaaggacccaagatagaggtttatattcagaaatggtatatatcaatgacagcatatcaaacttcctatgggaaaaagtctggtgggtggtcagctgacagatttcccatttagtagtcatagaatacagaaatagtttagggacatgtattcattttgttattttgagcattgataggtcagtatatctacctaatctgtttggtaagtataggatatataaaccattaccattgatctgtcttatgccataatcttaaaaaaaaattgaatgctcttgaatttgtatattcaataaagttatccttttataaaaaaaaagtcgacgcggccgc

SEQ ID NO: 22260 - DNA, 3298 bp, Homo sapiens
cggtccttcccggctgagctcgcggccagcgctggccggcggattcccattcattcacccttctcctcctccgcccagtactcgtggccagggtcgtatcagttctccgtcaacttgcttggggccttggacgagcctcctggcgcttcctgtcagtggcgaaaagctgctttgctccccctgtggatgtaaccccttagctggcattttgcatctcaattggcttgtgatggaggcgtctttggggattcagatggatgagccaatggctttttctccccagcgtgaccggtttcaggctgaaggctctttaaaaaaaaacgagcagaattttaaacttgcaggtgttaaaaaagatattgagaagctttatgaagctgtaccacagcttagtaatgtgtttaagattgaggacaaaattggagaaggcactttcagctctgtttatttggccacagcacagttacaagtaggacctgaagagaaaattgctctaaaacacttgattccaacaagtcatcctataagaattgcagctgaacttcagtgcctaacagtggctggggggcaagataatgtcatgggagttaaatactgctttaggaagaatgatcatgtagttattgctatgccatatctggagcatgagtcgtttttggacattctgaattctctttcctttcaagaagtacgggaatatatgcttaatctgttcaaagctttgaaacgcattcatcagtttggtattgttcaccgtgatgttaagcccagcaattttttatataataggcgcctgaaaaagtatgccttggtagactttggtttggcccaaggaacccatgatacgaaaatagagcttcttaaatttgtccagtctgaagctcagcaggaaaggtgttcacaaaacaaatcccacataatcacaggaaacaagattccactgagtggcccagtacctaaggagctggatcagcagtccaccacaaaagcttctgttaaaagaccctacacaaatgcacaaattcagattaaacaaggaaaagacggaaaggagggatctgtaggcctttctgtccagcgctctgtttttggagaaagaaatttcaatatacacagctccatttcacatgagagccctgcagtgaaactcatgaagcagtcaaagactgtggatgtactgtctagaaagttagcaacaaaaaagaaggctatttctacgaaagttatgaatagtgctgtgatgaggaaaactgccagttcttgcccagctagcctgacctgtgactgctatgcaacagataaagtttgtagtatttgcctttcaaggcgtcagcaggttgcccctagggcaggtacaccaggattcagagcaccagaggtcttgacaaagtgccccaatcaaactacagcaattgacatgtggtctgcaggtgtcatatttctttctttgcttagtggacgatatccattttataaagcaagtgatgatttaactgctttggcccaaattatgacaattaggggatccagagaaactatccaagctgctaaaacttttgggaaatcaatattatgtagcaaagaagttccagcacaagacttgagaaaactctgtgagagactcaggggtatggattctagcactcccaagttaacaagtgatatacaagggcatgcttctcatcaaccagctatttcagagaagactgaccataaagcttcttgcctcgttcaaacacctccaggacaatactcagggaattcatttaaaaagggggatagtaatagctgtgagcattgttttgatgagtataataccaatttagaaggctggaatgaggtacctgatgaagcttatgacctgcttgataaacttctagatctaaatccagcttcaagaataacagcagaagaagctttgttgcatccattttttaaagatatgagcttgtgataatggatcttcatttaatgtttactgttatgaggtagaataaaaaagaatactttgtaatagccacaagttcttgtttagagaccagagcaggattaataatttattttaacattttagtgtttggtggcacattctaaaatatagattaagaatacttaaaatgcctgggatagttcttgggactaacaacatgatcttctttgagttaaacctacctaagtagattttaggtgggttcctattaggtcagatttttagcttccctaattacctttcactgacatatacagaaaaaggagcagttttagttttaattaattaaaattaacagatgtgatgaggattaaatgaatcaaaagacttaatttgtagattcttttagagttatgagctaggtatagtttggggaaactcaacctggtgctggtgctcttaacaattttgtaaataaagaagataatttccttttctagaggtacatattaggccttttatgaacactaaaacaatgaggaaatgttggtcatggggcaaagtatcacttaaaattgaattcatccatttttaaaaaacacttcatgaaagcattctggtgtgaattgccatttttttcttactggcttctcaattttcttccttctctgcccctacctaaaacattctcctcggaaattacatggtgctgaccacaaagtttctggatgttttattaaatattgtacgtgtttacagttgggaatttaaaataatacatacactggttgataaagggaagctgcaggaccaaggtgaagattgatagtccaaatgcttttcttttttgagttgtatattttttcacaccatcttagatataattaggtagctgctgaaaggaaaagtgaatacagaattgacggtattattggagatttttcctctgcgtagagccatccagatctctgtatcctgttttgactaagtcttaggtgggttgggaagacagataatgaagtaggcaaagagaaaaggacccaagatagaggtttatattcagaaatggtatatatcaatgacagcatatcaaacttcctatgggaaaaagtctggtgggtggtcagctgacagatttcccatttagtagtcatagaatacagaaatagtttagggacatgtattcattttgttattttgagcattgataggtcagtatatctacctaatctgtttggtaagtataggatatataaaccattaccattgatctgtcttatgccataatcttaaaaaaaaattgaatgctcttgaatttgtatattcaataaagttatccttttataaaaaaaaagtcgacgcggccgc

SEQ ID NO: 22261 - DNA, 2010 bp, Homo sapiens
gtaggcacgagtcaccacacacggtaagttcaagatggatctgaccctgttctccatatagcagatcctggatcatggtaggtcgtggctggtgacactttacctaatcttagctggcacccgggcagcggataatcgcagtctgtacttagaaccaaagtcgcatggatgtgagtttcgtcgtatggtgcaccctacttgtgatgcatcatactatacgagggaatccagaagcgagctctcactaattccaagattacaacctcctggcggaaatcaatattatgtagcaaagaagttccagcacaagacttgagaaaactctgtgagagactcaggggtatggattctagcactcccaagttaacaagtgatatacaagggcatgcttctcatcaaccagctatttcagagaagactgaccataaagcttcttgcctcgttcaaacacctccaggacaatactcagggaattcatttaaaaagggggatagtaatagctgtgagcattgttttgatgagtataataccaatttagaaggctggaatgaggtacctgatgaagcttatgacctgcttgataaacttctagatctaaatccagcttcaagaataacagcagaagaagctttgttgcatccattttttaaagatatgagcttgtgataatggatcttcatttaatgtttactgttatgaggtagaataaaaaagaatactttgtaatagccacaagttcttgtttagagaccagagcaggattaataatttattttaacattttagtgtttggtggcacattctaaaatatagattaagaatacttaaaatgcctgggatagttcttgggactaacaacatgatcttctttgagttaaacctacctaagtagattttaggtgggttcctattaggtcagatttttagcttccctaattacctttcactgacatatacagaaaaaggagcagttttagttttaattaattaaaattaacagatgtgatgaggattaaatgaatcaaaagacttaatttgtagattcttttagagttatgagctaggtatagtttggggaaactcaacctggtgctggtgctcttaacaattttgtaaataaagaagataatttccttttctagaggtacatattaggccttttatgaacactaaaacaatgaggaaatgttggtcatggggcaaagtatcacttaaaattgaattcatccatttttaaaaaacacttcatgaaagcattctggtgtgaattgccatttttttcttactggcttctcaattttcttccttctctgcccctacctaaaacattctcctcggaaattacatggtgctgaccacaaagtttctggatgttttattaaatattgtacgtgtttacagttgggaatttaaaataatacatacactggttgataaagggaagctgcaggaccaaggtgaagattgatagtccaaatgcttttcttttttgagttgtatattttttcacaccatcttagatataattaggtagctgctgaaaggaaaagtgaatacagaattgacggtattattggagatttttcctctgcgtagagccatccagatctctgtatcctgttttgactaagtcttaggtgggttgggaagacagataatgaagtaggcaaagagaaaaggacccaagatagaggtttatattcagaaatggtatatatcaatgacagcatatcaaacttcctatgggaaaaagtctggtgggtggtcagctgacagatttcccatttagtagtcatagaatacagaaatagtttagggacatgtattcattttgttattttgagcattgataggtcagtatatctacctaatctgtttggtaagtataggatatataaaccattaccattgatctgtcttatgccataatcttaaaaaaaaattgaatgctcttgaatttgtatattcaataaagttatccttttataaaaaaaaagtcgacgcggccgc

SEQ ID NO: 22262 - DNA, 930 bp, Homo sapiens
agagcggcggcgggaagtgttgcgcaggcgcatccgatcgactcgctgctttgctccccctgtggatgtaaccccttagctggcattttgcatctcaattggcttgtgatggaggcgtctttggggattcagatggatgagccaatggctttttctccccagcgtgaccggtttcaggctgaaggctctttaaaaaaaaacgagcagaattttaaacttgcaggtgttaaaaaagatattgagaagctttatgaagctgtaccacagcttagtaatgtgtttaagattgaggacaaaattggagaaggcactttcagctctgtttatttggccacagcacagttacaagtaggacctgaagagaaaattgctctaaaacacttgattccaacaagtcatcctataagaattgcagctgaacttcagtgcctaacagtggctggggggcaagataatgtcatgggagttaaatactgctttaggaagaatgatcatgtagttattgctatgccatatctggagcatgagtcgtttttggacattctgaattctctttcctttcaagaagtacgggaatatatgcttaatctgttcaaagctttgaaacgcattcatcagtttggtattgttcaccgtgatgttaagcccagcaattttttatataataggcgcctgaaaaagtatgccttggtagactttggtttggcccaaggaacccatgatacgaaaatagagcttcttaaatttgtccagtctgaagctcagcaggaaaggtgttcacaaaacaaatcccacataatcacaggaaacaagattccactgagtggcccagtacctaaggagctggatcagcagtccaccacaaaagcttctgttaaaagaccctacacaaatgcacaaattcagattaaacaaggaaaagacggaaag

SEQ ID NO: 22263 - DNA, 335 bp, Homo sapiens
tctcccagatcacccattgtatttctttgttgtatgtctttagtctcctttaatctagaatcattcttcagcttttctttaactgtctgacatggatgtttttgaaacatacaggcctattgtgaatgtccttcaatttgggtttgtttcatgattagattcaaattatacatttttggaaaaaaaaatagcatgagtagattgggggtggtggctcacgcctgtaatcctagcactttgggaggccaaggtggaaggatcactttagcccaggagttcgagaccagcctatgcaacatagcaagacctcctctctacaaaacattttaaaaatt

SEQ ID NO: 22264 - DNA, 218 bp, Homo sapiens
ttagaatctacagttactaaaactgaagaagtggaaaatctggagaccgatacatagaaaaaggaaaaagacagtcaaagactcatcctccagattggagttttatttaaaccatggtttctcaacctcagcaatattgacatattgggccagacaattctttgtggagggttctcctgtgtgttgtaggatgtttagtgacatcccctctacctaag

SEQ ID NO: 22265 - DNA, 336 bp, Homo sapiens
ctcagagaagtgtccctcataccttaggttacaattaatgagcattcattgaacccctacaaattctaggcagtatgctaagcactttacatttataggtttatatgagaaatgtaaatctcatatttctatgaagtgtacagacagggaactgagttgttaaaatttacctaatattacatggtaagtgagtagtagattgagctttgaacttggatatgactgattagagttaaaaccttaagcacaagaaataagttttatttaatgtcttgctaaatgtattttattgatcaagacatggtggctcacatctgtaatcccagcactttgggt

SEQ ID NO: 22266 - DNA, 276 bp, Homo sapiens
gggcaaactcactggtctggccctgcctctacccttgctcctggaaaaggaagaatgcctttagctgggccctgaagaatgggcaaggggtgggtagctggaggggccagggagttgctgcacgggagtcggaccaatgtgtgtcagggtctctatctgttgtttgcaaacaagctctggactaaggtgataccacccagatgtggacacctgaggaaaagctaaatttgtcatcctgtgcaaactattggtctcccacaatcccctgtgacccct

SEQ ID NO: 22267 - DNA, 138 bp, Homo sapiens
tactcctccaaggccattctcagtaaatgcatgtccaggcacccggctgttcctgccacaaatctgggaaatatccttgacaccatcctaccccttgctctccctcatccaatcagtcgccaagccctaatcattatc

SEQ ID NO: 22268 - DNA, 1501 bp, Homo sapiens
gagcggagggtacgggcaatgagtccatgtatttgtgttttcagggaggtgttagggaaaggtggaggaaggcgaagagaaggctaaggaagcctaagaactgcggctgcagagtcacggaaacacttcgctccgctccaggatcactggcacaggcctttgccagggcgaactccgggcaagacccgtgaccccaccccagaaaactcccgactcccgggctggagaaggtagccaagatcattctcagttgccatatggcaaagacacaggaagctgccctgtgtagagacccacatggcaaggaactgagacatcctgccaacaaccaccagagtctgaggcctgctgccatcaccacgtgagtgagacatcttagaagtggatccttcagcctaagtcaagccttcagatgattgcatcttgactgcagcctcatcaaagaccttgaaccagaaccacccaactcaattactctcaaatgcttaacccatagaaactatagcgattatggcttgctatggcagtcagcccccaagatggaccccattgattctggactcctggtgccaaaaccattgtacccagatcaactgcaaacaagaacagagttttaatggaaattttaaacaagtaagatgaaaatcctgaagcatttctttcaagaattgtaacaggagatgaaacatggttttaccagtataatcccgaagacaaagtacaatcagagcaatggctaccaagaggtggaagtggtccagtcaaagcaaaagcagacctgccaagagcaaaggtcgtgggaatagttttttgggatacttattttgcttgttgactttctgaagagccaaagaacaataatatctgcttgtttcaagagtgttttgagaaagtttgctaaagctttagcagaaaaattcctggaaaagcttcaccagtctttttctaccgcaacaatgctcccactcattcttctcatcaaacaagggcaattttacaagactttcaatgagaaatcattaggcatcgaccttacagtcctaatttggctctttctaacttctttttgtttcctaatcttaaaaaatctgcaaagggctcccatttttcgtcatttaatcatgtaaaaaagacatggttaaatttccatgaatctcaatttttttagggatggattaaatgactggtgtcatcacttacaaccatggttgacctcgatggagcttatgttgagaaataaagtttatattctttatcttttaattcaatttttccatgaacattttgaagtgccctcatattataaatgatatttcattgttagtggttcattaatagggtatttaaatacaattcttttttaatattagtcctgtacactgagatcatgtttaaaaacctattagttctagtagtattttatagatttcttttgattttctatgtatacaatcatgtttctccaaataaagagttttatttttttccttccaaaaaaaaa

SEQ ID NO: 22269 - DNA, 2569 bp, Homo sapiens
gaactgccatttgaaggggctttggtggtgttcacagctgcctctttggcacctcctcccaagccggagtcaaggaggcccctgagccttggaccagccactgccacctccgacctgctcggccagaagctgcccagggacaaagcagagtgcaggtcatttatcttcaggctttgagatctgcgtggggggagctgttgcagcagcccaagccgcaggaattgctgagacaggatggcctggcaggggctggtcctggctgcctgcctcctcatgttcccctccaccacagcggactgcctgtcgcggtgctccttgtgtgctgtaaagacccaggatggtcccaaacctatcaatcccctgatttgctccctgcaatgccaggctgccctgctgccctctgaggaatgggagagatgccagagctttctgtcttttttcaccccctccacccttgggctcaatgacaaggaggacttggggagcaagtcggttggggaagggccctacagtgagctggccaagctctctgggtcattcctgaaggagctggagaaaagcaagtttctcccaagtatctcaacaaaggagaacactctgagcaagagcctggaggagaagctcaggggtctctctgacgggtttagggagggagcagagtctgagctgatgagggatgcccagctgaacgatggtgccatggagactggcacactctatctcgctgaggaggaccccaaggagcaggtcaaacgctatgggggctttttgcgcaaataccccaagaggagctcagaggtggctggggagggggacggggatagcatgggccatgaggacctgtacaaacgctatgggggcttcttgcggcgcattcgtcccaagctcaagtgggacaaccagaagcgctatggcggttttctccggcgccagttcaaggtggtgactcggtctcaggaagatccgaatgcttactctggagagctttttgatgcataagcacctcttttcatggagtagagtcaggagaaacccctgacaccttttcaggttggagtgcattcattcatcctcttatatgtgccccttccccatgctcagctcagcattgtgtacaaaatatccaagcccagcctatctctcttctgcgtgggagtatgttatttctctggggtctgtgatggggaagggtggatgtcccttccccacaataggcttagtgcttggctcagacacctagactctaaaactatcagcagcggcagcagcagcagcagcagcagtttgtgatctgtccttccaacctgttcacgtgactcctcaattccagggaaccagagcgatgtgttctttgtacctgtaggtctatgatgtccaaacttaacagatcacatgcccctcttagaagaaatatgagcatgctccctcatgcagatagtatacacatcataaacaaagagtagaactttaaaagaaggtaaataatcatacacagaaatcctaacattatattcccaaatctcaaaagatctcctgtgcacctgactttggagacgatgctttaggtaaaaagcttaaacattgccttatattggatcaggaacccttacagtagagggtccagtcttctagtggggtttaatgtttagtcagtgtactctgagtcctcattgttcagaaaagcacctcttgaagaactgacttcctgaactcccagtcatgttggtaccctggacagtgcctaactccttacagaagggagtgaaaacctctttcggaaatgattgagagcagcctcttgaatgcttaaatgatcaaggagggagaaaggcaaaccaatttgttctgtgcaacaaactcaaaatgtggaccagttccctcagccctcattaaactaattaaactgatgggtatcatgcttctactccatggtgaactgaagcagagtcaagctgatgaagttaagcacaaccatgttcttgagcagctgaattggctgccaagagtccaagccatctggcccaacatacgcactgggcattgggtaagggactccagaagcagcagctagaaagagaaaaagccctcttcaatccccataatgcttctttcctcttaatgtctcaaaataaaaccagaaagaggaataaaatgattaagtgcttgaggccaaatgagttcccttgattcaaataaccctgaatcagaggcagagacctcctgatgtcttggtttccatcaaagccctccctgtctgtctgtctctcttttgctctctcattcccaggcactctcttttggtttgtgggtccaggagatgaggctggataggagaggaaaaggcttgagtctggataatttgtataagatgctgctgagcacatctcttcatgcgcagtccccaggtatctgatgatgttctgaaatggatagattgttttagagttattttgtgtcctttaaaaaaatcccatttatgcaatttacttggaatttgcttagcctttaataggcttgtgtaatttcctgctcctccagtacaataaataaaagaaagatgaaaaaaaaa

SEQ ID NO: 22270 - DNA, 364 bp, Homo sapiens
ataaataaactataggggtgaggttatatattgccaacttgcctaattaaacaatagtatggttctggtttgaagggatcactactaacaaatgggctcatcttactttatggtgtggtagtaggtaaagtttttagtaaattggctcaagatccctcagaataatatattatcttttagtaatagagaaaactagccccaaatgtagaaagatgtttaaattgaaatgtatacagctggccaggcatggtggctcacgcctgtaatcccagcactttgggaggtggggcaggcggatcatgaggtcaggagatcgagaccatcctggccaacatggtgaaaccctgtctgtactacaaatacc

SEQ ID NO: 22271 - DNA, 322 bp, Homo sapiens
cacatccttggcaactgtcaggcaaacactgcaaccaacaattccactaggggtagaaaaacacttgcttaattcacgttacttgataacttcttctggaaaaaaaaaattaggggaggtggggaagaaacctccttctttcttctccacgaatccgaccgacgctacttgctttgcaacagcatcgcccttccccggccccctcccgcttcccagcactttccccctttaagaacacagaccaaccaaaatgatttaacttgagcagatgacagaaggaaaataaaacacgttaagagaatacggtctgatttgggatggc

SEQ ID NO: 22272 - DNA, 896 bp, Homo sapiens
aaaaaaatcaaaaacaaacaaaaataagtgaaaggactacttatcatttccagcagtcatgatgacaagttaaggtgggttaccaattccaatataggaaggggatttcttgtttgtctaaatttctttttttcttaaaaaaaaaaaatcatttttatgggtctgttgtacaggccattaagtcataacaaggtgtttataatcgtatcaattgtgttgggggttcctttcttaactggtacaatttaggcaggcctgtattactgtattattattgttgttgttgttattgttttatatatatagtttggacatgtttattatctcttgctcctggatcctatttcagtgagctcccacactgtggggagggagggttttggggtaaggggagacttctgttcttaactgtggggaatgttcttgctggtttccttatccttgatgactcttacagaggtgctagaaaattattttcttttgccacttatgcaagaggcttggtgcagaagctgaaggcagtgtgtgcaaacactcccattccacacacgccccttcccctccccacatcaggtggtgcctttggagcacttttgtgtaggaaggaattcctgctgaactgtagctctcactcacccccaaatcattgaatgaccctgaggcccagttcctgtggtgcaacagtgctgctttctgctactttcaatgggaacagctgtacatgttgcagggcaggatttggttcccaagagcaaagactactgcagacacctgacttggtggttctcctgatttcttatctcctgaaaaatgctcctgctgttggtgtgtttgtttgtttgttccattttgtggaagtttttcatccaaactttaactaacttggcaaaaaaaaa

SEQ ID NO: 22273 - DNA, 426 bp, Homo sapiens
gattacataccacatattttcggaatttgtccttcttcccaaattaaatgatcttgtatctgtactacacttcatcgtgttttgatttttagttcttttctccaaggtgcatatccagtgtgtgtattataattagcaaacttaataagcagcaaagttctcatttagagttttccttatgtaataggtaataatggaacagctagagtcaaacttctagaattgctttgcaaaatactgggagaaagttaattatgacgtatttactgagaggagattaaataaaaccagttaaatgagctgaagtccaaaatgagattttaggtagacatacctataggtaccagatagtaagtatttggacagcaaaacaacaaaactatcttcttttaaggtgggtagcccatcagccttgatattttcttt

SEQ ID NO: 22274 - DNA, 413 bp, Homo sapiens
aacaagcagtgggctggttttggccgtcaggttctagtttgccagcccctgcactaggatcattttttgggcccaaccctcacccctttattattcatgcattggaagttaatttctggctgggcgtggtggctcacgtctgtaatcccagcactttgggaggctgaggcaggcagatcacttcagccaggagttcaagaccagcctggccaacatggccaaacgccatctctactaaaaatataaaaattagccaggcctgggggcacccgcctgtagtcccagctacttgagaagctaaggcatgaaaatcgcttgaacccaggaggtggaggttgtagtgagccaagattgcgccactgtacttcattcagcctgtgtgacagagcaagatcctgtttcaaaaaaaaaaa

SEQ ID NO: 22275 - DNA, 336 bp, Homo sapiens
atggaaggaactctgaacacgtccgaacatcagaaggaacaaactctggtcacaccgtctttaagaactataacactcaccgcgagggtcggcggcttcattcttgaagtcagtgagaccaagaacccaccaattccggacacacagtggcctctggggggattccaccagggttcaggccctggactggggctggatgaatagatcccatcaggtcccaccctgggggacttggaaaacttttatgtctagctaaaggattgtaaatacaccagtcagcactctgtgtctagctccaggtcgtggatgcaccaatcagcatctgtatctagctaa

SEQ ID NO: 22276 - DNA, 1714 bp, Homo sapiens
ggcacgagggccatcttcaccactggccagggggcgtcggctgtgggcctcacggcgtatgtccagcggcaccctgtcagcagggagtggaccttggaggctggggccctggttctggctgaccgaggagtgtgtctcattgatgaatttgacaagatgaatgaccaggacagaaccagcatccatgaggccatggagcaacagagcatctccatctcgaaggctggcatcgtcacctccctgcaggctcgctgcacggtcattgctgccgccaaccccataggagggcgctacgacccctcgctgactttctctgagaacgtggacctcacagagcccatcatctcacgctttgacatcctgtgtgtggtgagggacaccgtggacccagtccaggacgagatgctggcccgcttcgtggtgggcagccacgtcagacaccaccccagcaacaaggaggaggaggggctggccaatggcagcgctgctgagcccgccatgcccaacacgtatggcgtggagcccctgccccaggaggtcctgaagaagtacatcatctacgccaaggagagggtccacccgaagctcaaccagatggaccaggacaaggtggccaagatgtacagtgacctgaggaaagaatctatggcgacaggcagcatccccattacggtgcggcacatcgagtccatgatccgcatggcggaggcccacgcgcgcatccatctgcgggactatgtgatcgaagacgacgtcaacatggccatccgcgtgatgctggagagcttcatagacacacagaagttcagcgtcatgcgcagcatgcgcaagacttttgcccgctacctttcattccggcgtgacaacaatgagctgttgctcttcatactgaagcagttagtggcagagcaggtgacatatcagcgcaaccgctttggggcccagcaggacactattgaggtccctgagaaggacttggtggataaggctcgtcagatcaacatccacaacctctctgcattttatgacagtgagctcttcaggatgaacaagttcagccacgacctgaaaaggaaaatgatcctgcagcagttctgaggccctatgccatccataaggattccttgggattctggtttggggtggtcagtgccctctgtgctttatggacacaaaaccagagcacttgatgaactcggggtactagggtcagggcttatagcaggatgtctggctgcacctggcatgactgtttgtttctccaagcctgctttgtgcttctcacctttgggtgggatgccttgccagtgtgtcttacttggttgctgaacatcttgccacctccgagtgctttgtctccactcagtaccttggatcagagctgctgagttcaggatgcctgcgtgtggtttaggtgttagccttcttacatggatgtcaggagagctgctgccctcttggcgtgagttgcgtattcaggctgcttttgctgcctttggccagagagctggttgaagatgtttgtaatcgttttcagtctcctgcaggtttctgtgcccctgtggtggaagagggcacgacagtgccagcgcagcgttctgggctcctcagtcgcaggggtgggatgtgagtcatgcggattatccactcgccacagttatcagctgccatgctcctgtttgtattaaatggcagggtcatcattatttgtagg

SEQ ID NO: 22277 - DNA, 1755 bp, Homo sapiens
ggcacgagggccatcttcaccactggccagggggcgtcggctgtgggcctcacggcgtatgtccagcggcaccctgtcagcagggagtggaccttggaggctggggccctggttctggctgaccgaggagtgtgtctcattgatgaatttgacaagatgaatgaccaggacagaaccagcatccatgaggccatggagcaacagagcatctccatctcgaaggctggcatcgtcacctccctgcaggctcgctgcacggtcattgctgccgccaaccccataggagggcgctacgacccctcgctgactttctctgagaacgtggacctcacagagcccatcatctcacgctttgacatcctgtgtgtggtgagggacaccgtggacccagtccaggacgagatgctggcccgcttcgtggtgggcagccacgtcagacaccaccccagcaacaaggaggaggaggggctggccaatggcagcgctgctgagcccgccatgcccaacacgtatggcgtggagcccctgccccaggaggtcctgaagaagtacatcatctacgccaaggagagggtccacccgaagctcaaccagatggaccaggacaaggtggccaagatgtacagtgacctgaggaaagaatctatggcgacaggcagcatccccattacggtgcggcacatcgagtccatgatccgcatggcggaggcccacgcgcgcatccatctgcgggactatgtgatcgaagacgacgtcaacatggccatccgcgtgatgctggagagcttcatagacacacagaagttcagcgtcatgcgcagcatgcgcaagacttttgcccgctacctttcattccggcgtgacaacaatgagctgttgctcttcatactgaagcagttagtggcagagcaggtgacatatcagcgcaaccgctttggggcccagcaggacactattgaggtccctgagaaggacttggtggataaggctcgtcagatcaacatccacaacctctctgcattttatgacagtgagctcttcaggatgaacaagttcagccacgacctgaaaaggaaaatgatcctgcagcagttctgaggccctatgccatccataaggattccttgggattctggtttggggtggtcagtgccctctgtgctttatggacacaaaaccagagcacttgatgaactcggggtactagggtcagggcttatagcaggatgtctggctgcacctggcatgactgtttgtttctccaagcctgctttgtgcttctcacctttgggtgggatgccttgccagtgtgtcttacttggttgctgaacatcttgccacctccgagtgctttgtctccactcagtaccttggatcagagctgctgagttcaggatgcctgcgtgtggtttaggtgttagccttcttacatggatgtcaggagagctgctgccctcttggcgtgagttgcgtattcaggctgcttttgctgcctttggccagagagctggttgaagatgtttgtaatcgttttcagtctcctgcaggtttctgtgcccctgtggtggaagagggcacgacagtgccagcgcagcgttctgggctcctcagtcgcaggggtgggatgtgagtcatgcggattatccactcgccacagttatcagctgccattgctccctgtctgtttccccactctcttatttgtgcattcggttggtttctgtagtttaattttaataaagttgaataaaatat

SEQ ID NO: 22278 - DNA, 379 bp, Homo sapiens
aagcccagtagattcagctgatgtctctgttccagttactagtaggccaggatcaaggtgtctgtcagtctgaagtcttctttggcaagagtctgcttccaggctcatttgaataattggcagaattcagttccatgcatttgtagaactgagatcttcatttccttgctgactgtgggctgagagattgttttcaatttctagaggccacctgcattccttggctgatggtctcatccatctttgagccagcaacagtgggtaaattcctgttacacttcaaatccctctcgcttattagtctacttacatttctgactctagccagagtgatatccttgtttttaaggatgtctgtgattagattaagcccaccaaa

SEQ ID NO: 22279 - DNA, 442 bp, Homo sapiens
tcccgtgaaacaaaacaatctcgcattaatctagagatggtacaggtatgttggaaaacaatattgcaaaatatatcaacaatcataaaattgttcaaagcattttttttgagactgagtcttgctgtgttgcctaggcttgactggactgcaacagctgttcacaggcacaatcattgcacactacagcctcgagctcttgggctcaagcaatcgtcctgcctcagtcgcccaagtagctgggactgcagtcacacacatctccatatcccactctcaaagtcttagattcaataatatttcttatgaaaagctatcctccagaaataatttaacaaaatgagtaagctacatattcccaaatttttcttatagcattaccagctgaatttccccaaactatattagagataaatattaggggtatagtgacgtaaattat

SEQ ID NO: 22280 - DNA, 410 bp, Homo sapiens
ggaagagataaaggaaagcagattttagcatagttgatcatttgggttttggatttatttgattaggaaacaataaataaagtgcttggagatctatcagtagtgtcacaaagaaaccattttttttaaatgatacaggtcacaggtgacctgggcttaaaggagtcattataaatcctactatccttctccatggtagagagattcccaagagtgcatcctaacggagacagaggctcgctacacggccttgctgacccagatccagagtctgattgataacctggaagctcagctggcagagatccggtgtgccctggaaagacagaaccaagaatacgagatcctgctggacgtcaagtcccggctggaatgtgagattaccacataccgcagccttctggagagct

SEQ ID NO: 22281 - DNA, 523 bp, Homo sapiens
ctatggttgttcaattgctctaatagcatttattgaaaaggttaatgatttatttgtacttctgccaaaattaattgatcatactcatgtggtcatacttccgctttctctgttttataccacttagctttgtctatcttgctatcaataccacactgtcttgattactgtagctatatattactgtagctatatagtaaactttaataaaaggaagatgaactttcttcttcttttttcaaaatcggtttggctgtttaaggtctttttcttttggtatacattttagagtaaaagtacatacttctatgaaataccttactaagcttctgataggaaatacgataacactgtagaacagtttagggaggactggtatctttactaaatcttctaacccataaacatgatatttaggtcttcttgtctttcaccaacattttgtaattttcaacatgtagattctatacaattttgttgagattatgtcatctgtgaataaagactgttttatttcttttcc

SEQ ID NO: 22282 - DNA, 367 bp, Homo sapiens
ccttctgactccaagcctgtagtcctttcactggcctacagctgcttcctgagcccctttcctggttcagtcaggcaaaacaaaccagcttcctgcgagttaagggggaaaagggtttaatggggactgactcattgagattggcagtcccctttggttaatttcatcaggtcatctcctagcgttccatttccttttgtggagacacagatcagaggcaatctggctctgtatgaactcactttgtgactctgggtgaatcatttccctctctgggtttcaggttcctcattgcacagtaagtatattggaattcagtggttctcaaatctgctggaacgtcagaatcacctggggacattttctt

SEQ ID NO: 22283 - DNA, 759 bp, Homo sapiens
  misc_feature (2)..(2): n is a, c, g, or t
angacaaacctttcctcagagttgctttatagttgtgggtctgagaataaattcacagattcacccactgcatgctttgatggtttcacgtcaggaatgggcctacttttcctcaggtgagagcggaatcctgctgtacaagccacctgtaatgtgggcagtggcaactgctgtttcctttccaagtcttctgaggttgtttcctagtaagtgagctggaggctatggggcctggtcctggtggtagctattttgcttttggacataaaatcttggtagcttaatgtatttgttcctagggctgcagtagcaaagtaccacaaaccgggtggtactggtactgtgggttgtcccgcagttctggagactggaagtctgaaatcagatgctggcagggttaatttgtcctgagggctgtgagggagacacagctcctggctttctcctagctgctggtagtttactggcaacctttggcattccttagcttgtggcatcatcactccagtattcatgtgatattcttcctgtgtgtgtgtctctatgtcaagatttcccctgtttataagaaaaccagtcatattgggttagtggttgagcccaccttactgaccaaataaagtcacatgtcgaggtactacgggttaggatttcaacatgtacattttagagggacacaatttaatctataatagtgtggaattttcttttgggtatctaccagtcaccaagatatttatccctacttgaccagccacc

SEQ ID NO: 22284 - DNA, 1524 bp, Homo sapiens
  misc_feature (1133)..(1133): n is a, c, g, or t
ttttcattaaccttttcagaagacaaacagatccctgataagggaataaaattttaaacacatttttaaaacaaattttaaatgttaagcaaatgtgaaacattgggctagttttctttgttcattaatttctaggctcagacaacattttgcattgtatcaggcccaggcagtcagtttttgtggttacttttggggctgtgttggccctccctcatggtggtgtgaccctaggaacataggcccctaaaccgtttccctgatcttttcccagtaataaggcatttattgcaacatagcatcaactccattatgttgtatacacaagaactgttttgcttttttgaggcttggtcatggatactgattatgaacagacaaaaaatcttcagcatgtcctctttaggagaagttgtccttggatccatttgccaaggatttgtttaggtggcatagcagacagaggacattgtcttacagagcattaaagaatcatcataggagcagcaaacaattttattactgtaaaatttggtggtagtgggttttctatcccattttagtatttaatatacatcatctgccttctgggattaatgtctaaatgatacattgaaattcttggagatgccttagaaatgtctgtcaataggaattttttttctactttttaaggctatgttaatctcatagtgaaatttcctagttaaacagtaaaaaatagaaaatttatccaaatagtctggatgaactggttttaccttctcatgacaaaatggtaggtgaccaaacagtaggatgggtaaatgcagttctacttttatctattaaaaattagcagttgttctttaaaaagaagcaaattttataatttctaagtgccacctgcctgctgtttgcatttgtgcctcagggcccaaagaagcaagagataagcagtaatgtgtatgttttgcaatggttcttgtcaccattaaacaacaactggaaagaagggaaaataattgggggatcagatatactctcttttctcttgtctttattgttcctaatatcaggtgcccctccagtgtgtgaaaatggtatgaagcctggaggcctggcaaaggatgaagaacagagaatgggaatanaaagggacagaccatttttgctcagctctagactttttttttaaatcagctgtcatatgtgaaataatagcagaacagtgtaatgattaagaacatgatcctcggccgggcgcggtggctcaagcctgtaatcccagcactttgggaggccgaatcacgaggtcaggagatcgagaccgtcctggctaacacggtgaaaccccatctctactaaaaatccaaaaaaaaaaaaaaaaaaaaaatcagccgggcgcggtggcaggcacctgtagtcccagctattcgggaggctgaggcaggagaatggcgtgaacccgggaggcggagcttgcagtgagccgagatcgggccactgcactccagcctgggcgacagagcaagactctgtcta

SEQ ID NO: 22285 - DNA, 635 bp, Homo sapiens
gcacccccaccaaagtctgagcatcattctacaaatgccttgtccagcggtgaacattctattgcagccaagcaaagtaaggggcatcagttgcacattttgccatcaagcaaagcaacaaaatgatgccttgcagcttttatggccaaacaaacacaaatgatgtaattgggaaaagctgtctccgaataggaggaaaagagtaaagggcaatcctttgagctggagagatgaccaccattcgagggtctgggatcaaagccccagccagacatcaaagcccatttgagtctaatgccaaaaaagccacagtgaattaaacttcatatataaactaattatagcttgaccccacaatcaggcttcagtgagcacacaggggaaagaaagcagacattgaaacaaaagatcaagaaaaaagaagcgtggtagcaaaatggggcaacatcatggccctgaaaattttaaacatcttttgagggcagaagggaataggggaatagcagaagaaacagcaaatgtttgacaatgctggtcttgtttgaaaggctatgaaacaactccttccatcctctctggtgcacaaccaaacactaccaaataaaccatcctacatgaaaaggttaaaaaatagc

SEQ ID NO: 22286 - DNA, 144 bp, Homo sapiens
gactccatctcagaaaaaaaaaaaaagtgtaggtctgtacaatgcagactgagtttctttgctgatcagttccagagcccttgccttaccacggtctgtgagatccggctcccggccagcgctccagcctcattttctccccat

SEQ ID NO: 22287 - DNA, 499 bp, Homo sapiens
acacttaccatgagtggagcctgtggaactggaagttgctctgggtgagtcagtggttgagtggtgtgtgtgtgtgagtaaacagtgcatttggtaccgatctttgactatcagaacatgaagtttcctcattttgtgcagtagccacatgctattttattccagggtgtgctctagcctacttacccagctcctgttgataagacatttaggtggttcccagtgttttgctattaaagacaatgcagtagtggataattttgtgagtaatattccacatctatctaagtatatatgtaggttaaatttctagaaatgaagttgctagaacaaaggaaaaataatctgtgtgtttgattatatgagagaaatgaagctactttaaaaattttacattaataaaatttttatattggaaacttaacttatttaaatgcaaagattatttagctatttttagaatattagtggactttagtatatctggtaccttaaaaag

SEQ ID NO: 22288 - DNA, 213 bp, Homo sapiens
gagaaagtccacatcccaggccttgcaaatggctgtgcctcctggggagaggagtggaggggagggcttgtccaggctgctggacatttgccaagtctcaaggcacaagcctgtgagctggccttcctgtgtcacaattctctcaccacagcaggcctccgtcaccagctcaccctgccccacaatcctggtgcatgcaaaggcatctggatt

SEQ ID NO: 22289 - DNA, 643 bp, Homo sapiens
cagaaaagtaaggaaacataactgggtaggaatgtccacttacgtttcacaaactcacttttagagtttcatgccactttcctcattcttctctttaagatactattatattgaacgtgggacccatgtctaaatacttgtatagataaatatttcttgtatattcttcccatacaagcaagacttgaatacagttgtagctagtcccacttttataataaaagcttccaaactctttatcataaactttgtctgtgagcttgggaatacagagaaagcaagttgatcattctgagacccttcctcatttgccctgaatcagttccccaagattggactgtactttaagctagttgttgtagcagtggtggttgttgttttatatcttgagatacttctagaacattctagaaacagggtattctaaaggcttactttatatgccatcctttttgaaccctcttattttagaaattattacacgtgcacacttatgatttcaaccttgtaaaataatttcaaattcatttcgtatccacattttactgcagtttccctatcatcatctcaatagttatagaactggttgaaattaaactgttttgaactaagaagtagatatatatatatatatatatatata

SEQ ID NO: 22290 - DNA, 882 bp, Homo sapiens
ggcacgagagaaaagcaaaaaagaagaaaaaattacccacaatcttaccatccagctataacaacacccagcattaggatataggtttgaaaatctgaattttcccccaaaatgcattacaatatcctttcctgtcattgaaatttattcaacaaccttaatagtatcctcattaatttaccaaaatattaaatcatcccttgtttttgattatttaagttgctattttctattgttgaaagcaaattttttcaacagaaaaggagggagaggcacaaagccctcaaggaatgtaataggaaagccatgggaagcaattaaataggtgggacccagaaatggggaggatgaagcttccaaaggataagatactttcaactttaacagtttggttttaaggacagctcctatttttttaaaacagccccactagggacttttgatggtgaacttccccagatgcccgtgacgtcaggaggtgaaagcaggtgctgcagtgggtggggctggcagctggtgtgctgctcaccgagaagggaggagggaggagccacggagaagcctggagaaggagtaacacaagaaagagactgcgccgtgaccctgtgaggaggcatttatgctttaaacccccatagggagtattcagagggcagaacctcagaagtagctgtgtgggtgtcgaggaggtagagcgttccttgctccttacagacctcactccccttttgcatccaggggccaatgctcctgccatcagccttgcgctctccttttcacttctcttatgggctcaggtggttaaagatgcttatgattttggcctggtgaaaaatccctaaggcaggaaagcacatgaaaggaattaggctatcttggaaa

SEQ ID NO: 22291 - DNA, 172 bp, Homo sapiens
aaatgatccacccacctcagcctcccacagtgctgggatcacagatgtgagctactgggcccagctgagcataagagtcttttctgtgtcacctttgtgttccctacagtgtctagcaagtgcgttgtgaggggaagataattgaataaattttatccaggtaaatgaacaa

SEQ ID NO: 22292 - DNA, 301 bp, Homo sapiens
gagacatcagcctactatttaaacaacaccctgtctggtttctatggcacaaactaccttcaaaaacaaaatgaaccatattaaatgaagcccagggaaagtcaagctcaggagtgctgccatagtctgtactccgagtcaggagacctggacttttatgttgcattgaccctgcagtcttgggctggggcctcaagcccaccaagaagagtgtaatttaccagccactgcagagtacagccggtgggatggagacagatgcccacctgagtgccaagcgaaacctgctccaaattttgtg

SEQ ID NO: 22293 - DNA, 309 bp, Homo sapiens
ccacagcaaggaaaatgagagaaaagagaagttcaggagagaaaggagatagaaagctggagaaagggaaaagatgcatttggtgaaaggaggtataagttgcatttcattcattcattcagcactagtttttgagcactatgtgccagccaccagcctcccttccaccagcctcccttccaccagtctcccttccaccagcctccctccctccagtctcccttctcccttccaccagccttgagggtctctctctcaacccctcaattgtttcctccatctcatttatcacaatttgtgatttgaaaa

SEQ ID NO: 22294 - DNA, 456 bp, Homo sapiens
ccacagcaaggaaaatgagagaaaagagaagttcaggagagaaaggagatagaaagctggagaaagggaaaagatgcatttggtgaaaggaggtataagttgcatttcattcattcattcagcactagtttttgagcactatgtgccagccacagggctaggtcccaggaatatggcaacagatgagttaaacaaagttactggtttcatgaagcctaccttttgttggaggaggtagaaggtagactcctaaagaataactagttgttcaaaatcacaaattgtgataaatgagatggaggaaacaaatgaggggttgagagagagaccctcaaggctggagagagaagagcttccttagattgtgtgatcagaaaagccttctcaaaaaaagtaattgccttttttggaacaaggagcattctgaaataaggaaaaagagaatgctgggaaatc

SEQ ID NO: 22295 - DNA, 351 bp, Homo sapiens
tctctgtgaaacaagaaaatataatgaactgtcatttgcacgttgcacaaagcatgaactttatttggagtcttagataaacttgttctgatctagaaatgaaaaataatgaactctgctgagttctgcatttcctgtctgaagttagctttaccataaggatctggtgggtaagtgtttgttgttcttgtcattaattattggaacagagttgtttggagtagatgattcattgtggaacaaatcgtctgattttgagggacattttccattataaaataattatacataaaaacagaagtattgctttaatactaagatttgtaacaatgccatgtcattctggttgta

SEQ ID NO: 22296 - DNA, 315 bp, Homo sapiens
ggtaatatgtctggtagcttgggaatccaggggctttccactttgtgattcaaccatagcaacatgagacttcaaatttgccctcgtgtggaaaagagatcttggaaaatccactcttgaattgacacacatcatttgcacttacagtccattggctagaactagtcatgtggctcaaacctaacctcagggaggctgggagaaataaaggagggcatgtattctctgtggatatcactctcattatcacatttgctccatcccttgtcagacattgaatgaacaaacactttggaaattgcaatgtggaaaaaa

SEQ ID NO: 22297 - DNA, 286 bp, Homo sapiens
aaatgtattgaaatgttagaatttatatggagtccagctttttactttccgaacacacacaagtgctttgaaattcattgagaagttatttctttggcaaaaaactcttgcttactctttcccttcaagagaacaggatctaacaaggtctatactctgaaattgtttaagatctttaaagtctgctcttactcttgaagtaagacatttcctttggtgatgacctcattggaaaggtcaaggagtgaataggaaattcttagagattgagatggcattgccaata

SEQ ID NO: 22298 - DNA, 348 bp, Homo sapiens
cacctcagaccatccttggatttatattatccttccagcttcccaaccagtagcagagcaaaggatgccccaactctgctccagtgctaaccccttcacctgtgtttgacagtgtctcccttttccactgcagctcctgcttccacatttatcctcaccctcaaagatctctggcttgttccctctgaattctgccatacacccaggcttccctgttgtaatatcatgtgcctcttgcctcttagtctcttttgctcccttttactacaaaacatgttgaacaggtggtccacgctcctatctctgcgtctctccaaaccaattttcatttccaccaatttactgaac

SEQ ID NO: 22299 - DNA, 642 bp, Homo sapiens
tgaatctgaaggatgccttcatctgtattcccctgagtccagagtcccatgaagtgtttgcctttgaataggaagactctgacactaaagctaaatgatagtattgctggatgatgctccatcaaggcttcaaaaactcactaaccgtccgggggaaatacatgctaaggagttttgggacctccaattgaaaaatgagactttgcttatatatgttgatggcatattagaagccagcacaactatggcaaattgaccagaatattatactggctttacatttttttttttgtctggatggggatccaaagtatccaagaaaaaaatcacaaatattgaaaaactcaattatatattttaggtttgaattttctcaggagcagagtaatctgctttcggactggagagaagctcttgtcagggtggccagactcaggacatggcagcagctgtgaggggtttttaggtatggctgaatgttgccatatttcattttcttattttgggcttatagcaaaatgtctctatgaagccctaagaccagacacttgacttctagaatggacaaggaatgtcaaaaggcctttctaaccattaagtaaaaattactaatggatctggctactgagaccccctgaacta

SEQ ID NO: 22300 - DNA, 2075 bp, Homo sapiens
tagagaaaagctctcgctatgttacccgggctggtctcgaactcctgggctcaagagatcctctggcctccgcctcccaaagttctgggattacaggtgtgagtccatgtgcccagccctttaattctttacttggggttcaggtgactacatatttcttacttacaaattttacttaatctcgctgatgctgtcacttgaaagctgacccaccttgaatgaagcctcctccaacaagtctggaatccatccgaatttaaattaacaggcgctcctatgaattccatcagagaacacacagtagatgctttagaacctcttcccatgcctccgaagtatctggtttgcattgtggtggccattagtcatccatgggcttctgatgtaaaaaacaaacctgcctcttttgaccctgtgctgtacagcatcagggcagtgattgctggccacatactggacccttgaaacagagggctctgcatccatgtccatgagccttcatgcccatctggccatcaggccttgggaagcagcaccccacagctttggcacagctgcagtgacctccttgcctccgaatggagtcaaatgtgtacacgctgcaattctcatctgcaggaagcactggcctccttcatccttaggctatagtgctgacactggcctccttcatcctcagactgtggtgccggatgtcacccctctgcgaggcccttgggatcgactgagtgaccagcagtgaagttcgtcagccttctgaatggatgccatgatcagatgtgatggagctcagtgggatgctgctgctttccctcccttagctaggatgtccctgataaaggatgacacccaagcctcagcacaactggccaaacttgaggtggtcatcatagcactgatgctgggccaacaattagccccatttgtacctttttacaaactttttgacaattgccaagaatcgtccaccttccctccccattgaattaaatacacttcttgtctcatggatactcagaataccaatcaaggtaacagatgcctttattttaactaaggacacagtacagatctcacagggacactccttatcccttgcagagttccagacactactgatggtcaccaaagcaacatttcatcagaaaacacagtgctgggcttgtgaagaaggtgtccagcagagcttccactgcccctgtaggctgcaggcagctgcttcagttgagagatacactgagctcctcaaagaattcctatttaaggtacaaagcagcgactggatgccctgctggattccactattgccacaggctttgataactctaagttcatgctccttaggaaagtgcactttttacaccaatgttagacagttccctcagttgcctttactggacatcaaggagttcacatttttgacaatctttcagtcctgaactgtccaaggggtggaggtagctccatacaggaagctgcctgctgcgtgtggatcagtaatatcagacttgcccaacagctcactggagacatcaaaaccaatgcatgggggatgcatgacgtcacccaaatatttaccacacgcttttgctgccagagaccccagatcacttttcctgcctcctgctaaacaaatgggagcagtagcttctcatcagcctccacatttcattactcataattgtggccttcctaatgtctcatgcccctaagcacttattacaatgtctcaacagccttctctcagcctctcaaaatattagtcatcattaaaataaatgtctgatgttaaagcatcagggtcaattgtactgtgacacctaaaatttcatgctgcatcccaccaggtcctcagcctaatggctttcatgcccccaacagactgctaaactctttgaattagtcaagcatatccctcaagggacaaggggttaccccaccctctgatttctaccaagcctgcctcccgcaccctgtgctccagagtgaacccccgggtagacctgcacagatgcagtgtcatcccctgttgggctgagtatgcgagatgaataaattacggtgaatttcgtcta

SEQ ID NO: 22301 - DNA, 710 bp, Homo sapiens
ccgggctgcaggaattcggcacgaggaaatatagacacattggataaatgctatttaaagtctgagtgcgttggtaactgattcagtcatctgtaggttgaagtgattacttttatctgccttcatagtgagaattagatttctattctttgtaaagcagggaatatagattgtgcatggagtaaaagaattcaatccttattaataatgatggtagctgcgctgcagaaaagaaagcctgtcagagtaacttattcagttttacatcataatcagaggtgtgtccatctctgttgaaggcagaattaaaaaccccttcaacatttttaaaataatagatgaaaaacatctcaaagtctcctttaaaatttgaattgacgattccacataaaaggaagggaccaaaaatatcttaaagaaatacttcacgatggaagtgatgttttaagtgaaatttcatcaaggagaagtttttccaaaaagtatttttacctcaggaagaatctcattagtttattctgtaaatagttcctagtaaaatgataaagacttgatttttcaaaaacaataaaaaacttacacggtttaatctaatgttgtgatttcgaaagtgcttcttctgcaatcatagttacgcgtgtgtatttatatgcattttcttagctcattcaaacgccaataaaatactatactatccaggctccttaaaa

SEQ ID NO: 22302 - DNA, 360 bp, Homo sapiens
gtccaaggggtggaggtagctccatacaggaagctgcccctgtaggctgcaggcagctgcttcagttgagagatacactgagctcggtcaattgtactgtgacacctaaaatttcatgctgcatcccaccaggtcctcagcctaatggctttcatgcccccaacagactgctaaactctttgaattagtcaagcatatccctcaagggacaaggggttaccccaccctctgatttctaccaagcctgcctcccgcaccctgtgctccagagtgaacccccgggtagacctgcacagatgcagtgtcatcccctgttgggctgagtatgcgagatgaataaattacggtgaatttcgtcta

SEQ ID NO: 22303 - DNA, 3750 bp, Homo sapiens
tagagaaaagctctcgctatgttacccgggctggtctcgaactcctgggctcaagagatcctctggcctccgcctcccaaagttctgggattacaggtgtgagtccatgtgcccagccctttaattctttacttggggttcaggtgactacatatttcttacttacaaattttacttaatctcgctgatgctgtcacttgaaagctgacccaccttgaatgaagcctcctccaacaagtctggaatccatccgaatttaaattaacaggcgctcctatgaattccatcagagaacacacagtagatgctttagaacctcttcccatgcctccgaagtatctggtttgcattgtggtggccattagtcatccatgggcttctgatgtaaaaaacaaacctgcctcttttgaccctgtgctgtacagcatcagggcagtgattgctggccacatactggacccttgaaacagagggctctgcatccatgtccatgagccttcatgcccatctggccatcaggccttgggaagcagcaccccacagctttggcacagctgcagtgacctccttgcctccgaatggagtcaaatgtgtacacgctgcaattctcatctgcaggaagcactggcctccttcatccttaggctatagtgctgacactggcctccttcatcctcagactgtggtgccggatgtcacccctctgcgaggcccttgggatcgactgagtgaccagcagtgaagttcgtcagccttctgaatggatgccatgatcagatgtgatggagctcagtgggatgctgctgctttccctcccttagctaggatgtccctgataaaggatgacacccaagcctcagcacaactggccaaacttgaggtggtcatcatagcactgatgctgggccaacaattagccccatttgtacctttttacaaactttttgacaattgccaagaatcgtccaccttccctccccattgaattaaatacacttcttgtctcatggatactcagaataccaatcaaggtaacagatgcctttattttaactaaggacacagtacagatctcacagggacactccttatcccttgcagagttccagacactactgatggtcaccaaagcaacatttcatcagaaaacacagtgctgggcttgtgaagaaggtgtccagcagagcttccactgcccctgtaggctgcaggcagctgcttcagttgagagatacactgagctcctcaaagaattcctatttaagtttaggctatgagcatagatggaagaggtggctgctgtattggatcaaggatatgagcagagatggatgaggcagcggctgtaatggatcaaggctatgaacatcttgtgaagtaggatgttaagtctgcaaatatcagagtgaatccaaacttatcaattcaacactggattgtaaaacagctcaaaaaaagactaaaaacacagctctacactttaggaggttggggcaggcagattgctcgagctcaggagtgggagacaagtttaggaaacatggaaaaaccctgtctcaaaaaaaaaaaaatttgaattagctgggtatggtggtataagcctgtggttccagcttctcaggaggctgaggtgagaggattgcttgagcctggaaggtgaggctgcagtgagctctgatcacaccactgcattccagcctaggtgatagagtgagaccctgtcttaaaaaaacaaacaaacaaacaaaaaacaaaaacagctctaaacgaatgtggctagaaaagtagctcaagttgttcctgtctggtgaaatacaaacataaatgaattatttatgtgccagtggcttcctgatgctgagagcaaagccagttgttctggcaggttctggaaaaatttatcacctcatggggttcaatgccaatgtcaaatcataaatataataatcaaatctgaaagtgaacccagtttcagagacatccagaagccactgtgtatgaagctcctttcagataaagagaagatattatttgacttcttatctctgttgtctagcacaatgtccagaacacaacagatattccatatgcacagtcacatcctatgtatgtgtgtttcttttccagcaaggactagaggtcctaagctttgtttgtatgacgagccagtgcccaaatgagcaggagggtcttagcacagtcacctacacactcatttcgatgctctgaccccttatcttggctagtcaaagcgtggtctatgagtttgcattttgataggatcccctggtgaatcttgtgcatgtcaaaggaagagaagaactgccctcaaaatatagagcaggtgaactaaattattaacttatagaggtaggctggctatttatttatgtatcttgttgatgggaagattcaaattgatatacataatcacccccataaggatttcaggtaaaaaacaaacaaacaaaggtttagatgttagatatattttacaattaccacaccagtctttttactacagcatctagtaacacatttaccatagatttagatggaaattttcatcccataagcctttgttagtatttttaaaattgaatactcaataaatagtggccaagttgaatctcttagaggaatctcactcaaactacagtcatattttccaataggccccacaaaaatcattgctctagagtaatttaatatatttatccacctctttagacacttaggtaagtataataatacaagttttgtgcgtgtgtgtgtattgtgtaccttgtggcttcttgcccagtttctgcaacacctgaagctgatgcatgtttaatgtaaataatgtccagcaatgttacaaatgttgacttttatgtgcccatcaggaaaaaaaagatgaatgttattgtagaggaaattttcattctggaaaaaatgcatactatttgaatattattttcatgatttccacagatattacacacagatattatattccaaggattatgtttcaaagtcatcaaaaatagaaaatacatctatatttctaactgaaaataataacagtaagtagcccagctttggggaaatgtaataaaaatattaatgaccatcacaactcattaaaagcataaattgtgcaatgatttaaactacatgttcttcatatgaatgtgtgtagaaatatagacacattggataaatgctatttaaagtctgagtgcgttggtaactgattcagtcatctgtaggttgaagtgattacttttatctgccttcatagtgagaattagatttctattctttgtaaagcagggaatatagattgtgcatggagtaaaagaattcaatccttattaataatgatggtagctgcgctgcagaaaagaaagcctgtcagagtaacttattcagttttacatcataatcagaggtgtgtccatctctgttgaaggcagaattaaaaaccccttcaacatttttaaaataatagatgaaaaacatctcaaagtctcctttaaaatttgaattgacgattccacataaaaggaagggaccaaaaatatcttaaagaaatacttcacgatggaagtgatgttttaagtgaaatttcatcaaggagaagtttttccaaaaagtatttttacctcaggaagaatctcattagtttattctgtaaatagttcctagtaaaatgataaagacttgatttttcaaaaacaataaaaaacttacacggtttaatct

SEQ ID NO: 22304 - DNA, 3692 bp, Homo sapiens
tagagaaaagctctcgctatgttacccgggctggtctcgaactcctgggctcaagagatcctctggcctccgcctcccaaagttctgggattacaggtgtgagtccatgtgcccagccctttaattctttacttggggttcaggtgactacatatttcttacttacaaattttacttaatctcgctgatgctgtcacttgaaagctgacccaccttgaatgaagcctcctccaacaagtctggaatccatccgaatttaaattaacaggcgctcctatgaattccatcagagaacacacagtagatgctttagaacctcttcccatgcctccgaagtatctggtttgcattgtggtggccattagtcatccatgggcttctgatgtaaaaaacaaacctgcctcttttgaccctgtgctgtacagcatcagggcagtgattgctggccacatactggacccttgaaacagagggctctgcatccatgtccatgagccttcatgcccatctggccatcaggccttgggaagcagcaccccacagctttggcacagctgcagtgacctccttgcctccgaatggagtcaaatgtgtacacgctgcaattctcatctgcaggaagcactggcctccttcatccttaggctatagtgctgacactggcctccttcatcctcagactgtggtgccggatgtcacccctctgcgaggcccttgggatcgactgagtgaccagcagtgaagttcgtcagccttctgaatggatgccatgatcagatgtgatggagctcagtgggatgctgctgctttccctcccttagctaggatgtccctgataaaggatgacacccaagcctcagcacaactggccaaacttgaggtggtcatcatagcactgatgctgggccaacaattagccccatttgtacctttttacaaactttttgacaattgccaagaatcgtccaccttccctccccattgaattaaatacacttcttgtctcatggatactcagaataccaatcaaggtaacagatgcctttattttaactaaggacacagtacagatctcacagggacactccttatcccttgcagagttccagacactactgatggtcaccaaagcaacatttcatcagaaaacacagtgctgggcttgtgaagaaggtgtccagcagagcttccactgcccctgtaggctgcaggcagctgcttcagttgagagatacactgagctcctcaaagaattcctatttaagtttaggctatgagcatagatggaagaggtggctgctgtattggatcaaggatatgagcagagatggatgaggcagcggctgtaatggatcaaggctatgaacatcttgtgaagtaggatgttaagtctgcaaatatcagagtgaatccaaacttatcaattcaacactggattgtaaaacagctcaaaaaaagactaaaaacacagctctacactttaggaggttggggcaggcagattgctcgagctcaggagtgggagacaagtttaggaaacatggaaaaaccctgtctcaaaaagaggctgaggtgagaggattgcttgagcctggaaggtgaggctgcagtgagctctgatcacaccactgcattccagcctaggtgatagagtgagaccctgtcttaaaaaaacaaacaaacaaacaaaaaacaaaaacagctctaaacgaatgtggctagaaaagtagctcaagttgttcctgtctggtgaaatacaaacataaatgaattatttatgtgccagtggcttcctgatgctgagagcaaagccagttgttctggcaggttctggaaaaatttatcacctcatggggttcaatgccaatgtcaaatcataaatataataatcaaatctgaaagtgaacccagtttcagagacatccagaagccactgtgtatgaagctcctttcagataaagagaagatattatttgacttcttatctctgttgtctagcacaatgtccagaacacaacagatattccatatgcacagtcacatcctatgtatgtgtgtttcttttccagcaaggactagaggtcctaagctttgtttgtatgacgagccagtgcccaaatgagcaggagggtcttagcacagtcacctacacactcatttcgatgctctgaccccttatcttggctagtcaaagcgtggtctatgagtttgcattttgataggatcccctggtgaatcttgtgcatgtcaaaggaagagaagaactgccctcaaaatatagagcaggtgaactaaattattaacttatagaggtaggctggctatttatttatgtatcttgttgatgggaagattcaaattgatatacataatcacccccataaggatttcaggtaaaaaacaaacaaacaaaggtttagatgttagatatattttacaattaccacaccagtctttttactacagcatctagtaacacatttaccatagatttagatggaaattttcatcccataagcctttgttagtatttttaaaattgaatactcaataaatagtggccaagttgaatctcttagaggaatctcactcaaactacagtcatattttccaataggccccacaaaaatcattgctctagagtaatttaatatatttatccacctctttagacacttaggtaagtataataatacaagttttgtgcgtgtgtgtgtattgtgtaccttgtggcttcttgcccagtttctgcaacacctgaagctgatgcatgtttaatgtaaataatgtccagcaatgttacaaatgttgacttttatgtgcccatcaggaaaaaaaagatgaatgttattgtagaggaaattttcattctggaaaaaatgcatactatttgaatattattttcatgatttccacagatattacacacagatattatattccaaggattatgtttcaaagtcatcaaaaatagaaaatacatctatatttctaactgaaaataataacagtaagtagcccagctttggggaaatgtaataaaaatattaatgaccatcacaactcattaaaagcataaattgtgcaatgatttaaactacatgttcttcatatgaatgtgtgtagaaatatagacacattggataaatgctatttaaagtctgagtgcgttggtaactgattcagtcatctgtaggttgaagtgattacttttatctgccttcatagtgagaattagatttctattctttgtaaagcagggaatatagattgtgcatggagtaaaagaattcaatccttattaataatgatggtagctgcgctgcagaaaagaaagcctgtcagagtaacttattcagttttacatcataatcagaggtgtgtccatctctgttgaaggcagaattaaaaaccccttcaacatttttaaaataatagatgaaaaacatctcaaagtctcctttaaaatttgaattgacgattccacataaaaggaagggaccaaaaatatcttaaagaaatacttcacgatggaagtgatgttttaagtgaaatttcatcaaggagaagtttttccaaaaagtatttttacctcaggaagaatctcattagtttattctgtaaatagttcctagtaaaatgataaagacttgatttttcaaaaacaataaaaaacttacacggtttaatct

SEQ ID NO: 22305 - DNA, 3105 bp, Homo sapiens
cacataggatgtgactgtgcatatggaatgtctgttgtgttctggacattgtactagacactagagataaaaagtcaaatatcccttgcctctatctgaaaggagcttcctactcagtggattctgactgcagtatatattttctcttctgacctgggagagtgagctctacctcaatgttggtaattgaacactgcccagtggatttgacaggggagaccacaggtagttgtgttcctacatagctatgaccatagtatatctcacgatgccatttccccgttgtcaaaaggctccctccagtatcatacacgctccccatgattatacattcttcttccttccaccaaattttccttaatcttgtaaagataaaaacataaaccacattcttgtcatattaattatatattaatgatgaaaattccttacttttcatgtgtttaatattttctcccaatttatagaatatattggttaatataagaataaattttagccatgcacatctattacaaacttcattttatactttgctatttttaaatttcttatgctcttataaaacatgtgttctggactcacgttggcttccatttcttccctctggcttctattagtttaggctatgagcatagatggaagaggtggctgctgtattggatcaaggatatgagcagagatggatgaggcagcggctgtaatggatcaaggctatgaacatcttgtgaagtaggatgttaagtctgcaaatatcagagtgaatccaaacttatcaattcaacactggattgtaaaacagctcaaaaaaagactaaaaacacagctctacactttaggaggttggggcaggcagattgctcgagctcaggagtgggagacaagtttaggaaacatggaaaaaccctgtctcaaaaaaaaaaaaatttgaattagctgggtatggtggtataagcctgtggttccagcttctcaggaggctgaggtgagaggattgcttgagcctggaaggtgaggctgcagtgagctctgatcacaccactgcattccagcctaggtgatagagtgagaccctgtcttaaaaaaacaaacaaacaaacaaaaaacaaaaacagctctaaacgaatgtggctagaaaagtagctcaagttgttcctgtctggtgaaatacaaacataaatgaattatttatgtgccagtggcttcctgatgctgagagcaaagccagttgttctggcaggttctggaaaaatttatcacctcatggggttcaatgccaatgtcaaatcataaatataataatcaaatctgaaagtgaacccagtttcagagacatccagaagccactgtgtatgaagctcctttcagataaagagaagatattatttgacttcttatctctgttgtctagcacaatgtccagaacacaacagatattccatatgcacagtcacatcctatgtatgtgtgtttcttttccagcaaggactagaggtcctaagctttgtttgtatgacgagccagtgcccaaatgagcaggagggtcttagcacagtcacctacacactcatttcgatgctctgaccccttatcttggctagtcaaagcgtggtctatgagtttgcattttgataggatcccctggtgaatcttgtgcatgtcaaaggaagagaagaactgccctcaaaatatagagcaggtgaactaaattattaacttatagaggtaggctggctatttatttatgtatcttgttgatgggaagattcaaattgatatacataatcacccccataaggatttcaggtaaaaaacaaacaaacaaaggtttagatgttagatatattttacaattaccacaccagtctttttactacagcatctagtaacacatttaccatagatttagatggaaattttcatcccataagcctttgttagtatttttaaaattgaatactcaataaatagtggccaagttgaatctcttagaggaatctcactcaaactacagtcatattttccaataggccccacaaaaatcattgctctagagtaatttaatatatttatccacctctttagacacttaggtaagtataataatacaagttttgtgcgtgtgtgtgtattgtgtaccttgtggcttcttgcccagtttctgcaacacctgaagctgatgcatgtttaatgtaaataatgtccagcaatgttacaaatgttgacttttatgtgcccatcaggaaaaaaaagatgaatgttattgtagaggaaattttcattctggaaaaaatgcatactatttgaatattattttcatgatttccacagatattacacacagatattatattccaaggattatgtttcaaagtcatcaaaaatagaaaatacatctatatttctaactgaaaataataacagtaagtagcccagctttggggaaatgtaataaaaatattaatgaccatcacaactcattaaaagcataaattgtgcaatgatttaaactacatgttcttcatatgaatgtgtgtagaaatatagacacattggataaatgctatttaaagtctgagtgcgttggtaactgattcagtcatctgtaggttgaagtgattacttttatctgccttcatagtgagaattagatttctattctttgtaaagcagggaatatagattgtgcatggagtaaaagaattcaatccttattaataatgatggtagctgcgctgcagaaaagaaagcctgtcagagtaacttattcagttttacatcataatcagaggtgtgtccatctctgttgaaggcagaattaaaaaccccttcaacatttttaaaataatagatgaaaaacatctcaaagtctcctttaaaatttgaattgacgattccacataaaaggaagggaccaaaaatatcttaaagaaatacttcacgatggaagtgatgttttaagtgaaatttcatcaaggagaagtttttccaaaaagtatttttacctcaggaagaatctcattagtttattctgtaaatagttcctagtaaaatgataaagacttgatttttcaaaaacaataaaaaacttacacggtttaatct

SEQ ID NO: 22306 - DNA, 3868 bp, Homo sapiens
tagagaaaagctctcgctatgttacccgggctggtctcgaactcctgggctcaagagatcctctggcctccgcctcccaaagttctgggattacaggtgtgagtccatgtgcccagccctttaattctttacttggggttcaggtgactacatatttcttacttacaaattttacttaatctcgctgatgctgtcacttgaaagctgacccaccttgaatgaagcctcctccaacaagtctggaatccatccgaatttaaattaacaggcgctcctatgaattccatcagagaacacacagtagatgctttagaacctcttcccatgcctccgaagtatctggtttgcattgtggtggccattagtcatccatgggcttctgatgtaaaaaacaaacctgcctcttttgaccctgtgctgtacagcatcagggcagtgattgctggccacatactggacccttgaaacagagggctctgcatccatgtccatgagccttcatgcccatctggccatcaggccttgggaagcagcaccccacagctttggcacagctgcagtgacctccttgcctccgaatggagtcaaatgtgtacacgctgcaattctcatctgcaggaagcactggcctccttcatccttaggctatagtgctgacactggcctccttcatcctcagactgtggtgccggatgtcacccctctgcgaggcccttgggatcgactgagtgaccagcagtgaagttcgtcagccttctgaatggatgccatgatcagatgtgatggagctcagtgggatgctgctgctttccctcccttagctaggatgtccctgataaaggatgacacccaagcctcagcacaactggccaaacttgaggtggtcatcatagcactgatgctgggccaacaattagccccatttgtacctttttacaaactttttgacaattgccaagaatcgtccaccttccctccccattgaattaaatacacttcttgtctcatggatactcagaataccaatcaaggtaacagatgcctttattttaactaaggacacagtacagatctcacagggacactccttatcccttgcagagttccagacactactgatggtcaccaaagcaacatttcatcagaaaacacagtgctgggcttgtgaagaaggtgtccagcagagcttccactgcccctgtaggctgcaggcagctgcttcagttgagagatacactgagctcctcaaagaattcctatttaagtttaggctatgagcatagatggaagaggtggctgctgtattggatcaaggatatgagcagagatggatgaggcagcggctgtaatggatcaaggctatgaacatcttgtgaagtaggatgttaagtctgcaaatatcagagtgaatccaaacttatcaattcaacactggattgtaaaacagctcaaaaaaagactaaaaacacagctctacactttaggaggttggggcaggcagattgctcgagctcaggagtgggagacaagtttaggaaacatggaaaaaccctgtctcaaaaaaaaaaaaatttgaattagctgggtatggtggtataagcctgtggttccagcttctcaggaggctgaggtgagaggattgcttgagcctggaaggtgaggctgcagtgagctctgatcacaccactgcattccagcctaggtgatagagtgagaccctgtcttaaaaaaacaaacaaacaaacaaaaaacaaaaacagctctaaacgaatgtggctagaaaagtagctcaagttgttcctgtctggtgaaatacaaacataaatgaattatttatgtgccagtggcttcctgatgctgagagcaaagccagttgttctggcaggttctggaaaaatttatcacctcatggggttcaatgccaatgtcaaatcataaatataataatcaaatctgaaagtgaacccagtttcagagacatccagaagccactgtgtatgaagctcctttcagataaagagaagatattatttgacttcttatctctgttgtctagcacaatgtccagaacacaacagatattccatatgcacagtcacatcctatgtatgtgtgtttcttttccagcaaggactagaggtcctaagctttgtttgtatgacgagccagtgcccaaatgagcaggagggtcttagcacagtcacctacacactcatttcgatgctctgaccccttatcttggctagtcaaagcgtggtctatgagtttgcattttgataggatcccctggtgaatcttgtgcatgtcaaaggaagagaagaactgccctcaaaatatagagcaggtgaactaaattattaacttatagaggtaggctggctatttatttatgtatcttgttgatgggaagattcaaattgatatacataatcacccccataaggatttcaggtaaaaaacaaacaaacaaaggtttagatgttagatatattttacaattaccacaccagtctttttactacagcatctagtaacacatttaccatagatttagatggaaattttcatcccataagcctttgttagtatttttaaaattgaatactcaataaatagtggccaagttgaatctcttagaggaatctcactcaaactacagtcatattttccaataggccccacaaaaatcattgctctagagtaatttaatatatttatccacctctttagacacttaggtaagtataataatacaagttttgtgcgtgtgtgtgtattgtgtaccttgtggcttcttgcccagtttctgcaacacctgaagctgatgcatgtttaatgtaaataatgtccagcaatgttacaaatgttgacttttatgtgcccatcaggaaaaaaaagatgaatgttattgtagaggaaattttcattctggaaaaaatgcatactatttgaatattattttcatgatttccacagatattacacacagatattatattccaaggattatgtttcaaagtcatcaaaaatagaaaatacatctatatttctaactgaaaataataacagtaagtagcccagctttggggaaatgtaataaaaatattaatgaccatcacaactcattaaaagcataaattgtgcaatgatttaaactacatgttcttcatatgaatgtgtgtagaaatatagacacattggataaatgctatttaaagtctgagtgcgttggtaactgattcagtcatctgtaggttgaagtgattacttttatctgccttcatagtgagaattagatttctattctttgtaaagcagggaatatagattgtgcatggagtaaaagaattcaatccttattaataatgatggtagctgcgctgcagaaaagaaagcctgtcagagtaacttattcagttttacatcataatcagaggtgtgtccatctctgttgaaggcagaattaaaaaccccttcaacatttttaaaataatagatgaaaaacatctcaaagtctcctttaaaatttgaattgacgattccacataaaaggaagggaccaaaaatatcttaaagaaatacttcacgatggaagtgatgttttaagtgaaatttcatcaaggagaagtttttccaaaaagtatttttacctcaggaagaatctcattagtttattctgtaaatagttcctagtaaaatgataaagacttgatttttcaaaaacaataaaaaacttacacggtttaatctaatgttgtgatttcgaaagtgcttcttctgcaatcatagttacgcgtgtgtatttatatgcattttcttagctcattcaaacgccaataaaatactatactatccaggctccttaaaa

SEQ ID NO: 22307 - DNA, 2260 bp, Homo sapiens
tagagaaaagctctcgctatgttacccgggctggtctcgaactcctgggctcaagagatcctctggcctccgcctcccaaagttctgggattacaggtgtgagtccatgtgcccagccctttaattctttacttggggttcaggtgactacatatttcttacttacaaattttacttaatctcgctgatgctgtcacttgaaagctgacccaccttgaatgaagcctcctccaacaagtctggaatccatccgaatttaaattaacaggcgctcctatgaattccatcagagaacacacagtagatgctttagaacctcttcccatgcctccgaagtatctggtttgcattgtggtggccattagtcatccatgggcttctgatgtaaaaaacaaacctgcctcttttgaccctgtgctgtacagcatcagggcagtgattgctggccacatactggacccttgaaacagagggctctgcatccatgtccatgagccttcatgcccatctggccatcaggccttgggaagcagcaccccacagctttggcacagctgcagtgacctccttgcctccgaatggagtcaaatgtgtacacgctgcaattctcatctgcaggaagcactggcctccttcatccttaggctatagtgctgacactggcctccttcatcctcagactgtggtgccggatgtcacccctctgcgaggcccttgggatcgactgagtgaccagcagtgaagttcgtcagccttctgaatggatgccatgatcagatgtgatggagctcagtgggatgctgctgctttccctcccttagctaggatgtccctgataaaggatgacacccaagcctcagcacaactggccaaacttgaggtggtcatcatagcactgatgctgggccaacaattagccccatttgtacctttttacaaactttttgacaattgccaagaatcgtccaccttccctccccattgaattaaatacacttcttgtctcatggatactcagaataccaatcaaggtaacagatgcctttattttaactaaggacacagtacagatctcacagggacactccttatcccttgcagagttccagacactactgatggtcaccaaagcaacatttcatcagaaaacacagtgctgggcttgtgaagaaggtgtccagcagagcttccactgcccctgtaggctgcaggcagctgcttcagttgagagatacactgagctcctcaaagaattcctatttaaggtacaaagcagcgactggatgccctgctggattccactattgccacaggctttgataactctaagttcatgctccttaggaaagtgcactttttacaccaatgttagacagttccctcagttgcctttactggacatcaaggagttcacatttttgacaatctttcagtcctgaactgtccaaggggtggaggtagctccatacaggaagctgcctgctgcgtgtggatcagtaatatcagacttgcccaacagctcactggagacatcaaaaccaatgcatgggggatgcatgacgtcacccaaatatttaccacacgcttttgctgccagagaccccagatcacttttcctgcctcctgctaaacaaatgggagcagtagcttctcatcagcctccacatttcattactcataattgtggccttcctaatgtctcatgcccctaagcacttattacaatgtctcaacagccttctctcagcctctcaaaatattagtcatcattaaaataaatgtctgatgttaaagcatcagggtcaattgtactgtgacacctaaaatttcatgctgcatcccaccaggtcctcagcctaatggctttcatgcccccaacagactgctaaactctttgaattagtcaagcatatccctcaagggacaaggggttaccccaccctctgatttctaccaagcctgcctcccgcaccctgtgctccagagtgaacccccgggtagacctgcacagatgcagtgtcatcccctgttgggctgagtatgcgagatgaataaattacggtgaatttcgtctaaaaaaaaaaaaacaacacaaacacaagggggggcgccaaaattcccccggggccaagtaggccgcccgttttggcaggggcctagggggcataacagccgggcgcgtaacgcgggggaagccgggctctggagcctctggggcaggacccgaaagcgggaacggatggacgcggggggggtaacc

SEQ ID NO: 22308 - DNA, 2619 bp, Homo sapiens
tagagaaaagctctcgctatgttacccgggctggtctcgaactcctgggctcaagagatcctctggcctccgcctcccaaagttctgggattacaggtgtgagtccatgtgcccagccctttaattctttacttggggttcaggtgactacatatttcttacttacaaattttacttaatctcgctgatgctgtcacttgaaagctgacccaccttgaatgaagcctcctccaacaagtctggaatccatccgaatttaaattaacaggcgctcctatgaattccatcagagaacacacagtagatgctttagaacctcttcccatgcctccgaagtatctggtttgcattgtggtggccattagtcatccatgggcttctgatgtaaaaaacaaacctgcctcttttgaccctgtgctgtacagcatcagggcagtgattgctggccacatactggacccttgaaacagagggctctgcatccatgtccatgagccttcatgcccatctggccatcaggccttgggaagcagcaccccacagctttggcacagctgcagtgacctccttgcctccgaatggagtcaaatgtgtacacgctgcaattctcatctgcaggaagcactggcctccttcatccttaggctatagtgctgacactggcctccttcatcctcagactgtggtgccggatgtcacccctctgcgaggcccttgggatcgactgagtgaccagcagtgaagttcgtcagccttctgaatggatgccatgatcagatgtgatggagctcagtgggatgctgctgctttccctcccttagctaggatgtccctgataaaggatgacacccaagcctcagcacaactggccaaacttgaggtggtcatcatagcactgatgctgggccaacaattagccccatttgtacctttttacaaactttttgacaattgccaagaatcgtccaccttccctccccattgaattaaatacacttcttgtctcatggatactcagaataccaatcaaggtaacagatgcctttattttaactaaggacacagtacagatctcacagggacactccttatcccttgcagagttccagacactactgatggtcaccaaagcaacatttcatcagaaaacacagtgctgggcttgtgaagaaggtgtccagcagagcttccactgcccctgtaggctgcaggcagctgcttcagttgagagatacactgagctcctcaaagaattcctatttaaggtacaaagcagcgactggatgccctgctggattccactattgccacaggctttgataactctaagttcatgctccttaggaaagtgcactttttacaccaatgttagacagttccctcagttgcctttactggacatcaaggagttcacatttttgacaatctttcagtcctgaactgtccaaggggtggaggtagctccatacaggaagctgcctgctgcgtgtggatcagtaatatcagacttgcccaacagctcactggagacatcaaaaccaatgcatgggggatgcatgacgtcacccaaatatttaccacacgcttttgctgccagagaccccagatcacttttcctgcctcctgctaaacaaatgggagcagtagcttctcatcagcctccacatttcattactcataattgtggccttcctaatgtctcatgcccctaagcacttattacaatgtctcaacagccttctctcagcctctcaaaatattagtcatcattaaaataaatgtctgatgttaaagcatcagggtcaattgtactgtgacacctaaaatttcatgctgcatcccaccaggtcctcagcctaatggctttcatgcccccaacagactgctaaactctttgaattagtcaagcatatccctcaagggacaaggggttaccccaccctctgatttctaccaagcctgcctcccgcaccctgtgctccagagtgaacccccgggtagacctgcacagatgcagtgtcatcccctgttgggctgagtatgcgagatgaataaattacggtgaatttcgtctactcagtgtttgttgtgtctgcagccatcctcagaattctagggcaagactaatttcttcaccaatgacgtgaacaggaaggaacccaactaggaattgccttttttaaaaaatcccttcccaccctcttaattatgtagtgcatgcattttatagcttttttgctcattccattatctgaggtcaggcactgatatttaacccatctttagcctcggaggagggcagaggaacagtggtcatatttatttccctaagtggcaaagacatgatttcctcctgtgccactcaaattcactccttctttaacttgatgctcagtaggttgtgtttcacttgtctatgcagattgttaggaagacgagactcagctttcatttttgatgttgtcatagagaagactctatggtaatgcttattttcacagtcaactttcctcttcttttcccccagacagaaattgcaaactcaggtgagtgacagctttctggagtctgcaaacatagattattttccctcttttgatggcaaatttcttatatccc

SEQ ID NO: 22309 - DNA, 235 bp, Homo sapiens
  misc_feature (224)..(224): n is a, c, g, or t
aatgctttcttaaaaattgctttatgacctcatactctcaggtagcttgcaaggttcctatatacaactctgtgacatatactgactcacgtctttgaagtttagaagtagaggagactgtctgattccattttctcattttatagatgacacagagacccagaaaatttgcatcacttgtctaaaatcatataggccatccaatgtcgacgcggccgcgaatntagtagtagta

SEQ ID NO: 22310 - DNA, 696 bp, Homo sapiens
gaaggttaatccaatatcaaagtttttgtgttagtttaagtgttgttaaatatgacaaagatcttcttttggcatttctgagtatgtgatgtaaattaggtgttgagatgggtcaactgtattacatagtaagaattcgttttctggatattagtggaagatattcccaaatctttagcatgagttgattaaataatatatctgtttgttcatatttactgtaaacacttgaattgcttatggcaagtccacctttaaagagtatgtattaacaaaattggtctttctatgcaataaagcttcaaaatgcaacattttgttgttaccaaggagcattctacggtagtgttgtgtatgatataaagcaaatttatgggaattgtctctgccatatgaaagtttaaaatatattattgaataaatgatgctattttgaaaatagaatgtacttaagtgcattttttaaaagcatatacatattgaaatttgtaaaatattttaaaaatactctgaaaagaaactgcaaaaagtttttggtgaagtaatggaatacagagttcttgtcaatataaaaattgtagacattaatcacttagagtttatatgctttattacctctaatagaaacatgattctttgggatttgtgatactcgatatagtatgtaaaatatttaataaattgctatatcatttg

SEQ ID NO: 22311 - DNA, 382 bp, Homo sapiens
atttcaaatggataaataaactaaaaagtgtttaatactccaaaatgattagaagtgtattgttaaataccaaaaagaaaataattctggggtgtttcaggcatgttattctgttaacgtagttcacgttgagtgtttgtattcatttgttgtttgtttgtttgtaagtaacaggttttgactaaaattccacggactgtggaacaacacacactggggtctatcggagggtggaaagtgggtggagggagtgggtcaggaaaaataactaatgtatactaggcttaatacctgggtgataagatagtctttacaacaaacccccatgacacaagtttacctatataacaaacctgccattgtacacctgaacttaagtaaa

SEQ ID NO: 22312 - DNA, 411 bp, Homo sapiens
gtgtatattggccatgattattattggcttcttggtaatgaaagcatcaaatactaagggcagcttttagtatattatttctgatcttgtgtgatcagaaataccacatttttgagaatgtattattttccaaagaattaaatgactctcagaggggaatggataaacccacagaggttctggaaatggagcagtttcctgtaagtatcatgacttccaattaagcccctttgtctgttttatccctgtcacttgtactcactgtgtagatcatgagctaattttgcttggactctcccctcccgccatctcttagagcccagcagtgctatgcatgcatgggttaaaaatttcaaactgtccaaatgaattgcatttattggcaatttaatgctgaaactcaaagaggga

SEQ ID NO: 22313 - DNA, 475 bp, Homo sapiens
ttccaccttccattcatgtctgtgcccaactactctgtatgtccacttaaggagtgacatttgaaactgtcaaactgttgcctccacgtggtgttggagtgcctgaggaattagatttaaagcagataactaacatgaatatcagaagtgaagatgttgaagaattaagcaagcatagaaatcaagaaaacaaattcacattacagacaaatttaagtgtaagtaaaggagaaccaagacataggcaagaagaaaaatgcacactacacactatgatgggcttcaattcctgaaactggataatctactataacacaaaactcttgaagaaaaagcaatttttttccttgactcagtgttctacataacagcattccttttctatcaagaaaaatatacttccatcactgcaatgaatatgcatgactattttacatagtaagcatgcaataaatacttcttgaattaatgaata

SEQ ID NO: 22314 - DNA, 510 bp, Homo sapiens
agtttaggttgccccaatacccatgcagagaacttggagctaaaaggttccacagcttcaaacctaggcatacttgtgaatgcgtggtggccacccattgattatcccttggtgctggtgcttgtacctgccattgcggggacctgtaggtgggcatgctaggtccagccccacccattatggtccccacccctccagtgcctagcagggagttcagaccactgtaaattacataggtcagccatttcttgaggcaacaagaatcctttggtgaataaaggagtatcaagaatatacccagccacatgagctacagctggctcttacctataagtaccatctactggcttgttggttgaactgcgcagcccaatattaagcctaccaaaagaagtggatagggctatagaagcaaagacaaaagactctacccagtattctctatcacataaggaagaaggaaaagggaaagagaaagagcaagaaaaaacccacaaagtattatagggg

SEQ ID NO: 22315 - DNA, 385 bp, Homo sapiens
gctcctactctcatgagagaaatcaacagttttgataattgctacaaaagtagtaacaatcctcccaaaatgactttagacaaacaagagcaacaaaaccaagatttaacattatcattatgattaacgaaatttatgcaacccataaggctaactctcaggtggaaagaaaattctattgaaaactaacaactctggtctcagttctttttaaaatcggagttaaagagcataattggattgtttgcaactcacttgataaatgctcgaggaggtaaatacctggttcttcatgatgtgtttatttcacagtgcactcctgtatcaaacatctcatgtaccccataaatatatatacctactgtgtacccacaaacatgaaaat

SEQ ID NO: 22316 - DNA, 362 bp, Homo sapiens
agtatcttctcattttagctttttcctagtacttacctacactgaaataattttttgtatacttcaagaatgaaatcagaaggcaattccccaatgcacccagacatagcaacacatagacctcactttggaggaaaaaaaaaaaacttttacactctaggatctatttgctttttacattaaaattcgtttctccaattgctggctataaaataaaataatcttcacagttgtatttattctacctggtttcaagtgcctaaaaagtcattatttttcactgcaaagaactgaaaaaataaacgtatatacctagaatttgacagaacaaagatccaagtgccagtctttttctttttctc

SEQ ID NO: 22317 - DNA, 3506 bp, Homo sapiens
ggcacgagggcccgagaagctggggagcatggaccagaccccgcagcgctggcaccatgacgctcgcccgcttcgtgctagccctgatgttaggggcgctccccgaagtggtcggctttgattctgtcctcaatgattccctccaccacagccaccgccattcgccccctgcgggtccgcactacccctattaccttcccacccagcagcggcccccgacgacgcgtccgccgccgcctctcccgcgcttcccgcgccccccgcgggcgctccctgcccagcgcccgcacgccctccaggccgggcacacgccccggccgcacccctggggctgccccgccggcgagccatgggtcagcgtgacggacttcggcgccccgtgtctgcggtgggcggaggtgccacccttcctggagcggtcgcccccagcgagctgggctcagctgcgaggacagcgccacaacttttgtcggagccccgacggcgcgggcagaccctggtgtttctacggagacgcccgtggcaaggtggactggggctactgcgactgcagacacggatcagtacgacttcgtggcggcaaaaatgagtttgaaggcacagtggaagtatatgcaagtggagtttggggcactgtctgtagcagccactgggatgattctgatgcatcagtcatttgtcaccagctgcagctgggaggaaaaggaatagcaaaacaaaccccgttttctggactgggccttattcccatttattggagcaatgtccgttgccgaggagatgaagaaaatatactgctttgtgaaaaagacatctggcagggtggggtgtgtcctcagaagatggcagctgctgtcacgtgtagcttttcccatggcccaacgttccccatcattcgccttgctggaggcagcagtgtgcatgaaggccgggtggagctctaccatgctggccagtggggaaccgtttgtgatgaccaatgggatgatgccgatgcagaagtgatctgcaggcagctgggcctcagtggcattgccaaagcatggcatcaggcatattttggggaagggtctggcccagttatgttggatgaagtacgctgcactgggaatgagctttcaattgagcagtgtccaaagagctcctggggagagcataactgtggccataaagaagatgctggagtgtcctgtacccctctaacagatggggtcatcagacttgcaggtgggaaaggcagccatgagggtcgcttggaggtatattacagaggccagtggggaactgtctgtgatgatggctggactgagctgaatacatacgtggtttgtcgacaattgggatttaaatatggtaaacaagcatctgccaaccattttgaagaaagcacagggcccatatggttggatgacgtcagctgctcaggaaaggaaaccagatttcttcagtgttccaggcgacagtggggaaggcatgactgcagccaccgcgaagatgttagcattgcctgctaccctggcggcgagggacacaggctctctctgggttttcctgtcagactgatggatggagaaaataagaaagaaggacgagtggaggtttttatcaatggccagtggggaacaatctgtgatgatggatggactgataaggatgcagctgtgatctgtcgtcagcttggctacaagggtcctgccagagcaagaaccatggcttactttggagaaggaaaaggacccatccatgtggataatgtgaagtgcacaggaaatgagaggtccttggctgactgtatcaagcaagatattggaagacacaactgccgccacagtgaagatgcaggagttatttgtgattattttggcaagaaggcctcaggtaacagtaataaagagtccctctcatctgtttgtggcttgagattactgcaccgtcggcagaagcggatcattggtgggaaaaattctttaaggggtggttggccttggcaggtttccctccggctgaagtcatcccatggagatggcaggctcctctgcggggctacgctcctgagtagctgctgggtcctcacagcagcacactgtttcaagaggtatggcaacagcactaggagctatgctgttagggttggagattatcatactctggtaccagaggagtttgaggaagaaattggagttcaacagattgtgattcatcgggagtatcgacccgaccgcagtgattatgacatagccctggttagattacaaggaccagaagagcaatgtgccagattcagcagccatgttttgccagcctgtttaccactctggagagagaggccacagaaaacagcatccaactgttacataacaggatggggtgacacaggacgagcctattcaagaacactacaacaagcagccattcccttacttcctaaaaggttttgtgaagaacgttataagggtcggtttacagggagaatgctttgtgctggaaacctccatgaacacaaacgcgtggacagctgccagggagacagcggaggaccactcatgtgtgaacggcccggagagagctgggtggtgtatggggtgacctcctgggggtatggctgtggagtcaaggattctcctggtgtttataccaaagtctcagcctttgtaccttggataaaaagtgtcaccaaactgtaattcttcatggaaacttcaaagcagcatttaaacaaatggaaaactttgaacccccactattagcactcagcagagatgacaacaaatggcaagatctgtttttgctttgtgttgtggtaaaaaattgtgtaccccctgctgcttttgagaaatttgtgaacattttcagaggcctcagtgtagtggaagtgataatccttaaatgaacattttctaccctaatttcactggagtgacttattctaagcctcatctatcccctacctatttctcaaaatcattctatgctgattttacaaaagatcatttttacatttgaactgagaaccccttttaattgaatcagtggtgtctgaaatcatattaaatacccacatttgacataaatgcggtaccctttactacactcatgagtggcatatttatgcttaggtcttttcaaaagacttgacaagaaatcttcatattctctgtagcctttgtcaagtgaggaaatcagtggttaaagaattccactataaacttttaggcctgaataggagtagtaaagcctcaaggacatctgcctgtcacaatatattctcaaagtgatctgatatttggaaacaagtatccttgttgagtaccaagtgctacagaaaccataagataaaaatactttctacctacagcgtataaactagcaaaatttgaaaggatttctggtaactaaatgccagctggacatacaacctattttatccaacacattaacatatctactatatttgcttttaacaagcacctcatcatagtccacgttccccgaccatgatgtaagag

SEQ ID NO: 22318 - DNA, 1255 bp, Homo sapiens
ctcattttaaactacactaatgccacaacagggattttattttcataactattacatgctcagtaactgttaaatgttgcgatggttatctggaatgccactaatcagatgtttggtctgagtaggacgagcctattcaagaacactacaacaagcagccattcccttacttcctaaaaggttttgtgaagaacgttataagggtcggtttacagggagaatgctttgtgctggaaacctccatgaacacaaacgcgtggacagctgccagggagacagcggaggaccactcatgtgtgaacggcccggagagagctgggtggtgtatggggtgacctcctgggggtatggctgtggagtcaaggattctcctggtgtttataccaaagtctcagcctttgtaccttggataaaaagtgtcaccaaactgtaattcttcatggaaacttcaaagcagcatttaaacaaatggaaaactttgaacccccactattagcactcagcagagatgacaacaaatggcaagatctgtttttgctttgtgttgtggtaaaaaattgtgtaccccctgctgcttttgagaaatttgtgaacattttcagaggcctcagtgtagtggaagtgataatccttaaatgaacattttctaccctaatttcactggagtgacttattctaagcctcatctatcccctacctatttctcaaaatcattctatgctgattttacaaaagatcatttttacatttgaactgagaaccccttttaattgaatcagtggtgtctgaaatcatattaaatacccacatttgacataaatgcggtaccctttactacactcatgagtggcatatttatgcttaggtcttttcaaaagacttgacaagaaatcttcatattctctgtagcctttgtcaagtgaggaaatcagtggttaaagaattccactataaacttttaggcctgaataggagtagtaaagcctcaaggacatctgcctgtcacaatatattctcaaagtgatctgatatttggaaacaagtatccttgttgagtaccaagtgctacagaaaccataagataaaaatactttctacctacagcgtataaactagcaaaatttgaaaggatttctggtaactaaatgccagctggacatacaacctattttatccaacacattaacatatctactatatttgcttttaacaagcacctcatcatagtccacgttccccgaccatgatgtaagag

SEQ ID NO: 22319 - DNA, 3383 bp, Homo sapiens
ggcacgagggcccgagaagctggggagcatggaccagaccccgcagcgctggcaccatgacgctcgcccgcttcgtgctagccctgatgttaggggcgctccccgaagtggtcggctttgattctgtcctcaatgattccctccaccacagccaccgccattcgccccctgcgggtccgcactacccctattaccttcccacccagcagcggcccccgacgacgcgtccgccgccgcctctcccgcgcttcccgcgccccccgcgggcgctccctgcccagcgcccgcacgccctccaggccgggcacacgccccggccgcacccctggggctgccccgccggcgagccatgggtcagcgtgacggacttcggcgccccgtgtctgcggtgggcggaggtgccacccttcctggagcggtcgcccccagcgagctgggctcagctgcgaggacagcgccacaacttttgtcggagccccgacggcgcgggcagaccctggtgtttctacggagacgcccgtggcaaggtggactggggctactgcgactgcagacacggatcagtacgacttcgtggcggcaaaaatgagtttgaaggcacagtggaagtatatgcaagtggagtttggggcactgtctgtagcagccactgggatgattctgatgcatcagtcatttgtcaccagctgcagctgggaggaaaaggaatagcaaaacaaaccccgttttctggactgggccttattcccatttattggagcaatgtccgttgccgaggagatgaagaaaatatactgctttgtgaaaaagacatctggcagggtggggtgtgtcctcagaagatggcagctgctgtcacgtgtagcttttcccatggcccaacgttccccatcattcgccttgctggaggcagcagtgtgcatgaaggccgggtggagctctaccatgctggccagtggggaaccgtttgtgatgaccaatgggatgatgccgatgcagaagtgatctgcaggcagctgggcctcagtggcattgccaaagcatggcatcaggcatattttggggaagggtctggcccagttatgttggatgaagtacgctgcactgggaatgagctttcaattgagcagtgtccaaagagctcctggggagagcataactgtggccataaagaagatgctggagtgtcctgtacccctctaacagatggggtcatcagacttgcaggtgggaaaggcagccatgagggtcgcttggaggtatattacagaggccagtggggaactgtctgtgatgatggctggactgagctgaatacatacgtggtttgtcgacaattgggatttaaatatggtaaacaagcatctgccaaccattttgaagaaagcacagggcccatatggttggatgacgtcagctgctcaggaaaggaaaccagatttcttcagtgttccaggcgacagtggggaaggcatgactgcagccaccgcgaagatgttagcattgcctgctaccctggcggcgagggacacaggctctctctgggttttcctgtcagactgatggatggagaaaataagaaagaaggacgagtggaggtttttatcaatggccagtggggaacaatctgtgatgatggatggactgataaggatgcagctgtgatctgtcgtcagcttggctacaagggtcctgccagagcaagaaccatggcttactttggagaaggaaaaggacccatccatgtggataatgtgaagtgcacaggaaatgagaggtccttggctgactgtatcaagcaagatattggaagacacaactgccgccacagtgaagatgcaggagttatttgtgattattttggcaagaaggcctcaggtaacagtaataaagagtccctctcatctgtttgtggcttgagattactgcaccgtcggcagaagcggatcattggtgggaaaaattctttaaggtatggcaacagcactaggagctatgctgttagggttggagattatcatactctggtaccagaggagtttgaggaagaaattggagttcaacagattgtgattcatcgggagtatcgacccgaccgcagtgattatgacatagccctggttagattacaaggaccagaagagcaatgtgccagattcagcagccatgttttgccagcctgtttaccactctggagagagaggccacagaaaacagcatccaactgttacataacaggatggggtgacacaggacgagcctattcaagaacactacaacaagcagccattcccttacttcctaaaaggttttgtgaagaacgttataagggtcggtttacagggagaatgctttgtgctggaaacctccatgaacacaaacgcgtggacagctgccagggagacagcggaggaccactcatgtgtgaacggcccggagagagctgggtggtgtatggggtgacctcctgggggtatggctgtggagtcaaggattctcctggtgtttataccaaagtctcagcctttgtaccttggataaaaagtgtcaccaaactgtaattcttcatggaaacttcaaagcagcatttaaacaaatggaaaactttgaacccccactattagcactcagcagagatgacaacaaatggcaagatctgtttttgctttgtgttgtggtaaaaaattgtgtaccccctgctgcttttgagaaatttgtgaacattttcagaggcctcagtgtagtggaagtgataatccttaaatgaacattttctaccctaatttcactggagtgacttattctaagcctcatctatcccctacctatttctcaaaatcattctatgctgattttacaaaagatcatttttacatttgaactgagaaccccttttaattgaatcagtggtgtctgaaatcatattaaatacccacatttgacataaatgcggtaccctttactacactcatgagtggcatatttatgcttaggtcttttcaaaagacttgacaagaaatcttcatattctctgtagcctttgtcaagtgaggaaatcagtggttaaagaattccactataaacttttaggcctgaataggagtagtaaagcctcaaggacatctgcctgtcacaatatattctcaaagtgatctgatatttggaaacaagtatccttgttgagtaccaagtgctacagaaaccataagataaaaatactttctacctacagcgtataaactagcaaaatttgaaaggatttctggtaactaaatgccagctggacatacaacctattttatccaacacattaacatatctactatatttgcttttaacaagcacctcatcatagtccacgttccccgaccatgatgtaagag

SEQ ID NO: 22320 - DNA, 3585 bp, Homo sapiens
ttaatcagataagcatttcaccttttttaaaatttaatgccagtttgtacacagcagaggttacttacaaaaatatgtggattagatgagctaaaagcagaacccgtctgtatgctattattttcattttttcttttaaaaatactctcctggtgttaggaaagagatgcatgttgctatgttattaattggtttcaaaggcttgctagcaaatactatatacagtgtaaggttttaaaaattataaatggattgcctcccgtgatattattgtgcttagatgtagtaataataattttgaaaatgctagcctagaatgttagagtcagaaagaatcttcaagcatccagatttttcttttgacacattagaagacaaagccttcgagttacttgcagcttggcatgacttttagctgagcccagactggagtccaagcctcactgaagctcgtgacacacctcttgcacacagccttactttttatgtctgcagtacttggccattttcttctaaatcagtcattggtggtaaaggcacataaagtagttatttaagattgatgaaaagaattccataagtaggcaaaccacgttgtgatctgatgttttgatttccttgaaactgatgtagtcttttgtgtttttcttctttctttctttgtttcttccatattcatctttgttgatttcttccattttttttcaaatccaaatgttttgataaaaagttttgcctacatttgataaacctaatatcgctcattgtacttccagaggaaaaggaatagcaaaacaaaccccgttttctggactgggccttattcccatttattggagcaatgtccgttgccgaggagatgaagaaaatatactgctttgtgaaaaagacatctggcagggtggggtgtgtcctcagaagatggcagctgctgtcacgtgtagcttttcccatggcccaacgttccccatcattcgccttgctggaggcagcagtgtgcatgaaggccgggtggagctctaccatgctggccagtggggaaccgtttgtgatgaccaatgggatgatgccgatgcagaagtgatctgcaggcagctgggcctcagtggcattgccaaagcatggcatcaggcatattttggggaagggtctggcccagttatgttggatgaagtacgctgcactgggaatgagctttcaattgagcagtgtccaaagagctcctggggagagcataactgtggccataaagaagatgctggagtgtcctgtacccctctaacagatggggtcatcagacttgcaggtgggaaaggcagccatgagggtcgcttggaggtatattacagaggccagtggggaactgtctgtgatgatggctggactgagctgaatacatacgtggtttgtcgacaattgggatttaaatatggtaaacaagcatctgccaaccattttgaagaaagcacagggcccatatggttggatgacgtcagctgctcaggaaaggaaaccagatttcttcagtgttccaggcgacagtggggaaggcatgactgcagccaccgcgaagatgttagcattgcctgctaccctggcggcgagggacacaggctctctctgggttttcctgtcagactgatggatggagaaaataagaaagaaggacgagtggaggtttttatcaatggccagtggggaacaatctgtgatgatggatggactgataaggatgcagctgtgatctgtcgtcagcttggctacaagggtcctgccagagcaagaaccatggcttactttggagaaggaaaaggacccatccatgtggataatgtgaagtgcacaggaaatgagaggtccttggctgactgtatcaagcaagatattggaagacacaactgccgccacagtgaagatgcaggagttatttgtgattattttggcaagaaggcctcaggtaacagtaataaagagtccctctcatctgtttgtggcttgagattactgcaccgtcggcagaagcggatcattggtgggaaaaattctttaaggggtggttggccttggcaggtttccctccggctgaagtcatcccatggagatggcaggctcctctgcggggctacgctcctgagtagctgctgggtcctcacagcagcacactgtttcaagaggtatggcaacagcactaggagctatgctgttagggttggagattatcatactctggtaccagaggagtttgaggaagaaattggagttcaacagattgtgattcatcgggagtatcgacccgaccgcagtgattatgacatagccctggttagattacaaggaccagaagagcaatgtgccagattcagcagccatgttttgccagcctgtttaccactctggagagagaggccacagaaaacagcatccaactgttacataacaggatggggtgacacaggacgagcctattcaagaacactacaacaagcagccattcccttacttcctaaaaggttttgtgaagaacgttataagggtcggtttacagggagaatgctttgtgctggaaacctccatgaacacaaacgcgtggacagctgccagggagacagcggaggaccactcatgtgtgaacggcccggagagagctgggtggtgtatggggtgacctcctgggggtatggctgtggagtcaaggattctcctggtgtttataccaaagtctcagcctttgtaccttggataaaaagtgtcaccaaactgtaattcttcatggaaacttcaaagcagcatttaaacaaatggaaaactttgaacccccactattagcactcagcagagatgacaacaaatggcaagatctgtttttgctttgtgttgtggtaaaaaattgtgtaccccctgctgcttttgagaaatttgtgaacattttcagaggcctcagtgtagtggaagtgataatccttaaatgaacattttctaccctaatttcactggagtgacttattctaagcctcatctatcccctacctatttctcaaaatcattctatgctgattttacaaaagatcatttttacatttgaactgagaaccccttttaattgaatcagtggtgtctgaaatcatattaaatacccacatttgacataaatgcggtaccctttactacactcatgagtggcatatttatgcttaggtcttttcaaaagacttgacaagaaatcttcatattctctgtagcctttgtcaagtgaggaaatcagtggttaaagaattccactataaacttttaggcctgaataggagtagtaaagcctcaaggacatctgcctgtcacaatatattctcaaagtgatctgatatttggaaacaagtatccttgttgagtaccaagtgctacagaaaccataagataaaaatactttctacctacagcgtataaactagcaaaatttgaaaggatttctggtaactaaatgccagctggacatacaacctattttatccaacacattaacatatctactatatttgcttttaacaagcacctcatcatagtccacgttccccgaccatgatgtaagag

SEQ ID NO: 22321 - DNA, 2128 bp, Homo sapiens
attttttcctgcttaaacgagagttaaagactatcatgattttttgatgtgccattaaatgtaagtttcttagaaaaagctaaattagaggcaagtgatgtaataaagtagctgtggagtatgggaaagtatagttaataccttttttatttaattttttttgacagtcatgaaacaaatggtttttagcacatgcagatgctaattttaatatgtaaaaattaaggaataaaattgaatacatgttgtgatttattcagatatatgactgactgattcttcacatgattaagaatgttctgtcttcaggggtcctgccagagcaagaaccatggcttactttggagaaggaaaaggacccatccatgtggataatgtgaagtgcacaggaaatgagaggtccttggctgactgtatcaagcaagatattggaagacacaactgccgccacagtgaagatgcaggagttatttgtgattattttggcaagaaggcctcaggtaacagtaataaagagtccctctcatctgtttgtggcttgagattactgcaccgtcggcagaagcggatcattggtgggaaaaattctttaaggggtggttggccttggcaggtttccctccggctgaagtcatcccatggagatggcaggctcctctgcggggctacgctcctgagtagctgctgggtcctcacagcagcacactgtttcaagaggtatggcaacagcactaggagctatgctgttagggttggagattatcatactctggtaccagaggagtttgaggaagaaattggagttcaacagattgtgattcatcgggagtatcgacccgaccgcagtgattatgacatagccctggttagattacaaggaccagaagagcaatgtgccagattcagcagccatgttttgccagcctgtttaccactctggagagagaggccacagaaaacagcatccaactgttacataacaggatggggtgacacaggacgagcctattcaagaacactacaacaagcagccattcccttacttcctaaaaggttttgtgaagaacgttataagggtcggtttacagggagaatgctttgtgctggaaacctccatgaacacaaacgcgtggacagctgccagggagacagcggaggaccactcatgtgtgaacggcccggagagagctgggtggtgtatggggtgacctcctgggggtatggctgtggagtcaaggattctcctggtgtttataccaaagtctcagcctttgtaccttggataaaaagtgtcaccaaactgtaattcttcatggaaacttcaaagcagcatttaaacaaatggaaaactttgaacccccactattagcactcagcagagatgacaacaaatggcaagatctgtttttgctttgtgttgtggtaaaaaattgtgtaccccctgctgcttttgagaaatttgtgaacattttcagaggcctcagtgtagtggaagtgataatccttaaatgaacattttctaccctaatttcactggagtgacttattctaagcctcatctatcccctacctatttctcaaaatcattctatgctgattttacaaaagatcatttttacatttgaactgagaaccccttttaattgaatcagtggtgtctgaaatcatattaaatacccacatttgacataaatgcggtaccctttactacactcatgagtggcatatttatgcttaggtcttttcaaaagacttgacaagaaatcttcatattctctgtagcctttgtcaagtgaggaaatcagtggttaaagaattccactataaacttttaggcctgaataggagtagtaaagcctcaaggacatctgcctgtcacaatatattctcaaagtgatctgatatttggaaacaagtatccttgttgagtaccaagtgctacagaaaccataagataaaaatactttctacctacagcgtataaactagcaaaatttgaaaggatttctggtaactaaatgccagctggacatacaacctattttatccaacacattaacatatctactatatttgcttttaacaagcacctcatcatagtccacgttccccgaccatgatgtaagag

SEQ ID NO: 22322 - DNA, 1079 bp, Homo sapiens
cactgacacttccctgtaactgacttatacctgcaggttttcccaagcccaacctgatacaatccaatcttaaaatatactagtcaaaatgctttcctggcctacacattgaaaagttctaatacatacagcagttataacatatgccaggcactgcattaggcagctttgcacatcactgacaatttgcaaaaggccagtaaatcttatggtagtagcccttgttttcaaatgggggaaaacaggcttgcctcaaagtgagaccagttggtgaaactgattccaaactccagaaaaaatgctgatttttttccccatggttctcctacctaaatgattggtttccctatggctatttctccaagagttaagggatagctgcttaactatgcacctttacagaacattcttagcagtaatgctcaaatttaaaaggcacactcaagatacttccatgtcatggatccttccccaggtcccagtagtataaatatagggaagaggttagcatgaacttacaaattgttttaagtaatcctcttgaatgccagtcattaaaggactttgcccttctacatcaaattacatccttttcacaaatccccatttctgtaataactggtgcaaacctaaaggtgctttatagttttactactttgcagatttgcaatgctgcatataatgcagaagagcattaaaaacttttgtaaaaactcatgattttgataaacttttaaagtagcgtttatatgtaaatagaactacacatggcacacacacttgcacaagggcttcagaaaaacgtgcaatataggtgagaaaaatgtctattgaaactttctcacaggctgcccttataattaaactagtgttggggcaagcaacatctgtttcaagtagatcagggactagcaaacctaaaaggcagcaagcagcctgcagtttgctcaatccttaagaatacatggttcatacaacatgcttttactatgtcttaagtgtgacttttgaaagatacaagtgttctgtgcatatttgtgtaaataaatacataattttccaccttgtaaaaaaaaaaa

SEQ ID NO: 22323 - DNA, 2655 bp, Homo sapiens
ggcacgagggcccgagaagctggggagcatggaccagaccccgcagcgctggcaccatgacgctcgcccgcttcgtgctagccctgatgttaggggcgctccccgaagtggtcggctttgattctgtcctcaatgattccctccaccacagccaccgccattcgccccctgcgggtccgcactacccctattaccttcccacccagcagcggcccccgacgacgcgtccgccgccgcctctcccgcgcttcccgcgccccccgcgggcgctccctgcccagcgcccgcacgccctccaggccgggcacacgccccggccgcacccctggggctgccccgccggcgagccatgggtcagcgtgacggacttcggcgccccgtgtctgcggtgggcggaggtgccacccttcctggagcggtcgcccccagcgagctgggctcagctgcgaggacagcgccacaacttttgtcggagccccgacggcgcgggcagaccctggtgtttctacggagacgcccgtggcaaggtggactggggctactgcgactgcagacacggatcagtacgacttcgtggcggcaaaaatgagtttgaaggcacagtggaagtatatgcaagtggagtttggggcactgtctgtagcagccactgggatgattctgatgcatcagtcatttgtcaccagctgcagctgggaggaaaaggaatagcaaaacaaaccccgttttctggactgggccttattcccatttattggagcaatgtccgttgccgaggagatgaagaaaatatactgctttgtgaaaaagacatctggcagggtggggtgtgtcctcagaagatggcagctgctgtcacgtgtagcttttcccatggcccaacgttccccatcattcgccttgctggaggcagcagtgtgcatgaaggccgggtggagctctaccatgctggccagtggggaaccgtttgtgatgaccaatgggatgatgccgatgcagaagtgatctgcaggcagctgggcctcagtggcattgccaaagcatggcatcaggcatattttggggaagggtctggcccagttatgttggatgaagtacgctgcactgggaatgagctttcaattgagcagtgtccaaagagctcctggggagagcataactgtggccataaagaagatgctggagtgtcctgtacccctctaacagatggggtcatcagacttgcaggtgggaaaggcagccatgagggtcgcttggaggtatattacagaggccagtggggaactgtctgtgatgatggctggactgagctgaatacatacgtggtttgtcgacaattgggatttaaatatggtaaacaagcatctgccaaccattttgaagaaagcacagggcccatatggttggatgacgtcagctgctcaggaaaggaaaccagatttcttcagtgttccaggcgacagtggggaaggcatgactgcagccaccgcgaagatgttagcattgcctgctaccctggcggcgagggacacaggctctctctgggttttcctgtcagactgatggatggagaaaataagaaagaaggacgagtggaggtttttatcaatggccagtggggaacaatctctgatacaatccaatcttaaaatatactagtcaaaatgctttcctggcctacacattgaaaagttctaatacatacagcagttataacatatgccaggcactgcattaggcagctttgcacatcactgacaatttgcaaaaggccagtaaatcttatggtagtagcccttgttttcaaatgggggaaaacaggcttgcctcaaagtgagaccagttggtgaaactgattccaaactccagaaaaaatgctgatttttttccccatggttctcctacctaaatgattggtttccctatggctatttctccaagagttaagggatagctgcttaactatgcacctttacagaacattcttagcagtaatgctcaaatttaaaaggcacactcaagatacttccatgtcatggatccttccccaggtcccagtagtataaatatagggaagaggttagcatgaacttacaaattgttttaagtaatcctcttgaatgccagtcattaaaggactttgcccttctacatcaaattacatccttttcacaaatccccatttctgtaataactggtgcaaacctaaaggtgctttatagttttactactttgcagatttgcaatgctgcatataatgcagaagagcattaaaaacttttgtaaaaactcatgattttgataaacttttaaagtagcgtttatatgtaaatagaactacacatggcacacacacttgcacaagggcttcagaaaaacgtgcaatataggtgagaaaaatgtctattgaaactttctcacaggctgcccttataattaaactagtgttggggcaagcaacatctgtttcaagtagatcagggactagcaaacctaaaaggcagcaagcagcctgcagtttgctcaatccttaagaatacatggttcatacaacatgcttttactatgtcttaagtgtgacttttgaaagatacaagtgttctgtgcatatttgtgtaaataaatacataattttccaccttgtaaaaaaaaaaa

SEQ ID NO: 22324 - DNA, 3624 bp, Homo sapiens
  misc_feature (48)..(48): n is a, c, g, or t
  misc_feature (51)..(51): n is a, c, g, or t
  misc_feature (59)..(59): n is a, c, g, or t
  misc_feature (61)..(61): n is a, c, g, or t
  misc_feature (71)..(71): n is a, c, g, or t
  misc_feature (78)..(78): n is a, c, g, or t
  misc_feature (83)..(83): n is a, c, g, or t
  misc_feature (87)..(87): n is a, c, g, or t
  misc_feature (94)..(95): n is a, c, g, or t
  misc_feature (113)..(113): n is a, c, g, or t
  misc_feature (115)..(119): n is a, c, g, or t
  misc_feature (121)..(121): n is a, c, g, or t
  misc_feature (125)..(125): n is a, c, g, or t
  misc_feature (128)..(128): n is a, c, g, or t
  misc_feature (130)..(131): n is a, c, g, or t
  misc_feature (139)..(139): n is a, c, g, or t
  misc_feature (148)..(148): n is a, c, g, or t
  misc_feature (157)..(159): n is a, c, g, or t
  misc_feature (164)..(164): n is a, c, g, or t
  misc_feature (173)..(174): n is a, c, g, or t
  misc_feature (176)..(176): n is a, c, g, or t
  misc_feature (179)..(179): n is a, c, g, or t
  misc_feature (182)..(182): n is a, c, g, or t
  misc_feature (190)..(190): n is a, c, g, or t
  misc_feature (197)..(197): n is a, c, g, or t
  misc_feature (199)..(199): n is a, c, g, or t
  misc_feature (201)..(202): n is a, c, g, or t
  misc_feature (211)..(211): n is a, c, g, or t
  misc_feature (213)..(213): n is a, c, g, or t
  misc_feature (218)..(218): n is a, c, g, or t
  misc_feature (220)..(222): n is a, c, g, or t
  misc_feature (226)..(227): n is a, c, g, or t
  misc_feature (234)..(235): n is a, c, g, or t
  misc_feature (237)..(238): n is a, c, g, or t
  misc_feature (241)..(244): n is a, c, g, or t
  misc_feature (246)..(249): n is a, c, g, or t
  misc_feature (252)..(253): n is a, c, g, or t
  misc_feature (256)..(261): n is a, c, g, or t
  misc_feature (274)..(274): n is a, c, g, or t
  misc_feature (280)..(280): n is a, c, g, or t
  misc_feature (282)..(282): n is a, c, g, or t
  misc_feature (284)..(284): n is a, c, g, or t
  misc_feature (295)..(296): n is a, c, g, or t
  misc_feature (303)..(304): n is a, c, g, or t
  misc_feature (307)..(307): n is a, c, g, or t
  misc_feature (312)..(314): n is a, c, g, or t
  misc_feature (316)..(318): n is a, c, g, or t
  misc_feature (320)..(321): n is a, c, g, or t
  misc_feature (329)..(329): n is a, c, g, or t
  misc_feature (331)..(333): n is a, c, g, or t
  misc_feature (336)..(336): n is a, c, g, or t
  misc_feature (339)..(339): n is a, c, g, or t
  misc_feature (346)..(347): n is a, c, g, or t
  misc_feature (353)..(353): n is a, c, g, or t
  misc_feature (356)..(357): n is a, c, g, or t
  misc_feature (367)..(367): n is a, c, g, or t
  misc_feature (370)..(370): n is a, c, g, or t
  misc_feature (374)..(374): n is a, c, g, or t
  misc_feature (377)..(378): n is a, c, g, or t
  misc_feature (382)..(382): n is a, c, g, or t
  misc_feature (387)..(387): n is a, c, g, or t
  misc_feature (391)..(393): n is a, c, g, or t
  misc_feature (401)..(401): n is a, c, g, or t
  misc_feature (412)..(412): n is a, c, g, or t
  misc_feature (418)..(418): n is a, c, g, or t
gcaaggcaccagcggcgggaggcaaggttggggaggcgagggcggtcngcntgcagggncnggaaggggcngggggantcganggangcggcannccgcccccgccccctccncnnnnncnctcnaancnngaaaagcnggggagcanggaccaaannncgcancgctggcannangangcncgcacgcntcgtgcnancnntaaagtaangngcgcncnnngaannggtcggnntnnaannnntnnnnaannaannnnnnaaaaaaaacaaangcaaanancnccctgcaggtnngcaaaannccnaaaannntnnnanncaacaacngnnnccnaanaaacgtnngcagcngcnnctaccgcacntanagcncanncaanaggcncacnnngcacaaancaagcaagcanacaaanaagggaacaaacaccggccgcacccctggggctgccccgccggcgagccatgggtcagcgtgacggacttcggcgccccgtgtctgcggtgggcggaggtgccacccttcctggagcggtcgcccccagcgagctgggctcagctgcgaggacagcgccacaacttttgtcggagccccgacggcgcgggcagaccctggtgtttctacggagacgcccgtggcaaggtggactggggctactgcgactgcagacacggatcagtacgacttcgtggcggcaaaaatgagtttgaaggcacagtggaagtatatgcaagtggagtttggggcactgtctgtagcagccactgggatgattctgatgcatcagtcatttgtcaccagctgcagctgggaggaaaaggaatagcaaaacaaaccccgttttctggactgggccttattcccatttattggagcaatgtccgttgccgaggagatgaagaaaatatactgctttgtgaaaaagacatctggcagggtggggtgtgtcctcagaagatggcagctgctgtcacgtgtagcttttcccatggcccaacgttccccatcattcgccttgctggaggcagcagtgtgcatgaaggccgggtggagctctaccatgctggccagtggggaaccgtttgtgatgaccaatgggatgatgccgatgcagaagtgatctgcaggcagctgggcctcagtggcattgccaaagcatggcatcaggcatattttggggaagggtctggcccagttatgttggatgaagtacgctgcactgggaatgagctttcaattgagcagtgtccaaagagctcctggggagagcataactgtggccataaagaagatgctggagtgtcctgtacccctctaacagatggggtcatcagacttgcaggtgggaaaggcagccatgagggtcgcttggaggtatattacagaggccagtggggaactgtctgtgatgatggctggactgagctgaatacatacgtggtttgtcgacaattgggatttaaatatggtaaacaagcatctgccaaccattttgaagaaagcacagggcccatatggttggatgacgtcagctgctcaggaaaggaaaccagatttcttcagtgttccaggcgacagtggggaaggcatgactgcagccaccgcgaagatgttagcattgcctgctaccctggcggcgagggacacaggctctctctgggttttcctgtcagactgatggatggagaaaataagaaagaaggacgagtggaggtttttatcaatggccagtggggaacaatctgtgatgatggatggactgataaggatgcagctgtgatctgtcgtcagcttggctacaagggtcctgccagagcaagaaccatggcttactttggagaaggaaaaggacccatccatgtggataatgtgaagtgcacaggaaatgagaggtccttggctgactgtatcaagcaagatattggaagacacaactgccgccacagtgaagatgcaggagttatttgtgattattttggcaagaaggcctcaggtaacagtaataaagagtccctctcatctgtttgtggcttgagattactgcaccgtcggcagaagcggatcattggtgggaaaaattctttaaggggtggttggccttggcaggtttccctccggctgaagtcatcccatggagatggcaggctcctctgcggggctacgctcctgagtagctgctgggtcctcacagcagcacactgtttcaagaggtatggcaacagcactaggagctatgctgttagggttggagattatcatactctggtaccagaggagtttgaggaagaaattggagttcaacagattgtgattcatcgggagtatcgacccgaccgcagtgattatgacatagccctggttagattacaaggaccagaagagcaatgtgccagattcagcagccatgttttgccagcctgtttaccactctggagagagaggccacagaaaacagcatccaactgttacataacaggatggggtgacacaggacgagcctattcaagaacactacaacaagcagccattcccttacttcctaaaaggttttgtgaagaacgttataagggtcggtttacagggagaatgctttgtgctggaaacctccatgaacacaaacgcgtggacagctgccagggagacagcggaggaccactcatgtgtgaacggcccggagagagctgggtggtgtatggggtgacctcctgggggtatggctgtggagtcaaggattctcctggtgtttataccaaagtctcagcctttgtaccttggataaaaagtgtcaccaaactgtaattcttcatggaaacttcaaagcagcatttaaacaaatggaaaactttgaacccccactattagcactcagcagagatgacaacaaatggcaagatctgtttttgctttgtgttgtggtaaaaaattgtgtaccccctgctgcttttgagaaatttgtgaacattttcagaggcctcagtgtagtggaagtgataatccttaaatgaacattttctaccctaatttcactggagtgacttattctaagcctcatctatcccctacctatttctcaaaatcattctatgctgattttacaaaagatcatttttacatttgaactgagaaccccttttaattgaatcagtggtgtctgaaatcatattaaatacccacatttgacataaatgcggtaccctttactacactcatgagtggcatatttatgcttaggtcttttcaaaagacttgacaagaaatcttcatattctctgtagcctttgtcaagtgaggaaatcagtggttaaagaattccactataaacttttaggcctgaataggagtagtaaagcctcaaggacatctgcctgtcacaatatattctcaaagtgatctgatatttggaaacaagtatccttgttgagtaccaagtgctacagaaaccataagataaaaatactttctacctacagcgtataaactagcaaaatttgaaaggatttctggtaactaaatgccagctggacatacaacctattttatccaacacattaacatatctactatatttgcttttaacaagcacctcatcatagtccacgttccccgaccatgatgtaagag

SEQ ID NO: 22325 - DNA, 2729 bp, Homo sapiens
ggcacgagggcccgagaagctggggagcatggaccagaccccgcagcgctggcaccatgacgctcgcccgcttcgtgctagccctgatgttaggggcgctccccgaagtggtcggctttgattctgtcctcaatgattccctccaccacagccaccgccattcgccccctgcgggtccgcactacccctattaccttcccacccagcagcggcccccgacgacgcgtccgccgccgcctctcccgcgcttcccgcgccccccgcgggcgctccctgcccagcgcccgcacgccctccaggccgggcacacgccccggccgcacccctggggctgccccgccggcgagccatgggtcagcgtgacggacttcggcgccccgtgtctgcggtgggcggaggtgccacccttcctggagcggtcgcccccagcgagctgggctcagctgcgaggacagcgccacaacttttgtcggagccccgacggcgcgggcagaccctggtgtttctacggagacgcccgtggcaaggtggactggggctactgcgactgcagacacggatcagtacgacttcgtggcggcaaaaatgagtttgaaggcacagtggaagtatatgcaagtggagtttggggcactgtctgtagcagccactgggatgattctgatgcatcagtcatttgtcaccagctgcagctgggaggaaaaggaatagcaaaacaaaccccgttttctggactgggccttattcccatttattggagcaatgtccgttgccgaggagatgaagaaaatatactgctttgtgaaaaagacatctggcagggtggggtgtgtcctcagaagatggcagctgctgtcacgtgtagcttttcccatggcccaacgttccccatcattcgccttgctggaggcagcagtgtgcatgaaggccgggtggagctctaccatgctggccagtggggaaccgtttgtgatgaccaatgggatgatgccgatgcagaagtgatctgcaggcagctgggcctcagtggcattgccaaagcatggcatcaggcatattttggggaagggtctggcccagttatgttggatgaagtacgctgcactgggaatgagctttcaattgagcagtgtccaaagagctcctggggagagcataactgtggccataaagaagatgctggagtgtcctgtacccctctaacagatggggtcatcagacttgcaggtgggaaaggcagccatgagggtcgcttggaggtatattacagaggccagtggggaactgtctgtgatgatggctggactgagctgaatacatacgtggtttgtcgacaattgggatttaaatatggtaaacaagcatctgccaaccattttgaagaaagcacagggcccatatggttggatgacgtcagctgctcaggaaaggaaaccagatttcttcagtgttccaggcgacagtggggaaggcatgactgcagccaccgcgaagatgttagcattgcctgctaccctggcggcgagggacacaggctctctctgggttttcctgtcagactgatggatggagaaaataagaaagaaggacgagtggaggtttttatcaatggccagtggggaacaatctgtgatgatggatggactgataaggatgcagctgtgatctgtcgtcagcttggctacaacattatttgcaatagccaagatgtggaaacagcctaaatgaatggatgaagaaaatgtgaggctttcaaactttggaggaatgcactgcggtaggatttggagtgagtgcaagatatgctttttgtgaagtgagagaagagaaattttgaaagagaagtttgatcttgatagcagcaagattatttttaagaaataatatatgtgaaatttgaggatataaaaattgattcacttacagcctgtgtatcccttggaaagttattatctaccaggagcacttgacatccagtttaaagactaattatcagaaagtgttgtgtcattgaaattttcagctatgaattactagattcagtaaaccagtgagaagcctttcccttttttctatggatggcagagtccttaattgtttaaagaaagagtagtcaaaagaaaatgtattagatttcactatatcaatgagaatttaatcatgtgctgttatttgttaaaatgttctctaatttctacttattgatatatctaaaatggtgcttttttttagtttgtgcaagttgatcagttgctaagaaatgatccttttggtttctttaagtgagttaaattttactttctgtatgtctacttctacctgccatctacttttatgttatttatcatgctttattttctgttttttgtgtaatcatctgttttttgattttcatgattaattcaattttcaattttcatcttttctcagtggtctagaaattcaacattcttattgtttttctggaagttctctttaaatttttagcaaacatactgaaacatactttcttaataatttcaaaaattattatctgtaacttccccttcctgaaaaagataaagacatttaacatattgttgtttactttctacctccacccattctcacctctgaaacttctgggaatcatctggaatttttgtttccaaattctattaattttttattgtcttcaaattatgccgatttgaatttcaaatttctttacattatacctatacattatc

SEQ ID NO: 22326 - DNA, 542 bp, Homo sapiens
ttggcggtggtcacagactttatgctcagggagaaacttattatcctgaattaggttggtagccatctgccagctcaactatttttggtaccagaacttagtgatgccatctctttaatgaccaaaagtcaccatgtctctactatcttgcctttgtgaggctctgcttacattgggcgggggttgccatgctaacctgaaaactcttgggcatttctgcatatcctaatatcatggatggttggactgaaagaaggaggaattaaaatatttaatttatatataagatacagtgtagtatagatgtatgtgtgtgtatgtctatgtgtatgtatgtatatatgtttgcacacatatataaatgtgtgcgtctgtgtatagactgtgtataccaaatccaaaatctcaaatgcttcaaattccaaaactttttgagtgtgaatatgatgctcaaaggaaatgtttattggagcatttcaaattttggatttccagattagagatgctcaactcgtgtaatgcaaatacttcaaaatctgaaa

SEQ ID NO: 22327 - DNA, 196 bp, Homo sapiens
gtaatttacaaagaaaagagatttaattgactaacagttctgcatggctagggaggcctcaggaaacttacaatcatggtggaaggcgcctcttcacaaggcggcagtagagagaatgagtaccaggaaatgtgggacacttataaaaccatcagatctcatgagaactcactcactatcacaagaacaggctagg

SEQ ID NO: 22328 - DNA, 1404 bp, Homo sapiens
gtctccctgagtcttggcccaagagctgtctgagaaaccagggagaaaccctcgtcatgggccccgtccctcttcatttttcatcccggaatccccgtcccagaactggactccctgcctcccactccttacctatttccctgaactcttctagaaaaaaactcaccccagggagcttggtgacagagagggagctcgccgccagagagggagctcgccctgggaatggaggcgtagagacaggtttttgttttttttttctttaaatccggaaaagttgtgcctgagtacatgagacagcatagagacaagttttctctttattaactacagtgggtagcagaatcttggcaacccctaaatgatcaggaatctaatcggtaaaaaatgtaactttggccccttgatctataaatgtgtctgaaagcattacaacaggactcacaaagctactaagtttgactttcccagacaatgtatctgtgactcccgcttgttttttacatttaccttcattccacagccctgagttactgggtgagtccaagacatctcctcaatataaagtagcacactgcgttactatatgttgcaaccgggagccagtacagactttattcacctcacagttgcaagtgttcaatgcagtcacaatgcccctcagcagtgctcatgtgctgcctgtttttaggaagtattcacgtctaagtggtgtgtatatcttataggaatacttagtatttttaaaacctgattaattaaaaaaaattagtttctaggcagtcccaaatatagtattaaaggccaactgcaaagaaggaacactaagtattttttaaaccttattaacataaaaaaacattagtttttaggcagtcctacattaggtattaaaggccaactgcaaagaacactgagcgaggctctgtagatggatgtaataaaaatctataaaacaatgtgtttaaacctaagaattctactgctttccaattccttccctctgctccttttcctaacctcctgcttctccagcccttccctctgtccctttcacccctcaggccctcctctccccttagtccccaccaccctgtcacttctaaattgtggctctagcattgtcccattacctgctatgtgactgttctctccacagtggtcctgctcctgtgagtcagagtgtgtcatttcctcacctaaaacactccagtggctccacctcggtcttgtgaagcttctagaatgtcaggcacgtgagcatatgagggcatacctggttcatcttaggcactaaattaatttttgttgactgaatgaatgaaatatgaatgtattaaattgcatcacagaaagttataaaatgtaaaacactgaaaaattaagaaatattttatcttatgt

SEQ ID NO: 22329 - DNA, 524 bp, Homo sapiens
gtctccctgagtcttggcccaagagctgtctgagaaaccagggagaaaccctcgtcatgggccccgtccctcttcatttttcatcccggaatccccgtcccagaactggactccctgcctcccactccttacctatttccctgaactcttctagaaaaaaactcaccccagggagcttggtgacagagagggagctcgccgccagagagggagctcgccctgggaatggaggcgtagagacagtgggtagcagaatcttggcaacccctaaatgatcagtggtcctgctcctgtgagtcagagtgtgtcatttcctcacctaaaacactccagtggctccacctcggtcttgtgaagcttctagaatgtcaggcacgtgagcatatgagggcatacctggttcatcttaggcactaaattaatttttgttgactgaatgaatgaaatatgaatgtattaaattgcatcacagaaagttataaaatgtaaaacactgaaaaattaagaaatattttatcttatgt

SEQ ID NO: 22330 - DNA, 342 bp, Homo sapiens
ctcccatgtcccaggtgacatccatgctgctggtccaggaaccacactttggtggcaagaatgtgagtcattgtgtgtgttgctatcattagtcttcctggtattggacttgagaccttcttagtcatctttgtatctccaacacttataaggtgaccaacgtcaagttgagttaacacatagttacagaataaatacatctttacagaataaatacatcttagcctttctttctctaaaaaacggtgagagcaactctctcaggtatggatgggataatatccaaaagtatccacgcttcttcagggttgaaagaagaccttcgaaagaaaatctaaagaa

SEQ ID NO: 22331 - DNA, 1176 bp, Homo sapiens
  misc_feature (273)..(273): n is a, c, g, or t
gacaaagaagtgtcaggacagtttgccaagaatgttgtttcttcttgtacaacacaaagcaaggaaacctctgtattttatggctttgaggttttaaaaaatgttctgcagtttgattgatatggcttttaaattcagtgaatcactttcatgaatactgaagtaggtataatcttcagaactagtaatcattatagttacagataggattccatcgcatgtcctgctcaaatgaagacctgttctcattaatcaatactgcatgaaaatatnactggctcacactaaaattaggagcatcaggtgtccagagttttcctgttggggttcagatataaaatctaagtttctattgaggttaataagctggaagcatttgtttcctttaagccttggagaggtcattttcttactcattgatagcttatgtctactgaatgcaatattcttttctgttcagggattttggctgcattatgatttggttatgacataactcagttaaggaatatatttactaatttccaatgtagtctatgaggttcatttaatgtttttaaattttctatgtgtgtggctagaaggcatttgtagatatgcaaatatttgttataatcctgatcccttttataatttgagttattttcttgccctgggggtttacaaggacacgagtgcaacactctttatatggagaagacaggaaatagaccttgagctctaaacctttgcctgaccccctcttctgtgggcctgtgtttctggacaatggggaggtttacagccagtatgagcagagcagactgggagcacctcaatcctcatgcttatattagaaaatgccttagcaatgttgatgggctccttgtagcactggagcatggggagggaacaagctcactgatgtcatttatgcctattgtcttcagtaacttagaacttattatggtatattaaatcaataaaatgttggtgatgaaaaatgtgttttgtaaccataaggctgaaagggacttccaggaatatccaatctatttctctcactttttataaagatttgtctaagcaactactctaaacacatatttattatctccatacttaagaatatctacgggaagcatatttgaaaagcatcattggaaatccacctcaatactagtgataggcctggag

SEQ ID NO: 22332 - DNA, 205 bp, Homo sapiens
ttttttggctgcaaggcaaactgaaaggatatagctctagaaataaaactgtcaaggtaaataggaatggtatgatatccactcacattgatgagggcaggtcttctttactcagtccactgattcaaatgctaatctcttctagagacatgctcacactctcagaaatgtttcactagctatttggtaaaaatattgtttaaaa

SEQ ID NO: 22333 - DNA, 399 bp, Homo sapiens
ggaagagtaccttgctctgtgtccctctgattcaacttcacccctatgtatctccagatgaagggatgaaattgaaaattcatcctcgagcttcaagcacagtcccttttctgatatggctaacagtagtttggataacacaatattgactgtgggttgcgaaattaatgcaacacattagcagttctgaatcagacgagcggtcaaaatggaggaactgaggcaaatttatgtgctggaagactgaaggactacaaacaagaaacaaagaactgtggcaaggtggcaagtattgaaaaatttgggcaatgttaattaatgatgaggaagtaaaaaagtgttgcctgccaaagaaggggatttgaaagtcttgattcattcttggaaatgcgggactac

SEQ ID NO: 22334 - DNA, 1189 bp, Homo sapiens
gggcggaagatggcggcggcgaaaggagctggtgcctgtgcaagttgttgagataatcaccatggccacagccctgaagagagaatcatctatggtgtagagaatagtagcacatttttggaatgcagtccgaagtcgcagagagcgctggtctattggcaattccagaggcgaaatgaagagcgaaaagaagagatcagagtggatgatcatatcatcaggacagatcaaggccttctgctacgtagtctacaacagaaggattcaggcaattacctctgccatgcggtggaacatgggttcatacaaactcttcttaaggtaaccctggaagtcattgacacagagcatttggaagaacttcttcataaagatgatgatggagatggctctaagaccaaagaaatgtccaatagcatgacacctagccagaaggtctggtacagagacttcatgcagctcatcaaccaccccaatctcaacacgatggatgagttctgtgaacaagtttggaaaagggaccgaaaacaacgtcggcaaaggccaggacataccccaggaacagtaacaaatggaagcacttacaagaaaataagaaaggtagaaacaggaggacccacgaatttgagagggcacccaggagtgtctgagctgcattacctctagaaacctcaaacaagtagaaacttgcctagacaataactggaaaaacaaatgcaatatacatgaacttttttcatggcattatgtggatgtttacaatggtgggaaattcagctgagttccaccaattataaattaaatccatgagtaactttcctaataggctttttttcctaataccaccacctaacagagaacacaggtgaatgcagatgttcactttagcagacttaatgtttcctatgagatttcactgtacaggtttgtctttcttctttgcctgagaaataaaaatgtcatttgccatattgccatctaaaggagaaaaactgcatcagcaaagccattgtattgaactaaaagtttaaaatgaactgcatggatttactaagctgatgaatattccaaaacgtggttggattcaaggatatattttgtctaccggccctcatgtttgtatgtacttgaggagtaaaatgagtaaaatgatactgaatgaaatgttctgtggatattaaaaaaaaaa

SEQ ID NO: 22335 - DNA, 1459 bp, Homo sapiens
aaggagacttggtatgatttagaagaggttctgctggaagaaatgacagtttttcgggaaccgactgctatttcagcaatggagctttccactaagcagcaacaactatatattggttcaacggctggggttgcccagctccctttacaccggtgtgatatttacgggaaagcgtgtgctgagtgttgcctcgcccgagacccttactgtgcttgggatggttctgcatgttctcgctattttcccactgcaaagagacgcacaagacgacaagatataagaaatggagacccactgactcactgttcagacttacaccatgataatcaccatggccacagccctgaagagagaatcatctatggtgtagagaatagtagcacatttttggaatgcagtccgaagtcgcagagagcgctggtctattggcaattccagaggcgaaatgaagagcgaaaagaagagatcagagtggatgatcatatcatcaggacagatcaaggccttctgctacgtagtctacaacagaaggattcaggcaattacctctgccatgcggtggaacatgggttcatacaaactcttcttaaggtaaccctggaagtcattgacacagagcatttggaagaacttcttcataaagatgatgatggagatggctctaagaccaaagaaatgtccaatagcatgacacctagccagaaggtctggtacagagacttcatgcagctcatcaaccaccccaatctcaacacgatggatgagttctgtgaacaagtttggaaaagggaccgaaaacaacgtcggcaaaggccaggacataccccaggaacagtaacaaatggaagcacttacaagaaaataagaaaggtagaaacaggaggacccacgaatttgagagggcacccaggagtgtctgagctgcattacctctagaaacctcaaacaagtagaaacttgcctagacaataactggaaaaacaaatgcaatatacatgaacttttttcatggcattatgtggatgtttacaatggtgggaaattcagctgagttccaccaattataaattaaatccatgagtaactttcctaataggctttttttcctaataccaccacctaacagagaacacaggtgaatgcagatgttcactttagcagacttaatgtttcctatgagatttcactgtacaggtttgtctttcttctttgcctgagaaataaaaatgtcatttgccatattgccatctaaaggagaaaaactgcatcagcaaagccattgtattgaactaaaagtttaaaatgaactgcatggatttactaagctgatgaatattccaaaacgtggttggattcaaggatatattttgtctaccggccctcatgtttgtatgtacttgaggagtaaaatgagtaaaatgatactgaatgaaatgttctgtggatattaaaaaaaaaa

SEQ ID NO: 22336 - DNA, 373 bp, Homo sapiens
ctgaaaggaaggcctcaccctggggatggcacctgtctcttctcggttaaacaggcctgtctccctcccttccccaccgccatcctttctggtcttctgagaatgctggcttccctactgcacagtcaagagcaagcaaagcaaaactctttggtctcgagctgctgcactcttctcgaaactaaaccatgatctgctcccaggagagcaggagaaagtaaatgtaaaagattctgtgagaaccctgagatactgtatcagacgatgaggaactggcagtagtacaatgaacggtgtagtgaagcgtctccagccatgaatataggacacaacctagatctgtggataactaaataaaaataaagccccgttc

SEQ ID NO: 22337 - DNA, 435 bp, Homo sapiens
gactttaaaatttttcagtctgcttatattacctattttaaataattttttaaaaagaggctcgaagattattaatagtaagtatggttattttatgatagttgttggatgacaaatgacctttgtacatacacttttcaatttagcaaacttaaacaatttcaactattaacatgttttttaataaatatttcaaattaaatatatctgtttaaaaatctttgacctcagattgtagaataatagcctaaaatgtagttgttgatatgttttgatttaaaattttctggaaattttaaattatgttataaatttaaatccatttggaatcagaagcaggaatatttgttactaagcgaatcttacatacgttttgatatgtaatgatgctttacaaaatggcctttggtctagccttgcatagcttgttttata

SEQ ID NO: 22338 - DNA, 328 bp, Homo sapiens
ggctctgctgcttactacctgttgtgaactctttctgacttagttttgtcatctgtaaagtagggaaaattttagtagtatcgtgaggatgaaaggtaaaggcaaagtacttggatcagggccttccattagtaagtattcaagaaatattaataacattcataaaaataataagcacattcttatgttgcctatgaaatcaggtccttctgcatttggacacaggacaagctggcatggaaactttcaatggttcattcgttcataaaagctcttagtgacttaccaactagtgcaagagacagtattttggaacaaattggcaaaa

SEQ ID NO: 22339 - DNA, 95 bp, Homo sapiens
ttgggaaatatggtaacattagatagtgggattccaaaagtgaggggggatcgcaggctaaaaaacttcctcttggatactatgtccactatctg

SEQ ID NO: 22340 - DNA, 212 bp, Homo sapiens
ctggaaacaagactctggcaagaagggccttctgagcaaggtcagcatctcctcccaacagctctttctcccaacaatgccaggggatctttcaaaattgccactgctgctgctaagctccagaagagaggtttctgaacttcaatgtctttatcatagctcactctctgggttctcagatagatatatatatatcagggttgtcttcatct

SEQ ID NO: 22341 - DNA, 361 bp, Homo sapiens
tttttttttttgagacggagtctcactctgtcacccaggctggagtgcagtggcacgatctcggctcactgcaagctccatctcccgggttcacaccattctcctgcctcagcctcccgagtagctgggactacaggcgcccgccaccacacccggctaattttttgtatttttagtagagacagggtttcaccatgttagccaggatggtctcgatctcctgatcttgtgatccacccaccttggcctcccaaagtgctgggattacaggcgtgagccaccacgcccagcctccatttttttattctcatgcttcatgactgcctaacgcaacataagttatcacaaacagaacactagc

SEQ ID NO: 22342 - DNA, 264 bp, Homo sapiens
taagcatgtgtttccttaacagtgagggagatcggtgccaaatagtgcagaggtggtatggcagacagcacatgtgatcccaggaaaacgctgtgccctcaacccctctagctctgagatgtttggaaaaccgcttgtgaagcttagctgacacttgtggcgtgttccctcaatgtgtttgatttttggagtccaaatggttaaaattgcccagataataagtcgccaaaaatcagctgtgcagagtatgctggtggagggaat

SEQ ID NO: 22343 - DNA, 429 bp, Homo sapiens
acagtttcttcagctatagtcaacatcagcaatgcctgtgtgtgcctcaatggcttaggctgtagagatttgtatggctattccacctacttgggctctgctcctcggggggttgggtgctgggctggtccacgctttggagaagtgaggggctggtaaatcagtggcttgagtcagctcaggctctgctcctcacattaaatcttgaaagatgtgaatttcattacctcttagttacataaagccatatacaaactctttgttgtttgttttaaatcttatctctgacttggttataaatgattgcacttttctactatttctaactacagtatagcagtgctgaaacatctggggggcaaaagaaagttagataggctagtaacaccaaagtaatgctgaaacctggaaggaaagaaaacacattac

SEQ ID NO: 22344 - DNA, 470 bp, Homo sapiens
actggaatgatttctaccaatagaatcctgtatagatattgattcactatggaaactgtggaatcctgtataaatatcgattctttcttctggagcacaatggcagtttaccagcccaaataggcagtaacagctactaagctcccaagatgtcattgtatgctggtggagctaaaccacagcagcattacactgtttctgatgaaatcagactttcattacttctgcatcatatcagaatcatctgatgactcttccaaagcatacatgcttgggccgccattcttggtgaatctgtttcagtagatttgagaatggaacacaacacatgtattttgaaagagctctccaagtgattctcatatacttcgtaattcaggtgaatgcaaaaaaataagtggttagcttatgcacatgctgctaaaagggagaacttaactatattaataacctagagttctgaagagacc

SEQ ID NO: 22345 - DNA, 379 bp, Homo sapiens
ctgtaaactaaaatttattattattacttatggattttgcaggtgggctagattcagacaggcagttatctctcagagtctctcttgattgttcagtaactggtcttaaagtcatctgaagcaaaaagcgaaattggattctactctcagtgggaggaagagcaaacaatgtgctaccttctttaatgtatcataatggtctttccagaaagaaatgctgagcattcaataagagctcagtatgcaggcattgaagaaatacttggttacagacaatgaactcagtgtgagttcacctccaaatgaagatctaaaacacagttcagagactgtctccgtaagggcttttaatacagatattgtatagatgagggcattg

SEQ ID NO: 22346 - DNA, 448 bp, Homo sapiens
caagccagtgacttgagagatctagtgcgtagtttgaccttttgacctggggttttacacgttggcatacttctggggtcttgcttttggggctttgcattacttctctcctgattcttcccttagagtgagctgtccacaggcgcatacttgagcccacttgcccaactcctaagatcttatcgggaagctgctgatcaacagttcaagtgttttctattgggagactgcctttccctggtgccggctgtgaccaactattattttagagagacaattaacaaccacctgaccatcacctgatggctgcctgacattcctgatgtgtgtgtgtatgagggggagccctctcctgccctgctcatgcctgactagctacctactgtaacaccttaaccagattttctttgtcatggcttttcttctcaaatttatctctctttaccta

SEQ ID NO: 22347 - DNA, 384 bp, Homo sapiens
ttaagagatttaaagcagtgcaaaaagagatacagtgaaaagtatttctgtaccctatctactttgtcctctccatgccaaatagataactagtttcttatactgtcttttgttgcttaaccacaggaatgtgtgttctgaggaatgcatccttagatgattttgttgttgtggaccatgatagattgcacttaaacatacctggatggtgcagccggcttgctgtacacataggctaggtgatatagcctgttgctgctaggctacaaacctagacagcatgttgcaaagccagagtacatgttaccatactgagtactgtaggcagttgtaacacaatggtaagtattttgtgtatttaaacatagaaaaagcacaataaaa

SEQ ID NO: 22348 - DNA, 564 bp, Homo sapiens
aagagggtagttgtatctatactgaacatgtagactttttttcttgtcattattccctaaacaatacagtataacaactatctacatagcctttacattgtattataagtaatctagacattaaagtgtatgggaggatgtatgtaggttacatgcaaatacttgtgtcattttatatcagggactggagcatctggggatcttgatatccaagggggtcctggatccacttcccctaagatatgcgaagtaaccgtactttcctctccaccaccacctcagtcccagcactttgggaggccaaggtgggaggattgcttgagctccggagttcgagaccaatctcggcaacatggcgagaccccatctctataaataaaacaaaagtaaatgcattaaatggaaggttgacagtttatcataaacctacaaagatgtttgtaaaattttgttttagtcattttctttgaactcacatcattataccatcttcatttttgtatggagctggttcaattctaagtcctctagactttccctgcctatctttgttgttgttgttgt

SEQ ID NO: 22349 - DNA, 123 bp, Homo sapiens
tgctagagtttcataattacaaattgggatataaaaatagaataattatttgaattttgtatttctctccaggggatcaaaagtaatatataaacttttaataaatattgatatagcttcacg

SEQ ID NO: 22350 - DNA, 2382 bp, Homo sapiens
aaatcagttgtcttagtttaagctactataacaaggtactgtagactgatggcttataagcaacagaaacttatttctcagttctgtagtctggaggtccaagatcaaggtgacactgtggtcaggttctgatgagggccctcttctgggttataaactacggacttcttgtatccttacatggcagaaagagcgacagagctctctgtagtcccttttataagctcactaatcccattcatgagggccctaccctcatgacccaattacctcccaaatgcccctcctccaaacaccaccactttgggggttaagatttcaacagatgaattttgaagggacacaaacattcagtccatagcatcacttatcaagctagtatttaatacctcttaggccccgtggaagggaaaatagataggaacctgccctgaaagatgcttcagttggggagaaaaggtgaaattccattgttagacaatttgtttaagacaatacatcttgcttgagaaggaatagaagggaaatgaaatggggggagggagtggtaggagatggaggctttgaaagaaaataaccagatttagaaacatgggtatagaaagcatcctccagtacttctgtaacaatttatcaagacctacaggaagtcagttttggatttgctcctccgagatttgcgagccagaggaaaatacttagactatcaggttggaaagttcacacttggaccaggaaaagaccaagcagttgctatagtctcctggattgtgactaatctggaggaagcaagtccctgtatccttggcaaagcttgaaaggcaggcaaatgtcttctctgtgttttctgacaggtggttgggtggtgggggttggtctctgtacctcctgttctttaccttgcttaccaagcccttccaccgactcactcctgcctccccagctaaaaattggctgtgttgcttttaccacagttaccaaggtctgagttttataaaatccaggatcacatctgacctcacctggtagatatctaggccaataaagtctaaagggctaaaaagaaggtacctctccatcctgtctcctcgaggccaggcagcacatgtgcagttaagaggcctcctggatccattgtcctcctgttgcttttcgttctaagtgatccaaactctattgctgatagggaataaaagcagggcaggctagtagtgggcaagtgctttgatggagcgtatctccaagcagggcccaagtttaggaggaggaagacctgatacaatgaatgaacagtgcgtcctcccaacccaaccaagaagtgtaattgtgttccgtctttaaccctggcatggaatggggagggaagaggcatggacatttattacatagtgcacattatctacattctctgcatgtgacccagatgtcagcccttccgcttcctgcgaaggttacctctaatgcacgttgccccaggccctgctgagctagttcctcaccgcagctacttaactcaccatgaattcctagaaccctcagcctctgagagtgctgggatctggcgggagaacaggcagtacttccctcactaacctacccgcacgccataccatcattgtgcaaagctgcctcatgctggaaggtctggtttacgtaaaagtgacaagttggaattgagcgtccgactctcgggtacctgccccaggcatttctcatcagccccatttcccacacagctctctcctaggcgcagccctccttcaccaccaccacccccaccccaatcacctttaggtattttctcccctaaagcctcacctgttggcattttacatctttttaagaccttattttgtattttaaatgtatgagaaaaattatggaggatgatgcaagatgagtgagtccataatggtaataattggacactaaaaacaatgaaaacttgtctcaagtatttgtgttgaaatctcaattaactgggcgactgctcccgttccattttattctgtaaaatatgtggcatcctttgtgttgaggcggcatttactaaacacccccaaggtgcaaggctgcaagagaatcgagcgccgcaaggcgagcttatcttccacacctggtacagtgcccaggacagagaaggtgtttagcaagtttctgctgaatggaagagtgagcgagaagggaaagtgcatctaaaaagcacagggaacctacaaaatatttgggaaagggtttcatcagttcgggtgaaatcttgaacgtgcaaagcaccatgggggtggctggacaggcttgttggagtcgtataatgcaatgaataaaaacttacggctgccttaaatgcaaatgtcaagcccttaaataaaatttaacaaagtc

SEQ ID NO: 22351 - DNA, 2328 bp, Homo sapiens
aaatcagttgtcttagtttaagctactataacaaggtactgtagactgatggcttataagcaacagaaacttatttctcagttctgtagtctggaggtccaagatcaaggtgacactgtggtcaggttctgatgagggccctcttctgggttataaactacggacttcttgtatccttacatggcagaaagagcgacagagctctctgtagtcccttttataagctcactaatcccattcatgagggccctaccctcatgacccaattacctcccaaatgcccctcctccaaacaccaccactttgggggttaagatttcaacagatgaattttgaagggacacaaacattcagtccatagcatcacttatcaagctagtatttaatacctcttaggccccgtggaagggaaaatagataggaacctgccctgaaagatgcttcagttggggagaaaaggtgaaattccattgttagacaatttgtttaagacaatacatcttgcttgagaaggaatagaagggaaatgaaatggggggagggagtggtaggagatggaggctttgaaagaaaataaccagatttagaaacatgggtatagaaagcatcctccagtacttctgtaacaatttatcaagacctacaggaagtcagttttggatttgctcctccgagatttgcgagccagaggaaaatacttagactatcaggttggaaagttcacacttggaccaggaaaagaccaagcagttgctatagtctcctggattgtgactaatctggaggaagcaagtccctgtatccttggcaaagcttgaaaggcaggcaaatgtcttctctgtgttttctgacaggtggttgggtggtgggggttggtctctgtacctcctgttctttaccttgcttaccaagcccttccaccgactcactcctgcctccccagctaaaaattggctgtgttgcttttaccacagttaccaaggtctgagttttataaaatccaggatcacatctgacctcacctggtagatatctaggccaataaagtctaaagggctaaaaagaaggtacctctccatcctgtctcctcgaggccaggcagcacatgtgcagttaagaggcctcctggatccattgtcctcctgttgcttttcgttctaagtgatccaaactctattgctgatagggaatcagggcccaagtttaggaggaggaagacctgatacaatgaatgaacagtgcgtcctcccaacccaaccaagaagtgtaattgtgttccgtctttaaccctggcatggaatggggagggaagaggcatggacatttattacatagtgcacattatctacattctctgcatgtgacccagatgtcagcccttccgcttcctgcgaaggttacctctaatgcacgttgccccaggccctgctgagctagttcctcaccgcagctacttaactcaccatgaattcctagaaccctcagcctctgagagtgctgggatctggcgggagaacaggcagtacttccctcactaacctacccgcacgccataccatcattgtgcaaagctgcctcatgctggaaggtctggtttacgtaaaagtgacaagttggaattgagcgtccgactctcgggtacctgccccaggcatttctcatcagccccatttcccacacagctctctcctaggcgcagccctccttcaccaccaccacccccaccccaatcacctttaggtattttctcccctaaagcctcacctgttggcattttacatctttttaagaccttattttgtattttaaatgtatgagaaaaattatggaggatgatgcaagatgagtgagtccataatggtaataattggacactaaaaacaatgaaaacttgtctcaagtatttgtgttgaaatctcaattaactgggcgactgctcccgttccattttattctgtaaaatatgtggcatcctttgtgttgaggcggcatttactaaacacccccaaggtgcaaggctgcaagagaatcgagcgccgcaaggcgagcttatcttccacacctggtacagtgcccaggacagagaaggtgtttagcaagtttctgctgaatggaagagtgagcgagaagggaaagtgcatctaaaaagcacagggaacctacaaaatatttgggaaagggtttcatcagttcgggtgaaatcttgaacgtgcaaagcaccatgggggtggctggacaggcttgttggagtcgtataatgcaatgaataaaaacttacggctgccttaaatgcaaatgtcaagcccttaaataaaatttaacaaagtc

SEQ ID NO: 22352 - DNA, 611 bp, Homo sapiens
tgtgtgtgtgtgtgaatgaatgcttctccatgaccagtgtactcccctgagagcaaccctctctgcctgtcttccacttacagtgactgagtgggagccaattggggaagctgctttctttgagttggcatctttcagtgacctggcggtacctggtccaataaaaagatgtgattttctgaaatccagtatatacctgtatgttttgaggctgtcttcccaaggtgacttgagaatacgtctacacacacagaatattgggatattgttttctaactgcctattgcattgtgttaaattacaaactaattccccagatgatgggataagttatttttttctctgccaagtcacaatattaataatgcagctaaatttagctctgctgtaaaagagtttaattttcaaagccaattagacaatttgatggctgacttgctgcatttgtctctaactactcagttgataccatgttgccaccctaacagattcttgctgatagtcaaaggagagatgagttgtgggaagtataaagcttttcaattaatttatgatcctattaggtgtaaagcctataaattacctgcggttgttgcctctgccaaaaaaga

SEQ ID NO: 22353 - DNA, 511 bp, Homo sapiens
cacaatgttaaacagttgtaagactgccatgttgaggtcactggatagattttacatctacttttggccttttggaaatggaatcttctgttttcatgcaataagctaatttggggataattatatgtgagttatgtcaatatttaaaaaaatcttttgaagttttggttgaatttcttatttggcattggagggtggctcttatttgaagtttagtgtcaggctgcttatcccaaagtaattcttgcaattcttggacccttagtgagatgttcccatcagtaatactttgcattttttggctgatagattaaacttttctcagctcctggagatcctttttctgcttttccttatttttaaataataatttaatgttgttgttttttgatttatctattttaaatattctttactgatttcatataacatggatgaaagttgagcatttttagaccaagctcctgccaccccctcctgactgaccctcctcccaatgtagttctatgac

SEQ ID NO: 22354 - DNA, 479 bp, Homo sapiens
ggtttttctttagtaaaaatcctataaaaatactagtatttttctctgagtttaaaattcaacacatgcctactgatatggttaggctttgtatccccacctaaatctcatcttgaattgtaatccccatagcccccataatccccacatgtcaagggagagaccaggtggaggtaattgaatcatgggggcagtttcccccgtgctcttcttgtgatagtgagttctcacaagatttgatggttttataagggattatttcccctttgctcggcacttctccttcatgctgccttgtgaagaagctgccttgcttcccctttgtcttccgccatgattgtagatttcctgtggcctcccaagctgtactgaactgtgagccaattaaacttctttcctttataaattacccagtcttgggcagttctttatagcagtatgaaaacagacaaatacacctactatataaaacttaaaat

SEQ ID NO: 22355 - DNA, 651 bp, Homo sapiens
gctttgataggtgaaacgcacgttttgaacaactctggtaacaaagaaaaacattaaattgattataggtatgttatatttaaagaccagttgtgaaattagctatattgtgctcaaagtatgttactgacatttctccgtcgttaaaaggaactgctccattctagttttttataatagtctgtattatgtatatagcctgatagtgctgaatttctgaattgaccttcatcttatttactcaataatattcatttgacaaatacttattaagtgcatatatgtgtcaggaactgtactagatgctgaggatatagcagtaagcgcaacagaccaagctaacagcttagtaaagggtgaggtaaaacaaaacaaaaaagtattcaaaaaaataaactaatttttatcttaatttaaaaaattacaaatttttaaaaatcacaaattggtatccatgtataattcatttccgtgcattttcttgtgtgaagaaagctcagtaaaagtatttcttaggtttctgtaattctagttctctactcgattttcttctgcaattttctgagccagaacccttcttagaaggcatattagagactttaaaagttaaataataaaataaatctcttctttaaacagcattgtactacg

SEQ ID NO: 22356 - DNA, 424 bp, Homo sapiens
ccatatcccctactagtctgtaagcatcttcagggcagggatacctctcatctctgtatccccaggctcaagcacagtgcagtaagcagacaataaatatttaactgaaatcaaatgttttattgctggcttgtcttttctaagttggctttaacccttagtctctttcttgcttcacaggaatgagctaatcctaacagtgatactgcctgtcccaggattacaagaaatatcacaaaatataagagagtgtagcataagacatgaaggccaccagaagtgctactatgatttaagattggccgggcagtggtggctcatgcctacaatcccagcactttgggaggccgaggtgggggaaatcaattgaagctaagagttcaagactaggctgggcaacatagaaagacccctgtctctacca

SEQ ID NO: 22357 - DNA, 775 bp, Homo sapiens
tctaaaacttcactggtcattaacgcttcttttggcaatttgaaaaaaaaaagttacatttaatagactattacacattttcttttgctatgttcaactactaaacttctaattctgttacaaaaggtatcttgaatttttaatgttcctttatgtaaataggataaacttgtacctggacatatctatattattaaccttaagatccctaaataaatgggtttgataaagggttgaatttgggggaatcattaaaattatcaaacctttcgtataaccagatgctcagttttttcagaagtaaatattagatggctttttcatactgtgagatgaggcatttctttttctcctcaagctgatctcagaaacaaatcagtctctcatcagtaaccaagctgtactgtggtaaattatgaagaaggtagatgcgactggtccaatgggcccactgttttgtatattcacacaaggaggcatctttgaaacactatacctatctctttctctaaaaaaaaaaaaaaaaaaaaaaaaaaaacctttccaataaatgttcattctgagtacattaatttttagtgagaaaaagaaacaatcatagagaccccactagagaacctagtgtctgctcagcaaacccatattgagctgtagagcatactttaacagccatctcaaccagctcacccaacgtgtaaattcccttcccatttgggcatagaagttgacagcctagagtgtcaggacggccgagtggtctgaggctccagactca

SEQ ID NO: 22358 - DNA, 250 bp, Homo sapiens
tttttttgagagagtctctgtcgcccaggagtgcagtggtgtgatcttggctcactgcaacgtccacctcccagattcaagtgattcccctgcctcagcctcccaagtagctgggattacaggcttgcaccaccacacccagctaatttttgtatttttagtagagatggggtttcaccatgttgccacagtgcctggcctgaactttctcttttacagccacatgcaaattacctgaactatctggctt

SEQ ID NO: 22359 - DNA, 1154 bp, Homo sapiens
cgcgactcgggcgccggtggcgccatcttactcggttgcgggaggggtcacaggtcagtgccggagcctccgcgagtgaaggaagacgaagtgcgtgacccgaccggctgtggtgttccagtccccactgaccagtaggagcagcagggcgtcggcttgtgaggtggcttttcctcggggcaacccaggaaggccccaagaggacaatggattctggaactcgcccagttggtagctgctgtagcagccccgctgggctctcacgggagtacaaactagtgatgctgggtgctggtggtgtagggaagagtgccatgaccatgcagttcatcagccaccgattcccagaagatcatgatcccaccattgaagatgcttataagatcaggatccgtattgatgatgagcctgccaatctggacattttggatacagctggacaggcagagtttacagccatgcgggaccagtatatgagggcaggagaagggtttatcatctgttactctatcacggatcgtcgaagtttccatgaagttcgtgagtttaaacagcttatttatcgagtccgacgtactgacgatacacctgtggttcttgtgggaaacaagtcagacctcaaacagctaagacaggtcaccaaggaagaaggattggccttggcccgagaattcagctgtcccttttttgagacatctgctgcataccgctactatattgatgatgttttccatgcccttgtacgggagatacgtaggaaagaaaaggaggcagtactggccatggagaaaaaatctaagcccaaaaacagtgtatggaagaggctaaaatcaccattccggaagaagaaagattcagtaacttgaagagaagatgtgaagtgtttatctgtgaactgcagtgctgtatcaaagcagtccagtaacctgcagtactgagtatggtgcttgctctttcacttaactgataagagggacatgcctactaggagtttttaatgatgtggtatttaaagtattgtctcttagttaagtatgatttattaacccagtggagcactgtctgcttttaaattgtcacattagaatttgttctaccaatgttttgggttctgttgcgctattaattaatgtaaatttgtttatacccaggag

SEQ ID NO: 22360 - DNA, 323 bp, Homo sapiens
tgattattgaagaattaatatatataagttacttagtataatgtctggtagataataacaatttaataaatggtaaagttacttttcaggcctaattttttttttcccctaagagatggggtctcggctgagtgcagtggcccacacctgtaataccagcactttgggaggccaaggcaggaggattgtttcaacccaggagttcgagactagcctggacaacattgcaaaatcctatgtctaccaaaaatacaaaaaaattagccagacatggtggcagtcaccactgtgcccagatagcctaatttttttaagaaagacat

SEQ ID NO: 22361 - DNA, 1688 bp, Homo sapiens
cgcgactcgggcgccggtggcgccatcttactcggttgcgggaggggtcacaggtcagtgccggagcctccgcgagtgaaggaagacgaagtgcgtgacccgaccggctgtggtgttccagtccccactgaccagtaggagcagcagggcgtcggcttgtgaggtggcttttcctcggggcaacccaggaaggccccaagaggacaatggattctggaactcgcccagttggtagctgctgtagcagccccgctgggctctcacgggagtacaaactagtgatgctgggtgctggtggtgtagggaagagtgccatgaccatgcagttcatcagccaccgattcccagaagatcatgatcccaccattgaagatgcttataagatcaggatccgtattgatgatgagcctgccaatctggacattttggatacagctggacaggcagagtttacagccatgcgggaccagtatatgagggcaggagaagggtttatcatctgttactctatcacggatcgtcgaagtttccatgaagttcgtgagtttaaacagcttatttatcgagtccgacgtactgacgatacacctgtggttcttgtgggaaacaagtcagacctcaaacagctaagacaggtcaccaaggaagaaggattggccttggcccgagaattcagctgtcccttttttgagacatctgctgcataccgctactatattgatgatgttttccatgcccttgtacgggagatacgtaggaaagaaaaggaggcagtactggccatggagaaaaaatctaagcccaaaaacagtgtatggaagaggctaaaatcaccattccggaagaagaaagattcagtaacttgaagagaagatgtgaagtgtttatctgtgaactgcagtgctgtatcaaagcagtccagtaacctgcagtactgagtatggtgcttgctctttcacttaactgataagagggacatgcctactaggagtttttaatgatgtggtatttaaagtattgtctcttagttaagtatgatttattaacccagtggagcactgtctgcttttaaattgtcacattagaatttgttctaccaatgttttgggttctgttgcgctattaattaatgtaaatttgtttatacccaggagaatatgtataccatgtgtgtttgactaagttcacaagggaagtttttggctctgcactccacattatcctttaatttcaatttcctgggactatcccagagaaagacctcagtctcttctattcacactatgcttcctagagacagaacaaaaatcatgtagggaaattggggctaatgagatcagtgccaaatttcagcagatacctgtgaggctgacacctgttgcagactatggagtggtgagatttgggaaagttgggctatatgtttgcagggacttaaaaaggtaggttcagaacagtattctcagtacaagcttcgcttttctaagaagtacacatttggcccaaattcaccgggataagtgagaacagccagaagcataaaatgtgatgaaggtttctcctgggaaccttattttactcttcatttcagggttttctttttttttttaccttcaaaggtagacattttgggaatcataactgtattactaaacgtgtttaatcaaaattcatagttggatcagcca

SEQ ID NO: 22362 - DNA, 601 bp, Homo sapiens
gcctactactactactaaattagcggccgctcgacctgtggttcttgtgggaaacaagtcagacctcaaacagctaagacaggtcaccaaggaagaaggattggccttggcccgagaattcagctgtcccttttttgagacatctgctgcataccgctactatattgatgatgttttccatgcccttgtacgggagatacgtaggaaagaaaaggaggcagtactggccatggagaaaaaatctaagcccaaaaacagtgtatggaagaggctaaaatcaccattccggaagaagaaagattcagtaacttgaagagaagatgtgaagtgtttatctgtgaactgcagtgctgtatcaaagcagtccagtaacctgcagtactgagtatggtgcttgctctttcacttaactgataagagggacatgcctactaggagtttttaatgatgtggtatttaaagtattgtctcttagttaagtatgatttattaacccagtggagcactgtctgcttttaaattgtcacattagaatttgttctaccaatgttttgggttctgttgcgctattaattaatgtaaatttgtttatacccaggag

SEQ ID NO: 22363 - DNA, 329 bp, Homo sapiens
aaaaagtagactagaaatagaatcatatcatttgaaggcagaataagaaaccttagaagtaatctagcctaaaattacaaaaattagtgctgtatgcttgaacacctccagaattgagaagctttctttgtgttaaggtggtggtgcattcaggtttttggacaatttaattgtttttcactgttatcttttctcacattttgcccttaaaggtcaccaaggaagaaggattggccttggcccgagaattcagctgtcccttttttgagacatctgctgcataccgctactatattgatgatgttttccatgcccttgtacgggagata

SEQ ID NO: 22364 - DNA, 395 bp, Homo sapiens
agcctaatttttttaagaaagacatcttctcagaatccttttttagcttagaattgtaggtgaaatcttcagctgtgaataaactacatcatcacctatgtggaaaaaaaaacttcagttgaagactcagtttatgtatctcagtggatttagcatgcttcctgagaaaatgtgggcatttaatgaatttggatacaatgtactactctgtaagatgagttttaaataggcatttcttccggcatttatgactttatagtacacctttcttccctcctgtagaagatgcttataagatcaggatccgtattgatgatgagcctgccaatctggacattttggatacagctggacaggtattaaatcccagaatgttatgagtaaaggctttttta

SEQ ID NO: 22365 - DNA, 1005 bp, Homo sapiens
cgcgactcgggcgccggtggcgccatcttactcggttgcgggaggggtcacaggtcagtgccggagcctccgcgagtgaaggaagacgaagtgcgtgacccgaccggctgtggtgttccagtccccactgaccagtaggagcagcagggcgtcggcttgtgagccatgaccatgcagttcatcagccaccgattcccagaagatcatgatcccaccattgaagatgcttataagatcaggatccgtattgatgatgagcctgccaatctggacattttggatacagctggacaggcagagtttacagccatgcgggaccagtatatgagggcaggagaagggtttatcatctgttactctatcacggatcgtcgaagtttccatgaagttcgtgagtttaaacagcttatttatcgagtccgacgtactgacgatacacctgtggttcttgtgggaaacaagtcagacctcaaacagctaagacaggtcaccaaggaagaaggattggccttggcccgagaattcagctgtcccttttttgagacatctgctgcataccgctactatattgatgatgttttccatgcccttgtacgggagatacgtaggaaagaaaaggaggcagtactggccatggagaaaaaatctaagcccaaaaacagtgtatggaagaggctaaaatcaccattccggaagaagaaagattcagtaacttgaagagaagatgtgaagtgtttatctgtgaactgcagtgctgtatcaaagcagtccagtaacctgcagtactgagtatggtgcttgctctttcacttaactgataagagggacatgcctactaggagtttttaatgatgtggtatttaaagtattgtctcttagttaagtatgatttattaacccagtggagcactgtctgcttttaaattgtcacattagaatttgttctaccaatgttttgggttctgttgcgctattaattaatgtaaatttgtttatacccaggag

SEQ ID NO: 22366 - DNA, 395 bp, Homo sapiens
ataccatcttaatttaaataaagagttgtgtgggattgcaagttaagttatttcaaaaacggtgacccttggcaaggtactcatctctatgaatcaggattttctctatagcaggcaacaaaaagaaaatgcgttaaataaatcggaagctggaacatgtgtgactgcaacagtcatccataattccagaattcaagtttttatatttatcaaaatcttactcactgtctttgaattctcattcactgtctttgaactctcattcactgactttgaactacataattgctataaatttgaacttataaaataagtgtagcaatacaacacaacttttttcttgtttatatagcagaactctaagatttttttgggaaaggaatgattctatagtt

SEQ ID NO: 22367 - DNA, 532 bp, Homo sapiens
ggaagactccatctcaaaaataataacaggcaaggtagtggtgaatttgggaagaagggagtaactgggtggggagctcgctggggacttccaggatgtcctatttcttgatctcattatttgggaggacttttaaggtgggaacctattatttctcctcttttgtgtatgtatgttaggtgtcaacaaaaagcttttttagaataatcatcatcataaaccatccttcacaatatcctattgtctgatctctgtctggaaatgtgagacaggctccgagggagagaaggctggggctgggccccccattttgactgcagtgccatctcagggaagggcaatgaggcctgagttaaggacagcctgccccctaggctggccccttggggaggatgcaggctgcttccaggaggtgccctatgccacccctcagagccatgcctgagttctgctgccagcccctccggcaggaggttggccttgactccacacttctcgggcttccgcgttctcctctcttgtcagccctgcg

SEQ ID NO: 22368 - DNA, 3516 bp, Homo sapiens
aaaaacttattagagctttctcaacctgcagccctcatctccgccggcgagtagggccaggtgttgggagctcccacgtgggacaagatggtgtcttcggcgcagatgggcttcaacctgcaggctctcctggagcagctcagccaggatgagttgagcaagttcaagtatctgatcacgaccttctccctggcacacgagctccagaagatcccccacaaggaggtagacaaggctgatgggaagcaactggtagaaatcctcaccacccattgtgacagctactgggtggagatggcgagcctccaggtctttgaaaagatgcaccgaatggatctgtctgagagagcaaaggatgaagtcagagaagcagctttgaaatcctttaataaaaggaagcctctatcattagggataacacggaaagaacgaccacctctagacgtggacgaaatgctggagcgcttcaaaacagaagcacaagcgtttacagaaacgaaaggaaatgtcatctgcctgggtaaagaagtctttaaaggaaaaaagccagacaaagacaataggtgcaggtatatattgaagacgaagttccgggagatgtggaagagctggcctggagatagcaaagaggtccaggttatggctgagagatacaagatgctgatcccattcagcaaccccagggtgcttcccgggcccttctcatacacggtggtgctgtatggtcctgcaggccttgggaaaaccacgctggcccagaaactaatgctagactgggcagaggacaacctcatccacaaattcaaatatgcgttctacctcagctgcagggagctcagccgcctgggcccgtgcagttttgcagagctggtcttcagggactggcctgaattgcaggatgacattccacacatcctagcccaagcacggaaaatcttgttcgtgattgacggctttgatgagctgggagccgcacctggggcgctgatcgaggacatctgcggggactgggagaagaagaagccggtgcccgtcctcctggggagtttgctgaacagggtgatgttacccaaggccgccctgctggtcaccacgcggcccagggccctgagggacctccggatcctggcggaggagccgatctacataagggtggagggcttcctggaggaggacaggagggcctatttcctgagacactttggagacgaggaccaagccatgcgtgcctttgagctaatgaggagcaacgcggccctgttccagctgggctcggcccccgcggtgtgctggatcgtgtgcacgactctgaagctgcagatggagaagggggaggacccggtccccacctgcctcacccgcacggggctgttcctgcgtttcctctgcagccggttcccgcagggcgcacagctgcggggcgcgctgcggacgctgagcctcctggccgcgcagggcctgtgggcgcagacgtccgtgcttcaccgagaggatctggaaaggctcggggtgcaggagtccgacctccgtctgttcctggacggagacatcctccgccaggacagagtctccaaaggctgctactccttcatccacctcagcttccagcagtttctcactgccctgttctacaccctggagaaggaggaggaagaggatagggacggccacacctgggacattggggacgtacagaagctgctttccggagtagaaagactcaggaaccccgacctgatccaagcaggctactactcctttggcctcgctaacgagaagagagccaaggagttggaggccacttttggctgccggatgtcaccggacatcaaacaggaattgctgcgatgcgacataagttgtaagggtggacattcaacggtgacagacctgcaggagctcctcggctgtctgtacgagtctcaggaggaggagctggtgaaggaggtgatggctcagttcaaagaaatatccctgcacttaaatgcagtagacgttgtgccatcttcattctgcgtcaagcactgtcgaaacctgcagaaaatgtcactgcaggtaataaaggagaatctcccggagaatgtcactgcgtctgaatcagacgccgaggttgagagatcccaggatgatcagcacatgcttcctttctggacggacctttgttccatatttggatcaaataaggatctgatgggtctagcaatcaatgatagctttctcagtgcctccctagtaaggatcctgtgtgaacaaatagcctctgacacctgtcatctccagagagtggtgttcaaaaacatttccccagctgatgctcatcggaacctctgcctagctcttcgaggtcacaagactgtaacgtatctgacccttcaaggcaatgaccaggatgatatgtttcccgcattgtgtgaggtcttgagacatccagaatgtaacctgcgatatctcgggttggtgtcttgttccgctaccactcagcagtgggctgatctctccttggcccttgaagtcaaccagtccctgacgtgcgtaaacctctccgacaatgagcttctggatgagggtgctaagttgctgtacacaactttgagacaccccaagtgctttctgcagaggttgtcgttggaaaactgtcaccttacagaagccaattgcaaggaccttgctgctgtgttggttgtcagccgggagctgacacacctgtgcttggccaagaaccccattgggaatacaggggtgaagtttctgtgtgagggcttgaggtaccccgagtgtaaactgcagaccttggtgctttggaactgcgacataactagcgatggctgctgcgatctcacaaagcttctccaagaaaaatcaagcctgttgtgtttggatctggggctgaatcacataggagttaagggaatgaagttcctgtgtgaggctttgaggaaaccactgtgcaacttgagatgtctgtggttgtggggatgttccatccctccgttcagttgtgaagacctctgctctgccctcagctgcaaccagagcctcgtcactctggacctgggtcagaatcccttggggtctagtggagtgaagatgctgtttgaaaccttgacatgttccagtggcaccctccggacactcaggttgaaaatcgatgactttaatgatgaactcaataagctgctggaagaaatagaagaaaaaaacccacaactgattattgatactgagaaacatcatccctgggcagaaaggccttcttctcatgacttcatgatctgaatccccccgagtcattcattctccatgaagtcatcgattttccaggtgttggtgaactgcctgtgactcctctcctccccggcccctacccctcagggataatgagttcattgctgggctagatgttttagccatgattctgcctctgttttatacctgcacacatccttatctttgttacatatgaaatatctgtatcacgggtatattgagagaaataaaggtgagagcattcacaaa

SEQ ID NO: 22369 - DNA, 3450 bp, Homo sapiens
aaaaacttattagagctttctcaacctgcagccctcatctccgccggcgagtagggccaggtgttgggagctcccacgtgggacaagatggtgtcttcggcgcagatgggcttcaacctgcaggctctcctggagcagctcagccaggatgagttgagcaagttcaagtatctgatcacgaccttctccctggcacacgagctccagaagatcccccacaaggaggtagacaaggctgatgggaagcaactggtagaaatcctcaccacccattgtgacagctactgggtggagatggcgagcctccaggtctttgaaaagatgcaccgaatggatctgtctgagagagcaaaggatgaagtcagagaagcagctttgaaatcctttaataaaaggaagcctctatcattagggataacacggaaagaacgaccacctctagacgtggacgaaatgctggagcgcttcaaaacagaagcacaagacaaagacaataggtgcaggtatatattgaagacgaagttccgggagatgtggaagagctggcctggagatagcaaagaggtccaggttatggctgagagatacaagatgctgatcccattcagcaaccccagggtgcttcccgggcccttctcatacacggtggtgctgtatggtcctgcaggccttgggaaaaccacgctggcccagaaactaatgctagactgggcagaggacaacctcatccacaaattcaaatatgcgttctacctcagctgcagggagctcagccgcctgggcccgtgcagttttgcagagctggtcttcagggactggcctgaattgcaggatgacattccacacatcctagcccaagcacggaaaatcttgttcgtgattgacggctttgatgagctgggagccgcacctggggcgctgatcgaggacatctgcggggactgggagaagaagaagccggtgcccgtcctcctggggagtttgctgaacagggtgatgttacccaaggccgccctgctggtcaccacgcggcccagggccctgagggacctccggatcctggcggaggagccgatctacataagggtggagggcttcctggaggaggacaggagggcctatttcctgagacactttggagacgaggaccaagccatgcgtgcctttgagctaatgaggagcaacgcggccctgttccagctgggctcggcccccgcggtgtgctggatcgtgtgcacgactctgaagctgcagatggagaagggggaggacccggtccccacctgcctcacccgcacggggctgttcctgcgtttcctctgcagccggttcccgcagggcgcacagctgcggggcgcgctgcggacgctgagcctcctggccgcgcagggcctgtgggcgcagacgtccgtgcttcaccgagaggatctggaaaggctcggggtgcaggagtccgacctccgtctgttcctggacggagacatcctccgccaggacagagtctccaaaggctgctactccttcatccacctcagcttccagcagtttctcactgccctgttctacaccctggagaaggaggaggaagaggatagggacggccacacctgggacattggggacgtacagaagctgctttccggagtagaaagactcaggaaccccgacctgatccaagcaggctactactcctttggcctcgctaacgagaagagagccaaggagttggaggccacttttggctgccggatgtcaccggacatcaaacaggaattgctgcgatgcgacataagttgtaagggtggacattcaacggtgacagacctgcaggagctcctcggctgtctgtacgagtctcaggaggaggagctggtgaaggaggtgatggctcagttcaaagaaatatccctgcacttaaatgcagtagacgttgtgccatcttcattctgcgtcaagcactgtcgaaacctgcagaaaatgtcactgcaggtaataaaggagaatctcccggagaatgtcactgcgtctgaatcagacgccgaggttgagagatcccaggatgatcagcacatgcttcctttctggacggacctttgttccatatttggatcaaataaggatctgatgggtctagcaatcaatgatagctttctcagtgcctccctagtaaggatcctgtgtgaacaaatagcctctgacacctgtcatctccagagagtggtgttcaaaaacatttccccagctgatgctcatcggaacctctgcctagctcttcgaggtcacaagactgtaacgtatctgacccttcaaggcaatgaccaggatgatatgtttcccgcattgtgtgaggtcttgagacatccagaatgtaacctgcgatatctcgggttggtgtcttgttccgctaccactcagcagtgggctgatctctccttggcccttgaagtcaaccagtccctgacgtgcgtaaacctctccgacaatgagcttctggatgagggtgctaagttgctgtacacaactttgagacaccccaagtgctttctgcagaggttgtcgttggaaaactgtcaccttacagaagccaattgcaaggaccttgctgctgtgttggttgtcagccgggagctgacacacctgtgcttggccaagaaccccattgggaatacaggggtgaagtttctgtgtgagggcttgaggtaccccgagtgtaaactgcagaccttggtgctttggaactgcgacataactagcgatggctgctgcgatctcacaaagcttctccaagaaaaatcaagcctgttgtgtttggatctggggctgaatcacataggagttaagggaatgaagttcctgtgtgaggctttgaggaaaccactgtgcaacttgagatgtctgtggttgtggggatgttccatccctccgttcagttgtgaagacctctgctctgccctcagctgcaaccagagcctcgtcactctggacctgggtcagaatcccttggggtctagtggagtgaagatgctgtttgaaaccttgacatgttccagtggcaccctccggacactcaggttgaaaatcgatgactttaatgatgaactcaataagctgctggaagaaatagaagaaaaaaacccacaactgattattgatactgagaaacatcatccctgggcagaaaggccttcttctcatgacttcatgatctgaatccccccgagtcattcattctccatgaagtcatcgattttccaggtgttggtgaactgcctgtgactcctctcctccccggcccctacccctcagggataatgagttcattgctgggctagatgttttagccatgattctgcctctgttttatacctgcacacatccttatctttgttacatatgaaatatctgtatcacgggtatattgagagaaataaaggtgagagcattcacaaa

SEQ ID NO: 22370 - DNA, 396 bp, Homo sapiens
aaaaacttattagagctttctcaacctgcagccctcatctccgccggcgagtagggccaggtgttgggagctcccacgtgggacaagatggtgtcttcggcgcagatgggcttcaacctgcaggctctcctggagcagctcagccaggatgagttgagcaagttcaagtatctgatcacgaccttctccctggcacacgagctccagaagatcccccacaaggaggtagacaaggctgatgggaagcaactggtagaaatcctcaccacccattgtgacagctactgggtggagatggcgagcctccaggtctttgaaaagatgcaccgaatggatctgtctgagagagcaaaggatgaagtcagagaagcaagcaagcctttgaaaaccctttaa

SEQ ID NO: 22371 - DNA, 1875 bp, Homo sapiens
ttcccaatgtcccaggtgtggccgtccctatcctgggacattggggacgtacagaagctgctttccggagtagaaagactcaggaaccccgacctgatccaagcaggctactactcctttggcctcgctaacgagaagagagccaaggagttggaggccacttttggctgccggatgtcaccggacatcaaacaggaattgctgcgatgcgacataagttgtaagggtggacattcaacggtgacagacctgcaggagctcctcggctgtctgtacgagtctcaggaggaggagctggtgaaggaggtgatggctcagttcaaagaaatatccctgcacttaaatgcagtagacgttgtgccatcttcattctgcgtcaagcactgtcgaaacctgcagaaaatgtcactgcaggtaataaaggagaatctcccggagaatgtcactgcgtctgaatcagacgccgaggttgagagatcccaggatgatcagcacatgcttcctttctggacggacctttgttccatatttggatcaaataaggatctgatgggtctagcaatcaatgatagctttctcagtgcctccctagtaaggatcctgtgtgaacaaatagcctctgacacctgtcatctccagagagtggtgttcaaaaacatttccccagctgatgctcatcggaacctctgcctagctcttcgaggtcacaagactgtaacgtatctgacccttcaaggcaatgaccaggatgatatgtttcccgcattgtgtgaggtcttgagacatccagaatgtaacctgcgatatctcgggttggtgtcttgttccgctaccactcagcagtgggctgatctctccttggcccttgaagtcaaccagtccctgacgtgcgtaaacctctccgacaatgagcttctggatgagggtgctaagttgctgtacacaactttgagacaccccaagtgctttctgcagaggttgtcgttggaaaactgtcaccttacagaagccaattgcaaggaccttgctgctgtgttggttgtcagccgggagctgacacacctgtgcttggccaagaaccccattgggaatacaggggtgaagtttctgtgtgagggcttgaggtaccccgagtgtaaactgcagaccttggtgctttggaactgcgacataactagcgatggctgctgcgatctcacaaagcttctccaagaaaaatcaagcctgttgtgtttggatctggggctgaatcacataggagttaagggaatgaagttcctgtgtgaggctttgaggaaaccactgtgcaacttgagatgtctgtggttgtggggatgttccatccctccgttcagttgtgaagacctctgctctgccctcagctgcaaccagagcctcgtcactctggacctgggtcagaatcccttggggtctagtggagtgaagatgctgtttgaaaccttgacatgttccagtggcaccctccggacactcaggttgaaaatcgatgactttaatgatgaactcaataagctgctggaagaaatagaagaaaaaaacccacaactgattattgatactgagaaacatcatccctgggcagaaaggccttcttctcatgacttcatgatctgaatccccccgagtcattcattctccatgaagtcatcgattttccaggtgttggtgaactgcctgtgactcctctcctccccggcccctacccctcagggataatgagttcattgctgggctagatgttttagccatgattctgcctctgttttatacctgcacacatccttatctttgttacatatgaaatatctgtatcacgggtatattgagagaaataaaggtgagagcattcacaaa

SEQ ID NO: 22372 - DNA, 3825 bp, Homo sapiens
aaaaacttattagagctttctcaacctgcagccctcatctccgccggcgagtagggccaggtgttgggagctcccacgtgggacaagatggtgtcttcggcgcagatgggcttcaacctgcaggctctcctggagcagctcagccaggatgagttgagcaagttcaagtatctgatcacgaccttctccctggcacacgagctccagaagatcccccacaaggaggtagacaaggctgatgggaagcaactggtagaaatcctcaccacccattgtgacagctactgggtggagatggcgagcctccaggtctttgaaaagatgcaccgaatggatctgtctgagagagcaaaggatgaagtcagagaagcagctttgaaatcctttaataaaaggaagcctctatcattagggataacacggaaagaacgaccacctctagacgtggacgaaatgctggagcgcttcaaaacagaagcacaagcgtttacagaaacgaaaggaaatgtcatctgcctgggtaaagaagtctttaaaggaaaaaagccagacaaagacaataggtgcaggtatatattgaagacgaagttccgggagatgtggaagagctggcctggagatagcaaagaggtccaggttatggctgagagatacaagatgctgatcccattcagcaaccccagggtgcttcccgggcccttctcatacacggtggtgctgtatggtcctgcaggccttgggaaaaccacgctggcccagaaactaatgctagactgggcagaggacaacctcatccacaaattcaaatatgcgttctacctcagctgcagggagctcagccgcctgggcccgtgcagttttgcagagctggtcttcagggactggcctgaattgcaggatgacattccacacatcctagcccaagcacggaaaatcttgttcgtgattgacggctttgatgagctgggagccgcacctggggcgctgatcgaggacatctgcggggactgggagaagaagaagccggtgcccgtcctcctggggagtttgctgaacagggtgatgttacccaaggccgccctgctggtcaccacgcggcccagggccctgagggacctccggatcctggcggaggagccgatctacataagggtggagggcttcctggaggaggacaggagggcctatttcctgagacactttggagacgaggaccaagccatgcgtgcctttgagctaatgaggagcaacgcggccctgttccagctgggctcggcccccgcggtgtgctggatcgtgtgcacgactctgaagctgcagatggagaagggggaggacccggtccccacctgcctcacccgcacggggctgttcctgcgtttcctctgcagccggttcccgcagggcgcacagctgcggggcgcgctgcggacgctgagcctcctggccgcgcagggcctgtgggcgcagacgtccgtgcttcaccgagaggatctggaaaggctcggggtgcaggagtccgacctccgtctgttcctggacggagacatcctccgccaggacagagtctccaaaggctgctactccttcatccacctcagcttccagcagtttctcactgccctgttctacaccctggagaaggaggaggaagaggatagggacggccacacctgggacattggggacgtacagaagctgctttccggagtagaaagactcaggaaccccgacctgatccaagcaggctactactcctttggcctcgctaacgagaagagagccaaggagttggaggccacttttggctgccggatgtcaccggacatcaaacaggaattgctgcgatgcgacataagttgtaagggtggacattcaacggtgacagacctgcaggagctcctcggctgtctgtacgagtctcaggaggaggagctggtgaaggaggtgatggctcagttcaaagaaatatccctgcacttaaatgcagtagacgttgtgccatcttcattctgcgtcaagcactgtcgaaacctgcagaaaatgtcactgcaggtaataaaggagaatctcccggagaatgtcactgcgtctgaatcagacgccgaggttgagagatcccaggatgatcagcacatgcttcctttctggacggacctttgttccatatttggatcaaataaggatctgatgggtctagcaatcaatgatagctttctcagtgcctccctagtaaggatcctgtgtgaacaaatagcctctgacacctgtcatctccagagagtggtgttcaaaaacatttccccagctgatgctcatcggaacctctgcctagctcttcgaggtcacaagactgtaacgtatctgacccttcaaggcaatgaccaggatgatatgtttcccgcattgtgtgaggtcttgagacatccagaatgtaacctgcgatatctcgggttggtgtcttgttccgctaccactcagcagtgggctgatctctccttggcccttgaagtcaaccagtccctgacgtgcgtaaacctctccgacaatgagcttctggatgagggtgctaagttgctgtacacaactttgagacaccccaagtgctttctgcagaggttgtcgtaagtctctcctctcttacagagcagctgtgctttcgatctggggccacagacgagcaatggtcatgcctgacttggctgtatggaacctctcgctgatgtgaacacctgttcccatgtttagatccaggccgatggcctgtgaattttgttcttctctcattcctattccttcataggatcaccagtgcatgatagaaggtggggagttcacaagaaggggcttttggatgctggcacttgtggagctagccgggaaggttgaagttggacctgtcaaccgtgttgccatttgtgattcttttgtaggttggaaaactgtcaccttacagaagccaattgcaaggaccttgctgctgtgttggttgtcagccgggagctgacacacctgtgcttggccaagaaccccattgggaatacaggggtgaagtttctgtgtgagggcttgaggtaccccgagtgtaaactgcagaccttggtgctttggaactgcgacataactagcgatggctgctgcgatctcacaaagcttctccaagaaaaatcaagcctgttgtgtttggatctggggctgaatcacataggagttaagggaatgaagttcctgtgtgaggctttgaggaaaccactgtgcaacttgagatgtctgtggttgtggggatgttccatccctccgttcagttgtgaagacctctgctctgccctcagctgcaaccagagcctcgtcactctggacctgggtcagaatcccttggggtctagtggagtgaagatgctgtttgaaaccttgacatgttccagtggcaccctccggacactcaggttgaaaatcgatgactttaatgatgaactcaataagctgctggaagaaatagaagaaaaaaacccacaactgattattgatactgagaaacatcatccctgggcagaaaggccttcttctcatgacttcatgatctgaatccccccgagtcattcattctccatgaagtcatcgattttccaggtgttggtgaactgcctgtgactcctctcctccccggcccctacccctcagggataatgagttcattgctgggctagatgttttagccatgattctgcctctgttttatacctgcacacatccttatctttgttacatatgaaatatctgtatcacgggtatattgagagaaataaaggtgagagcattcacaaa

SEQ ID NO: 22373 - DNA, 1594 bp, Homo sapiens
agattgactaagttctgtatttccagctgattcctgggcgatgttggtgccactggtctgaccaccctttgacaactgctgctccagataattcaagtcggggtataacacaaccagtgagatgtaaaccaaagacgattccacggttagattctcaagaatgacttgttctgccgggcgcggtggctcacgcctgtcatcccagcactctgggaggccgaggttggtgtcttgttccgctaccactcagcagtgggctgatctctccttggcccttgaagtcaaccagtccctgacgtgcgtaaacctctccgacaatgagcttctggatgagggtgctaagttgctgtacacaactttgagacaccccaagtgctttctgcagaggttgtcgtaagtctctcctctcttacagagcagctgtgctttcgatctggggccacagacgagcaatggtcatgcctgacttggctgtatggaacctctcgctgatgtgaacacctgttcccatgtttagatccaggccgatggcctgtgaattttgttcttctctcattcctattccttcataggatcaccagtgcatgatagaaggtggggagttcacaagaaggggcttttggatgctggcacttgtggagctagccgggaaggttgaagttggacctgtcaaccgtgttgccatttgtgattcttttgtaggttggaaaactgtcaccttacagaagccaattgcaaggaccttgctgctgtgttggttgtcagccgggagctgacacacctgtgcttggccaagaaccccattgggaatacaggggtgaagtttctgtgtgagggcttgaggtaccccgagtgtaaactgcagaccttggtgctttggaactgcgacataactagcgatggctgctgcgatctcacaaagcttctccaagaaaaatcaagcctgttgtgtttggatctggggctgaatcacataggagttaagggaatgaagttcctgtgtgaggctttgaggaaaccactgtgcaacttgagatgtctgtggttgtggggatgttccatccctccgttcagttgtgaagacctctgctctgccctcagctgcaaccagagcctcgtcactctggacctgggtcagaatcccttggggtctagtggagtgaagatgctgtttgaaaccttgacatgttccagtggcaccctccggacactcaggttgaaaatcgatgactttaatgatgaactcaataagctgctggaagaaatagaagaaaaaaacccacaactgattattgatactgagaaacatcatccctgggcagaaaggccttcttctcatgacttcatgatctgaatccccccgagtcattcattctccatgaagtcatcgattttccaggtgttggtgaactgcctgtgactcctctcctccccggcccctacccctcagggataatgagttcattgctgggctagatgttttagccatgattctgcctctgttttatacctgcacacatccttatctttgttacatatgaaatatctgtatcacgggtatattgagagaaataaaggtgagagcattcacaaa

SEQ ID NO: 22374 - DNA, 1350 bp, Homo sapiens
gtgggcggatcacaaggtcaggagtctgagaccagcctggccaaaatggtgaaaccccatctctactaaaaatacaaaacttagctgggcatggtggtgtatgcctgtaatcccagctactcggaaggctggggcacaagaatcgcgtgaaaccaggaggcggaggttgaagtgagccaccgtgccagctgagaatccttcttacttctccaacttctgttggccacctgcattccttggcttgtggcccttcctccaacttcagcagagcatcttcaaacgttgccctggctcccttatcacgtcacctcctgctggctttgactctcagctccctcttatgaggatccctgtgattgctggacctacccaaataaaccaggatataaaccatcttaagatgctcagtcacctctacgaggtcccttttgctcgcaggtgccaggagttgggacttggacatctttaggggaggccattcttctgtccaccacaccaccccatgattccatttccatgtcaccactgtctctaagtgtgtctaacccacggctcaagagtcaaaggtgcatcacagcagtgagaactcacaggttcgggtttgctttcttcctgtggttgatttctaggctttggaactgcgacataactagcgatggctgctgcgatctcacaaagcttctccaagaaaaatcaagcctgttgtgtttggatctggggctgaatcacataggagttaagggaatgaagttcctgtgtgaggctttgaggaaaccactgtgcaacttgagatgtctgtggttgtggggatgttccatccctccgttcagttgtgaagacctctgctctgccctcagctgcaaccagagcctcgtcactctggacctgggtcagaatcccttggggtctagtggagtgaagatgctgtttgaaaccttgacatgttccagtggcaccctccggacactcaggttgaaaatcgatgactttaatgatgaactcaataagctgctggaagaaatagaagaaaaaaacccacaactgattattgatactgagaaacatcatccctgggcagaaaggccttcttctcatgacttcatgatctgaatccccccgagtcattcattctccatgaagtcatcgattttccaggtgttggtgaactgcctgtgactcctctcctccccggcccctacccctcagggataatgagttcattgctgggctagatgttttagccatgattctgcctctgttttatacctgcacacatccttatctttgttacatatgaaatatctgtatcacgggtatattgagagaaataaaggtgagagcattcacaaa

SEQ ID NO: 22375 - DNA, 2844 bp, Homo sapiens
aaaaacttattagagctttctcaacctgcagccctcatctccgccggcgagtagggccaggtgttgggagctcccacgtgggacaagatggtgtcttcggcgcagatgggcttcaacctgcaggctctcctggagcagctcagccaggatgagttgagcaagttcaagtatctgatcacgaccttctccctggcacacgagctccagaagatcccccacaaggaggtagacaaggctgatgggaagcaactggtagaaatcctcaccacccattgtgacagctactgggtggagatggcgagcctccaggtctttgaaaagatgcaccgaatggatctgtctgagagagcaaaggatgaagtcagagaagcagctttgaaatcctttaataaaaggaagcctctatcattagggataacacggaaagaacgaccacctctagacgtggacgaaatgctggagcgcttcaaaacagaagcacaagcgtttacagaaacgaaaggaaatgtcatctgcctgggtaaagaagtctttaaaggaaaaaagccagacaaagacaataggtgcaggtatatattgaagacgaagttccgggagatgtggaagagctggcctggagatagcaaagaggtccaggttatggctgagagatacaagatgctgatcccattcagcaaccccagggtgcttcccgggcccttctcatacacggtggtgctgtatggtcctgcaggccttgggaaaaccacgctggcccagaaactaatgctagactgggcagaggacaacctcatccacaaattcaaatatgcgttctacctcagctgcagggagctcagccgcctgggcccgtgcagttttgcagagctggtcttcagggactggcctgaattgcaggatgacattccacacatcctagcccaagcacggaaaatcttgttcgtgattgacggctttgatgagctgggagccgcacctggggcgctgatcgaggacatctgcggggactgggagaagaagaagccggtgcccgtcctcctggggagtttgctgaacagggtgatgttacccaaggccgccctgctggtcaccacgcggcccagggccctgagggacctccggatcctggcggaggagccgatctacataagggtggagggcttcctggaggaggacaggagggcctatttcctgagacactttggagacgaggaccaagccatgcgtgcctttgagctaatgaggagcaacgcggccctgttccagctgggctcggcccccgcggtgtgctggatcgtgtgcacgactctgaagctgcagatggagaagggggaggacccggtccccacctgcctcacccgcacggggctgttcctgcgtttcctctgcagccggttcccgcagggcgcacagctgcggggcgcgctgcggacgctgagcctcctggccgcgcagggcctgtgggcgcagacgtccgtgcttcaccgagaggatctggaaaggctcggggtgcaggagtccgacctccgtctgttcctggacggagacatcctccgccaggacagagtctccaaaggctgctactccttcatccacctcagcttccagcagtttctcactgccctgttctacaccctggagaaggaggaggaagaggatagggacggccacacctgggacattggggacgtacagaagctgctttccggagtagaaagactcaggaaccccgacctgatccaagcaggctactactcctttggcctcgctaacgagaagagagccaaggagttggaggccacttttggctgccggatgtcaccggacatcaaacaggaattgctgcgatgcgacataagttgtaagggtggacattcaacggtgacagacctgcaggagctcctcggctgtctgtacgagtctcaggaggaggagctggtgaaggaggtgatggctcagttcaaagaaatatccctgcacttaaatgcagtagacgttgtgccatcttcattctgcgtcaagcactgtcgaaacctgcagaaaatgtcactgcaggtaataaaggagaatctcccggagaatgtcactgcgtctgaatcagacgccgaggttgagagatcccaggatgatcagcacatgcttcctttctggacggacctttgttccatatttggatcaaataaggatctgatgggtctagcaatcaatgatagctttctcagtgcctccctagtaaggatcctgtgtgaacaaatagcctctgacacctgtcatctccagagagtggtgttcaaaaacatttccccagctgatgctcatcggaacctctgcctagctcttcgaggtcacaagactgtaacgtatctgacccttcaaggcaatgaccagaatcccttggggtctagtggagtgaagatgctgtttgaaaccttgacatgttccagtggcaccctccggacactcaggttgaaaatcgatgactttaatgatgaactcaataagctgctggaagaaatagaagaaaaaaacccacaactgattattgatactgagaaacatcatccctgggcagaaaggccttcttctcatgacttcatgatctgaatccccccgagtcattcattctccatgaagtcatcgattttccaggtgttggtgaactgcctgtgactcctctcctccccggcccctacccctcagggataatgagttcattgctgggctagatgttttagccatgattctgcctctgttttatacctgcacacatccttatctttgttacatatgaaatatctgtatcacgggtatattgagagaaataaaggtgagagcattcacaaa

SEQ ID NO: 22376 - DNA, 3115 bp, Homo sapiens
aaaaacttattagagctttctcaacctgcagccctcatctccgccggcgagtagggccaggtgttgggagctcccacgtgggacaagatggtgtcttcggcgcagatgggcttcaacctgcaggctctcctggagcagctcagccaggatgagttgagcaagttcaagtatctgatcacgaccttctccctggcacacgagctccagaagatcccccacaaggaggtagacaaggctgatgggaagcaactggtagaaatcctcaccacccattgtgacagctactgggtggagatggcgagcctccaggtctttgaaaagatgcaccgaatggatctgtctgagagagcaaaggatgaagtcagagaagcagctttgaaatcctttaataaaaggaagcctctatcattagggataacacggaaagaacgaccacctctagacgtggacgaaatgctggagcgcttcaaaacagaagcacaagcgtttacagaaacgaaaggaaatgtcatctgcctgggtaaagaagtctttaaaggaaaaaagccagacaaagacaataggtgcaggtatatattgaagacgaagttccgggagatgtggaagagctggcctggagatagcaaagaggtccaggttatggctgagagatacaagatgctgatcccattcagcaaccccagggtgcttcccgggcccttctcatacacggtggtgctgtatggtcctgcaggccttgggaaaaccacgctggcccagaaactaatgctagactgggcagaggacaacctcatccacaaattcaaatatgcgttctacctcagctgcagggagctcagccgcctgggcccgtgcagttttgcagagctggtcttcagggactggcctgaattgcaggatgacattccacacatcctagcccaagcacggaaaatcttgttcgtgattgacggctttgatgagctgggagccgcacctggggcgctgatcgaggacatctgcggggactgggagaagaagaagccggtgcccgtcctcctggggagtttgctgaacagggtgatgttacccaaggccgccctgctggtcaccacgcggcccagggccctgagggacctccggatcctggcggaggagccgatctacataagggtggagggcttcctggaggaggacaggagggcctatttcctgagacactttggagacgaggaccaagccatgcgtgcctttgagctaatgaggagcaacgcggccctgttccagctgggctcggcccccgcggtgtgctggatcgtgtgcacgactctgaagctgcagatggagaagggggaggacccggtccccacctgcctcacccgcacggggctgttcctgcgtttcctctgcagccggttcccgcagggcgcacagctgcggggcgcgctgcggacgctgagcctcctggccgcgcagggcctgtgggcgcagacgtccgtgcttcaccgagaggatctggaaaggctcggggtgcaggagtccgacctccgtctgttcctggacggagacatcctccgccaggacagagtctccaaaggctgctactccttcatccacctcagcttccagcagtttctcactgccctgttctacaccctggagaaggaggaggaagaggatagggacggccacacctgggacattggggacgtacagaagctgctttccggagtagaaagactcaggaaccccgacctgatccaagcaggctactactcctttggcctcgctaacgagaagagagccaaggagttggaggccacttttggctgccggatgtcaccggacatcaaacaggaattgctgcgatgcgacataagttgtaagggtggacattcaacggtgacagacctgcaggagctcctcggctgtctgtacgagtctcaggaggaggagctggtgaaggaggtgatggctcagttcaaagaaatatccctgcacttaaatgcagtagacgttgtgccatcttcattctgcgtcaagcactgtcgaaacctgcagaaaatgtcactgcaggtaataaaggagaatctcccggagaatgtcactgcgtctgaatcagacgccgaggttgagagatcccaggatgatcagcacatgcttcctttctggacggacctttgttccatatttggatcaaataaggatctgatgggtctagcaatcaatgatagctttctcagtgcctccctagtaaggatcctgtgtgaacaaatagcctctgacacctgtcatctccagagagtggtgttcaaaaacatttccccagctgatgctcatcggaacctctgcctagctcttcgaggtcacaagactgtaacgtatctgacccttcaaggcaatgaccaggatgatatgtttcccgcattgtgtgaggtcttgagacatccagaatgtaacctgcgatatctcgggttggtgtcttgttccgctaccactcagcagtgggctgatctctccttggcccttgaagtcaaccagtccctgacgtgcgtaaacctctccgacaatgagcttctggatgagggtgctaagttgctgtacacaactttgagacaccccaagtgctttctgcagaggttgtcgttggaaaactgtcaccttacagaagccaattgcaaggaccttgctgctgtgttggttgtcagccgggagctgacacacctgtgcttggccaagaaccccattgggaatacaggggtgaagtttctgtgtgagggcttgaggtaccccgagtgtaaactgcagaccttggtaaaacccacaactgattattgatactgagaaacatcatccctgggcagaaaggccttcttctcatgacttcatgatctgaatccccccgagtcattcattctccatgaagtcatcgattttccaggtgttggtgaactgcctgtgactcctctcctccccggcccctacccctcagggataatgagttcattgctgggctagatgttttagccatgattctgcctctgttttatacctgcacacatccttatctttgttacatatgaaatatctgtatcacgggtatattgagagaaataaaggtgagagcattcacaaa

SEQ ID NO: 22377 - DNA, 3340 bp, Homo sapiens
aaaaacttattagagctttctcaacctgcagccctcatctccgccggcgagtagggccaggtgttgggagctcccacgtgggacaagatggtgtcttcggcgcagatgggcttcaacctgcaggctctcctggagcagctcagccaggatgagttgagcaagttcaagtatctgatcacgaccttctccctggcacacgagctccagaagatcccccacaaggaggtagacaaggctgatgggaagcaactggtagaaatcctcaccacccattgtgacagctactgggtggagatggcgagcctccaggtctttgaaaagatgcaccgaatggatctgtctgagagagcaaaggatgaagtcagagaagcagctttgaaatcctttaataaaaggaagcctctatcattagggataacacggaaagaacgaccacctctagacgtggacgaaatgctggagcgcttcaaaacagaagcacaagcgtttacagaaacgaaaggaaatgtcatctgcctgggtaaagaagtctttaaaggaaaaaagccagacaaagacaataggtgcaggtatatattgaagacgaagttccgggagatgtggaagagctggcctggagatagcaaagaggtccaggttatggctgagagatacaagatgctgatcccattcagcaaccccagggtgcttcccgggcccttctcatacacggtggtgctgtatggtcctgcaggccttgggaaaaccacgctggcccagaaactaatgctagactgggcagaggacaacctcatccacaaattcaaatatgcgttctacctcagctgcagggagctcagccgcctgggcccgtgcagttttgcagagctggtcttcagggactggcctgaattgcaggatgacattccacacatcctagcccaagcacggaaaatcttgttcgtgattgacggctttgatgagctgggagccgcacctggggcgctgatcgaggacatctgcggggactgggagaagaagaagccggtgcccgtcctcctggggagtttgctgaacagggtgatgttacccaaggccgccctgctggtcaccacgcggcccagggccctgagggacctccggatcctggcggaggagccgatctacataagggtggagggcttcctggaggaggacaggagggcctatttcctgagacactttggagacgaggaccaagccatgcgtgcctttgagctaatgaggagcaacgcggccctgttccagctgggctcggcccccgcggtgtgctggatcgtgtgcacgactctgaagctgcagatggagaagggggaggacccggtccccacctgcctcacccgcacggggctgttcctgcgtttcctctgcagccggttcccgcagggcgcacagctgcggggcgcgctgcggacgctgagcctcctggccgcgcagggcctgtgggcgcagacgtccgtgcttcaccgagaggatctggaaaggctcggggtgcaggagtccgacctccgtctgttcctggacggagacatcctccgccaggacagagtctccaaaggctgctactccttcatccacctcagcttccagcagtttctcactgccctgttctacaccctggagaaggaggaggaagaggatagggacggccacacctgggacattggggacgtacagaagctgctttccggagtagaaagactcaggaaccccgacctgatccaagcaggctactactcctttggcctcgctaacgagaagagagccaaggagttggaggccacttttggctgccggatgtcaccggacatcaaacaggaattgctgcgatgcgacataagttgtaagggtggacattcaacggtgacagacctgcaggagctcctcggctgtctgtacgagtctcaggaggaggagctggtgaaggaggtgatggctcagttcaaagaaatatccctgcacttaaatgcagtagacgttgtgccatcttcattctgcgtcaagcactgtcgaaacctgcagaaaatgtcactgcaggtaataaaggagaatctcccggagaatgtcactgcgtctgaatcagacgccgaggttgagagatcccaggatgatcagcacatgcttcctttctggacggacctttgttccatatttggatcaaataaggatctgatgggtctagcaatcaatgatagctttctcagtgcctccctagtaaggatcctgtgtgaacaaatagcctctgacacctgtcatctccagagagtggtgttcaaaaacatttccccagctgatgctcatcggaacctctgcctagctcttcgaggtcacaagactgtaacgtatctgacccttcaaggcaatgaccaggatgatatgtttcccgcattgtgtgaggtcttgagacatccagaatgtaacctgcgatatctcgggttggtgtcttgttccgctaccactcagcagtgggctgatctctccttggcccttgaagtcaaccagtccctgacgtgcgtaaacctctccgacaatgagcttctggatgagggtgctaagttgctgtacacaactttgagacaccccaagtgctttctgcagaggttgtcgttggaaaactgtcaccttacagaagccaattgcaaggaccttgctgctgtgttggttgtcagccgggagctgacacacctgtgcttggccaagaaccccattgggaatacaggggtgaagtttctgtgtgagggcttgaggtaccccgagtgtaaactgcagaccttggttgtaagtccgtgctggctgcctgtgtgcgtgggtgtatatgcacacgccccccacctccgggtttgagtagggtggttatgagaacacttaattcctctaaaagttccaagcatgatgctaatgacaactggtaagacctgggtagatgatggtaggaaaaaagtataagtagtagtagagtagtagtaatattctatagggatttggggaatgtagctggttttcgggtttttttttttttcctctttatgtatgtatgtattttagagatgggatctcgccgtgttgcctaggctggtctcaaactcctgagctcaagagatctgcctgccttggcctcccagggtgctagaattacaggcatgagccatgtcaccccatgctgtgttttctcttaatctgtgttcttagaactataactgtaacataaattgcacgcaattggttgtaaatggaatcatttacttattttttaatgaatgatttgcagtgagctgagatggcaccactgaagtccagtctggccaatagagcaagactctct

SEQ ID NO: 22378 - DNA, 215 bp, Homo sapiens
tgcacaaagtaaccttttcttcccccattgtaccccaggttgaaaatcgatgactttaatgatgaactcaataagctgctggaagaaatagaagaaaaaaacccacaactgattattgatactgagaaacatcatccctgggcagaaaggccttcttctcatgacttcatgatctgaatccccccgagtcattcattctccatgaagtcatcgat

SEQ ID NO: 22379 - DNA, 221 bp, Homo sapiens
tgcatcctctctcccttccctcctcaccaatgataaagacaaagacaataggtgcaggtatatattgaagacgaagttccgggagatgtggaagagctggcctggagatagcaaagaggtccaggttatggctgagagatacaagatgctgatcccattcagcaaccccagggtgcttcccgggcccttctcatacacggtggtgctgtatggtcctgcag

SEQ ID NO: 22380 - DNA, 408 bp, Homo sapiens
tgtctaagaagaataggttctttctcctgtgatgcttcttgggtgttgagttgtctgatggtggtgctaataagtgattacatggtccagctttcaattgtactcatttgtcaggggtatatgcccagagaaaccctaaatacttcagccgtgatggacacacatttggtgtaaccctttcttctcttccctatagatcccaggatgatcagcacatgcttcctttctggacggacctttgttccatatttggatcaaataaggatctgatgggtctagcaatcaatgatagctttctcagtgcctccctagtaaggatcctgtgtgaacaaatagcctctgacacctgtcatctccagagagtggtgtaagtagaaactaattcatgaactcaaatccttagggtat

SEQ ID NO: 22381 - DNA, 860 bp, Homo sapiens
tggtaaaagtgactaatggtgcagcaaccatttcttcaccagcccttcctcagctctcctctccactccctcctcctcaggattatagggtccttcttgctgctgtatcaggtctcagctcattagttgtttgaggaaagggcctgccatgccatgttcatcacttcagccacaaaggatggcttttactcagcaatcatgtgctgaacatctgctacattccactcttagcactagtgaaacaaacgcgtagaaccagagccccaggcctcaaagctcacaatggaggtaactggtttccaggttaagtgcactaaactgtgtggaaggtgttatgatagtacctctacaggttctgatggaagcatcagtgatggatttggcttttccatttgggagaggaggctataaaaaaccttcctggaggacgtgggctcattctgattcacagacaggtccagccccttcacttcttactttgaactactccatctggaatcatagaaactcattagcagctaagtgagtcgtagaccctgttcctacagtttcaacaaaccctgatggtggcatttcagtttatcgtagaggtttcttttcccctacaagggtcattctctcttgcccaattttggctgagaagggaggaatatcatggccgttttggctgtatggtgttactgtataatgatatggggattggtgagtgaaaaataaaatgaaccctcacttgcttaggtaccagttttatgtaagaagaaactcacagcttttgcacattatttgagatttgcttcttctgtttaacatatttgtggtactttcctaaaaagttttgttatagacagctgtagagatta

SEQ ID NO: 22382 - DNA, 790 bp, Homo sapiens
gcagaatggtttctttgcctcagctctgcccagtaccagtgaccatcctttagaataatcttagaatacaggagatgaaggggacaagcatcaaaagttcttccttcctcatccccattttccagatgggaaaaccaggctcagagatattaactgtcttggaaaatgagtaaaatatagagaaaacaaaactcttaccttgtgcaggttcaagttcaaatccagtaaataccatagtttaaagcatccctttacacaatggatttggttattttgcaaaacagatattagccccatgtgtcagtaatctacagtcatttgtaccttaacataaaatgccaaagcacagtaatatattcttagtgtaaaaaaaaaaaaaaaattcaaggctgggggtggtggctcacacctgtaatcccagcattttgggaggccgaggtgggaggatcacttgagctcaggagttcaagaccagcctgggcaacatagtgagacctagtctcttaaaaaaattaaccatatgattatgtttaaaaggaatagccccttgcttactgttcctctaaattccactccccagaggcatctattgttcacagtttttggttctgctatccttattttgaatgcacaggtattctcattgataactacctttatccatattagtctccttgcttcctggaagcaacacacagaaatctgtattccagcctttgtttatgctctttcctctgctaacgcacccgctccttcttctctgcctatacgaagagtttccattctttaa

SEQ ID NO: 22383 - DNA, 274 bp, Homo sapiens
taagatgctactactttattttaaatgtgaaagtccaggttgtagaggcaaagatgcaaaggaagtgaaacaaggaagataggaagacgcagggttggccatgagatgcatttctgcttggtcctagcagtaaaccaagctatgaagaaacacagccggtggccctcaggcttgtttacttggcacatagatttcctataggatagtaaggaagagctgccctttagggtagtcataaagaaagagaaagggagggaactttatttgtgtttcc

SEQ ID NO: 22384 - DNA, 1110 bp, Homo sapiens
ttttttctatacaaatttgttacatgtcagtgagacctttttcaaaggaacatattcaatttggctttttgtggctgaaaaaacataactgttagacccaaagcattttatgctccgttccatcttaaggagccatccttaagtctgctcccaccctcagtagaatttattttctacaaagtggtagtaatttttttttaaattgcaaatgtaatttttgccaattagagaaaccaaccggtgtcagtaaaattctgtgagaaatgccatccctgctgggaatgttgaagttacttaatgttgatctatcccttggggaaagtaaaagtgactgtgagtggtgccattgtgtgatgtcagcatgacgttgttttgaatgtggcattatgttctggtgctcatgtttcctggattgtattatctgctttcctttaccaaggcagacagaactgctgccttagcctgacaaccggttgtcctcaaagcaaatgaacttaagcatttgggattgagggacagaaggattctgagggggctctgcgagggacggtgtgtgacatgtcatgcctggagaaggaacaaggctatttgaaaacagaaggcaggtcaagggtagaagttaaaggagaatctgaaggcaggtcagggaaaagaagaactggaaatgaaacagaggacaggtgacaaccacctcgaagagctcccagagattgtagaaagagtccagtgtaaccagcttagtaaccagagtatctggattacccaggaaggttgagctgctgagatttcagtggtgcaatgtctttaaaaaaacaggctttgttgggagggtatttccattttgaactttgaggactgttggtcagaaaatgggctcaaaagtgagtttgcttaatgaagacatttaacggttgtgctgtttatagtaaaataaaactccctaccttgcttcagttaaaaatgaagcacttggtttcttccatcctcctcctccccttaatggattgtggcagttgaaataatccatcggatgacccacctgtagtgagatgtactgtcgatgtagtgcccggtgtatctcagtggccatctgccatggtgaggtgagcg

SEQ ID NO: 22385 - DNA, 771 bp, Homo sapiens
atctgaagcatccgcagttggtcttttctcttcctttttctccttgtttttcacctcaataacctgaaaaaacaaaaacaaagaaaaaaggtgtttggggaattagtgtccaatgtgaagtaagctgagaatggaggtgttgacagggtgggacctccgagagggggtggtgatgatggagatgggtcagacccgggggaggtggcgggggaccctgggactggtgatttagtgggaagaggcagccttcacacagaatccgcaggcctctggtgtggttggtttcagttccctttatgttcacagacccccacccccacacaacagatttcctgacatttaatatttgttttggcttttttggactgtggggtctccttgtatcagtccaatgtggagtcgccccaggatggaagtgcccttctggtaaaatcacacgttcaatctgaggaactggcttgtgattttaaaaggccgctaggacttgggatgtggcctgactctctttggacagtgcacggaagtgaagggatggatgtaacattggcaccaggtttagacattggcttcatggagaatttactccatgggaattttgaaacttgaaacctgtcactttttgtgcacaggcagctgtagggtcttaactcaggggactttggagtgtttgctagggtcattcctctgccccatgctgtggctgaccccatgatctcaaccttgtatttattccattggtttatctccagcttctagaatgaagacctttac

SEQ ID NO: 22386 - DNA, 922 bp, Homo sapiens
  misc_feature (636)..(636): n is a, c, g, or t
  misc_feature (806)..(806): n is a, c, g, or t
  misc_feature (859)..(859): n is a, c, g, or t
  misc_feature (877)..(877): n is a, c, g, or t
  misc_feature (889)..(889): n is a, c, g, or t
atctgaagcatccgcagttggtcttttctcttcctttttctccttgtttttcacctcaataacctgaaaaaacaaaaacaaagaaaaaaggtgtttggggaattagtgtccaatgtgaagtaagctgagaatggaggtgttgacagggtgggacctccgagagggggtggtgatgatggagatgggtcagacccgggggaggtggcgggggaccctgggactggtgatttagtgggaagaggcagccttcacacagaatccgcaggcctctggtgtggttggtttcagttccctttatgttcacagacccccacccccacacaacagatttcctgacatttaatatttgttttggcttttttggactgtggggtctccttgtatcagtccaatgtggagtcgccccaggatggaagtgcccttctggtaaaatcacacgttcaatctgaggaactggcttgtgattttaaaaggccgctaggacttgggatgtggcctgactctctttggacagtgcacggaagtgaagggatggatgtaacattggcaccaggtttagacattggcttcatggagaatttactccatggggttaggtctgggcttcaatctacttctcccgccgcaggaaaaaanaggcgggagaagtcccggcagaattgaagctgcttctttgaatttgcaattcaacatgatattcaccacggaactggcaaaaagagggcttaacctctgtctttagatttacagtctaatgcttactcagccattttacctatgttcgtaaatcgttgactatactcaanaaaccacaaagacatcggcaccctgtacctactatttggtgcctgagcaggantaggggcactgcttgagnctactaattcgngctgactaggtcagccgggaaccttattgggat

SEQ ID NO: 22387 - DNA, 634 bp, Homo sapiens
  misc_feature (348)..(348): n is a, c, g, or t
  misc_feature (518)..(518): n is a, c, g, or t
  misc_feature (571)..(571): n is a, c, g, or t
  misc_feature (589)..(589): n is a, c, g, or t
  misc_feature (601)..(601): n is a, c, g, or t
cactcagattattcttgagtatcattgtcatcacgactatcagctgaagatttaatatttgttttggcttttttggactgtggggtctccttgtatcagtccaatgtggagtcgccccaggatggaagtgcccttctggtaaaatcacacgttcaatctgaggaactggcttgtgattttaaaaggccgctaggacttgggatgtggcctgactctctttggacagtgcacggaagtgaagggatggatgtaacattggcaccaggtttagacattggcttcatggagaatttactccatggggttaggtctgggcttcaatctacttctcccgccgcaggaaaaaanaggcgggagaagtcccggcagaattgaagctgcttctttgaatttgcaattcaacatgatattcaccacggaactggcaaaaagagggcttaacctctgtctttagatttacagtctaatgcttactcagccattttacctatgttcgtaaatcgttgactatactcaanaaaccacaaagacatcggcaccctgtacctactatttggtgcctgagcaggantaggggcactgcttgagnctactaattcgngctgactaggtcagccgggaaccttattgggat

SEQ ID NO: 22388 - DNA, 909 bp, Homo sapiens
agggctggctcttctatgtactcacgctgtgaagaaaaacttaaaaaaaattaaacaaaaaaaccttgtacgaaagcaaaggaagaagacaaatttagcagcagttctcttgaatttcctggctttgttgatttcgaaccacaaggttaacattaaaacacaaagactcacatttaaatatttcttttgaaatcagaaaaacaatagctctttgaaatgacgctggaacgcacacaatagattctactgggtcaatgtattatttatatactcatctgaactttcaaaagaagttaaatgggagatattctcaacaggcaaaaataagatattccaatctattgttcaagtttatggctccgatataaataatgggctataaacccgtatctggaaaacagttgcgcagtgcgtgcttaatggccagccaatgaaaaccaacgtctcattctactccgtctttcagcacgtcaaggacatcccactccgcctttttttttttttctttttaaagaggccaaccgctggggacacctggttttggcacctttatgaggcctcccagcagcacaggagctctaaggggcacgctctgcagttgagctatttgcagagctccatgatcgctcaaagccgagcacgcgcacgggtttgctactggcaccagcacaaggctttagacaggcacttcccacggctgagttctaggcatcccctttttgaaacgtgttctctccaccctgcaagggtggggtgagaaatctcactttcgaagggcttgcaaggaggaagagagtcggcgccttgcggattccccggccgagcccacccattcctccccgcagtcatcgcccttaccgcgcggctcctacctatctccccttttatactaatagtcttataaaaaaa

SEQ ID NO: 22389 - DNA, 2944 bp, Homo sapiens
agggctggctcttctatgtactcacgctgtgaagaaaaacttaaaaaaaattaaacaaaaaaaccttgtacgaaagcaaaggaagaagacaaatttagcagcagttctcttgaatttcctggctttgttgatttcgaaccacaaggttaacattaaaacacaaagactcacatttaaatatttcttttgaaatcagaaaaacaatagctctttgaaatgacgctggaacgcacacaatagattctactgggtcaatgtattatttatatactcatctgaactttcaaaagaagttaaatgggagatattctcaacaggcaaaaataagatattccaatctattgttcaagtttatggctccgatataaataatgggctataaacccgtatctggaaaacagttgcgcagtgcgtgcttaatggccagccaatgaaaaccaacgtctcattctactccgtctttcagcacgtcaaggacatcccactccgcctttttttttttttctttttaaagaggccaaccgctggggacacctggttttggcacctttatgaggcctcccagcagcacaggagctctaaggggcacgctctgcagttgagctatttgcagagctccatgatcgctcaaagccgagcacgcgcacgggtttgctactggcaccagcacaaggctttagacaggcacttcccacggctgagttctaggcatcccctttttgaaacgtgttctctccaccctgcaagggtggggtgagaaatctcactttcgaagggcttgcaaggaggaagagagtcggcgccttgcggattccccggccgcgcttcaaggttcacacgccgcgtggcagctcggatgcagcccggttccgaggcggtcggcggtcgagactggggcctcgagccgagaagcgaagaacaaagcggccgcgttagcccgccgccccgagggacagcccgggcgcgcccgccgctccgcccacaccccgcccctcggccgcgcgaaatggcggcggccgcaccacaaaatggcagtcgctcggtcgcggagaagcacctgctaaatgccgtgactccctccccctgccctgccccgctagcgccaacgtcgttctccccgcccaggcgccccggtcttcccacgccgccccgcccaggggcaacagggtccggagcccgccaacaacgcggcgcctttgtgcgggcgcacgccacctttactcagccacacgggcccctctccggggggctttttcttaaaggggcaaccgctggaagaaacggagcaccgccgcccgggacgcccctcaggcccggggttactacggtttccccaactcgcagcgttagcgtcaggccaccaaagtgaagatgggtggtgaaaggaccacagagcccgataggagagaaaacctaggaaaaattagtgaaagacgcccccaaccaatgctttggcggccacgctgagtcctaacgtactgagcccactcgacggggcccgtgcgcacaggcggctccaaagggcgggtttcggctttccttccacctcgcaaaagtccagtgagcgctctaggtttctcatggctaccccctgccctctccccgtgctggggagtctcgggggctgagcagtggcagagggaggagcgctgccgcggtccctgtgctttttctctggcgtgagggtctcagtggccttgggctctgcttgggccgtggctcgaaggttggaggtgtcgcggtgcgcttgggttttttcgctttctttcaaacgcttgcttcctggcgctccccaccccccagcgtccctttggctccatctttccagaaacttctctgagaaactcagcaaaaagcatccaatttcgccactgcttccccctccgcgcatgcgcgagacgccaagcggaaagcctttggcgcgccggagtgtgagagtggtgcgtgagcgcgcgcgcgctcgccgtgcgggggcggttctctctgacaatgaagggaaagaattccccctcccctcaacattccgtcctcgcgcaagcgcgtcggagccacttccttggcctttgagggaagggggaggggtcgtcccgaagcgcgctagtcgtgtttccgcgcgcctgcgcacggggccgttttcgtctcgctgtgttgtccgcgagtctttgctgtgaagtgcgtctgaacagctcgcttgtgcccgacctactttttccttaaggcccactcgcggaaactagtttcttgtggggttatcgattctgtaccccgagtttcctggagattagtctcccctttgtgccccggggatgaggctggacggcgtcgcgctggcttgtcttccaccccttcccgcgccatgtttggaacggctgttgactggatcccgtgtggagtgtgatggagccttctcgaaacgggaaaacagtcctggccgaaggcttgggtggtgcctgggccggcttatattaggcactgcgtagaatgtttgctcactaagcccaaagaaaggtgtctcttttttttttttttttttgagacgggagtctcttgtcatccaggctgtagtgcagtggcgcagtctcggctcactgcaaccttcgcctcccgggttcaagcgattctcctgcctcagcctcccatgtagctgggactacaggcgcccgccaatacgctcgggtaatttttgtatgtttagtagagatgggtttcaccatgttggtcaggctggtctcgaactcctgagctcaggtgatccgcccacctcggcctcccaaagtgctggaattacaggcgtgagccaccgagcccggctttgcccccagcctgggaacggggtcttgctgtgttgcccaactgttttggaagtcctgacgtcaagagatccttccgccagggccttccaaagtgctgagattacaggtgtgagccgccacgcccggccttt

SEQ ID NO: 22390 - DNA, 2218 bp, Homo sapiens
aaccacctggtgctggccattccactgagggtgctggtggttctgtgggccttcgtcttgggcctatccagggtcatgctggggcggcacaatgtcaccgacgtagcttttggcttttttctgggctacatgcagtacagcatcgtggactattgctggctctcaccccataatgctccggtcctctttttactgtggagtcaacgatgacaccatctcattgattatggcaccaggaagtctgaaggtttccacattcgatgatgtcaacctaaaccagcagccatcccgcttgtccctcttaggcatttcaggcttcctttgggatttcaggtgtcccatgatcttgatgtgctgctaggctggagcacacactggccattactgaacacagccatattagggaaagcaaaaaaacccaaaaaatcctctattgtatatttattcaacaactgtttatgtttccaggacaactgcaaagaaaacaagctgaggtggttatactgttgctgttaaaagttggtatcagtaagatttgtgttttgtgataatccctaaatcaacataccacttgtaaactgaacttcgagaaagaaacatgatgttcattctgtaaatatacatgcagacaggtcatgtactaatcctagtccttttcctgaggtagattttaaacagtatttttaaagtccaagacataggtttttctagtttattccctgaagatctgttgccacagttgggagatttcttcttaatcctgattttcttggtaagcttttttactttattatctctataatttattatctctatccatatttgtggatcgggtagtgggaaaagagattataatacttgtctttctctcctctccctccatccctcaaaagatctttatgcatttcccactactcccttactgtcttttagcattcagagaaaaagccaacttgcttaaagaggaatcacttaaaaggtaggcatatctaagatgctcatagaagaggaagaatgggacatggccccatgcttatttttgtttacaacgtaacatggcatgagagagggcagagaaactaagttgctggggaaagttagaggaactgaaagtttgggaataggctgaccacatattatgccagtgaccagtatgacaggagatggggccctgctgccagtcatctccactgaataaagaataatgctcctctttcagggtaataaagtggggaaaaggaacgtcttctcaatgcaagaacataagctttctcgtatatacctgtatgctacagtttttcacatggaattccgttttctgaggtacagcacattttaggtaacagtatttaacttgaaattcatcatgggagtctgctgctataccaggcacaagataaaactccaaaatttctgtttacattgacctttacatttaaagctgttcatccatggtgcctccccaaatcataagaccaaagaccaccaaacgcagggtggactctgctcattattctttgacccagaaagactggagaaggtatgtgctttaagtgctgctctacctgaaaagaaatcctttaaattacctatggaagtgatgtcctcagataatcttaatgactattttggcatttataaatagaaatgattatggactttgatctgccatacggaggttcggaacctggagaacggctgtgataagtaggttttgattgagtgaaagcatgagcttgttcagagtgaggggcatagtgaaaaaggaacagccatgcctcaaaatcaaatcatttgcattcccacagcatcctgaataccgactacctcttcacttgctaaagcagctaaactgtgaagctctaagtggtttgggtttgttgtttaaccttagcgagatcctttaactgcagcaatattcaagccagatatttggaagcaaatgatatttcctcttgcagtgtccacaaatctgaatattaggggcatgaaattaggcttaccatctgatttgtaattacaattttggaattctctgttttagttgctgaggcctgagttttctggctcttaaagcatagatcatttcacctgatgtttttgaagcatcctaagtacagtagagtagaaaactgatttctttgttaattgtacactgaataatgccttttaaaaatcaaaataaaattaacaaataatggtgaatgaagtgagatga

SEQ ID NO: 22391 - DNA, 2100 bp, Homo sapiens
aaccacctggtgctggccattccactgagggtgctggtggttctgtgggccttcgtcttgggcctatccagggtcatgctggggcggcacaatgtcaccgacgtagcttttggcttttttctgggctacatgcagtacagcatcgtggactattgctggctctcaccccataatgctccggtcctctttttactgtggagtcaacgatgacaccatctcattgattatggcaccaggaagtctgaaggtttccacattcgatgatgtcaacctaaaccagcagccatcccgcttgtccctcttaggcatttcaggcttcctttgggatttcaggtgtcccatgatcttgatgtgctgctaggctggagcacacactggccatatactgttgctgttaaaagttggtatcagtaagatttgtgttttgtgataatccctaaatcaacataccacttgtaaactgaacttcgagaaagaaacatgatgttcattctgtaaatatacatgcagacaggtcatgtactaatcctagtccttttcctgaggtagattttaaacagtatttttaaagtccaagacataggtttttctagtttattccctgaagatctgttgccacagttgggagatttcttcttaatcctgattttcttggtaagcttttttactttattatctctataatttattatctctatccatatttgtggatcgggtagtgggaaaagagattataatacttgtctttctctcctctccctccatccctcaaaagatctttatgcatttcccactactcccttactgtcttttagcattcagagaaaaagccaacttgcttaaagaggaatcacttaaaaggtaggcatatctaagatgctcatagaagaggaagaatgggacatggccccatgcttatttttgtttacaacgtaacatggcatgagagagggcagagaaactaagttgctggggaaagttagaggaactgaaagtttgggaataggctgaccacatattatgccagtgaccagtatgacaggagatggggccctgctgccagtcatctccactgaataaagaataatgctcctctttcagggtaataaagtggggaaaaggaacgtcttctcaatgcaagaacataagctttctcgtatatacctgtatgctacagtttttcacatggaattccgttttctgaggtacagcacattttaggtaacagtatttaacttgaaattcatcatgggagtctgctgctataccaggcacaagataaaactccaaaatttctgtttacattgacctttacatttaaagctgttcatccatggtgcctccccaaatcataagaccaaagaccaccaaacgcagggtggactctgctcattattctttgacccagaaagactggagaaggtatgtgctttaagtgctgctctacctgaaaagaaatcctttaaattacctatggaagtgatgtcctcagataatcttaatgactattttggcatttataaatagaaatgattatggactttgatctgccatacggaggttcggaacctggagaacggctgtgataagtaggttttgattgagtgaaagcatgagcttgttcagagtgaggggcatagtgaaaaaggaacagccatgcctcaaaatcaaatcatttgcattcccacagcatcctgaataccgactacctcttcacttgctaaagcagctaaactgtgaagctctaagtggtttgggtttgttgtttaaccttagcgagatcctttaactgcagcaatattcaagccagatatttggaagcaaatgatatttcctcttgcagtgtccacaaatctgaatattaggggcatgaaattaggcttaccatctgatttgtaattacaattttggaattctctgttttagttgctgaggcctgagttttctggctcttaaagcatagatcatttcacctgatgtttttgaagcatcctaagtacagtagagtagaaaactgatttctttgttaattgtacactgaataatgccttttaaaaatcaaaataaaattaacaaataatggtgaatgaagtgagatga

SEQ ID NO: 22392 - DNA, 554 bp, Homo sapiens
aaccacctggtgctggccattccactgagggtgctggtggttctgtgggccttcgtcttgggcctatccagggtcatgctggggcggcacaatgtcaccgacgtagcttttggcttttttctgggctacatgcagtacagcatcgtggactattgctggctctcaccccataatgctccggtcctctttttactgtggagtcaacgatgacaccatctcattgattatggcaccaggaagtctgaaggtttccacattcgatgatgtcaacctaaaccagcagccatcccgcttgtccctcttaggcatttcaggcttcctttgggatttcaggtgtcccatgatcttgatgtgctgctaggctggagcacacactggccattactgaacacagccatattagggaaagcaaaaaaacccactggagccgacacaggccccttacggggctggcaaaagctcctgggggggccctgtaccaaattcaccctatactgaggtggttacatttcacgggcccttgtttacaagtcttgcctggaacaccctgtttt

SEQ ID NO: 22393 - DNA, 1627 bp, Homo sapiens
acacgcagcttgggtaagccttctcaggcagcgcgtgtgagaactcaccaggactggggccaaatcaggatgggtggcctcgagaggtcactgcccagtttcctctagcagggaaaacccagagcccggtggctgtgttccaagcccttctccccactcctgccctggggccactgggtggcgaggtgaggtgcctcatgccaggttcatttcccggcgcctacatgcttggcatccagcggggtccgaactcctcctgctgagcggttgtctttctctcctctccctccatccctcaaaagatctttatgcatttcccactactcccttactgtcttttagcattcagagaaaaagccaacttgcttaaagaggaatcacttaaaaggtaggcatatctaagatgctcatagaagaggaagaatgggacatggccccatgcttatttttgtttacaacgtaacatggcatgagagagggcagagaaactaagttgctggggaaagttagaggaactgaaagtttgggaataggctgaccacatattatgccagtgaccagtatgacaggagatggggccctgctgccagtcatctccactgaataaagaataatgctcctctttcagggtaataaagtggggaaaaggaacgtcttctcaatgcaagaacataagctttctcgtatatacctgtatgctacagtttttcacatggaattccgttttctgaggtacagcacattttaggtaacagtatttaacttgaaattcatcatgggagtctgctgctataccaggcacaagataaaactccaaaatttctgtttacattgacctttacatttaaagctgttcatccatggtgcctccccaaatcataagaccaaagaccaccaaacgcagggtggactctgctcattattctttgacccagaaagactggagaaggtatgtgctttaagtgctgctctacctgaaaagaaatcctttaaattacctatggaagtgatgtcctcagataatcttaatgactattttggcatttataaatagaaatgattatggactttgatctgccatacggaggttcggaacctggagaacggctgtgataagtaggttttgattgagtgaaagcatgagcttgttcagagtgaggggcatagtgaaaaaggaacagccatgcctcaaaatcaaatcatttgcattcccacagcatcctgaataccgactacctcttcacttgctaaagcagctaaactgtgaagctctaagtggtttgggtttgttgtttaaccttagcgagatcctttaactgcagcaatattcaagccagatatttggaagcaaatgatatttcctcttgcagtgtccacaaatctgaatattaggggcatgaaattaggcttaccatctgatttgtaattacaattttggaattctctgttttagttgctgaggcctgagttttctggctcttaaagcatagatcatttcacctgatgtttttgaagcatcctaagtacagtagagtagaaaactgatttctttgttaattgtacactgaataatgccttttaaaaatcaaaataaaattaacaaataatggtgaatgaagtgagatga

SEQ ID NO: 22394 - DNA, 472 bp, Homo sapiens
gttattattaactaatgtgcatagatttcattagagtttactctttgtgttgtagaatctatgggttttggaagatatataatggcacatattcacccgtaccgtatcatacagaacactttcactgacctaaaaatctcctgcactccaccattgatctctcactcccttcccccaagccccagggaaccacggatctatttactgtctctatagttttaccttttccaaaatgtcagatagttgaaattattagagaatgcagccttttcagattggtttctttcacgtagcaatatgcatttaagtttcctccatgtcttttgtggcttgataactcatttctttttgttgctcaataatattccattgtatggatgtagtacagtttttatgtattcacctattgaaggacatcttggttaatttcagatttgggaaattataataaatgctgtaaatattcttgcac

SEQ ID NO: 22395 - DNA, 472 bp, Homo sapiens
ctggaactcagcaaacattcaggatggaaatgcacacttgcaaagcagtttctagaactttgtgtgacaagaacactaggaattcttcaagggatatctagccatacatatggcctccgaagaattcacccctagagggtgttcatagtgatcacttaacttgtgcaggtggcctgtagtggtgtaagcatggacatttaagcatgacacctaaagtattttatagaaatgttgaaggaattagagaaagtttatatcattttttaattggtttattactgacagcattttgatagggtattattagaactcaggtcttgtgactcaaaatcaatgccttcccagtataccactgactccccatagctggaaaaccccatgggggctctctgtttgcccttatatcaggctgaaagacatattatcaacaaaagtttatgacattaaaaccacggacccactgatcattcag

SEQ ID NO: 22396 - DNA, 664 bp, Homo sapiens
  misc_feature (557)..(557): n is a, c, g, or t
  misc_feature (560)..(560): n is a, c, g, or t
  misc_feature (587)..(587): n is a, c, g, or t
  misc_feature (597)..(597): n is a, c, g, or t
  misc_feature (625)..(625): n is a, c, g, or t
gggcacctgtaatcccagctactcaggaggctgaggcgggagaattgcttgaacccgagaggcggaggttacagtgagatgagattgcaccgctgtgctccagcctgggtgacaataacaacaacaacaaactcatttcttcaataaaattcaagaatgcacatgtactgaggcttttgtttccaagcaagatgacaggactaatcgcactgaccgccacagccacacacacaaatatctgatggggtaactttataaacacagcatgggacatccagacaatgaactattactcagtactaaaaatggagccttttcaagcaagccttgaaaagatgcagaggaaacattactaagagccaacctgaacgttgctacctactgtatagcacgctgtgtgagtccaacattctgaaaagccaaaaacccgggagacagaagaaagatcaggggttgccaggacttagggggagggagggaggaacggcagagcacacggaggatttttccagcagtgaaactcttctgtacgacactgcaaagatggatcactgtcnctntatgttgtccaaaagctgcagaatacncaagtgcaanaatgaaccctaatgggaactatggactntgggtgataatgatgtgtcaggtaagttcctcaattata

SEQ ID NO: 22397 - DNA, 356 bp, Homo sapiens
cacttgaataatgtcttgcttacagtcatttaaatctggtaatttcaataattcttttgaaaaggccaattgtggctggacgcagtggctcaagcctgtaatccccagcactctgggaggctgaggcgggtggatcacctgaggttaggagttcaagaccagcctggccaacatggtgaaaccccatctctactaaaagtataaaactagccaggcatggtggcacgtgcctgtagtcccagctacttgggaggctgaggcatgagaatcacttgaacccaggagccgaggttgtggtgagccgaaactgcgccactgcactccagcctgggtgacagagcaagactctgtctcaa

SEQ ID NO: 22398 - DNA, 243 bp, Homo sapiens
attcacgtaattctcacgacggctccatgagagaggaataagcgcttcatttagagatggagaaactgaggcacaacggagctaagttgctggcccagttcacacagctgggagtagccaggtcaggactccaatccaggcaaagcagagagaaaaatactggtgaggaggagggaggaggaagtgggacgttccagctgaggagaggtcttttttccttaatctgatgttaggggccaccca

SEQ ID NO: 22399 - DNA, 2392 bp, Homo sapiens
agctttgtggggaggtcgcgggtgagcatgcgcagagagactgtgggcgcgtggtgcagtccctggagggttctcacgctttggctgtctggacttttaagtttttccgctttttcaggaaggcgaccggcagcctcgggcaggggagacaggactgtatgtcagagaagagacggcgcttggacgccaggaatcctctgaagcaggagactgccctatccaggaagatgactcaagaccggcctctgcttgccgtgcaggaggcgctgaagaagtgcttccccgtggtggaggagcagcagggcctgtggcagagtgccctgcgggactgccagcccctcctgtcctccctcagcaacctggcggaacagctgcaggccgcacagaacctgcggtttgaggatgtgccggcgcttcgggccttcccagatttaaaagagcggctgaggcgtaagcagctggtggctggtgacatcgtcctggacaagctaggggaaaggctagccatcctcctcaaggtgcgagacatggtcagcagccatgtggagcgagtgtttcagatctatgagcaacacgcagacacagttggcattgatgctgtcctgcagccttcagcagtgagcccctctgtggctgacatgttggaatggttgcaggatattgagagacattatcgaaagtcgtacctgaagagaaagtatcttctttcgtctatccagtggggagacttggcaaacatacaagctttgcccaaggcctgggaccgaatttcaaaagacgaacaccaagatcttgtacaagatatcctattgaatgtttccttcttcctggaagagtaaggaagctatgcgtatctggagaccacgggcaccacagttgaagactgacattctgaaccctgatgtttctaaagaaacgtcagtatttcagtctgacatatttgaaacatcagtgccttgaaccttaggactgggtcttggggaggattagcgcctagatgtctgattttggagctgcagcatgccaggccgtggctgagagtatgtgagccatgccttgcccttttctgaggctcagggaagtggatggagctagagagacaacaggaaagacggtgctgaagaacatagtgtctttcctctattgtggacctaaagaggtggggaagcaaggacaagaggcaaagagccacactgcccttggcatcatccaaagcattgtctggttgacaccaggtcctggttttgtgtcttttgtcaatacctgaatccttgacaaaagaaaaagtggttttgatgatttaaagaaataagggtgattttgacagaaaatatattttaaaaattttgaccaattgcaatagttatcctcaagccaatttccagaacctgccaccagggggaggtggtgcagcatgaatcattctgaatgctttgtctttgaagtgttcccctattgctgttaccatctcagaggaagtaactgggcatggtgagactcctaaaatgatcggagtttttttggccaaagctggcatctgacttgccacattcctctgagtctggagtagccgcaggggtgggagaatgccagcccagagtcagtccatcggggttacatttccaaggtctgctgccttcatctatgtaatggccgtgttactttcagatctttcagcttcccagagtgttgtgggaatcttggtcattgaatgtaaagggacttagtaaagggtatagatatttttcaaaaatgaaaataactttttttcttataagtgataagcttttataaagatcataggaaaactagaaaaaatgtaaaatgtagaaaattgtaaaacaaacttcattagagatattttgatagataccttttcagtgtctatttacaaattttttcttttaatatagatagggtctcactatattgcccagctcactcctgagctcaagggatcctcccaccatagcctcccaaaatattggaaatacaggcatgagccactgctcctgaccaattcacaaatttttttaaagaacaaacgtgctatcatcgatacatactgttaggttgtctttttttaaaaaacctaatgtaatttgttcatctttttatatctgtaaatatagctcaacacagttatattctttttgtgaatgtattatatctacaatttaccttttttcttagattttacatgcattttcccaaatctttgtgtttgcctatctgtaaaggtaatacattctgattacaaaaaatgaaaatgttacatagaaatgtaccgttatccatctaccagataactattattaataatgtgtatttatttttccaggaattaaaaaacatctatcatataagtattgcaaataaaacttaaaaagca

SEQ ID NO: 22400 - DNA, 735 bp, Homo sapiens
agctttgtggggaggtcgcgggtgagcatgcgcagagagactgtgggcgcgtggtgcagtccctggagggttctcacgctttggctgtctggacttttaagtttttccgctttttcaggaaggcgaccggcagcctcgggcaggggagacaggactgtatgtcagagaagagacggcgcttggacgccaggaatcctctgaagcaggagactgccctatccaggttacccttcccgaggggaaaccagggtctccttcagaaagctgaggcaggccgggcgcggtggctcacgcctgtaatcccagcactttggaagaccgaggcgggcggatcacctgaggaagatgactcaagaccggcctctgcttgccgtgcaggaggcgctgaagaagtgcttccccgtggtggaggagcagcagggcctgtggcagagtgccctgcgggactgccagcccctcctgtcctccctcagcaacctggcggaacagctgcaggccgcacagaacctgcggtttgaggatgtgccggcgcttcgggccttcccagatttaaaagagcggctgaggcgtaagcagctggtggctggtgacatcgtcctggacaagctaggggaaaggctgtaagcagctccctagtgctgtttcttggtggaaggattttaaaacgaggtgttttatatgtagctagtgtcagtccagaaggtgtttttctccttgaaagcgtggcatgtggag

SEQ ID NO: 22401 - DNA, 823 bp, Homo sapiens
agctttgtggggaggtcgcgggtgagcatgcgcagagagactgtgggcgcgtggtgcagtccctggagggttctcacgctttggctgtctggacttttaagtttttccgctttttcaggaaggcgaccggcagcctcgggcaggggagacaggactgtatgtcagagaagagacggcgcttggacgccaggaatcctctgaagcaggagactgccctatccaggttacccttcccgaggggaaaccagggtctccttcagaaagccggcttattttcccttttaaatgcattggtagcagtagtagtaacagcaacaggagcatgggcagaaggagcaagagctgcggctgacattactaagcacttgctatgtgctagaatgtttacacagtcacttgtcaagtcctttccttctgtttccctggtgcttctttgattttccctctccgtccccatcccctctgttgcttacatggcttcttagctctcacttggactcttaattgcctcttgacagttttctctgtctagtttctttccttctaagctgactccaatgaatgacctctatatctgcaggaagtctggttctgatcctgatacttaggatcagaattgttctgtactgtataggaatagctcctgttgctaatgggataaagttcagagccctgcgttggtacttggtgttctttctgttctggctcagcccacctttcagcctttctgactgctctccatgtggcgtccatgctgagcagactggaagatttgctttccctgaattcattctatgcatctccacctctgtgcctttgttca

SEQ ID NO: 22402 - DNA, 654 bp, Homo sapiens
tgtggcggctctgcaataccccaagctctggagggctgggggcctactaggtcaggaagatgactcaagaccggcctctgcttgccgtgcaggaggcgctgaagaagtgcttccccgtggtggaggagcagcagggcctgtggcagagtgccctgcgggactgccagcccctcctgtcctccctcagcaacctggcggaacagctgcaggccgcacagaacctgcggtttgaggatgtgccggcgcttcgggccttcccagatttaaaagagcggctgaggcgtaagcagctggtggctggtgacatcgtcctggacaagctaggggaaaggctagccatcctcctcaaggtgcgagacatggtcagcagccatgtggagcgagtgtttcagatctatgagcaacacgcagacacagttggcattgatgctgtcctgcagccttcagcagtgagcccctctgtggctgacatgttggaatggttgcaggatattgagagacattatcgaaagtcgtacctgaagagaaagtatcttctttcgtctatccagtggggagacttggcaaacatacaagctttgcccaaggcctgggaccgaatttcaaaagacgaacaccaagatcttgtacaaggtactggtttgtgttcttcct

SEQ ID NO: 22403 - DNA, 2869 bp, Homo sapiens
  misc_feature (2800)..(2800): n is a, c, g, or t
  misc_feature (2857)..(2857): n is a, c, g, or t
agctttgtggggaggtcgcgggtgagcatgcgcagagagactgtgggcgcgtggtgcagtccctggagggttctcacgctttggctgtctggacttttaagtttttccgctttttcaggaaggcgaccggcagcctcgggcaggggagacaggactgtatgtcagagaagagacggcgcttggacgccaggaatcctctgaagcaggagactgccctatccaggttacccttcccgaggggaaaccagggtctccttcagaaagctgaggcaggccgggcgcggtggctcacgcctgtaatcccagcactttggaagaccgaggcgggcggatcacctgaggaagatgactcaagaccggcctctgcttgccgtgcaggaggcgctgaagaagtgcttccccgtggtggaggagcagcagggcctgtggcagagtgccctgcgggactgccagcccctcctgtcctccctcagcaacctggcggaacagctgcaggccgcacagaacctgcggtttgaggatgtgccggcgcttcgggccttcccagatttaaaagagcggctgaggcgtaagcagctggtggctggtgacatcgtcctggacaagctaggggaaaggctagccatcctcctcaaggtgcgagacatggtcagcagccatgtggagcgagtgtttcagatctatgagcaacacgcagacacagttggcattgatgctgtcctgcagccttcagcagtgagcccctctgtggctgacatgttggaatggttgcaggatattgagagacattatcgaaagtcgtacctgaagagaaagtatcttctttcgtctatccagtggggagacttggcaaacatacaagctttgcccaaggcctgggaccgaatttcaaaagacgaacaccaagatcttgtacaagatatcctattgaatgtttccttcttcctggaagagtaaggaagctatgcgtatctggagaccacgggcaccacagttgaagactgacattctgaaccctgatgtttctaaagaaacgtcagtatttcagtctgacatatttgaaacatcagtgccttgaaccttaggactgggtcttggggaggattagcgcctagatgtctgattttggagctgcagcatgccaggccgtggctgagagtatgtgagccatgccttgcccttttctgaggctcagggaagtggatggagctagagagacaacaggaaagacggtgctgaagaacatagtgtctttcctctattgtggacctaaagaggtggggaagcaaggacaagaggcaaagagccacactgcccttggcatcatccaaagcattgtctggttgacaccaggtcctggttttgtgtcttttgtcaatacctgaatccttgacaaaagaaaaagtggttttgatgatttaaagaaataagggtgattttgacagaaaatatattttaaaaattttgaccaattgcaatagttatcctcaagccaatttccagaacctgccaccagggggaggtggtgcagcatgaatcattctgaatgctttgtctttgaagtgttcccctattgctgttaccatctcagaggaagtaactgggcatggtgagactcctaaaatgatcggagtttttttggccaaagctggcatctgacttgccacattcctctgagtctggagtagccgcaggggtgggagaatgccagcccagagtcagtccatcggggttacatttccaaggtctgctgccttcatctatgtaatggccgtgttactttcagatctttcagcttcccagagtgttgtgggaatcttggtcattgaatgtaaagggacttagtaaagggtatagatatttttcaaaaatgaaaataactttttttcttataagtgataagcttttataaagatcataggaaaactagaaaaaatgtaaaatgtagaaaattgtaaaacaaacttcattagagatattttgatagataccttttcagtgtctatttacaaattttttcttttaatatagatagggtctcactatattgcccagctcactcctgagctcaagggatcctcccaccatagcctcccaaaatattggaaatacaggcatgagccactgctcctgaccaattcacaaatttttttaaagaacaaacgtgctatcatcgatacatactgttaggttgtctttttttaaaaaacctaatgtaatttgttcatctttttatatctgtaaatatagctcaacacagttatattctttttgtgaatgtattatatctacaatttaccttttttcttagattttacatgcattttcccaaatctttgtgtttgcctatctgtaaaggtaatacattctgattacaaaaaatgaaaatgttacatagaaatgtaccgttatccatctaccagataactattattaataatgtgtatttatttttccaggaattaaaaaacatctatcatataagtattgcaaataaaacttaaaaagcaaaaaaaaaaaaaaaaaaaaaaaaaaaaaaaaaaaaaaaaaaaaaaaaaaaaaaaaaaaaaaaaaaaaaaaaaaaaaaaaaaaaaaaaaaaaaaaaaaaaaaaaaaaaaaaaaaaaaaacaaaaaaaaaaaaaaaaaaaaacacaaaaaaaaccaaaaaaaaacaaaaaaaaaacacaacaaaacacaaaaacaacacaccacacacacacacacacccaaaccaaccccccccacccacaccaacccaccaccacccacacaccccaaacacccacacaaataccccaanacacaccacaaaaaccccataaaaccaccacaccaccccccaaataaatcacaccancccaacttctaa

SEQ ID NO: 22404 - DNA, 3083 bp, Homo sapiens
  misc_feature (3014)..(3014): n is a, c, g, or t
  misc_feature (3071)..(3071): n is a, c, g, or t
agctttgtggggaggtcgcgggtgagcatgcgcagagagactgtgggcgcgtggtgcagtccctggagggttctcacgctttggctgtctggacttttaagtttttccgctttttcaggaaggcgaccggcagcctcgggcaggggagacaggactgtatgtcagagaagagacggcgcttggacgccaggaatcctctgaagcaggagactgccctatccaggttacccttcccgaggggaaaccagggtctccttcagaaagctgaggcaggccgggcgcggtggctcacgcctgtaatcccagcactttggaagaccgaggcgggcggatcacctgaggtcaggaaccccgtctactaaaaatacaaaaattagccaggcgtgtaggcgggcacctgtattcccagctactcgggaggctgaggcaggagaattgcttgaacccgggatgcggaggttgcagtgagccgagatagcgccactgcactccagcctgggcgacattgagactccgtctcgaaaaaaaaacaaaaaaaaaaccctgcttctggaggaagatgactcaagaccggcctctgcttgccgtgcaggaggcgctgaagaagtgcttccccgtggtggaggagcagcagggcctgtggcagagtgccctgcgggactgccagcccctcctgtcctccctcagcaacctggcggaacagctgcaggccgcacagaacctgcggtttgaggatgtgccggcgcttcgggccttcccagatttaaaagagcggctgaggcgtaagcagctggtggctggtgacatcgtcctggacaagctaggggaaaggctagccatcctcctcaaggtgcgagacatggtcagcagccatgtggagcgagtgtttcagatctatgagcaacacgcagacacagttggcattgatgctgtcctgcagccttcagcagtgagcccctctgtggctgacatgttggaatggttgcaggatattgagagacattatcgaaagtcgtacctgaagagaaagtatcttctttcgtctatccagtggggagacttggcaaacatacaagctttgcccaaggcctgggaccgaatttcaaaagacgaacaccaagatcttgtacaagatatcctattgaatgtttccttcttcctggaagagtaaggaagctatgcgtatctggagaccacgggcaccacagttgaagactgacattctgaaccctgatgtttctaaagaaacgtcagtatttcagtctgacatatttgaaacatcagtgccttgaaccttaggactgggtcttggggaggattagcgcctagatgtctgattttggagctgcagcatgccaggccgtggctgagagtatgtgagccatgccttgcccttttctgaggctcagggaagtggatggagctagagagacaacaggaaagacggtgctgaagaacatagtgtctttcctctattgtggacctaaagaggtggggaagcaaggacaagaggcaaagagccacactgcccttggcatcatccaaagcattgtctggttgacaccaggtcctggttttgtgtcttttgtcaatacctgaatccttgacaaaagaaaaagtggttttgatgatttaaagaaataagggtgattttgacagaaaatatattttaaaaattttgaccaattgcaatagttatcctcaagccaatttccagaacctgccaccagggggaggtggtgcagcatgaatcattctgaatgctttgtctttgaagtgttcccctattgctgttaccatctcagaggaagtaactgggcatggtgagactcctaaaatgatcggagtttttttggccaaagctggcatctgacttgccacattcctctgagtctggagtagccgcaggggtgggagaatgccagcccagagtcagtccatcggggttacatttccaaggtctgctgccttcatctatgtaatggccgtgttactttcagatctttcagcttcccagagtgttgtgggaatcttggtcattgaatgtaaagggacttagtaaagggtatagatatttttcaaaaatgaaaataactttttttcttataagtgataagcttttataaagatcataggaaaactagaaaaaatgtaaaatgtagaaaattgtaaaacaaacttcattagagatattttgatagataccttttcagtgtctatttacaaattttttcttttaatatagatagggtctcactatattgcccagctcactcctgagctcaagggatcctcccaccatagcctcccaaaatattggaaatacaggcatgagccactgctcctgaccaattcacaaatttttttaaagaacaaacgtgctatcatcgatacatactgttaggttgtctttttttaaaaaacctaatgtaatttgttcatctttttatatctgtaaatatagctcaacacagttatattctttttgtgaatgtattatatctacaatttaccttttttcttagattttacatgcattttcccaaatctttgtgtttgcctatctgtaaaggtaatacattctgattacaaaaaatgaaaatgttacatagaaatgtaccgttatccatctaccagataactattattaataatgtgtatttatttttccaggaattaaaaaacatctatcatataagtattgcaaataaaacttaaaaagcaaaaaaaaaaaaaaaaaaaaaaaaaaaaaaaaaaaaaaaaaaaaaaaaaaaaaaaaaaaaaaaaaaaaaaaaaaaaaaaaaaaaaaaaaaaaaaaaaaaaaaaaaaaaaaaaaaaaaaacaaaaaaaaaaaaaaaaaaaaacacaaaaaaaaccaaaaaaaaacaaaaaaaaaacacaacaaaacacaaaaacaacacaccacacacacacacacacccaaaccaaccccccccacccacaccaacccaccaccacccacacaccccaaacacccacacaaataccccaanacacaccacaaaaaccccataaaaccaccacaccaccccccaaataaatcacaccancccaacttctaa

SEQ ID NO: 22405 - DNA, 3087 bp, Homo sapiens
  misc_feature (3018)..(3018): n is a, c, g, or t
  misc_feature (3075)..(3075): n is a, c, g, or t
tgtggcggctctgcaataccccaagctctggagggctgggggcctactaggtcaggtcggctgtaggattctgctccaggttggcggctgcttctttctggcctggctgccactgagtagccgaggggccgccgtgaccctctgactgattgactggctggctgcctacgtcggcgctcctcagggccccaagctcctcaggccgaacttcggggttggattgctcaagagttgtgctgagacccagaaggctagaggctagtttcgaagctgtagctcaggctgagtctcaaggcgggcggcgactggacggccagaccggcgagctcttgacgggaaggcgaccggcagcctcgggcaggggagacaggactgtatgtcagagaagagacggcgcttggacgccaggaatcctctgaagcaggagactgccctatccaggttacccttcccgaggggaaaccagggtctccttcagaaagctgaggcaggccgggcgcggtggctcacgcctgtaatcccagcactttggaagaccgaggcgggcggatcacctgaggaagatgactcaagaccggcctctgcttgccgtgcaggaggcgctgaagaagtgcttccccgtggtggaggagcagcagggcctgtggcagagtgccctgcgggactgccagcccctcctgtcctccctcagcaacctggcggaacagctgcaggccgcacagaacctgcggtttgaggatgtgccggcgcttcgggccttcccagatttaaaagagcggctgaggcgtaagcagctggtggctggtgacatcgtcctggacaagctaggggaaaggctagccatcctcctcaaggtgcgagacatggtcagcagccatgtggagcgagtgtttcagatctatgagcaacacgcagacacagttggcattgatgctgtcctgcagccttcagcagtgagcccctctgtggctgacatgttggaatggttgcaggatattgagagacattatcgaaagtcgtacctgaagagaaagtatcttctttcgtctatccagtggggagacttggcaaacatacaagctttgcccaaggcctgggaccgaatttcaaaagacgaacaccaagatcttgtacaagatatcctattgaatgtttccttcttcctggaagagtaaggaagctatgcgtatctggagaccacgggcaccacagttgaagactgacattctgaaccctgatgtttctaaagaaacgtcagtatttcagtctgacatatttgaaacatcagtgccttgaaccttaggactgggtcttggggaggattagcgcctagatgtctgattttggagctgcagcatgccaggccgtggctgagagtatgtgagccatgccttgcccttttctgaggctcagggaagtggatggagctagagagacaacaggaaagacggtgctgaagaacatagtgtctttcctctattgtggacctaaagaggtggggaagcaaggacaagaggcaaagagccacactgcccttggcatcatccaaagcattgtctggttgacaccaggtcctggttttgtgtcttttgtcaatacctgaatccttgacaaaagaaaaagtggttttgatgatttaaagaaataagggtgattttgacagaaaatatattttaaaaattttgaccaattgcaatagttatcctcaagccaatttccagaacctgccaccagggggaggtggtgcagcatgaatcattctgaatgctttgtctttgaagtgttcccctattgctgttaccatctcagaggaagtaactgggcatggtgagactcctaaaatgatcggagtttttttggccaaagctggcatctgacttgccacattcctctgagtctggagtagccgcaggggtgggagaatgccagcccagagtcagtccatcggggttacatttccaaggtctgctgccttcatctatgtaatggccgtgttactttcagatctttcagcttcccagagtgttgtgggaatcttggtcattgaatgtaaagggacttagtaaagggtatagatatttttcaaaaatgaaaataactttttttcttataagtgataagcttttataaagatcataggaaaactagaaaaaatgtaaaatgtagaaaattgtaaaacaaacttcattagagatattttgatagataccttttcagtgtctatttacaaattttttcttttaatatagatagggtctcactatattgcccagctcactcctgagctcaagggatcctcccaccatagcctcccaaaatattggaaatacaggcatgagccactgctcctgaccaattcacaaatttttttaaagaacaaacgtgctatcatcgatacatactgttaggttgtctttttttaaaaaacctaatgtaatttgttcatctttttatatctgtaaatatagctcaacacagttatattctttttgtgaatgtattatatctacaatttaccttttttcttagattttacatgcattttcccaaatctttgtgtttgcctatctgtaaaggtaatacattctgattacaaaaaatgaaaatgttacatagaaatgtaccgttatccatctaccagataactattattaataatgtgtatttatttttccaggaattaaaaaacatctatcatataagtattgcaaataaaacttaaaaagcaaaaaaaaaaaaaaaaaaaaaaaaaaaaaaaaaaaaaaaaaaaaaaaaaaaaaaaaaaaaaaaaaaaaaaaaaaaaaaaaaaaaaaaaaaaaaaaaaaaaaaaaaaaaaaaaaaaaaaacaaaaaaaaaaaaaaaaaaaaacacaaaaaaaaccaaaaaaaaacaaaaaaaaaacacaacaaaacacaaaaacaacacaccacacacacacacacacccaaaccaaccccccccacccacaccaacccaccaccacccacacaccccaaacacccacacaaataccccaanacacaccacaaaaaccccataaaaccaccacaccaccccccaaataaatcacaccancccaacttctaa

SEQ ID NO: 22406 - DNA, 2969 bp, Homo sapiens
  misc_feature (2900)..(2900): n is a, c, g, or t
  misc_feature (2957)..(2957): n is a, c, g, or t
tgtggcggctctgcaataccccaagctctggagggctgggggcctactaggtcaggtcggctgtaggattctgctccaggttggcggctgcttctttctggcctggctgccactgagtagccgaggggccgccgtgaccctctgactgattgactggctggctgcctacgtcggcgctcctcagggccccaagctcctcaggccgaacttcggggttggattgctcaagagttgtgctgagacccagaaggctagaggctagtttcgaagctgtagctcaggctgagtctcaaggcgggcggcgactggacggccagaccggcgagctcttgacgggaaggcgaccggcagcctcgggcaggggagacaggactgtatgtcagagaagagacggcgcttggacgccaggaatcctctgaagcaggagactgccctatccaggaagatgactcaagaccggcctctgcttgccgtgcaggaggcgctgaagaagtgcttccccgtggtggaggagcagcagggcctgtggcagagtgccctgcgggactgccagcccctcctgtcctccctcagcaacctggcggaacagctgcaggccgcacagaacctgcggtttgaggatgtgccggcgcttcgggccttcccagatttaaaagagcggctgaggcgtaagcagctggtggctggtgacatcgtcctggacaagctaggggaaaggctagccatcctcctcaaggtgcgagacatggtcagcagccatgtggagcgagtgtttcagatctatgagcaacacgcagacacagttggcattgatgctgtcctgcagccttcagcagtgagcccctctgtggctgacatgttggaatggttgcaggatattgagagacattatcgaaagtcgtacctgaagagaaagtatcttctttcgtctatccagtggggagacttggcaaacatacaagctttgcccaaggcctgggaccgaatttcaaaagacgaacaccaagatcttgtacaagatatcctattgaatgtttccttcttcctggaagagtaaggaagctatgcgtatctggagaccacgggcaccacagttgaagactgacattctgaaccctgatgtttctaaagaaacgtcagtatttcagtctgacatatttgaaacatcagtgccttgaaccttaggactgggtcttggggaggattagcgcctagatgtctgattttggagctgcagcatgccaggccgtggctgagagtatgtgagccatgccttgcccttttctgaggctcagggaagtggatggagctagagagacaacaggaaagacggtgctgaagaacatagtgtctttcctctattgtggacctaaagaggtggggaagcaaggacaagaggcaaagagccacactgcccttggcatcatccaaagcattgtctggttgacaccaggtcctggttttgtgtcttttgtcaatacctgaatccttgacaaaagaaaaagtggttttgatgatttaaagaaataagggtgattttgacagaaaatatattttaaaaattttgaccaattgcaatagttatcctcaagccaatttccagaacctgccaccagggggaggtggtgcagcatgaatcattctgaatgctttgtctttgaagtgttcccctattgctgttaccatctcagaggaagtaactgggcatggtgagactcctaaaatgatcggagtttttttggccaaagctggcatctgacttgccacattcctctgagtctggagtagccgcaggggtgggagaatgccagcccagagtcagtccatcggggttacatttccaaggtctgctgccttcatctatgtaatggccgtgttactttcagatctttcagcttcccagagtgttgtgggaatcttggtcattgaatgtaaagggacttagtaaagggtatagatatttttcaaaaatgaaaataactttttttcttataagtgataagcttttataaagatcataggaaaactagaaaaaatgtaaaatgtagaaaattgtaaaacaaacttcattagagatattttgatagataccttttcagtgtctatttacaaattttttcttttaatatagatagggtctcactatattgcccagctcactcctgagctcaagggatcctcccaccatagcctcccaaaatattggaaatacaggcatgagccactgctcctgaccaattcacaaatttttttaaagaacaaacgtgctatcatcgatacatactgttaggttgtctttttttaaaaaacctaatgtaatttgttcatctttttatatctgtaaatatagctcaacacagttatattctttttgtgaatgtattatatctacaatttaccttttttcttagattttacatgcattttcccaaatctttgtgtttgcctatctgtaaaggtaatacattctgattacaaaaaatgaaaatgttacatagaaatgtaccgttatccatctaccagataactattattaataatgtgtatttatttttccaggaattaaaaaacatctatcatataagtattgcaaataaaacttaaaaagcaaaaaaaaaaaaaaaaaaaaaaaaaaaaaaaaaaaaaaaaaaaaaaaaaaaaaaaaaaaaaaaaaaaaaaaaaaaaaaaaaaaaaaaaaaaaaaaaaaaaaaaaaaaaaaaaaaaaaaacaaaaaaaaaaaaaaaaaaaaacacaaaaaaaaccaaaaaaaaacaaaaaaaaaacacaacaaaacacaaaaacaacacaccacacacacacacacacccaaaccaaccccccccacccacaccaacccaccaccacccacacaccccaaacacccacacaaataccccaanacacaccacaaaaaccccataaaaccaccacaccaccccccaaataaatcacaccancccaacttctaa

SEQ ID NO: 22407 - DNA, 2741 bp, Homo sapiens
  misc_feature (2672)..(2672): n is a, c, g, or t
  misc_feature (2729)..(2729): n is a, c, g, or t
tgtggcggctctgcaataccccaagctctggagggctgggggcctactaggtcaggtcggctgtaggattctgctccaggttggcggctgcttctttctggcctggctgccactgagtagccgaggggccgccgtgaccctctgactgattgactggctggctgcctacgtcggcgctcctcagggccccaagctcctcaggccgaacttcgggaagatgactcaagaccggcctctgcttgccgtgcaggaggcgctgaagaagtgcttccccgtggtggaggagcagcagggcctgtggcagagtgccctgcgggactgccagcccctcctgtcctccctcagcaacctggcggaacagctgcaggccgcacagaacctgcggtttgaggatgtgccggcgcttcgggccttcccagatttaaaagagcggctgaggcgtaagcagctggtggctggtgacatcgtcctggacaagctaggggaaaggctagccatcctcctcaaggtgcgagacatggtcagcagccatgtggagcgagtgtttcagatctatgagcaacacgcagacacagttggcattgatgctgtcctgcagccttcagcagtgagcccctctgtggctgacatgttggaatggttgcaggatattgagagacattatcgaaagtcgtacctgaagagaaagtatcttctttcgtctatccagtggggagacttggcaaacatacaagctttgcccaaggcctgggaccgaatttcaaaagacgaacaccaagatcttgtacaagatatcctattgaatgtttccttcttcctggaagagtaaggaagctatgcgtatctggagaccacgggcaccacagttgaagactgacattctgaaccctgatgtttctaaagaaacgtcagtatttcagtctgacatatttgaaacatcagtgccttgaaccttaggactgggtcttggggaggattagcgcctagatgtctgattttggagctgcagcatgccaggccgtggctgagagtatgtgagccatgccttgcccttttctgaggctcagggaagtggatggagctagagagacaacaggaaagacggtgctgaagaacatagtgtctttcctctattgtggacctaaagaggtggggaagcaaggacaagaggcaaagagccacactgcccttggcatcatccaaagcattgtctggttgacaccaggtcctggttttgtgtcttttgtcaatacctgaatccttgacaaaagaaaaagtggttttgatgatttaaagaaataagggtgattttgacagaaaatatattttaaaaattttgaccaattgcaatagttatcctcaagccaatttccagaacctgccaccagggggaggtggtgcagcatgaatcattctgaatgctttgtctttgaagtgttcccctattgctgttaccatctcagaggaagtaactgggcatggtgagactcctaaaatgatcggagtttttttggccaaagctggcatctgacttgccacattcctctgagtctggagtagccgcaggggtgggagaatgccagcccagagtcagtccatcggggttacatttccaaggtctgctgccttcatctatgtaatggccgtgttactttcagatctttcagcttcccagagtgttgtgggaatcttggtcattgaatgtaaagggacttagtaaagggtatagatatttttcaaaaatgaaaataactttttttcttataagtgataagcttttataaagatcataggaaaactagaaaaaatgtaaaatgtagaaaattgtaaaacaaacttcattagagatattttgatagataccttttcagtgtctatttacaaattttttcttttaatatagatagggtctcactatattgcccagctcactcctgagctcaagggatcctcccaccatagcctcccaaaatattggaaatacaggcatgagccactgctcctgaccaattcacaaatttttttaaagaacaaacgtgctatcatcgatacatactgttaggttgtctttttttaaaaaacctaatgtaatttgttcatctttttatatctgtaaatatagctcaacacagttatattctttttgtgaatgtattatatctacaatttaccttttttcttagattttacatgcattttcccaaatctttgtgtttgcctatctgtaaaggtaatacattctgattacaaaaaatgaaaatgttacatagaaatgtaccgttatccatctaccagataactattattaataatgtgtatttatttttccaggaattaaaaaacatctatcatataagtattgcaaataaaacttaaaaagcaaaaaaaaaaaaaaaaaaaaaaaaaaaaaaaaaaaaaaaaaaaaaaaaaaaaaaaaaaaaaaaaaaaaaaaaaaaaaaaaaaaaaaaaaaaaaaaaaaaaaaaaaaaaaaaaaaaaaaacaaaaaaaaaaaaaaaaaaaaacacaaaaaaaaccaaaaaaaaacaaaaaaaaaacacaacaaaacacaaaaacaacacaccacacacacacacacacccaaaccaaccccccccacccacaccaacccaccaccacccacacaccccaaacacccacacaaataccccaanacacaccacaaaaaccccataaaaccaccacaccaccccccaaataaatcacaccancccaacttctaa

SEQ ID NO: 22408 - DNA, 2917 bp, Homo sapiens
  misc_feature (2848)..(2848): n is a, c, g, or t
  misc_feature (2905)..(2905): n is a, c, g, or t
tgtggcggctctgcaataccccaagctctggagggctgggggcctactaggtcaggtcggctgtaggattctgctccaggttggcggctgcttctttctggcctggctgccactgagtagccgaggggccgccgtgaccctctgactgattgactggctggctgcctacgtcggcgctcctcagggccccaagctcctcaggccgaacttcggggttggattgctcaagagttgtgctgagacccagaaggctagaggctagtttcgaagctgtagctcaggctgagtctcaaggcgggcggcgactggacggccagaccggcgagctcttgacgggaaggcgaccggcagcctcgggcaggggagacaggactgtatgtcagagaagagacggcgcttggacgccaggaatcctctgaagcaggagactgccctatccaggaagatgactcaagaccggcctctgcttgccgtgcaggaggcgctgaagaagtgcttccccgtggtggaggagcagcagggcctgtggcagagtgccctgcgggactgccagcccctcctgtcctccctcagcaacctggcggaacagctgcaggccgcacagaacctgcggtttgaggatgtgccggcgcttcgggccttcccagatttaaaagagcggctgaggcagccatcctcctcaaggtgcgagacatggtcagcagccatgtggagcgagtgtttcagatctatgagcaacacgcagacacagttggcattgatgctgtcctgcagccttcagcagtgagcccctctgtggctgacatgttggaatggttgcaggatattgagagacattatcgaaagtcgtacctgaagagaaagtatcttctttcgtctatccagtggggagacttggcaaacatacaagctttgcccaaggcctgggaccgaatttcaaaagacgaacaccaagatcttgtacaagatatcctattgaatgtttccttcttcctggaagagtaaggaagctatgcgtatctggagaccacgggcaccacagttgaagactgacattctgaaccctgatgtttctaaagaaacgtcagtatttcagtctgacatatttgaaacatcagtgccttgaaccttaggactgggtcttggggaggattagcgcctagatgtctgattttggagctgcagcatgccaggccgtggctgagagtatgtgagccatgccttgcccttttctgaggctcagggaagtggatggagctagagagacaacaggaaagacggtgctgaagaacatagtgtctttcctctattgtggacctaaagaggtggggaagcaaggacaagaggcaaagagccacactgcccttggcatcatccaaagcattgtctggttgacaccaggtcctggttttgtgtcttttgtcaatacctgaatccttgacaaaagaaaaagtggttttgatgatttaaagaaataagggtgattttgacagaaaatatattttaaaaattttgaccaattgcaatagttatcctcaagccaatttccagaacctgccaccagggggaggtggtgcagcatgaatcattctgaatgctttgtctttgaagtgttcccctattgctgttaccatctcagaggaagtaactgggcatggtgagactcctaaaatgatcggagtttttttggccaaagctggcatctgacttgccacattcctctgagtctggagtagccgcaggggtgggagaatgccagcccagagtcagtccatcggggttacatttccaaggtctgctgccttcatctatgtaatggccgtgttactttcagatctttcagcttcccagagtgttgtgggaatcttggtcattgaatgtaaagggacttagtaaagggtatagatatttttcaaaaatgaaaataactttttttcttataagtgataagcttttataaagatcataggaaaactagaaaaaatgtaaaatgtagaaaattgtaaaacaaacttcattagagatattttgatagataccttttcagtgtctatttacaaattttttcttttaatatagatagggtctcactatattgcccagctcactcctgagctcaagggatcctcccaccatagcctcccaaaatattggaaatacaggcatgagccactgctcctgaccaattcacaaatttttttaaagaacaaacgtgctatcatcgatacatactgttaggttgtctttttttaaaaaacctaatgtaatttgttcatctttttatatctgtaaatatagctcaacacagttatattctttttgtgaatgtattatatctacaatttaccttttttcttagattttacatgcattttcccaaatctttgtgtttgcctatctgtaaaggtaatacattctgattacaaaaaatgaaaatgttacatagaaatgtaccgttatccatctaccagataactattattaataatgtgtatttatttttccaggaattaaaaaacatctatcatataagtattgcaaataaaacttaaaaagcaaaaaaaaaaaaaaaaaaaaaaaaaaaaaaaaaaaaaaaaaaaaaaaaaaaaaaaaaaaaaaaaaaaaaaaaaaaaaaaaaaaaaaaaaaaaaaaaaaaaaaaaaaaaaaaaaaaaaaacaaaaaaaaaaaaaaaaaaaaacacaaaaaaaaccaaaaaaaaacaaaaaaaaaacacaacaaaacacaaaaacaacacaccacacacacacacacacccaaaccaaccccccccacccacaccaacccaccaccacccacacaccccaaacacccacacaaataccccaanacacaccacaaaaaccccataaaaccaccacaccaccccccaaataaatcacaccancccaacttctaa

SEQ ID NO: 22409 - DNA, 2811 bp, Homo sapiens
  misc_feature (2742)..(2742): n is a, c, g, or t
  misc_feature (2799)..(2799): n is a, c, g, or t
agctttgtggggaggtcgcgggtgagcatgcgcagagagactgtgggcgcgtggtgcagtccctggagggttctcacgctttggctgtctggacttttaagtttttccgctttttcaggaaggcgaccggcagcctcgggcaggggagacaggactgtatgtcagagaagagacggcgcttggacgccaggaatcctctgaagcaggagactgccctatccaggttacccttcccgaggggaaaccagggtctccttcagaaagctgaggcaggccgggcgcggtggctcacgcctgtaatcccagcactttggaagaccgaggcgggcggatcacctgaggaagatgactcaagaccggcctctgcttgccgtgcaggaggcgctgaagaagtgcttccccgtggtggaggagcagcagggcctgtggcagagtgccctgcgggactgccagcccctcctgtcctccctcagcaacctggcggaacagctgcaggccgcacagaacctgcggtttgaggatgtgccggcgcttcgggccttcccagatttaaaagagcggctgaggcgtaagcagctggtggctggtgacatcgtcctggacaagctaggggaaaggctagccatcctcctcaaggtgcgagacatggtcagcagccatgtggagcgagtgtttcagatctatgagcaacacgcagacacagttggcattgatgctgtcctgcagccttcagcagtgagcccctctgtggctgacatgttggaatggttgcaggatattgagagacattatcgaaagtcgtacctgaagagaaagtatcttctttcgtctatccagtggggagacttggcaaacatacaagctttgcccaaggcctgggaccgaatttcaaaagacgaacaccaagatcttgtacaagatatcctattgaatgtttccttcttcctggaagagtaaggaagctatgcgtatctggagaccacgggcaccacagttgaagactgacattctgaaccctgatgtttctaaagaaacgtcagtatttcagtctgacatatttgaaacatcagtgccttgaaccttaggactgggtcttggggaggattagcgcctagatgtctgattttggagctgcagcatgccaggccgtggctgagagtatgtgagccatgccttgcccttttctgaggctcagggaagtggatggagctagagagacaacaggaaagacggtgctgaagaacatagtgtctttcctctattgtggacctaaagaggtggggaagcaaggacaagaggcaaagagccacactgcccttggcatcatccaaagcattgtctggttgacaccaggtcctggttttgtgtcttttgtcaatacctgaatccttgacaaaagaaaaagtggttttgatgatttaaagaaataagggtgattttgacagaaaatatattttaaaaattttgaccaattgcaatagttatcctcaagccaatttccagaacctgccaccagggggaggtggtgcagcatgaatcattctgaatgctttgtctttgaagtgttcccctattgctgttaccatctcagaggaagtaactgggcatggtgagactcctaaaatgatcggagtttttttggccaaagctggcatctgacttgccacattcctctgagtctggagtagccgcaggggtgggagaatgccagcccagagtcagtccatcggggttacatttccaaggtctgctgccttcatctatgtaatggccgtgttactttcagatctttcagcttcccagagtgttgtgggaatcttggtcattgaatgtaaagggacttagtaaagggtatagatatttttcaaaaatgaaaataactttttttcttataagtgataagcttttataaagatcataggaaaactagaaaaaatgtaaaatgtagaaaattgtaaaacaaacttcattagagatattttgatagataccttttcagtgtctatttacaaattttttcttttaatatagatagggtctcactatattgcccagctcactcctgagctcaagggatcctcccaccatagcctccaaagaacaaacgtgctatcatcgatacatactgttaggttgtctttttttaaaaaacctaatgtaatttgttcatctttttatatctgtaaatatagctcaacacagttatattctttttgtgaatgtattatatctacaatttaccttttttcttagattttacatgcattttcccaaatctttgtgtttgcctatctgtaaaggtaatacattctgattacaaaaaatgaaaatgttacatagaaatgtaccgttatccatctaccagataactattattaataatgtgtatttatttttccaggaattaaaaaacatctatcatataagtattgcaaataaaacttaaaaagcaaaaaaaaaaaaaaaaaaaaaaaaaaaaaaaaaaaaaaaaaaaaaaaaaaaaaaaaaaaaaaaaaaaaaaaaaaaaaaaaaaaaaaaaaaaaaaaaaaaaaaaaaaaaaaaaaaaaaaacaaaaaaaaaaaaaaaaaaaaacacaaaaaaaaccaaaaaaaaacaaaaaaaaaacacaacaaaacacaaaaacaacacaccacacacacacacacacccaaaccaaccccccccacccacaccaacccaccaccacccacacaccccaaacacccacacaaataccccaanacacaccacaaaaaccccataaaaccaccacaccaccccccaaataaatcacaccancccaacttctaa

SEQ ID NO: 22410 - DNA, 1962 bp, Homo sapiens
agctttgtggggaggtcgcgggtgagcatgcgcagagagactgtgggcgcgtggtgcagtccctggagggttctcacgctttggctgtctggacttttaagtttttccgctttttcaggaaggcgaccggcagcctcgggcaggggagacaggactgtatgtcagagaagagacggcgcttggacgccaggaatcctctgaagcaggagactgccctatccaggttacccttcccgaggggaaaccagggtctccttcagaaagctgaggcaggccgggcgcggtggctcacgcctgtaatcccagcactttggaagaccgaggcgggcggatcacctgaggaagatgactcaagaccggcctctgcttgccgtgcaggaggcgctgaagaagtgcttccccgtggtggaggagcagcagggcctgtggcagagtgccctgcgggactgccagcccctcctgtcctccctcagcaacctggcggaacagctgcaggccgcacagaacctgcggtttgaggatgtgccggcgcttcgggccttcccagatttaaaagagcggctgaggcgtaagcagctggtggctggtgacatcgtcctggacaagctaggggaaaggctagccatcctcctcaaggtgcgagacatggtcagcagccatgtggagcgagtgtttcagatctatgagcaacacgcagacacagttggcattgatgctgtcctgcagccttcagcagtgagcccctctgtggctgacatgttggaatggttgcaggatattgagagacattatcgaaagtcgtacctgaagagaaagtatcttctttcgtctatccagtggggagacttggcaaacatacaagctttgcccaaggcctgggaccgaatttcaaaagacgaacaccaagatcttgtacaagatatcctattgaatgtttccttcttcctggaagagtaaggaagctatgcgtatctggagaccacgggcaccacagttgaagactgacattctgaaccctgatgtttctaaagaaacgtcagtatttcagtctgacatatttgaaacatcagtgccttgaaccttaggactgggtcttggggaggattagcgcctagatgtctgattttggagctgcagcatgccaggccgtggctgagagtatgtgagccatgccttgcccttttctgaggctcagggaagtggatggagctagagagacaacaggaaagacggtgctgaagaacatagtgtctttcctctattgtggacctaaagaggtggggaagcaaggacaagaggcaaagagccacactgcccttggcatcatccaaagcattgtctggttgacaccaggtcctggttttgtgtcttttgtcaatacctgaatccttgacaaaagaaaaagtggttttgatgatttaaagaaataagggtgattttgacagaaaatatattttaaaaattttgaccaattgcaatagttatcctcaagccaatttccagaacctgccaccagggggaggtggtgcagcatgaatcattctgaatgctttgtctttgaagtgttcccctattgctgttaccatctcagaggaagtaactgggcatggtgagactcctaaaatgatcggagtttttttggccaaagctggcatctgacttgccacattcctctgagtctggagtagccgcaggggtgggagaatgccagcccagagtcagtccatcggggttacatttccaaggtctgctgccttcatctatgtaatggccgtgttactttcagatctttcagcttcccagagtgttgtgggaatcttggtcattgaatgtaaagggacttagtaaagggtatagatatttttcaaaaatgaaaataactttttttcttataagtgataagcttgctatacacagactcatacggcgcgctagcatcccggtagcagtgtagtcctcttg

SEQ ID NO: 22411 - DNA, 444 bp, Homo sapiens
ataacagagatgacgcccaccctcgacccagtgcctccccgactgacttggcaccccaacgtggttattttctgtttttatctttttcagcagaagatgactcaagaccggcctctgcttgccgtgcaggaggcgctgaagaagtgcttccccgtggtggaggagcagcagggcctgtggcagagtgccctgcgggactgccagcccctcctgtcctccctcagcaacctggcggaacagctgcaggccgcacagaacctgcggtttgaggatgtgccggcgcttcgggccttcccagatttaaaagagcggctgaggcgtaagcagctggtggctggtgacatcgtcctggacaagctaggggaaaggctgtaagcagctccctagtgctgtttcttggtggaaggattttaaaacgaggtgttttatatgtagctagtgtca

SEQ ID NO: 22412 - DNA, 216 bp, Homo sapiens
gttattttcaaaatagcattttgatattccaaagttacacattaagagactaaattgctgaataattatttatgaactttaattatttgtaactttcactctcttatggtgatgaaacattggttaaaagatcaagccagacactgtggttcatgcctgtataatcccaacattttgggaggccaaggcaggaggattgcttgagcctcagagttg

SEQ ID NO: 22413 - DNA, 427 bp, Homo sapiens
catttactctcaaacctcctccacccattcccctccatctataacgctttctgcacatctgtaaaaggtatgacttagtgtttggtctgtgaaataaggttaaaaaggaagcatttctttttacattctagctaatgttgatatttttctcatgcttctattagcacataattcagatacattagttttgaagttttgaatcttctctgcttcttgagggctctctgttctagatcaacatgatctgtggaacaccagccaagtcctggggcagaaccctccccgttgtccaaatattactgaatcagttgagttttctctgttgtcaatgaattattccacatgtttctttggctacattttttttggctttctgttcacagtaaatatagcctttgtttttaaaaacttctattatgaaaattcc

SEQ ID NO: 22414 - DNA, 393 bp, Homo sapiens
tgccaggatagtgattgactctgtgtgtgtaaaaatgtgcacacaatttttattttagctgattggggaatacttttccaaagagatgtgatctgagcggagatccagatgataagaaggagcaagccatgaagagatctgaatattttcagagagagggaatagcaagtgcaaagggcctgagatgggaatgagcttggaagtttttcctttgtttctttctttttttttggaacaccaataaggccaattgggctggaacaagaggagtgaagaaaggtgagaatgatatgagatgaagtgggagaataatccaagtctagtgtttacaaggccttgtagccattggccaaagtgtatctatattctagacacctccaaggctgcaagtca

SEQ ID NO: 22415 - DNA, 336 bp, Homo sapiens
caaaattattaaaattgtatacagttactttcaggctatgtgtataagaaacacaaatgaattttgtgtttaaatttgggttctatcccctattcccaaggtgcctgattttatgtatgcagatattccagaatcagaaaaattctgaaatccaaaacacttctggtcccaagctttttgaatatgggatactcaacctgtattgccccatgtttcctttccacttactcttcctaatcatcacctatgtcctttctagggaatagaaagagttaattatgtttttatactggagaatgtttagactgtgattaaacatcacatgaaattatgtga

SEQ ID NO: 22416 - DNA, 2106 bp, Homo sapiens
tgacatgctcccagaatcctggatttggacttcattctggacagcatatgacaaggacgaggacccctattctagccagttaaagctggacagaatttttaaaagcaatgaagccagttccttggatatatccacgggctttgctttgagaaggaactgagtaggcagtgagaagagtcgagtgaagcctggcccgtgagtgcctcaacaactgagatgaacgtcgactcgcttgcaggcaagttgtcactcagcagcgatctgaactatatcctgggttccagaaaaggcagaggttcttaccgaaagcaggggaggaagccgcagcccaaggaggtcgtcacttgccgggaaggtggctcgggccaggctgcactcaaaacccgtgctctgtccacactgctacggggccagagccaaggaagcttccacttcttcccccagacagccccaacagcggctaccccaaggagccagcagccttgtgtcctgggatccccagcccctgcagaatgacccaccaggatctgagcatcacagccaaactcatcaatggaggtgtagcagggctcgtgggggtgacctgcgtgttccccatcgacttggccaagactcgcctgcagaaccagcatgggaaagccatgtacaaaggaatgatcgactgcctgatgaagacggctcgggcggagggcttcttcggcatgtaccgaggggctgcagtgaacctcactctggtcactccagagaaggccatcaagctggcggccaacgactttttccggcggctgctcatggaagatgggatgcagcggaacctgaagatggagatgcttgccgggtgtggggctgggatgtgccaggtcgtggtgacctgtcccatggaaatgctcaagattcagctgcaggatgctggacgcctggccgtccatcatcagggctcggcctcagcaccctccacctccaggtcctacacaactggttcggcttccacccacaggcgcccctctgccaccctcattgcctgggagctgctccgcactcagggcctggctgggctctacaggggcctgggtgccactctcctcagagacattcctttctccatcatctacttcccactgtttgccaaccttaacaacctggggttcaacgagctcgccggtaaggcgtcctttgcacattccttcgtgtcaggctgtgtggcaggttccatagctgcggtcgcagtgacgcctctagatgttctgaaaactcgaatccaaaccctcaagaaaggcctgggcgaggacatgtacagtgggatcaccgactgtgccaggaaactctggattcaggagggaccatctgccttcatgaaaggcgctggctgccgggcactggtcatagcacctctctttgggattgctcaaggggtctattttattgggattggagagcgcatcttaaagtgttttgactagacagagctggaggtcaagtccctgcgcttgccgccctctctctagctgtttcacttagcctagagggggcaagggcaggtggggccactctggcctgcctggtcctctgcgttgtagtgctacctcaatctcgggagaaacagccctatattctaacaagttgagcacagccttcttccccttcgtgtctacactcgttttcctttgtgggcacagctaccaggggcttttggaagcccctaaccacctacttttcaacaaaaatggtactttcgttgtattaattgcaggaccttaacaggtagtcacaatagaagggttgtttctgtattttaacatttctatttcacagtcaaactcggcattcttcagtcagcttgaggatttagcattgttaatcttggactccataacttatgagtcctagcactgattttgaggaaaaggaggatcagaagttcaagggaccgtgaaagccctcagagtcagcacctagtttgagaccaagcaccctttcgaatccctggatggctgagggggctgaggccggctctgactgggcagctcagcccctcccccagagcccagggtcttgcacacccctccctgtaaccaaggaacactctgaaataaaggtgaatggcta

SEQ ID NO: 22417 - DNA, 2570 bp, Homo sapiens
tgacatgctcccagaatcctggatttggacttcattctggacagcatatgacaaggacgaggacccctattctagccagttaaagctggacagaatttttaaaagcaatgaagccagttccttggatatatccacgggctttgctttgagaaggaactgagtaggcagtgagaagagtcgagtgaagcctggcccgtgagtgcctcaacaactgagatgaacgtcgactcgcttgcaggcaagttgtcactcagcagcgatctgaactatatcctgggttccagaaaaggcagaggttcttaccgaaagcaggggaggaagccgcagcccaaggaggtcgtcacttgccgggaaggtggctcgggccaggctgcactcaaaacccgtgctctgtccacactgctacggggccagagccaaggaagcttccacttcttcccccagacagccccaacagcggctaccccaaggagccagcagccttgtgtcctgggatccccagcccctgcagaatgacccaccaggatctgagcatcacagccaaactcatcaatggaggtgtagcagggctcgtgggggtgacctgcgtgttccccatcgacttggccaagactcgcctgcagaaccagcatgggaaagccatgtacaaaggaatgatcgactgcctgatgaagacggctcgggcggagggcttcttcggcatgtaccgaggggctgcagtgaacctcactctggtcactccagagaaggccatcaagctggcggccaacgactttttccggcggctgctcatggaagatgggatgcagcggaacctgaagatggagatgcttgccgggtgtggggctgggatgtgccaggtcgtggtgacctgtcccatggaaatgctcaagattcagctgcaggatgctggacgcctggccgtccatcatcagggctcggcctcagcaccctccacctccaggtcctacacaactggttcggcttccacccacaggcgcccctctgccaccctcattgcctgggagctgctccgcactcagggcctggctgggctctacaggggcctgggtgccactctcctcagagacattcctttctccatcatctacttcccactgtttgccaaccttaacaacctggggttcaacgagctcgccggtaaggcgtcctttgcacattccttcgtgtcaggctgtgtggcaggttccatagctgcggtcgcagtgacgcctctagatgttctgaaaactcgaatccaaaccctcaagaaaggcctgggcgaggacatgtacagtgggatcaccgactgtgccaggaaactctggattcaggagggaccatctgccttcatgaaaggcgctggctgccgggcactggtcatagcacctctctttgggattgctcaaggggtctattttattgggattggagagcgcatcttaaagtgttttgactagacagagctggaggtcaagtccctgcgcttgccgccctctctctagctgtttcacttagcctagagggggcaagggcaggtggggccactctggcctgcctggtcctctgcgttgtagtgctacctcaatctcgggagaaacagccctatattctaacaagttgagcacagccttcttccccttcgtgtctacactcgttttcctttgtgggcacagctaccaggggcttttggaagcccctaaccacctacttttcaacaaaaatggtactttcgttgtattaattgcaggaccttaacaggtagtcacaatagaagggttgtttctgtattttaacatttctatttcacagtcaaactcggcattcttcagtcagcttgaggatttagcattgttaatcttggactccataacttatgagtcctagcactgattttgaggaaaaggaggatcagaagttcaagggaccgtgaaagccctcagagtcagcacctagtttgagaccaagcaccctttcgaatccctggatggctgagggggctgaggccggctctgactgggcagctcagcccctcccccagagcccagggtcttgcacacccctccctgtaaccaaggaacactctgaaataaaggtgaatggctaaaatctcatctgttcatcagtgggtacagcagataggctgcagtgaatgctatcaccatctacttttctacgtccatttcaaaaccaaacattaaaaagggcatagaagcagacccccgtcactcttcaaactgttacttgtgggggtggaggaacacagccatagggaaatatctgcttgttagtgacactgggttttaagccttgattctatcccttcataagtgaatcgtcttgaggagctgagtttgctgtgagagccctcctcacgcacctcgattcctcccccaaaggctgctacaggagagataatgtcacagcagcagggccaagtcctaagaactgggctaacaaggaagaggatggtgctaacatggtcagccctgggggcctcactctctgttatgagaactgcatttgagtatgggccctggagacagacctcagttcaagtcccagctcca

SEQ ID NO: 22418 - DNA, 2644 bp, Homo sapiens
tgacatgctcccagaatcctggatttggacttcattctggacagcatatgacaaggacgaggacccctattctagccagttaaagctggacagaatttttaaaagcaatgaagccagttccttggatatatccacgggctttgctttgagaaggaactgagtaggcagtgagaagagtcgagtgaagcctggcccgtgagtgcctcaacaactgagatgaacgtcgactcgcttgcaggcaagttgtcactcagcagcgatctgaactatatcctgggttccagaaaaggcagaggttcttaccgaaagcagatggaggctcgctgtgtcacccaggctggagtgcagtggtgcgatctcggctccctgcaagttctgcctcccaggggaggaagccgcagcccaaggaggtcgtcacttgccgggaaggtggctcgggccaggctgcactcaaaacccgtgctctgtccacactgctacggggccagagccaaggaagcttccacttcttcccccagacagccccaacagcggctaccccaaggagccagcagccttgtgtcctgggatccccagcccctgcagaatgacccaccaggatctgagcatcacagccaaactcatcaatggaggtgtagcagggctcgtgggggtgacctgcgtgttccccatcgacttggccaagactcgcctgcagaaccagcatgggaaagccatgtacaaaggaatgatcgactgcctgatgaagacggctcgggcggagggcttcttcggcatgtaccgaggggctgcagtgaacctcactctggtcactccagagaaggccatcaagctggcggccaacgactttttccggcggctgctcatggaagatgggatgcagcggaacctgaagatggagatgcttgccgggtgtggggctgggatgtgccaggtcgtggtgacctgtcccatggaaatgctcaagattcagctgcaggatgctggacgcctggccgtccatcatcagggctcggcctcagcaccctccacctccaggtcctacacaactggttcggcttccacccacaggcgcccctctgccaccctcattgcctgggagctgctccgcactcagggcctggctgggctctacaggggcctgggtgccactctcctcagagacattcctttctccatcatctacttcccactgtttgccaaccttaacaacctggggttcaacgagctcgccggtaaggcgtcctttgcacattccttcgtgtcaggctgtgtggcaggttccatagctgcggtcgcagtgacgcctctagatgttctgaaaactcgaatccaaaccctcaagaaaggcctgggcgaggacatgtacagtgggatcaccgactgtgccaggaaactctggattcaggagggaccatctgccttcatgaaaggcgctggctgccgggcactggtcatagcacctctctttgggattgctcaaggggtctattttattgggattggagagcgcatcttaaagtgttttgactagacagagctggaggtcaagtccctgcgcttgccgccctctctctagctgtttcacttagcctagagggggcaagggcaggtggggccactctggcctgcctggtcctctgcgttgtagtgctacctcaatctcgggagaaacagccctatattctaacaagttgagcacagccttcttccccttcgtgtctacactcgttttcctttgtgggcacagctaccaggggcttttggaagcccctaaccacctacttttcaacaaaaatggtactttcgttgtattaattgcaggaccttaacaggtagtcacaatagaagggttgtttctgtattttaacatttctatttcacagtcaaactcggcattcttcagtcagcttgaggatttagcattgttaatcttggactccataacttatgagtcctagcactgattttgaggaaaaggaggatcagaagttcaagggaccgtgaaagccctcagagtcagcacctagtttgagaccaagcaccctttcgaatccctggatggctgagggggctgaggccggctctgactgggcagctcagcccctcccccagagcccagggtcttgcacacccctccctgtaaccaaggaacactctgaaataaaggtgaatggctaaaatctcatctgttcatcagtgggtacagcagataggctgcagtgaatgctatcaccatctacttttctacgtccatttcaaaaccaaacattaaaaagggcatagaagcagacccccgtcactcttcaaactgttacttgtgggggtggaggaacacagccatagggaaatatctgcttgttagtgacactgggttttaagccttgattctatcccttcataagtgaatcgtcttgaggagctgagtttgctgtgagagccctcctcacgcacctcgattcctcccccaaaggctgctacaggagagataatgtcacagcagcagggccaagtcctaagaactgggctaacaaggaagaggatggtgctaacatggtcagccctgggggcctcactctctgttatgagaactgcatttgagtatgggccctggagacagacctcagttcaagtcccagctcca

SEQ ID NO: 22419 - DNA, 1508 bp, Homo sapiens
gatctgcccacctcagcctcccaaggtgctgggattacaggcgtgagccactgcgcccggcctatgagtcagttttatatgtggtggctctacaggagggcccagccccttagtgttgaggggaggacaccgaaagtaagctgttcactacttactttaacttttacttgatttagttctttctgaaaactcgaatccaaaccctcaagaaaggcctgggcgaggacatgtacagtgggatcaccgactgtgccaggaaactctggattcaggagggaccatctgccttcatgaaaggcgctggctgccgggcactggtcatagcacctctctttgggattgctcaaggggtctattttattgggattggagagcgcatcttaaagtgttttgactagacagagctggaggtcaagtccctgcgcttgccgccctctctctagctgtttcacttagcctagagggggcaagggcaggtggggccactctggcctgcctggtcctctgcgttgtagtgctacctcaatctcgggagaaacagccctatattctaacaagttgagcacagccttcttccccttcgtgtctacactcgttttcctttgtgggcacagctaccaggggcttttggaagcccctaaccacctacttttcaacaaaaatggtactttcgttgtattaattgcaggaccttaacaggtagtcacaatagaagggttgtttctgtattttaacatttctatttcacagtcaaactcggcattcttcagtcagcttgaggatttagcattgttaatcttggactccataacttatgagtcctagcactgattttgaggaaaaggaggatcagaagttcaagggaccgtgaaagccctcagagtcagcacctagtttgagaccaagcaccctttcgaatccctggatggctgagggggctgaggccggctctgactgggcagctcagcccctcccccagagcccagggtcttgcacacccctccctgtaaccaaggaacactctgaaataaaggtgaatggctaaaatctcatctgttcatcagtgggtacagcagataggctgcagtgaatgctatcaccatctacttttctacgtccatttcaaaaccaaacattaaaaagggcatagaagcagacccccgtcactcttcaaactgttacttgtgggggtggaggaacacagccatagggaaatatctgcttgttagtgacactgggttttaagccttgattctatcccttcataagtgaatcgtcttgaggagctgagtttgctgtgagagccctcctcacgcacctcgattcctcccccaaaggctgctacaggagagataatgtcacagcagcagggccaagtcctaagaactgggctaacaaggaagaggatggtgctaacatggtcagccctgggggcctcactctctgttatgagaactgcatttgagtatgggccctggagacagacctcagttcaagtcccagctcca

SEQ ID NO: 22420 - DNA, 1432 bp, Homo sapiens
gatctgcccacctcagcctcccaaggtgctgggattacaggcgtgagccactgcgcccggcctatgagtcagttttatatgtggtggctctacaggagggcccagccccttagtgttgaggggaggacaccgaaagtaagctgttcactacttactttaacttttacttgatttagttctgaaactctggattcaggagggaccatctgccttcatgaaaggcgctggctgccgggcactggtcatagcacctctctttgggattgctcaaggggtctattttattgggattggagagcgcatcttaaagtgttttgactagacagagctggaggtcaagtccctgcgcttgccgccctctctctagctgtttcacttagcctagagggggcaagggcaggtggggccactctggcctgcctggtcctctgcgttgtagtgctacctcaatctcgggagaaacagccctatattctaacaagttgagcacagccttcttccccttcgtgtctacactcgttttcctttgtgggcacagctaccaggggcttttggaagcccctaaccacctacttttcaacaaaaatggtactttcgttgtattaattgcaggaccttaacaggtagtcacaatagaagggttgtttctgtattttaacatttctatttcacagtcaaactcggcattcttcagtcagcttgaggatttagcattgttaatcttggactccataacttatgagtcctagcactgattttgaggaaaaggaggatcagaagttcaagggaccgtgaaagccctcagagtcagcacctagtttgagaccaagcaccctttcgaatccctggatggctgagggggctgaggccggctctgactgggcagctcagcccctcccccagagcccagggtcttgcacacccctccctgtaaccaaggaacactctgaaataaaggtgaatggctaaaatctcatctgttcatcagtgggtacagcagataggctgcagtgaatgctatcaccatctacttttctacgtccatttcaaaaccaaacattaaaaagggcatagaagcagacccccgtcactcttcaaactgttacttgtgggggtggaggaacacagccatagggaaatatctgcttgttagtgacactgggttttaagccttgattctatcccttcataagtgaatcgtcttgaggagctgagtttgctgtgagagccctcctcacgcacctcgattcctcccccaaaggctgctacaggagagataatgtcacagcagcagggccaagtcctaagaactgggctaacaaggaagaggatggtgctaacatggtcagccctgggggcctcactctctgttatgagaactgcatttgagtatgggccctggagacagacctcagttcaagtcccagctcca

SEQ ID NO: 22421 - DNA, 261 bp, Homo sapiens
tgttgaggggaggacaccgaaagtaagctgttcactacttactttaacttttacttgatttagttctttctgaaaactcgaatccaaaccctcaagaaaggcctgggcgaggacatgtacagtgggatcaccgactgtgccaggtgagagccagtgtcccctcaaatggtggctgggacaggttcctctgcgtgggtgtctgcctagaccagatttagagaccaacttgaattgctgggctctgggtttctttgaagtctg

SEQ ID NO: 22422 - DNA, 756 bp, Homo sapiens
ctcccccagagcccagggtcttgcacacccctccctgtaaccaaggaacactctgaaataaaggtgaatggctaaaatctcatctgttcatcagtgggtacagcagataggctgcagtgaatgctatcaccatctacttttctacgtccatttcaaaaccaaacattaaaaagggcatagaagcagacccccgtcactcttcaaactgttacttgtgggggtggaggaacacagccatagggaaatatctgcttgttagtgacactgggttttaagccttgattctatcccttcataagtgaatcgtcttgaggagctgagtttgctgtgagagccctcctcacgcacctcgattcctcccccaaaggctgctacaggagagataatgtcacagcagcagggccaagtcctaagaaaatcagcacctgctgcaggagctggtgtttacaatagtcccatctactgtgaaacctgggctaacaaggaagaggatggtgctaacatggtcagccctgggggcctcactctctgttatgagaactgcatttgagtatgggccctggagacagacctcagttcaagtcccagctccaccatgtactagctgcaaggccctgggcagctcttagtcgtcacctacggaaaaataaaacatgggacagggaaggaagaacagggcctctgtgaaaggatctggttccagcacacagtgacctgctccaaaataactcggttttttgggtctggcgccgtggc

SEQ ID NO: 22423 - DNA, 2507 bp, Homo sapiens
tgacatgctcccagaatcctggatttggacttcattctggacagcatatgacaaggacgaggacccctattctagccagttaaagctggacagaatttttaaaagcaatgaagccagttccttggatatatccacgggctttgctttgagaaggaactgagtaggcagtgagaagagtcgagtgaagcctggcccgtgagtgcctcaacaactgagatgaacgtcgactcgcttgcaggcaagttgtcagggaggaagccgcagcccaaggaggtcgtcacttgccgggaaggtggctcgggccaggctgcactcaaaacccgtgctctgtccacactgctacggggccagagccaaggaagcttccacttcttcccccagacagccccaacagcggctaccccaaggagccagcagccttgtgtcctgggatccccagcccctgcagaatgacccaccaggatctgagcatcacagccaaactcatcaatggaggtgtagcagggctcgtgggggtgacctgcgtgttccccatcgacttggccaagactcgcctgcagaaccagcatgggaaagccatgtacaaaggaatgatcgactgcctgatgaagacggctcgggcggagggcttcttcggcatgtaccgaggggctgcagtgaacctcactctggtcactccagagaaggccatcaagctggcggccaacgactttttccggcggctgctcatggaagatgggatgcagcggaacctgaagatggagatgcttgccgggtgtggggctgggatgtgccaggtcgtggtgacctgtcccatggaaatgctcaagattcagctgcaggatgctggacgcctggccgtccatcatcagggctcggcctcagcaccctccacctccaggtcctacacaactggttcggcttccacccacaggcgcccctctgccaccctcattgcctgggagctgctccgcactcagggcctggctgggctctacaggggcctgggtgccactctcctcagagacattcctttctccatcatctacttcccactgtttgccaaccttaacaacctggggttcaacgagctcgccggtaaggcgtcctttgcacattccttcgtgtcaggctgtgtggcaggttccatagctgcggtcgcagtgacgcctctagatgttctgaaaactcgaatccaaaccctcaagaaaggcctgggcgaggacatgtacagtgggatcaccgactgtgccaggaaactctggattcaggagggaccatctgccttcatgaaaggcgctggctgccgggcactggtcatagcacctctctttgggattgctcaaggggtctattttattgggattggagagcgcatcttaaagtgttttgactagacagagctggaggtcaagtccctgcgcttgccgccctctctctagctgtttcacttagcctagagggggcaagggcaggtggggccactctggcctgcctggtcctctgcgttgtagtgctacctcaatctcgggagaaacagccctatattctaacaagttgagcacagccttcttccccttcgtgtctacactcgttttcctttgtgggcacagctaccaggggcttttggaagcccctaaccacctacttttcaacaaaaatggtactttcgttgtattaattgcaggaccttaacaggtagtcacaatagaagggttgtttctgtattttaacatttctatttcacagtcaaactcggcattcttcagtcagcttgaggatttagcattgttaatcttggactccataacttatgagtcctagcactgattttgaggaaaaggaggatcagaagttcaagggaccgtgaaagccctcagagtcagcacctagtttgagaccaagcaccctttcgaatccctggatggctgagggggctgaggccggctctgactgggcagctcagcccctcccccagagcccagggtcttgcacacccctccctgtaaccaaggaacactctgaaataaaggtgaatggctaaaatctcatctgttcatcagtgggtacagcagataggctgcagtgaatgctatcaccatctacttttctacgtccatttcaaaaccaaacattaaaaagggcatagaagcagacccccgtcactcttcaaactgttacttgtgggggtggaggaacacagccatagggaaatatctgcttgttagtgacactgggttttaagccttgattctatcccttcataagtgaatcgtcttgaggagctgagtttgctgtgagagccctcctcacgcacctcgattcctcccccaaaggctgctacaggagagataatgtcacagcagcagggccaagtcctaagaactgggctaacaaggaagaggatggtgctaacatggtcagccctgggggcctcactctctgttatgagaactgcatttgagtatgggccctggagacagacctcagttcaagtcccagctcca

SEQ ID NO: 22424 - DNA, 724 bp, Homo sapiens
ttgaactaataattaaagtttctttacattagctatcttaggagatttctcctcttctccctcccccctggtttttttcagaaacattgttctgggagaaaaatcccagttatctgaattcatcaagtcaaaaccataagtcattgaagaaagcattaggtgataatttttatccttatgaaaaagcattttatttaatgaatttcagatatagtgtagtgctaaataagtttttttctctccttttaatgagatatgtgttttatgttcttcattttcagatgaagaaattgaagcccagaaaaattaagtaacttgtccaaatccaaacagatgagttcaaatcatgatgactttttagtggcttgaagacattttgtgtaacatttcagcttcaataagaagacgggagccttggtgcaaggatgttttactgggagcctacagtggagctcagaaagtcatgttccggctggacgcagtggcttatgcctacaatcccagcactttgggaggccaaggcaggtggattgcttgagctcaggagttcaagaccagcctgggcgacatggtgaaactccatctctgcaaaaagtacaaaaaattagccaggtgtcatgaggtgcaactgtggtcccagctacttgatgggctgaggcaggagaatcccttgagcccaggaggttgaggctgcagtgagccgtgttggagtgagaccctgtct

SEQ ID NO: 22425 - DNA, 318 bp, Homo sapiens
atatgaatggaaatatggatttttgttagagaattatacatgaatagttcaataggtgttttcgtaaacctcttcactagttcttagaaagaagactcaataatttgagtttttaaaacttgagggacatactaaccagggagttcctgcatgcagactatttttaatacaagctgtcatattcttgggtggtgagaactacagaaataatttcaaattcctaaaatattgttcggtgaaaggtttggagcttgtaaaacgttctgcgaataaaataactaatatgcttctaagatactacaataacctgaagctctg

SEQ ID NO: 22426 - DNA, 405 bp, Homo sapiens
agcagcgtgatctcagctcactgcaacctctgcctaccaggctcaagagatcctcccatctcagcctcccatgtagctgggactagaggcatgtaccagcacaccaagctaatttttgtatttcttgagatggtgttttgccatgttgcccaggctggtctcaaactcctggattcaagccatccgcctgcctcagcctcccaaagtgttggcattacaggcatgagccactgcaccttgcttaacccagagatgttaagtgacttacttcttttttttttttttttttttttgtgactgagtcttgctctgttgcccgggctggagtgcagtggcacaatctcagctcactgcaacctccagctcccaggttcaagcaattctcctgcctcagcctcccggata

SEQ ID NO: 22427 - DNA, 439 bp, Homo sapiens
acataacgaacttctctctcagcctggacctgtgctggaaaagagtttgacgcccactaaaacaggcatttcactgtgaattagaaagcctctggagaagagactttatgtaaatgtgtgttctcagtgtggaattgttcttccatgtttacaattgtttgtgtgtctttttctctgtgccaaatttcaggtgactggagactgattagctggtctgtgctatccttactccactttagccaacacattgcacattcttacctccaaagtggcaaaaaatgcaaatgtgtatcattatgctttattagctttagtaaaaagtttgccatattaaaggttaaaatttttggcaattttttgtactcctcgaatatctaattatttagattaaaataattatataattattctagttacctttcttgaatttaagtcttaa

SEQ ID NO: 22428 - DNA, 381 bp, Homo sapiens
tgattaaatttttcttttggtctttcagattgagaaagtaaggagaataggcatacatggtgggaaatttctatcaacttggaaaaaacaatagaatacataattcttagccactgagatgagagcccaggaagtcacaaggtcaaaggatcctgtcccattgtctgtggtgacagcctgtcctcccactataaggaatgccttacccttaaacaatggaagtgtccctgagaagttgaagaaatgcatgctgatggaattttaaaaatcatatcattgtagaagtactccagtgattatacttttctgtattttccattttttttttttttagtgagagtgtattctgtttataataaaaacagaaatcagaaaaatatt

SEQ ID NO: 22429 - DNA, 682 bp, Homo sapiens
gtcacgagatgctaaaacttcacttgcattgcctgttaaattgtctaagcctagctaaacttactttgaaaatatttttaaaaatgagaactcaaatattaaaccagtttttatttcttcatgctaaaagagtttagtgtgacattcctgcaactcaactttcttataaagtcagtggtgctttttgtgtagttatctgaaaataaaaggagagtgctgaagttgaatatagaaatataagtacgcacaggatgccttctggcattgctttaagaaatctgttttcttggtattgagcagtaaaatcaacttttttatggtttatttagaatttaaaataccagtaaactagatctgatatagaagatgtcagtggaaaaaaatgaaaacaaaatcataataaaagtaagaaaaatttaattgatgatggattattaatgctcaaagaaaaataattaaaggaaagatttctacaagaccatctttaagttagttactttctagttagtgtcaggtgagacaaactccacgttttattttgtttcgtttacagttagattaacttttgtttggttaactttttattttaagttgacagataaaaattttacataattagagtgtacagtatgatgtgttcatgggtaatgagttttaatgacatgatcatgaaaagattgct

SEQ ID NO: 22430 - DNA, 319 bp, Homo sapiens
gaaccattttctgcatggcagattcttgccaaacacccagtgtcgtacaattgctggacagaggccagtcttagagcaattgctggtagtcactgtaacaaaagttgttttataatttttctaagatgttaagactatttgaaaatagtgaagaacaccattcatcttttcattacttggctgaacaaaaaaagagaaggtcattctacgtgatgaaagtcattgtcgtttgatattcaagcctcaaaaagaagaaacttgggggaaaggaaataaaatgtctgtgtttttaggggactattcagtggtgacgtcttat

SEQ ID NO: 22431 - DNA, 175 bp, Homo sapiens
agatgagttgcctttctcttgcagctttcaaaattctgtctcttgagttttgacaatttaattataataagtcttgatgtagacttctttaactgttgtggggttctatgagcttgagtctggatatctgttttgttctccatatttaggaagttttgggttatttctttaaaaa

SEQ ID NO: 22432 - DNA, 334 bp, Homo sapiens
ttgatattcttgatttgaagaatttgattttagacaacagtgtatttgaggcaatggatgggatattcatgcaggcacccagtttcaatttgtccctagagcctgaaaaacagatcaaggtcagagcctaaaaagtgtagagttcttccatattgttgaagccatgaaaatggctaagcttcaataaggtgaacttatagtggtaaaaacagaaggctatgaactcaacatttattttattttattttattttgaattatttaaaagtagtataattaaggtaagaaattaaaacagttcaaaagtatataaaggagaggcaactactatcttc

SEQ ID NO: 22433 - DNA, 451 bp, Homo sapiens
taacttgtccctactgctaggcctgaataactggcccaaggaagagctcatatcagtctgtattgtaaaagaatcgtagacagtaattgcttacacagctcagggaaatgtaataaccagatgtttcagataatgagactattcccacagaattccagaaaatgaaaatgtcaagtaggaaggcagatgaccttcctcaatttcttgaataaaggtgctatataaacagttgaagtcttcgcccactcaactcaagaaaactgattttacatataagcaacttggtcatctcaactttgctatgcaatcaagtaaagagtaaatatataacaaaacagataaatgaatggaccagtagagataaatatataaatggacagttacaaatgattataagaacaccatctatgcaccaagagtctagctgtgagtgaggatgaagcaagacaca

SEQ ID NO: 22434 - DNA, 335 bp, Homo sapiens
tttgagtcttctctcttttttttcttagtctaagtaaaggcttttaaattctatattgtcaaaacaccacgatttgttttgttgatcttttgtattacttttctagtctctatttctgctcaggttttttcttttttcttcttcagagatgggggtctcactctgttacccaggcgggagtgtagcagtgcaatcatagctcactgtagattttaactcctggactcaagggttttctccacctcagcttcccaagtagctagaatctcaggtgcacagaaccatgccttgctaaattctttatttttgtagagactgggtcttattgtgttgcc

SEQ ID NO: 22435 - DNA, 409 bp, Homo sapiens
tgagtactatttacatatcacaactatttggatgattaagctctactactgtccccattttacagatgagaagacaacatgggaaggacaagtaggtcatacagagatacctctttagtaggtgatagagcaaaattctaaccctggtttgtgtaacccacagcatctgcttttaactagttggttatactgtctccagccagaaccttgttaacttgggaagagggtgcagagagacacatttattacaaactcacatgattgggtttgatgtgttagtgtgatgcattaaaaaagaataaggcctcagtcagacctgaaattgaaaccaagatcttctgtcttctagctgtatgcctcagggtagtttcaattttctcatgtgtaaatagaggtaatactaccagtc

SEQ ID NO: 22436 - DNA, 514 bp, Homo sapiens
atttgcttaataccctgtacatatctttgatttcaacccttagtacatgtggcttggtcactttgtggctaagataagaaagtgcttgtggaagacaagtctgtggcttggtgagtctgcgtggccagcagtctctgatctgtgcagggtattaatacgtcagggctgcgtgttctgggatttctctggaggctggcaagaaccagttgttttgtcttgcgggtctgtcagggttggaaagtccaagccgtaggacccagtttcctttcttagctgatgtctttggccagaacaccgtgggctgttacttgctttgagttggaagcggtttgcatttacgcctgtaaatgtattcattcttaatttatgtaaggttttttttgtacgcaattctcgattctttgaagagatgacaacaaattttggttttctactgttatgtgagaacattaggccccagcaacacgtcattgtgtaaggaaaaataaaagtgctgccgtaaccaaaaaaaaaa

SEQ ID NO: 22437 - DNA, 687 bp, Homo sapiens
gagtttttgaattttctcaggtgtgttttttttatagctgggtgatttcaaacagaatttcaaggcttagcttttagagtgctgccaagaaaaaggagagaaaaaatctccatttcatttttgctgtagaaaatgaatacatttccatgagaaaatgcggtaggtaattggtgagttacgtagattcataaaaacgtaagttcctttttttgcaaggtaaatttttgacagtgaatatctctgttcaaatcctgttatcttgatttgtgagtttcatgctaaatattatgagatgaaacttgatactgcctggaagtgttttcatatgactcattgttaactgcatgatttttagtggaattaatagaataagacatttattttctaaaagaaatagatacttttgcttttcttattaaggtatacaatataagcaacttggccgggcgcggtggctcatgcctgtaatcccagcactttgggagtctgaggcgagtagatcacaaggtcaagagatcaagaccatcctgaccaacatggtgaaaccctgcctctactaaaaatagaaaaattagctgggcatggtggcacgcacctgtagtcccagctacttgggaggctgaggcaggagaatggcttaaacctaagaggttgaggttgtagtgagccaagattgtaccactgtac

SEQ ID NO: 22438 - DNA, 705 bp, Homo sapiens
tagtaagagaggttgttaaatgccccagaggtcttctgaacatccataggaaataaagttaagtttaattctcatattctatgtaagaatagagttccaatgtcaaatgggatattagaaatgtaagtgcctcagtgtttactgttcataaatttgagaacagggtttgataagggataagtggaattctggcagatttacttgtaggttattgtgagtttatcataattttgacaacaaaaaaaaactccacagtatgttgaaatgcatttcttcattttattcaataatttttcaagatttttagaaatatttttaaaaatctaaattaagaagtttatttttggcatatatatatactagttttcaaaacttgtactccttttctgtaatcccagctatttgggaggctaaggcgggaggattggttgagcccgggagttcgaggctatagtgagccatgagagctatgatcactcaactgcattccattgtgggcaacagaatgagaccctatctctacaaaaaaccttcaactccaaagtagattaaatatgacaaatttatgttgcaaattaaccagtaaatctaaaggaactccacaaaggaaatttcaccattgatttatttaggccagattgggttgattgatatccttgtttctggtgattggtaaatgaaaaaaaaaaaaaaaaaaaaaaagca

SEQ ID NO: 22439 - DNA, 356 bp, Homo sapiens
acaaataattttttaaaaattatccaggcatgatggtgcatatctgtagtcctagctactcaggtggctgaggcagaaagattccttaagcacaggaattaaaaattactgtgagctatgtttatgccattgcactttagcctgagtgacagagaccctgtctcagaaatttcaaaatatcatttaactttgtttttgcttgttaattaggtacaataacaatacattcaaaataagaatatatttccatgatatttggcgaggaaatatatttggttagatgtacaaaaaactattgaagaataaaatcgatgaattcaataatattaaaacttaaaactcatataccaaaaaaa

SEQ ID NO: 22440 - DNA, 437 bp, Homo sapiens
taaatgtccatatcccctactagcctataagctccatgacttctaggtaccctgtctgactacgtgtatcactgtttctaccgcctaacattgcctagcacattcattgcttcacaggcatctgaatatggttttataaaatacattgctctagtgcacaggattttaagctaaggatttcatgaatgggatttggggtaggggcatctatgaaattcctgaaattgtgtagaattttgagaatatgtgttttcctggggatagagtatgtagtttctcagcaactcattacagtctgtcacatcatgccctaattctacttgcctgtagctaaacacctaataacattagaactgaaatgatagtgatatgcaagatagcacgtgtggtttccacatattctaagaggcatcttcaattagattccaaaaattttt

SEQ ID NO: 22441 - DNA, 737 bp, Homo sapiens
taaatgtccatatcccctactagcctataagctccatgacttctaggtaccctgtctgactacgtgtatcactgtttctaccgcctaacattgcctagcacattcattgcttcacaggcatctgaatatggttttataaaatacattgctctagtgcacaggattttaagctaaggatttcatgaatgggatttggggtaggggcatctatgaaattcctgaaattgtgtagaattttgagaatatgtgttttcctggggatagagtatgtagtttctcagcaactcattacagtctgtcacatcatgccctaattctacttgcctgtagctaaacacctaataacattagaactgaaatgatagtgatacacgtagtcagacaggtggcatcgataaacaccggtgtttatcgatgccactgcacctggccactaatattttttaaatcacactcattaatttattaccatttataagaaaacagcacctttcctctaaaagtggcttaccaatcttcccaagatccatgtaaagggaggtaagcaaggctactgacttcgagacgtacagtgacactacccaccataacttaactggttccattctaggttgtttttttctttcttgtctccaaagtttaaactttattttaggcaatctggtgcttaaaattcccaagcttaagttctctggctttggaataaatatcctgggagggtatttaacccttatttt

SEQ ID NO: 22442 - DNA, 324 bp, Homo sapiens
gattgctaaaaattgggaccaattgtttttaattaaaatgagatatcatggtatttgtagaactatctgaatatttccttaaattgaattacttaataaacattatgcatcttttaatatcttttcctattgtggacacagttcagtgttgtactgaagcttcaaaaatggtaaattattaactctaagaataatttatttgattttaaataatattcaactgttttcctttaaagaaaatgatgctattttttgcttattatgaatactgacctcttttctgcccctaaatgctgacacaaggctgcgttacaggtaaaaaaa

SEQ ID NO: 22443 - DNA, 407 bp, Homo sapiens
acagtagagagctcactactaggaaaggagaggcattcccaacacagagaagtaggggcggacaggtcccgaggctggagggcgtgtgcagatgggtcgggggagcaaggggctgtcagcttcattaaggctgagagcaggcaggagcgaaacagctggctttgctagccagttacacactcaccgctgtccacggatccctgacactggacgactgttgtgccggtggcccccccaggctgctgcagtctgaggagaaaagccagatggtgacactgcgtctctcctgccccttacctccaggcacagtgaggggcccacctgggatataggcatctccccggagctggtcaggcagatggccccagttggggggctgtggacgccgactcctgaccaggaaggcg

SEQ ID NO: 22444 - DNA, 152 bp, Homo sapiens
tgcttctgatgccttggacaagattcgctatgagagcctgacagacccttcaaagttggacagtggtaaagagctgaaaattgacattatcccatcaccctttatttggagaaggaacaagacaaggaaattagtgatgatgaggcagaaga

SEQ ID NO: 22445 - DNA, 1559 bp, Homo sapiens
cagtttcgctttctctctgtctctcagggcatgagaccagccaggcactgggaaacaaggtttggtgccagagattttggtggcttccaagactgctttttcagagacaggctcatggacacagcacggattgcagttgtcggggcaggtgtggtggggctctccacggctgtgtgcatctccaaactggtgccccgatgctccgttaccatcatttcagacaagtttactccagataccaccagtgatgtggcagccggaatgcttattcctcacacttatccagatacacccattcacacgcagaagcagtggttcagagaaacctttaatcacctctttgcaattgccaattctgcagaagctggagatgctggtgttcatttggtatcagggataaagggaagtggaggctggacactcactcggcgaatagaagacctgtgggaacttcatccgtcctttgacatcgtggtcaactgttcaggccttggaagcagacagcttgcaggagactcaaagattttccctgtaaggggccaagtcctccaagttcaggctccctgggtggagcattttatccgagatggcagtgggctgacatatatttatcctggtacatcccatgtaaccctaggtggaactaggcaaaaaggggactggaatctgtccccggatgcagaaaatagcagagagattctttcccgatgctgtgctctggagccctccctccacggagcctgcaacatcagggagaaggtgggcttgaggccctacaggccaggcgtgcgactgcagacagagctccttgcgcgagatggacagaggctgcctgtagtccaccactatggccatgggagtgggggcatctcagtgcactggggcactgctctggaggccgccaggctggtgagcgagtgtgtccatgccctcaggacccccattcccaagtcaaacctgtagatgacataaaatgacagcaaagagactgagagactgttgatcaaagcacagaacaggttcaaataacttttccactgcatgaaagtttaattagacatttctttgttttcaacattagaagtggtgtaacatgtaagctgagcacggtagcatgcctatagtcccagctacttgagaggctgaggcaggaggattgttgagcccaggagtttgagtgcaatctgggtaacattttttagaggtgccagttcccacctctaaaaaaaacaccaacaacaaaagaaatgatgcaacatgtaggcttacttaggaagtccagcattaatggcatagggcataaagctctattttttgttaaaaatacttcttatagagtaaaatttatttagaactgatgtccaaggacctatgcagatttatatgaatgttggaagctatagagattttgatatcatttggcttataaatccacaggaggagataatgtatggaaaacatttaaatcactgtcaattgcagagctgcctgtgatcttcttaggttatagccaagtcagcaacataattcctctaaataaaattacattgtgctcacac

SEQ ID NO: 22446 - DNA, 2135 bp, Homo sapiens
cagtttcgctttctctctgtctctcagggcatgagaccagccaggcactgggaaacaaggtttggtgccagagattttggtggcttccaagactgctttttcagagacaggctcatggacacagcacggattgcagttgtcggggcaggtgtggtggggctctccacggctgtgtgcatctccaaactggtgccccgatgctccgttaccatcatttcagacaagtttactccagataccaccagtgatgtggcagccggaatgcttattcctcacacttatccagatacacccattcacacgcagaagcagtggttcagagaaacctttaatcacctctttgcaattgccaattctgcagaagctggagatgctggtgttcatttggtatcaggttggcagatatttcagagcactccgactgaagaagtgccattctgggctgacgtggttctgggatttcgaaagatgactgaggctgagctgaagaaattcccccagtatgtgtttggtcaggcttttacaaccctgaaatgtgaatgccctgcctacctcccgtggttggagaaaaggataaagggaagtggaggctggacactcactcggcgaatagaagacctgtgggaacttcatccgtcctttgacatcgtggtcaactgttcaggccttggaagcagacagcttgcaggagactcaaagattttccctgtaaggggccaagtcctccaagttcaggctccctgggtggagcattttatccgagatggcagtgggctgacatatatttatcctggtacatcccatgtaaccctaggtggaactaggcaaaaaggggactggaatctgtccccggatgcagaaaatagcagagagattctttcccgatgctgtgctctggagccctccctccacggagcctgcaacatcagggagaaggtgggcttgaggccctacaggccaggcgtgcgactgcagacagagctccttgcgcgagatggacagaggctgcctgtagtccaccactatggccatgggagtgggggcatctcagtgcactggggcactgctctggaggccgccaggctggtgagcgagtgtgtccatgccctcaggacccccattcccaagtcaaacctgtagatgacataaaatgacagcaaagagactgagagactgttgatcaaagcacagaacaggttcaaataacttttccactgcatgaaagtttaattagacatttctttgttttcaacattagaagtggtgtaacatgtaagctgagcacggtagcatgcctatagtcccagctacttgagaggctgaggcaggaggattgttgagcccaggagtttgagtgcaatctgggtaacattttttagaggtgccagttcccacctctaaaaaaaacaccaacaacaaaagaaatgatgcaacatgtaggcttacttaggaagtccagcattaatggcatagggcataaagctctattttttgttaaaaatacttcttatagagtaaaatttatttagaactgatgtccaaggacctatgcagatttatatgaatgttggaagctatagagattttgatatcatttggcttataaatccacaggaggagataatgtatggaaaacatttaaatcactgtcaattgcagagctgcctgtgatcttcttaggttatagccaagtcagcaacataattcctctaaataaaattacattgtgctcacacagtgctggattattacatttaattgaagacaaagcatgcttgctcctagtactagcagcaagcttttcctcccctcagctggtaatgatggtaggagacagagatgaagttgcctatgtatgtcatatcaattcaatagctgcctggggtcaaacacctaggggttgtacattccattactgtaaatgattgagagctggtttgtggtatggttggctttgcctaagcatttttgaagatgaacagcatgtgcagccaaagaactaatttgctaattaaggtggaacaatcattctgaatgaaatataatcagagtactccgcagtttgttaagaagtattggggaggaggggaatgtgtctcacaataaaatgagttggaattgttgagttaaatgaa

SEQ ID NO: 22447 - DNA, 1736 bp, Homo sapiens
cagtttcgctttctctctgtctctcagggcatgagaccagccaggcactgggaaacaaggtttggtgccagagattttggtggcttccaagactgctttttcagagacaggctcatggacacagcacggattgcagttgtcggggcaggtgtggtggggctctccacggctgtgtgcatctccaaactggtgccccgatgctccgttaccatcatttcagacaagtttactccagataccaccagtgatgtggcagccggaatgcttattcctcacacttatccagatacacccattcacacgcagaagcagtggttcagagaaacctttaatcacctctttgcaattgccaattctgcagaagctggagatgctggtgttcatttggtatcaggttggcagatatttcagagcactccgactgaagaagtgccattctgggctgacgtggttctgggatttcgaaagatgactgaggctgagctgaagaaattcccccagtatgtgtttggtcaggcttttacaaccctgaaatgtgaatgccctgcctacctcccgtggttggagaaaaggataaagggaagtggaggctggacactcactcggcgaatagaagacctgtgggaacttcatccgtcctttgacatcgtggtcaactgttcaggccttggaagcagacagcttgcaggagactcaaagattttccctgtaaggggccaagtcctccaagttcaggctccctgggtggagcattttatccgagatggcagtgggctgacatatatttatcctggtacatcccatgtaaccctaggtggaactaggcaaaaaggggactggaatctgtccccggatgcagaaaatagcagagagattctttcccgatgctgtgctctggagccctccctccacggagcctgcaacatcagggagaaggtgggcttgaggccctacaggccaggcgtgcgactgcagacagagctccttgcgcgagatggacagaggctgcctgtagtccaccactatggccatgggagtgggggcatctcagtgcactggggcactgctctggaggccgccaggctggtgagcgagtgtgtccatgccctcaggacccccattcccaagtcaaacctgtagatgacataaaatgacagcaaagagactgagagactgttgatcaaagcacagaacaggttcaaataacttttccactgcatgaaagtttaattagacatttctttgttttcaacattagaagtggtgtaacatgtaagctgagcacggtagcatgcctatagtcccagctacttgagaggctgaggcaggaggattgttgagcccaggagtttgagtgcaatctgggtaacattttttagaggtgccagttcccacctctaaaaaaaacaccaacaacaaaagaaatgatgcaacatgtaggcttacttaggaagtccagcattaatggcatagggcataaagctctattttttgttaaaaatacttcttatagagtaaaatttatttagaactgatgtccaaggacctatgcagatttatatgaatgttggaagctatagagattttgatatcatttggcttataaatccacaggaggagataatgtatggaaaacatttaaatcactgtcaattgcagagctgcctgtgatcttcttaggttatagccaagtcagcaacataattcctctaaataaaattacattgtgctcacac

SEQ ID NO: 22448 - DNA, 1958 bp, Homo sapiens
cagtttcgctttctctctgtctctcagggcatgagaccagccaggcactgggaaacaaggtttggtgccagagattttggtggcttccaagactgctttttcagagacaggctcatggacacagcacggattgcagttgtcggggcaggtgtggtggggctctccacggctgtgtgcatctccaaactggtgccccgatgctccgttaccatcatttcagacaagtttactccagataccaccagtgatgtggcagccggaatgcttattcctcacacttatccagatacacccattcacacgcagaagcagtggttcagagaaacctttaatcacctctttgcaattgccaattctgcagaagctggagatgctggtgttcatttggtatcagggataaagggaagtggaggctggacactcactcggcgaatagaagacctgtgggaacttcatccgtcctttgacatcgtggtcaactgttcaggccttggaagcagacagcttgcaggagactcaaagattttccctgtaaggggccaagtcctccaagttcaggctccctgggtggagcattttatccgagatggcagtgggctgacatatatttatcctggtacatcccatgtaaccctaggtggaactaggcaaaaaggggactggaatctgtccccggatgcagaaaatagcagagagattctttcccgatgctgtgctctggagccctccctccacggagcctgcaacatcagggagaaggtgggcttgaggccctacaggccaggcgtgcgactgcagacagagctccttgcgcgagatggacagaggctgcctgtagtccaccactatggccatgggagtgggggcatctcagtgcactggggcactgctctggaggccgccaggctggtgagcgagtgtgtccatgccctcaggacccccattcccaagtcaaacctgtagatgacataaaatgacagcaaagagactgagagactgttgatcaaagcacagaacaggttcaaataacttttccactgcatgaaagtttaattagacatttctttgttttcaacattagaagtggtgtaacatgtaagctgagcacggtagcatgcctatagtcccagctacttgagaggctgaggcaggaggattgttgagcccaggagtttgagtgcaatctgggtaacattttttagaggtgccagttcccacctctaaaaaaaacaccaacaacaaaagaaatgatgcaacatgtaggcttacttaggaagtccagcattaatggcatagggcataaagctctattttttgttaaaaatacttcttatagagtaaaatttatttagaactgatgtccaaggacctatgcagatttatatgaatgttggaagctatagagattttgatatcatttggcttataaatccacaggaggagataatgtatggaaaacatttaaatcactgtcaattgcagagctgcctgtgatcttcttaggttatagccaagtcagcaacataattcctctaaataaaattacattgtgctcacacagtgctggattattacatttaattgaagacaaagcatgcttgctcctagtactagcagcaagcttttcctcccctcagctggtaatgatggtaggagacagagatgaagttgcctatgtatgtcatatcaattcaatagctgcctggggtcaaacacctaggggttgtacattccattactgtaaatgattgagagctggtttgtggtatggttggctttgcctaagcatttttgaagatgaacagcatgtgcagccaaagaactaatttgctaattaaggtggaacaatcattctgaatgaaatataatcagagtactccgcagtttgttaagaagtattggggaggaggggaatgtgtctcacaataaaatgagttggaattgttgagttaaatgaa

SEQ ID NO: 22449 - DNA, 355 bp, Homo sapiens
caagacacatcatagagaattgcctctcaaggtggagttcttgttggtccttcttaattgcaaatgtgcaaggacagccaaacactaatcccagcctgccctcaaatgaccctaaatattcaggatagtcctgaaataaaagtagtttccaaaagaaaagactgaaaccaggaaagagggaacatggatatttgaaagacatgactctatcttgccagtctgcatttagccctaaacattttcatccacatttgtttgagagtctacagtcctgcccatgagtgccatcagttatctcatgatttgatagacgttccttaccacccccacctgaaattattcttagcactagcct

SEQ ID NO: 22450 - DNA, 530 bp, Homo sapiens
gtcaaatatcacactggaaaccctagcaatttgtgtaggaccctttccagaaggaaggggacttcattggcgtggccttgtgcagggggagtttctcggagtttcagcctgggagtgggccgggcctccctgttctgggctcaccccaccttctccagccactctcgcgtgcacctggcctcaccatgaaaggcgactttctagacggactccccagccaggagacgtctgcgcttctcaggctctttggttttcccttcacatttttgggagttacatgacacccagcagccagcaatcctggcgggctaagaaatacaaagttcagggcctgaggccgctgtggcctccactgtggtttttctggagctctgtttcatttgggctagagtgaacgcttccctccggagaccccagcaggcaggggctgaagaaagttgaaggaacagtcatttccactgtggctgggtgttggtcgtctggcacggaggtagcctgacagcatgcggacagggggccagcgcggccgc

SEQ ID NO: 22451 - DNA, 1874 bp, Homo sapiens
actttaaatcaggcgtgatggctcattcctgtaatctcaagcactttgggaggctaaggtgggtggatctcttgaggtcaggagttcgagaccaacctggccaacgtggtgaaaccccgtctctactaaaaatacaaaattagccgggcatggtggcagctgcctgtaatcccagctactcgggaagctgaggcaggagaattgcttgaacctgggaggtggggattgcagtcagccaagattgttctgcagcatgggtgacaaagtgagacttcgtctcaagtaaataaaactaaaatttttaaatcaaacatgacaaaaatgttaatataattcagaagtaccttgaaattgaaacatatttgtgcaatgatcattaggctttttgtccttgttgttttaaaatgaggcttatacagagtgagttgagagtcaagtagccttcgctgtgagacggtaatgcagttatataatagatacccttgactttgccagattcatcacaatactgcttatacaggaaagttttctcagaaaggaaaatccattagtatcagtcccatcaagccaaacagaatgaagacctttgatagtaatagcaagaggttacaaatagcagggaggaggcgagtagtgaatgtcactgtgattgcaaacccttacctgtattatcacacgtagtcctcacaacaaccttgtgagacaagtgttgtgttcctcattttttcagaggggaacacagacccagagaggttaagaaatttgcccaagataacaagtaaaaggcaaagttggttgcaaaagaggtgtttctgaattcaagggccatactctctctctgacaacatgctctaagtccatagagtaagcactctagtatgaaaaaaagtttcaaggaacgaggccatgaaaatgagactatttgacatctcagatctgtctgggatgttatggaggtttttaaaaataaagttgaaaaaagaaaatgaatcatgtttatacataaaaaaaatcacatgtaacacatttcaagtgtttgaaaataaaaccaaaatctaaactttagtcttcaagcagacattcagtgttactttagaaaactcactgaattaggtggaaatgatggaataatactattcatggccagctattaacacagaagaacatggcagtgtgtgtctggaacggcatgcacaatttgtaaacctttttcaaatatcatttaatcaactcagaataaagtgccctgtagccaacagtgcctctttacttgcttctctgggaaatacatggtactaaattagtagcacaaagtttgggaatatgcaaaataatggataaccatttttcaaaatgtacattctctgaagaggaagcagctggttggacaggatttcttgaagagccaggtgctaagggcatcaggtcgacatccatagtaaccatgtgccataacatctacacatttccacttgttttacagacaaggtaacaggcagaaggaaaatccagagtcttgcagtaagcagatgacaaaacttcaatatgcttgggcaccacttaggtgaccccagggagatttagtgtggccttaggaaagcaaaagagcactttttattggaaatatgagcttgtcactgggaaagatttgtaaaattgatcaagaacttgatttataattatgcctcaaaaaaaaaagttctcatttagtagtggagcaatctagaaaacataccttttttgtttgtttggaagatcctctttccctggctgtattgtagtgtttgctatttgatgtggaaataactaataacttaagattttggaacagaacaccctttagatttccaaaacacaattcttatttcagggaa

SEQ ID NO: 22452 - DNA, 390 bp, Homo sapiens
atgctatgagatctcaaagagctaagtctgtttctcaaaaaatcagaaatagaattaccatatgatccggcagttccacttctgggtgtatacccaaaagacaggaaagcagggacacaaagggatatgtgcacacccataatccttcccatcagcgttactgacgaccactaaaagccagaagcagcccaagtgctcaacaacagatgaacagataaacaaaatgtggtctatccctgtgatgggggttctccagccttggaaggaaattctgacccgtgccacaacatgcatgaacctcaaggacattctgctcagtgaaatgagccagtgacaaaaagatagatgtttcccgattctactcatatgaagtacccagagtagtcaacc

SEQ ID NO: 22453 - DNA, 571 bp, Homo sapiens
atcctactctcatagtgcatggacacgtagacccagtattggaataatgtaggcaccctgtagctaagaatgctctccttgtcttttctgttgccctgaatagttgtaatagagaaaggagtcaacaccaggtattgagtcttcagagagaaaagtacccagtccctatcgtaaacaatccagtggaggatgcaaaaggcttagaaacaatgaccaagccagtagaaaaagcatgtctaatatccagattgtggttttgacatattccattaaagaatacagaacaggctggatgcggtggctcacgcctgtaatcccagcactttgggaggacaagacggacagatcacctgatgtcaggagttcaaaaccagcctggccaacatggtgaaacccccatatctactaaaaatacaaaaattagccgggcgtggcggcacacacctgtaatcccagctacttgggaggctgaggtaggagaatggcttgaactcaggaggcagaagttgcagtgagccgagattgtgccactgcactccagactgggcaaaagagagagactctgtctcaa

SEQ ID NO: 22454 - DNA, 655 bp, Homo sapiens
gtaatgtagcaatttctagctgatgttcacaagcagagagagcccaatcctgccaatcaaatcaagagtgttctctgtttcattgggaattgatgtctttagttaatatactcataagcgttaaaaaaatagcctgtgttctgaattaagtatggaaaatacgtttctgtccaggaaattagttgagatgaaattattttatctgaggaaacagtacagtaaaatttctttccttttggtgtaattttaaagtgttctttctattttaaactcaggcaaaaaatgcactttacaaattgggtgatggaactactttagtagagttaataaatattaaattagtctaggacagtatttatagaaagtaaaaaaaaaaaatcctggtgtgtttgcttagaatttctgatctgtctcttcataattatacttcttagctttcttatttttatctacagttaacatccttccaccattccctctggtagcctgactttgattaaacaatattttaggccaggcgtgttagaaaaaataggccaggtgtggtggcatgcgtctgtagtcccagctactcaggagtctgaagtgggaggatgttttgagcctgggagatcagggccactgtgtgctatgatcacaccactgtactgtagcc

SEQ ID NO: 22455 - DNA, 495 bp, Homo sapiens
gactgccactcgtggtataaggtctgatttggggcatgggctgtggaatcagatctggacccaatgtccgatctatcacttccccgcgcttttttttttagagacggggtctcgctacgttgcccaggctggcctcgaactcctggcttcaagcgacttcccgcctcccgagtagctgggattacaggcgcgccccaccactccctgtggatcggttgcttctcagctcggtgatgtggggtaacttatttcctggcccgcgacccttgtctgcatgaaagagtcaggggtgaataccatcagggggtgcctggagcattacacggggcaatgccgatagataagtcgcgaggatcagccaggcacggagctaagcgattttatgcgcacggcctccacgagatggctcgttttacggatgaggaaactgaggctcggagggtgaggaatctcgtcctagaccccattccggcagaggtcgaggacgcgagcacc

SEQ ID NO: 22456 - DNA, 531 bp, Homo sapiens
gctttgtggtgtcttaatagctgaaacacagcattttgttaataaacaagttgttctcaaactgtagcagtcatcagaatcccctgaggggctaattaaaacgggctgggtgtggtggagtgtgcctgtaggcccagtcactttggaggctgaggtgaaggattgcttgagcctgggagttagagtacagcctgagcaacacagcgataccttgtctcctaaaaaataaaattaaggccgggcacggtggctcaagcctgtaatcccagcactttgggaggccgaggtgggcggatcacctgaggtcaggagttcaagaccagtctgaccaacgtggagaaaccccatctctacaaaaaatacaaaattagccaggtgtggtggcgcatgcctgtaatcccagctactcgggaggctgaggcaggagaatcgcttaaacccaggaggcggaggttgcagtgagctgagatcgcgccattgcactccagcctgggcaagaagagtgaaactccatctcaaaaaataaataaa

SEQ ID NO: 22457 - DNA, 579 bp, Homo sapiens
atggatgtcacccgcttactcctggccaccctgctggtcttcctctgcttcttcactgccaacagccacctgccacctgaggagaagctccgagatgacaggagcctgagaagcaactcctctgtgaacctactggatgtcccttctgtctctattgtggcgctgaacaagaaatccaaacagatcggcagaaaagcagcagaaaagaaaagatcttctaagaaggaggcttcgatgaagaaagtggtgcggccccggacccccctatctgcgccctgcgtggccacccgcaacagctgcaagccgccggcacccgcctgctgcgacccgtgcgcctcctgccagtgccgcttcttccgcagcgcctgctcctgccgcgtgctcagcctcaactgctgagcgcccccactcccggccgcgagcaggcagggcttcggggacgcggggcgcttctcgggcgggtgatccctaacagggcggcttcccagggctgcaggcgggcggaggttccaggagatgggacttcagggagacctggcttgggctaaaatcgaaatacaatatatataggctgctcga

SEQ ID NO: 22458 - DNA, 321 bp, Homo sapiens
ctctgcccaaataaatgaattaatttcattattggaagaaatagttttgttataaaaatgaatttggcttattttgcacatgtgcatgtgttctcctacccttccaacatgagatgacacagcaagaaggccctcaccagatgtgagcgccttgactttgtactttccagtcttcaggactgtaagaaataaaattgacatacttattttaatttataattacatttttataaagttattcatttttggtaataaataatttgttataaataaaatttataaatatataaaatacataaataaatatatataaattgttat

SEQ ID NO: 22459 - DNA, 394 bp, Homo sapiens
ctaattgaattactgccaccttactcaatatcagaatatttagagagtttaactacctctggtgcttttctcttccattgatgaagtaatctcagacctgaatttaactgacattcctgggcaaagaatgtttgataaggccgggtgtggtggctcacgcctgtaatcccagcactttggatggccaagccgggtggatcacctgaggtcaggaattcaagaccagcctgaccaatatggtgaaaccccatctctactaaaaatacaaaaattagccaggtgtggtggcgtgcacctgtagttccagctactcgggaggctgagacaggagaattgcttgaacccgggaggtggagattgcagtgagctgagatcgtgccactgccctccagcc

SEQ ID NO: 22460 - DNA, 153 bp, Homo sapiens
tctgcctcatctccaccatgaccttcccggggacactctcctgtcttggcttctgggaaggagggcaagtctggcttccctcctatctcagtgcccacaactttatccctgcctgcgtctgctcttcctctccagtcctggaatgatgtgtac

SEQ ID NO: 22461 - DNA, 279 bp, Homo sapiens
tcaaagcctattgggtcatttatttcacctagttgatttgcatagtgaaatatttgtgttaaaaaattgtcatctttgggccaggcaagatggctcaaggctaatgaatgaatgatatccgtgatgaaaagcaaagacactacaacatgagcactgtttcaggttcctgcaggagtgtgtgtgtgtgtgtgtgtgtgtgtattactgtgttagtgtgagtatatagaattgtgtttcattatactctaagtatgaatagttgcctttacagtagaattg

SEQ ID NO: 22462 - DNA, 336 bp, Homo sapiens
tttcttttttcaaaaaaaaaagccttcatattaaaaactaaatgggatttgaggggttttgttgcagtaatgtctctttctgagttatatgcgaactctttctgagttatatgcctaaacgcacgctggtcagaacccatcactgtgtatcagctgacatcatttgggtactcctttaattctgtcaaaagtgaaaaaaaaaaaaagagccacgtaagttgcaataaaaagtcttgttgtccacctacttgattcattcccttttccagctttatgagagccagtattttgcatctggcatgccagaggtcttcaaccacagggcagagtacaacg

SEQ ID NO: 22463 - DNA, 181 bp, Homo sapiens
gggaggtggaggttgcagtgagcagagattgcgcctgggtgacacagcaagaccctgtctggaaaaaaaaaaaaaaggaaaagagggaagagagtcttgattgatgatttttatcaatttccttccacatgcattgggagctggtctcacatgatctgaatggtgccagggaaattttttt

SEQ ID NO: 22464 - DNA, 5769 bp, Homo sapiens
agcggaaaaggagcagcggccggggcggcagcggtccccaggccgggacacccggggtggtgcgcccgggttcgcgggggctgcgccggcgccggggaggcggggggagcgggagcgggcgacgcggggaaggggggagccagggggagggcgccggccggaggaggggcggacccgcccgccctagccgagcagagcacagccgagccgagcggcccgggcgggggccgaccccggccagcgtcggcgcagagagcgggcggaggcgcaggccatgctgcggctggtgcccaccggggcccgggccatcgtggacatgtcgtacgcccgccacttcctggacttccagggctccgccattccccaagccatgcagaagctggtggtgacccggctgagccccaacttccgcgaggccgtcaccctgagccgggactgcccggtgccgctccccggggacggagacctcctcgtccggaaccgatttgttggtgttaatgcatctgacatcaactattcagcaggccgctatgacccctcagttaagcctccctttgacataggtttcgaaggcattggggaggtggtggccctaggcctctctgctagtgccagatacacagttggccaagctgtggcttacatggcacctggttcttttgctgagtacacagttgtgcctgccagcattgcaactccagtgccctcagtgaaacccgagtatcttaccctgctggtaagtggcaccaccgcatacatcagcctgaaagagctcggaggactgtcggaagggaaaaaagttttggtgacagcagcagctgggggaacgggccagtttgccatgcagctttcaaagaaggcaaagtgccatgtaattggaacctgctcttctgatgaaaagtctgcttttctgaaatctcttggctgtgatcgtcctatcaactataaaactgaacccgtaggtaccgtccttaagcaggagtaccctgaaggtgtcgatgtggtctatgaatctgttgggggagccatgtttgacttggctgtagacgccctggctacgaaagggcgcttgatagtaatagggtttatctctggctaccaaactcctactggcctttcgcctgtgaaagcaggaacattgccagccaaactgctcaagaaatctgccagcgtacagggcttcttcctgaaccattacctttctaagtatcaagcagccatgagccacttgctcgagatgtgtgtgagcggagacctggtttgtgaggtggaccttggagatctgtctccagagggcaggtttactggcctggagtccatattccgtgctgtcaattatatgtacatgggaaaaaacactggaaaaattgtagttgaattacctcactctgtcaacagtaagctgtaaaaacagaacaatgacataaatcaagggagaaagaaaatgggcactttatgtctcagaattactcaaatcaatttatttttagttggtaatggatataatatttcttaaaacaaaagtaaggtgttaatgaataggtctctccttctcctcctcctcctcctcttcccttgggggaaaaaaaaaaatgtgctaataaaacttccctccatggctaagagggaaaacgcttacattcaattctttagtcatggatggtctcgttccagatgttattgttccagggaactaaattcattcctgatgccagatctgatcgagtcagtatgtcttcagcttgatcagattttaaaatcagttttgaaagtggttcccgacttctttgctttgggagaatttggtcttatgctcataagcagttcatgagtgacaagtgtagcaaaagccagccatatattttcagaatctatatcctcaggaaatggtcctttttttttctataaatcaccaaccaactatctaaatggacatttgggggaattccctcccaaatttgattttgttattagaaaaatgattccgtgaacacagatgtgttttgaagaagtagcacgtaatggcttttatctaccatcaacctgataaggcacatgtgaaatggaaatgttctctttcctctgaagcagcaaattaatgttgaaaacttacatagacagaaagtaggttttggaaagggaaaccacagagattagggggacttaaaattaatataggcacaggaaagagaaaagtgtgcgctccattctcagtgggggttcaccacaaaacacgggccccaggagggaagcgctgtctaggcacacggcaaggccttagtaacagcatgctacactgctcgaggtacggtatgtcccatcgccctgtgcaccgtagagacctcagtcatctcaaggaagaatacatttgcttctccttagaggcgttcgaactagaagctatgcgttacctctgattctggaaacagaatagcagccactcattctgcattcccatttttctctccacgtgttctggtggaatgagatgctccttggcactatagcctgatgtcccacattgacccactgaccacacaggaaaagcagcgaaacctgcaccctctcttctgagtcacgcctgtggctcatcggcttccctcttaacctttagtgccctgaagactgctgccgctgtcaccgttgcgctgaaaccccatgggcccgttctgattgaaggtgaagcccaccagattatttttcaaagtcttaggtttcggtgtatctaacctgctcagtaaatatggacgcaattaaagatgctctaggaaatttggggactgtatttaatttttctttccttccatctgaggagcaaggaaatcctactgctgaatagctgttagtatctattttacaagatttactcattttcaggtacctaatgtagctgctagcatgcatgcacaacaatacaatttatatggtaaatggaaccaaataatggcttcactgaatgttatggctgcactgaagggaaatgtcacggtaaatagctgccaaattatggatcatgccgaagtgtcacaactgcactaaagacaaatagcactagaggctattgccactgtgacgcttttgagttatgaagaagggtagcggcctgatgcgaggctctttgtgtcctcattatagcaaagggttactggtgcaggggactaggaaaaacccgtccagtgtggtgcttagttattcatccatccctttcagacctaacagccacagccacacggaaagagactttgcctcacttttacattcacaaacaaacaaaggaggggggagcaggttttatgaatgtaactgtgcacaggaaatgactggtaatggaaaaaatgttgtaataaaataatctaatcaaagaatattattaaatttaacatagtctatgtccaaaaggcttagttgcttcttatgcagatagatgtgtgaaatctaagcagtaatgtactttctccctttgtaaagacttggggagtaaggacattaccaactaaattgcttcttcgaaactgaagtgagtcccggtttgtttcattttaatgggagggtaataaagatgaaagaccaacattttaactgatggatcccttaagctacagaatagaaatttattgtgttttgagggaatatactaaatgcagctatgtaaaaataaaattcaaacgcccaggattaaaataaaatataatctgaaaacctcatgttctctctttccccaaactaagaaagtgcactgcatgctgttttcacttattcttagaaaacaagcatgaaagattccgcccattcagataatgccaaaaatatgtttaaacttttttttattcttttgaaaaatgatttgtaaattgagggtcatagttcagcatcagtttcatcttctgggattattgttcaagaccagcctctaatgggaggtgaaacggtacgatggtctcaacacctttcttctgaactgtaatacatatcacaaaaagtacatccataattcagggcaattgtcagtctttttagagaaggggccagggtggaacaatcccagtgagtaaattatttctcagcgtggacttctctgcatgtcgggcttaaggtcaccagccgggcagggtggaaggagcttgcctctttgagaaaccaaggagtcccagtgatctgttaccatttggttatgacttctaaagagccaaatgctattccttcaagcctgttttgcaggcagaaaataccagcagtgtcatttaggggttcctttgatgatgactactgctgttaactgacctcagcattaaaaaaaaaaaaattcagggaatagtttgcaaagaaatgaaggaagttttgcatgatatattctataacttgtcattatatgatttcatctggatgaagttcctcaggagtaggatagagcctctgtaaatggtcattagtattacattctgtgtttatctaatgaaagtgcagtgacaagtagctgcttcttattaaaatgaaaatcctgcattatgtacttgaggaacattccagctaatgaggatgtaatgtcctcagtacaacgcagaccttctttttgtgttcaccaccacaagatgctggaagcttgacaaatgatatcatttaagacacatgcctgccttagggacctggtttttggcttcctgtttctggcttttatttgggtaacgtttataatggccacccgacttgtacctgggtaatgttttaaccccttccccagagttctcaattagcatgaatttactacagtcagagtttcctttaaattggggtgggggtgctaagcactgaaaatatctttcttgattactttaccatgtggacatatgggataaatactgtatttcagatttacataaaagtagattagtaatgcacagctttcagaataaaaacaatgataaaaaagaccaagcactatcaactttggacagtaatttcctaggtgttaaacaagttttctgaatgcaatctggatgcaaaacggcctgatttgatgaattcataattttcttctgtatactttcattttattaaatattttattacttggttaaacacaagaattatctatgtaaacttcatgggcttttttgttgaaagttagatgttcagtaactaatttcccagttatggcccagaattaaacatttatgatcatatttcagaagtcaaaatacaaaactggattatcaaaacggttggtgtggtcactttaaactggactatcagtatggttgccgtggtcactttaagcgggattatcagtacggttggtgtggtcactttggtttatcatcaatacagttggtgtggtcactttaaactggattaccaatatggttggtgtggtcgctttaaagtttgttttcattttttttctatttttaattcttacgggtatatagaaggtgtatatatttatggggtacatgagatgtcttgaaacaggcatgcaatgtgaaataaataagcacatcatggagaatggggtgtctacctcctcaagcatttatccattgagttgcaaacaatccagctacactcagttatttaaaaatgtacagttattattgcttatagtcaccctgtttgctatcaaatagtaggtcttactctatttttttcattttaaactttgaattttatttttcctaggcttatagcatcatgctatcccccttgtaaaaggaggaatgcttggcatgagaaccttactgctgttaccatgaacaaactatggaatgttgg

SEQ ID NO: 22465 - DNA, 5199 bp, Homo sapiens
tatcagctcggaccttacttcccacgatctctctgctagtgccagatacacagttggccaagctgtggcttacatggcacctggttcttttgctgagtacacagttgtgcctgccagcattgcaactccagtgccctcagtgaaacccgagtatcttaccctgctggtaagtggcaccaccgcatacatcagcctgaaagagctcggaggactgtcggaagggaaaaaagttttggtgacagcagcagctgggggaacgggccagtttgccatgcagctttcaaagaaggcaaagtgccatgtaattggaacctgctcttctgatgaaaagtctgcttttctgaaatctcttggctgtgatcgtcctatcaactataaaactgaacccgtaggtaccgtccttaagcaggagtaccctgaaggtgtcgatgtggtctatgaatctgttgggggagccatgtttgacttggctgtagacgccctggctacgaaagggcgcttgatagtaatagggtttatctctggctaccaaactcctactggcctttcgcctgtgaaagcaggaacattgccagccaaactgctcaagaaatctgccagcgtacagggcttcttcctgaaccattacctttctaagtatcaagcagccatgagccacttgctcgagatgtgtgtgagcggagacctggtttgtgaggtggaccttggagatctgtctccagagggcaggtttactggcctggagtccatattccgtgctgtcaattatatgtacatgggaaaaaacactggaaaaattgtagttgaattacctcactctgtcaacagtaagctgtaaaaacagaacaatgacataaatcaagggagaaagaaaatgggcactttatgtctcagaattactcaaatcaatttatttttagttggtaatggatataatatttcttaaaacaaaagtaaggtgttaatgaataggtctctccttctcctcctcctcctcctcttcccttgggggaaaaaaaaaaatgtgctaataaaacttccctccatggctaagagggaaaacgcttacattcaattctttagtcatggatggtctcgttccagatgttattgttccagggaactaaattcattcctgatgccagatctgatcgagtcagtatgtcttcagcttgatcagattttaaaatcagttttgaaagtggttcccgacttctttgctttgggagaatttggtcttatgctcataagcagttcatgagtgacaagtgtagcaaaagccagccatatattttcagaatctatatcctcaggaaatggtcctttttttttctataaatcaccaaccaactatctaaatggacatttgggggaattccctcccaaatttgattttgttattagaaaaatgattccgtgaacacagatgtgttttgaagaagtagcacgtaatggcttttatctaccatcaacctgataaggcacatgtgaaatggaaatgttctctttcctctgaagcagcaaattaatgttgaaaacttacatagacagaaagtaggttttggaaagggaaaccacagagattagggggacttaaaattaatataggcacaggaaagagaaaagtgtgcgctccattctcagtgggggttcaccacaaaacacgggccccaggagggaagcgctgtctaggcacacggcaaggccttagtaacagcatgctacactgctcgaggtacggtatgtcccatcgccctgtgcaccgtagagacctcagtcatctcaaggaagaatacatttgcttctccttagaggcgttcgaactagaagctatgcgttacctctgattctggaaacagaatagcagccactcattctgcattcccatttttctctccacgtgttctggtggaatgagatgctccttggcactatagcctgatgtcccacattgacccactgaccacacaggaaaagcagcgaaacctgcaccctctcttctgagtcacgcctgtggctcatcggcttccctcttaacctttagtgccctgaagactgctgccgctgtcaccgttgcgctgaaaccccatgggcccgttctgattgaaggtgaagcccaccagattatttttcaaagtcttaggtttcggtgtatctaacctgctcagtaaatatggacgcaattaaagatgctctaggaaatttggggactgtatttaatttttctttccttccatctgaggagcaaggaaatcctactgctgaatagctgttagtatctattttacaagatttactcattttcaggtacctaatgtagctgctagcatgcatgcacaacaatacaatttatatggtaaatggaaccaaataatggcttcactgaatgttatggctgcactgaagggaaatgtcacggtaaatagctgccaaattatggatcatgccgaagtgtcacaactgcactaaagacaaatagcactagaggctattgccactgtgacgcttttgagttatgaagaagggtagcggcctgatgcgaggctctttgtgtcctcattatagcaaagggttactggtgcaggggactaggaaaaacccgtccagtgtggtgcttagttattcatccatccctttcagacctaacagccacagccacacggaaagagactttgcctcacttttacattcacaaacaaacaaaggaggggggagcaggttttatgaatgtaactgtgcacaggaaatgactggtaatggaaaaaatgttgtaataaaataatctaatcaaagaatattattaaatttaacatagtctatgtccaaaaggcttagttgcttcttatgcagatagatgtgtgaaatctaagcagtaatgtactttctccctttgtaaagacttggggagtaaggacattaccaactaaattgcttcttcgaaactgaagtgagtcccggtttgtttcattttaatgggagggtaataaagatgaaagaccaacattttaactgatggatcccttaagctacagaatagaaatttattgtgttttgagggaatatactaaatgcagctatgtaaaaataaaattcaaacgcccaggattaaaataaaatataatctgaaaacctcatgttctctctttccccaaactaagaaagtgcactgcatgctgttttcacttattcttagaaaacaagcatgaaagattccgcccattcagataatgccaaaaatatgtttaaacttttttttattcttttgaaaaatgatttgtaaattgagggtcatagttcagcatcagtttcatcttctgggattattgttcaagaccagcctctaatgggaggtgaaacggtacgatggtctcaacacctttcttctgaactgtaatacatatcacaaaaagtacatccataattcagggcaattgtcagtctttttagagaaggggccagggtggaacaatcccagtgagtaaattatttctcagcgtggacttctctgcatgtcgggcttaaggtcaccagccgggcagggtggaaggagcttgcctctttgagaaaccaaggagtcccagtgatctgttaccatttggttatgacttctaaagagccaaatgctattccttcaagcctgttttgcaggcagaaaataccagcagtgtcatttaggggttcctttgatgatgactactgctgttaactgacctcagcattaaaaaaaaaaaaattcagggaatagtttgcaaagaaatgaaggaagttttgcatgatatattctataacttgtcattatatgatttcatctggatgaagttcctcaggagtaggatagagcctctgtaaatggtcattagtattacattctgtgtttatctaatgaaagtgcagtgacaagtagctgcttcttattaaaatgaaaatcctgcattatgtacttgaggaacattccagctaatgaggatgtaatgtcctcagtacaacgcagaccttctttttgtgttcaccaccacaagatgctggaagcttgacaaatgatatcatttaagacacatgcctgccttagggacctggtttttggcttcctgtttctggcttttatttgggtaacgtttataatggccacccgacttgtacctgggtaatgttttaaccccttccccagagttctcaattagcatgaatttactacagtcagagtttcctttaaattggggtgggggtgctaagcactgaaaatatctttcttgattactttaccatgtggacatatgggataaatactgtatttcagatttacataaaagtagattagtaatgcacagctttcagaataaaaacaatgataaaaaagaccaagcactatcaactttggacagtaatttcctaggtgttaaacaagttttctgaatgcaatctggatgcaaaacggcctgatttgatgaattcataattttcttctgtatactttcattttattaaatattttattacttggttaaacacaagaattatctatgtaaacttcatgggcttttttgttgaaagttagatgttcagtaactaatttcccagttatggcccagaattaaacatttatgatcatatttcagaagtcaaaatacaaaactggattatcaaaacggttggtgtggtcactttaaactggactatcagtatggttgccgtggtcactttaagcgggattatcagtacggttggtgtggtcactttggtttatcatcaatacagttggtgtggtcactttaaactggattaccaatatggttggtgtggtcgctttaaagtttgttttcattttttttctatttttaattcttacgggtatatagaaggtgtatatatttatggggtacatgagatgtcttgaaacaggcatgcaatgtgaaataaataagcacatcatggagaatggggtgtctacctcctcaagcatttatccattgagttgcaaacaatccagctacactcagttatttaaaaatgtacagttattattgcttatagtcaccctgtttgctatcaaatagtaggtcttactctatttttttcattttaaactttgaattttatttttcctaggcttatagcatcatgctatcccccttgtaaaaggaggaatgcttggcatgagaaccttactgctgttaccatgaacaaactatggaatgttgg

SEQ ID NO: 22466 - DNA, 5716 bp, Homo sapiens
agcggaaaaggagcagcggccggggcggcagcggtccccaggccgggacacccggggtggtgcgcccgggttcgcgggggctgcgccggcgccggggaggcggggggagcgggagcgggcgacgcggggaaggggggagccagggggagggcgccggccggaggaggggcggacccgcccgccctagccgagcagagcacagccgagccgagcggcccgggcgggggccgaccccggccagcgtcggcgcagagagcgggcggaggcgcaggccatgctgcggctggtgcccaccggggcccgggccatcgtggacatgtcgtacgcccgccacttcctggacttccagggctccgccattccccaagccatgcagaagctggtggtgacccggctgagccccaacttccgcgaggccgtcaccctgagccgggactgcccggtgccgctccccggggacggagacctcctcgtccggaaccgatttgttggtgttaatgcatctgacatcaactattcagcaggccgctatgacccctcagttaagcctccctttgacataggtttcgaaggcattggggaggtggtggccctaggcctctctgctagtgccagatacacagttggccaagctgtggcttacatggcacctggttcttttgctgagtacacagttgtgcctgccagcattgcaactccagtgccctcagtgaaacccgagtatcttaccctgctggtaagtggcaccaccgcatacatcagcctgaaagagctcggaggactgtcggaagggaaaaaagttttggtgacagcagcagctgggggaacgggccagtttgccatgcagctttcaaagaaggcaaagtgccatgtaattggaacctgctcttctgatgaaaagtctgcttttctgaaatctcttggctgtgatcgtcctatcaactataaaactgaacccgtaggtaccgtccttaagcaggagtaccctgaaggtgtcgatgtggtctatgaatctgttgggggagccatgtttgacttggctgtagacgccctggctacgaaagggcgcttgatagtaatagggtttatctctggctaccaaactcctactggcctttcgcctgtgaaagcaggaacattgccagccaaactgctcaagaaatctgccagcgtacagggcttcttcctgaaccattacctttctaagtatcaagcagccatgagccacttgctcgagatgtgtgtgagcggagacctggtttgtgaggtggaccttggagatctgtctccagagggcaggtttactggcctggagtccatattccgtgctgtcaattatatgtacatgggaaaaaacactggaaaaattgtagttgaattacctcactctgtcaacagtaagctgtaaaaacagaacaatgacataaatcaagggagaaagaaaatgggcactttatgtctcagaattactcaaatcaatttatttttagttggtaatggatataatatttcttaaaacaaaagtaaggtgttaatgaataggtctctccttctcctcctcctcctcctcttcccttgggggaaaaaaaaaaatgtgctaataaaacttccctccatggctaagagggaaaacgcttacattcaattctttagtcatggatggtctcgttccagatgttattgttccagggaactaaattcattcctgatgccagatctgatcgagtcagtatgtcttcagcttgatcagattttaaaatcagttttgaaagtggttcccgacttctttgctttgggagaatttggtcttatgctcataagcagttcatgagtgacaagtgtagcaaaagccagccatatattttcagaatctatatcctcaggaaatggtcctttttttttctataaatcaccaaccaactatctaaatggacatttgggggaattccctcccaaatttgattttgttattagaaaaatgattccgtgaacacagatgtgttttgaagaagtagcacgtaatggcttttatctaccatcaacctgataaggcacatgtgaaatggaaatgttctctttcctctgaagcagcaaattaatgttgaaaacttacatagacagaaagtaggttttggaaagggaaaccacagagattagggggacttaaaattaatataggcacaggaaagagaaaagtgtgcgctccattctcagtgggggttcaccacaaaacacgggccccaggagggaagcgctgtctaggcacacggcaaggccttagtaacagcatgctacactgctcgaggtacggtatgtcccatcgccctgtgcaccgtagagacctcagtcatctcaaggaagaatacatttgcttctccttagaggcgttcgaactagaagctatgcgttacctctgattctggaaacagaatagcagccactcattctgcattcccatttttctctccacgtgttctggtggaatgagatgctccttggcactatagcctgatgtcccacattgacccactgaccacacaggaaaagcagcgaaacctgcaccctctcttctgagtcacgcctgtggctcatcggcttccctcttaacctttagtgccctgaagactgctgccgctgtcaccgttgcgctgaaaccccatgggcccgttctgattgaaggtgaagcccaccagattatttttcaaagtcttaggtttcggtgtatctaacctgctcagtaaatatggacgcaattaaagatgctctaggaaatttggggactgtatttaatttttctttccttccatctgaggagcaaggaaatcctactgctgaatagctgttagtatctattttacaagatttactcattttcaggtacctaatgtagctgctagcatgcatgcacaacaatacaatttatatggtaaatggaaccaaataatggcttcactgaatgttatggctgcactgaagggaaatgtcacggtaaatagctgccaaattatggatcatgccgaagtgtcacaactgcactaaagacaaatagcactagaggctattgccactgtgacgcttttgagttatgaagaagggtagcggcctgatgcgaggctctttgtgtcctcattatagcaaagggttactggtgcaggggactaggaaaaacccgtccagtgtggtgcttagttattcatccatccctttcagacctaacagccacagccacacggaaagagactttgcctcacttttacattcacaaacaaacaaaggaggggggagcaggttttatgaatgtaactgtgcacaggaaatgactggtaatggaaaaaatgttgtaataaaataatctaatcaaagaatattattaaatttaacatagtctatgtccaaaaggcttagttgcttcttatgcagatagatgtgtgaaatctaagcagtaatgtactttctccctttgtaaagacttggggagtaaggacattaccaactaaattgcttcttcgaaactgaagtgagtcccggtttgtttcattttaatgggagggtaataaagatgaaagaccaacattttaactgatggatcccttaagctacagaatagaaatttattgtgttttgagggaatatactaaatgcagctatgtaaaaataaaattcaaacgcccaggattaaaataaaatataatctgaaaacctcatgttctctctttccccaaactaagaaagtgcactgcatgctgttttcacttattcttagaaaacaagcatgaaagattccgcccattcagataatgccaaaaatatgtttaaacttttttttattcttttgaaaaatgatttgtaaattgagggtcatagttcagcatcagtttcatcttctgggattattgttcaagaccagcctctaatgggaggtgaaacggtacgatggtctcaacacctttcttctgaactgtaatacatatcacaaaaagtacatccataattcagggcaattgtcagtctttttagagaaggggccagggtggaacaatcccagtgagtaaattatttctcagcgtggacttctctgcatgtcgggcttaaggtcaccagccgggcagggtggaaggagcttgcctctttgagaaaccaaggagtcccagtgatctgttaccatttggttatgacttctaaagagccaaatgctattccttcaagcctgttttgcaggcagaaaataccagcagtgtcatttaggggttcctttgatgatgactactgctgttaactgacctcagcattaaaaaaaaaaaaattcagggaatagtttgcaaagaaatgaaggaagttttgcatgatatattctataacttgtcattatatgatttcatctggatgaagttcctcaggagtaggatagagcctctgtaaatggtcattagtattacattctgtgtttatctaatgaaagtgcagtgacaagtagctgcttcttattaaaatgaaaatcctgcattatgtacttgaggaacattccagctaatgaggatgtaatgtcctcagtacaacgcagaccttctttttgtgttcaccaccacaagatgctggaagcttgacaaatgatatcatttaagacacatgcctgccttagggacctggtttttggcttcctgtttctggcttttatttgggtaacgtttataatggccacccgacttgtacctgggtaatgttttaaccccttccccagagttctcaattagcatgaatttactacagtcagagtttcctttaaattgggatatgggataaatactgtatttcagatttacataaaagtagattagtaatgcacagctttcagaataaaaacaatgataaaaaagaccaagcactatcaactttggacagtaatttcctaggtgttaaacaagttttctgaatgcaatctggatgcaaaacggcctgatttgatgaattcataattttcttctgtatactttcattttattaaatattttattacttggttaaacacaagaattatctatgtaaacttcatgggcttttttgttgaaagttagatgttcagtaactaatttcccagttatggcccagaattaaacatttatgatcatatttcagaagtcaaaatacaaaactggattatcaaaacggttggtgtggtcactttaaactggactatcagtatggttgccgtggtcactttaagcgggattatcagtacggttggtgtggtcactttggtttatcatcaatacagttggtgtggtcactttaaactggattaccaatatggttggtgtggtcgctttaaagtttgttttcattttttttctatttttaattcttacgggtatatagaaggtgtatatatttatggggtacatgagatgtcttgaaacaggcatgcaatgtgaaataaataagcacatcatggagaatggggtgtctacctcctcaagcatttatccattgagttgcaaacaatccagctacactcagttatttaaaaatgtacagttattattgcttatagtcaccctgtttgctatcaaatagtaggtcttactctatttttttcattttaaactttgaattttatttttcctaggcttatagcatcatgctatcccccttgtaaaaggaggaatgcttggcatgagaaccttactgctgttaccatgaacaaactatggaatgttgg

SEQ ID NO: 22467 - DNA, 3395 bp, Homo sapiens
agcggaaaaggagcagcggccggggcggcagcggtccccaggccgggacacccggggtggtgcgcccgggttcgcgggggctgcgccggcgccggggaggcggggggagcgggagcgggcgacgcggggaaggggggagccagggggagggcgccggccggaggaggggcggacccgcccgccctagccgagcagagcacagccgagccgagcggcccgggcgggggccgaccccggccagcgtcggcgcagagagcgggcggaggcgcaggccatgctgcggctggtgcccaccggggcccgggccatcgtggacatgtcgtacgcccgccacttcctggacttccagggctccgccattccccaagccatgcagaagctggtggtgacccggctgagccccaacttccgcgaggccgtcaccctgagccgggactgcccggtgccgctccccggggacggagacctcctcgtccggaaccgatttgttggtgttaatgcatctgacatcaactattcagcaggccgctatgacccctcagttaagcctccctttgacataggtttcgaaggcattggggaggtggtggccctaggcctctctgctagtgccagatacacagttggccaagctgtggcttacatggcacctggttcttttgctgagtacacagttgtgcctgccagcattgcaactccagtgccctcagtgaaacccgagtatcttaccctgctggtaagtggcaccaccgcatacatcagcctgaaagagctcggaggactgtcggaagggaaaaaagttttggtgacagcagcagctgggggaacgggccagtttgccatgcagctttcaaagaaggcaaagtgccatgtaattggaacctgctcttctgatgaaaagtctgcttttctgaaatctcttggctgtgatcgtcctatcaactataaaactgaacccgtaggtaccgtccttaagcaggagtaccctgaaggtgtcgatgtggtctatgaatctgttgggggagccatgtttgacttggctgtagacgccctggctacgaaagggcgcttgatagtaatagggtttatctctggctaccaaactcctactggcctttcgcctgtgaaagcaggaacattgccagccaaactgctcaagaaatctgccagcgtacagggcttcttcctgaaccattacctttctaagtatcaagcagccatgagccacttgctcgagatgtgtgtgagcggagacctggtttgtgaggtggaccttggagatctgtctccagagggcaggtttactggcctggagtccatattccgtgctgtcaattatatgtacatgggaaaaaacactggaaaaattgtagttgaattacctcactctgtcaacagtaagctgtaaaaacagaacaatgacataaatcaagggagaaagaaaatgggcactttatgtctcagaattactcaaatcaatttatttttagttggtaatggatataatatttcttaaaacaaaagtaaggtgttaatgaataggtctctccttctcctcctcctcctcctcttcccttgggggaaaaaaaaaaatgtgctaataaaacttccctccatggctaagagggaaaacgcttacattcaattctttagtcatggatggtctcgttccagatgttattgttccagggaactaaattcattcctgatgccagatctgatcgagtcagtatgtcttcagcttgatcagattttaaaatcagttttgaaagtggttcccgacttctttgctttgggagaatttggtcttatgctcataagcagttcatgagtgacaagtgtagcaaaagccagccatatattttcagaatctatatcctcaggaaatggtcctttttttttctataaatcaccaaccaactatctaaatggacatttgggggaattccctcccaaatttgattttgttattagaaaaatgattccgtgaacacagatgtgttttgaagaagtagcacgtaatggcttttatctaccatcaacctgataaggcacatgtgaaatggaaatgttctctttcctctgaagcagcaaattaatgttgaaaacttacatagacagaaagtaggttttggaaagggaaaccacagagattagggggacttaaaattaatataggcacaggaaagagaaaagtgtgcgctccattctcagtgggggttcaccacaaaacacgggccccaggagggaagcgctgtctaggcacacggcaaggccttagtaacagcatgctacactgctcgaggtacggtatgtcccatcgccctgtgcaccgtagagacctcagtcatctcaaggaagaatacatttgcttctccttagaggcgttcgaactagaagctatgcgttacctctgattctggaaacagaatagcagccactcattctgcattcccatttttctctccacgtgttctggtggaatgagatgctccttggcactatagcctgatgtcccacattgacccactgaccacacaggaaaagcagcgaaacctgcaccctctcttctgagtcacgcctgtggctcatcggcttccctcttaacctttagtgccctgaagactgctgccgctgtcaccgttgcgctgaaaccccatgggcccgttctgattgaaggtgaagcccaccagattatttttcaaagtcttaggtttcggtgtatctaacctgctcagtaaatatggacgcaattaaagatgctctaggaaatttggggactgtatttaatttttctttccttccatctgaggagcaaggaaatcctactgctgaatagctgttagtatctattttacaagatttactcattttcaggtacctaatgtagctgctagcatgcatgcacaacaatacaatttatatggtaaatggaaccaaataatggcttcactgaatgttatggctgcactgaagggaaatgtcacggtaaatagctgccaaattatggatcatgccgaagtgtcacaactgcactaaagacaaatagcactagaggctattgccactgtgacgcttttgagttatgaagaagggtagcggcctgatgcgaggctctttgtgtcctcattatagcaaagggttactggtgcaggggactaggaaaaacccgtccagtgtggtgcttagttattcatccatccctttcagacctaacagccacagccacacggaaagagactttgcctcacttttacattcacaaacaaacaaaggaggggggagcaggttttatgaatgtaactgtgcacaggaaatgactggtaatggaaaaaatgttgtaataaaataatctaatcaaagaatattattaaatttaacatagtctatgtcca

SEQ ID NO: 22468 - DNA, 2769 bp, Homo sapiens
agcggaaaaggagcagcggccggggcggcagcggtccccaggccgggacacccggggtggtgcgcccgggttcgcgggggctgcgccggcgccggggaggcggggggagcgggagcgggcgacgcggggaaggggggagccagggggagggcgccggccggaggaggggcggacccgcccgccctagccgagcagagcacagccgagccgagcggcccgggcgggggccgaccccggccagcgtcggcgcagagagcgggcggaggcgcaggccatgctgcggctggtgcccaccggggcccgggccatcgtggacatgtcgtacgcccgccacttcctggacttccagggctccgccattccccaagccatgcagaagctggtggtgacccggctgagccccaacttccgcgaggccgtcaccctgagccgggactgcccggtgccgctccccggggacggagacctcctcgtccggaaccgatttgttggtgttaatgcatctgacatcaactattcagcaggccgctatgacccctcagttaagcctccctttgacataggtttcgaaggcattggggaggtggtggccctaggcctctctgctagtgccagatacacagttggccaagctgtggcttacatggcacctggttcttttgctgagtacacagttgtgcctgccagcattgcaactccagtgccctcagtgaaacccgagtatcttaccctgctggtaagtggcaccaccgcatacatcagcctgaaagagctcggaggactgtcggaagggaaaaaagttttggtgacagcagcagctgggggaacgggccagtttgccatgcagctttcaaagaaggcaaagtgccatgtaattggaacctgctcttctgatgaaaagtctgcttttctgaaatctcttggctgtgatcgtcctatcaactataaaactgaacccgtaggtaccgtccttaagcaggagtaccctgaaggtgtcgatgtggtctatgaatctgttgggggagccatgtttgacttggctgtagacgccctggctacgaaagggcgcttgatagtaatagggtttatctctggctaccaaactcctactggcctttcgcctgtgaaagcaggaacattgccagccaaactgctcaagaaatctgccagcgtacagggcttcttcctgaaccattacctttctaagtatcaagcagccatgagccacttgctcgagatgtgtgtgagcggagacctggtttgtgaggtggaccttggagatctgtctccagagggcaggtttactggcctggagtccatattccgtgctgtcaattatatgtacatgggaaaaaacactggaaaaattgtagttgaattacctcactctgtcaacagtaagctgtaaaaacagaacaatgacataaatcaagggagaaagaaaatgggcactttatgtctcagaattactcaaatcaatttatttttagttggtaatggatataatatttcttaaaacaaaagtaaggtgttaatgaataggtctctccttctcctcctcctcctcctcttcccttgggggaaaaaaaaaaatgtgctaataaaacttccctccatggctaagagggaaaacgcttacattcaattctttagtcatggatggtctcgttccagatgttattgttccagggaactaaattcattcctgatgccagatctgatcgagtcagtatgtcttcagcttgatcagattttaaaatcagttttgaaagtggttcccgacttctttgctttgggagaatttggtcttatgctcataagcagttcatgagtgacaagtgtagcaaaagccagccatatattttcagaatctatatcctcaggaaatggtcctttttttttctataaatcaccaaccaactatctaaatggacatttgggggaattccctcccaaatttgattttgttattagaaaaatgattccgtgaacacagatgtgttttgaagaagtagcacgtaatggcttttatctaccatcaacctgataaggcacatgtgaaatggaaatgttctctttcctctgaagcagcaaattaatgttgaaaacttacatagacagaaagtaggttttggaaagggaaaccacagagattagggggacttaaaattaatataggcacaggaaagagaaaagtgtgcgctccattctcagtgggggttcaccacaaaacacgggccccaggagggaagcgctgtctaggcacacggcaaggccttagtaacagcatgctacactgctcgaggtacggtatgtcccatcgccctgtgcaccgtagagacctcagtcatctcaaggaagaatacatttgcttctccttagaggcgttcgaactagaagctatgcgttacctctgattctggaaacagaatagcagccactcattctgcattcccatttttctctccacgtgttctggtggaatgagatgctccttggcactatagcctgatgtcccacattgacccactgaccacacaggaaaagcagcgaaacctgcaccctctcttctgagtcacgcctgtggctcatcggcttccctcttaacctttagtgccctgaagactgctgccgctgtcaccgttgcgctgaaaccccatgggcccgttctgattgaaggtgaagcccaccagattatttttcaaagtcttaggtttcggtgtatctaacctgctcagtaaatatggacgcaattaaagatgctctagg

SEQ ID NO: 22469 - DNA, 3128 bp, Homo sapiens
ctcagatttcagctgcattgtctaacctcctgtcaatctcaatccccaccagattatttttcaaagtcttaggtttcggtgtatctaacctgctcagtaaatatggacgcaattaaagatgctctaggaaatttggggactgtatttaatttttctttccttccatctgaggagcaaggaaatcctactgctgaatagctgttagtatctattttacaagatttactcattttcaggtacctaatgtagctgctagcatgcatgcacaacaatacaatttatatggtaaatggaaccaaataatggcttcactgaatgttatggctgcactgaagggaaatgtcacggtaaatagctgccaaattatggatcatgccgaagtgtcacaactgcactaaagacaaatagcactagaggctattgccactgtgacgcttttgagttatgaagaagggtagcggcctgatgcgaggctctttgtgtcctcattatagcaaagggttactggtgcaggggactaggaaaaacccgtccagtgtggtgcttagttattcatccatccctttcagacctaacagccacagccacacggaaagagactttgcctcacttttacattcacaaacaaacaaaggaggggggagcaggttttatgaatgtaactgtgcacaggaaatgactggtaatggaaaaaatgttgtaataaaataatctaatcaaagaatattattaaatttaacatagtctatgtccaaaaggcttagttgcttcttatgcagatagatgtgtgaaatctaagcagtaatgtactttctccctttgtaaagacttggggagtaaggacattaccaactaaattgcttcttcgaaactgaagtgagtcccggtttgtttcattttaatgggagggtaataaagatgaaagaccaacattttaactgatggatcccttaagctacagaatagaaatttattgtgttttgagggaatatactaaatgcagctatgtaaaaataaaattcaaacgcccaggattaaaataaaatataatctgaaaacctcatgttctctctttccccaaactaagaaagtgcactgcatgctgttttcacttattcttagaaaacaagcatgaaagattccgcccattcagataatgccaaaaatatgtttaaacttttttttattcttttgaaaaatgatttgtaaattgagggtcatagttcagcatcagtttcatcttctgggattattgttcaagaccagcctctaatgggaggtgaaacggtacgatggtctcaacacctttcttctgaactgtaatacatatcacaaaaagtacatccataattcagggcaattgtcagtctttttagagaaggggccagggtggaacaatcccagtgagtaaattatttctcagcgtggacttctctgcatgtcgggcttaaggtcaccagccgggcagggtggaaggagcttgcctctttgagaaaccaaggagtcccagtgatctgttaccatttggttatgacttctaaagagccaaatgctattccttcaagcctgttttgcaggcagaaaataccagcagtgtcatttaggggttcctttgatgatgactactgctgttaactgacctcagcattaaaaaaaaaaaaattcagggaatagtttgcaaagaaatgaaggaagttttgcatgatatattctataacttgtcattatatgatttcatctggatgaagttcctcaggagtaggatagagcctctgtaaatggtcattagtattacattctgtgtttatctaatgaaagtgcagtgacaagtagctgcttcttattaaaatgaaaatcctgcattatgtacttgaggaacattccagctaatgaggatgtaatgtcctcagtacaacgcagaccttctttttgtgttcaccaccacaagatgctggaagcttgacaaatgatatcatttaagacacatgcctgccttagggacctggtttttggcttcctgtttctggcttttatttgggtaacgtttataatggccacccgacttgtacctgggtaatgttttaaccccttccccagagttctcaattagcatgaatttactacagtcagagtttcctttaaattggggtgggggtgctaagcactgaaaatatctttcttgattactttaccatgtggacatatgggataaatactgtatttcagatttacataaaagtagattagtaatgcacagctttcagaataaaaacaatgataaaaaagaccaagcactatcaactttggacagtaatttcctaggtgttaaacaagttttctgaatgcaatctggatgcaaaacggcctgatttgatgaattcataattttcttctgtatactttcattttattaaatattttattacttggttaaacacaagaattatctatgtaaacttcatgggcttttttgttgaaagttagatgttcagtaactaatttcccagttatggcccagaattaaacatttatgatcatatttcagaagtcaaaatacaaaactggattatcaaaacggttggtgtggtcactttaaactggactatcagtatggttgccgtggtcactttaagcgggattatcagtacggttggtgtggtcactttggtttatcatcaatacagttggtgtggtcactttaaactggattaccaatatggttggtgtggtcgctttaaagtttgttttcattttttttctatttttaattcttacgggtatatagaaggtgtatatatttatggggtacatgagatgtcttgaaacaggcatgcaatgtgaaataaataagcacatcatggagaatggggtgtctacctcctcaagcatttatccattgagttgcaaacaatccagctacactcagttatttaaaaatgtacagttattattgcttatagtcaccctgtttgctatcaaatagtaggtcttactctatttttttcattttaaactttgaattttatttttcctaggcttatagcatcatgctatcccccttgtaaaaggaggaatgcttggcatgagaaccttactgctgttaccatgaacaaactatggaatgttgg

SEQ ID NO: 22470 - DNA, 1492 bp, Homo sapiens
agcggaaaaggagcagcggccggggcggcagcggtccccaggccgggacacccggggtggtgcgcccgggttcgcgggggctgcgccggcgccggggaggcggggggagcgggagcgggcgacgcggggaaggggggagccagggggagggcgccggccggaggaggggcggacccgcccgccctagccgagcagagcacagccgagccgagcggcccgggcgggggccgaccccggccagcgtcggcgcagagagcgggcggaggcgcaggccatgctgcggctggtgcccaccggggcccgggccatcgtggacatgtcgtacgcccgccacttcctggacttccagggctccgccattccccaagccatgcagaagctggtggtgacccggctgagccccaacttccgcgaggccgtcaccctgagccgggactgcccggtgccgctccccggggacggagacctcctcgtccggaaccgatttgttggtgttaatgcatctgacatcaactattcagcaggccgctatgacccctcagttaagcctccctttgacataggtttcgaaggcattggggaggtggtggccctaggcctctctgctagtgccagatacacagttggccaagctgtggcttacatggcacctggttcttttgctgagtacacagttgtgcctgccagcattgcaactccagtgccctcagtgaaacccgagtatcttaccctgctggtaagtggcaccaccgcatacatcagcctgaaagagctcggaggactgtcggaagggaaaaaagttttggtgacagcagcagctgggggaacgggccagtttgccatgcagctttcaaagaaggcaaagtgccatgtaattggaacctgctcttctgatgaaaagtctgcttttctgaaatctcttggctgtgatcgtcctatcaactataaaactgaacccgtaggtaccgtccttaagcaggagtaccctgaaggtgtcgatgtggtctatgaatctgttgggggagccatgtttgacttggctgtagacgccctggctacgaaagggcgcttgatagtaatagggtttatctctggctaccaaactcctactggcctttcgcctgtgaaagcaggaacattgccagccaaactgctcaagaaatctgccagcgtacagggcttcttcctgaaccattacctttctaagtatcaagcagccatgagccacttgctcgagatgtgtgtgagcggagacctggtttgtgaggtggaccttggagatctgtctccagagggcaggtttactggcctggagtccatattccgtgctgtcaattatatgtacatgggaaaaaacactggaaaaattgtagttgaattacctcactctgtcaacagtaagctgtaaaaacagaacaatgacataaatcaagggagatgcggccgaaaaacaaccacataacaactcatataaacataatgttctgaacct

SEQ ID NO: 22471 - DNA, 1796 bp, Homo sapiens
tgacctcgtgggctcaagcaatcctcccgcctcaacctctcaagtagctggcactacaggcacatgccaccatgcctggctaattttttccatttttgtagagacagggtccccctgtgttgcccaggctggtcttaaactcctggtctcaagcaatcttcctgcctcggcctccgaaagtactgggattacaggtatgagccactgtacccagcctttttcctcttcttaaagtctggtcctctctcccagttttcatgtctcacagccatccttttgtctctgataccgcttcttaattctaaacagctatattctataagctgctaccaaagagagaaacatcatcctctctagactgccgtggagtcagtgccacatataccaaactgtctgatctgtgactatgtcctcttttgactgggcccacattaaagcatgtcccaaacgctatcttgatatatgtcctcagtagcaatcttgttttttaagccttcctttacaggttgattcacagtgggagagagccatgttcagaatttttttctgatagcctgaattttcttcttgtctttcatgtctttgcttctatttatgttctttgtacctcttcttccttgaacttggatcttctgcatagttgactctattatatcatctttggggctgcagaataaaatgtggaagattttaaagttaaggttcccagaataatgttgtcgcccacattgcacatatgtcacattttgagtttactagttaagcctctaaatatgcactttatatacaatatgcgcagtgcgatgatttaggttgccatgagaacctaaaaattttaggcttaaatggttcggtaacagacactttaaaattatcttagatgaaggctaattttttcttttatatactctttacaaactgaggcataaggcaatagctgttctcatatagtacttctgctgacaggttgggtggcttctttgtttgcctacctgttatcagtccccttcattccagtctttcatactctggtgtcctgtcccctgcccaagtatttgtctctcttttttttttaagtcttaccctgttgctcaggctggagagcagtggcgtgatcttggatcactgcaacctccacctcccaggtttaagcagttctcctgcctcagcctccccagtagctgagattacaggtgcctgccaccacacccagctaattttttttttcccgagtcggagtctcgctgtgttgcctaggctggagtgcagtgacaggatctcggctcactacaacctccacttcctgggttcaaatgattctcctgcctcagcctcccaagtggctgggactatttttgtatttttagtagagacagggtttgccatgttggccaggctgctctcgaactcctggcctcatgtgatcttctcgcctcggcctcgcaacgtgctgggattacaggcgtgagccagcatgcctggccactaatttttatatttttagtagagattgggtttcgccacgttacccgggctggtctcgaacttctgacctccagtgatccacctgcctcagcctcccaaagtgctgggagccactgtccccggcctcgtctcctactttctttgctccaaggtaggattagaagtagaaactggagccaggagctatagtgccagctacccgggaggctgaggtgggataattacttgaacctgagaggcagaggttgcagtgagctgagattgcgccactgtgctccagcctgagctacagagcaagactctgtctcaaa

SEQ ID NO: 22472 - DNA, 588 bp, Homo sapiens
taggcttttagcagcccaaagccatagcttttagtttctctctctagtgataagtggaaaagagggatgaggaagaggctttgccggcccaaccagaaacaaactaagaacccatgactgcattctctccctttaacacccctgtttaggggaaactgaaactgggtaaggagaatatgggtcctctttgtactatctttgtaacttttctgtaaatctaaaaatatttcaaaatgaaagttcattttagaaaaagaagggagtattatgaataactttacaattttgacaaattaggtaaaatgaacaaattccttgaattacagaaagtgactcaagaagaaatagaaaaatggcactatttctattaaagaattttaaatctgtaaaactttcccacaaagaaaaccctaggcccagagagcctccctggtgaattctatcatatatttaagaagaactaacacaatcttatcaccaactttttcaaaaaacagaagtaaaaggaagatgtctcatcttattttatgaggtcagctttaccccaacttgaaaaccagataaataatttacaaacaaaaaaaaaaa

SEQ ID NO: 22473 - DNA, 1186 bp, Homo sapiens
aaatgagacgtccaaacacttgagtttcttaagattgggatctctttcaaatgaaaaaggacagagccaagtagagaaaagactttgtgctcccacccagccttaatgagtctcatggtctaaaagtataggaagaaatgaaatgcactttcagaagctaaaatgacagtgtctgctacaaaaggctgtagttgtaggcagtcggggatgccatgtccttggttccattcctgcgtgagtctgcagaaggcacacactttgtaagagtagagtggactagtgccagcctgaataggtttaaaactgcaaacagttggagaacatggaacaggttggtgcaggaagcctaagattttgcaatcatattataacattggcttttgacaacataaatgttgtatcttccctaaggtcaggtcggggaaagaaagacttccagcttcttacctctgcgtgcatgggcacgtgtgcattgctcagtccgcaggaggtctcactccgcaggaaacgctctcctcccgcataagtctgtacttccatcccctcatctgtggtagtagtgaaggctaggtgagtaagcgtgggctgttctacccaccagaagtccaggagctgttgtatacctcatttctaactcgtgaccgagtgacttgctttaactttctcgaaatcctacagagttgccaagtctgccctccctcctcagtcatgttaaactctggcctatagcatcatgggacctgtagcctagggtgggaccccctaaagcctctgaatgtcgctgcttaaaagctactgcaaactgagggcaaattgcaatcttctattcctttttgttgcaaggggtcttcacaggtctcttaacatctgctttccctgccaccctgcctttaggggctggccagctatccacacccctaacccaccctgtgtttctgacagctggccacacgtcaacttctgtacttgccttttccttggtggggtagaggccaaccccttctcctctgaggcctcagggttctgtttcttttcaggactttgggtagaagggaagacaccaaaggctcctttaagctgactgctgcatacacatttcactttttttcctttgacatgaccaaaaatatccattaaaggtattaataataataatattatttgcccctttttccgggccctctgc

SEQ ID NO: 22474 - DNA, 3441 bp, Homo sapiens
aaatgagacgtccaaacacttgagtttcttaagattgggatctctttcaaatgaaaaaggacagagccaagtagagaaaagactttgtgctcccacccagccttaatgagtctcatggtctaaaagtataggaagaaatgaaatgcactttcagaagctaaaatgacagtgtctgctacaaaaggctgtagttgtaggcagtcggggatgccatgtccttggttccattcctgcgtgagtctgcagaaggcacacactttgtaagagtagagtggactagtgccagcctgaataggtttaaaactgcaaacagttggagaacatggaacaggttggtgcaggaagcctaagattttgcaatcatattataacattggcttttgacaacataaatgttgtatcttccctaaggtcaggtcggggaaagaaagacttccagcttcttacctctgcgtgcatgggcacgtgtgcattgctcagtccgcaggaggtctcactccgcaggaaacgctctcctcccgcataagtctgtacttccatcccctcatctgtggtagtagtgaaggctaggtgagtaagcgtgggctgttctacccaccagaagtccaggagctgttgtatacctcatttctaactcgtgaccgagtgacttgctttaactttctcgaaatcctacagagttgccaagtctgccctccctcctcagtcatgttaaactctggcctatagcatcatgggacctgtagcctagggtgggaccccctaaagcctctgaatgtcgctgcttaaaagctactgcaaactgagggcaaattgcaatcttctattcctttttgttgcaaggggtcttcacaggtctcttaacatctgctttccctgccaccctgcctttaggggctggccagctatccacacccctaacccaccctgtgtttctgacagctggccacacgtcaacttctgtacttgccttttccttggtggggtagaggccaaccccttctcctctgaggcctcagggttctgtttcttttcaggactttgggtagaagggaagacaccaaaggctcctttaagctgactgctgcatacacatttcactttttttcctttgacatgaccaaaaatatccaaatatttaagtttattattattattattattatttgacaatcttatatccaatgggctctctagaagctgcatccccagccctttcaccttttctttgaatgtagttcccaaccttcaattcccacccctaatgctgacaaaaagcttagccaggtcatgatactgctgctataagccaggggagggtggtttctttgttttgttttgttttgttttgtttttcaaatttccagccaaaaccaaagatttcttaatgattgtataaactcaaaacaaacaaaagaaccaaagaaaagggaagtcttcagcatcagtccagtctgtggtgtcctggcacttagaagagtgaggccagggaaggtggggcggggggaccctctgactggatcagaaagggcaggcaagctgcttaccaccttccagggtccagcacaggtgcatgcccctagctttggccctcacaaacttgtgagcatgccctgaaacaaattggcatttcagattttccaaaacaaaagtcaaaaaaccccatcaccaccatcatccaccctacaccaaccagggtcactatggggacttagcacagggcctagggagggtgggagctgctgctggactggcccgaggactccacagagtgggggacgttgaagacactggcgcacgattggctgctctgctgggtgctttaacctctggggctgggcgaatgcacgccacggtgcccttctgagcctttttttcttttcctgtactggaactgcttggaagtggctgtcctgtttgtgagaaaacatgcagaaagattatcaagcttttcatttctctttattgtagttttctttcctttttgcagcaccactgtgcaactatgcattgtacttcacaaccttttgtgctaggtagatgcctgtgactttttaacttggggggtggggggattgcaaatgaaggaactttttacatggatctttttaatctcagttggttgggggaggggggtacttggttcttgggtcacacaagctctatcccaaagcaaaatccaaatgttaataatattagcctgatgcagataccaaagataatttctttcctgcagaaccttagactcgtgtattaagtacgattacccagcacttgcattagtctaacctcagtaattccaaagcttagatgtatattttggtatatttctgggatattaaaaaaaatgtcgtttaacttcttgtttgtttcagtgtaatgctcttaaagtcatagcatgaaaataattgaactgtcctattcttagtagtttgaaataatagtatttttgtatgttttgggtgtgtctatgtatgtattaacataacagttttcactgcctaggtgttcataataaaaaagaaaatgaaaaaagttctgagtgtacataatattcaataataatctcccaccaggtgtcaatttagattgcatattcctcattactgttcccaactgggattttgttttcttttaaagagacagtgatcgtgtttttctaaagatgttttctttctctctttcaatatcttaactcactttttttttcttccttttttgtcttaattattaattcaggggtgtttgtccactgttgtcaaaggaggggcacaaggggaattggcccccggcctcctagaactttttgttttatgtactttaaaatgtgagtttgagttcttctttgtggaaacttaagatgtggtgtaaatgattctttccaaaattgtccagcagcttgaatgaggcagtgacaattctgaggtggtttattgggagtccttctacatttctcttagataactctgcactctgggtggctattgtgtagccttactgccccagagtgcctgttagccaaatatttcccctctgataggaatattttctaagaatcagctgataacttgcgtgctggaccttgttatctgtgcccctgggagacacacgttttcttggttttgaaaacctgaaacacaggcaactttacattttggggaattagctgatgcctcctgaagcctgaggaggtggcggggaatatgagcggtgctgtctctctcaaaagtgccctttagatgattccccctcctagggctgcctgcaggggctgtaggcttgggaaagattgtgtaggtgacagtgaatcagaatgaagtggtagattttgtgtagatgcatttgtctgctgtaattttttatatatatattaaacttactgtaactgtacagttcatttctgttgtaaaacatcattaaaccatcttccaagtgttttca

SEQ ID NO: 22475 - DNA, 3209 bp, Homo sapiens
gaagattctttgcctggtgtaattgtgactcatgtgtcagttcatgatgtggatttgaattcagctttcatattcagttttgccaaagagagtaatcctggaaccaagtttgctattgatcagaacactggagtggtggtgttggtgaaaacattggattttgaagaaatgactgaatatgagctgctcatccaaatttctgattcagtgcactacacagagggagcacttgtagtccgtgtgctggatgtcaatgataatccaccagtgttttctcaagatttctatcaggtcacagttcctgaatcaatacctgtggggtattcagtgctgactctgtcagccacagacttagaaagcaatgagaacatttcttacagaattctatcctcttctaaggaattctccattgatcctaagaatggcacaatatttactatcagtcccgtattacttctggatacaatatcaacaactcaatttcttgtggaagccagtgatggtggaaatcctgacctgagagctcttactttagtggagataggaatagaagatatgaacaattatgcccctgaattcacagtcaaatcctataatcttagcctaagtgaggatgctctggttggaagcacgcttgttacattttcaaacatcgaccatgactggacccgtgaaaacacatatgttgaatattccatcatcagtggtaattcacagaacaattttcatgtggaaactaagttctttcattcagaatatccttataagcaagtcggttatcttgtgttgcttcacagtctggacagagaagcaagtgctagccatgagcttgtcattctggcatctgacagtggctgccctccattgagttccacagctgtcatatcaatacaagtacttgatgtcaatgacaatcccccaaacttcagcagcctgagctatcacacccatgtcaaggaaagcacccctctagggagtcacatcactgtggtctcagcaaatgaccgtgacacagggtcacatgcagaaatcatctacaacatcatctctggaaatgagaagggacatttttacttagaagaaaacactggagttctttatttgattaaacctctggattatgaaaaaatgacaaaattcaccttaactgtccaagcttcagatgcagaaaagaaacatttttcttttgcagttgtgtttgtcagtgtcctggatgataacgaccatgcacctcagtttatgttctcaagcttcagctgtattgttccagaaaatctgcctatttcctctaccatatgctctataaatgctctggattttgatgctggtccgtatggagaattgacctattctattgtatcaccctgttttctcactcatggaatgtcttatgatcatgatctcttcctcattgaccctttgacaggggatattcatgctaagcaaatccttgactatgaaaatggcaataaatactgcctcacagtccaagccaaagacaaaggtgatgcaactgcctccttagtggtctgggtggatattgaagggatagatgaatttgagcccattttcactcaagatcagtattttttcaccctcccagaaaagaataaagacagacagttgattggcagagtggaagcctcagatgcagatgctggtattgatggagtcattctttactcccttggaacctcatctcctttcttttcagtaaatagaaccaatggaaatatttatttgattagagcccttcccctaataaaaagtcaactcaacaaagaagacaccttggaaatgaaaataatcgctcatagtcccaaatcagattccaagtttgcatcttgcactgtttttgtgaatgtgtctttctcctctgaaggaacacccttggcagtgttcgccagcagcttttcaatcagcctggtggtctcctttttagtgtttctgatactcatctgcattctaattgtaatgattttaagacataaacaaaaagacacaataaacaattatgaggagaagaaaacctcatctttagatgcggacttgagagtgacccgggatgccagtgtgctcaaagccttccagaaaactgacgactgcagtaacgaggtggtccctgtggatgccactccggaatggttgagtttaataagtatcatggagaaggatattgtcaatctgtacagatactcaaactccagtggccactgttctgtggaaggagaaactgcagaagataaggaaatccagaggataaatgagcatccctacagaaagtgctcagactcagctctgagtgaccacgagtccagggtgccagactcgggtatcccgagggactcagaccagctctcctgcctatctggggaaactgatgtgatggtgactgccgaaacagcagaagccagccaaacatttggggaaggagatcaaggggaaggctgcagcaccacctgtgctcaaaataatgtgttaccccagacagttcagaagagagaggcaaaagagagcatcctggctgacgttagaaaagagtctgtctttatttcaggtgatcaggaagtaaggtgtgcagctctttcaactcagacgacctctgatcatgatggaaaagacaactatcactggaattatcttcttagttgggagcccaaattccaacctcttgcctcagtatttaatgatattgcaaaactaaaggatgaacatttgcatatgcctggcattccaaaagagaagaaatcttttgtttttccaccccctttgataacagcagtagcccagcctgggattaaagcagtcccaccaagaatgccggcagtaaacctggggcaggtgcctccgaaacacccacgctctcccatcccctaccatcttggttctctgccagaaggcatgactcccaatttttctccatctctttccctattgacgatgcagcctcctgccttgtctccactgttgagagaaggagaattattaggaacacacatcagtggtacatgccatgaacttaaagcagaagatgaagttcaaatatgaaaccactgggatgccaagtacctgctcaccattggtcatgaatgaatgaacaaaatgttttcaagccggcaactcgagattgggctcatttttatctaaaagcaagtgatgtaatttagttagagtttttaaaacttccccattaaagtttctccaatttc

SEQ ID NO: 22476 - DNA, 2532 bp, Homo sapiens
gctgggtgatctacggatccttgtaagtggtaattcacagaacaattttcatgtggaaactaagttctttcattcagaatatccttataagcaagtcggttatcttgtgttgcttcacagtctggacagagaagcaagtgctagccatgagcttgtcattctggcatctgacagtggctgccctccattgagttccacagctgtcatatcaatacaagtacttgatgtcaatgacaatcccccaaacttcagcagcctgagctatcacacccatgtcaaggaaagcacccctctagggagtcacatcactgtggtctcagcaaatgaccgtgacacagggtcacatgcagaaatcatctacaacatcatctctggaaatgagaagggacatttttacttagaagaaaacactggagttctttatttgattaaacctctggattatgaaaaaatgacaaaattcaccttaactgtccaagcttcagatgcagaaaagaaacatttttcttttgcagttgtgtttgtcagtgtcctggatgataacgaccatgcacctcagtttatgttctcaagcttcagctgtattgttccagaaaatctgcctatttcctctaccatatgctctataaatgctctggattttgatgctggtccgtatggagaattgacctattctattgtatcaccctgttttctcactcatggaatgtcttatgatcatgatctcttcctcattgaccctttgacaggggatattcatgctaagcaaatccttgactatgaaaatggcaataaatactgcctcacagtccaagccaaagacaaaggtgatgcaactgcctccttagtggtctgggtggatattgaagggatagatgaatttgagcccattttcactcaagatcagtattttttcaccctcccagaaaagaataaagacagacagttgattggcagagtggaagcctcagatgcagatgctggtattgatggagtcattctttactcccttggaacctcatctcctttcttttcagtaaatagaaccaatggaaatatttatttgattagagcccttcccctaataaaaagtcaactcaacaaagaagacaccttggaaatgaaaataatcgctcatagtcccaaatcagattccaagtttgcatcttgcactgtttttgtgaatgtgtctttctcctctgaaggaacacccttggcagtgttcgccagcagcttttcaatcagcctggtggtctcctttttagtgtttctgatactcatctgcattctaattgtaatgattttaagacataaacaaaaagacacaataaacaattatgaggagaagaaaacctcatctttagatgcggacttgagagtgacccgggatgccagtgtgctcaaagccttccagaaaactgacgactgcagtaacgaggtggtccctgtggatgccactccggaatggttgagtttaataagtatcatggagaaggatattgtcaatctgtacagatactcaaactccagtggccactgttctgtggaaggagaaactgcagaagataaggaaatccagaggataaatgagcatccctacagaaagtgctcagactcagctctgagtgaccacgagtccagggtgccagactcgggtatcccgagggactcagaccagctctcctgcctatctggggaaactgatgtgatggtgactgccgaaacagcagaagccagccaaacatttggggaaggagatcaaggggaaggctgcagcaccacctgtgctcaaaataatgtgttaccccagacagttcagaagagagaggcaaaagagagcatcctggctgacgttagaaaagagtctgtctttatttcaggtgatcaggaagtaaggtgtgcagctctttcaactcagacgacctctgatcatgatggaaaagacaactatcactggaattatcttcttagttgggagcccaaattccaacctcttgcctcagtatttaatgatattgcaaaactaaaggatgaacatttgcatatgcctggcattccaaaagagaagaaatcttttgtttttccaccccctttgataacagcagtagcccagcctgggattaaagcagtcccaccaagaatgccggcagtaaacctggggcaggtgcctccgaaacacccacgctctcccatcccctaccatcttggttctctgccagaaggcatgactcccaatttttctccatctctttccctattgacgatgcagcctcctgccttgtctccactgttgagagaaggagaattattaggaacacacatcagtggtacatgccatgaacttaaagcagaagatgaagttcaaatatgaaaccactgggatgccaagtacctgctcaccattggtcatgaatgaatgaacaaaatgttttcaagccggcaactcgagattgggctcatttttatctaaaagcaagtgatgtaatttagttagagtttttaaaacttccccattaaagtttctccaatttc

SEQ ID NO: 22477 - DNA, 3224 bp, Homo sapiens
tcatttttactgctttcatttggcttgaatatcaacaagtatttccagaataagtatctttatgccagaatatctttatacatgtgtttgtgggtagtagaatggggtataaattttacaaacaaaaatattttttaagaatagtggaacaacttactatacaaaaacaaaattcagaggaatttgtggcaacagcaacctcaagcagcacacatatttcacagagtgaatgtcatgaatattatttctgtatcttacatgttataaacatataaatacaataatttgtatttctatttggagtcattgttcattgtgacttaacagatctaacaaagaattaaacacatattagtagacattggatagtcaactgccgattaaatggatcatcaaaactgcacctcacagtgttgaaatactatgtcttatttttcaggcacaatatttactatcagtcccgtattacttctggatacaatatcaacaactcaatttcttgtggaagccagtgatggtggaaatcctgacctgagagctcttactttagtggagataggaatagaagatatgaacaattatgcccctgaattcacagtcaaatcctataatcttagcctaagtgaggatgctctggttggaagcacgcttgttacattttcaaacatcgaccatgactggacccgtgaaaacacatatgttgaatattccatcatcagtggtaattcacagaacaattttcatgtggaaactaagttctttcattcagaatatccttataagcaagtcggttatcttgtgttgcttcacagtctggacagagaagcaagtgctagccatgagcttgtcattctggcatctgacagtggctgccctccattgagttccacagctgtcatatcaatacaagtacttgatgtcaatgacaatcccccaaacttcagcagcctgagctatcacacccatgtcaaggaaagcacccctctagggagtcacatcactgtggtctcagcaaatgaccgtgacacagggtcacatgcagaaatcatctacaacatcatctctggaaatgagaagggacatttttacttagaagaaaacactggagttctttatttgattaaacctctggattatgaaaaaatgacaaaattcaccttaactgtccaagcttcagatgcagaaaagaaacatttttcttttgcagttgtgtttgtcagtgtcctggatgataacgaccatgcacctcagtttatgttctcaagcttcagctgtattgttccagaaaatctgcctatttcctctaccatatgctctataaatgctctggattttgatgctggtccgtatggagaattgacctattctattgtatcaccctgttttctcactcatggaatgtcttatgatcatgatctcttcctcattgaccctttgacaggggatattcatgctaagcaaatccttgactatgaaaatggcaataaatactgcctcacagtccaagccaaagacaaaggtgatgcaactgcctccttagtggtctgggtggatattgaagggatagatgaatttgagcccattttcactcaagatcagtattttttcaccctcccagaaaagaataaagacagacagttgattggcagagtggaagcctcagatgcagatgctggtattgatggagtcattctttactcccttggaacctcatctcctttcttttcagtaaatagaaccaatggaaatatttatttgattagagcccttcccctaataaaaagtcaactcaacaaagaagacaccttggaaatgaaaataatcgctcatagtcccaaatcagattccaagtttgcatcttgcactgtttttgtgaatgtgtctttctcctctgaaggaacacccttggcagtgttcgccagcagcttttcaatcagcctggtggtctcctttttagtgtttctgatactcatctgcattctaattgtaatgattttaagacataaacaaaaagacacaataaacaattatgaggagaagaaaacctcatctttagatgcggacttgagagtgacccgggatgccagtgtgctcaaagccttccagaaaactgacgactgcagtaacgaggtggtccctgtggatgccactccggaatggttgagtttaataagtatcatggagaaggatattgtcaatctgtacagatactcaaactccagtggccactgttctgtggaaggagaaactgcagaagataaggaaatccagaggataaatgagcatccctacagaaagtgctcagactcagctctgagtgaccacgagtccagggtgccagactcgggtatcccgagggactcagaccagctctcctgcctatctggggaaactgatgtgatggtgactgccgaaacagcagaagccagccaaacatttggggaaggagatcaaggggaaggctgcagcaccacctgtgctcaaaataatgtgttaccccagacagttcagaagagagaggcaaaagagagcatcctggctgacgttagaaaagagtctgtctttatttcaggtgatcaggaagtaaggtgtgcagctctttcaactcagacgacctctgatcatgatggaaaagacaactatcactggaattatcttcttagttgggagcccaaattccaacctcttgcctcagtatttaatgatattgcaaaactaaaggatgaacatttgcatatgcctggcattccaaaagagaagaaatcttttgtttttccaccccctttgataacagcagtagcccagcctgggattaaagcagtcccaccaagaatgccggcagtaaacctggggcaggtgcctccgaaacacccacgctctcccatcccctaccatcttggttctctgccagaaggcatgactcccaatttttctccatctctttccctattgacgatgcagcctcctgccttgtctccactgttgagagaaggagaattattaggaacacacatcagtggtacatgccatgaacttaaagcagaagatgaagttcaaatatgaaaccactgggatgccaagtacctgctcaccattggtcatgaatgaatgaacaaaatgttttcaagccggcaactcgagattgggctcatttttatctaaaagcaagtgatgtaatttagttagagtttttaaaacttccccattaaagtttctccaatttc

SEQ ID NO: 22478 - DNA, 382 bp, Homo sapiens
gagggaaatttatagttgtaaatctatacatgaaagaaaaatactgcaaacagtggattagtgtcccctacgattgcagacttgtattattacttcttcttctactaattttttttttttttttttgagatggagtctcactctgtcaccaggctggagtgcagtggcgtgatctcagctcactgcaacctctgcctcctgggttcaagccattctcctgtctcaacttcccgagtatctgggaccacagacacacatcaccacacccagctaatttttgtattttttagtagacacggggtttcaccatgttggccaggatggtcttgatctgttgacctcaggtgatccgcccgccttggcttcccaaagtgctgggatt

SEQ ID NO: 22479 - DNA, 378 bp, Homo sapiens
cagcaagactgaaactgttaaggagccatgaaggaagaagcagcagcaaaagaagagaaagaagaatcttatgatgaagctgcagtagaggaagaagaagaaaaacagaaaccaaagactaaaaaagttgaaaaaactgtctgtgaatgggaacttatgaatgatatcaaaccaatatggcagagaccatccaagaagtagaagatgaatacaaagctttctgcaaatcattttcaaaggaaagtgatgaccctgtggcttgtattcactttactgctgaaggagaagttaccttcaaatcaattttatttgtacccacatttgttccacgtggcctatttgatgaatatggatctaaaaagagcgattacattaagc

SEQ ID NO: 22480 - DNA, 441 bp, Homo sapiens
gttagcttcgatggcaaccatatgggaatctaaattgcgttttgaattacagggagatggtaggaagaaagctaaatatggttatgaaagtgtcatatgggaaaagtgtaagaaaggtataaagtggggaaagtaattgaatataggcttgcttagtgtggccactccctctgtggggcagtatgaaggcgcagaagcattctcacttgatatactccgcagattgaaatgaagccaagtggggagaagttggaaaaccaaatcatgtttcaaccaccataaacttgccaaaatgttgcactcatttagatgggtcactttgttttaatgtccacagtaataggtagtccctggcaaaaggtgaaagcaatctgcatttttaacagaacttttcactaatgatgtttttcttgtaagcaccccaaagagtcttccaagaat

SEQ ID NO: 22481 - DNA, 253 bp, Homo sapiens
gctatatatagatatagatactatatatatagtacctatatatagtgtgtgtatatatctacatataggatcatatattcatagatgtataggctatatatctatacactatatagtacatatgaatatatatcttatatatcatatatatccatatatatgatatatattcatatgtgctatatagtatatagacctatatatctcactatatatccataagtagtatatctatatctatggatatatatat

SEQ ID NO: 22482 - DNA, 811 bp, Homo sapiens
attttaaagctatatagcactttgacctactttttttttactttagaacgactaaactgattaatttatcaatgttaatccttcctctttgtgtaaatgtagttgacagccctttgggagaggtgttggagatgctaactgtctacaattcaatccacctattgatgtgttgatggaatgctaggcttaggaagggtactcataacccctgttatgatgtgtaaaaaaatccaggaaggtacagaagtacttttgaagtcttgatcaaatgaagtaaggggagctataacttcaaaacacattccatttaaatccaacaaggtctaggttaatatttttactaagaagtgttgtctacatactataaaattttggttgaccgttccctagtagatgacaacttcacatggctatttcctgaataaactcagagaaggtgattctagagaaagcttaccaggagaaatagatgtgttttagaagtggatactttctggaaatgtttatgtttaaaaatacttttccccaaattctctgtcttgtatgatctttgattttgctgactttggtcagtccattttcagggatgtaaactgtgcgattgatgaaggattattgtatggaacttacagacactatactttctttttcacagaagaagtacattgttttttctctaaactttaggggaaaatacctaaaggacctaaagactaaagaacaaaattaaaaaacacaagtagctattgccagttttgatctctatatttgacataaaaaaggaaataaattgatatattttaaaaatgca

SEQ ID NO: 22483 - DNA, 452 bp, Homo sapiens
ctaatttgtaagcaaactattggaacaaagtctatttgtaaattgactgccttttctaaaatgcaccaggtgttatttttttcatgtgttttccatgaatccttaaacgcatttcattattggatgttgataatattttaattaactggtgatcatttaggtcatttctacctctaaaatttctatgattcggttagagcagagatttttggcaaatgatttagttgaattaaggtttctaaagttttaatgttcaaagatatggcacttcaatcaatattttcttgtatagacaagttaggtttattttgggaggaaattttttaaaaaataatatcctgcttctttcttacagaatttagtacacatgggcttaaggaagaatttattgtaaaaataaaatttttcttttacaatgttattacttgttttttagctttcaagaccatagg

SEQ ID NO: 22484 - DNA, 5456 bp, Homo sapiens
ggggcggtgaaagaagtttgctgacgaagatggcgactgaggcacagagtgaaggggaggtgccagcccgcgaatccggccggagtgatgccatctgcagttttgtgatctgcaatgattcttcccttcgaggtcagcccattatctttaatcctgacttttttgtggagaaactccgacatgagaaacctgagattttcactgagttggtggtcagcaatatcacaaggctcatcgatttacctggaactgagttggctcagctgatgggggaagtggaccttaagttgcctggcggggctggcccagcatcaggattcttccggtctctcatgtctctcaagcgaaaggaaaaaggagtgatatttgggtccccactgacggaggaaggcattgcccagatataccaactgattgagtatctacacaaaaacttgcgagtagagggtttgtttagagtaccgggtaatagtgtccgacagcagattttaagggatgctctcaataatggaactgacattgacttggaatcaggggaatttcactcaaatgatgttgccactttgctgaagatgtttctaggagagttgccggagcctctgctgacacataaacacttcaatgcacacctcaaaatcgctgatttgatgcagtttgatgataaaggaaacaagaccaatataccagacaaggaccggcaaattgaggctctccagttgctcttcctcattctccctcctcctaatcgtaatttgctgaagttattgcttgatctcctataccagacagcaaagaaacaagacaagaacaagatgtcagcctataaccttgcccttatgtttgcaccccacgtcctgtggccaaaaaatgtcactgcaaatgaccttcaggagaatatcacaaagttaaacagtgggatggcttttatgattaaacactcccagaaactttttaaggctcctgcttacattcgggagtgtgcgagattgcactatttgggatccagaactcaggcatcaaaggatgaccttgacctcatagcttcatgtcatactaagtcctttcagctggcaaagtctcagaaacggaaccgggtagattcctgccctcaccaggaggagacccagcaccatacggaagaggcactgagagagctgtttcaacacgttcatgatatgccagagtcagcaaagaagaaacaacttattagacagtttaataagcaatcattgacccagacaccagggcgagaaccttctacttcccaggtacaaaagagggctcgttcgcgctccttcagtgggcttattaagcggaaggtcctgggaaatcagatgatgtcagaaaagaaaaagaagaaccctactccagaatctgtggccattggtgaattgaagggaaccagcaaagaaaataggaacttattattttctggctctccagctgtcacgatgacaccaacaagattgaagtggtctgaagggaagaaagaggggaaaaaaggatttctctgaaggatccagagttgtctcctatggtccatgcagaattttctgtttagtgggcaggtgttattcctgcccacagcaaagcttggacttgcagcttgcttgctgcattttgaattgtcaaagccaactaataccgtgacccgactgatacctctaaccccactcactggatgatgtttgcaagctgtgccttctgagagagtgcttaggccctgtctctcttttttaatattatggggaaaccactaactatccaaccagcttatacagcacactaaggtgggcttcagtgctcactcaatgtgtttaggcagattccacttttgaaaaaaaatatgaaatgtgtgctcaactgccagtaattttttaaaaagcactgtcccagtggattgatgttgtttttaatggatattttgggtttttctctgttttgatagtattgggtatttggttgtttttgtttgtttatttctttgttttaaaagccatgtttttggttgggctctaagctagatatctttccctctttttcactttgagctttgggaaaactctttatcttatgaggctgtattcctcaatacctaatttgtgtccaaagaatttatagcttttctggacattttttattatttcttgggtgtgacatcagagtatttgacctgcagtattgaaaaaggagaattcagaatgatacagtattttaacaaatcttaattattaaactcttttccttccttccatttctccctcccttgtccatctctctctctctttccctttcctcagtgatgtgaaaataattgtgttttgctgaacttgttatcttcattcaatttcctcttgactaaaacatctctggtgccaacgtaatacttctgaaccaaatcactgtgactcaaggaaagtcactgacagcataagagaagtttgctaaaatatttgtatgtgggggaagctctggagtgtgcctaggagggggctggctgcctttatgtcccaggatgactctttatgggtgggattacattgcaccctctgagggtgcaggctagaccgtctcctgagaggaagttaggatcagaaagaagaagcaagcagcagcctctgcagggctgacaggatttaaaggagagaatgttcttatttggaagcagctgtggcttgtcaccaatgttcaaggagtgttactgttccgccctctctttgtcagaagggacacaggtggtaatttggagatggggccagagcttctggctttggatttggtgtgttcacttgtgttggatagagcagtggcatggctttgacctagtatgaactggtgtctgcccagagagcagcatgtagcaggggggaatgctcaggtttgtgcctggctctgtggagctgtacaacccttctcaccctgtgggttggagccgagtcaggccactatggggaagcagttgccccacaaaatgtggtttgctgacctatttctaaactgttgaatatgctgcaccattgctgaaatgaaagatgactctgggggagcagagcttggccttgtgcccagctggcagccccctctgccagcctttctgctgcttttgctgctgtaacagcaatagtggagaaaaatgtaaaatttggtcttccagcttaatgcagtgtgaacaatagatggttaggaaaacaaaactgcttagaagcccctttctctagagcagttttatgtcatttgtaaaaacacatattagcaaattcgtttgcgtaggtttctattaaatatttgactttttttttcttattaagaaaatgaaatcccttacaccagatatcagttaattcaaacagaaaaccctttgggtatcaccaaattgaaatggtattcttccttaactcttccttctttcctttatttgtttagacgtgcttcatcccgaagtggtgctatggtctgttaaacagggctggcatcaggtagagggagcagagtggtgacctgatagctcctgtcatcgtgttagtttttgattctatttaagggaagtagctgagatttagacggatgtagatgctctttgggtgaatggaatcataagcaaaggttgtgttctggggtgaggatcatgagagagatatttatcacatgcacatgcctttatatagctggtctccttgggtggtttatgtgtgttttgtttatttattgaatatgttttcccttgctttaggggttttataggtcatttttcttaatagaagctgtgatcgacttagaatccaaatttgaggagtaagcagcataaccttctaccttgtaatatgtaactattctaatccagtggaatcttacggaaaacacagagaaaaccccttttatcatttgccacagaaggctgctgtctcccttctgatttggtgggcaggtattgtttttgagccagtatttaacagagttttttaatctataagattttttttgaatctatttcattgtgtttgtttttcatgttggaacaatctctctggaagtgcctcttcttgtggcttttacaacttcatttctttctggggtcacctgtgatgggctttgatgtggtgtcaatttggggccttgtgtttgtgccagagggatacacatattaaactgcaggccaccttcctggtccagactgtactgtgtgaaccccactgactaaattagtgagaaccataggcgttggaatttctcaccttttacaatgatagacttttgcattgggaccaatgaatctggtgtgaaaaaccctgctgtagtagtgaaagagcatcaggagatactgactgtacctgagggccaaaacaggagcaggtaacgaaccgtaaaaaaaggagcaggtaatgaatcgtaaccaaaactacagttgatcctccgcaaaggaaagctctttacccagaatgtccttccagagtcattcaggaaggacaagggaacacccttgggaaatgggctagtggagggctgttgactgcagtgacacctgggtgctccggaggtatctgttctgttgacctgtaaggaagcagtcgatcctagagtgtcagaacagagccattctctcctcctgagtaggaacgtttctgttcagtttccctcacagcagcctgtgttagcatgcagttgaaaatactgccgtctaggagaacctgtggtcactgggaacgtgccccacagtgactggccatgcaaccaggtgatttttaggaatagatgtctctagactctgtctcctttcctacaaggcctcacacagatgcttgaggctaatggcccccattctgaggtcatttttgtgtagaactcctttccccaggagagagccttatctctgccctcctttaccctgaaggcttcaaacggaagacaggacctagatctaaacctagatactagcattttgtgggattgtctagaatttggggaagatttgggttcctaagatgcacaagcgttttacaccagtggtgattaactcaactaaaacccactgtaggaagttagcttccccagacagctaatgccgagatcttctaccagcgtagagttgacagaagcaggccagcgaggaggtgtgggacataatagcctgagtgcttgggttaccatggagactggagtgtgtgaggccacagcctgtgctaaagagccatggagccctcccctggccatgtctggggacagatagaacctgttgggggaaatattccctcaccccagggttctttctgcagagcaagggttgcctttgtcctatccctgagcttgctcaacaagagaaacaaggtttcttaagtgttttggttaaagttttcattcttatttgactatgtatatgtaattgtaaagaaacgatcctatgcattgtctttcttttatattcttgtaatattctgaaattaaaattgttttgtttcata

SEQ ID NO: 22485 - DNA, 5237 bp, Homo sapiens
ggggcggtgaaagaagtttgctgacgaagatggcgactgaggcacagagtgaaggggaggtgccagcccgcgaatccggccggagtgatgccatctgcagttttgtgatctgcaatgattcttcccttcgagaaaaaggagtgatatttgggtccccactgacggaggaaggcattgcccagatataccaactgattgagtatctacacaaaaacttgcgagtagagggtttgtttagagtaccgggtaatagtgtccgacagcagattttaagggatgctctcaataatggaactgacattgacttggaatcaggggaatttcactcaaatgatgttgccactttgctgaagatgtttctaggagagttgccggagcctctgctgacacataaacacttcaatgcacacctcaaaatcgctgatttgatgcagtttgatgataaaggaaacaagaccaatataccagacaaggaccggcaaattgaggctctccagttgctcttcctcattctccctcctcctaatcgtaatttgctgaagttattgcttgatctcctataccagacagcaaagaaacaagacaagaacaagatgtcagcctataaccttgcccttatgtttgcaccccacgtcctgtggccaaaaaatgtcactgcaaatgaccttcaggagaatatcacaaagttaaacagtgggatggcttttatgattaaacactcccagaaactttttaaggctcctgcttacattcgggagtgtgcgagattgcactatttgggatccagaactcaggcatcaaaggatgaccttgacctcatagcttcatgtcatactaagtcctttcagctggcaaagtctcagaaacggaaccgggtagattcctgccctcaccaggaggagacccagcaccatacggaagaggcactgagagagctgtttcaacacgttcatgatatgccagagtcagcaaagaagaaacaacttattagacagtttaataagcaatcattgacccagacaccagggcgagaaccttctacttcccaggtacaaaagagggctcgttcgcgctccttcagtgggcttattaagcggaaggtcctgggaaatcagatgatgtcagaaaagaaaaagaagaaccctactccagaatctgtggccattggtgaattgaagggaaccagcaaagaaaataggaacttattattttctggctctccagctgtcacgatgacaccaacaagattgaagtggtctgaagggaagaaagaggggaaaaaaggatttctctgaaggatccagagttgtctcctatggtccatgcagaattttctgtttagtgggcaggtgttattcctgcccacagcaaagcttggacttgcagcttgcttgctgcattttgaattgtcaaagccaactaataccgtgacccgactgatacctctaaccccactcactggatgatgtttgcaagctgtgccttctgagagagtgcttaggccctgtctctcttttttaatattatggggaaaccactaactatccaaccagcttatacagcacactaaggtgggcttcagtgctcactcaatgtgtttaggcagattccacttttgaaaaaaaatatgaaatgtgtgctcaactgccagtaattttttaaaaagcactgtcccagtggattgatgttgtttttaatggatattttgggtttttctctgttttgatagtattgggtatttggttgtttttgtttgtttatttctttgttttaaaagccatgtttttggttgggctctaagctagatatctttccctctttttcactttgagctttgggaaaactctttatcttatgaggctgtattcctcaatacctaatttgtgtccaaagaatttatagcttttctggacattttttattatttcttgggtgtgacatcagagtatttgacctgcagtattgaaaaaggagaattcagaatgatacagtattttaacaaatcttaattattaaactcttttccttccttccatttctccctcccttgtccatctctctctctctttccctttcctcagtgatgtgaaaataattgtgttttgctgaacttgttatcttcattcaatttcctcttgactaaaacatctctggtgccaacgtaatacttctgaaccaaatcactgtgactcaaggaaagtcactgacagcataagagaagtttgctaaaatatttgtatgtgggggaagctctggagtgtgcctaggagggggctggctgcctttatgtcccaggatgactctttatgggtgggattacattgcaccctctgagggtgcaggctagaccgtctcctgagaggaagttaggatcagaaagaagaagcaagcagcagcctctgcagggctgacaggatttaaaggagagaatgttcttatttggaagcagctgtggcttgtcaccaatgttcaaggagtgttactgttccgccctctctttgtcagaagggacacaggtggtaatttggagatggggccagagcttctggctttggatttggtgtgttcacttgtgttggatagagcagtggcatggctttgacctagtatgaactggtgtctgcccagagagcagcatgtagcaggggggaatgctcaggtttgtgcctggctctgtggagctgtacaacccttctcaccctgtgggttggagccgagtcaggccactatggggaagcagttgccccacaaaatgtggtttgctgacctatttctaaactgttgaatatgctgcaccattgctgaaatgaaagatgactctgggggagcagagcttggccttgtgcccagctggcagccccctctgccagcctttctgctgcttttgctgctgtaacagcaatagtggagaaaaatgtaaaatttggtcttccagcttaatgcagtgtgaacaatagatggttaggaaaacaaaactgcttagaagcccctttctctagagcagttttatgtcatttgtaaaaacacatattagcaaattcgtttgcgtaggtttctattaaatatttgactttttttttcttattaagaaaatgaaatcccttacaccagatatcagttaattcaaacagaaaaccctttgggtatcaccaaattgaaatggtattcttccttaactcttccttctttcctttatttgtttagacgtgcttcatcccgaagtggtgctatggtctgttaaacagggctggcatcaggtagagggagcagagtggtgacctgatagctcctgtcatcgtgttagtttttgattctatttaagggaagtagctgagatttagacggatgtagatgctctttgggtgaatggaatcataagcaaaggttgtgttctggggtgaggatcatgagagagatatttatcacatgcacatgcctttatatagctggtctccttgggtggtttatgtgtgttttgtttatttattgaatatgttttcccttgctttaggggttttataggtcatttttcttaatagaagctgtgatcgacttagaatccaaatttgaggagtaagcagcataaccttctaccttgtaatatgtaactattctaatccagtggaatcttacggaaaacacagagaaaaccccttttatcatttgccacagaaggctgctgtctcccttctgatttggtgggcaggtattgtttttgagccagtatttaacagagttttttaatctataagattttttttgaatctatttcattgtgtttgtttttcatgttggaacaatctctctggaagtgcctcttcttgtggcttttacaacttcatttctttctggggtcacctgtgatgggctttgatgtggtgtcaatttggggccttgtgtttgtgccagagggatacacatattaaactgcaggccaccttcctggtccagactgtactgtgtgaaccccactgactaaattagtgagaaccataggcgttggaatttctcaccttttacaatgatagacttttgcattgggaccaatgaatctggtgtgaaaaaccctgctgtagtagtgaaagagcatcaggagatactgactgtacctgagggccaaaacaggagcaggtaacgaaccgtaaaaaaaggagcaggtaatgaatcgtaaccaaaactacagttgatcctccgcaaaggaaagctctttacccagaatgtccttccagagtcattcaggaaggacaagggaacacccttgggaaatgggctagtggagggctgttgactgcagtgacacctgggtgctccggaggtatctgttctgttgacctgtaaggaagcagtcgatcctagagtgtcagaacagagccattctctcctcctgagtaggaacgtttctgttcagtttccctcacagcagcctgtgttagcatgcagttgaaaatactgccgtctaggagaacctgtggtcactgggaacgtgccccacagtgactggccatgcaaccaggtgatttttaggaatagatgtctctagactctgtctcctttcctacaaggcctcacacagatgcttgaggctaatggcccccattctgaggtcatttttgtgtagaactcctttccccaggagagagccttatctctgccctcctttaccctgaaggcttcaaacggaagacaggacctagatctaaacctagatactagcattttgtgggattgtctagaatttggggaagatttgggttcctaagatgcacaagcgttttacaccagtggtgattaactcaactaaaacccactgtaggaagttagcttccccagacagctaatgccgagatcttctaccagcgtagagttgacagaagcaggccagcgaggaggtgtgggacataatagcctgagtgcttgggttaccatggagactggagtgtgtgaggccacagcctgtgctaaagagccatggagccctcccctggccatgtctggggacagatagaacctgttgggggaaatattccctcaccccagggttctttctgcagagcaagggttgcctttgtcctatccctgagcttgctcaacaagagaaacaaggtttcttaagtgttttggttaaagttttcattcttatttgactatgtatatgtaattgtaaagaaacgatcctatgcattgtctttcttttatattcttgtaatattctgaaattaaaattgttttgtttcata

SEQ ID NO: 22486 - DNA, 6671 bp, Homo sapiens
  misc_feature (5459)..(5459): n is a, c, g, or t
  misc_feature (5462)..(5462): n is a, c, g, or t
  misc_feature (5467)..(5467): n is a, c, g, or t
  misc_feature (5474)..(5474): n is a, c, g, or t
  misc_feature (5483)..(5483): n is a, c, g, or t
  misc_feature (5485)..(5485): n is a, c, g, or t
  misc_feature (5490)..(5490): n is a, c, g, or t
  misc_feature (5492)..(5492): n is a, c, g, or t
  misc_feature (5503)..(5503): n is a, c, g, or t
  misc_feature (5505)..(5505): n is a, c, g, or t
  misc_feature (5507)..(5507): n is a, c, g, or t
  misc_feature (5510)..(5510): n is a, c, g, or t
  misc_feature (5512)..(5512): n is a, c, g, or t
ggggcggtgaaagaagtttgctgacgaagatggcgactgaggcacagagtgaaggggaggtgccagcccgcgaatccggccggagtgatgccatctgcagttttgtgatctgcaatgattcttcccttcgaggtcagcccattatctttaatcctgacttttttgtggagaaactccgacatgagaaacctgagattttcactgagttggtggtcagcaatatcacaaggctcatcgatttacctggaactgagttggctcagctgatgggggaagtggaccttaagttgcctggcggggctggcccagcatcaggattcttccggtctctcatgtctctcaagcgaaaggaaaaaggagtgatatttgggtccccactgacggaggaaggcattgcccagatataccaactgattgagtatctacacaaaaacttgcgagtagagggtttgtttagagtaccgggtaatagtgtccgacagcagattttaagggatgctctcaataatggaactgacattgacttggaatcaggggaatttcactcaaatgatgttgccactttgctgaagatgtttctaggagagttgccggagcctctgctgacacataaacacttcaatgcacacctcaaaatcgctgatttgatgcagtttgatgataaaggaaacaagaccaatataccagacaaggaccggcaaattgaggctctccagttgctcttcctcattctccctcctcctaatcgtaatttgctgaagttattgcttgatctcctataccagacagcaaagaaacaagacaagaacaagatgtcagcctataaccttgcccttatgtttgcaccccacgtcctgtggccaaaaaatgtcactgcaaatgaccttcaggagaatatcacaaagttaaacagtgggatggcttttatgattaaacactcccagaaactttttaaggctcctgcttacattcgggagtgtgcgagattgcactatttgggatccagaactcaggcatcaaaggatgaccttgacctcatagcttcatgtcatactaagtcctttcagctggcaaagtctcagaaacggaaccgggtagattcctgccctcaccaggaggagacccagcaccatacggaagaggcactgagagagctgtttcaacacgttcatgatatgccagagtcagcaaagaagaaacaacttattagacagtttaataagcaatcattgacccagacaccagggcgagaaccttctacttcccaggtacaaaagagggctcgttcgcgctccttcagtgggcttattaagcggaaggtcctgggaaatcagatgatgtcagaaaagaaaaagaagaaccctactccagaatctgtggccattggtgaattgaagggaaccagcaaagaaaataggaacttattattttctggctctccagctgtcacgatgacaccaacaagattgaagtggtctgaagggaagaaagaggggaaaaaaggatttctctgaaggatccagagttgtctcctatggtccatgcagaattttctgtttagtgggcaggtgttattcctgcccacagcaaagcttggacttgcagcttgcttgctgcattttgaattgtcaaagccaactaataccgtgacccgactgatacctctaaccccactcactggatgatgtttgcaagctgtgccttctgagagagtgcttaggccctgtctctcttttttaatattatggggaaaccactaactatccaaccagcttatacagcacactaaggtgggcttcagtgctcactcaatgtgtttaggcagattccacttttgaaaaaaaatatgaaatgtgtgctcaactgccagtaattttttaaaaagcactgtcccagtggattgatgttgtttttaatggatattttgggtttttctctgttttgatagtattgggtatttggttgtttttgtttgtttatttctttgttttaaaagccatgtttttggttgggctctaagctagatatctttccctctttttcactttgagctttgggaaaactctttatcttatgaggctgtattcctcaatacctaatttgtgtccaaagaatttatagcttttctggacattttttattatttcttgggtgtgacatcagagtatttgacctgcagtattgaaaaaggagaattcagaatgatacagtattttaacaaatcttaattattaaactcttttccttccttccatttctccctcccttgtccatctctctctctctttccctttcctcagtgatgtgaaaataattgtgttttgctgaacttgttatcttcattcaatttcctcttgactaaaacatctctggtgccaacgtaatacttctgaaccaaatcactgtgactcaaggaaagtcactgacagcataagagaagtttgctaaaatatttgtatgtgggggaagctctggagtgtgcctaggagggggctggctgcctttatgtcccaggatgactctttatgggtgggattacattgcaccctctgagggtgcaggctagaccgtctcctgagaggaagttaggatcagaaagaagaagcaagcagcagcctctgcagggctgacaggatttaaaggagagaatgttcttatttggaagcagctgtggcttgtcaccaatgttcaaggagtgttactgttccgccctctctttgtcagaagggacacaggtggtaatttggagatggggccagagcttctggctttggatttggtgtgttcacttgtgttggatagagcagtggcatggctttgacctagtatgaactggtgtctgcccagagagcagcatgtagcaggggggaatgctcaggtttgtgcctggctctgtggagctgtacaacccttctcaccctgtgggttggagccgagtcaggccactatggggaagcagttgccccacaaaatgtggtttgctgacctatttctaaactgttgaatatgctgcaccattgctgaaatgaaagatgactctgggggagcagagcttggccttgtgcccagctggcagccccctctgccagcctttctgctgcttttgctgctgtaacagcaatagtggagaaaaatgtaaaatttggtcttccagcttaatgcagtgtgaacaatagatggttaggaaaacaaaactgcttagaagcccctttctctagagcagttttatgtcatttgtaaaaacacatattagcaaattcgtttgcgtaggtttctattaaatatttgactttttttttcttattaagaaaatgaaatcccttacaccagatatcagttaattcaaacagaaaaccctttgggtatcaccaaattgaaatggtattcttccttaactcttccttctttcctttatttgtttagacgtgcttcatcccgaagtggtgctatggtctgttaaacagggctggcatcaggtagagggagcagagtggtgacctgatagctcctgtcatcgtgttagtttttgattctatttaagggaagtagctgagatttagacggatgtagatgctctttgggtgaatggaatcataagcaaaggttgtgttctggggtgaggatcatgagagagatatttatcacatgcacatgcctttatatagctggtctccttgggtggtttatgtgtgttttgtttatttattgaatatgttttcccttgctttaggggttttataggtcatttttcttaatagaagctgtgatcgacttagaatccaaatttgaggagtaagcagcataaccttctaccttgtaatatgtaactattctaatccagtggaatcttacggaaaacacagagaaaaccccttttatcatttgccacagaaggctgctgtctcccttctgatttggtgggcaggtattgtttttgagccagtatttaacagagttttttaatctataagattttttttgaatctatttcattgtgtttgtttttcatgttggaacaatctctctggaagtgcctcttcttgtggcttttacaacttcatttctttctggggtcacctgtgatgggctttgatgtggtgtcaatttggggccttgtgtttgtgccagagggatacacatattaaactgcaggccaccttcctggtccagactgtactgtgtgaaccccactgactaaattagtgagaaccataggcgttggaatttctcaccttttacaatgatagacttttgcattgggaccaatgaatctggtgtgaaaaaccctgctgtagtagtgaaagagcatcaggagatactgactgtacctgagggccaaaacaggagcaggtaacgaaccgtaaaaaaaggagcaggtaatgaatcgtaaccaaaactacagttgatcctccgcaaaggaaagctctttacccagaatgtccttccagagtcattcaggaaggacaagggaacacccttgggaaatgggctagtggagggctgttgactgcagtgacacctgggtgctccggaggtatctgttctgttgacctgtaaggaagcagtcgatcctagagtgtcagaacagagccattctctcctcctgagtaggaacgtttctgttcagtttccctcacagcagcctgtgttagcatgcagttgaaaatactgccgtctaggagaacctgtggtcactgggaacgtgccccacagtgactggccatgcaaccaggtgatttttaggaatagatgtctctagactctgtctcctttcctacaaggcctcacacagatgcttgaggctaatggcccccattctgaggtcatttttgtgtagaactcctttccccaggagagagccttatctctgccctcctttaccctgaaggcttcaaacggaagacaggacctagatctaaacctagatactagcattttgtgggattgtctagaatttggggaagatttgggttcctaagatgcacaagcgttttacaccagtggtgattaactcaactaaaacccactgtaggaagttagcttccccagacagctaatgccgagatcttctaccagcgtagagttgacagaagcaggccagcgaggaggtgtgggacataatagcctgagtgcttgggttaccatggagactggagtgtgtgaggccacagcctgtgctaaagagccatggagccctcccctggccatgtctggggacagatagaacctgttgggggaaatattccctcaccccagggttctttctgcagagcaagggttgcctttgtcctatccctgagcttgctcaacaagagaaacaaggtttcttaagtgttttggttaaagttttcattcttatttgactatgtatatgtaattgtaaagaaacgatcctatgcattgtctttcttttatattcttgtaatattctgaaattaaaattgttttgtttcataaanaanaaaanaaaaaanaaaaaaaananaaaananaaaaaaaaaanananaananaaaggggggggcgcgcgcaccaaaacagtactcccccccagaggggcgcccaccgactaagaccgagaacacacaagagttattatggcaacaaagagggaggccaccaaaagggaggagagagaatatatacaagacgcagaagagaggtgggagcgaaggaaaaaaaaagaacgaggaaagagagggaaaaaaaggcagacgacagggagagaaaacacaggcgagcaaacaaggacacaacagaaaacaagggcgggagaggagacaaacaaaaaacgatggagcaacaaaaaaccaccacccaagacgacaacaccaaacacaagcacacaagaggaaaaaaacataaacaaaacaaaggagagaccacaacacacgggtgtcacaaaaaacaacaacccacagggaaacaacacgagcagagggaggccagagaagaacgaaagaaggccaacacacaacgagcacactcagtaccccacccgctgcacaacaaacttaatataccaaccacgagggagcacacctacaccgtaaacaaccacaagaaaccaaccaagagagaaaacaaggagaaaagaaaaagaagagaagaaaaaaagaggaaaacagcagaaaagagggaaggagagagagaggagagagagagagagagagagagagacaagaagcgaaagagagagaggaaggcagggaaaagagagggacaagagaaagagtggagaagagaagaaggagagaaaggacagagaaaagaaagaaaggagcaaagcacgggaaaaagaggagaggaggagggggcgaggaaggagagggaagaggagcgcgggaagcagggagaaagggagggggagggagagggagcagggagagggagaaggcaggaaagagagaggaggagaaaggaggagagacaaagaagaagagagagaggaggaagagacaggagaaggagagagagagaaaggacgaaaaagaaaggggagagaggagagaaggaggatggaagcaagcgcaaaggaaaggagagagcagagaggcagccaagagacagcgcacgaggaaggagaaggacagaaaaaagcagcacaagaagaggaaggaaagacgagaaagaaagagagaaacgaagaaagaaggaggagccaaagaacag

SEQ ID NO: 22487 - DNA, 6268 bp, Homo sapiens
  misc_feature (5528)..(5528): n is a, c, g, or t
  misc_feature (5531)..(5531): n is a, c, g, or t
  misc_feature (5536)..(5536): n is a, c, g, or t
  misc_feature (5543)..(5543): n is a, c, g, or t
  misc_feature (5552)..(5552): n is a, c, g, or t
  misc_feature (5554)..(5554): n is a, c, g, or t
  misc_feature (5559)..(5559): n is a, c, g, or t
  misc_feature (5561)..(5561): n is a, c, g, or t
  misc_feature (5572)..(5572): n is a, c, g, or t
  misc_feature (5574)..(5574): n is a, c, g, or t
  misc_feature (5576)..(5576): n is a, c, g, or t
  misc_feature (5579)..(5579): n is a, c, g, or t
  misc_feature (5581)..(5581): n is a, c, g, or t
ggggcggtgaaagaagtttgctgacgaagatggcgactgaggcacagagtgaaggggaggtgccagcccgcgaatccggccggagtgatgccatctgcagttttgtgatctgcaatgattcttcccttcgaggtcagcccattatctttaatcctgacttttttgtggagaaactccgacatgagaaacctgagattttcactgagttggtggtcagcaatatcacaaggctcatcgatttacctggaactgagttggctcagctgatgggggaagtggaccttaagttgcctggcggggctggcccagcatcaggattcttccggtctctcatgtctctcaagcgaaaggaaaaaggagtgatatttgggtccccactgacggaggaaggcattgcccagatataccaactgattgagtatctacacaaaaacttgcgagtagagggtttgtttagagtaccgggtaatagtgtccgacagcagattttaagggatgctctcaataatggaactgacattgacttggaatcaggggaatttcactcaaatgatgttgccactttgctgaagatgtttctaggagagttgccggagcctctgctgacacataaacacttcaatgcacacctcaaaatcgctgatttgatgcagtttgatgataaaggaaacaagaccaatataccagacaaggaccggcaaattgaggctctccagttgctcttcctcattctccctcctcctaatcgtaatttgctgaagttattgcttgatctcctataccagacagcaaagaaacaagacaagaacaagatgtcagcctataaccttgcccttatgtttgcaccccacgtcctgtggccaaaaaatgtcactgcaaatgaccttcaggagaatatcacaaagttaaacagtgggatggcttttatgattaaacactcccagaaactttttaaggctcctgcttacattcgggagtgtgcgagattgcactatttgggatccagaactcaggcatcaaaggatgaccttgacctcatagcttcatgtcatactaagtcctttcagctggcaaagtctcagaaacggaaccgggtagattcctgccctcaccaggaggagacccagcaccatacggaagaggcactgagagagctgtttcaacacgttcatgatatgccagagtcagcaaagaagaaacaacttattagacagtttaataagcaatcattgacccagacaccagggcgagaaccttctacttcccaggtacaaaagagggctcgttcgcgctccttcagtgggcttattaagcggaaggtcctgggaaatcagatgatgtcagaaaagaaaaagaagaaccctactccagaatctgtggccattggtgaattgaagggaaccagcaaagaaaataggaacttattattttctggctctccagctgtcacgatgacaccaacaagattgaagtggtctgaagggaagaaagaggggaaaaaaggatttctctgaaggatccagagttgtctcctatggtccatgcagaattttctgtttagtgggcaggtgttattcctgcccacagcaaagcttggacttgcagcttgcttgctgcattttgaattgtcaaagccaactaataccgtgacccgactgatacctctaaccccactcactggatgatgtttgcaagctgtgccttctgagagagtgcttaggccctgtctctcttttttaatattatggggaaaccactaactatccaaccagcttatacagcacactaaggtgggcttcagtgctcactcaatgtgtttaggcagattccacttttgaaaaaaaatatgaaatgtgtgctcaactgccagtaattttttaaaaagcactgtcccagtggattgatgttgtttttaatggatattttgggtttttctctgttttgatagtattgggtatttggttgtttttgtttgtttatttctttgttttaaaagccatgtttttggttgggctctaagctagatatctttccctctttttcactttgagctttgggaaaactctttatcttatgaggctgtattcctcaatacctaatttgtgtccaaagaatttatagcttttctggacattttttattatttcttgggtgtgacatcagagtatttgacctgcagtattgaaaaaggagaattcagaatgatacagtattttaacaaatcttaattattaaactcttttccttccttccatttctccctcccttgtccatctctctctctctttccctttcctcagtgatgtgaaaataattgtgttttgctgaacttgttatcttcattcaatttcctcttgactaaaacatctctggtgccaacgtaatacttctgaaccaaatcactgtgactcaaggaaagtcactgacagcataagagaagtttgctaaaatatttgtatgtgggggaagctctggagtgtgcctaggagggggctggctgcctttatgtcccaggatgactctttatgggtgggattacattgcaccctctgagggtgcaggctagaccgtctcctgagaggaagttaggatcagaaagaagaagcaagcagcagcctctgcagggctgacaggatttaaaggagagaatgttcttatttggaagcagctgtggcttgtcaccaatgttcaaggagtgttactgttccgccctctctttgtcagaagggacacaggtggtaatttggagatggggccagagcttctggctttggatttggtgtgttcacttgtgttggatagagcagtggcatggctttgacctagtatgaactggtgtctgcccagagagcagcatgtagcaggggggaatgctcaggtttgtgcctggctctgtggagctgtacaacccttctcaccctgtgggttggagccgagtcaggccactatggggaagcagttgccccacaaaatgtggtttgctgacctatttctaaactgttgaatatgctgcaccattgctgaaatgaaagatgactctgggggagcagagcttggccttgtgcccagctggcagccccctctgccagcctttctgctgcttttgctgctgtaacagcaatagtggagaaaaatgtaaaatttggtcttccagcttaatgcagtgtgaacaatagatggttaggaaaacaaaactgcttagaagcccctttctctagagcagttttatgtcatttgtaaaaacacatattagcaaattcgtttgcgtaggtttctattaaatatttgactttttttttcttattaagaaaatgaaatcccttacaccagatatcagttaattcaaacagaaaaccctttgggtatcaccaaattgaaatggtattcttccttaactcttccttctttcctttatttgtttagacgtgcttcatcccgaagtggtgctatggtctgttaaacagggctggcatcaggtagagggagcagagtggtgacctgatagctcctgtcatcgtgttagtttttgattctatttaagggaagtagctgagatttagacggatgtagatgctctttgggtgaatggaatcataagcaaaggttgtgttctggggtgaggatcatgagagagatatttatcacatgcacatgcctttatatagctggtctccttgggtggtttatgtgtgttttgtttatttattgaatatgttttcccttgctttaggggttttataggtcatttttcttaatagaagctgtgatcgacttagaatccaaatttgaggagtaagcagcataaccttctaccttgtaatatgtaactattctaatccagtggaatcttacggaaaacacagagaaaaccccttttatcatttgccacagaaggctgctgtctcccttctgatttggtgggcaggtattgtttttgagccagtatttaacagagttttttaatctataagattttttttgaatctatttcattgtgtttgtttttcatgttggaacaatctctctggaagtgcctcttcttgtggcttttacaacttcatttctttctggggtcacctgtgatgggctttgatgtggtgtcaatttggggccttgtgtttgtgccagagggatacacatattaaactgcaggccaccttcctggtccagactgtactgtgtgaaccccactgactaaattagtgagaaccataggcgttggaatttctcaccttttacaatgatagacttttgcattgggaccaatgaatctggtgtgaaaaaccctgctgtagtagtgaaagagcatcaggagatactgactgtacctgagggccaaaacaggagcaggtaacgaaccgtaaaaaaaggagcaggtaatgaatcgtaaccaaaactacagttgatcctccgcaaaggaaagctctttacccagaatgtccttccagagtcattcaggaaggacaagggaacacccttgggaaatgggctagtggagggctgttgactgcagtgacacctgggtgctccggaggtatctgttctgttgacctgtaaggaagcagtcgatcctagagtgtcagaacagagccattctctcctcctgagtaggaacgtttctgttcagtttccctcacagcagcctgtgttagcatgcagttgaaaatactgccgtctaggagaacctgtggtcactgggaacgtgccccacagtgactggccatgcaaccaggtgatttttaggaatagatgtctctagactctgtctcctttcctacaaggcctcacacagatgcttgaggctaatggcccccattctgaggtcatttttgtgtagaactcctttccccaggagagagccttatctctgccctcctttaccctgaaggcttcaaacggaagacaggacctagatctaaacctagatactagcattttgtgggattgtctagaatttggggaagatttgggttcctaagatgcacaagcgttttacaccagtggtgattaactcaactaaaacccactgtaggaagttagcttccccagacagctaatgccgagatcttctaccagcgtagagttgacagaagcaggccagcgaggaggtgtgggacataatagcctgagtgcttgggttaccatggagactggagtgtgtgaggccacagcctgtgctaaagagccatggagccctcccctggccatgtctggggacagatagaacctgttgggggaaatattccctcaccccagggttctttctgcagagcaagggttgcctttgtcctatccctgagcttgctcaacaagagaaacaaggtttcttaagtgttttggttaaagttttcattcttatttgactatgtatatgtaattgtaaagaaacgatcctatgcattgtctttcttttatattcttgtaatattctgaaattaaaattgttttgtttcataaaaaaaaaaaaaaaaaaaaagaggaaaaaagaaaaaaaaaaaaaaaaaaaaaggagaaaaaaaaaaaaaaanaanaaaanaaaaaanaaaaaaaananaaaananaaaaaaaaaanananaananaaagggggggggggggggaaaaactggcgagggggaaacaacaatcgcaagacctaagccaaactcctttagtagaaagcgaaagacgggaccacctagaggggggaggaccactaatataagagcacgacagagccccggagcagagataacaaacagccccatcagcgggagagaacgacaacaaaccaccacaacgatgagaccaactggagggaaaaaccccaccctcgcactcggagcaggcacagccattataagcaaaacaccaacacgaagagaagaatatcaccacgcagcatgttataccaacagacatatgaggaacgtaactagtggtgtcaaccaccaaccgcataggtatgggcggcgaaacaaaaacgtccagcaaacggacaaaatctagagataaaaaacatctcacgagccgggggggtggctgagaataaaacaaagggagcagaaaggaagagacaagaagaacgcggccgcagatggaaaggagagccgaagtaggaaccggcaagcagatgacgtagccgctaaccgagagagcaggacgaggcggacaagaacacaccgctagccaaaaacaacacatagtgagcaaagacacaaagcaacagcatccatacccctaccggcaaagacaacgaaacacacaaagcagtacgacaaagaagaagc

SEQ ID NO: 22488 - DNA, 1239 bp, Homo sapiens
  misc_feature (1234)..(1234): n is a, c, g, or t
ggggcggtgaaagaagtttgctgacgaagatggcgactgaggcacagagtgaaggggaggtgccagcccgcgaatccggccggagtgatgccatctgcagttttgtgatctgcaatgattcttcccttcgaggtcagcccattatctttaatcctgacttttttgtggagaaactccgacatgagaaacctgagattttcactgagttggtggtcagcaatatcacaaggctcatcgatttacctggaactgagttggctcagctgatgggggaagtggaccttaagttgcctggcggggctggcccagcatcaggattcttccggtctctcatgtctctcaagcgaaaggaaaaaggagtgatatttgggtccccactgacggaggaaggcattgcccagatataccaactgattgagtatctacacaaaaacttgcgagtagagggtttgtttagagtaccgggtaatagtgtccgacagcagattttaagggatgctctcaataatggaactgacattgacttggaatcaggggaatttcactcaaatgatgttgccactttgctgaagatgtttctaggagagttgccggagcctctgctgacacataaacacttcaatgcacacctcaaaatcgctgatttgatgcagtttgatgataaaggaaacaagaccaatataccagacaaggaccggcaaattgaggctctccagttgctcttcctcattctccctcctcctaatcgtaatttgctgaagttattgcttgatctcctataccagacagcaaagaaacaagacaagaacaagatgtcagcctataaccttgcccttatgtttgcaccccacgtcctgtggccaaaaaatgtcactgcaaatgaccttcaggagaatatcacaaagttaaacagtgggatggcttttatgattaaacactcccagaaactttttaaggctcctgcttacattcgggagtgtgcgagattgcactatttgggatccagaactcaggcatcaaaggatgaccttgacctcatagcttcatgtcatactaagtcctttcagctggcaaagtctcagaaacggaaccgggtagattcctgccctcaccaggaggagacccagcaccatacggaagaggcactgagagagctgtttcaacacgttcatgatatgccagaatttctaacccacaaagccccgagtcacaataaatgctatgggacaaaaanaaaaa

SEQ ID NO: 22489 - DNA, 199 bp, Homo sapiens
ggatatattaatttactcttcttttaaattttccttaggatgaccttgacctcatagcttcatgtcatactaagtcctttcagctggcaaagtctcagaaacggaaccgggtagattcctgccctcaccaggaggagacccagcaccatacggaagaggcactgagagagctgtttcaacacgttcatgatatgccaga

SEQ ID NO: 22490 - DNA, 1032 bp, Homo sapiens
ggtttctagtgacgcaagtacaatattttgtgccaaaatgttaactaatgattacttatgggccttatttctactttctattacatgaacatccattactaagaaagggttaagaacaaaactgaagtattcaaatagcaagtcatcttatattgaaattttaattcagcatcaaacttactaaggcatagtctctaggcttgaggatcctgaaggatgggggtggagggagaagaaacaggcacataagcgaagaagcataatgcaatataagttctatgcttagaagtatttgtaaaaatgccatgggaacacagaatagggagcaattgtgtcaggtacagatgatgggggaggaactttaggtgcaggtaacaacagtttgtgcagaggcatgaagataggcaacacaaacacatggtgcattatgggggaggcaaggaatgcttaaaaaaaaaaaaaagagttacgagcaatctgtctggaaacaaaccctaaccaaactgcaatcaaattgattttgaaggaaataaggagaaccactgaaatattttaagaatgagaatgacctgaacagatctaaaatgtattcaggaggacaattacagggctatttcaaatagtttaggtgcaggtgaaaaatgggtgcttcaactgagcacctagctacactgtgaaatcataaagctagggaaagacaagatttaagtaaaagctgtgatggggtggtgattaactcaggccagcaaaacaatgataccctcaacagattttccattaatcaggcaagcatcttcacagaaacaacttcaaactgtaaagactaagatttatataattttgttatgaaaaagttggccttttttttttttgagacggagtcttgctctggcaccaggctggagtgcagtggcgcgatctcggctcactgcaacccccacctcctgggttcaagcgattccccagcctcagcctcctgagttgggattacaggcatgtgccaccacacccagctaattttttgtattttta

SEQ ID NO: 22491 - DNA, 444 bp, Homo sapiens
atactggatggggcagtttacctgagaaaagatcttatttcattgtcatgacaaccacagaaagtacatactttgatcttcatcttataaacaatgaatccaagtcgctgagaagttaaaaacttgctcagggtaacacgagacagaatctgactctgtcgcccaggctggagtgcaacggcgcgatatcgactctgcaacctctgcctcccgggttcaagcggtccttgtgcctcacccccctgagtagctgggactacaggcatccgccacctcgccaggaagatgaccatcttttactgcccaacgacatctttctaccaatgtgaacagagactagcagcacagtgatcacctgcagatagacctggctttatctgtacataacaccaaaagaaaaaacctggattccagaaggaaataaagattttcagtccctgcaaa

SEQ ID NO: 22492 - DNA, 607 bp, Homo sapiens
acaattccattggcatggtccttcaccgaccctatgatttgcactttttatttctatgtgtgccacacacaatgcagtattaatggcaaccaggtaaatattgatttattttttaaagcttttcttcagtgttttgtcaaccatttcaaagtgtctcccaaaaaaggatgctgaagagcaattgctcccttaagcaacagattcatatttaccctgggttaatacaacaaaaggcctgtataattgtcttttcattgttaacacccaaaatagcatctatctagacagtatccccaaagaatttggaaaatctgatggtgtgagcagcagccgttagtatcagggtttcccattcttggacagtccgaggctgtgacctgttagataattagattatacttgaactggaccagagtttgttttttgaatttatgagaaaaaccaaaacactaagttaagtttgaacttgtaaagtattgaaatttgttgagtgtcctataaattgtcactacttttcctgatctgtataactgactgcaaagtgtttgtttttacaaaagagaaaagaaaagatttttaataaagagaatttgaaagctgtgagtga

SEQ ID NO: 22493 - DNA, 509 bp, Homo sapiens
gccactctcagcagcctctgcttttccccatgccatccacaggccaggcccagctaatgcagacatcccacacatgctgtcctatacatgaaagtgcccaagtcctccccttcaactatgctgtttgatatgatcccaagagtgtttcacagcatccttgatttcttaagtaagatgctccaggctctagccaggtacagtggtgcacaactgtattccccactactcaggaggctgaggtaggaggattgcttgagcctataaattcaaatcaagcctggggaacacagtaggaccttgtctctttaaaaaaaaaaaaaaaaaaaaaaaaaaaaaattccgggggtttgtgtttcccattttctttaagaacggaaaaaggccctttttttttttttccaaaaagccgggggttttaaaaaggtggcaagggaaaattcattgtgtatactctccttcgggggaacccttttacaaactataaaaggctttctggaagggaaagtggg

SEQ ID NO: 22494 - DNA, 1481 bp, Homo sapiens
ttactgcgctcctgcctctcctcagggcagctgggaactagctgcctgcccctttcagtccttgagggaactcgcccctttgccctggcctgtgtggtgttaaagctctgtttctcgggcacctcctcctccaaaccccggaccagccgcccagcgccgtcagagcagccccgactagcctcctctcctctcagccgtctgactcctctccccagtctgtagtcccctcaatttgcatcctttagccccgcttggaaagagaccggagagaaatttgcccactacccccgcgagaagacccacttgtcagccgtgtctcggggtggggggcactgcaaggcctggcgctgttttgtgcacgttaaatgcccagcagtatctcccagaccggcaacccccgaccctccagtctccatgtcttacagaagccaaattcgagagttatataatttctagtgctgctgttgctcctgcctgaggaaacacttcatcgcgtggagggtgcaggacatttcagtgctcttccctaaaagaacggggcttgggcaggggtggccagcggtggcaaagaaatgtcttgtcttttctgcaaaaggaaggtgggtagtttgaagagagattgagagaaaaggtggatgtgaaagccaagcagctgcactttctcatttaggaaatcgcggaccgtttacatagcttatgcttacatgtctaatactactacggcgtctctgaaaacacctttgggggaaggtttggcttctctcgaagtctcagtgtttttcctcgccggatagggagctgcttgaatgcgaagagatggcatgatgtgaatgactccagtgtgaagaaatctgcttcgccaactcatcctgcatcaagtgcccattgagtagcactgtcactttaatgtctccatgccaagggattgctttccttttttttcaatcctctcggttaatacatgggaggatcagaatcagaggggcattaaggatcaagcctgggggcttggagagcacagaagaaaaaaatgaaagggacagcaagctggattctgagttactgaggggaagactcagcctggatttcaaaactgaacactgaagtggtttgcaacagttacctggctcttggcctcaatccagctggatcaaactgagacctgaaaagagatattgactcctgtggcagtggaaagacccaagaatgccagtcaagaagacagagagtttcttttggattaccttattttgaactaataatggaattaaacacattacgtgtgtgtgtgagagagagagagacagagaggaaaagagtgaaaggaagagagaatgggaaggaggagagacagagaaagagataaaaagatactgaccgagctttatcattactggaagaatactgcaaaaaattaaggaaaccagaggagcagctgttgaaaaatgcggttaaaaaggtgatgggtatctttaagagca

SEQ ID NO: 22495 - DNA, 740 bp, Homo sapiens
tggggttacatttttctctacagatttgagtatctttatcatcatctttgaatttgaccatgtataaagtaatgagacctgtctaaatttggtttgtgccttaattgagttagtcattgaacttccaaaaatgttgctgcctgaagaggaatttcagtaacgttcttcatgtttacaataattttcccagtttgtaaaaacagtctaaatattttctgaaaattgaaaaacttgaaaaactaaaaaattacgttgctgtaaactctgtgggcggtgtaaaaagtttagttgtggaaaaaatacatcattattttctttgtctgacatagaagactcagcctggatttcaaaactgaacactgaagtggtttgcaacagttacctggctcttggcctcaatccagctggatcaaactgagacctgaaaagagatattgactcctgtggcagtggaaagacccaagaatgccagtcaagaagacagagagtttcttttggattaccttattttgaactaataatggaattaaacacattacgtgtgtgtgtgagagagagagagacagagaggaaaagagtgaaaggaagagagaatgggaaggaggagagacagagaaagagataaaaagatactgaccgagctttatcattactggaagaatactgcaaaaaattaaggaaaccagaggagcagctgttgaaaaatgcggttaaaaaggtgatgggtatctttaagagca

SEQ ID NO: 22496 - DNA, 1010 bp, Homo sapiens
ttactgcgctcctgcctctcctcagggcagctgggaactagctgcctgcccctttcagtccttgagggaactcgcccctttgccctggcctgtgtggtgttaaagctctgtttctcgggcacctcctcctccaaaccccggaccagccgcccagcgccgtcagagcagccccgactagcctcctctcctctcagccgtctgactcctctccccagtctgtagtcccctcaatttgcatcctttagccccgcttggaaagagaccggagagaaatttgcccactacccccgcgagaagacccacttgtcagccgtgtctcggggtggggggcactgcaaggcctggcgctgttttgtgcacgttaaatgcccagcagtatctcccagaccggcaacccccgaccctccagtctccatgtcttacagaagccaaattcgagagttatataatttctagtgctgctgttgctcctgcctgaggaaacacttcatcgcgtggagggtgcaggacatttcagtgctcttccctaaaagaacggggcttgggcaggggtggccagcggtggcaaagaaatgtcttgtcttttctgcaaaaggaagaagactcagcctggatttcaaaactgaacactgaagtggtttgcaacagttacctggctcttggcctcaatccagctggatcaaactgagacctgaaaagagatattgactcctgtggcagtggaaagacccaagaatgccagtcaagaagacagagagtttcttttggattaccttattttgaactaataatggaattaaacacattacgtgtgtgtgtgagagagagagagacagagaggaaaagagtgaaaggaagagagaatgggaaggaggagagacagagaaagagataaaaagatactgaccgagctttatcattactggaagaatactgcaaaaaattaaggaaaccagaggagcagctgttgaaaaatgcggttaaaaaggtgatgggtatctttaagagca

SEQ ID NO: 22497 - DNA, 1037 bp, Homo sapiens
gggtacatcattacataaatgcaagaacatcctgtttcaaatgatgacccagaaaaccacactgatggcagtgatggccagccctgaggtcttgtccccgccaccatgtcgagagttttagtggaatcactccgtgaaggtgctgttcagataaagccaaaaaccacgccaacaaacgtttcctgagtgctgctttgagcaaggtgcaagctaggttcagagaggggagggcacgagagccgtatttatctcaccctggagctgcttaaatctggcaaagcaaggacacaaggaaaatcatgacgttacatgtctatacaagatttagaaagctcccagacgagactagtagagctgtcactgtccttcggcaggtgtgtaagccctgtcctgtgccttcctttcccttatcagtaaaaacggggacaaaattgtactcacctcatgaactcttactgaggtctgatgagatagtgcatataaagtgctcatgccaacaccccaggacgttgtacgcactcaacacatattcacagccattactgttgtcatcattgtggccatgagtactgtgcccgttgccataggaagcgcattggttgaagttcctgtaggagtttagaagtgagcacttctggagttgggcgtggtggctcatgtctgtaatcccagcatattgggagactgaggtgggggatcacgtgaactcaggagtttgagaccagtctggcaagatggcgagactctgttgctaccaaaaaaaaaaaacaaaaaaaaaaaactttttcggggcggcctgggccctggaaaaatttttaaaacccattcggttggggccggggccccaatggttacgggacactgggcccaacacgggggccccaaaggagaaaccccggggccaagaaaagaggggcgtggggttctcccccgaataaaaaacacgccggggggaaaccgagggtttggacaaacccagaaggggcccagaaggccaaacgggcccaccaacgggggcccaggacccaaaataatag

SEQ ID NO: 22498 - DNA, 974 bp, Homo sapiens
  misc_feature (1)..(2): n is a, c, g, or t
  misc_feature (5)..(7): n is a, c, g, or t
  misc_feature (533)..(533): n is a, c, g, or t
nncannnggtgatgaggaccagcaagaatttgcaacaggaacgcagcttccatagcaaagtcaaggggaggggagctgccgccctgggcttgcctggcaggaattagcttatgtaccaaattgtttgtgacagtgctgagcaggagacgctggcttgtgaggaggaaggcttttttaaacaatttggttaaaatgttcaaattgccagctctgactcttgccctggagaggagggcagcggcctgctgttgactccctgatggctggagcagtggaagccactaagaatggctaaagatcacccaagctacgggcaagggcaatctcgtgggtccgcagcccaaggcagagagagacatggagtttaccacctccccggcagctcctgccactgcccagcgtcttgatgaaacagtatggaaacacggctgtcatttatccaggtgtctgcctagcaggtacaggaatgtgggcttggggactggagcccccaccttaaaaagaggtgaggcaatggaaaggaccagaggggncctgattcagcaatttacagtgccttggagctcgccagcagcacctcatttgcatctggattccagccctggcatctgcctcgccccgctctgctcacaaagtaaccccactgtctttccacaaagccaggcactccttagcctaacggcagatcctagccctgagtgcccagaaattctatgtaaagaatgagaaccaaaccaggctcccactaatttagaattcaaacaaccccaaagctaaaataaccccaatttttttctatattgcatagtcatcagtgagctttataattttgtcctagaaacccccccagagtccctaagtgcctttggcctatcaaagtaagactcatttatgttcagtctagtttgtgttaaatgtgttttgtgctatcctgattcctttaaaaatggtaattcattcatgagaaatacgat

SEQ ID NO: 22499 - DNA, 444 bp, Homo sapiens
gttggcaaagcataatagcttttgaaggtgcttactgtggttcaaatgtgtaccctccaaaattcagctgctgttaatgtgatagtatcaagaggtagggcctttaagtggtaattttcccatgagggcccctcccttgtgaatggggttaggtgctcttataaaaggtcttgacagagggagctcctctcttttggtcctttctccatgtgaggacacagtgttcaaggagccatcttggaagtagagaccgaaccttcaccagacagtgaacctgctggtgacttgatcttggacttcccagcctccagaactgtgatgagtacatttttgttctttatcaattaccaatctcagcagcactaaaacagtgctcatctgctgtttcaaccaacaaactataagaatttcagttccattggtaaggccatgaatatagcaagg

SEQ ID NO: 22500 - DNA, 508 bp, Homo sapiens
attacaggtgtgagcgaccacacccagccatgaacagcatgtttgaagagtctagtacacagtacttgactgacaaaagtgagtgtatgtcttaattcccttctagctctgagatcccatgcattgcctgctagttggggccttgaaggaagtggactcagcacagctggaccatgggatgatggatggagtgatgctgggacagccacaggggccatgaaaaggggacctcatttaatgaatattacataccagaggcagccaaaaaatctggaaagactattcagactgttggatagcatgagaaagaacccccaaagactgcttaatagatttaaatttacaagatcactgggaatgatttttcctccccctgggattaactcagttggcagggctctccttagttcagcaaataactcttctagaatatagaaaaaattggcttgtgacagctttttgattcacaagtatttactgcatttacgacgtggcaggaaccagacac

SEQ ID NO: 22501 - DNA, 458 bp, Homo sapiens
gaaatcctaaatgcattccatttttaactagcacaaaatggaaatgacttttcaggaatagattagaaagctatgaccttgaggactttccacctttaaagtaagattcttttgtgaagcaattcaggaagatggacggtgaacattcaattcattaacatctgagaaccatgaagagagtattttttgccacaagcaaaaatgaacctaaataaaagactggtgggggaggagaatcataacgaccattatggcccgcatcttatgggctgctgcgcagttagcatgaggggaggccttgcacaagctcttcccctcagcctcagcatcctgttctgcctcatttgtggcttgcgtcagactgagtcacccagcgcaatgtcactcttcctcaggggacttctctcaaccttccaccttctacagagagcttgatggatggtgaggttgttgcaacc

SEQ ID NO: 22502 - DNA, 429 bp, Homo sapiens
taacattattgccacaactaaatttctgtttaactgtgttgcagaatatgataatgtcatctaacatcactccctacttgcaacattcctctgtgaatattaatatagttaaccctcccttattatgtatcatatcaataagtttctcttcccttggattaatttttgcttctttgcattacattttatcttgtgctaagataacaaaaagcaagcaagaataaagatccagatattagccatatgtagaaagttcctggtgtgcatttctgtgtacttttccctcacatattagaattgtcaggaaagtttttttcttttggaactttctgtttacattttgcatgatcttataaattaacctgaagagtaattggataccttttatggttatttgaaaataaaatttgctacaaataagaaaaaaaa

SEQ ID NO: 22503 - DNA, 331 bp, Homo sapiens
ccgcggcgccgccctccacccaccgtgctgccaccttgcaccccccgtgccgccctccacccgccgtgccgccctccacgtggttctgagacacaggacggagctatcagggcacccgtcgaggtcaggaggcgtccggggcatcaggagaaactaccggcaaatacccaagaatccaggaagacccgggatgaggagaagcccccgagagtaaagcccgggacgagggccccccacggcacccactgagcccagacatccctgcccagagccacccaccacggcctccccatccaccgtgactcactcgagtgaagccaataccattgca

SEQ ID NO: 22504 - DNA, 412 bp, Homo sapiens
gcaatcacttcgtccattctgatttccaggagaggcactgggggctcggcgtctgcaacaacttcgtacctcaggggtttggtgtttcggcgtgtgcacacgccgagcgcccaaaccatgagaatttgcaacaggggaggaaaaaagaaccaaaacttcccaaggccctgctttttttcttaaaagtactttaaaaaggaaatttgtttgtattttttatttacattttatatttttggtacatattgttagggtgcaggtcagaatggacgaagttgttgcgcaacaacttcgtccactacgatctgcaacaacttcgtccatccagacttgtgtcacaagggtatgggttctcggcgtgtgcagcaacaacttcgtccattgggatctgtgtggaccttcggcgtgtgca

SEQ ID NO: 22505 - DNA, 645 bp, Homo sapiens
gcaatcacttcgtccattctgatttccaggagaggcactgggggctcggcgtctgcaacaacttcgtacctcaggggtttggtgtttcggcgtgtgcacacgccgagcgcccaaaccatgagaatttgcaacaggggaggaaaaaagaaccaaaacttcccaaggccctgctttttttcttaaaagtactttaaaaaggaaatttgtttgtattttttatttacattttatatttttggtacatattgttagggtcagccatttttaatgatctcggatgaccaaaccagccttcggagcgttctctgtcctacttctgactttacttgtggtgtgaccatgttcattataatctcaaaggagaaaaaaaaccttgtaaaaaaagcaaaaatgacaacagaaaaacaatcttattccgagcattccagtaacttttttgtgtatgtacttagctgtactataagtagttggtttgtatgagatggttaaaaaggccaaagataaaaggtttcttttttttccttttttgtctatgaagttgctgtttattttttttggcctgtttgatgtatgtgtgaaacaatgttgtccaacaataaacaggaattttattttgctgagttgttctaacaaaaaaaaaaattc

SEQ ID NO: 22506 - DNA, 821 bp, Homo sapiens
gcaatcacttcgtccattctgatttccaggagaggcactgggggctcggcgtctgcaacaacttcgtacctcaggggtttggtgtttcggcgtgtgcacacgccgagcgcccaaaccatgagaatttgcaacaggggaggaaaaaagaaccaaaacttcccaaggccctgctttttttcttaaaagtactttaaaaaggaaatttgtttgtattttttatttacattttatatttttggtacatattgttagggtcagccatttttaatgatctcggatgaccaaaccagccttcggagcgttctctgtcctacttctgactttacttgtggtgtgaccatgttcattataatctcaaaggagaaaaaaaaccttgtaaaaaaagcaaaaatgacaacagaaaaacaatcttattccgagcattccagtaacttttttgtgtatgtacttagctgtactataagtagttggtttgtatgagatggttaaaaaggccaaagataaaaggtttcttttttttccttttttgtctatgaagttgctgtttattttttttggcctgtttgatgtatgtgtgaaacaatgttgtccaacaataaacaggaattttattttgctgagttgttctaacaaaaaaaaaaattcacatgaaaccctctctctactaaaaatacaaaattagccgggtgtcatgggcgcctataattccagctaccaggagactgatgcacgagaattccttgaacctgggaggaggagtgttcagtaagccagatggcagcattgcacttcagcctgggcaacaagagcgaactcaaaaa

SEQ ID NO: 22507 - DNA, 388 bp, Homo sapiens
gtacagcacgagggcaaccagaatataaaaagcataagtttcaaaatttaaaatttaataacataatcatagtctgagaagtcctaaacattttaataacaaaagaaagtaaaaagtgggcaaaaaatttgtatagacacttcatcaaagaaatatggatggcatattatttaatttttctaatcttttttctttttttggctctgttacgttagtaacttacaacttttctaaccttatacaggtatgcatccattttttaaaaatcagtaaaggttatctggttgagaagtttatgatctacttttattttctttgttcctcactggatcttttaaagtgcaaatcctagcaaatgaaacctgaggaagaaagtctctaatcgggg

SEQ ID NO: 22508 - DNA, 264 bp, Homo sapiens
tggcttcccaaagtgctgggattacaggcatgaaccatcgcacccggcctccattgtttggttttataaagaatattatagtgaacatctcttgtatatagatttgtgtgaacaaccatgattatttccttagcatatattcttagaagtagaattattgggttcaaagggtatgaatagtttttaagttattaatatattactgtccggaaaggttgtactaatctcattgtttttacttttaaaactgattggtagagggat

SEQ ID NO: 22509 - DNA, 475 bp, Homo sapiens
aattttgcagtaataatattaagtaatcttgatattcacctggatagcatgtctcttgattgcctccaaagtaaaatccccattctggttggcttctttgaatgcagtgctgctcctaacacccctcctcacatgtgccctttaaggactccacctttctcgcacatgtggtttcatccttgagcttgagcctcactggtcagaaccacaggatcgaccaagggctctgatacagactctcattatcccatttatctgagctagcaacagttagttctttttaaagattcaacaatgcttttattacttttttaaggtcttttttcctccttccaaagttgtgtatttgggggaagggcagggaaagggatgtaaatgcttaagtgtttctatgaaccagaagtgactagggtagggttacaggcaggtcaaatgacatttgtttggatgcattacatttaagcaaccttctgtt

SEQ ID NO: 22510 - DNA, 314 bp, Homo sapiens
acaaccacccaggaaaacattgctatgtccctaccagaggcatacttcctttataaaggaggtttggggtcttcttaaagtcccacagggactccatccccctcagctgtccatcagtgtgccttctactgtccctgcagaatggtacttacttccctctactgcctttcttctctccaaaacctcccttctcatttgccttcctcttccatagtgggcaggtatcactaaggctgcccagtctctccccgcaagaccgccttctgacaattctccacttcccctccttgcgcattcccctgcctcctttgccc

SEQ ID NO: 22511 - DNA, 454 bp, Homo sapiens
tactgtcttcccatctgagcactaaattcttattaatgatgccaaaagttgtattggcaggcaaaacaaaaattgctcttttttattttttgcatgaacttccattatgccagtctttttcctcacatgtatgtacaactaaatttttaagcccaaagacaactgatgttcaattttggtgtttatggacttattttcccttccttctgttttgccatttctcttgtaattttctagtgtttagttctataaaactattataatgcaacctcaaaagattggactctattaaagttgatgataatgagactttgactttaataaattcacctttgccttaattataaagaaaaactttacaaaattcagctaccttcagaaaacgaattctttaaaagaccatagtgcaaaatgatgctgtcatgaatctcattggttcattcagccaaaaaaa

SEQ ID NO: 22512 - DNA, 452 bp, Homo sapiens
tagaggcaacacaagcttttggaagtaattggcatgtgtctgtctaatccagtaaagccttgcagacctacctgatatccacactgatcttggccttggccttccctctctcaacatgcaaagccattcctctcccaggcccaccatgtggcccctaagttaaaaccaagctaaaatggaaatatatttagttgttataaaaaaataaaatgtgggcagtctcccaacagaaataatcagcctgcttgcccagagggcaagtgctaatgtatcagagcagaggaatgaagtggggaggaaacagaaggctgtctcccaagcctggtccctaacaccctgtgcactcaataaacaaacagccatttgaatcactttggttctccttttttattattctgcagaatgataaagacctaaagcctgtttatatagtgttttcatggctagagttg

SEQ ID NO: 22513 - DNA, 243 bp, Homo sapiens
tttccaagtgaaaggtgatggaatattttgacagcatgctgctaacttaaacatttttgtttaatgtaatttttgtgtctaagtgctcccaaccaccatttccaagacaagaagactcatgagcattcagaaaacatttggcactgtttcattttaattttttacttctccttgactctttgagcctagaaagaattttctctgtagttgctcacccaggtacaagtgtccttgagttaatct

SEQ ID NO: 22514 - DNA, 215 bp, Homo sapiens
ctgtcatctgtggcctagaacatggaacactgaccaactagagaattcccatttttacccccacttgagacctttatctgtactgtactgtcgttttttttccccttccctttgcccctcccccaagcttgcaaattccccatcttatcatttttcaactccagtaatctctactggactcttaagactagatttcatcattcacccacctaccc

SEQ ID NO: 22515 - DNA, 232 bp, Homo sapiens
gagaaaaattcttaaagcaaattatatgctactacaccaaaatattttgaacaatgttacacaaaaacattaacaaaaaatatcttcccatttaaaaaaaaaaaggaatacaaaagggaaattggttaatgcagggaaaataatcataacaacatcaatttaccaaatgaataacaacacaaagtggatgagccagggctgagattctcaaaataaagcagacggggcgtcc

SEQ ID NO: 22516 - DNA, 312 bp, Homo sapiens
taaaagataactaacattaaaaaatatgaatgctatatgtgtactttatttatagaagaactgagcctggagtagaggaggcagctggatataaaaaagtgcatagactggcatcaaagagagctcactttgaatctgggttttgccaagtgtgttatcttagaaaagtcatttaactccctgaccttcaattttttcacccactaagttaatagtacctagtacaacatgaaattaggaggatgggaaatgatctacataccaccataccattgctatgcaatcgtaagaactctaaatataacttctctc

SEQ ID NO: 22517 - DNA, 503 bp, Homo sapiens
aatggaatgatttaaaatgtctctgggcacaatgaagtgctcctagagcttaaagtgccagaaaagtgtacagggtttccctccatgtcctgcctctctcctttactgtctctagcccagcatacaccgcctgagtttctagggccatgttcctgcacctggtactgtctccttcaagctgtgtgttcctccttgtgccttaatttcccttagttgtcaatagtatcgttgtcaattgattatgttatctacctcataaggtcagtatgaagattcagtgttctaatgcaggttcagagacctgagcaggttcctgcaatagaaccagtgtaaaaaatgaaaagggctatgtgttggtaaagatcaatggttttcagaacacagagaagtgtctcaaagccagtgaagaatatttggcctaaagtaaatttctgtattgtgatttgaatagcaagcaaaatccatttaaaccctagcaagaatactatctcctcaaaaaaaaa

SEQ ID NO: 22518 - DNA, 1052 bp, Homo sapiens
gccaggcttagacgctttatctttattttgaaggcaatctgtgggtaaagaacaaaataaaagccttgtccctttgttcccttagccatctttcttatgctttctttgttaccagatagggcctttctcatactaccctggaatactgaaatttcagactaaatcagtcaggtggctgggagtgcaagaaatccttggcaagacccttctccccggaaagcctcctgacagcagagtacacagtgtcacaccttagaatgtccaccatgaaatgtaatggtgctcagtgtagcagatgattgcaaggccagtgtgaaggcaatctacccacaacatttataactctgcgggttgtcagcttcatgagctatgcagctgagtaggaaggcatctcctgactttcactcctcaagatccattctctatgatgcccttcccacttgaaagagctttctttagccaaggtctttctttgatactctgtccccctaaaaatcagtgcttttgaaagtcatggccagaatagtataaacaacagaagggttttataaatgttaatactttgatttcgcaaattttctgtcacttggaatgattcttaatacaaaacaatgtacattataaaaataaattcatagctcagtatagaactacattatctgcaaactctacttacacacatcaaatcataaagggtagcaggaagttgttatgaaattttgaatcacaagtacaaggatcaaataaagtatacaacactcaaacgtccagtttcatgaacaaaccatcacttccatgtaaccacaacccagatcatgcgatacgacgtgaaatcatacagcatgcactctttcgtatctggcttcctaaactcaaccctgagtttagatgaatttgaaaaacaagttagataacttataccaagaaatatcaagacttataacattattaattaaaatcatgtaattggcacacaaatggaaaacagcaataaaacagatcatatgtatgtgtacaatcacctgatttatgacaatctatattgactatat

SEQ ID NO: 22519 - DNA, 353 bp, Homo sapiens
tcttgctctctgtcatccaggctggagtgcagtggcatgatcttggttcactacaatctcctcctcccagattaaagcagttctcatgcttcagcctcatgcttcagcctccaagtagctagaactacaggcatgtaccactacgcccaattaatttttgtatttttagtagagatggggtttcaccatattggccaggctggtcttgaactcttgacctcaagtgatcctcccacctcagccttctaaagtgctgggattacaagtgtgagccactgcaactggcctaatttccttctttaaaaaacaagaaagatctcaaatcaatagcgtaacatacaacttaatgaact

SEQ ID NO: 22520 - DNA, 466 bp, Homo sapiens
caggagtaactgaggttaatcaatggaaaatgcttagaatagtgcctggcacatactaaacgctcaacaaatgttagctgctgctatcatcatcatcgtcatcattatcattaagtttattgtgataataggataaatttctaggatgatacaattcaagcctttagagcattgagagcgtaaacgtgtcatcagtactccacatttctgtgtagaaagaatgacaaaaggtattcctgttttggggaagataactttgaaacaagtatttaaaacatttctctgagaaaaaaaatagggaatcacagttaggtgctatacaagtcagctttttttaggtagggaaggttgcatattcagtccttaaactctgcaagaattgcactgcttccctgtgtgactcttgaccctgtggaagacaagtggggtgtgaaatctgcccaaatcatctcccttactggatgaa

SEQ ID NO: 22521 - DNA, 449 bp, Homo sapiens
tttaaaacatagaaccatgtttcctgccattgggaaactttgagaaggtctcaaatgattacaatataatagctaagcactacagtatgggaaagtggcaaggactgcagagaggaaggctttgattactctggggcagttttggaagactccctagagggtgaaacatttcatcagagaagatgaaatatgacaatgcagggagtgtaacatatgccatggttccaaagtgtggaaaagccttaaataacaggcagtttgattagtgattgccaatctggcttttaattagaatcatctggcaaactaaaaaatgtactgattctgaagtctaatctccagagattcttatttaactacttttaaattgggaccagacatttctttttcagcaccatttaaaggaatacaaagcatatgcaaggtatcctacatatgctatttaaatt

SEQ ID NO: 22522 - DNA, 413 bp, Homo sapiens
ccttccctgctgcatccttcctcatccctcaccctcctcccagaagtctctagatttaacccccaggggttgtcccaaggggctattaagaaccttcaaggagcttgtgaaattggggctcaacactgaagtaacaaatagcagctgctatttactgaacacctactatgtgttaggcaccgagctctttacatgtgttttcttcttaagagccaattatagtcctaaaaggaaagtattattgccagcatttcacagaaaaggaaacccagcttcaaaaagctggagtcagttgctcaagtacacatggctgacgggcaaaggcaggatttgagctcagatccagagcagcactgtccagtagatatataatgccagccatgtgtggaatgtaagattttctagtcatcaca

SEQ ID NO: 22523 - DNA, 183 bp, Homo sapiens
ttgtgccattgcattccagcctgggcaggcgacaaagcaagaaaaaaaacagataccttgaatgataacattaatgataaaaattgcatagcataacagctattcacatggatgtcagattagtcactgttcagctttctctttaatactacccaagtatttcatagtgtttaggatttactt

SEQ ID NO: 22524 - DNA, 463 bp, Homo sapiens
agccaccaacaaattataaacttagatagtacataataaaccagggtatgcttaacaagaagcagccacattggcagtcactgtggatgactgatgatgtgacaaagcccttgaagctttttgcaggctgagaacataaaactacaaagtagcacaagcggaaaccaaaatagctgaagcaaaacacagcaagaaaagagaaaatgttaggaagagaatagtgaaatacctggaagaaaataatggaagagtagaacatgagatgaagaacagagttcataatacaatacatgcatttcagatataaaaattgaaatacatttattcaacaaatatgcattaagatctgattgtgtcccagacactactgtacacacttgggatacatctgtgaatgaaagaagacagtaagcccagccatcaggtagcttatatggggaagtaggccagagaggcaaacaat

SEQ ID NO: 22525 - DNA, 355 bp, Homo sapiens
aggacatgaaccagtgactttgaatgtgatgctgagcccagcagggagccagtatgactctccccaaatcacaagtgagactcagaggccccactgggctcccacatggactcaggccaccgtctttgcttagaggacgcagcagaaagacttggctcattttccaggggcagacttggagagttctggcaggtccatacatttcaactccctcctcccaccacagcaggcctgctcttttatgtatccaatgggaatatttttcattatcttccctctcaatttaattaatccacattccgtaatgaaccttgaaatttcattaaacacatcattactaatcagcacagagctg

SEQ ID NO: 22526 - DNA, 698 bp, Homo sapiens
ctttttgcaagggctttgaatagatatgcttttgcaagggctgaatgggaaaaggtaaagatgaagctatgcaaatgagccggggaactttttatatatattctttaaacacacacacacacactgcggggggaagagtgctgcctcgggatgtttatagaagcaataattgccattattagcattgtctgcggcagatagaaattgaacaggttgggataatatagggtagcagtaattattcttctaattaatggtcctttgctacttgaaaaaagaaaaaaggaaagaagtagtaaaagttatgcagaagttatgtttccttgtgtccatttgcccagcgctggaatctgtggagcaggaagcctggcaattccaagatacgcgatgatcttcaaacattcccgggagccagtcctgaggctctggcttcagggcctagtttccatttatgccgcgtttttgagagtctaatactgtgtctggcacatggtaggtgctcactgaatagtcgtggtatgaatgaatgaacgaatgaatgaatgaatgaatgaatgaatataagtttaatgggggaaacccgggcctcctaataaaggtaggggctgggggatacctaggggcttccccaggaggatttcttttttcatcatcccacccctgggagaaaggtccacgcaggatggtcgcttccccct

SEQ ID NO: 22527 - DNA, 544 bp, Homo sapiens
ctgagggtctttaaagaatggatttagtaatttctacattgtactactttctgaaatattactgattttcaatgaagtaactaagccctagccaaatgttttagtttatttctttctctctctctctttttgtcaatctgtaaatgcgtcagaaaaacgtttactgtaatgttagactgtgcatgtgttggcattaaaagtgtggttttgtccttacagggaatcaaatagaagcaaaattatagttaattcttggtttctgtggtaatggggaacagactgagtttgtaccaataacacttgaaaaatttattttagaaattaggttgaactttgtccttcactaaacttttgccagaaaatccacatgcagtcaagttgttcttctttctcttcttcctggctctgccccaagctggggtaggagaaatggccagcagggaaagaagggtggaatcaaaagacctatgcccaaatgtcgtggtcctgaggtggttctcagcatgttgactagagttatttgtgggaaaaggaaactactctg

SEQ ID NO: 22528 - DNA, 482 bp, Homo sapiens
acaaatgtgctcctgaaatgtgactgtgccaggtggaaactgcattcagctgcttgcagcaaagacatgaaacaacagggtttaaacaaggggcaagcttattttttactcattacaatgattggaagtcctggtggctccacattgtcatcaacactccaggcctcttttatctttgtcataccactcttaacatattctcaaagtcatacaggattacagaactgtcacttagggatcacaatgaatggagaaaagagaaatattgctgtgtagctgtgtaagtgttttcctaaaaccctcaccaagtgactctctgacacatctcacaacctacctcctcccatctgcaatgaggactgagaaatgtcaattggcagttgggcatattgataccccacagagcaggggctttttccagggtaaaagaccaccctcctctactacaacttaagggattggaacacacccaaatctacttt

SEQ ID NO: 22529 - DNA, 1795 bp, Homo sapiens
ccgacctggattgtagactccaggcacagtcaactgcaggcacagtcagcaccagcgcagcagggacggggcggtcctcactgacgtcctcctactgcagatgcacactgaggctcttggccgcagagcgtggcgtctgcagttcatgccaacggtgtgtgcacgtccccggagagtgacagaggagagtggctaaatgtcagtcatggggaatctagagcacaggtgggcacgcttctccgatgaagggtcaggcaggaaatattcttggcactgcagccatacagcctgtgcctcagcacccacgggggaccacagaaggttggggaccactgctttaaacaactagctctcccgtgaagagcaggtccccaccctgctgtgtagggcaacagcagatgtcaatggcatatgaatgaacgagcgtggctgtgccaataaaactttatttacaaacgtaaaaaaaaaaaaaaaaaaaaaaaaaaaaaaaaaaaaaaaaaaaaaaaaaaaaaaaggggggggggcccaaaatatattcccctcgggggggcaccagtatacagcgtcacgcccccgctttgttttttatacaaggggtggcccccatataggagacatcattatttaatacacgagcaggcaacagggcgccgcgcggttaataaaacacctctatgatcagagaacaacaacgctcgatcacagcgggagtaatctgtggaagaaaaaccccctaatatacgctggggggggaggggagaacaatagtggtggggaaacacactcaccacttaaggacattattttaaacaggtcctagaagaggatagaagaatatataacaaatctcttagagggtgttataatcatgtgtggtgtgtaaaacaataagaagggcgaactatattttatgatggagagtgattcgacaaaaaagatttttgcagtgacctataacgaaggagtatatatgtgaatcttttggtacagaccaattttttttatctaccacgcgggaggcgcactctttgttgttaataaaatagactaaaagcgataagtgatagatagagactgcactcagaactgaccaaacatactagtggaacaaccatgacacagaaattgaccgacgcaaagatagaacagtaagatagaacagtcaaagtcaaaagaatagatcaatcaacaataggaaccgataggcatagtagatgacaaaggcaaagaagaagaagaaggaagaaggaagacggacagaaggaagaaaagaaacaaaagaaagaaagaaagaagaaagacaaacaagaaaaaagcaacgaagaagaaatagaagagaaaaaagagaaaacagaacacagcaaagagacgagcagaacgaaagaaaagaagacaacagagaaacgcaagagacgatacacgacaaacagaaagagacaaagaacagagacgagagagaagaaacgaagaaacgaaaaaaagaacaaaaaacaaagaaacgaaacagaaagcaagaacaacaggagaacacaagaacaaaaaaaaagaaagagaaaagaaaaaaagaaaaaaaagaacaacaaagatgaaaaaaaagaaaaaaccagagagcaacgaaagaagacgaaaaacggaaagaagggcaaagaagaggaccacgaaaagaaaacaaacagagaaacagagagacacgaacacagaaaagaacgaaagaaagaaaaaaggacaaagaacagagaagaagaaaacaagagcaaaaagaaaaagaacaacacaaaagagaagagagaggacg

SEQ ID NO: 22530 - DNA, 292 bp, Homo sapiens
gccttctcctgccaaccctctctctcctgtctcccgcgctgtccctcacagctcctactctaggcctgtgacccacatctgtccctctcctgtctcccacgcagctcctgctcctgcctctgacctgcatctgtccctctcctgtctcccccgctgccccttgcagctcctgctccaggcctctgacctgcatcgtatcatctgtctacacatttccctcgtccttcatagcaccacagggttccccggggtcttccgaagccttttctgggctctgtctcttgcacatgcc

SEQ ID NO: 22531 - DNA, 436 bp, Homo sapiens
ggaaatttgtaaaaaataagttttgaagattacttaggtaaataagaggcagctgggctaaaagaagttaaatttaaaggataatttaaaaacaaaaacaaaaactattctttattccacccagtaggaagcatttaattttcctcaactctgtgtcttagaaaagtttgcttagaagtgtttttggccaggcatggtagctgacacctctaatctcagcactttggcaggctgaggcgggaggatcgcttgaacccaggagttcaagaccagcctgggcaatatagcaagatgttgtctctacaaaaaatttaaaaattagctgagtgtgctggctggggcatgcctgtagccccagctactcaggagactgaggtgggagaatcacttggacctgggaggtggagtctgcagtgagccaagatcgtgccaactg

SEQ ID NO: 22532 - DNA, 537 bp, Homo sapiens
cactaaaatcttggtgtcccctagggtctttccttgaatttcatgccctcctggggtgacctcattcacttccaaccactacttgaaattgacacctctagagtccttgtctctgactcagctctcttcaatcagtgggcattttaatctccatgtgaacggccaggccagcctgtctccagatgctcttccctcctctgagtccagtctatgtaccactgagctctggactgtgcaccgcttagctccagatggccaggacggcctgtctgcagatgcttttcccctcctccttccctccatgagtccccatcagcttcccagctccctgctccatcgcctgctctcctgtgaagtctttcctgctacggccaaacagaattcatcactgttcctggtgtgacccagtgtccttgccagagtgtgagctcccgggcgggggtggcaagttcccatcacctgtctgggctcccattcctaggactcagcattggcatatggctggcgctcaatagaataaattagaaccaacacaat

SEQ ID NO: 22533 - DNA, 412 bp, Homo sapiens
gagaatgagagaatatctgtaatcatgttcccatgaactgactaaaatgatggatgacagagtctcattctaccaaataagttagtgtcaaaatgtgccccccaaattacaaatatgaattaatttgccatattagcttattgctgtaagtcaattatgttattaagaataactattagcctggcacagtggctcatgcatgcagtcccatctacttaggaggctgagattggaggatggcttaagcccaggagtttgagaccagcctgggcaacataaaaaaaaatatatatatatatatagtttaaattaggctggaatggtggtgtacacctctactcccagctactggggaggctcaggcgggagaatctcttaagcccaggagttcaaagttgcagtgagctatgac

SEQ ID NO: 22534 - DNA, 450 bp, Homo sapiens
caagctaaactacacacgacgctactttgggtttaagttggtgacagcctttcctgcccctttccttctagtaccagaggggaaatcagagctttgtcatcttttggacaagttcactgccaagctatgcatcgttacacttaatttactcttcctaagtgtgtgtggatgctctaaagaaaatccaggccgggcacagtggctcgcctgtaatcccagcactctgggaggatcacgaggtccagagatagggaccatcctggccagcatggctaaaccctgtctctactaaaattacaaaaattagctgggtgtggtggtgcacacctgtagtcccagctacgcgggaggctgaggcaggagaatcgcttgatcccaggagtgggaggttgcagtgagctgagatcgtgccactacactccagcctggcgacagagcgagactgtctca

SEQ ID NO: 22535 - DNA, 1169 bp, Homo sapiens
ttagaggatccaagctccaacaagaacaaggaggcttctctttttttatttgaatatctaaatgcatttaataataataattatttaatttcagagttcactcttgtgccaggctggagtgcagtggtgcgatcttgggctcactgcaacctccgcctcctgggagtgtacgtcattgttttaaaccacttatgtgttgtagattttactctgtgtattcgtttggtgggttatagtttaccaagttgtccaaaatggataattcatgtgagataggcaagagcaagtgttgtatcccaataccatttggtgaaaaagttgaacttcagaaaggataagtagtttgccaagatcacctgtcaacctgcatagtcaaatttgagatggaactcagctactccaatatctgtatttgcagaataattctgttgtgtttattttgttggtggtggtgtttttgagacggagtctcactctgttgcccaggctgcagtgcaatggcacgatctcagctcactgcaacttccacctccttgcttcaagtgattctcctgcctcatcctcctgagtagctggaattagaggcgcctgccaccacgcccagctaatgtttgtatttttagtcgagactaattttcaccagtttggccacgctggtcttgaactaatgatgtcaggtgatccacctgcctcggcctttcagtgtgttttatttttaaagcagattactttattgaatagtttgtgttgggtacttaagtactttacatgctttgcatgctgctgatttaatcagttctttgagggaggtactctgtcatccttttcagatgagggaactaaggtttagagaatttatgtgacttgcttagggtcacatgtgactgtttggtggaaccacaggacttaatcccagattaggctaagagttttttttttttttgaaaaggaattttgttcctgttgcccaggctggtgtgcaatggcatgatctcggctcattgcaacctccgcctcctgggttcaagcgattctcctgcctcagcctcctgagtagctgggattacaggcatgcaccaccatgcctggctaatttttgtaattttagtcgatgtggggtttcaccatgttggccaggatggtcttgaattcctgaccccaggtaatcc

SEQ ID NO: 22536 - DNA, 461 bp, Homo sapiens
  misc_feature (408)..(408): n is a, c, g, or t
ggacctggccttccattctgtggaagcctgagacaagcagcaacttctctcattcctcctctctatgacaagacaggaactgggacactcaccttactaccctaattcgctgagcctcggaagaaaagcagcttagatttttaatcccatccaagatggaggccctcctgctcctgctgccttgttctcaccccctttcgtgatgtgcgaggccatcggaaggtgtggaatttctccactgattcctctcattgtccctttctccctaactacactttccttttattaaaaattaataaatagatagataaataagctcagggcttttaaaaaatatgtagagactagattttccatttttcctatgatgtaaaattacactatacaaaaacatccatttcttctatnacccctaccttaagacccttcagtgacatcccattacttttttttttttttga

SEQ ID NO: 22537 - DNA, 369 bp, Homo sapiens
ctctggcctctcaggaaacaaagacagcccctgtttaaggatcaaggcccccacattgaggaatggagggtcccctttctcttactgagggcctagacagatggtcaccatctaggggccaagctgaaccatgtgtcttcagcatcctggcagcatgcacagctctggggacccagcccatcccaggctgtgccctgatggaatgggctggaagcttctggcagtgccagtctgggatttccctggccgtcttccctgtgtcctgctcagcctctgaggatttttgtcagagagtaaagaactcagaaggctttttaaaattgtgctaaaatatgcacaacataaagtttatcattttaaccattgttg

SEQ ID NO: 22538 - DNA, 278 bp, Homo sapiens
tttattttttttcatttgagtgcaatattcccagcaccaagaacagtgcctagcatacagtaggcacttgatacatattaagtaaatgcgagggtattattggagaatgaagggagggacttgtctgtttcagcatcagtagtcattgtgcttgttttgaatgtcatggtgctgtgaatcatggaaataggtgtttctgtctttgtataggccactcaaaaatcattgcctaagccaggtacattgggacacccatagtcccaggtagtcaggaggct

SEQ ID NO: 22539 - DNA, 371 bp, Homo sapiens
ccctgggagaagctgctattcagacaatttcccaccaccctctgggacaggcaggaacagcagtgtccccaattctatgacatctggcccctcctctgctggtccctctcgggaagccggaatgtggctgggtgggcctccccctcccacccgggaggcagccgtcacatctggatgacctactgccccaggacctgttcaaagtccctcaaacctgcctcccctcccaccctaggatgccagcctcagctcagcacccggctctggggccagcttcattcattcagcaaggtcttctggggccctagcaggcaccagggcactggactgagccaccatggccacgcgcctggccttgagatggtgtgggg

SEQ ID NO: 22540 - DNA, 466 bp, Homo sapiens
gggaggttggccaaggcaagatgtttaggaaaggctttcctggggaaatttctctttgggttgaatcacagttaagtaggcaaaggggaagacagagggaagggaagtatggcaggcaggaagaataggcacttaatagctttgggatattgggcaggtcgcttgatctttctgagcttcagttttctcatctgggaaatgagttaataatagtcgtttagaaagtgtgatgaggccagccaggtgtgatggctcaggcctgtaatcccagcactttgggaggccgaggcaggtagatcatgaagtcaggagattgagaccatcctcgccaacatggtgaaactctgtctctactaaaaatacaaaaattacccaggcatggtggcgtgtgggaggcagaggttgcagtgagccaagatggcaccactgcactccagcctgggtgacagagcaagactccacctca

SEQ ID NO: 22541 - DNA, 690 bp, Homo sapiens
aaatatattttatgacatcaaaattatttttctctccaattaaaattagaaataaacaaaaaagttaatcaaaatcttaactatttggatatgaagaaatatttctagtctgtttctctggttaaatacagactggagaacttggcttaatgaattgtttgaggcatgaattaactatgttatttttctgcgcggtatcatcaaagaaaaatttttgtgtttctctatatttttacgttgtctgcaataaataggaaagagcctaatttatttatttacttatttatatttttcgagatggagtctcactctgtaacccatgctggagtgcaaagacacaatctcaattcactgcaacctctgcctcctgggttcaagcgattctcctgcctctgctttctaagtagctggaattacaggggcgcaccaccaggcccggctaattttttttgtatttttagtagagacggagtatcaccatgttggcccagctggtctcgaactccttacgagtgatctgcctgtctcagccttccaaagtgctgggattacaggcgtgagccactgcgcccagcccatgaattcaatctaaaacaaataaaaaccttaaatccctcaaaatactacttccttacattgaattgttctgagaagaaaatgcagggctcttgtttactgatgagaatagaa

SEQ ID NO: 22542 - DNA, 635 bp, Homo sapiens
attagaaacagtaagaaattctagagatattaaatcaattcaaggtcaaatacgatttaaatgcttatgggctcagtttttcagggtatcattttttttttccagaaaatttggaaatagaatgatcgaataaaacctccagaaaacaaaaacttagcccaccggccctagtaccattcccattatgaaaaacaaagtaggcgatggtctctctcttacctaagcagcatacatctgatcacttggccatattatggaaactcttacttccaccaccagccatgagttcagacgcccccgggagttttaatctaaaaactcagtcatcctgttcttcctgctttgtcagcttttgtggagagttttcccttcttcccattagcagaaattgggttcacgccgttagacagtagcacattgtttccaaactgcatatcaaggctgaaacacaatcttcaggtcctgcagccattcgtaaacctcttgagctttgctcttgtgtagaacgtacaatgtctgcagagtcccgtgactgaatgacagcctttgaatgccattgttatgtgctcatacagagagatgtacatagaggcacatacacagatggtggacatagcggttgtagtaatgcgcac

SEQ ID NO: 22543 - DNA, 474 bp, Homo sapiens
gccaacgatcagggcatgatccactgccctgatcgagcctcttcacctgctcgggaatctaagcagcatacatctgatcacttggccatattatggaaactcttacttccaccaccagccatgagttcagacgcccccgggagttttaatctaaaaactcagtcatcctgttcttcctgctttgtcagcttttgtggagagttttcccttcttcccattagcagaaattgggttcacgccgttagacagtagcacattgtttccaaactgcatatcaaggctgaaacacaatcttcaggtcctgcagccattcgtaaacctcttgagctttgctcttgtgtagaacgtacaatgtctgcagagtcccgtgactgaatgacagcctttgaatgccattgttatgtgctcatacagagagatgtacatagaggcacatacacagatggtggacatagcggttgtagtaatgcgcac

SEQ ID NO: 22544 - DNA, 495 bp, Homo sapiens
ctgcatgagcgctgatgatgcccagttccaccatctcgctccagactcatctaatcagctgctttctggcagtgtctgtctccattgatacttctcactcagcatgtccaaggctgagctcatcactctcgctccacctcccttctcctcttcctgcatccctgtcctctgtgagcagcatcgccatctaccttgtggcctggacgtgaatcctgaaacttcctccctgtgttggattctccagcgagcacaaaaaaagcataggcttggaacaccaaggaaacaaacacagagtgccaaaaaattatttcaaaagtgtgtagtgacttacacgcatgtttatagcagcacaatttgcaattgcaaaaatgtggaaccaacccaaatgcccatcaaccaacgagtggataaagaaactgtggtgtgtgtgtgtgtgtgtgtgtgtatacatacatacatatatatatatatatatgatggaatactgctcagcca

SEQ ID NO: 22545 - DNA, 210 bp, Homo sapiens
cagagggactagcatgtacaaaggcttttttttttttcctctgaaaggaatatattttgagaatgaagaactgaaagaaggctactgtggcttagacacaggggtgtccaatcttttggcttcccaggggcacattggaaggaagaacaattgtcttgggccacacataaaatacactaacactaatgatagctgatgagctaaaaaaaa

SEQ ID NO: 22546 - DNA, 300 bp, Homo sapiens
aaaaagaattctttttaatgtaaactgttgaatatttgaaatagcccacttcaccttaatgggtcttgtgtatcttcatttgtcttcaaagaaaaaccatttgctaccaaagtaaatcagtatttcgaatgtgcttctcttgttttttgtttattagctagttgctgtaagcatttccaccagaacttgagccaaatcataaggaagctgtttcttttaaaatacaaaccaccaccaaaaaattaaatgtacatattaagcatttgactatttttatttttttaaaaagtataaacacca

SEQ ID NO: 22547 - DNA, 475 bp, Homo sapiens
ggatataaatatctgagggttttttttcttatccatttaagttactaaagtaaaatattttaaatgtgtaaccgttttgtgttcatattgcctggtattttcttggcatattatgcttattggaaaaatatacctttggccatctatatatagagtagcaggattattatgcactaaagaacagttgccagcaccaagctgtgagcctcatggttgtcagacagctttgcagatggaggcccagatgggtgggtgtccagaagtattctatcaatattcagaagagccaaaaggtggaaacaacggcaatgactatcaactgatggaacggataaataaaagttagtatatatccaggccttgtgcggtggctcacacctgtaatcccggcactttgagaggtaaaggcaggccagtgtcttgcatccaggagttttgagaccagcctgggcaacatagggaaactccgtttctg

SEQ ID NO: 22548 - DNA, 385 bp, Homo sapiens
taccatatacaaaaattaattcaaaatggaccaaagacctaaatgtaagaagagctataaggagaaaaataagtgtaattctttgtgaccttaggttaggcaatgattttttagatacgacgccaaagcacaagcaataaaagaaaatgaactgtacgtcatcagaatcaacttttgtacatcaaagaacactatcaagaaagggaaaagacaacccacaaagtgggagaacattttggaaatcatctatgtaacaaggaacttgtatctagactacctcaagaactcttggctgggtacggtggctcacatgggaggatggcttgaggttgggagttcaagaccagcctgggcaatgtcataagaccctgtctctgcaaaaagt

SEQ ID NO: 22549 - DNA, 591 bp, Homo sapiens
tacacaggtgccatggtggtttgctgcacccatcaacccgtcatctaagttttttcttttttttaaattatactttaagttctagggtacttgtgtacaaagtgcaggtctgttacataggtatacatgtactatgttggtttgctgcacacatcaacttgtcgtttacattaggtatttctcctaatgctacccttcccccaaccccccatccccctgacagaccccagtgtgtgatgctccccgccctgtgtccaagtgttctcattgttcaattctcacctatgagtgagaacatgtagtgtttggttttctgtccttgtgatagtttgctgagaatggtagtttccagcttcattcatgtccctgcaaaggacatgaactcatccttttttatggctgcatagtattccatagtgtatatgtgccacattttcttaatccagtctatcattgatggacatttggattggttccaaatctttgctactgtgagtagtgccgcagtaaatacgtgtgctgtttacatagtttttaactgtggaatttattttttatttctgttttattttcatgggcacaacaaacagc

SEQ ID NO: 22550 - DNA, 272 bp, Homo sapiens
ttgaaccaattctcccaaataaactctttttactatatacatatatcctattggttctgtctttctggaagaccctaatacattttgatatgcatttacaacatgaaatgattccataagtctcatgaaacaatcacttcacacatttatcattttttgtggtgaaaacatttaaattctattcttctagcaattttgaaatatgtcatttcttattatttattataatcactattctgtgcaatagatcactaaagtttatctctattgta

SEQ ID NO: 22551 - DNA, 520 bp, Homo sapiens
atgagtttatattgacagttcacgttcagatttcacatattttttcctgttttgatttcctgtttctaaattagtgtgaaaatccccgtttattaaggaaaacaaaattgtttaaaatattgaatattttcaagcccacagaaaagttgagaaaaaaacctagtacaatgagcacctcatatagtcttcactcagattcaccctcggttagcatcatacctttaagtatgtcagtatcattaccacctctttgaaaatcattaattcagtaacatcatctagcatgcattccaaacacagatttccctgtgtctcaagtatccttgtaactttttccttgcttctcttctaggatccacactgtatttggtcaaggttcacacactgtatttggggattgtatctctttggtcttccccattctagaccattccaatagtctaaattcttttctcatgcagcaaatcttctgaagagtctaggccagttgtgttgtagaatatttttatatttgggttca

SEQ ID NO: 22552 - DNA, 124 bp, Homo sapiens
tgttccccttcgggatggtctctcctggcctctgccctatgtggctcttccctttgctgattttattccgtgtccttctgctgtaataaactgtagccttggctataacagcacccctgatgct

SEQ ID NO: 22553 - DNA, 443 bp, Homo sapiens
atatatgcagcaatatggatgaaacccaaatgtgagagctgccgcaccaaaaggccaccaactgtatgattctatttatatgacatcctcgagaaggcagaactatagtagcggagagcagaccagtgattgtgggggttgagaatgatcaggactagaaggaggcgctgactgcaaagtgacactgagaaaaattttgggagcgatggagctgctctgtgtcttgattgtggtggtgattgcatgaatccaagtgttcgtcaacactcatggccctgtacatgaaaaagagtaaattttattttatgtaaaccaaaaagaaatgttttcaaagaacatttaatcacataggaaaatgtgtaagagataaaatataaaacttaattgtatgatgaaaatgtctaaagtatgatacaaatttaatatattaaaatataatatat

SEQ ID NO: 22554 - DNA, 405 bp, Homo sapiens
atctatgaaatcgggataataatagttcctatctcaaaggttgtagtgaggataaaatgaaggtatgtatatataatgtgctttggttagggccccgcataatatctgttgctgctattgttgctgctgttataggataattatactttttgcccagatattgctcaggggtctttgtaatatactcaataacctctgtccttttccttcagagcgtatatttccatttataattttacattccgtgaaatgagagcaaggactgtatcctgtttctcaccattgtccccaacacctagctggtatagtcaaggttaacaaatgtttgttgagtgaatgaatcgtttggagttgagtattttcactcttatagaatgttggacatatacacctactatgtaccca

SEQ ID NO: 22555 - DNA, 450 bp, Homo sapiens
taattataattaatgattttctgaaagtaactgtcaagacaaattttcttaactatctcttttcacctttgaggtttccacaagtgccaattgctgctacaggattccatttagattgttctcagctgcagagctcaattaggtatttttgtcttgacctggcatgaaacggaagtgctagagtcattgtttgagtctttaatttttccccagaacctttgtacaaatacttgatcttgcctttacaaagtggcaaaacaattctctgatctgtcatgtttgtttgctagccctggcttcgttctctcctttggacaattacctaggtttggcaaaattgcttttcgtggcctttggaggcacagttccctctctgcgttcatttgccttgtttagatccataattcactgaaaaaggcttcctcagttgctgttagaatcctgtggcta

SEQ ID NO: 22556 - DNA, 386 bp, Homo sapiens
attcacccaccttggcctcccaaagtgctgggattacaggtgtgagccaccgcacctggcctggaaggaaaattagtgtagtcaattcaagaagcatttactgactatatgcaagagcctgtgatgatcattaagacagcatcagcattaaaactgctgctcctataggatcaagcttagtaaacaataatataaggcaaaatcagttagcctactttttttgttttatttttgagacacggtcttgctctgtcacctaggctggagtgcagtggcatgaacacggctcactgcagcctcaatctcccaggctcaagtgatcctcccaactcagcctcccaaatagctgagaccacatgtgcacaccaccacacccagctattttt

SEQ ID NO: 22557 - DNA, 471 bp, Homo sapiens
cagctctgttatttcatcttggtgtgtattcagagtcaaatattggccaggaatggtggctcatgcctgtaatcccaggactttgggaggctgaggtgggaggatgacttgaggccaggagttcaaggccaacctggccaacgtagtgagatcgcatctctatttaaaaaatttgaaaacaaacaaaaaaaagcaaaatacagtgtcacaaccttcaaacaatgttacaacctgtcttccctcatttactagtgctccagtttccattgactataagtctttctatttccattataatggttccatgaatcatttgtctaagagagacttggtctataaattagtgaagaaatgtcattctgtgatactaaattttatgtattcataaatctctggactatagccacttccttggtctgcttatattatcgatttagggaacaatgtcagtaatccaactgtagccttcag

SEQ ID NO: 22558 - DNA, 203 bp, Homo sapiens
atcacatggagccttgatgtttaccttaagtcagatgagaaaccactggaagattttaagcagagaaggacatgaccactctggctactgaatttcagaccaaataggggcaaaggtggaagtagggaaatccgtgagcttattgcaataatacaagcaaataccatggtgacttccaccaggtggtggcatggggtgatatg

SEQ ID NO: 22559 - DNA, 191 bp, Homo sapiens
gataactatgccttttaaaaaatagcttcaaagacttctagtatatgaggtctgaggtcagttctgccttagtatcttattggaacagaaaaatatcaacatctcatgtaccctataaatatatatacctactgtgtacccacaaaaaattttctaaaaaagaaaagaatatcagtgtcagtgatttttaa

SEQ ID NO: 22560 - DNA, 489 bp, Homo sapiens
atttaaaggaagcattaattttggttaatttattctagtaatacatacattgctctttaaaaacactatatttattttaaacttttttcatatgactagaatttcatcatttttcaagttctgttcaaagcatcattttattgatgataatttcttttatccctggaagttactaatgtctcctatcaattcatacaaatcacaagagatgtctactttaaaagtttgatgcagtacggtagtaataaagtgatcaaccggaaatcaaaaggcatttagaaacaatttcataatgacctgaaaaataataatgattttaaaaaatgaacgtgtgttcagtatgtactgataaagccatggacattctttggctaggattatcagctatctctttgaaaagaattagagtgaaaagaggttaaattattttcttgaggtttaggtggaaggtaacaactgaagcaataaacagccaggcatggtggctca

SEQ ID NO: 22561 - DNA, 1794 bp, Homo sapiens
  misc_feature (1312)..(1312): n is a, c, g, or t
  misc_feature (1315)..(1315): n is a, c, g, or t
gttttcatttgctgagttttctttgtatcagtcactaattcattcaaactctatgacaaaactgattatctttgaatattctcaggtagtcactcactttcatatcttttccccaggagatggtcctgctggagccccctctctcctactccagtctggaattgtttgctccctggactactgcatagccatcatcctgggacttccctttgtcatcatcttgggaattccctttgccttcctcctgtgttaggtcttctatttcctggaccctgtgtcttccttattcttgagtagcttcctgagaaagggtacatacaaaatctgaaattccttcctgaattcagaagttacatgtctggaaatgccttcattttaccttcactcttgaatggtagtttagcttggtgttaaaatctggattgaaaattaatgtgactgttttgaagacattgttccattagcttccagtgtcactattgagaagtccaatgtcattttaatcctcattccctttttcttcccactctgaaagattttaggatcttcagtttatccctggtgttcctgacatttcatgatgtaccttggaatagatatttttctttacttttgcttgtggggtagattgtattttccaaaaaggctgtatatgtatgtgtgtgcatactccccccatctcacccaatatgctattctttgtgcctccatcaagcagtggggtctttgtttcctcctcttgaacctgtgcagacaggaattctcccccgaacgttttggatcttgagcattgtgttttaagagcacagctgcaagatcaagaacatgcacctggcactgctaggtgcccagcgccatcaggccagcatctcccttcccattttccttgtgaccactgtttaggcattgagattaagcactgtagatgtgtatgtgttcattgagagaggggattaagtttttttacttttaaatgaaatcaacaatgaaaatatcaattgacatcagagagagtttcttttaagcagtgaaatgaaccaacatgacggctgtcaggtgcattttttaaaaatccaccttaggaaatgacaaaaaaagaaatgaccaaaaagaaactaacttgagcttcatgattaaatatgtcattattaaatgtgacaaatatattgtttgcaagaatttctgtgatgagaagatggaagcaaaaggagctgcataaatcacagcttcacagaacattgtcagtatttttgtgtttatctcatggatacatattattattattattttgagatggagtctcactctgtcnccnaggctggagtacagtggcgtgatctcagctcacggcaagctccgcttcccgggttcatgccattctcctgccttctcagcctcccgagtagctgggactacaggcgcctgccacacgcccggcttattttttgtatttttagtagagacggggtttcaccttgttagccaggatggtctcgatctcctgaccttgtgatccacacgcctcggcctcccaaagtgctgggattacagacatgaaccaccgcgcccagccacaaaattgtttttaaaaaaactattttacaaaatctttgaccgtaattatttttaagatgaaaaatatgttatataaattataaaatgttacttaacacaaatataagtattgattgcccaatgttgagagagatcaacaaatgatataaaaccattcactccaaaattataattacattttaaaattaaaaaatgaaaaacattaaactttttaatttg

SEQ ID NO: 22562 - DNA, 1870 bp, Homo sapiens
  misc_feature (1312)..(1312): n is a, c, g, or t
  misc_feature (1315)..(1315): n is a, c, g, or t
gttttcatttgctgagttttctttgtatcagtcactaattcattcaaactctatgacaaaactgattatctttgaatattctcaggtagtcactcactttcatatcttttccccaggagatggtcctgctggagccccctctctcctactccagtctggaattgtttgctccctggactactgcatagccatcatcctgggacttccctttgtcatcatcttgggaattccctttgccttcctcctgtgttaggtcttctatttcctggaccctgtgtcttccttattcttgagtagcttcctgagaaagggtacatacaaaatctgaaattccttcctgaattcagaagttacatgtctggaaatgccttcattttaccttcactcttgaatggtagtttagcttggtgttaaaatctggattgaaaattaatgtgactgttttgaagacattgttccattagcttccagtgtcactattgagaagtccaatgtcattttaatcctcattccctttttcttcccactctgaaagattttaggatcttcagtttatccctggtgttcctgacatttcatgatgtaccttggaatagatatttttctttacttttgcttgtggggtagattgtattttccaaaaaggctgtatatgtatgtgtgtgcatactccccccatctcacccaatatgctattctttgtgcctccatcaagcagtggggtctttgtttcctcctcttgaacctgtgcagacaggaattctcccccgaacgttttggatcttgagcattgtgttttaagagcacagctgcaagatcaagaacatgcacctggcactgctaggtgcccagcgccatcaggccagcatctcccttcccattttccttgtgaccactgtttaggcattgagattaagcactgtagatgtgtatgtgttcattgagagaggggattaagtttttttacttttaaatgaaatcaacaatgaaaatatcaattgacatcagagagagtttcttttaagcagtgaaatgaaccaacatgacggctgtcaggtgcattttttaaaaatccaccttaggaaatgacaaaaaaagaaatgaccaaaaagaaactaacttgagcttcatgattaaatatgtcattattaaatgtgacaaatatattgtttgcaagaatttctgtgatgagaagatggaagcaaaaggagctgcataaatcacagcttcacagaacattgtcagtatttttgtgtttatctcatggatacatattattattattattttgagatggagtctcactctgtcnccnaggctggagtacagtggcgtgatctcagctcacggcaagctccgcttcccgggttcatgccattctcctgccttctcagcctcccgagtagctgggactacaggcgcctgccacacgcccggcttattttttgtatttttagtagagacggggtttcaccttgttagccaggatggtctcgatctcctgaccttgtgatccacacgcctcggcctcccaaagtgctgggattacagacatgaaccaccgcgcccagccacaaaattgtttttaaaaaaactattttacaaaatctttgaccgtaattatttttaagatgaaaaatatgttatataaattataaaatgttacttaacacaaatataagtattgattgcccaatgttgagagagatcaacaaatgatataaaaccattcactccaaaattataattacattttaaaattaaaaaatgaaaaacattaaactttttaatttgaaaaaaatttaaactcaaaaagttaatttaaaattagttacatttaaatgtaattaaatgctaaaaatctctcttc

SEQ ID NO: 22563 - DNA, 399 bp, Homo sapiens
aaacaaaagaaactttaggtatcaaaccaaaacacatcataaccacatcgtaaaagtagtgacaaaaccaacacatatgtttgcaaataccttgggaagattgtgttttatagcaatagtttttttgctaaacaaacaactaacttttaaagttaacatttgctggagatgatattttcccagggaagtatttaaatgcttggaacacacctatccaaagacaaatatttgttttcccccagccactggaaagagaccccaactggaaacattgtctagaaatgaatatttggaaactctgaggccctctataaatgccattgcagtagctcactgtccttctaagctgaggacaaaatgccctcaaaggggccttggtgtagaaaagctgttttcagg

SEQ ID NO: 22564 - DNA, 443 bp, Homo sapiens
ctggaaaaagccaagagttccttccaccagctcagcccggacctctcaaagaggtcatctccacagaactgaccaacccgattcccctacccctcccaccacctcactccctttggtttcagccagcaaagcccccccccaggccaaggcagggacaagcccaggagaagtcaaagacgggacaagtccattcacgcaggcgggaagcaccgagccccgacttcccaccaggagccccggggttgggatggacagaggtgggcccttcacccggcagacccccctcccagctccaggagaaacagaggtggggccccaacttcctaccaggagcccctgggtggggagacacagaggtgagtggggagggacagaggtaggccctccgccctcccacccggcagaccccctcccagctgcaggagggagattggggcagcagc

SEQ ID NO: 22565 - DNA, 400 bp, Homo sapiens
caagaaacaagaaaacaaaatcatcgtaggtggggatgagtgcaaagaagggaataagcaggatattattcagagaaaatgtaagtgatgtctacttttaaataggctaggcaggggcagagagtagaacagcaaagccttaaagctggacagatctggacttgtcccaggacagaaaggaggtcagtggagctgaagcacagggagcaaatcacagtggacttcggaaaggatggacgggcagggtgtaggggagccaggtgtgcaggccccgagaccaccctaaggagtctggattttatcctagtgcagaggaaatttacagatgtgcttgcaagcaggagacgtgctgagctcattttatgagttacaggggtagctctggctgccagtggagaat

SEQ ID NO: 22566 - DNA, 417 bp, Homo sapiens
aggactgtatgtcctttctttttcctctgcttcagtcacctagcttgggcagtgctgagcagtgtaccctgccagggggcagtcagagtcacactgtaaggacctgtattcctgccctgggaggaaggtgggggtcactgggtatttcttgtagtcacatcaaccagtccctgacctgtggagaactgtgaaaagagctgccccaggcccagtttggagcagacctgaccgtcctgttgctttggcttcagggatgccctttaatttcaagctcctggcttgctgtttggaataacccccatactgtgcagcacacaatgcctgctagaaggaacatctagaagagtgctgtgtgacagaaatagtgtatgaactatggatagatataaaacaacgttttctagtagtcgtgttaat

SEQ ID NO: 22567 - DNA, 480 bp, Homo sapiens
atcagaagaaaactatacaccagaaaacaagagaacttttttttttgtattggatgggaagaacataggtttatttgttgatatttacaatgaaaactcctggaaccgtaatgcttcattcaatacatgagccagtaatttcatttgtgtgtgtttcatttcacacacacacagacacacaaatattgctaaaatgatcacaaaatctcacagctacaaaagaaatcattatgacttccatgtgtgtaaattccatgagattgacaattccttagtctgataacaaatgaacaagtgaatccaaatttctttttgttttgcactctcacttgtcttgtaaagtaaaggtaacctaggtattacttcacgagattcaaactcatttaacaaagtaagtgcttttaagattgaaatatgttaaatcttatgaatactagtataactttaataaacatatcttttgtctcttactattcctta

SEQ ID NO: 22568 - DNA, 505 bp, Homo sapiens
taacagcccctctaagttctccatgacttagaccccagtcacctccctgacatccctgagtgggaggcacctggcggtttcgcgctttccccgcgttttgtttgcgtcagagcagcgcgctggcgggagctgcagggcaaatatcccgccccggtgctttggtgtgtggcacttgctgccattctgccgctgtggggtgagcggcggtggcgggactagcacccaggcgggatccgttggcagcagcagagagagctcaatcctgatgatgcagaagcccagactccagcctactgcaagttccagagcaggctgtacccacgcctgcgtgagggctagagggacttggcctgctccgcaaatgatccaacttcccggacgggctggtgaacacagacaatgccagcctggataaggaagcggccagcactgcttaggcattgttctcaggacgcgcattactgagtgtggaactttaccctcctgatgaagacgccagagttgg

SEQ ID NO: 22569 - DNA, 513 bp, Homo sapiens
gaaacgggcttaaggatctcttgcttttctggaggaaagttcagtatcgcattaataaagagaaacagtaggaatcatggcaaaaataataaaaaagcagctctgttggaaaggaggagctgaagccagcagctctctagggaatctatgcctagtcttgagctaatacttttctgaaataagtttgatctgccttaaacataattaaaaccgcttacagtttctgcagagaggatgcagtcgtcgaagttctgaagctgaactaacttgtgtggcctgtctgcttgggcatcagtcttagcggtgagctgcgtctcacccacgtgagtatgaactgaattttctctgtcctggttattgcacatgctggagaccacacaagcccagcgtgctggtatcagctgttggcaagtctgcttcccagctgggctgcaggtcccagccccagggactccatccagttggcttgtctgcccttgtggagctgaggcaggtgaagagaagcccgccgtg

SEQ ID NO: 22570 - DNA, 559 bp, Homo sapiens
  misc_feature (27)..(27): n is a, c, g, or t
gaatctacttccaccctcagaacttanaatgaactgcatcctttttttcatcttcttttcttctccagtgaatatgatctccaaacccttattttttctttgaactgtaaaatttccactcatggacgatgcaaccaacagatgcaatctctgagaagatgaaaattgggacctcttattataaaattgacctagctggactcaggaaaccagggaagaagtcaatgcaggcatttaaaatgtaaagttttttctggttaaatctatttatttttcttgtaggttgagtatttcttcccagtttttctgctctggtgtataacaaacaggtcaaaatttcccatctttcctcctgatagtagttgaatcctaccttgcatacttaatgcatagtgaaatggcatctagcagaaatacacacccccaaaacacaccaccatttcattaggtgcccaaaaaattctgtatttagcttatttatttattgttatttttgctttttcttaacccactatatattgactgcaaacgaattaataaattatcccttctggaaaat

SEQ ID NO: 22571 - DNA, 428 bp, Homo sapiens
ggtcgacctggtctcgaactccagacttcaagtgatctgtctgccttggcctcccaatgtgctgggattacaggcataagccaccgcgctgggcctgaggaaaatttttaaaaaataatcgagactgctgttatggtgacaccaccacgagaagctacaagcaaaatactgataacctcatatgtgaaaatttttcatattgtttaaaatattatgaacaaaagaaaagacaaataacaaactgggaaaaatatttacaactcatcacaaatggctaatccttttaatgttaatatttaaaaaaaaatacaaatcaggtcaggcacagtggctcatgcctgtaatcccagtactttgggaggctgaggtgagaggatcacctgaagtcaggagttcaaaaccagcctggccaacacggagaaacctgt

SEQ ID NO: 22572 - DNA, 409 bp, Homo sapiens
ggtcgacctggtctcgaactccagacttcaagtgatctgtctgccttggcctcccaatgtgctgggattacaggcataagccaccgcgctgggcctgaggaaaatttttaaaaaataatcgagactgctgttatggtgacaccaccacgagaagctacaagcaaaatactgataacctcatatgtgaaaatttttcatattgtttaaaatattatgaacaaaagaaaagacaaataacaaactgggaaaaatatttacaactcatcacaaatggctaatccttttaatgttaatatttaaaaaaaaatacaaatcaggtcaggctggtctcgaactccagacttcaagtgatctttctgccttggcctcccaacgtgctgggttccaggcatagccaccgcgctgggcc

SEQ ID NO: 22573 - DNA, 999 bp, Homo sapiens
atagctgtcacagctgaggtaaagttacagtgatttacttggtggtagaatgttgggatttttccatttgattgagttctaggaagcctttagtttccctgcctgcagaccccattctcctgcctcagatatatcaatgacatattcaatacatcattaagttgcttaatatttaagaggttaagatgcacaggtaatgacctctaaatgaatgccaataaaaatagtaaaaggtgtaaactctgactcctatctgacctaggtaggaagtaacatccagaacttctgcaggctgtcctgtgtaattgttctccggaggaacccttgtccctggggtttgagagaaggggatcgaggaaaaggatgtttgtctgagctcttgtttgatttgcccaagtgacttgacttgtttgaatcctctcagggtgccatcatgtaatctgtccactccaacttcttcctgtttttcacattggcaaaacaaaacccaactgaatcgacactgagtttaaaataaatcttggtatttaggttgtacctaaaaatgataacttttagactgtaatcagaggtagatgctatcaatttgttagtgaggaggggaggagttttcaatgccacttagtttacaatgtctaattgttcaaatatacatctaggttgtaaaggagactcaacggtaagttatagtgaccattgaaaaatgtaaaggggcttcaaatcaagaacttagaaggaatttcttgcaatctattgagacacaaagcagatgagtggttgtctgggcctaggaacaggaatggggagtggctgcaaataggtggaagagaccttttttgggtgatgaaagtgctctataattgggttatggtaataattgtacaactatgtaaatttactgaaagtcattgagttggacacttaaaacaggtgaattttatgatatgtaaattatatattcacaaagccattaaaaattgtattttttgagcagctaca

SEQ ID NO: 22574 - DNA, 552 bp, Homo sapiens
gattaaatgtgtgtgtgaccttttgtttttattatagcagttggagtaatccaaactttaacctatcacattgatattgaaactgttctctaataccaagaaggcctgttaacattgtaatatggtggactcaaaccagttgaactacatttaacctacctaaatggcaacatcctctcagttgttatacagaagcttaggatatattcttggtttgttagaaaaatgaaattgaatgttgttaaagtggtactttgtaaatctggcttttacactaaaagcaccctctcagcttgtagtattttaatttgataatattcagcctgaatttgtttgaaattctgtgaggaacagttgcattaaaaaaaaaattcagcatgctttttctggaatttatttttatggcaatttaagttttatatctcctacttgattgacatgttatttgtaattagctggtaaattgtgtgcatgagctatcagtgctgcaaatttttaggaaaataagcaatcattaaatagaaaaatttgtgttggaagctttcattgctt

SEQ ID NO: 22575 - DNA, 550 bp, Homo sapiens
taatcatactaagactaatctgtttgcaaaatcagtctaatctcattaaacttggactgatcatttatgtaactgcatcaaggatagtggttcaatgcacattctcaaatatgacattccagtcaaagttttggtgataaccaaaggggttattagctccataaagtcaatctctactcattgaaactgtctggtaataaggagtctcagattagacttttaaaagccactccaggctaagcaaccaagccatggacttgcacaattttgtaaaatggagataacttaactagtaataaaagttgtatgtctgtattataactaatattgacaactctgaaggtatatccttttctttttttaaaaaaactaaaccaacgatattcttactcaccaaagattatccgtgtcacatgaacttaaaaaacatttgagtaaattcctgtttttctgaaagttttagaattacttatacaagtgcttatttttctttgagccaattaaatagagctattttatacattaattttggaaatgccatccagaggtt

SEQ ID NO: 22576 - DNA, 515 bp, Homo sapiens
tgtcaatctttcatagaccttggttatcctccaccgtcatcagggtttttcatcgaccttgacatcagatctacctacggacattgttgttcgaagcaatgatcataaagctttttattgagtgcttaatatgtcctgggcattttggtaagcactatacaaacgttatctcaattaatcctgtcaacaaacatacaaaagaaatactattcatatcctcatcttaaaagtgtggaaactgccaggtgtggtggctcatgcctgtaatcccagcactttgggaggccgaggcagtggatcacgtgaggtcaggagttcaagaccagcctggccaacatggtgaaaccctgtccctacaaaaacacaaaaattagccgggcatgatggtgggtgcctgtaatcccagctactaggggggctgaggctggagaatcgcttgaacccaggaggcggggttacagtgagccgagatctcaccactgcactccagtctgggtgacagagactccatctca

SEQ ID NO: 22577 - DNA, 1797 bp, Homo sapiens
  misc_feature (13)..(13): n is a, c, g, or t
tggccaaccctcnccacccgggacttgggcagcggcgccggcagcccagcgtctatttgcgcttaagagccagcaaggaagctccaggggccccagctggccgtgctcccccgggatgcaagtccctgcgctgacgcccggcagcggctggcacgggcgcggctgctccgggtgcacagggatgctgctgtttcggggaccccggcgccctgccttggccagccccgcgggcccctgaggccactctccggagcgcgccgccgctgggcttctggcgctgcctgaggcatcctccccaaccaccgaacctccggcggttctcctcggcccagaccgatggagccggggatgctgggtccacacaacctcccacaccacgagccaatcagcttcggcatcgatcagatcctgagcggccccgaaaccccagggggcggtctaggcctgggtcgcgggggccagggtcatggggagaatggggcgttctcgggtggataccacggagcctcgggctacggtcccgccggctcacttgccccgctgcccggcagctccggagtgggcccaggcggcgtgatccgcgtccctgcgcaccgcccgctgcctgtgccgccgcccgctgggggggcgcctgcagtgcctgggccctcgggtttgggcggcgccggaggcctagcgggactcaccttcccctggatggacagcggccgccgctttgccaaggaccggctcacggctgcgctctcgcccttctctgggacgcgccgcataggccacccctaccaaaaccggacccctccgaagcggaagaagccgcgcacgtccttctcccgctcacaggtgctggagttggagcggcgcttcctgcgccagaagtacctggcctctgcggagagggcggcgctggccaaggccttgcgcatgaccgacgcacaggtcaaaacgtggttccagaaccgacgcaccaagtggcggcgccagacggcggaggagcgcgaggccgagcggcaccgcgcgggccggctgctcctgcatctgcagcaggacgcgttgccacggccgctgcggccgccgctgcccccggaccctctctgcctgcacaactcgtcgctcttcgcgctgcagaacctgcagccctgggccgaggacaacaaagtggcttcagtgtccgggctcgcctcggtggtgtgagcgacgcccgtccgatcggcgtggagcgccgggcccggagcggtggagcgcgcggctgcctgcgtccatggtctagtggcagccgggcgcgtgaggagcggcaggccttgaggctgtcgtcgagggctcctccaccaccggccggctcccaagccagcgttgcgcagatgcacggccagctcagaggcggcctttcccgccatttttcacttcactgccgttacgccctcgctggaacctgaggcgccgagagggcgggacctgcaggacagtagccaatgaggtgcggggagggggccgggctggccaatgggagctgctttcctgagggactcgaaattctccggcgggtggtcgggagctggggctctgaggggctctagcggcgttgcgcgcggtgccggctgggtctgtaccaaaggtgtgaaggaaagaagacaccgaccacggcgaagcaatagagggggtgctggagcgcgagaggctggctgattgtgaccgaaaccagagggttgtccaccccgggcatctcatccctcaactgtaaaataatcgctaaggattccttcctgactttgagcctcacgttgtcatgtgtgttcagcc

SEQ ID NO: 22578 - DNA, 1396 bp, Homo sapiens
gatccaaccaaggcctcagtgaggtcccacgtgtcccccgtggcgagatttcgccctcccgccgttgaggaggaagagtgtgagaacagacttcctaggcaccgggcgccgttccccagccgcttcttacgcagccgggaaaccacaacgagatttggtcttcgagagcatttaggcggggaccacaacgaatccgggagttggccagaaggatccatcgagaggcgaagagtgggggctgggggaggaggcacctgcggaggaagccggtgaggcggaggcagcccaaaggcggaggccgcccaaaggcggaggccagcaaggatggaggcgcgctgcgctctcgcccttctctgggacgcgccgcataggccacccctaccaaaaccggacccctccgaagcggaagaagccgcgcacgtccttctcccgctcacaggtgctggagttggagcggcgcttcctgcgccagaagtacctggcctctgcggagagggcggcgctggccaaggccttgcgcatgaccgacgcacaggtcaaaacgtggttccagaaccgacgcaccaagtggcggcgccagacggcggaggagcgcgaggccgagcggcaccgcgcgggccggctgctcctgcatctgcagcaggacgcgttgccacggccgctgcggccgccgctgcccccggaccctctctgcctgcacaactcgtcgctcttcgcgctgcagaacctgcagccctgggccgaggacaacaaagtggcttcagtgtccgggctcgcctcggtggtgtgagcgacgcccgtccgatcggcgtggagcgccgggcccggagcggtggagcgcgcggctgcctgcgtccatggtctagtggcagccgggcgcgtgaggagcggcaggccttgaggctgtcgtcgagggctcctccaccaccggccggctcccaagccagcgttgcgcagatgcacggccagctcagaggcggcctttcccgccatttttcacttcactgccgttacgccctcgctggaacctgaggcgccgagagggcgggacctgcaggacagtagccaatgaggtgcggggagggggccgggctggccaatgggagctgctttcctgagggactcgaaattctccggcgggtggtcgggagctggggctctgaggggctctagcggcgttgcgcgcggtgccggctgggtctgtaccaaaggtgtgaaggaaagaagacaccgaccacggcgaagcaatagagggggtgctggagcgcgagaggctggctgattgtgaccgaaaccagagggttgtccaccccgggcatctcatccctcaactgtaaaataatcgctaaggattccttcctgactttgagcctcacgttgtcatgtgtgttcagcc

SEQ ID NO: 22579 - DNA, 917 bp, Homo sapiens
  misc_feature (13)..(13): n is a, c, g, or t
tggccaaccctcnccacccgggacttgggcagcggcgccggcagcccagcgtctatttgcgcttaagagccagcaaggaagctccaggggccccagctggccgtgctcccccgggatgcaagtccctgcgctgacgcccggcagcggctggcacgggcgcggctgctccgggtgcacagggatgctgctgtttcggggaccccggcgccctgccttggccagccccgcgggcccctgaggccactctccggagcgcgccgccgctgggcttctggcgctgcctgaggcatcctccccaaccaccgaacctccggcggttctcctcggcccagaccgatggagccggggatgctgggtccacacaacctcccacaccacgagccaatcagcttcggcatcgatcagatcctgagcggccccgaaaccccagggggcggtctaggcctgggtcgcgggggccagggtcatggggagaatggggcgttctcgggtggataccacggagcctcgggctacggtcccgccggctcacttgccccgctgcccggcagctccggagtgggcccaggcggcgtgatccgcgtccctgcgcaccgcccgctgcctgtgccgccgcccgctgggggggcgcctgcagtgcctgggccctcgggtttgggcggcgccggaggcctagcgggactcaccttcccctggatggacagcggccgccgctttgccaaggaccggctcacgggtgaggttgtctgacccctccagcgtcacgcccgactctgaccccgtctcctcatttcttagctttctgctccaactcaaggacccctttcacacctcccatagatctcccaggggatctcccccaatcaaatctctgggtctgcctccgagaggtgatgggagggagctgccgtcggtgc

SEQ ID NO: 22580 - DNA, 965 bp, Homo sapiens
ccaacaaacacacaacaccacaaaaccaacacaacaacactactggcactgatcaagcccgtcgcgtataacgctgcagagaagccagagactttcgcttccggctgccgcaggcgcttcgctggtgcagacgcagtgctgagcacacagctaccggacaaagagtgacgcccggagctggagttatggcggctacggagccgatcttggcggccactgggagtcccgcggcggtgccaccggagaaactggaaggagccggttcgagctcagcccctgagcgtaactgtgtgggctcctcgctgccagaggcctcaccgcctgcccctgagccttccagtcccaacgccgcggtccctgaagccatccctacgccccgagctgcggcctccgcggccctggagctgcctctcgggcccgcacccgtgagcgtagcgcctcaggccgaagctgaagcgcgctccacaccaggccccgccggctctagactcggtcccgagacgttccgccagcgtttccggcagttccgctaccaggatgcggcgggtccccgggaggctttccggcagctgcgggagctgtcccgccagtggctgcggcctgacatccgcaccaaggagcagatcgtggagatgctggtgcaagagcagctgctcgccatcctgcccgaggcggctcgggcccggcggatccgccgccgcacggatgtgcgcatcactggctgagcggtggagctgcgggcggccagggccgggcgctctgtgcggactggggccatgatcgggcccgggggcctgagcctgggaccccaccccgtgttaatgaaaaatgagttttggcagccaaaaaaaaaaaaaaaaaaaaactgggggtttttttgggggggggaaagggttttaaggggcatgttgtatttttttctggcacctttgggaaagggaaatgcgggcccaaagagggaatga

SEQ ID NO: 22581 - DNA, 2041 bp, Homo sapiens
tcaattacctctgagaggtaagttctattacatccacattttactgataagaaaacagtagctcagagatagcaagcagtttacctaataaaaacaagagcaaacttcttaaaagccctttctctccaacggcttaatttatttaatcctcctaacaactctgagctgggtatcgtcaaaggggattccaccaaggtagcctcactccaacactctaacccaaggctgctcaacagaaatataatgtaaactgcacatgcaatttaaatgtttttagaagctgcatttaaaaagtaaaaacacaggtgaaattaataacatttttatttgacccaatatatgcaaaacattatattccaacatgtaatcagtattaaaaagtattgagataatttttacatcagttttttcgtactaagtcccgtattttacaatatagcacatctcaattcgctatatttcgagggttatcaactagctacgttgcaagagctgagtcaactcaggaggccagcggccaccataaggggcaatgcatttagagttcacttattaaatgctgacgttaacagaacccacagagccgcatttcccttggtttcggaggacacgcgaaaaataacaacagcaaagggttctcgagcatctccttcgcgccagacggtgtgttgtactttgtcatcgtcgcagtaaggccggtgctatcgccctcctagtttgaccaagcgagaggactttctccagatgggcccctcccgagagaatggtcgccgtcccgctctcctgttcgggtcaccaccggccgggcgccactcgaacgagccccggccagccgtcaccctaatcattcccgaaggaggggccatcagagctacagctcatcagggtcaatcagaaggggcgcccgcacgcaaaggtcacctgcaaaccgaagcggcgcacggataaggtccgggacttgaagtctatctccaaacattcaggctcctcctccgactcctcctcgaactggcgctcagaggcgccaccattcggaaggagcccaggcacgcgcagtcgccctcccgcaccggagggcagcagccgcctcatgcgactcgagaacgctagagggcgccgcttccgggagcccaagcggcttccgggtgctcgcgcgccgacctggacgcagagaagccagagactttcgcttccggctgccgcaggcgcttcgctggtgcaggtaagctccgcacactctcggccggtcccgagtccgactccctcaagggtgacgcgagctctgccctttaaccggaaacgtctccctgctcaccccacccccgcgcagacgcagtgctgagcacacagctaccggacaaagagtgacgcccggagctggagttatggcggctacggagccgatcttggcggccactgggagtcccgcggcggtgccaccggagaaactggaaggagccggttcgagctcagcccctgagcgtaactgtgtgggctcctcgctgccagaggcctcaccgcctgcccctgagccttccagtcccaacgccgcggtccctgaagccatccctacgccccgagctgcggcctccgcggccctggagctgcctctcgggcccgcacccgtgagcgtagcgcctcaggccgaagctgaagcgcgctccacaccaggccccgccggctctagactcggtcccgagacgttccgccagcgtttccggcagttccgctaccaggatgcggcgggtccccgggaggctttccggcagctgcgggagctgtcccgccagtggctgcggcctgacatccgcaccaaggagcagatcgtggagatgctggtgcaagagcagctgctcgccatcctgcccgaggcggctcgggcccggcggatccgccgccgcacggatgtgcgcatcactggctgagcggtggagctgcgggcggccagggccgggcgctctgtgcggactggggccatgatcgggcccgggggcctgagcctgggaccccaccccgtgttaatgaaaaatgagttttggca

SEQ ID NO: 22582 - DNA, 1933 bp, Homo sapiens
tcaattacctctgagaggtaagttctattacatccacattttactgataagaaaacagtagctcagagatagcaagcagtttacctaataaaaacaagagcaaacttcttaaaagccctttctctccaacggcttaatttatttaatcctcctaacaactctgagctgggtatcgtcaaaggggattccaccaaggtagcctcactccaacactctaacccaaggctgctcaacagaaatataatgtaaactgcacatgcaatttaaatgtttttagaagctgcatttaaaaagtaaaaacacaggtgaaattaataacatttttatttgacccaatatatgcaaaacattatattccaacatgtaatcagtattaaaaagtattgagataatttttacatcagttttttcgtactaagtcccgtattttacaatatagcacatctcaattcgctatatttcgagggttatcaactagctacgttgcaagagctgagtcaactcaggaggccagcggccaccataaggggcaatgcatttagagttcacttattaaatgctgacgttaacagaacccacagagccgcatttcccttggtttcggaggacacgcgaaaaataacaacagcaaagggttctcgagcatctccttcgcgccagacggtgtgttgtactttgtcatcgtcgcagtaaggccggtgctatcgccctcctagtttgaccaagcgagaggactttctccagatgggcccctcccgagagaatggtcgccgtcccgctctcctgttcgggtcaccaccggccgggcgccactcgaacgagccccggccagccgtcaccctaatcattcccgaaggaggggccatcagagctacagctcatcagggtcaatcagaaggggcgcccgcacgcaaaggtcacctgcaaaccgaagcggcgcacggataaggtccgggacttgaagtctatctccaaacattcaggctcctcctccgactcctcctcgaactggcgctcagaggcgccaccattcggaaggagcccaggcacgcgcagtcgccctcccgcaccggagggcagcagccgcctcatgcgactcgagaacgctagagggcgccgcttccgggagcccaagcggcttccgggtgctcgcgcgccgacctggacgcagagaagccagagactttcgcttccggctgccgcaggcgcttcgctggtgcagacgcagtgctgagcacacagctaccggacaaagagtgacgcccggagctggagttatggcggctacggagccgatcttggcggccactgggagtcccgcggcggtgccaccggagaaactggaaggagccggttcgagctcagcccctgagcgtaactgtgtgggctcctcgctgccagaggcctcaccgcctgcccctgagccttccagtcccaacgccgcggtccctgaagccatccctacgccccgagctgcggcctccgcggccctggagctgcctctcgggcccgcacccgtgagcgtagcgcctcaggccgaagctgaagcgcgctccacaccaggccccgccggctctagactcggtcccgagacgttccgccagcgtttccggcagttccgctaccaggatgcggcgggtccccgggaggctttccggcagctgcgggagctgtcccgccagtggctgcggcctgacatccgcaccaaggagcagatcgtggagatgctggtgcaagagcagctgctcgccatcctgcccgaggcggctcgggcccggcggatccgccgccgcacggatgtgcgcatcactggctgagcggtggagctgcgggcggccagggccgggcgctctgtgcggactggggccatgatcgggcccgggggcctgagcctgggaccccaccccgtgttaatgaaaaatgagttttggca

SEQ ID NO: 22583 - DNA, 2155 bp, Homo sapiens
tcaattacctctgagaggtaagttctattacatccacattttactgataagaaaacagtagctcagagatagcaagcagtttacctaataaaaacaagagcaaacttcttaaaagccctttctctccaacggcttaatttatttaatcctcctaacaactctgagctgggtatcgtcaaaggggattccaccaaggtagcctcactccaacactctaacccaaggctgctcaacagaaatataatgtaaactgcacatgcaatttaaatgtttttagaagctgcatttaaaaagtaaaaacacaggtgaaattaataacatttttatttgacccaatatatgcaaaacattatattccaacatgtaatcagtattaaaaagtattgagataatttttacatcagttttttcgtactaagtcccgtattttacaatatagcacatctcaattcgctatatttcgagggttatcaactagctacgttgcaagagctgagtcaactcaggaggccagcggccaccataaggggcaatgcatttagagttcacttattaaatgctgacgttaacagaacccacagagccgcatttcccttggtttcggaggacacgcgaaaaataacaacagcaaagggttctcgagcatctccttcgcgccagacggtgtgttgtactttgtcatcgtcgcagtaaggccggtgctatcgccctcctagtttgaccaagcgagaggactttctccagatgggcccctcccgagagaatggtcgccgtcccgctctcctgttcgggtcaccaccggccgggcgccactcgaacgagccccggccagccgtcaccctaatcattcccgaaggaggggccatcagagctacagctcatcagggtcaatcagaaggggcgcccgcacgcaaaggtcacctgcaaaccgaagcggcgcacggataaggtccgggacttgaagtctatctccaaacattcaggctcctcctccgactcctcctcgaactggcgctcagaggcgccaccattcggaaggagcccaggcacgcgcagtcgccctcccgcaccggagggcagcagccgcctcatgcgactcgagaacgctagagggcgccgcttccgggagcccaagcggcttccgggtgctcgcgcgccgacctggacgcagagaagccagagactttcgcttccggctgccgcaggcgcttcgctggtgcaggtaagctccgcacactctcggccggtcccgagtccgactccctcaagggtgacgcgagctctgccctttaaccggaaacgtctccctgctcaccccacccccgcgcagacgcagtgctgagcacacagctaccggacaaagagtgacgcccggagctggagttatggcggctacggagccgatcttggcggccactgggagtcccgcggcggtgccaccggagaaactggaaggagccggttcgagctcagcccctgagcgtaactgtgtgggctcctcgctgccagaggcctcaccgcctgcccctgagccttccagtcccaacgccgcggtccctgaagccatccctacgccccgagctgcggcctccgcggccctggagctgcctctcgggcccgcacccgtgagcgtagcgcctcaggccgaagctgaagcgcgctccacaccaggccccgccggctctagactcggtcccgagacgttccgccagcgtttccggcagttccgctaccaggatgcggcgggtccccgggaggctttccggcagctgcgggagctgtcccgccagtggctgcggcctgacatccgcaccaaggagcagatcgtggagatgctggtgcaagagcagctgctcgccatcctgcccgaggcggctcgggcccggcggatccgccgccgcacggatgtgcgcatcactggctgagcggtggagctgcgggcggccagggccgggcgctctgtgcggactggggccatgatcgggcccgggggcctgagcctgggaccccaccccgtgttaatgaaaaatgagttttggcaaaaaaaaacacacacacccagctctctatccgggcggaaaaagatacaagggaggaaaaggtctgcccttctggccgtggaacgcggccctgtgggcatatgaacagcacaaca

SEQ ID NO: 22584 - DNA, 2157 bp, Homo sapiens
tcaattacctctgagaggtaagttctattacatccacattttactgataagaaaacagtagctcagagatagcaagcagtttacctaataaaaacaagagcaaacttcttaaaagccctttctctccaacggcttaatttatttaatcctcctaacaactctgagctgggtatcgtcaaaggggattccaccaaggtagcctcactccaacactctaacccaaggctgctcaacagaaatataatgtaaactgcacatgcaatttaaatgtttttagaagctgcatttaaaaagtaaaaacacaggtgaaattaataacatttttatttgacccaatatatgcaaaacattatattccaacatgtaatcagtattaaaaagtattgagataatttttacatcagttttttcgtactaagtcccgtattttacaatatagcacatctcaattcgctatatttcgagggttatcaactagctacgttgcaagagctgagtcaactcaggaggccagcggccaccataaggggcaatgcatttagagttcacttattaaatgctgacgttaacagaacccacagagccgcatttcccttggtttcggaggacacgcgaaaaataacaacagcaaagggttctcgagcatctccttcgcgccagacggtgtgttgtactttgtcatcgtcgcagtaaggccggtgctatcgccctcctagtttgaccaagcgagaggactttctccagatgggcccctcccgagagaatggtcgccgtcccgctctcctgttcgggtcaccaccggccgggcgccactcgaacgagccccggccagccgtcaccctaatcattcccgaaggaggggccatcagagctacagctcatcagggtcaatcagaaggggcgcccgcacgcaaaggtcacctgcaaaccgaagcggcgcacggataaggtccgggacttgaagtctatctccaaacattcaggctcctcctccgactcctcctcgaactggcgctcagaggcgccaccattcggaaggagcccaggcacgcgcagtcgccctcccgcaccggagggcagcagccgcctcatgcgactcgagaacgctagagggcgccgcttccgggagcccaagcggcttccgggtgctcgcgcgccgacctggacgcagagaagccagagactttcgcttccggctgccgcaggcgcttcgctggtgcaggtaagctccgcacactctcggccggtcccgagtccgactccctcaagggtgacgcgagctctgccctttaaccggaaacgtctccctgctcaccccacccccgcgcagacgcagtgctgagcacacagctaccggacaaagagtgacgcccggagctggagttatggcggctacggagccgatcttggcggccactgggagtcccgcggcggtgccaccggagaaactggaaggagccggttcgagctcagcccctgagcgtaactgtgtgggctcctcgctgccagaggcctcaccgcctgcccctgagccttccagtcccaacgccgcggtccctgaagccatccctacgccccgagctgcggcctccgcggccctggagctgcctctcgggcccgcacccgtgagcgtagcgcctcaggccgaagctgaagcgcgctccacaccaggccccgccggctctagactcggtcccgagacgttccgccagcgtttccggcagttccgctaccaggatgcggcgggtccccgggaggctttccggcagctgcgggagctgtcccgccagtggctgcggcctgacatccgcaccaaggagcagatcgtggagatgctggtgcaagagcagctgctcgccatcctgcccgaggcggctcgggcccggcggatccgccgccgcacggatgtgcgcatcactggctgagcggtggagctgcgggcggccagggccgggcgctctgtgcggactggggccatgatcgggcccgggggcctgagcctgggaccccaccccgtgttaatgaaaaatgagttttggcaggcaaaaaacaaaaagacaaaaaaaaccgcgggttttggggggcaaagtagagggctgtatatttccacccctttaaagggaaggcgccacagagaaataacgagaacacaaacct

SEQ ID NO: 22585 - DNA, 2057 bp, Homo sapiens
tcaattacctctgagaggtaagttctattacatccacattttactgataagaaaacagtagctcagagatagcaagcagtttacctaataaaaacaagagcaaacttcttaaaagccctttctctccaacggcttaatttatttaatcctcctaacaactctgagctgggtatcgtcaaaggggattccaccaaggtagcctcactccaacactctaacccaaggctgctcaacagaaatataatgtaaactgcacatgcaatttaaatgtttttagaagctgcatttaaaaagtaaaaacacaggtgaaattaataacatttttatttgacccaatatatgcaaaacattatattccaacatgtaatcagtattaaaaagtattgagataatttttacatcagttttttcgtactaagtcccgtattttacaatatagcacatctcaattcgctatatttcgagggttatcaactagctacgttgcaagagctgagtcaactcaggaggccagcggccaccataaggggcaatgcatttagagttcacttattaaatgctgacgttaacagaacccacagagccgcatttcccttggtttcggaggacacgcgaaaaataacaacagcaaagggttctcgagcatctccttcgcgccagacggtgtgttgtactttgtcatcgtcgcagtaaggccggtgctatcgccctcctagtttgaccaagcgagaggactttctccagatgggcccctcccgagagaatggtcgccgtcccgctctcctgttcgggtcaccaccggccgggcgccactcgaacgagccccggccagccgtcaccctaatcattcccgaaggaggggccatcagagctacagctcatcagggtcaatcagaaggggcgcccgcacgcaaaggtcacctgcaaaccgaagcggcgcacggataaggtccgggacttgaagtctatctccaaacattcaggctcctcctccgactcctcctcgaactggcgctcagaggcgccaccattcggaaggagcccaggcacgcgcagtcgccctcccgcaccggagggcagcagccgcctcatgcgactcgagaacgctagagggcgccgcttccgggagcccaagcggcttccgggtgctcgcgcgccgacctggacgcagagaagccagagactttcgcttccggctgccgcaggcgcttcgctggtgcagacgcagtgctgagcacacagctaccggacaaagagtgacgcccggagctggagttatggcggctacggagccgatcttggcggccactgggagtcccgcggcggtgccaccggagaaactggaaggagccggttcgagctcagcccctgagcgtaactgtgtgggctcctcgctgccagaggcctcaccgcctgcccctgagccttccagtcccaacgccgcggtccctgaagccatccctacgccccgagctgcggcctccgcggccctggagctgcctctcgggcccgcacccgtgagcgtagcgcctcaggccgaagctgaagcgcgctccacaccaggccccgccggctctagactcggtcccgagacgttccgccagcgtttccggcagttccgctaccaggatgcggcgggtccccgggaggctttccggcagctgcgggagctgtcccgccagtggctgcggcctgacatccgcaccaaggagcagatcgtggagatgctggtgcaagagcagctgctcgccatcctgcccgaggcggctcgggcccggcggatccgccgccgcacggatgtgcgcatcactggctgagcggtggagctgcgggcggccagggccgggcgctctgtgcggactggggccatgatcgggcccgggggcctgagcctgggaccccaccccgtgttaatgaaaaatgagttttggcagccaaaaaaaaaaaaaaaaaaaaactgggggtttttttgggggggggaaagggttttaaggggcatgttgtatttttttctggcacctttgggaaagggaaatgcgggcccaaagagggaatga

SEQ ID NO: 22586 - DNA, 2049 bp, Homo sapiens
tcaattacctctgagaggtaagttctattacatccacattttactgataagaaaacagtagctcagagatagcaagcagtttacctaataaaaacaagagcaaacttcttaaaagccctttctctccaacggcttaatttatttaatcctcctaacaactctgagctgggtatcgtcaaaggggattccaccaaggtagcctcactccaacactctaacccaaggctgctcaacagaaatataatgtaaactgcacatgcaatttaaatgtttttagaagctgcatttaaaaagtaaaaacacaggtgaaattaataacatttttatttgacccaatatatgcaaaacattatattccaacatgtaatcagtattaaaaagtattgagataatttttacatcagttttttcgtactaagtcccgtattttacaatatagcacatctcaattcgctatatttcgagggttatcaactagctacgttgcaagagctgagtcaactcaggaggccagcggccaccataaggggcaatgcatttagagttcacttattaaatgctgacgttaacagaacccacagagccgcatttcccttggtttcggaggacacgcgaaaaataacaacagcaaagggttctcgagcatctccttcgcgccagacggtgtgttgtactttgtcatcgtcgcagtaaggccggtgctatcgccctcctagtttgaccaagcgagaggactttctccagatgggcccctcccgagagaatggtcgccgtcccgctctcctgttcgggtcaccaccggccgggcgccactcgaacgagccccggccagccgtcaccctaatcattcccgaaggaggggccatcagagctacagctcatcagggtcaatcagaaggggcgcccgcacgcaaaggtcacctgcaaaccgaagcggcgcacggataaggtccgggacttgaagtctatctccaaacattcaggctcctcctccgactcctcctcgaactggcgctcagaggcgccaccattcggaaggagcccaggcacgcgcagtcgccctcccgcaccggagggcagcagccgcctcatgcgactcgagaacgctagagggcgccgcttccgggagcccaagcggcttccgggtgctcgcgcgccgacctggacgcagagaagccagagactttcgcttccggctgccgcaggcgcttcgctggtgcaggtaagctccgcacactctcggccggtcccgagtccgactccctcaagggtgacgcgagctctgccctttaaccggaaacgtctccctgctcaccccacccccgcgcagacgcagtgctgagcacacagctaccggacaaagagtgacgcccggagctggagttatggcggctacggagccgatcttggcggccactgggagtcccgcggcggtgccaccggagaaactggaaggagccggttcgagctcagcccctgagcgtaactgtgtgggctcctcgctgccagaggcctcaccgcctgcccctgagccttccagtcccaacgccgcggtccctgaagccatccctacgccccgagctgcggcctccgcggccctggagctgcctctcgggcccgcacccgtgagcgtagcgcctcaggccgaagctgaagcgcgctccacaccaggccccgccggctctagactcggtcccgagacgttccgccagcgtttccggcagttccgctaccaggatgcggcgggtccccgggaggctttccggcagctgcgggagctgtcccgccagtggctgcggcctgacatccgcaccaaggagcagatcgtggagatgctggtgcaagagcagctgctcatcatcggaacagagttgctgtatactgaaggtctgacagtagctcttagactcgcctatcttaggtagtcatgctgtgcattttttttttcattggtgtactgtgtttgatttgtctcatatatttggagtttttctgaaaaatggagcagtaatgcagcatcaacctattaaaatacattttaagcctttt

SEQ ID NO: 22587 - DNA, 1771 bp, Homo sapiens
tcaattacctctgagaggtaagttctattacatccacattttactgataagaaaacagtagctcagagatagcaagcagtttacctaataaaaacaagagcaaacttcttaaaagccctttctctccaacggcttaatttatttaatcctcctaacaactctgagctgggtatcgtcaaaggggattccaccaaggtagcctcactccaacactctaacccaaggctgctcaacagaaatataatgtaaactgcacatgcaatttaaatgtttttagaagctgcatttaaaaagtaaaaacacaggtgaaattaataacatttttatttgacccaatatatgcaaaacattatattccaacatgtaatcagtattaaaaagtattgagataatttttacatcagttttttcgtactaagtcccgtattttacaatatagcacatctcaattcgctatatttcgagggttatcaactagctacgttgcaagagctgagtcaactcaggaggccagcggccaccataaggggcaatgcatttagagttcacttattaaatgctgacgttaacagaacccacagagccgcatttcccttggtttcggaggacacgcgaaaaataacaacagcaaagggttctcgagcatctccttcgcgccagacggtgtgttgtactttgtcatcgtcgcagtaaggccggtgctatcgccctcctagtttgaccaagcgagaggactttctccagatgggcccctcccgagagaatggtcgccgtcccgctctcctgttcgggtcaccaccggccgggcgccactcgaacgagccccggccagccgtcaccctaatcattcccgaaggaggggccatcagagctacagctcatcagggtcaatcagaaggggcgcccgcacgcaaaggtcacctgcaaaccgaagcggcgcacggataaggtccgggacttgaagtctatctccaaacattcaggctcctcctccgactcctcctcgaactggcgctcagaggcgccaccattcggaaggagcccaggcacgcgcagtcgccctcccgcaccggagggcagcagccgcctcatgcgactcgagaacgctagagggcgccgcttccgggagcccaagcggcttccgggtgctcgcgcgccgacctggacgcagagaagccagagactttcgcttccggctgccgcaggcgcttcgctggtgcaggtaagctccgcacactctcggccggtcccgagtccgactccctcaagggtgacgcgagctctgccctttaaccggaaacgtctccctgctcaccccacccccgcgcagacgcagtgctgagcacacagctaccggacaaagagtgacgcccggagctggagttatggcggctacggagccgatcttggcggccactgggagtcccgcggcggtgccaccggagaaactggaaggagccggttcgagctcagcccctgagcgtaactgtgtgggctcctcgctgccagaggcctcaccgcctgcccctgagccttccagtcccaacgccgcggtccctgaagccatccctacgccccgagctgcggcctccgcggccctggagctgcctctcgggcccgcacccgtgagcgtagcgcctcaggccgaagctgaagcgcgctccacaccaggccccgccggctcgcgctctgtgcggactggggccatgatcgggcccgggggcctgagcctgggaccccaccccgtgttaatgaaaaatgagttttggca

SEQ ID NO: 22588 - DNA, 1842 bp, Homo sapiens
tcaattacctctgagaggtaagttctattacatccacattttactgataagaaaacagtagctcagagatagcaagcagtttacctaataaaaacaagagcaaacttcttaaaagccctttctctccaacggcttaatttatttaatcctcctaacaactctgagctgggtatcgtcaaaggggattccaccaaggtagcctcactccaacactctaacccaaggctgctcaacagaaatataatgtaaactgcacatgcaatttaaatgtttttagaagctgcatttaaaaagtaaaaacacaggtgaaattaataacatttttatttgacccaatatatgcaaaacattatattccaacatgtaatcagtattaaaaagtattgagataatttttacatcagttttttcgtactaagtcccgtattttacaatatagcacatctcaattcgctatatttcgagggttatcaactagctacgttgcaagagctgagtcaactcaggaggccagcggccaccataaggggcaatgcatttagagttcacttattaaatgctgacgttaacagaacccacagagccgcatttcccttggtttcggaggacacgcgaaaaataacaacagcaaagggttctcgagcatctccttcgcgccagacggtgtgttgtactttgtcatcgtcgcagtaaggccggtgctatcgccctcctagtttgaccaagcgagaggactttctccagatgggcccctcccgagagaatggtcgccgtcccgctctcctgttcgggtcaccaccggccgggcgccactcgaacgagccccggccagccgtcaccctaatcattcccgaaggaggggccatcagagctacagctcatcagggtcaatcagaaggggcgcccgcacgcaaaggtcacctgcaaaccgaagcggcgcacggataaggtccgggacttgaagtctatctccaaacattcaggctcctcctccgactcctcctcgaactggcgctcagaggcgccaccattcggaaggagcccaggcacgcgcagtcgccctcccgcaccggagggcagcagccgcctcatgcgactcgagaacgctagagggcgccgcttccgggagcccaagcggcttccgggtgctcgcgcgccgacctggacgcagagaagccagagactttcgcttccggctgccgcaggcgcttcgctggtgcagacgcagtgctgagcacacagctaccggacaaagagtgacgcccggagctggagttatggcggctacggagccgatcttggcgctgcgggagctgtcccgccagtggctgcggcctgacatccgcaccaaggagcagatcgtggagatgctggtgcaagagcagctgctcgccatcctgcccgaggcggctcgggcccggcggatccgccgccgcacggatgtgcgcatcactggctgagcggtggagctgcgggcggccagggccgggcgctctgtgcggactggggccatgatcgggcccgggggcctgagcctgggaccccaccccgtgttaatgaaaaatgagttttggcaaaaaaaaaaataacaaaccctttctcataaattcactccataataatcataaccatattacaacctacaactcaatccaattcaaccgggcagggttttacatttctggattgggcaaactctgctattccccactaaactccttgggtttaatcaccctttcctttgcttcggcactgcgaagcggcccgcactcttctcccttcaataactccgtaaccttattgcaattggcaatcttaagctaacttctggttaaattttcc

SEQ ID NO: 22589 - DNA, 769 bp, Homo sapiens
ctctaggtcgaggcggtgttatcggacgaggggctgcgcaggcgcttcgctggtgcagacgcagtgctgagcacacagctaccggacaaagagtgacgcccggagctggagttatggcggctacggagccgatcttggcggccactgggagtcccgcggcggtgccaccggagaaactggaaggagccggttcgagctcagcccctgagcgtaactgtgtgggctcctcgctgccagaggcctcaccgcctgcccctgagccttccagtcccaacgccgcggtccctgaagccatccctacgccccgagctgcggcctccgcggccctggagctgcctctcgggcccgcacccgtgagcgtagcgcctcaggccgaagctgaagcgcgctccacaccaggccccgccggctctagactcggtcccgagacgttccgccagcgtttccggcagttccgctaccaggatgcggcgggtccccgggaggctttccggcagctgcgggagctgtcccgccagtggctgcggcctgacatccgcaccaaggagcagatcgtggagatgctggtgcaagagcagctgctcgccatcctgcccgaggcggctcgggcccggcggatccgccgccgcacggatgtgcgcatcactggctgagcggtggagctgcgggcggccagggccgggcgctctgtgcggactggggccatgatcgggcccgggggcctgagcctgggaccccaccccgtgttaatgaaaaatgagttttggca

SEQ ID NO: 22590 - DNA, 1722 bp, Homo sapiens
tgtgacttgctcctccttgtcttccaccacgattgtgaggcctccctagccacgtggagctctcaaaggtggagacaacccaaatgtccttcaatggatggttaaatataccatggtacatctataccatagattactactcagcaataaaaaggacaaactattgatacaagcaaccacttgggtgaatctccaggaattgtgccaagtggaaagagccaagcccaaatgattatacactatatgattccagaacccacagagccgcatttcccttggtttcggaggacacgcgaaaaataacaacagcaaagggttctcgagcatctccttcgcgccagacggtgtgttgtactttgtcatcgtcgcagtaaggccggtgctatcgccctcctagtttgaccaagcgagaggactttctccagatgggcccctcccgagagaatggtcgccgtcccgctctcctgttcgggtcaccaccggccgggcgccactcgaacgagccccggccagccgtcaccctaatcattcccgaaggaggggccatcagagctacagctcatcagggtcaatcagaaggggcgcccgcacgcaaaggtcacctgcaaaccgaagcggcgcacggataaggtccgggacttgaagtctatctccaaacattcaggctcctcctccgactcctcctcgaactggcgctcagaggcgccaccattcggaaggagcccaggcacgcgcagtcgccctcccgcaccggagggcagcagccgcctcatgcgactcgagaacgctagagggcgccgcttccgggagcccaagcggcttccgggtgctcgcgcgccgacctggacgcagagaagccagagactttcgcttccggctgccgcaggcgcttcgctggtgcaggtaagctccgcacactctcggccggtcccgagtccgactccctcaagggtgacgcgagctctgccctttaaccggaaacgtctccctgctcaccccacccccgcgcagacgcagtgctgagcacacagctaccggacaaagagtgacgcccggagctggagttatggcggctacggagccgatcttggcggccactgggagtcccgcggcggtgccaccggagaaactggaaggagccggttcgagctcagcccctgagcgtaactgtgtgggctcctcgctgccagaggcctcaccgcctgcccctgagccttccagtcccaacgccgcggtccctgaagccatccctacgccccgagctgcggcctccgcggccctggagctgcctctcgggcccgcacccgtgagcgtagcgcctcaggccgaagctgaagcgcgctccacaccaggccccgccggctctagactcggtcccgagacgttccgccagcgtttccggcagttccgctaccaggatgcggcgggtccccgggaggctttccggcagctgcgggagctgtcccgccagtggctgcggcctgacatccgcaccaaggagcagatcgtggagatgctggtgcaagagcagctgctcgccatcctgcccgaggcggctcgggcccggcggatccgccgccgcacggatgtgcgcatcactggctgagcggtggagctgcgggcggccagggccgggcgctctgtgcggactggggccatgatcgggcccgggggcctgagcctgggaccccaccccgtgttaatgaaaaatgagttttggca

SEQ ID NO: 22591 - DNA, 957 bp, Homo sapiens
gatccagggtccctgggtgggtgggtcagcagccaggctctatcgatgggaatcagtgccaccttctctggagccctgggtgctgatgccctcagctgcaaatctaggttggcaggggtcccattttccttggcattcaccagcaataaagctccaaggtgctccactcctgaccaccactccccactctggtgctgagtgagaggggctgtcctcagaggaccctgggacctgcctcaggccccctacccacctctgccatgcctaggagtcccattcacacaggcccggagctggagttatggcggctacggagccgatcttggcggccactgggagtcccgcggcggtgccaccggagaaactggaaggagccggttcgagctcagcccctgagcgtaactgtgtgggctcctcgctgccagaggcctcaccgcctgcccctgagccttccagtcccaacgccgcggtccctgaagccatccctacgccccgagctgcggcctccgcggccctggagctgcctctcgggcccgcacccgtgagcgtagcgcctcaggccgaagctgaagcgcgctccacaccaggccccgccggctctagactcggtcccgagacgttccgccagcgtttccggcagttccgctaccaggatgcggcgggtccccgggaggctttccggcagctgcgggagctgtcccgccagtggctgcggcctgacatccgcaccaaggagcagatcgtggagatgctggtgcaagagcagctgctcgccatcctgcccgaggcggctcgggcccggcggatccgccgccgcacggatgtgcgcatcactggctgagcggtggagctgcgggcggccagggccgggcgctctgtgcggactggggccatgatcgggcccgggggcctgagcctgggaccccaccccgtgttaatgaaaaatgagttttggca

SEQ ID NO: 22592 - DNA, 2540 bp, Homo sapiens
tcaattacctctgagaggtaagttctattacatccacattttactgataagaaaacagtagctcagagatagcaagcagtttacctaataaaaacaagagcaaacttcttaaaagccctttctctccaacggcttaatttatttaatcctcctaacaactctgagctgggtatcgtcaaaggggattccaccaaggtagcctcactccaacactctaacccaaggctgctcaacagaaatataatgtaaactgcacatgcaatttaaatgtttttagaagctgcatttaaaaagtaaaaacacaggtgaaattaataacatttttatttgacccaatatatgcaaaacattatattccaacatgtaatcagtattaaaaagtattgagataatttttacatcagttttttcgtactaagtcccgtattttacaatatagcacatctcaattcgctatatttcgagggttatcaactagctacgttgcaagagctgagtcaactcaggaggccagcggccaccataaggggcaatgcatttagagttcacttattaaatgctgacgttaacagaacccacagagccgcatttcccttggtttcggaggacacgcgaaaaataacaacagcaaagggttctcgagcatctccttcgcgccagacggtgtgttgtactttgtcatcgtcgcagtaaggccggtgctatcgccctcctagtttgaccaagcgagaggactttctccagatgggcccctcccgagagaatggtcgccgtcccgctctcctgttcgggtcaccaccggccgggcgccactcgaacgagccccggccagccgtcaccctaatcattcccgaaggaggggccatcagagctacagctcatcagggtcaatcagaaggggcgcccgcacgcaaaggtcacctgcaaaccgaagcggcgcacggataaggtccgggacttgaagtctatctccaaacattcaggctcctcctccgactcctcctcgaactggcgctcagaggcgccaccattcggaaggagcccaggcacgcgcagtcgccctcccgcaccggagggcagcagccgcctcatgcgactcgagaacgctagagggcgccgcttccgggagcccaagcggcttccgggtgctcgcgcgccgacctggacgcagagaagccagagactttcgcttccggctgccgcaggcgcttcgctggtgcaggtaagctccgcacactctcggccggtcccgagtccgactccctcaagggtgacgcgagctctgccctttaaccggaaacgtctccctgctcaccccacccccgcgcagacgcagtgctgagcacacagctaccggacaaagagtgacgcccggagctggagttatggcggctacggagccgatcttggcggccactgggagtcccgcggcggtgccaccggagaaactggaaggagccggttcgagctcagcccctgagcgtaactgtgtgggctcctcgctgccagaggcctcaccgcctgcccctgagccttccagtcccaacgccgcggtccctgaagccatccctacgccccgagctgcggcctccgcggccctggagctgcctctcgggcccgcacccgtgagcgtagcgcctcaggccgaagctgaagcgcgctccacaccaggccccgccggctctagactcggtcccgagacgttccgccagcgtttccggcagttccgctaccaggatgcggcgggtccccgggaggctttccggcagctgcgggagctgtcccgccagtggctgcggcctgacatccgcaccaaggagcagatcgtggagatgctggtgcaagagcagctgctcgccatcctgcccgaggcggctcgggcccggcggatccgccgccgcacggatgtgcgcatcactggctgagcggtggagctgcgggcggccagggccgggcgctctgtgcggactggggccatgatcgggcccgggggcctgagcctgggaccccaccccgtgttaatgaaaaatgagttttggcaaaaaaaaaaaacaaaaaaacaaaaaaaactataaaagacaaataacacaaatctacaacacaaaagaagggcggcgagccgataataacaaaataactcaccagaagaggcgcacacaaaaaaagaatacaacacgcaattataataataaaaacgagttgccacaccaataagaaggacgataataaataacacgcaaaccacgtgcgccagacatttaaaaaaacgaagccagtatggatagggacacactagataatacacaggagacacaacacgtgcaaaaaaagaaaccacacaaaaaactaaaccagggagccctaaacaatatggggacacaaccaacaaccaaaacaagagataaaacaaccaccaagagaggaaaaacaaaaaaactctaacacgagtattaaagtgcggtgacaaccacagcacgagaattaagcacagaagaaaaaatattaggctactaaacaatcagatccgagaacaaatttac

SEQ ID NO: 22593 - DNA, 1873 bp, Homo sapiens
tcaattacctctgagaggtaagttctattacatccacattttactgataagaaaacagtagctcagagatagcaagcagtttacctaataaaaacaagagcaaacttcttaaaagccctttctctccaacggcttaatttatttaatcctcctaacaactctgagctgggtatcgtcaaaggggattccaccaaggtagcctcactccaacactctaacccaaggctgctcaacagaaatataatgtaaactgcacatgcaatttaaatgtttttagaagctgcatttaaaaagtaaaaacacaggtgaaattaataacatttttatttgacccaatatatgcaaaacattatattccaacatgtaatcagtattaaaaagtattgagataatttttacatcagttttttcgtactaagtcccgtattttacaatatagcacatctcaattcgctatatttcgagggttatcaactagctacgttgcaagagctgagtcaactcaggaggccagcggccaccataaggggcaatgcatttagagttcacttattaaatgctgacgttaacagaacccacagagccgcatttcccttggtttcggaggacacgcgaaaaataacaacagcaaagggttctcgagcatctccttcgcgccagacggtgtgttgtactttgtcatcgtcgcagtaaggccggtgctatcgccctcctagtttgaccaagcgagaggactttctccagatgggcccctcccgagagaatggtcgccgtcccgctctcctgttcgggtcaccaccggccgggcgccactcgaacgagccccggccagccgtcaccctaatcattcccgaaggaggggccatcagagctacagctcatcagggtcaatcagaaggggcgcccgcacgcaaaggtcacctgcaaaccgaagcggcgcacggataaggtccgggacttgaagtctatctccaaacattcaggctcctcctccgactcctcctcgaactggcgctcagaggcgccaccattcggaaggagcccaggcacgcgcagtcgccctcccgcaccggagggcagcagccgcctcatgcgactcgagaacgctagagggcgccgcttccgggagcccaagcggcttccgggtgctcgcgcgccgacctggacgcagagaagccagagactttcgcttccggctgccgcaggcgcttcgctggtgcaggtaagctccgcacactctcggccggtcccgagtccgactccctcaagggtgacgcgagctctgccctttaaccggaaacgtctccctgctcaccccacccccgcgcagacgcagtgctgagcacacagctaccggacaaagagtgacgcccggagctggagttatggcggctacggagccgatcttggcggccactgggagtcccgcggcggtgccaccggagaaactggaaggagccggttcgagctcagcccctgagcgtaactgtgtgggctcctcgctgccagaggcctcaccgcctgcccctgagccttccagtcccaacgccgcggtccctgaagccatccctacgccccgagctgcggcctccgcggccctggagctgcctctcgggcccgcacccgtgagcgtagcgcctcaggccgaagctgaagcgcgctccacaccaggccccgccggctctagactcggtcccgagacgttccgccagcgtttccggcagttccgccgcacggatgtgcgcatcactggctgagcggtggagctgcgggcggccagggccgggcgctctgtgcggactggggccatgatcgggcccgggggcctgagcctgggaccccaccccgtgttaatgaaaaatgagttttggca

SEQ ID NO: 22594 - DNA, 1828 bp, Homo sapiens
tcaattacctctgagaggtaagttctattacatccacattttactgataagaaaacagtagctcagagatagcaagcagtttacctaataaaaacaagagcaaacttcttaaaagccctttctctccaacggcttaatttatttaatcctcctaacaactctgagctgggtatcgtcaaaggggattccaccaaggtagcctcactccaacactctaacccaaggctgctcaacagaaatataatgtaaactgcacatgcaatttaaatgtttttagaagctgcatttaaaaagtaaaaacacaggtgaaattaataacatttttatttgacccaatatatgcaaaacattatattccaacatgtaatcagtattaaaaagtattgagataatttttacatcagttttttcgtactaagtcccgtattttacaatatagcacatctcaattcgctatatttcgagggttatcaactagctacgttgcaagagctgagtcaactcaggaggccagcggccaccataaggggcaatgcatttagagttcacttattaaatgctgacgttaacagaacccacagagccgcatttcccttggtttcggaggacacgcgaaaaataacaacagcaaagggttctcgagcatctccttcgcgccagacggtgtgttgtactttgtcatcgtcgcagtaaggccggtgctatcgccctcctagtttgaccaagcgagaggactttctccagatgggcccctcccgagagaatggtcgccgtcccgctctcctgttcgggtcaccaccggccgggcgccactcgaacgagccccggccagccgtcaccctaatcattcccgaaggaggggccatcagagctacagctcatcagggtcaatcagaaggggcgcccgcacgcaaaggtcacctgcaaaccgaagcggcgcacggataaggtccgggacttgaagtctatctccaaacattcaggctcctcctccgactcctcctcgaactggcgctcagaggcgccaccattcggaaggagcccaggcacgcgcagtcgccctcccgcaccggagggcagcagccgcctcatgcgactcgagaacgctagagggcgccgcttccgggagcccaagcggcttccgggtgctcgcgcgccgacctggacgcagagaagccagagactttcgcttccggctgccgcaggcgcttcgctggtgcaggtaagctccgcacactctcggccggtcccgagtccgactccctcaagggtgacgcgagctctgccctttaaccggaaacgtctccctgctcaccccacccccgcgcagacgcagtgctgagcacacagctaccggacaaagagtgacgcccggagctggagttatggcggctacggagccgatcttggcggccactgggagtcccgcggcggtgccaccggagaaactggaaggagccggttcgagctcagcccctgagcgtaactgtgtgggctcctcgctgccagaggcctcaccgcctgcccctgagccttccagtcccaacgccgcggtccctgaagccatccctacgccccgagctgcggcctccgcggccctggagctgcctctcgggcccgcacccgtgagcgtagcgcctcaggccgaagctgaagcgcgctccacaccaggccccgccggctcccgcacggatgtgcgcatcactggctgagcggtggagctgcgggcggccagggccgggcgctctgtgcggactggggccatgatcgggcccgggggcctgagcctgggaccccaccccgtgttaatgaaaaatgagttttggca

SEQ ID NO: 22595 - DNA, 1411 bp, Homo sapiens
aagaaatgggagaaaaaagggaccctggggtcctcttggagaagagagggaccattcaaatgttatttggggcaaatttttttttttggagacggcctgcactctgtcgcccaggctgaagtgcagtggcacgatcatggctcactgcagcctcaaccttcccaggcttaaccaatcctcccacatagctgggactatagacacaccaccacgcctggctaatctttctttttttgtagagatgtgatcttcctgtgttgcccaggctggtcctaaactcctggcctcaggcaattctctcacttcagctccccaaagtgctgagatgatggcactggcacccagcatatactttttttttttaatgtgcaacttctttcctatctttgtgttaaggataacatatgtttagctaaggaaagactagtacagacatgagccactgcaccaggcctggaccttttccttgagtgctttatacttaggctggcttcagttaccaactggatgttgatggcctacctctagatctctaggtcagacctcttccatgtacttcagactcatgtatctcatttccacagacacctcagacagtatggctgcgacagactgtctccttccttctcacctctcctttccttctctttccttggcttggagagtggcagtgccatccatcaaaatcagacactaggcctcatccagtgtttctcctgatttttttcagctcccaaatctgttgctttggcctccttgtcacagcctctccctcagttcctctgctatgcctctgccaggttgacctcccaccaccatcttccatagctgagtaggtgctacgccagtgtggtttttgctccctctcaatttttcatgaatctgcctcccttctctgcgtctttgtctccacttccatcaccttagtccactctgtcatcatctgtcccccctggatccttgcagtagcctcatgactgatcatctacatctgctcttaggccctataatccattcttcacatggcagccctatgatgtgttcagaatgcagctctgagcatgtcattcccctgtttaaacatttaagtagcttctcattattcctagttcttcgaatatgggcccagtggccaggtgtggtggttcacacctgtaatcccagcactttgggaggctgaggcaggcggatcacttgagtccaagagtttgagaccatcctgagctacatggcaaaaccccgtctctatcaaaaattaaaaaattagctgggcatcgtggttcatgcccagctactggggaagctgaggcaggaggatcacttgagcccaggaggtgaaggctgcaatgagccatgatcgtgccactgcacttcagcctgggcgacagagtgcaggctgtctcaaaaaaaa

SEQ ID NO: 22596 - DNA, 1053 bp, Homo sapiens
aagaaatgggagaaaaaagggaccctggggtcctcttggagaagagagggaccattcaaatgttatttggggcaaatttttttttttggagacggcctgcactctgtcgcccaggctgaagtgcagtggcacgatcatggctcactgcagcctcaaccttcccaggcttaaccaatcctcccacatagctgggactatagacacaccaccacgcctggctaatctttctttttttgtagagatgtgatcttcctgtgttgcccaggctggtcctaaactcctggcctcaggcaattctctcacttcagctccccaaagtgctgagatgatggcactggcacccagcatatactttttttttttaatgtgcaacttctttcctatctttgtgttaaggataacatatgtttagctaaggaaagactagtacagacatgagccactgcaccaggcctggaccttttccttgagtgctttatacttaggctggcttcagttaccaactggatgttgatggcctacctctagatctctaggtcagacctcttccatgtacttcagactcatgtatctcatttccacagacacctcagacagtatggctgcgacagactgtctccttccttctcacctctcctttccttctctttccttggcttggagagtggcagtgccatccatcaaaatcagacactaggcctcatccagtgtttctcctgatttttttcagctcccaaatctgttgctttggcctccttgtcacagcctctccctcagttcctctgctatgcctctgccaggttgacctcccaccaccatcttccatagctgagtaggtgctacgccagtgtggtttttgctccctctcaatttttcatgaatctgcctcccttctctgcgtctttgtctccacttccatcaccttagtccactctgtcatcatctgtcccccctggatccttgcagtagcctcatgactgatcatctacatctccaaggaacccacgcatgacaacctgaaacagatggaaggaacgtgctccaggtctatca

SEQ ID NO: 22597 - DNA, 490 bp, Homo sapiens
tgctggttagccctttgacaagtctcacagtaccttaaaacacatatttatagtgaggtttgagtaacttggaagtctattttagaccaaatacacgtttggttaatgttgctaggcatagagtgtagccctcctcccttcatatgagatcctttagacgtgacaagacccgcctgtgatgcctagacccttctcccatttagaaggacatcactgaatgcaaatttgcaaaaagctatggcagaacctgtggttaaaatctcataagattcaaagagtctggaatttaagaagctaagggaaaatatatgtccagagcctatcttctaccagtcagccttgtttttgcttacataagtttattctttttctgagccaatgttgaattgaagtaatagtgatcacagcttatcacagttctctaaagattattgcctccttcactgccttcatgaattaacaccaatttcttccaaatggaattctttaa

SEQ ID NO: 22598 - DNA, 883 bp, Homo sapiens
gtccccacgaactgtctctgtgtgcggctgagctgtgcttcaccaggctggctggttctcacctgccttcctcctcacacctcctggtgatacaccctgtttctgagtcatcagtcatcggacatatgacatctaaaacgtgacagatggcaccttctattctgggctcacaggaagcaccaactggggcaaatctgttgtatttggggcacaggacacaatcgatcccaaggcccggagctgtggagaggaagccgagtgttaggatctgctgccggggcctccacgcgcccaccgggaaaagcctgagaacatcgtgtttatttcctgccgcccgttccgagagaaggaagtggaaatatcaagtaggcatctgcgaatctcccatcccagtcatgtgctacatgggtgtagtgaacagattaacctcatttagttcattagcttgcctgttgctgcaatatttggtttgttattaattaagaaaaaattaattaagaagtaactaagactcctggagcctcagagctggcaggagcctcagagatcattttgtttgattttgtttgactgtgaccccaaagcaggaatcccatctttagcctccctgaccagatggtctgagtggacccctgcataggtggggtgctggtcatgtggccagcgtgtccacaacaagcactgccaggggtccctgcatgcccagcactgtgctgggagccctgggtgagggaaggaaatcagacatggataagaaccagagcaagaggagtagtgtatgtcagacctggtgccagggtcaggggagctcacactgtcttccatgagaccctttccttgtctccatctgtatccccaggtagcccccctctcggaggaaacg

SEQ ID NO: 22599 - DNA, 1356 bp, Homo sapiens
ttagtagagatgaggtttctccatgttggccaggctggtctcgaactactgacctcaagtgatccacgcacctcggcctcccaaagtgctgggattataggcatgagccactgcgcccagccaggagctgggttttaatgggggcatttcattgtggacattttacaaggctttgagctaggtttaaatcttatataactttccccagctctctccgtgtctctgagactcaacttcctcatctgcaaaatagggttaaccgaacttccttcataggtctgtgtgagagatttggtctgcacatggccataaaatgcccagctagtgcctggtgggcacagtgggcactctgtgagtgagttagccctgttaggagtttctggaatggagacggtggtggggagcggggctagctcttgctgacatccttgtggctggaggtgggccttcccagggcagcgtagggcagctgtgtgcaccccctcatccagtctctttgttcacagggatgtgtctgcaggccttcgtagaagctttctttttcctggctcagaggaagttcaagatgctgccacttcatgagcaggtggcctcactgattgacctttgcgagtaccacctgtccctgctggatgaaaaacgcctggaagcaccaactggggcaaatctgttgtatttggggcacaggacacaatcgatcccaaggcccggagctgtggagaggaagccgagtgttaggatctgctgccggggcctccacgcgcccaccgggaaaagcctgagaacatcgtgtttatttcctgccgcccgttccgagagaaggaagtggaaatatcaagtaggcatctgcgaatctcccatcccagtcatgtgctacatgggtgtagtgaacagattaacctcatttagttcattagcttgcctgttgctgcaatatttggtttgttattaattaagaaaaaattaattaagaagtaactaagactcctggagcctcagagctggcaggagcctcagagatcattttgtttgattttgtttgactgtgaccccaaagcaggaatcccatctttagcctccctgaccagatggtctgagtggacccctgcataggtggggtgctggtcatgtggccagcgtgtccacaacaagcactgccaggggtccctgcatgcccagcactgtgctgggagccctgggtgagggaaggaaatcagacatggataagaaccagagcaagaggagtagtgtatgtcagacctggtgccagggtcaggggagctcacactgtcttccatgagaccctttccttgtctccatctgtatccccaggtagcccccctctcggaggaaacg

SEQ ID NO: 22600 - DNA, 445 bp, Homo sapiens
taaaggatcagacctagaaccttgcctggcacaacagaagccctcacagaataattggatctgcttctcagaaaagaaataagtaaacattaagttttatataaattttatgaaggttcacagcccatctatgcatttcagtgtaagaatctcattgcaggctgggcacggtggttcacacctataatcccagcactttggaagggtgaggcaggaggatcacttgagtctaggagttcaaaaccaacctgggcaacacagtgggaccccatttctaaaatatatacatatatatatagccaggtgtgatagtgcacacttaacagtctcagctactcaaaaagctgagggaggaggatccctacaggccaggagttcgaggctgcagtaagctgtgactgcaccactgcactccagcttgggtaacagagccagatactgtccc

SEQ ID NO: 22601 - DNA, 256 bp, Homo sapiens
attaaaaccatgaagtggatgcaaagagcagaagacaaaaacaagaacaaataataagggccacaaatagaaagcagtaacaaatatgatagatattaacccaatgatattagcaactgctttgaatatcaatggtctaagtgcactaattaaaagaaattttcagagtggatccaaaaaaaagacctaactatatgttgtctataataaatctactttaagtatagaaacacaaatatattagaaatatatggat

SEQ ID NO: 22602 - DNA, 666 bp, Homo sapiens
agcaatgttagctggcacaaattatgccagcaagtcctctggactctcccttcatcccacctttactaagtattgcctggttgccaggaactgtgctggattctaggaatgtctccaaagcctggcatgaaacccactggcctccctctggagaggctgtcacaggcctctgggcatcctttaatctctgcagccacagtgcctgatgcaatggctgatcctgcattagtgagcagtgtttaggaaatgggtttatgaataaatcacatatgaataaacaagggatgagtgggcagctggatagatggacagatggatggatgtacaaatagagtatattatgttgcacatacattttaagcctcctctggagtatctctcatagtgcctttaattttatagtgtcattctcatctctctatgatttttttctctattttttttatatttggtctaggtccacggcaaatagggtaggggagtcggagctggccatgctggaggttggaaaggtgttaacaagctataaatgaccttccctggcctattcaggcataagtaatgtctccaaattgcctacagtcaaaactgccaattccaagctgattgcaatgaatcaggctccccctatacgcaataatgtgatcaatttctcatttcgctgaa

SEQ ID NO: 22603 - DNA, 253 bp, Homo sapiens
atagctcaccgcagccttggactcctggacacagtgatccttccacctcctgagtagctgggactataggcacacaccactatgcccagttacttttgttttgtagagacagggtctcgctatattgcccaggctggtcttgaactcctggcctcaagtgatccctgcctcagcctcccaaaatgttgggatgacaggtgggagccactgcaccctgctgagaccagtgacttttaaagtcgactagtggctg

SEQ ID NO: 22604 - DNA, 704 bp, Homo sapiens
ctcccaaagtgctgggattacaggagtgagccactgcccccagcctctttctcatttaaaaagaaatggattaaaagttcatttagaacatgagtaaatgttttatatctttttctagtaaaaccttatagtttttgttgctataaaaatgagccccctttttttcctgtttgataatctaattagttattactagagagtaagttgatttttatgttaatcttgttttcagcagctttgatgatttgttagttgtaatagttctaatctggcagttcttataatctacctgttgattcttttagatttattatatagaaaatcattatgttctcccatagttttgtctgcttcttttaaacctaatgttctatataatacttgatttattgcattgaataggttttctattcagtgttaaatagcaggcaccttttcttgttcctgattttagtggggaatacacctataatattacaaataagtataatatttactatagttttttagcgtagatcttttagttttacagtttatctgccccatgtcagtattaccctgaatttaaggtttccccattaatagttttactcaaatcagaatcatgtatgaaattaaaaacatatatacatctggctagagttccagatattctgatatctggagtctaggcatttgtatttttaaaaagcattgtgcttact

SEQ ID NO: 22605 - DNA, 636 bp, Homo sapiens
cagaggagctgggattttccatcctaaagaggatgtggccgggatggaactccatcaccatcctgaagccacagcagaggtggcaggtaacagacagtccagagctgctcactgtcttcatacatgacgtgaggacggtggttccagtgcgccgcaaggtgggactgaggttcagagttgagaggaaacaataggaaggggctgagatgctgcaacaggtcacgggctgctattgtaaacacttttttaaggataggttcaaataagagcttcttggcttggagaactgaggggaagtatgactaagaagtattaggttggtgcaaaactaattgcagtttttgccattaaaagtaatgacaaaaactgcaatttcttttgcactaacctaatattctgaggacaagaagacatttaataccacatgactttttttaagtaagaggtctcattttctaaataacttgaaaatagaggctctccaagggttccgttacaggagagaataatcagaggtgaagaaaacccatttagagctgactccctttcccagggaatgagcttttggtcctcatagactggcatcctgcagacacgcagagagaaagaataaagcctgcctgtgcattgttaatt

SEQ ID NO: 22606 - DNA, 554 bp, Homo sapiens
cagaggagctgggattttccatcctaaagaggatgtggccgggatggaactccatcaccatcctgaagccacagcagaggtggcaggtaacagacagtccagagctgctcactgtcttcatacatgacgtgaggacggtggttccagtgcgccgcaaggtgggactgaggttcagagttgagaggaaacaataggaaggggctgagatgctgcaacaggtcacgggctgctattgtaaacacttttttaaggataggttcaaataagagcttcttggcttggagaactgaggggaagtatgataacctaatattctgaggacaagaagacatttaataccacatgactttttttaagtaagaggtctcattttctaaataacttgaaaatagaggctctccaagggttccgttacaggagagaataatcagaggtgaagaaaacccatttagagctgactccctttcccagggaatgagcttttggtcctcatagactggcatcctgcagacacgcagagagaaagaataaagcctgcctgtgcattgttaatt

SEQ ID NO: 22607 - DNA, 694 bp, Homo sapiens
gagcccgtccctttgtttcccataaggaatacttttagtaaatcttaccactggcttgctgtcaataaatatgtgggtaaatctctgttcaaggctctcagctctgaaggctgtgagacccctgatttcccacttcacatgctgtatttctgtgtgtgtgtctttaattcctctagcaccactgggttagggtctccacaaccgagctggtctcagcagtaaatattgaaaaggaatagatacaattgtcattatttacagatagaatttccaaacaattcccagggaataaactgaaaaactaacagaaacaaaacaagaatgtagtaaggtgtctgggtaagagatttgtatctaaaaatcagtagctttgcaatgtgcaagcagtaatctgcttagacatcagtaaatacctcattcatattttaaacaaaaaattaaaaatgccttgaaataatgtaaccagaaatacaaaaaaaaaggatatgaaaacgtggctgctaatggacatgaaagaatgtaatactagattctgagatgcaatttttttcatttgttcttcctgaaaaatcattaggttgatgtgcattacagtgttacgattatgtatgagtctaaggaaaatcagatgaaatttccaaattaaaccatgaaggtgcattggtagaggaagagacaattagggtcagtggag

SEQ ID NO: 22608 - DNA, 390 bp, Homo sapiens
atggccactagagtgacgtcagattcagcccagctcaaatgcctccgcagtgctccctgggtgcttcctgccacacgtcctccgcatgctattctcatcagctagatcgtgtgcttcctgaggacaggaaccatatgttaaattttcacagctcctagcaacttgcaagaggctcagagggaaaacttgtaattgaatcttcttccagcatttttgaagatggatattcaatgactggttaacattagctttgaagagaggatctaggaggtggtaccgggagggacagggagggagaattttacttttcatcttacaacttatgcacttttagaatttttttctggccatgtggcaaaaatgttttacataaatatttttaaaacaaga

SEQ ID NO: 22609 - DNA, 409 bp, Homo sapiens
aggtgtgcaccaccatgctgtctttgaaaaacgggtctgactgttgcacaggctgaatgagtctttagctgatccctgagaccttttggtggccatccctgtggccccaaggttggagtccatgctccatgtgagaggccgatggttgcctggggcttttctctgtggctcatcagtgattcttatgcaacctgctctttgcaaacaaggtgctgagaaataccactggctggagcgcagctgagctgcttgggaaaggaatggcctgtagcgttgccacctacactcctggcctcgggtcgtttaagtcaggactggacagtttaggtggcacggagcagagtgaggctggggggtgtgggagccaagcagggctccaccgtcgccttctttcctgttagagagactc

SEQ ID NO: 22610 - DNA, 2082 bp, Homo sapiens
ttttcatgaagttggggttttaccattttggctggctggtcttgaactcctgacctcaggtgatccacccaccttggcctcctgaagtgctgggattacagacctgagccacagcacccggccttggtggtggtcttattgaaggggaaacgctttttgaaatcaataggatgaaggttttttaaaaacaatgaagtcttaaatcattagattttaaagtggggtctggaggtggaagacagcttatttctgctgtgtaacatttagtacttaaccatacataattatcaatgcaagttttttgtcctaggtgcaagattatatttatttgagagtatcaggtgaacaagtttacatttaaaggcgagaattgtgttaagcatttggtattgacattatagttttagtaaaaccatcaagttatctcgatagagtttgaaactaagctctttggtggactgctactgtttattaagtaggtatcacatttctatagcaagacatagttgagttttgtaaatctacttgtattttgaaggattgaattgtgaaaattatttgtcttttggcaatctttctgaatagagagcgtgcatgagcaagtttgcattgcaattaataggtgaaaattgctgagcacctaagtaaccaaaaaggaggtgatgaattaggttacagaattagttttgtccaccctttacctgtctactccattatttgatttttggcagcattcagcatgctttttctgtaaaggaccagtaaatagtaattattttaggctttgtggccaggatgcaaaattgaagatattatgtaggtacttaatattaaaagaaagaaaaaatttacagttttttaaaatttcagtccaaaatgtcaatctgtaaattttttgttgataaaaatacaacaatataagatacaacattttgtaatacaggcctactaatgagaaatgagaattttatttttgtgagggtaggggagataacacttagctgaattggggttcagagttagtgttttctataatcaaatcaattgctaatgtttatctgtaaaaaccattcttaccttccaggctgtacaaaaacaggcgataggccagatttgaccatggtccatacttccccacccttgatttattctataaaactagtagaattcgactaactgttttgtttcatcaaagctttttttttttttttttttttgagacagagtcttgctctgtcgtctaggctggagtgccgtggtgcaatttcggctcactgcaatcttcgcctcccaagttcaagcaattctgcctcagcctcctgagtagctgggattacaggcgtgtggcactacgcccagctaatttttgtatttttagtagagacagggtttcaccatgttggtcaggctggtctcaaactcctgacctcatgatccgcctgccttggcctcccaaagtgctgggattacagtcgtgagccaccgtccctggccatcaaagcatttttaatatagaaggtcagttgagttgctgcctaggatgcaacctgatcttaatttacaaagtaattaaattattataaaataagtttgcattcatagattaaaaagtacacatttattttattattattataattttttgagatggagtttcgctcttgttgcccaggctggagtgcaatggtgcaatcttggctcactgccacttccacctcctgggttcaagtgattctcctgcctcagcctcccgagtaactgggattagaggcatgcgccaccatgcctggctaattttgtatttttaggagagatggagtttctccatgttggtcaggctggtctcgaactcccgacctcaggtgatctgcccacctcagaatcccaaagtgctaggattacaggtgtgaaccaccacgtcctgctaaaaagtacacatttaaaatctaagttccattttcccgtcatgtttattaatttgtcccattgcaagatatgtttctgttgtctgcatgggtagagataattttaaaagcttggttaagtaaaaactgattttcttaattattgccctttaggtta

SEQ ID NO: 22611 - DNA, 263 bp, Homo sapiens
gtgatgatgacttattagaaatattgggccagtctaccaacccatcagtgattcagtctcacctgaagaagctttttgctggtattaacagtgtttgctttgatgagaaatcaaaacatataactgcaatgaaatctttagagggagaagttgtaccttttaaaaataaagttcctctatcaaataatgtagagacatggttgaatgatttggccttagaaatgaagaaaactttggaacagttgttgaaggaatgtgttact

SEQ ID NO: 22612 - DNA, 577 bp, Homo sapiens
tttgctgaacctcaggagttcactcagcacatcgttcgctctcagctgccccagcaggagctgcgcagaaccgccttggaggcgtgctcagaggacacttcctcacttttataatgaatcgtgagcactctctcctcgctttggccggcagagcctgcctttctggccacgtggacgtcttcatgcagggtcctgctggccccttgacatcaacaggcatgaagctgcagccatcctctcccctccccaagttttgggcaccaccatctcctagtctcttgagactggcccctggcttctcccgttaccccagcctcagtcccatccaatctgctccccattgagaagtccaagtggaccctcttctccggcctcactgcccccagcccactccttgggctccatcccagcctcttccttggcggtcccccagctactctccagtcctacgtgcagctgcatcttccagatccacctggcacggcatctccttctgcctcaatgcctgggattcaggaccttgatcacagctgggttttgtatagaaataaataaataaaactgaaagaaaaaaaca

SEQ ID NO: 22613 - DNA, 328 bp, Homo sapiens
tctctcttctactgtggctcttcctatccctggtgtcccttgaatgccctatcttcccttttgtgcctcccaaacctctcacgcccgccccaagttactcatttccttagttgttctgaactttaaataaggtaatgcatgtaagattgcataaatgctcaataattgtcatctgttattattttcatcagtaacatcatctgaatcatcagtattgtctatttttaacagctgcatttttcattgtccgaatatagtcacatacatttgaacattttataattattgaataataaattcgttctgctattttacaataaaaaaaaaa

SEQ ID NO: 22614 - DNA, 492 bp, Homo sapiens
tcagaatgcaaagccatcctggcccaatgggaagagtttcagattgaagatcctttcggaaataatgctttctttgagcacctgcctgtgatgcagtacgcacctggcagaaggctggcttactctcatgcactcactgcccctctctgcctttcagaaactgccctaatctgccccacatcccatgccagcctctcctctccatttgctgctctaggaagatggatcatcttctgtccccccgtagccctgcctctgggcccaggatctactcttgcctgcctctcctcctccctcctcctctctaccagcctctccccatcctcccctgggggccccctggctggtctggcccatctgaagcctttcctccccaaactctcttgcatgtagactctttaactctagcatggcattccctgtccttctcttcctttgtgttttttttctctctccaaatagatggtcagcttttgtggaagcatggatcat

SEQ ID NO: 22615 - DNA, 288 bp, Homo sapiens
actcaggaacattcaagaatattctcagcatctcctcctcttttgtacctccaataactggcttcttcgcttctgtgtatttcctattcataacttggcttgcaagtagctttggtttgccatggccctaattccaatttatggcatccttatttttttcagttccactggtaaattctctccataattcttagctgaaattcccagtccatggccagcctggtgattggctgccgttggatccagtgtccactctagtccaatcagctctgtgctggtgggtcagat

SEQ ID NO: 22616 - DNA, 339 bp, Homo sapiens
gtgaaccccctggtcaccatcaaagttagcacacaacaaagccaaccacgtgtccccctcacagatgacaatggctgaactctgagtgaaaccacctgtatggccgggcacagtggctcacgcctgtaatcccagcactttgggaggttgaggtgggtggatcacctgaagtcagaagattggcctggccaacatgatgaaaccccgtctctaataaaaatgcaaaaattagctgggcgcagtggcacgtgcctgtaatcccagctacttgggaggctgaggcaggagaaccgctggaacccagaaggcagaggttgcagtgagtggagatcatgccac

SEQ ID NO: 22617 - DNA, 377 bp, Homo sapiens
gatgggaaaggagaaaagccagcatggtcggagggtcagaactatatggaggggaaactgggtgaattctgagcccactctggcctgagttaaaatcttctaaaggcagatcagtatcttgtttgagcccaaaagagtcctttgataatttaccatgttattatgcttattgtacacatttcctctttctctcagcaaacctagagtactatacatacattattgatttatctttatcatgttcaaatgaaaggcctggtgagtgaattgccttaacagactttacaaaatgaaaaattattaatgtgatatattagtgaagtgcagaagcttcacttaaaaagtagagctgttagctttcctaaagagatactaga

SEQ ID NO: 22618 - DNA, 1348 bp, Homo sapiens
aaatattgtaactggggagtatagagtagaaaaaaagtatagttaaaacatttgttctacaaattaacctttaaaaatataattactgctaaaaatagagtgctgttacacttaaggaaaattagtgccattttggaaatgagatcttgtgccataaatacagctgaactgaatataaatgttcacaaattaatgctgtcaaaggaatgagtaaagcagaaaaacttttaaccagcaacatttcaagtacgtagtgtgatcaaacatgatcatccagaatttgtatatttttttctttgtacagaggttacatattctgggtgttcttttataaaggaaacattttaaatcccacaaattgacactttctatcttcaatggactaagatttttttggtcagtaatctctgaaatttccttaaattatatacttaacatagcagagaaactggattgtttttgtatataagactgcttccacctgaaatgctgtcataagtactgggggggtgggggagtgcccatcttgtacatgatattcttagaggtaataaggtaatgatgcatgaatttattttataaactcttggactatgtatttgacatgtaaaatatgtacagtattaacgtcaaccatctctttaaagttagcctataaatattgttgtataattttctttggtcagaaacacttggactgaatagtgacactcggtaaggattttcagtgccatttagcaaaacgtctttagtctatgcaactagcaaaaatctgcataatgcaacaacacagttttcacacttcaaattttacatgaggggttcttcacgattctcctggaacccagtctagcaaaatgagaggaaaggccctagggagatttatttctgttaaatagttaactctgctgagtatgacaaatagtgtctactatctcaaccctccaaaatttgcagagtgttgggactgtcatttgtgatttttttttttttttttggtggggtagttgaataaaattgggcagctaaatttttcagttccatgtgcctcccaaataaaaaacagaaaataagtagtttttgtgaattgacttgcagacaaagtagaaactgtgctgcatgatgttattttgtaaacagatgacattttctgaccaggcacatgccatccaattttctgtcaatcacactgttgtataaagcagcagaactgaaggggaaaaatgattgttgtatacactgaattgctttgcatggtctcatttgagataattgatgtaagaatcctgacttttttatatttggaaacatcaaataaaaatggaaaaaatgaaaaaaaaaaaaaaaa

SEQ ID NO: 22619 - DNA, 1294 bp, Homo sapiens
aaatattgtaactggggagtatagagtagaaaaaaagtatagttaaaacatttgttctacaaattaacctttaaaaatataattactgctaaaaatagagtgctgttacacttaaggaaaattagtgccattttggaaatgagatcttgtgccataaatacagctgaactgaatataaatgttcacaaattaatgctgtcaaaggaatgagtaaagcagaaagaatttgtatatttttttctttgtacagaggttacatattctgggtgttcttttataaaggaaacattttaaatcccacaaattgacactttctatcttcaatggactaagatttttttggtcagtaatctctgaaatttccttaaattatatacttaacatagcagagaaactggattgtttttgtatataagactgcttccacctgaaatgctgtcataagtactgggggggtgggggagtgcccatcttgtacatgatattcttagaggtaataaggtaatgatgcatgaatttattttataaactcttggactatgtatttgacatgtaaaatatgtacagtattaacgtcaaccatctctttaaagttagcctataaatattgttgtataattttctttggtcagaaacacttggactgaatagtgacactcggtaaggattttcagtgccatttagcaaaacgtctttagtctatgcaactagcaaaaatctgcataatgcaacaacacagttttcacacttcaaattttacatgaggggttcttcacgattctcctggaacccagtctagcaaaatgagaggaaaggccctagggagatttatttctgttaaatagttaactctgctgagtatgacaaatagtgtctactatctcaaccctccaaaatttgcagagtgttgggactgtcatttgtgatttttttttttttttttggtggggtagttgaataaaattgggcagctaaatttttcagttccatgtgcctcccaaataaaaaacagaaaataagtagtttttgtgaattgacttgcagacaaagtagaaactgtgctgcatgatgttattttgtaaacagatgacattttctgaccaggcacatgccatccaattttctgtcaatcacactgttgtataaagcagcagaactgaaggggaaaaatgattgttgtatacactgaattgctttgcatggtctcatttgagataattgatgtaagaatcctgacttttttatatttggaaacatcaaataaaaatggaaaaaatgaaaaaaaaaaaaaaaa

SEQ ID NO: 22620 - DNA, 927 bp, Homo sapiens
acttggcatccccctgtggtgagaccacaggcatgagccatcgcgcccagccataactccccacccggacatggcatgtactgggggggtgggggagtgcccatcttgtacatgatattcttagaggtaataaggtaatgatgcatgaatttattttataaactcttggactatgtatttgacatgtaaaatatgtacagtattaacgtcaaccatctctttaaagttagcctataaatattgttgtataattttctttggtcagaaacacttggactgaatagtgacactcggtaaggattttcagtgccatttagcaaaacgtctttagtctatgcaactagcaaaaatctgcataatgcaacaacacagttttcacacttcaaattttacatgaggggttcttcacgattctcctggaacccagtctagcaaaatgagaggaaaggccctagggagatttatttctgttaaatagttaactctgctgagtatgacaaatagtgtctactatctcaaccctccaaaatttgcagagtgttgggactgtcatttgtgatttttttttttttttttggtggggtagttgaataaaattgggcagctaaatttttcagttccatgtgcctcccaaataaaaaacagaaaataagtagtttttgtgaattgacttgcagacaaagtagaaactgtgctgcatgatgttattttgtaaacagatgacattttctgaccaggcacatgccatccaattttctgtcaatcacactgttgtataaagcagcagaactgaaggggaaaaatgattgttgtatacactgaattgctttgcatggtctcatttgagataattgatgtaagaatcctgacttttttatatttggaaacatcaaataaaaatggaaaaaatgaaaaaaaaaaaaaaaa

SEQ ID NO: 22621 - DNA, 1717 bp, Homo sapiens
  misc_feature (1398)..(1398): n is a, c, g, or t
  misc_feature (1400)..(1400): n is a, c, g, or t
aaatattgtaactggggagtatagagtagaaaaaaagtatagttaaaacatttgttctacaaattaacctttaaaaatataattactgctaaaaatagagtgctgttacacttaaggaaaattagtgccattttggaaatgagatcttgtgccataaatacagctgaactgaatataaatgttcacaaattaatgctgtcaaaggaatgagtaaagcagaaaaacttttaaccagcaacatttcaagtacgtagtgtgatcaaacatgatcatccagaatttgtatatttttttctttgtacagaggttacatattctgggtgttcttttataaaggaaacattttaaatcccacaaattgacactttctatcttcaatggactaagatttttttggtcagtaatctctgaaatttccttaaattatatacttaacatagcagagaaactggattgtttttgtatataagactgcttccacctgaaatgctgtcataagtactgggggggtgggggagtgcccatcttgtacatgatattcttagaggtaataaggtaatgatgcatgaatttattttataaactcttggactatgtatttgacatgtaaaatatgtacagtattaacgtcaaccatctctttaaagttagcctataaatattgttgtataattttctttggtcagaaacacttggactgaatagtgacactcggtaaggattttcagtgccatttagcaaaacgtctttagtctatgcaactagcaaaaatctgcataatgcaacaacacagttttcacacttcaaattttacatgaggggttcttcacgattctcctggaacccagtctagcaaaatgagaggaaaggccctagggagatttatttctgttaaatagttaactctgctgagtatgacaaatagtgtctactatctcaaccctccaaaatttgcagagtgttgggactgtcatttgtgatttttttttttttttttggtggggtagttgaataaaattgggcagctaaatttttcagttccatgtgcctcccaaataaaaaacagaaaataagtagtttttgtgaattgacttgcagacaaagtagaaactgtgctgcatgatgttattttgtaaacagatgacattttctgaccaggcacatgccatccaattttctgtcaatcacactgttgtataaagcagcagaactgaaggggaaaaatgattgttgtatacactgaattgctttgcatggtctcatttgagataattgatgtaagaatcctgacttttttatatttggaaacatcaaataaaaatggaaaaaatgaaaaaaaaaaaaaaaaaaaaaaaaaaaaaaaaaaaaaaaaaaaaaaaaaaaaaaaaaaaaaaaaananaaaaaaaaaaaccttgtcgcccccttggcccaatccaattttaaactcaaccaacttaatccatccgccccaaattcaacctaattggccaaattccccctatagggagccgtttaaaaatcaactgcccgccgtttaaaaacgtcgaaactggaaaacccctggcttacccaaactaaatccctttgaaaaaaatccccttttcccaagttggctaaataccaaaaagccccgaaccaatcgcctttccaaacagttgcccaccctaaatgccaaaggaaaattgaaaccgtaaaaatttggtaaaaatccccgta

SEQ ID NO: 22622 - DNA, 1537 bp, Homo sapiens
aaatattgtaactggggagtatagagtagaaaaaaagtatagttaaaacatttgttctacaaattaacctttaaaaatataattactgctaaaaatagagtgctgttacacttaaggaaaattagtgccattttggaaatgagatcttgtgccataaatacagctgaactgaatataaatgttcacaaattaatgctgtcaaaggaatgagtaaagcagaaaaacttttaaccagcaacatttcaagtacgtagtgtgatcaaacatgatcatccagaatttgtatatttttttctttgtacagaggttacatattctgggtgttcttttataaaggaaacattttaaatcccacaaattgacactttctatcttcaatggactaagatttttttggtcagtaatctctgaaatttccttaaattatatacttaacatagcagagaaactggattgtttttgtatataagactgcttccacctgaaatgctgtcataagtactgggggggtgggggagtgcccatcttgtacatgatattcttagaggtaataaggtaatgatgcatgaatttattttataaactcttggactatgtatttgacatgtaaaatatgtacagtattaacgtcaaccatctctttaaagttagcctataaatattgttgtataattttctttggtcagaaacacttggactgaatagtgacactcggtaaggattttcagtgccatttagcaaaacgtctttagtctatgcaactagcaaaaatctgcataatgcaacaacacagttttcacacttcaaattttacatgaggggttcttcacgattctcctggaacccagtctagcaaaatgagaggaaaggccctagggagatttatttctgttaaatagttaactctgctgagtatgacaaatagtgtctactatctcaaccctccaaaatttgcagagtgttgggactgtcatttgtgatttttttttttttttttggtggggtagttgaataaaattgggcagctaaatttttcagttccatgtgcctcccaaataaaaaacagaaaataagtagtttttgtgaattgacttgcagacaaagtagaaactgtgctgcatgatgttattttgtaaacagatgacattttctgaccaggcacatgccatccaattttctgtcaatcacactgttgtataaagcagcagaactgaaggggaaaaatgattgttgtatacactgaattgctttgcatggtctcatttgagataattgatgtaagaatcctgacttttttatatttggaaacatcaaataaaaatggaaaaaatgaaaaaaaaaaaaaaaatcatggctttaaaaaaaaacaaaaccacacacacatgaactcagatttgcaaactaggtcaggatttcaagaccagcttggccaatatggtgaaccctgtctctactaaaaatacaaaattagccgggcatggtgacgacgcctgtagtcccagctacttgggaggctgaggcagaatggctttcaccc

SEQ ID NO: 22623 - DNA, 1383 bp, Homo sapiens
  misc_feature (1257)..(1258): n is a, c, g, or t
  misc_feature (1375)..(1375): n is a, c, g, or t
aaatattgtaactggggagtatagagtagaaaaaaagtatagttaaaacatttgttctacaaattaacctttaaaaatataattactgctaaaaatagagtgctgttacacttaaggaaaattagtgccattttggaaatgagatcttgtgccataaatacagctgaactgaatataaatgttcacaaattaatgctgtcaaaggaatgagtaaagcagaaaaacttttaaccagcaacatttcaagtacgtagtgtgatcaaacatgatcatccagaatttgtatatttttttctttgtacagaggttacatattctgggtgttcttttataaaggaaacattttaaatcccacaaattgacactttctatcttcaatggactaagatttttttggtcagtaatctctgaaatttccttaaattatatacttaacatagcagagaaactggattgtttttgtatataagactgcttccacctgaaatgctgtcataagtactgggggggtgggggagtgcccatcttgtacatgatattcttagaggtaataaggtaatgatgcatgaatttattttataaactcttggactatgtatttgacatgtaaaatatgtacagtattaacgtcaaccatctctttaaagttagcctataaatattgttgtataattttctttggtcagaaacacttggactgaatagtgacactcggtaaggattttcagtgccatttagcaaaacgtctttagtctatgcaactagcaaaaatctgcataatgcaacaacacagttttcacacttcaaattttacatgaggggttcttcacgattctcctggaacccagtctagcaaaatgagaggaaaggccctagggagatttatttctgttaaatagttaactctgctgagtatgacaaatagtgtctactatctcaaccctccaaaatttgcagagtgttgggactgtcatttgtgatttttttttttttttttggtggggtagttgaataaaattgggcagctaaatttttcagttccatgtgcctcccaaataaaaaacagaaaataagtagtttttgtgaattgacttgcagacaaagtagaaactgtgctgcatgatgttattttgtaaacagatgacattttctgaccaggcacatgccatccaattttctgtcaatcacactgttgtataaagcagcagaactgaaggggaaatgctgtcaaaggatccaaagtttcagttagacagnnaaaataaacttcagtgatctattgcacagcatggtgaccacagttaaaaataatgtatggtacatctccaaattgcttaaataaaaaaaaatggtttcaaatgttgtcaccacgggnaatccaaa

SEQ ID NO: 22624 - DNA, 323 bp, Homo sapiens
gtctcatttgacaaatgaggaactacaaatgggaacagtttaagatgagatttgggtggggacacagccaaaccacatcagtggtgctaatagacagtggtgctgtggtgtgtagtagggaaaactatggcctgtgggccaaattttgaagtccttttactttttggttctaaaaattattaattgtagccagagttgttaacttaatatgtcttggaccccttgggctctctgaagactgtactctttctttccacttaataatatacatggaattgcaaaggaaaccaatgatattgaaatagatatcagaaataaaattt

SEQ ID NO: 22625 - DNA, 302 bp, Homo sapiens
aatattattatgaacacccatgtacctagtattccagatttaaaaaaataaacatgccaaatgtttgtgaaacctcacatacactatgtctgtttgacatctcctctctttttctaggacttagtttgctataaagctgaatctgcagactattattttatttaacattttgtatttaagatttccccatgatgtcttgtaagcactgggacttgcattttcactgttatctatatgtatatttatttgtttgtttatctatccatgtttcttgtgactaagaatatttaagattgttatat

SEQ ID NO: 22626 - DNA, 459 bp, Homo sapiens
tgagacagagtcttgctctgtcacccaggctggagtgcagtggcaccatctcagctcactgcaacctccgcctcccgggttcaatagattcttctgcctcagcctcccaagtagctgggactataggtgcatgccaccacgcccggctaatttttgtatttttttagtagagacggggtttcaccatattggccaggctgggctcgaactcctgacctcgtgatccacctgcgtcagcctcccaaagtgctgggattacaggcatgagccatcgtgcccggccagccactaacatttaattagtatattactataattagtatattactaaaaagagaaaactgaaatcatctaggtttgatttcagaattggctacagctggtagatgaccatgaaaatggaatcttcacaagagactgatgtcctcctgctatattttacaattcaacatcatgtgt

SEQ ID NO: 22627 - DNA, 347 bp, Homo sapiens
ttaagacagggtcttgttgtgcaggctgcagtacagtggtatgatcacagcttactgtggcttcgacctcctagctcaagagagcctcttggcttagcctgccacgaagccaggactacagagagtcacacgccactaggcccagctaattgtattttttgtagagatgggatttttccatgttgcccagggtggccttgaactcctggctcaaacaatcctcctgcttcagcctcccaaagtgctgggattgcaggtgtgagccactgtgcccagcctacataccttggtcttgaccctttaccatattttgttttgttttgttttgagatggagtctcactctgt

SEQ ID NO: 22628 - DNA, 362 bp, Homo sapiens
ctgaactgcctgcagcttttacgacatccttccttccttttatgcagtggtaaaactgaatacagtcaaatgtaaattcattttgacttgcagctctgctattatcaagtccgtattatagaagtttataaacagaatggaatttcccaggattttcccagcagcactttctgctgaatatgcagatagatgaggaaagtctagtgttttttttgaacaaagtatcaacaattttttgttttctgctttctgtagtttcactaaaatcttcatagaaataaggcaattgtttgaaactcaatttttcaaattaaagtaactaagagcaggaaaacattttgttgttgctataattcgactca

SEQ ID NO: 22629 - DNA, 430 bp, Homo sapiens
gtggacccttttaaagaagaacaatttcttaagaagcccagtgttcacttacatattatataaatatatacacacattaaactagttctaaactcttggtgtttagctcttaaaagaactctaagaccacagcaaatttataattataaataacattacagtccaggtgcggaggctcacgtcccagcactttgggaggccgaggtgggcagatcacctgaggtcagaagttctagaccagtctggccaatatggcgaaaccccgtctctactaaaaatacaaaaattagccaagcatcgtggcgggcacctgtaatcccagctacttaggaggctgaggcaggagaatggcttgaacccgggaggtggaggttgcaatgagttgagatcacgccactgcactccagcctgggcaacagagtgagactcc

SEQ ID NO: 22630 - DNA, 538 bp, Homo sapiens
caggcccaggttccttgtaactagttctgtagccttgggcaaatctttagtattctctgggtcttgctttcttcacctttaaactgaaagagttgacaagatgatctctgaagtccctttcagctctgatttctatgcttttatgactagattcacagagatagactgacccataaccagaaggcaatataatgctctttcatctgtttcctgcagcttggatttgtgaaagcgcagtattggctgggcacggtggctcatgcctataatcacagcacttttggaagctgaggcaggtggataacttgaggtcaggagttcgagaccagcttggccaacatggtgaaatccccatctttactaaaaataccaaaaaaaaacaaaaaaaaatagccaggcgtggatgggtacctgtagtcccagctactcaggaggctgaggtaggagaatcgcttgaacccgggaggcagaggttgcagtgagccgagatcacaccattgcactcccgcatgggcaacaagagcaaaactccatctca

SEQ ID NO: 22631 - DNA, 691 bp, Homo sapiens
tatttattcagatctagtgtgtgtcaagcattgtcctaaatccagggtgtgcagcagtgaataagtcagatgagatctgtgtttgctgaagctacaattacatggcttcagagtgactcagcatcttctttctggagttagctccttttgacttcttgatcctttgtccttctaaggctttgtttgttttttaatttataatttcaacttttatttgtattttcaaattatttttgtagaggcaaggcctcgcttttttgcccaggctggtctcgaactcctgacctcaagtgatcttcctgccttggcctcccaaagtgctagggttgcaggtgtgagccctccatgcctggcctctgagactttgccttgtcagttgttttcttcatatttaactcttccttcactccaacttaggaatgtactcagatctctcctctcctaaaacaaaaacaaaaacaaaaacaaaaactatgaacttccaaccccaagcttctgctcgaatacctttttctaccaagattactgaatcagcccactgctttcgttactagtactctgtcctttgccctctgtgtacctcctctcaccaactatgctcttgaaaaggaggatgaccactttctagttttcttagtttttttctatttcagtgtttcttaaactttttctggagagtccctgtatagcc

SEQ ID NO: 22632 - DNA, 444 bp, Homo sapiens
agaggtatacatcagggcacagaggagaaaagctaacatgatactgatgacttcaagtcttcactgtccaattcagaggataggggagggtttaagctgattaaacagtgggctttttttctcctgcaagagggtggaggtctataactgtgcagattttatcagatgcatgctaatacatgttattctgggggactctcttataccttgaagtagacattgctgctatttggcgtgaaaaaaataggaggacttatttgaattgagaatggggataggctgagttccaccgagatgttggcttagagatgcctgggccatgctgtacagtaggaagcccagcagaggagattgggctgtgtgggtcatgacaaagggagttgttagcttatggttggctattaaagtcatgggcaaggatgggcaagaaaagtgtgtaaaatg

SEQ ID NO: 22633 - DNA, 404 bp, Homo sapiens
atggaggtgcagtgtagccctccttagaaatcgactcctataaattgggctggcggggaagagaggcagcttcttgaagtttcaagaggtgtccggtgccccaaacaaattttcctggattcttcccctataagaaaggcactgtgggccgggcgcagtggctcacgcctgtaatcccagcactttgggaggccgaggcgggtggatcatgaggtcaggagatcgagaccatcctggctaacaaggtgaaaccccgtctctactaaaaatacaaaaaattagccgggcgcggtggcgggcgcctgtagtcccagctacttgggaggctgaggcaggagaatggcgtgaacccgggaagcggagcttgcagtgagccgagattgcgccactgcagtccgcagtcc

SEQ ID NO: 22634 - DNA, 811 bp, Homo sapiens
agacagggattctgctgctgggtgctgaggagcgccgatggggcattagtgggacccagagtgtggcactgtaaatgagagctgtgtggagtgcttggggaaggcttccccgaggaggcaaagtcttgctggtggagaatttgtcagcaggaaagggaagggatcatcatgtgcaaaggcaggcagcctggagccagcatgtgtgtcaggtacccaggagcagctggagtgttcctggcacccacgatactgtgcagaagtggggaggtgggcagcagagggaaggctggggtgagtcatgaggatctgtgaatgccacactaagcaacttgtactttattctaggggtgcaggggctttgagaagtttcaagcatgggagaactttttttgttgttctttttgagacagggcctctctcactctgtggccaaggctcgagtctgagatcacgccattgcattccaccctgggcaacaagagcaaaactccgtctctaaataaataaataaataaataaatataataaaaacaccaagagcgatctctataacaagaaaaaagagcctgtcttactgaggccctacgacagtcacccagctccagccgcctctagccttcctgtctcacctaaggaggtgggacaaagctaagacacctgtgaagacaccagggatacggatgcactaaaagaccaagatttaatcataaaattagaaacgtgcttccccgtttcctaaatcataccaccacatcaacggggctccagtgtaacagcagtggattgtagctgagggagctattaggcacag

SEQ ID NO: 22635 - DNA, 140 bp, Homo sapiens
cagaattagctaagaatgagttctaatgggggaagttactgtacaagtactgcctctaatatggcagagttatgatgggccaaagatgataattcacaccaataaactcacctcagggactctgatgtcccaatctcagt

SEQ ID NO: 22636 - DNA, 596 bp, Homo sapiens
gcttccccaaatacttcccaatcaaaacactaaaaggcagacctgaaattaataaaaatgttaattaaatctgttcaacagaaagcataaagccagtctttttaattatgaaatgtagcattcatataaatttcattgcttttgaaaacaatctatggctagattctcctgggtttgtatgatgattactgaaaactgtagaaaatctaaaatcaagcaagttgtttataggcaattactttcagaagcaaaaattataaaagaaccatgagatttttaaagagaaaaaattacatttgatatgagataatcatgcattttaagatgtttaaaatgacatggagtggggtccccagaccaggagagctgagggcttatgaaggacctaagggagtgagacctgttatgtaataagcccccattctgggggcagcaccacagaggcgggaccccagaagtagaagaagagccctcctgcactgggtggtgaagttggtatcagcccctagtttgtgaccctggacagatttctctgctctccagccctcagagtcctcaataaaacaaaaacatatgcaaatatacaaaaaaacaaa

SEQ ID NO: 22637 - DNA, 2073 bp, Homo sapiens
gttacacacaggcagtggtatctgtgagcagctctgtggactcaaaggttttctccctgagaggcatgacccaggccagctgattcatcagaatcaggatggacgtggtagaggtcgcgggcagttggtgggcacaagagcgagaggacatcattatgaaatacgaaaagggacaccgagctgggctgccagaggacaaggggcctaagccttttcgaagctacaacaacaacgtcgatcatttggggattgtacatgagacggagctgcctcctctgactgcgcgggaggcgaagcaaattcggcgggagatcagccgaaagagcaagtgggtggatatgctgggagactgggagaaatacaaaagcagcagaaagctcatagatcgagcgtacaagggaatgcccatgaacatccggggcccgatgtggtcagtcctcctgaacactgaggaaatgaagttgaaaaaccccggaagataccagatcatgaaggagaagggcaagaagtcatctgagcacatccagcgcatcgaccgggacgtaagcgggacattaaggaagcatatattcttcagggatcgatacggaaccaagcagcgggaactactccacatcctcctggcatatgaggagtacaacccggaggtgggctactgcagggacctgagccacatcgccgccttgttcctcctctatcttcctgaggaggatgcattctgggcactggtgcagctgctggccagtgagaggcactccctgcagggatttcacagcccaaatggcgggaccgtccaggggctccaagaccaacaggagcatgtggtagccacgtcacaacccaagaccatggggcatcaggacaagaaagatctatgtgggcagtgttccccgttaggctgcctcatccggatattgattgacgggatctctctcgggctcaccctgcgcctgtgggacgtgtatctggtagaaggcgaacaggcgttgatgccgataacaagaatcgcctttaaggttcagcagaagcgcctcacgaagacgtccaggtgtggcccgtgggcacgtttttgcaaccggttcgttgatacctgggccagggatgaggacactgtgctcaagcatcttagggcctctatgaagaaactaacaagaaagaagggggacctgccacccccagccaaacccgagcaagggtcgtcggcatccaggcctgtgccggcttcacgtggcgggaagaccctctgcaagggggacaggcaggcccctccaggcccaccagcccggttcccgcggcccatttggtcagcttccccgccacgggcacctcgttcttccacaccctgtcctggtggggctgtccgggaagacacctaccctgtgggcactcagggtgtgcccagcccggccctggctcagggaggacctcagggttcctggagattcctgcagtggaactccatgccccgcctcccaacggacctggacgtagagggcccttggttccgccattatgatttcagacagagctgctgggtccgtgccatatcccaggaggaccagctggccccctgctggcaggctgaacaccctgcggagcgggtgagatcggctttcgctgcacccagcactgattccgaccagggcacccccttcagagctagggacgaacagcagtgtgctcccacctcagggccttgcctctgcggcctccacttggaaagttctcagttccctccaggcttctagaagcatctgggccagggctcatggctggataatttccctaggcttaacaacccaagcaagcttcgcatcctcgttttatttttggttaaacttatgaaaatgtattaagaaagagtgcagctcgagagagattcagagatggaacacaccagaccccagatcacaaagccaaccatgcccggcccctcccagcacccccagccccacgaccatcgttctgaattctgacgacaccgtgagcctgcctttgtacttcaaactcatggaaggataaccaccttcatgttttgaaataaatgtttcctgttgaaatgaaaaaaaaaaa

SEQ ID NO: 22638 - DNA, 308 bp, Homo sapiens
ggtgggaggccttggggtttgggggcctctccagctgcccagctcttgcagctgatggctccacatcttgggggaaggctctgatttcatgatgggctgggggcttctcaggatttcacagcccaaatggcgggaccgtccaggggctccaagaccaacaggagcatgtggtagccacgtcacaacccaagaccatggggcatcaggacaagaaagatctatgtgggcagtgttccccgttaggctgcctcatccggatattgattgacgggatctctctcagggctcaccactgcgtattatatacg

SEQ ID NO: 22639 - DNA, 2443 bp, Homo sapiens
gttacacacaggcagtggtatctgtgagcagctctgtggactcaaaggttttctccctgagaggcatgacccaggccagctgattcatcagaatcaggatggacgtggtagaggtcgcgggcagttggtgggcacaagagcgagaggacatcattatgaaatacgaaaagggacaccgagctgggctgccagaggacaaggggcctaagccttttcgaagctacaacaacaacgtcgatcatttggggattgtacatgagacggagctgcctcctctgactgcgcgggaggcgaagcaaattcggcgggagatcagccgaaagagcaagtgggtggatatgctgggagactgggagaaatacaaaagcagcagaaagctcatagatcgagcgtacaagggaatgcccatgaacatccggggcccgatgtggtcagtcctcctgaacactgaggaaatgaagttgaaaaaccccggaagataccagatcatgaaggagaagggcaagaagtcatctgagcacatccagcgcatcgaccgggacgtaagcgggacattaaggaagcatatattcttcagggatcgatacggaaccaagcagcgggaactactccacatcctcctggcatatgaggagtacaacccggaggtgggctactgcagggacctgagccacatcgccgccttgttcctcctctatcttcctgaggaggatgcattctgggcactggtgcagctgctggccagtgagaggcactccctgcagggatttcacagcccaaatggcgggaccgtccaggggctccaagaccaacaggagcatgtggtagccacgtcacaacccaagaccatggggcatcaggacaagaaagatctatgtgggcagtgttccccgttaggctgcctcatccggatattgattgacgggatctctctcgggctcaccctgcgcctgtgggacgtgtatctggtagaaggcgaacaggcgttgatgccgataacaagaatcgcctttaaggttcagcagagtaagtctacgtgtgcccagcggggcctggggagccctggggtcagaccccgactggcccgagggcagcttcctcacactgtcctcatgatcctctgttctggcccagagggaggtctggccaggtgggctgggcaggacactgtgacaccgagcccatcccccacatgacccagatgaaagtcgagagtgtggtgagcacttccctgtccggatcgccccccagccacagtctcctgtgtatatctggacacctggggtggccacaaaaggatccggcaccgcccagtaggagactgaagtggccacggggtatgagctgtgaccattcccaggtaactcccctggcctgatatccaccctgtccctagagcgcctcacgaagacgtccaggtgtggcccgtgggcacgtttttgcaaccggttcgttgatacctgggccagggatgaggacactgtgctcaagcatcttagggcctctatgaagaaactaacaagaaagaagggggacctgccacccccagccaaacccgagcaagggtcgtcggcatccaggcctgtgccggcttcacgtggcgggaagaccctctgcaagggggacaggcaggcccctccaggcccaccagcccggttcccgcggcccatttggtcagcttccccgccacgggcacctcgttcttccacaccctgtcctggtggggctgtccgggaagacacctaccctgtgggcactcagggtgtgcccagcccggccctggctcagggaggacctcagggttcctggagattcctgcagtggaactccatgccccgcctcccaacggacctggacgtagagggcccttggttccgccattatgatttcagacagagctgctgggtccgtgccatatcccaggaggaccagctggccccctgctggcaggctgaacaccctgcggagcgggtgagatcggctttcgctgcacccagcactgattccgaccagggcacccccttcagagctagggacgaacagcagtgtgctcccacctcagggccttgcctctgcggcctccacttggaaagttctcagttccctccaggcttctagaagcatctgggccagggctcatggctggataatttccctaggcttaacaacccaagcaagcttcgcatcctcgttttatttttggttaaacttatgaaaatgtattaagaaagagtgcagctcgagagagattcagagatggaacacaccagaccccagatcacaaagccaaccatgcccggcccctcccagcacccccagccccacgaccatcgttctgaattctgacgacaccgtgagcctgcctttgtacttcaaactcatggaaggataaccaccttcatgttttgaaataaatgtttcctgttgaaatgaaaaaaaaaaa

SEQ ID NO: 22640 - DNA, 1575 bp, Homo sapiens
actgcaggtcgactcatagtagcgatcccctgtatatccgggacgtaagcgggacattaaggaagcatatattcttcagggatcgatacggaaccaagcagcgggaactactccacatcctcctggcatatgaggagtacaacccggaggtgggctactgcagggacctgagccacatcgccgccttgttcctcctctatcttcctgaggaggatgcattctgggcactggtgcagctgctggccagtgagaggcactccctgcagggatttcacagcccaaatggcgggaccgtccaggggctccaagaccaacaggagcatgtggtagccacgtcacaacccaagaccatggggcatcaggacaagaaagatctatgtgggcagtgttccccgttaggctgcctcatccggatattgattgacgggatctctctcgggctcaccctgcgcctgtgggacgtgtatctggtagaaggcgaacaggcgttgatgccgataacaagaatcgcctttaaggttcagcagaagcgcctcacgaagacgtccaggtgtggcccgtgggcacgtttttgcaaccggttcgttgatacctgggccagggatgaggacactgtgctcaagcatcttagggcctctatgaagaaactaacaagaaagaagggggacctgccacccccagccaaacccgagcaagggtcgtcggcatccaggcctgtgccggcttcacgtggcgggaagaccctctgcaagggggacaggcaggcccctccaggcccaccagcccggttcccgcggcccatttggtcagcttccccgccacgggcacctcgttcttccacaccctgtcctggtggggctgtccgggaagacacctaccctgtgggcactcagggtgtgcccagcccggccctggctcagggaggacctcagggttcctggagattcctgcagtggaactccatgccccgcctcccaacggacctggacgtagagggcccttggttccgccattatgatttcagacagagctgctgggtccgtgccatatcccaggaggaccagctggccccctgctggcaggctgaacaccctgcggagcgggtgagatcggctttcgctgcacccagcactgattccgaccagggcacccccttcagagctagggacgaacagcagtgtgctcccacctcagggccttgcctctgcggcctccacttggaaagttctcagttccctccaggcttctagaagcatctgggccagggctcatggctggataatttccctaggcttaacaacccaagcaagcttcgcatcctcgttttatttttggttaaacttatgaaaatgtattaagaaagagtgcagctcgagagagattcagagatggaacacaccagaccccagatcacaaagccaaccatgcccggcccctcccagcacccccagccccacgaccatcgttctgaattctgacgacaccgtgagcctgcctttgtacttcaaactcatggaaggataaccaccttcatgttttgaaataaatgtttcctgttgaaatgaaaaaaaaaaa

SEQ ID NO: 22641 - DNA, 2070 bp, Homo sapiens
gttacacacaggcagtggtatctgtgagcagctctgtggactcaaaggttttctccctgagaggcatgacccaggccagctgattcatcagaatcaggatggacgtggtagaggtcgcgggcagttggtgggcacaagagcgagaggacatcattatgaaatacgaaaagggacaccgagctgggctgccagaggacaaggggcctaagccttttcgaagctacaacaacaacgtcgatcatttggggattgtacatgagacggagctgcctcctctgactgcgcgggaggcgaagcaaattcggcgggagatcagccgaaagagcaagtgggtggatatgctgggagactgggagaaatacaaaagcagcagaaagctcatagatcgagcgtacaagggaatgcccatgaacatccggggcccgatgtggtcagtcctcctgaacactgaggaaatgaagttgaaaaaccccggaagataccagatcatgaaggagaagggcaagaagtcatctgagcacatccagcgcatcgaccgggacgtaagcgggacattaaggaagcatatattcttcagggatcgatacggaaccaagcagcgggaactactccacatcctcctggcatatgaggagtacaacccggaggtgggctactgcagggacctgagccacatcgccgccttgttcctcctctatcttcctgaggaggatgcattctgggcactggtgcagctgctggccagtgagaggcactccctgcagggatttcacagcccaaatggcgggaccgtccaggggctccaagaccaacaggagcatgtggtagccacgtcacaacccaagaccatggggcatcaggacaagaaagatctatgtgggcagtgttccccgttaggctgcctcatccggatattgattgacgggatctctctcgggctcaccctgcgcctgtgggacgtgtatctggtagaaggcgaacaggcgttgatgccgataacaagaatcgcctttaaggttcagcagagtaagtctacgtgtgcccagcggggcctggggagccctggggtcagaccccgactggcccgagggcagcttcctcacactgtcctcatgatcctctgttctggcccagagggaggtctggccaggtgggctgggcaggacactgtgacaccgagcccatcccccacatgacccagatgaaagtcgagagtgtggtgagcacttccctgtccggatcgccccccagccacagtctcctgtgtatatctggacacctggggtggccacaaaaggatccggcaccgcccagtaggagactgaagtggccacggggtatgagctgtgaccattcccaggtaactcccctggcctgatatccaccctgtccctagagcgcctcacgaagacgtccaggtgtggcccgtgggcacgtttttgcaaccggttcgttgatacctgggccagggatgaggacactgtgctcaagcatcttagggcctctatgaagaaactaacaagaaagaagggggacctgccacccccaggtgggctccagtgccatgtcccctcccatgtcaccctctggggtagtcagtagtaggggagtgcccgggacccgcaaccctactacctgggccttcctcttcaccttttcttcctcctcttcctcctggactctaagaaagtacaggaggcccaccggtcctcagggcaggcgctcagtgcgtgtatactggacatgctgtgcacgcaggagggggatgtgggcaagaccctccaacaagccccctcccactttccacggtgtctccctctccccctcgcagggccctccaagttactagacgagcccagacccatttgtgggagaccccgcccctccctgcaagcacccacagcctcagagagcagcagaggcccctcactcctgcacgctcctccaaggttgccaggacaagaagcctggagccagggagacaagggaatccgtgtccctgacccacagagcattcagggagagggcacaggcgggaccccgggcccagagccagagccaagagttcag

SEQ ID NO: 22642 - DNA, 978 bp, Homo sapiens
gttacacacaggcagtggtatctgtgagcagctctgtggactcaaaggttttctccctgagaggcatgacccaggccagctgattcatcagaatcaggatggacgtggtagaggtcgcgggcagttggtgggcacaagagcgagaggacatcattatgaaatacgaaaagggacaccgagctgggctgccagaggacaaggggcctaagccttttcgaagctacaacaacaacgtcgatcatttggggattgtacatgagacggagctgcctcctctgactgcgcgggaggcgaagcaaattcggcgggagatcagccgaaagagcaagtgggtggatatgctgggagactgggagaaatacaaaagcagcagaaagctcatagatcgagcgtacaagggaatgcccatgaacatccggggcccgatgtggtcagtcctcctgaacactgaggaaatgaagttgaaaaaccccggaagataccagatcatgaaggagaagggcaagaagtcatctgagcacatccagcgcatcgaccgggacgtaagcgggacattaaggaagcatatattcttcagggatcgatacggaaccaagcagcgggaactactccacatcctcctggcatatgaggagtacaacccggaggtgggctactgcagggacctgagccacatcgccgccttgttcctcctctatcttcctgaggaggatgcattctgggcactggtgcagctgctggccagtgagaggcactccctgcagggatttcacagcccaaatggcgggaccgtccaggggctccaagaccaacaggagcatgtggtagccacgtcacaacccaagaccatggggcatcaggacaagaaagatctatgtgggcagtgttccccgttaggctgcctcatccggatattgattgacgggatctctctcctgcgcgcaatgggtgtgtggtacgtgtatgctctcagcgcgt

SEQ ID NO: 22643 - DNA, 469 bp, Homo sapiens
gacaagaaagatctatgtgggcagtgttccccgttaggctgcctcatccggatattgattgacggggtaaggaggcatagggagaccctggctcagggaccttccttgccctgcagtgccctgcttccccagcccgggggtctggctcactcccagcccacaggaggctcaggcgggtccccaaaggacacacaagcaaaaccctctgcccaaggggggtcatcccagggccatggctggggctcaggcccagcctcatgggcagactgggccaggacccgacttgagagggctcagggaagcctcaagccctgggcaagcccctctctccaggagccacatccccactcaaatgagtgccccccatgaggagcttcaagaccttgtctgacccagcgtcctggagggctcaggcgaccctcatggggaaggtcactgactctggagactgaagccccagtgtgcgcag

SEQ ID NO: 22644 - DNA, 389 bp, Homo sapiens
acatgagtcctcccaggtgacctcagccctcccaggtgatgtccttccatggtgactctggctcttgcaggaggtgggctactgcagggacctgagccacatcgccgccttgttcctcctctatcttcctgaggaggatgcattctgggcactggtgcagctgctggccagtgagaggcactccctgcagggtaagtgaacagctgccccggggacctcctgcagccagacctggggatggccaccctggccaggtgatcacagctttcagccaaggcaccctccttgtgtcgccagcttgttgggagactttaggatgtctctgctgagggtcccacaggagtccacggctgacccccaaagcccaaatcagacgcctctcatcccca

SEQ ID NO: 22645 - DNA, 613 bp, Homo sapiens
ctgctcaacaggcgttattcctaaagtggcttcactgttcagactgaagagccacggtagccaaagtgatgagcggagtagaaccgagcagtcgggagagatcttgttccctgtaggaaactgggcatcgctgaggccctgagcatcccaggaggccgattgcacagagacctctggtcgctgaccccagtctgcctccacatccctggaatagcccatcatgggcccttcacccttggcaggtggaaaccattcaacctgctggggccggtgtgtccccatttcatggcattgggggacaacaggattctctgtctaggtcccactgtactcaagtccttgggaagatgcccacccctgcttgggacttgagactccagagactggagcagctgtgggccactgggtctggcccctttttccctgggggcggcggtggaatgggggttacgcagccagccagcatctgggagcccggcgagagcggttcaggtgttctccgaagccgccgcgtacagtgtgacctttagacaattctgtctcacaggatggacgtggtagaggtcgcgggcagttggtgggcacaagagcgagaggacatcattatgaaata

SEQ ID NO: 22646 - DNA, 1633 bp, Homo sapiens
tgcattagacctctcccagagaccctctctggagactgaagccccagtgtgcgcagctcgagccaccagccccagcctggaaggaccaggttctttcacacctgctgtccccacagatctctctcgggctcaccctgcgcctgtgggacgtgtatctggtagaaggcgaacaggcgttgatgccgataacaagaatcgcctttaaggttcagcagagtaagtctacgtgtgcccagcggggcctggggagccctggggtcagaccccgactggcccgagggcagcttcctcacactgtcctcatgatcctctgttctggcccagagggaggtctggccaggtgggctgggcaggacactgtgacaccgagcccatcccccacatgacccagatgaaagtcgagagtgtggtgagcacttccctgtccggatcgccccccagccacagtctcctgtgtatatctggacacctggggtggccacaaaaggatccggcaccgcccagtaggagactgaagtggccacggggtatgagctgtgaccattcccaggtaactcccctggcctgatatccaccctgtccctagagcgcctcacgaagacgtccaggtgtggcccgtgggcacgtttttgcaaccggttcgttgatacctgggccagggatgaggacactgtgctcaagcatcttagggcctctatgaagaaactaacaagaaagaagggggacctgccacccccagccaaacccgagcaagggtcgtcggcatccaggcctgtgccggcttcacgtggcgggaagaccctctgcaagggggacaggcaggcccctccaggcccaccagcccggttcccgcggcccatttggtcagcttccccgccacgggcacctcgttcttccacaccctgtcctggtggggctgtccgggaagacacctaccctgtgggcactcagggtgtgcccagcccggccctggctcagggaggacctcagggttcctggagattcctgcagtggaactccatgccccgcctcccaacggacctggacgtagagggcccttggttccgccattatgatttcagacagagctgctgggtccgtgccatatcccaggaggaccagctggccccctgctggcaggctgaacaccctgcggagcgggtgagatcggctttcgctgcacccagcactgattccgaccagggcacccccttcagagctagggacgaacagcagtgtgctcccacctcagggccttgcctctgcggcctccacttggaaagttctcagttccctccaggcttctagaagcatctgggccagggctcatggctggataatttccctaggcttaacaacccaagcaagcttcgcatcctcgttttatttttggttaaacttatgaaaatgtattaagaaagagtgcagctcgagagagattcagagatggaacacaccagaccccagatcacaaagccaaccatgcccggcccctcccagcacccccagccccacgaccatcgttctgaattctgacgacaccgtgagcctgcctttgtacttcaaactcatggaaggataaccaccttcatgttttgaaataaatgtttcctgttgaaatgaaaaaaaaaaa

SEQ ID NO: 22647 - DNA, 1438 bp, Homo sapiens
aatcctcgggagccttaacctcaagcagcgggaactactccacatctccttggcatatgatggagtataacccgggaggtgggctactgcagggacctgagccacatcgccgccttgttcctcctctatcttcctgaggaggatgcattctgggcactggtgcagctgctggccagtgagaggcactccctgcagggatttcacagcccaaatggcgggaccgtccaggggctccaagaccaacaggagcatgtggtagccacgtcacaacccaagaccatggggcatcagatctctctcgggctcaccctgcgcctgtgggacgtgtatctggtagaaggcgaacaggcgttgatgccgataacaagaatcgcctttaaggttcagcagaagcgcctcacgaagacgtccaggtgtggcccgtgggcacgtttttgcaaccggttcgttgatacctgggccagggatgaggacactgtgctcaagcatcttagggcctctatgaagaaactaacaagaaagaagggggacctgccacccccagccaaacccgagcaagggtcgtcggcatccaggcctgtgccggcttcacgtggcgggaagaccctctgcaagggggacaggcaggcccctccaggcccaccagcccggttcccgcggcccatttggtcagcttccccgccacgggcacctcgttcttccacaccctgtcctggtggggctgtccgggaagacacctaccctgtgggcactcagggtgtgcccagcccggccctggctcagggaggacctcagggttcctggagattcctgcagtggaactccatgccccgcctcccaacggacctggacgtagagggcccttggttccgccattatgatttcagacagagctgctgggtccgtgccatatcccaggaggaccagctggccccctgctggcaggctgaacaccctgcggagcgggtgagatcggctttcgctgcacccagcactgattccgaccagggcacccccttcagagctagggacgaacagcagtgtgctcccacctcagggccttgcctctgcggcctccacttggaaagttctcagttccctccaggcttctagaagcatctgggccagggctcatggctggataatttccctaggcttaacaacccaagcaagcttcgcatcctcgttttatttttggttaaacttatgaaaatgtattaagaaagagtgcagctcgagagagattcagagatggaacacaccagaccccagatcacaaagccaaccatgcccggcccctcccagcacccccagccccacgaccatcgttctgaattctgacgacaccgtgagcctgcctttgtacttcaaactcatggaaggataaccaccttcatgttttgaaataaatgtttcctgttgaaatgaaaaaaaaaaa

SEQ ID NO: 22648 - DNA, 991 bp, Homo sapiens
gttacacacaggcagtggtatctgtgagcagctctgtggactcaaaggttttctccctgagaggcatgacccaggccagctgattcatcagaatcaggatggacgtggtagaggtcgcgggcagttggtgggcacaagagcgagaggacatcattatgaaatacgaaaagggacaccgagctgggctgccagaggacaaggggcctaagccttttcgaagctacaacaacaacgtcgatcatttggggattgtacatgagacggagctgcctcctctgactgcgcgggaggcgaagcaaattcggcgggagatcagccgaaagagcaagtgggtggatatgctgggagactgggagaaatacaaaagcagcagaaagctcatagatcgagcgtacaagggaatgcccatgaacatccggggcccgatgtggtcagtcctcctgaacactgaggaaatgaagttgaaaaaccccggaagataccagatcatgaaggagaagggcaagaagtcatctgagcacatccagcgcatcgaccgggacgtaagcgggacattaaggaagcatatattcttcagggatcgatacggaaccaagcagcgggaactactccacatcctcctggcatatgaggagtacaacccggaggtgggctactgcagggacctgagccacatcgccgccttgttcctcctctatcttcctgaggaggatgcattctgggcactggtgcagctgctggccagtgagaggcactccctgcagggatttcacagcccaaatggcgggaccgtccaggggctccaagaccaacaggagcatgtggtagccacgtcacaacccaagaccatggggcatcagatctctctcgggctcaccctgcgcctgtgggacgtgtatctggtagaaggcgaacaggcgttgatgccgataacaagaatcgcctttaaggttcagcagaagcgcctcacgaagacgtcccgataagcagg

SEQ ID NO: 22649 - DNA, 541 bp, Homo sapiens
gagacttgtacagttttcctgatttaagagtgtagaagtcatttttccctggaacatgacaggcgtttccttagaagcaagtcacagcatgtttattcatcagagaccatgcgaacattggcagctgtctagaggaaacatggaaaagtctcaaagcaacatgactaatctaaaagatatttagtataatttttacatagaggaaacatgtagtgtattaattatttcattttgctcaaattaactttctcctttctgcaaatattactcccactgttgactttcatttcttttctttccccaggtttttcattgcttaaatattttcatatatcctgacatatattctcacattaggatgagtaaagaaatatatcggtagaaagatattgagcatacaagcaaggttcctaagtggagctgcaaaattatgtgaattgacgatgagacagctgtcaggataccgaaatgtattcagggattgcaaaatgagatagaattaaattggatttggaaatggattaggttaaggtactttaaa

SEQ ID NO: 22650 - DNA, 382 bp, Homo sapiens
acaggacttgaattcagaacttttgcctgattgcaaagctcaccttcctaatagctttgctctgttgcctgccttctgtgaacagtgcttttaaaaaagtaaagattgtcgggtgtgggtggctcacgcctgtaatcccagcactttgggaggccgaggtgggtggatcatctgaggtcaggagtttgagaccatcctggccaacatggtaaaaccccgtctctactaaaaatacaaaaaattagccaggtgtggtggcatctacctgtagtcccaggtactcgaggcaggagaattgcttgaacctgggagacggaggttgcagtgagctgagactacgccactgcattctagcctgaacgacagagtcagactctttctc

SEQ ID NO: 22651 - DNA, 501 bp, Homo sapiens
attttttattgctctggacatcactttgaggtcctggaatttacagatgagaaaaattaaacaatgaatgaggacagttttcttgtatgagggatttttgttttcttcatatttttaatgtgtttaatatactggagtgagcatgtcttattcttgttaacagacaagctatctaaaaattaaaacacaaactaaaagtagaggaagattgttatgagaaacatgtcatgtatgtgaaatacattttataaggaatagattagattctttatggaaccaggatgggtataaatacatcactagataaatattaagtaggaagatcattatggacaaagattgtttcttaggaattttgcatcgtatagcactgtgttagacagagtccttaactgattatttttgtagcatttgtttacacattcacttattaattaattttgccaatgtattgagccatctatggagatgtgtggaggtctgtgttgaaagcttgagata

SEQ ID NO: 22652 - DNA, 672 bp, Homo sapiens
attttaggtttgaattttctcaggagcagagtaatctgctttcggactggagagaagctcttgtcagggtggccagactcaggacatggcagcagctgtgaggggtttttaggtatggctgaatgttgccatatttcattttcttattttgggcttatagcaaaatgtctctatgaagccctaagaccagacacttgaccttctagaatggacaaggaatgtcaaaaggcctttctaaccattaagtaaaaattactaatggatctggctactgagaccccctgaactaagaaagccatttgatttgttcatacatgagagagaagggatgggtttaggagtagtaacccaagacttggggaatatcatgaggcctgtagcctacttttcaaaacagctggacattgttatgatgggttggacttcttatctctgaccactggcaccacttgtgatcttctccaggaggcagaagagttcactttgggttaacctagcactgtacacaccccacactgtgtatgctatttgttggaacagaagtggagctactgacttacctctagaagactgaataggtatcaggtcatcctcctggataatcctagtgttactttgagagctgtttctgctttaaatcctgctaaataaacctatacatgattgcatata

SEQ ID NO: 22653 - DNA, 336 bp, Homo sapiens
attcccatcagtaatgtacaagggttccgtttccctcacaatcttgccaatactcgctcttttcgtttcttttcttttttggttaatagttttgtaatgtatgtgcaaagtggtgtattgttgtggttttaatttgcatttccttaatggttagtgatattggacatttacttgccatttttatagcttctttggagaaggtctttaattgtgcagacagaaaattacaacctgggataaatgctctgggaacacagcaagcatcacctaagtcaacctggagagtcaggaaaagtctctagagaagtacttgttggaactcttttatctgtgtct

SEQ ID NO: 22654 - DNA, 430 bp, Homo sapiens
gtattaaaattattgtttttatttttatcatatgttttaattgatcttagtcactttcccttttcagtctgttagtgtcttttttttattcctaactcccctaacctaggttgataccagtctctgtactgtccaaccagggatacttttctgggtctctttggctgcaaattcatacgaattctaaattctgagtgcagatgttagagttccttcctacactccatagcacagatggaaaagaggatggagattggggaaagtaccagaacttgaatcaggtctttcccaacaccaacactcatcttaaagagcatggctattgtaagagagttatctattggaagttgtggaatttactgataggaaaatgttggacatatattgtaaagtttctttttttttgtcaaaagtataaggctttccttgc

SEQ ID NO: 22655 - DNA, 444 bp, Homo sapiens
tgacgttccctcggaaagcagggctgaaggcatcctcagagaatgccccgatgcccagggatctgggacggccatggcttcacctgcacaggcacccctggcccaatcctcacagctgccactcccacactgctcccgatggaaattccagagctttacagaatcccctgttttatgaaaaggggtagacgtggcagctcaccccaggttgcacagcctcatggccagccggggtttgaaccctggaccacctgcttcccccacacccaggggctttccagggggtgcctggagggggagggaagccgatgtttggtgggtgagcctccctgagtccatccgttttttgtttgtttgtttacttgcttgtttgtttttgagacagtttcacagtttcattcttgttgcactccagccagggcgacagagggagactctatctca

SEQ ID NO: 22656 - DNA, 983 bp, Homo sapiens
ccactcgagcagctgagagccctcttaaagggcaagtgacatcgagacctgctctcggaactgtctgcaggaagactggtgttagactaggattgaagatgaagcacatcttgaagtttactgatctctgccatcggatgctgggtgaggtacagctcattcatgccttccttggctcatgcttaaaacccatcacactcctatcctcccatagttctgcacgtttctcatccactcgggcagctaagagccctcttaaagggcaagcgaccctgacacctgctttaggaactgtttgcaggagtcagtgcaggccagctccacatcctgaaggggatgccatccgggtacgaacagctcagaggctgaatggccctatcacccgggaggagcctggagggtattccatctaatcctgtggctaagcggggtggatgagggaacacacggacttgttcgagaatttgcccagcagcacgaaactacttagaagcagaaaactggggcaggacctggcgtgggagttagggagccctccactgccttctcagggatccacatgtgctcctctgtgcaggaactttcaacagcgcctcaagatagagtcacagagaacgatggcaaattccatagcactcactttttctttcctgagaaataaacagatttgggagctcagtacatcagtaatataaaagacagtgggttcagaaaaaaaaaaaggaaaaaaatgcacaaattacaaaaaaatatgtataaagagcttcataccttttttcgtttttggttacctgtaacgttttagaattcaagaaggtttccaatgaggaaagacggaattattcagaaacagcgttcacctgatacggagaacagctccccagcgggaagtcatcatgtctcatctgacagtctagcgagctgcgtggcccctggtcactcactcactcaccctcatgggtggtctctgtgcactcatttat

SEQ ID NO: 22657 - DNA, 321 bp, Homo sapiens
ggcttttaccatgttgaccaggatggtcttgatctcctgacctcgtgatccgtccgccttggcctcccaaagtgctgggattacaggtgggagccatcacacctggccatattttaatttttctagtttggtcagaatctttctcttaacctctgggaaacagatgtattccttaactggctgtagaaagtcacatatcagcatttttattggtggagctgattctgagtcagtacctcatgctgtttaagagcagccacggccaggccagcagcagctgaaaggcatgggggctggctgtgatggcccagtcatcaggga

SEQ ID NO: 22658 - DNA, 1393 bp, Homo sapiens
gccaggcatgagcgacctgctgcagtttgtggcaaaacagggcgcctgcttcgaggtgattctcatctccgatgccaacacctttggcgtggagagctcgctgcgcgccgccggccaccacagcctgttccgccgcatcctcagcaacccgtcggggccggatgcgcggggactgctggctctgcggccgttccacacacacagctgcgcgcgctgccccgccaacatgtgcaagcacaaggtgctcagcgactacctgcgcgagcgggcccacgacggcgtgcacttcgagcgcctcttctacgtgggcgacggcgccaacgacttctgccccatggggctgctggcgggcggcgacgtggccttcccgcgccgcggctaccccatgcaccgcctcattcaggaggcccagaaggccgagcccagctcgttccgcgccagcgtggtgccctgggaaacggctgcagatgtgcgcctccacctgcaacaggtgctgaagtcgtgctgagtctggccgcctgcaggggggtacccgggccaacggcggagggggcggggaagggagattcggcaaagacagctttactactcccttttccctttggctttgttatgtccctctgggaatttctggaatctcgtatttgggggcttggggaagggggctcagagccgtccctatctattcagttaacccacctcggctgcctcccccactccactgtgcacggttgagttctggagtctgacccatcgcggggtggcgcgcaaaccttggaaggcagcagtatttcctggtcctcccaactgggaggaaggggcccccccggcaggtgagagaaggaacatctcccgccgctgtaacttgttgcctcgggctgcgtgaccgcccctcctccagtctactgtggagggaacccaggatcctgaaattctcctggccgcaagaactccccacagaggcagaagagggtctccacctatggccccaggcctttgcgatcttgcttcacccaccgcgaccccacactatttctgtgctgtccacactctcttgcctcccgacccccgcactcccttctagcacccccaaaggaaaagccagaggaacaatcgcctcctggtggtggtacgaggtagcgcaccgtccggctcgggtccggacagccagtaacctcgcagagagtgacggtgtctccttgcatcccagcctcgtctatgcagcaagagaccagggacttcaccaaagtcaccctcgcgggctgggccttccacgcatcccccccaccccccatggaacagaaagccatgtttttaagcagaaccagcgaaacccaagcccctccttcctctggtgttttacaactataaaggaggtgaagggggaagaaat

SEQ ID NO: 22659 - DNA, 1583 bp, Homo sapiens
ctgtggttgcgctgggatatgctgctgtcccatgctggagaatcaacttactggaggtgcccccccgccaagccacaggagcagagagctgtcacggtggggaatgctgctgggacccgtgcaggacgaaaggagacagaagaaaaaggccatcttcctcctctagccttgttagccccttcagagcccactgtgggtcaggctggcaaagggtaaaggagttttcagagccccctcttcagtgtgacaaggaagggcaaggtcagggaaatttggagttaagaggcaataaatgagtacctggcacacctagtcgaggtgtgtccactttctccatagcatggttactgtttttttcttttcaactaataagaaatctctggagacacactgtctccatgtacataccctgttcctcatgagactcttccccattccccgaccaggttcagcaaatgttgctgattctggcctgattcaatctttatgatgactgccaagcgacgtttctgcagcccagcactccttcctcatttgccagtcatccctcccttctccttcatttattttcatatatccactatggattcccattttttcaaaagtcgacttcatcattgacctttggggatgggggaagagttcctcagatagttcccgacttgggcagcgagagccccttcgagtgcctcctatatcccagcatttttggaagcactcccctaatttctgatctaacaagatgttccgggcccctgggcaccagccatggatcagtgtttgtcccaggagccctggtccctggcactaggtgtgcttattgcagctggggtgtctttgcttcttgtcctatagatgattgacagagcttgtcttactgccttttttaagtgtatttttttaaacaaaagtaattggtgctttaaaaaatgtgaacaatacagacatctgtaaagaagtacccacagggaagcaagttcagcagttcagcaatggcatgtgtctttgcagactacatacacagaaacagacttggtattgggttttggtttttgctttttgctaataggaattttatcctacaagatcctctttctgtcttcacaacatagtctgatgctccttccatgtctaactgtaggatttgtcattccattgtgttagctgtgtgggtacattagtaccatgattaaccaaggtgtataaagggcaggcctgcaggctgcctccagtgcctccactactcgccacagtgatcatctctatacacacactgcagtcatttacaatttttaaaatgaaaacaatttttattgagatgcaattcacatggcataaaattaacgattttaaagtaaagaagttgccttgagtacattcaccatgctatagaaccactgcctgtatctagtttcaaagcactttcatcaccctgtgtcatgtatttttacatgaactccaagggtggattcttgttagttggatttactctggatggaaaagtcatgtttggctgggtgcagtggctcatgcctgtaatcatagcactttgggaggtcgagacaggtgggtcacttgagatc

SEQ ID NO: 22660 - DNA, 1356 bp, Homo sapiens
ctgtggttgcgctgggatatgctgctgtcccatgctggagaatcaacttactggaggtgcccccccgccaagccacaggagcagagagctgtcacggtggggaatgctgctgggacccgtgcaggacgaaaggagacagaagaaaaaggccatcttcctcctctagccttgttagccccttcagagcccactgtgggtcaggctggcaaagggtaaaggagttttcagagccccctcttcagtgtgacaaggaagggcaaggtcagggaaatttggagttaagaggcaataaatgagtacctggcacacctagtcgaggtgtgtccactttctccatagcatggttactgtttttttcttttcaactaataagaaatctctggagacacactgtctccatgtacataccctgttcctcatgagactcttccccattccccgaccaggttcagcaaatgttgctgattctggcctgattcaatctttatgatgactgccaagcgacgtttctgcagcccagcactccttcctcatttgccagtcatccctcccttctccttcatttattttcatatatccactatggattcccattttttcaaaagtcgacttcatcattgacctttggggatgggggaagagttcctcagatagttcccgacttgggcagcgagagccccttcgagtgcctcctatatcccagcatttttggaagcactcccctaatttctgatctaacaagatgttccgggcccctgggcaccagccatggatcagtgtttgtcccaggagccctggtccctggcactaggtgtgcttattgcagctggggtgtctttgcttcttgtcctatagatgattgacagagcttgtcttactgccttttttaagtgtatttttttaaacaaaagtaattggtgctttaaaaaatgtgaacaatacagacatctgtaaagaagtacccacagggaagcaagttcagcagttcagcaatggcatgtgtctttgcagactacatacacagaaacagacttggtattgggttttggtttttgctttttgctaataggaattttatcctacaagatcctctttctgtcttcacaacatagtctgatgctccttccatgtctaactgtaggatttgtcattccattgtgttagctgtgtgggtacattagtaccatgattaaccaaggtgtataaagggcaggcctgcaggctgcctccagtgcctccactactcgccacagtgatcatctctatacacacactgcagtcatttacaatttttaaaatgaaaacaatttttattgagatgcaattcacatggcataaaattaacgattttaaagt

SEQ ID NO: 22661 - DNA, 1714 bp, Homo sapiens
gaaatgggatttcaccatgttggccagggtggtcttgaactcctcacctcaagtgatctggctgcttcggccaccctaagtgctgggattacaggcataagctactgtgcccagccaggagaatgaattttaaaaatctatgttagtgtttaaaatgagtgctttgttttaaagcagcaatttagtagcattattaaaatgcttacttcactatagtagcaattaggtaaagatgggcaatatcaaaatgggctaaacttattttccactatgttccacacctttgaaataggaattcctaacttgagaatcatgaacccttagggaatcctttataattgtgtataagaagttctagtttacatgcatttttcttggggaaagtgcatagtttagatcagcttctcgaagtggcaaaagtatgggagttagggttaggaaccaccaggattgaataatcctggaatattatataattttctacttttgattttgctgtggtatatttctgaaaatgtgctgtggctcctaactagtaaaatgggctggtgagggactctggaattctgaatttctaagtttataacctaaaatgaaactgtaaagtcctcggtatttagaaaaatgcttaatctcagatttacagatggcctcatgataacttagattcgttaacagggtcaaactttagttcaacaaatttcaacccaatattatcacagtacaatagcttagaatgatcattagaaatggtagaaaatagaataaatcattaaagatcccaaaatgttgagttctgtagcatgaaaactctcttgctcctccatgtttgtagttcaggccagaacaaactaaacagaccaataaatataaaagtgatagtttagggaaaaaaaaaaactttgtataaataaaattgtatgtgtgttcaaataactacctattaaatcatccaaagcttagaatttaaattggtcatagtagcaaatagtgcagatgatggaagaaaaccagtctcaataatggttttttttttccaattgcataaggtcacgtcatcccccaaattgtctattttttcttttctttttttttaagatggagtctcgctccgtcacccaggctggaatgcagtggcgcaatctgggctcattggcaacctccacctcccaggtgcaagcgattctcctacctcagcctcccaagtagctgggactacaggcgcccgccaccatgtgggcctggctaatttttgtagagatggggtttcaacatgttggccaggctggtctcaaactcctgacctccagtgatgcacccgcctcggcctcccaaagttctgggattacaggcgtgagccaccgtgcccagcccctattttttctgaaataatttttcggatatacttttatatttgaaattagttgaacataagatgatcatcaagcttgctataagttttaagctattgctacatttgaacaaagacccacgtacttatcttagaaagtacttaggatatctttgagattaatggtgctacatcactctacagtactatgtaaaatgaatggagctgctgttcctttctagctagctgtttgtgtagttcatattaatttaccctgccttttatttggattgtctgatttcttagttgtacacatgaacctcattatttgcctggaataagtaatcaaataaaattgctttg

SEQ ID NO: 22662 - DNA, 520 bp, Homo sapiens
gcagcagtgattcggtcaggatgtcttttaccagacactaaagcatatggagatagaatagaaagaatgccttgcctcagtttgaacacatcctgatgcaaaggtggaagaacccgacgaagaacctgaggagacagcagaagacaaagagcaagacaaagacaaagaaatggatgtgggaacagatgaagaaaaacaagaaacagcaaaggaatctacagctgaaaaagatgaattgtaaattatactctcatcgtttggatcctgtgtggagagggaatgtgaaatgtaagtcatttcttttggcagagacttgttttggatgccccccaccagtccccttctcccctgcactgtaaaatgtgggattatgggttacaagaagaagtgggttttttagttgattttttttaaacatacctcatgaatgtaaatttgtactatttaactgactattcttgatgtaaaatcttgtcatgtataaaaataaaaaagatttcctccccaccaaaagttaaac

SEQ ID NO: 22663 - DNA, 1400 bp, Homo sapiens
cgttcaggttttctgaatagctgaaatatcaacatgtttatctcttcccttgccttagtatatcctagagcagtgttttccccggctttatctttattccttcatttaatgaactccgtgttttcatcactcacattttgttcccttccctcagtttccttcctttgccttcatttatgtatttagtttacagaataacaaaagcactcgtgttacttttaaacaaggtaaaacttaaacagttttttcctccgtttctttttttatggaaataagaggcaagtgatagcaagtgggtaattcaatggcagtggtaactgaagcactgacctgttacaagagagacggaagcttctacttgagcagatacaaatactgtcatccgtggagatttgaaagaagtctttctatcactgggtagtttgagagctcattagtcttctttagaatgggtttaaacttggaaacatcaaagcaagttacaaggaaacttagttttacagtgttggcagcctaggcgccagaatttgttataaagtgtctgaaagtggcacaggtatcacttaacttttcttcaagaaggtctatgagttacattttactcggtatcccaggcatcaaggagtgtaactttcaatgaatcaaagagaaacagaatcattttaaattccagcctctgtttaaagaaggatcttatgaaggggagaaattaaccacctgacccagggaaggatcccgcctcctccagaaagtgaaatcgccgggtgtggtggctcacgcctgtaatcccagcactttgggaggtcgaggtaggtggatcacgtgaggtcaggacttcaagaccagcctggcgaacatggtgaaaccccatctctactaaaatgcaaaaaattagccgggcacggtggtgcacccctgtaatcccagctactggggaggctgaggcaggataatcactcaaacctggaaggtggaggttgcagtcagctgagatcacgccactgcactccagcctggacgacagagtaaggctccgtctcaaaaaaaaaaaaaaaagaaaaagaaaaggagttaaatctttgcatatatttaactggcaagagcatccttacatcagtgcatgggaagttttatccaagtagcagtttccctgggattataaaaatccccgaggcatttgtcttggtgttgtgcctttttttggttgtgttttttcacgtccctcccctcccctttctccataaacaagagaggcattaacttggaatgtccgtggaaagtcttagaagctgattggtgtaatttgcctgccttccctttagtttgaacagcgtttactctggaagaggtcagtggcctttttcttggttgtgatttatgcaagtgttatctgaaggcga

SEQ ID NO: 22664 - DNA, 104 bp, Homo sapiens
acagggccagatagtaaatatttcaatctttgctggccacacggtctctgttgtaattactcagctctgtgagtgcatgtggaagcagccataggcaatacaca

SEQ ID NO: 22665 - DNA, 400 bp, Homo sapiens
aattttgaataccagatagtacgagtacttttgtttcaaccttctgggaaagaatttttccactaaagccaatacaggaggaacctaaagaatgcttttagagtaccatagtgggtccgggtgcagtggctcacacctgtaatccctgcgctttgggaggacaaggcaggtagatcacctgaggtcaggagtttgagactagcctggccaacatgatgaaaccccgtctctactaaaaatacaaaaagaattagccaggcgtggtggggggtgcctgtaatcccacctactcaggaggctgaggcaggagaatcgcttgaacccaggaggtggaggttgcagtgtgccgagatcgcgacactgcactccagcctgggcaacggagtgaaattctgtctca

SEQ ID NO: 22666 - DNA, 464 bp, Homo sapiens
tgggcaaatgactgaaactccttgatgcttattttctttatcttaaaaacataaaaaataaatgaggataagatgatggatgacccatccatagggttgttttaacgctgggatgcagtgatgtgtgtgcaagctcctggcacagcaacttaataccagtctcctctgtcctgtcttgcatctgctgaggatgaagaaggagagcagttgagtgtggccctgcctggctgggggcccttcctctatagttatcttctttataagccatttatagtcttggtataattttaaggaaaaaaaatcaaggcgctactttgcatttaaaattcatttttgaaacatactggcagcaaacgccacactattgcagttagggaagacaggagagcaaatgtcaggtcttggcaaagtggggtggggaattttttgagtgtgacatttgaataaagaaatctaaactagga

SEQ ID NO: 22667 - DNA, 426 bp, Homo sapiens
ttgtgggcaacccagggacaaaataaagtacagtactcatacttactttgttaatcatttctttcttcattctctccacatatacaaccttttttctgacttattaaaatctctagcttctctgttattaaaattgcaggcagtcagcacacttatgaagtattcaatgtgcacaaaaccagtagttccaaacctcgactttagctaaacaaaagaactggggttatttttaaaagactcctgacaatgaccctcactctcctcccattactgtgagccccgtgagaacaaagagtcagtatcatgcatttctcagcatctagccctgcgcttggcattttggctaacacatatctgtggagtgaattaagatgatggcaaatacagttacttaaaggaaggtgagtcaatcaggaggatgtaggt

SEQ ID NO: 22668 - DNA, 716 bp, Homo sapiens
ttcttcatccaaatgtctcctgcctttcaaaactgtggcctcgagggatctgttccagtagatatctatgaacttggcagtggagacagtcaaagatcaagtcattcttctgaaaaggctattccatccagagtcacaggaaatgggagaggacagaatttgccagagaatctaaacagtacagcacctcccgaggggcaaacacggtggagggccattcagatatacacgaagccatcttgacgtggttgtttaaagagataatcgcaagccacatgacccaatgttaaaacagtttctaaaggcacttggccagagagctaggaagccatcctatgacaattaaattagtgaacagataaggctgtttattcttctcatgggcaagagaaaaaaaagggggggcacgttgtaattcagggcacagtcaacacaggactcatcttcaaggtgttcaggataaagtttggaaagctctcaaatactccaggctagataaagtttggaaagctctcaaatactccaggctggataaagtttgaaaagctttcaaatactccaggctggaagagagagtaggaacagcagctgctgtcttctctgggaaaatcagatccctaaggagaagcctggagcaacaggaagcttccagggcctgtgagacaggaagaggggaggccgctccagctgcctggatgaggggaacagtgagctcc

SEQ ID NO: 22669 - DNA, 447 bp, Homo sapiens
gaatcttctcacctttcattagactctaagttccttggagagtcagtactcacggggagtacttttaggatcaacacttgtggacgggagaagatggaagcaggactgggtagaagaagaagctgggctgcaatgaagtcccattgaagacctcagctgaccttgcatggagcctgcatcccatccaggatacctgttacatttacttgtcatatctcctcaagcttctcttggctatgacagttttttagactttccttgattttgatgaccttgacagttttgaggagttctgggcccgatgttgcagaatgcctccttattgaaatttgtctgatgttttcctcatgattagattggggttgtgagttttggggggaaggtaatagaggaaaagtgtcatcttcatcacatcatattaaaggtacatattagtgacatgattta

SEQ ID NO: 22670 - DNA, 507 bp, Homo sapiens
agaaagatcctaagacaaggtaccgcttttcgaagtgtcatagttttcacagtacaatggcctcttagctgggatgtgaaggatacacaggaattcatgaagtcttctttagtaaagaaagcttaggctgggcacagtggctcattcctgtaatcccagctctctgggaggccaaggcaggaggatcgcttgaagccaggagttcaagaccagcttggacaacatagcaagaccccatctctataaaaaaaataagctggtgcttactgccagtcccatggtgggtctcaacctgggagggatggaggacatggtttctggtcctgctcacaacacccaaatacatggctcttagtgaccctgttagctccccacataacctcgagttggttttaggagcgaaaactaaatttggggcatggagtttggacacaagtgtgtcaggggcattttgggaaaactcattgtattaaaatccaaatttacaaaccagatccatttcggggg

SEQ ID NO: 22671 - DNA, 902 bp, Homo sapiens
  misc_feature (3)..(3): n is a, c, g, or t
  misc_feature (22)..(22): n is a, c, g, or t
  misc_feature (24)..(24): n is a, c, g, or t
tangctagtacgaggctgggtntnaatcggccgagcctggcacagcgaagtcgcagtttctcaagtatattgagaaagtgtccagccgagccatcttcaccactggccagggggcgtcggctgtgggcctcacggcgtatgtccagcggcaccctgtcagcagggagtggaccttggaggctggggccctggttctggctgaccgaggagtgtgtctcattgatgaatttgacaagatgaatgaccaggacagaaccagcatccatgaggccatggagcaacagagcatctccatctcgaaggctggcatcgtcacctccctgcaggctcgctgcacggtcattgctgccgccaaccccataggagggcgctacgacccctcgctgactttctctgagaacgtggacctcacagagcccatcatctcacgctttgacatcctgtgtgtggtgagggacaccgtggacccagtccaggacgagatgctggcccgcttcgtggtgggcagccacgtcagacaccaccccagcaacaaggaggaggaggggctggccaatggcagcgctgctgagcccgccatgcccaacacgtatggcgtggagcccctgccccaggaggtcctgaagaagtacatcatctacgccaaggagagggtccacccgaagctcaaccagatggaccaggacaaggtggccaagatgtacagtgacctgaggaaagaatctatggcgacaggcagcatccccattacggtgcggcacatcgagtccatgatccgcatggcggagggcccacgcgcgcatccatctgcgggactatgtgatcgaagacgacgtcaacatggccatccgcgtgatgctgggagagcttcatagacacacagaagttcagcgtcatgcgca

SEQ ID NO: 22672 - DNA, 2187 bp, Homo sapiens
  misc_feature (3)..(3): n is a, c, g, or t
  misc_feature (22)..(22): n is a, c, g, or t
  misc_feature (24)..(24): n is a, c, g, or t
tangctagtacgaggctgggtntnaatcggccgagtctggatgatgaggacgtagaggagctgacggccagtcagagggaggcagcagagcgggccatgcggcagcgtgaccgggaggctggccggggcctgggccgcatgcgccgtgggctcctgtatgacagcgatgaggaggacgaggagcgccctgcccgcaagcgccgccaggtggagcgggccacggaggacggcgaggaggacgaggagatgattgagagcatcgagaacctggaggatctcaaaggccactctgtgcgcgagtgggtgagcatggcgggcccccggctggagatccaccaccgcttcaagaacttcctgcgcactcacgtcgacagccacggccacaacgtcttcaaggagcgcatcagcgacatgtgcaaagagaaccgtgagagcctggtggtgaactatgaggacttggcagccagggagcacgtgctggcctacttcctgcctgaggcaccggcggagctgctgcagatctttgatgaggctgccctggaggtggtactggccatgtaccccaagtacgaccgcatcaccaaccacatccatgtccgcatctcccacctgcctctggtggaggagctgcgctcgctgaggcagctgcatctgaaccagctgatccgcaccagtggggtggtgaccagctgcactggcgtcctgccccagctcagcatggtcaagtacaactgcaacaagtgcaatttcgtcctgggtcctttctgccagtcccagaaccaggaggtgaaaccaggctcctgtcctgagtgccagtcggccggcccctttgaggtcaacatggaggagaccatctatcagaactaccagcgtatccgaatccaggagagtccaggcaaagtggcggctggccggctgccccgctccaaggacgccattctcctcgcagatctggtggacagctgcaagccaggagacgagatagagctgactggcatctatcacaacaactatgatggctccctcaacactgccaatggcttccctgtctttgccactgtcatcctagccaaccacgtggccaagaaggacaacaaggttgctgtaggggaactgaccgatgaagatgtgaagatgatcactagcctctccaaggatcagcagatcggagagaagatctttgccagcattgctccttccatctatggtcatgaagacatcaagagaggcctggctctggccctgttcggaggggagcccaaaaacccaggtggcaagcacaaggtacgtggtgatatcaacgtgctcttgtgcggagaccctggcacagcgaagtcgcagtttctcaagtatattgagaaagtgtccagccgagccatcttcaccactggccagggggcgtcggctgtgggcctcacggcgtatgtccagcggcaccctgtcagcagggagtggaccttggaggctggggccctggttctggctgaccgaggagtgtgtctcattgatgaatttgacaagatgaatgaccaggacagaaccagcatccatgaggccatggagcaacagagcatctccatctcgaaggctggcatcgtcacctccctgcaggctcgctgcacggtcattgctgccgccaaccccataggagggcgctacgacccctcgctgactttctctgagaacgtggacctcacagagcccatcatctcacgctttgacatcctgtgtgtggtgagggacaccgtggacccagtccaggacgagatgctggcccgcttcgtggtgggcagccacgtcagacaccaccccagcaacaaggaggaggaggggctggccaatggcagcgctgctgagcccgccatgcccaacacgtatggcgtggagcccctgccccaggaggtcctgaagaagtacatcatctacgccaaggagagggtccacccgaagctcaaccagatggaccaggacaaggtggccaagatgtacagtgacctgaggaaagaatctatggcgacaggcagcatccccattacggtgcggcacatcgagtccatgatccgcatggcggagggcccacgcgcgcatccatctgcgggactatgtgatcgaagacgacgtcaacatggccatccgcgtgatgctgggagagcttcatagacacacagaagttcagcgtcatgcgca

SEQ ID NO: 22673 - DNA, 1820 bp, Homo sapiens
gtatctaagatccgcagttagggctacccaagagcgcatcagcgaatgtgcaagagaaccgtgagagcctggtggtgaactatgaggacttggcagccagggagcacgtgctggcctacttcctgcctgaggcaccggcggagctgctgcagatctttgatgaggctgccctggaggtggtactggccatgtaccccaagtacgaccgcatcaccaaccacatccatgtccgcatctcccacctgcctctggtggaggagctgcgctcgctgaggcagctgcatctgaaccagctgatccgcaccagtggggtggtgaccagctgcactggcgtcctgccccagctcagcatggtcaagtacaactgcaacaagtgcaatttcgtcctgggtcctttctgccagtcccagaaccaggaggtgaaaccaggctcctgtcctgagtgccagtcggccggcccctttgaggtcaacatggaggagaccatctatcagaactaccagcgtatccgaatccaggagagtccaggcaaagtggcggctggccggctgccccgctccaaggacgccattctcctcgcagatctggtggacagctgcaagccaggagacgagatagagctgactggcatctatcacaacaactatgatggctccctcaacactgccaatggcttccctgtctttgccactgtcatcctagccaaccacgtggccaagaaggacaacaaggttgctgtaggggaactgaccgatgaagatgtgaagatgatcactagcctctccaaggatcagcagatcggagagaagatctttgccagcattgctccttccatctatggtcatgaagacatcaagagaggcctggctctggccctgttcggaggggagcccaaaaacccaggtggcaagcacaaggtacgtggtgatatcaacgtgctcttgtgcggagaccctggcacagcgaagtcgcagtttctcaagtatattgagaaagtgtccagccgagccatcttcaccactggccagggggcgtcggctgtgggcctcacggcgtatgtccagcggcaccctgtcagcagggagtggaccttggaggctggggccctggttctggctgaccgaggagtgtgtctcattgatgaatttgacaagatgaatgaccaggacagaaccagcatccatgaggccatggagcaacagagcatctccatctcgaaggctggcatcgtcacctccctgcaggctcgctgcacggtcattgctgccgccaaccccataggagggcgctacgacccctcgctgactttctctgagaacgtggacctcacagagcccatcatctcacgctttgacatcctgtgtgtggtgagggacaccgtggacccagtccaggacgagatgctggcccgcttcgtggtgggcagccacgtcagacaccaccccagcaacaaggaggaggaggggctggccaatggcagcgctgctgagcccgccatgcccaacacgtatggcgtggagcccctgccccaggaggtcctgaagaagtacatcatctacgccaaggagagggtccacccgaagctcaaccagatggaccaggacaaggtggccaagatgtacagtgacctgaggaaagaatctatggcgacaggcagcatccccattacggtgcggcacatcgagtccatgatccgcatggcggagggcccacgcgcgcatccatctgcgggactatgtgatcgaagacgacgtcaacatggccatccgcgtgatgctgggagagcttcatagacacacagaagttcagcgtcatgcgca

SEQ ID NO: 22674 - DNA, 1191 bp, Homo sapiens
tacggctaggtacgaggctgggtgtgtgctcacactgccaatggcttccctgtctttgccactgtcatcctagccaaccacgtggccaagaaggacaacaaggttgctgtaggggaactgaccgatgaagatgtgaagatgatcactagcctctccaaggatcagcagatcggagagaagatctttgccagcattgctccttccatctatggtcatgaagacatcaagagaggcctggctctggccctgttcggaggggagcccaaaaacccaggtggcaagcacaaggtacgtggtgatatcaacgtgctcttgtgcggagaccctggcacagcgaagtcgcagtttctcaagtatattgagaaagtgtccagccgagccatcttcaccactggccagggggcgtcggctgtgggcctcacggcgtatgtccagcggcaccctgtcagcagggagtggaccttggaggctggggccctggttctggctgaccgaggagtgtgtctcattgatgaatttgacaagatgaatgaccaggacagaaccagcatccatgaggccatggagcaacagagcatctccatctcgaaggctggcatcgtcacctccctgcaggctcgctgcacggtcattgctgccgccaaccccataggagggcgctacgacccctcgctgactttctctgagaacgtggacctcacagagcccatcatctcacgctttgacatcctgtgtgtggtgagggacaccgtggacccagtccaggacgagatgctggcccgcttcgtggtgggcagccacgtcagacaccaccccagcaacaaggaggaggaggggctggccaatggcagcgctgctgagcccgccatgcccaacacgtatggcgtggagcccctgccccaggaggtcctgaagaagtacatcatctacgccaaggagagggtccacccgaagctcaaccagatggaccaggacaaggtggccaagatgtacagtgacctgaggaaagaatctatggcgacaggcagcatccccattacggtgcggcacatcgagtccatgatccgcatggcggagggcccacgcgcgcatccatctgcgggactatgtgatcgaagacgacgtcaacatggccatccgcgtgatgctgggagagcttcatagacacacagaagttcagcgtcatgcgca

SEQ ID NO: 22675 - DNA, 1299 bp, Homo sapiens
ctcttggtctgtgatcttgggaaaggcctttctgaaatatgtcaagattaggggttcagatgaaggttcttctaaactccaaagttctgtgactcttgggaagagccaactaatgaaaagctttagagtcgggcacggcttgataccagggcctgatgcagttgcagcagctgtggaagtgggtgtctttgagctggggatgtcgtggttccctgatgccagagcatgtgggtgacctactctgtgagtatctgttcccattcttgtcggtctccctccctttctcagatctttgccagcattgctccttccatctatggtcatgaagacatcaagagaggcctggctctggccctgttcggaggggagcccaaaaacccaggtggcaagcacaaggtacgtggtgatatcaacgtgctcttgtgcggagaccctggcacagcgaagtcgcagtttctcaagtatattgagaaagtgtccagccgagccatcttcaccactggccagggggcgtcggctgtgggcctcacggcgtatgtccagcggcaccctgtcagcagggagtggaccttggaggctggggccctggttctggctgaccgaggagtgtgtctcattgatgaatttgacaagatgaatgaccaggacagaaccagcatccatgaggccatggagcaacagagcatctccatctcgaaggctggcatcgtcacctccctgcaggctcgctgcacggtcattgctgccgccaaccccataggagggcgctacgacccctcgctgactttctctgagaacgtggacctcacagagcccatcatctcacgctttgacatcctgtgtgtggtgagggacaccgtggacccagtccaggacgagatgctggcccgcttcgtggtgggcagccacgtcagacaccaccccagcaacaaggaggaggaggggctggccaatggcagcgctgctgagcccgccatgcccaacacgtatggcgtggagcccctgccccaggaggtcctgaagaagtacatcatctacgccaaggagagggtccacccgaagctcaaccagatggaccaggacaaggtggccaagatgtacagtgacctgaggaaagaatctatggcgacaggcagcatccccattacggtgcggcacatcgagtccatgatccgcatggcggagggcccacgcgcgcatccatctgcgggactatgtgatcgaagacgacgtcaacatggccatccgcgtgatgctgggagagcttcatagacacacagaagttcagcgtcatgcgca

SEQ ID NO: 22676 - DNA, 2563 bp, Homo sapiens
tggacgccgacgtcatgacgtcgcgttccgtagggctcttcccgggctttggtgggtcacgtgaaccacttttcgcgcgaaacctggttgttgctgtagtggcggagaggatcgtggtactgctatggcggaatcatcggaatccttcaccatggcatccagcccggcccagcgtcggcgaggcaatgatcctctcacctccagccctggccgaagctcccggcgtactgatgccctcacctccagccctggccgtgaccttccaccatttgaggatgagtccgaggggctcctaggcacagaggggcccctggaggaagaagaggatggagaggagctcattggagatggcatggaaagggactaccgcgccatcccagagctggacgcctatgaggccgagggactggctctggatgatgaggacgtagaggagctgacggccagtcagagggaggcagcagagcgggccatgcggcagcgtgaccgggaggctggccggggcctgggccgcatgcgccgtgggctcctgtatgacagcgatgaggaggacgaggagcgccctgcccgcaagcgccgccaggtggagcgggccacggaggacggcgaggaggacgaggagatgattgagagcatcgagaacctggaggatctcaaaggccactctgtgcgcgagtgggtgagcatggcgggcccccggctggagatccaccaccgcttcaagaacttcctgcgcactcacgtcgacagccacggccacaacgtcttcaaggagcgcatcagcgacatgtgcaaagagaaccgtgagagcctggtggtgaactatgaggacttggcagccagggagcacgtgctggcctacttcctgcctgaggcaccggcggagctgctgcagatctttgatgaggctgccctggaggtggtactggccatgtaccccaagtacgaccgcatcaccaaccacatccatgtccgcatctcccacctgcctctggtggaggagctgcgctcgctgaggcagctgcatctgaaccagctgatccgcaccagtggggtggtgaccagctgcactggcgtcctgccccagctcagcatggtcaagtacaactgcaacaagtgcaatttcgtcctgggtcctttctgccagtcccagaaccaggaggtgaaaccaggctcctgtcctgagtgccagtcggccggcccctttgaggtcaacatggaggagaccatctatcagaactaccagcgtatccgaatccaggagagtccaggcaaagtggcggctggccggctgccccgctccaaggacgccattctcctcgcagatctggtggacagctgcaagccaggagacgagatagagctgactggcatctatcacaacaactatgatggctccctcaacactgccaatggcttccctgtctttgccactgtcatcctagccaaccacgtggccaagaaggacaacaaggttgctgtaggggaactgaccgatgaagatgtgaagatgatcactagcctctccaaggatcagcagatcggagagaagatctttgccagcattgctccttccatctatggtcatgaagacatcaagagaggcctggctctggccctgttcggaggggagcccaaaaacccaggtggcaagcacaaggtacgtggtgatatcaacgtgctcttgtgcggagaccctggcacagcgaagtcgcagtttctcaagtatattgagaaagtgtccagccgagccatcttcaccactggccagggggcgtcggctgtgggcctcacggcgtatgtccagcggcaccctgtcagcagggagtggaccttggaggctggggccctggttctggctgaccgaggagtgtgtctcattgatgaatttgacaagatgaatgaccaggacagaaccagcatccatgaggccatggagcaacagagcatctccatctcgaaggctggcatcgtcacctccctgcaggctcgctgcacggtcattgctgccgccaaccccataggagggcgctacgacccctcgctgactttctctgagaacgtggacctcacagagcccatcatctcacgctttgacatcctgtgtgtggtgagggacaccgtggacccagtccaggacgagatgctggcccgcttcgtggtgggcagccacgtcagacaccaccccagcaacaaggaggaggaggggctggccaatggcagcgctgctgagcccgccatgcccaacacgtatggcgtggagcccctgccccaggaggtcctgaagaagtacatcatctacgccaaggagagggtccacccgaagctcaaccagatggaccaggacaaggtggccaagatgtacagtgacctgaggaaagaatctatggcgacaggcagcatccccattacggtgcggcacatcgagtccatgatccgcatggcggagggcccacgcgcgcatccatctgcgggactatgtgatcgaagacgacgtcaacatggccatccgcgtgatgctgggagagcttcatagacacacagaagttcagcgtcatgcgca

SEQ ID NO: 22677 - DNA, 2498 bp, Homo sapiens
tggacgccgacgtcatgacgtcgcgttccgtagggctcttcccgggctttggtgggtcacgtgaaccacttttcgcgcgaaacctggttgttgctgtagtggcggagaggatcgtggtactgctatggcggaatcatcggaatccttcaccatggcatccagcccggcccagcgtcggcgaggcaatgatcctctcacctccagccctggccgaagctcccggcgtactgatgccctcacctccagccctggccgtgaccttccaccatttgaggatgagtccgaggggctcctaggcacagaggggcccctggaggaagaagaggatggagaggagctcattggagatggcatggaaagggactaccgcgccatcccagagctggacgcctatgaggccgagggactggctctggatgatgaggacgtagaggagctgacggccagtcagagggaggcagcagagcgggccatgcggcagcgtgaccgggaggctggccggggcctgggccgcatgcgccgtgggctcctgtatgacagcgatgaggaggacgaggagcgccctgcccgcaagcgccgccaggtggagcgggccacggaggacggcgaggaggacgaggagatgattgagagcatcgagaacctggaggatctcaaaggccactctgtgcgcgagtgggtgagcatggcgggcccccggctggagatccaccaccgcttcaagaacttcctgcgcactcacgtcgacagccacggccacaacgtcttcaaggagcgcatcagcgacatgtgcaaagagaaccgtgagagcctggtggtgaactatgaggacttggcagccagggagcacgtgctggcctacttcctgcctgaggcaccggcggagctgctgcagatctttgatgaggctgccctggaggtggtactggccatgtaccccaagtacgaccgcatcaccaaccacatccatgtccgcatctcccacctgcctctggtggaggagctgcgctcgctgaggcagctgcatctgaaccagctgatccgcaccagtggggtggtgaccagctgcactggcgtcctgccccagctcagcatggtcaagtacaactgcaacaagtgcaatttcgtcctgggtcctttctgccagtcccagaaccaggaggtgaaaccaggctcctgtcctgagtgccagtcggccggcccctttgaggtcaacatggaggagaccatctatcagaactaccagcgtatccgaatccaggagagtccaggcaaagtggcggctggccggctgccccgctccaaggacgccattctcctcgcagatctggtggacagctgcaagccaggagacgagatagagctgactggcatctatcacaacaactatgatggctccctcaacactgccaatggcttccctgtctttgccactgtcatcctagccaaccacgtggccaagaaggacaacaaggttgctgtaggggaactgaccgatgaagatgtgaagatgatcactagcctctccaaggatcagcagatcggagagaagatctttgccagcattgctccttccatctatggtcatgaagacatcaagagaggcctggctctggccctgttcggaggggagcccaaaaacccaggtggcaagcacaaggtacgtggtgatatcaacgtgctcttgtgcggagaccctggcacagcgaagtcgcagtttctcaagtatattgagaaagtgtccagccgagccatcttcaccactggccagggggcgtcggctgtgggcctcacggcgtatgtccagcggcaccctgtcagcagggagtggaccttggaggctggggccctggttctggctgaccgaggagtgtgtctcattgatgaatttgacaagatgaatgaccaggacagaaccagcatccatgaggccatggagcaacagagcatctccatctcgaaggctggcatcgtcacctccctgcaggctcgctgcacggtcattgctgccgccaaccccataggagggcgctacgacccctcgctgactttctctgagaacgtggacctcacagagcccatcatctcacgctttgacatcctgtgtgtggtgagggacaccgtggacccagtccaggtatagctcacatgtgcccggtttccatgaactgtggtttggggacctcaggtgaggcttggggtcatacagtgtgcccaacacaggggacaggtgctgcaggggccataggctgttttctagtcctgttccctcggtctcttctcatgtccagaagtcgccctgatttctctttccttcacagcacccccgacccccaccctacataacccacaatccaccaaatcctgttgtcccaactcctgagcctacccacctccctcacttctgcctctgacttgaggcactaccatcatctgaactggcctcctggcacccatgtagactgtcttccagttgaaggcataaatcagatcagccc

SEQ ID NO: 22678 - DNA, 1106 bp, Homo sapiens
ccaaattaggctaggtagaggcctggtgtgaatcggccgatgaagatgtgaagatgatcactagcctctccaaggatcagcagatcggagagaagatctttgccagcattgctccttccatctatggtcatgaagacatcaagagaggcctggctctggccctgttcggaggggagcccaaaaacccaggtggcaagcacaaggtacgtggtgatatcaacgtgctcttgtgcggagaccctggcacagcgaagtcgcagtttctcaagtatattgagaaagtgtccagccgagccatcttcaccactggccagggggcgtcggctgtgggcctcacggcgtatgtccagcggcaccctgtcagcagggagtggaccttggaggctggggccctggttctggctgaccgaggagtgtgtctcattgatgaatttgacaagatgaatgaccaggacagaaccagcatccatgaggccatggagcaacagagcatctccatctcgaaggctggcatcgtcacctccctgcaggctcgctgcacggtcattgctgccgccaaccccataggagggcgctacgacccctcgctgactttctctgagaacgtggacctcacagagcccatcatctcacgctttgacatcctgtgtgtggtgagggacaccgtggacccagtccaggacgagatgctggcccgcttcgtggtgggcagccacgtcagacaccaccccagcaacaaggaggaggaggggctggccaatggcagcgctgctgagcccgccatgcccaacacgtatggcgtggagcccctgccccaggaggtcctgaagaagtacatcatctacgccaaggagagggtccacccgaagctcaaccagatggaccaggacaaggtggccaagatgtacagtgacctgaggaaagaatctatggcgacaggcagcatccccattacggtgcggcacatcgagtccatgatccgcatggcggagggcccacgcgcgcatccatctgcgggactatgtgatcgaagacgacgtcaacatggccatccgcgtgatgctgggagagcttcatagacacacagaagttcagcgtcatgcgca

SEQ ID NO: 22679 - DNA, 872 bp, Homo sapiens
ggtgggactcccccacctactatacccccagatgaaactttggggggagagtgcccagaccagccttgtccactagtgacaaggaggaggcatctgatgtggagatctccttggaaagtgactctgatgacagcgtggtgatcgtgcccgaggggcttcccggtgggactgaccgaggagtgtctcgcattgatgaatttgacaagatgaatgaccaggacagaaccagcatccatgaggccatggagcaacagagcatctccatctcgaaggctggcatcgtcacctccctgcaggctcgctgcacggtcattgctgccgccaaccccataggagggcgctacgacccctcgctgactttctctgagaacgtggacctcacagagcccatcatctcacgctttgacatcctgtgtgtggtgagggacaccgtggacccagtccaggacgagatgctggcccgcttcgtggtgggcagccacgtcagacaccaccccagcaacaaggaggaggaggggctggccaatggcagcgctgctgagcccgccatgcccaacacgtatggcgtggagcccctgccccaggaggtcctgaagaagtacatcatctacgccaaggagagggtccacccgaagctcaaccagatggaccaggacaaggtggccaagatgtacagtgacctgaggaaagaatctatggcgacaggcagcatccccattacggtgcggcacatcgagtccatgatccgcatggcggagggcccacgcgcgcatccatctgcgggactatgtgatcgaagacgacgtcaacatggccatccgcgtgatgctgggagagcttcatagacacacagaagttcagcgtcatgcgca

SEQ ID NO: 22680 - DNA, 285 bp, Homo sapiens
cagcctgtctaagcagaggaaaacggagcaggcagagccggcctgatctcggaataaaggctgcatgcgacaaacactgagggaccctaaaagtctcgaccatagggcctcttctggccatctccgtggtcgtgtcccgctggaggaggaggcgattagagactgtgaggtgaagatgcgggacccaaaccacatttcaccagactgtatcctcacccccatctgaccttactgctgctcacactctccgtcccagaatgaaatccccagaagatggaagagtgc

SEQ ID NO: 22681 - DNA, 346 bp, Homo sapiens
aagaatattgaatcattctgtggttgcaataaaatttaaatcttttaagattcacattttatatttgaatagtgcttttggaaatcaccaattttactggatatttggaataggaagggtagccaatttaatttattgggcaacatttaggttattagctgtatatgaaattttcaatgtgtacatatcttagatgatgagctttttaagacacctaacagaattaagaaacagcccattctcattgtgaatttgacaccaattctactttggtggtattagttggtattctgaaattatcataccgaattacctacctctaattcattaccctaccagtggtaga

SEQ ID NO: 22682 - DNA, 276 bp, Homo sapiens
gttattgtgattaattgtatatagtgccctctattataataataagaaaaatagtttctcaaattggttcagtatacatttttggctaatttatattcatatttcttctattgcagctattgctttttctttatagttggatagatttttttaacatgtaaatatttaatacctttgattttacttttatttacctcaaagaactgagactggagtaaaaagacaagaggttacagatagaatacttttattagacagtcaaactaggttaggagg

SEQ ID NO: 22683 - DNA, 968 bp, Homo sapiens
ggaattgggaagaaggataaatacatacatggaggagcaatagaagtctaccttatggagcatgtggaaatatcaggtggcttcttcatatgatttttaagtatctcgatgatgatgaagaacaaagacatcaatcaggattcaggaagacagcttttgcggaaaatgcttaaagggaagcatcaaggattggtgttgatatttgaaagtttaagagtggtatacttttattcagtcaacacatgacaaatgtaaaaggcactcatttgttgttcctggaagaagcctggcagcattccattcagacatctgccctttcatcgtcccactttttacttattgcagtcctttcagtctgaatatttcctcctgacgcatcttctgccgtccgaaatgactccctgctcccagatcctgtagcccttattattgacacctttcatttagaaatttagcacatgtcacattacaccattattgaataaataatgaataaataaataaataaagatgtatgtccttcccaagtatatcagagaactatctggacaatttctttctttcccaattctcagaatcagcagtattctgtcaagaaacatttatcgacgatgatggcaatagtcgattaaaatcagatgaagttttatttttaaaaaaaggttgagcggagagacaaggctgaaggtttggaagttgagacaaccatcttcaataaacgttttctcatctaagggctgtatgtacatcattttggggaaggtagagattgaaggaggaagaacatcactggaggaagagacagcagtttgtctttcgagtttcaataaagtttcaaaaatcttgcctaagttatatatttttttggcctttcccttttgatgtgacaataaactgtaatgcggctgtcgtttgtacgaaccgatattcagcagaataaatctgagcactttcagaaaaagaagcgt

SEQ ID NO: 22684 - DNA, 1029 bp, Homo sapiens
atagctgccgctaatggagttggactcatgagtgagggagaaagtgcctgtgaatgacatcattatgcgacatcataggacagttttttttttcttttattcactcgtctttcttttatttcaactgatgatatcaggtggcttcttcatatgatttttaagtatctcgatgatgatgaagaacaaagacatcaatcaggattcaggaagacagcttttgcggaaaatgcttaaagggaagcatcaaggattggtgttgatatttgaaagtttaagagtggtatacttttattcagtcaacacatgacaaatgtaaaaggcactcatttgttgttcctggaagaagcctggcagcattccattcagacatctgccctttcatcgtcccactttttacttattgcagtcctttcagtctgaatatttcctcctgacgcatcttctgccgtccgaaatgactccctgctcccagatcctgtagcccttattattgacacctttcatttagaaatttagcacatgtcacattacaccattattgaataaataatgaataaataaataaataaagatgtatgtccttcccaagtatatcagagaactatctggacaatttctttctttcccaattctcagaatcagcagtattctgtcaagaaacatttatcgacgatgatggcaatagtcgattaaaatcagatgaagttttatttttaaaaaaaggttgagcggagagacaaggctgaaggtttggaagttgagacaaccatcttcaataaacgttttctcatctaagggctgtatgtacatcattttggggaaggtagagattgaaggaggaagaacatcactggaggaagagacagcagtttgtctttcgagtttcaataaagtttcaaaaatcttgcctaagttatatatttttttggcctttcccttttgatgtgacaataaactgtaatgcggctgtcgtttgtacgaaccgatattcagcagaataaatctgagcactttcagaaaaagaagcgt

SEQ ID NO: 22685 - DNA, 956 bp, Homo sapiens
  misc_feature (56)..(56): n is a, c, g, or t
gttttatagtgtattaacacttaccacgtaacttacaagttaagaagctgatatanaatatcaggtggcttcttcatatgatttttaagtatctcgatgatgatgaagaacaaagacatcaatcaggattcaggaagacagcttttgcggaaaatgcttaaagggaagcatcaaggattggtgttgatatttgaaagtttaagagtggtatacttttattcagtcaacacatgacaaatgtaaaaggcactcatttgttgttcctggaagaagcctggcagcattccattcagacatctgccctttcatcgtcccactttttacttattgcagtcctttcagtctgaatatttcctcctgacgcatcttctgccgtccgaaatgactccctgctcccagatcctgtagcccttattattgacacctttcatttagaaatttagcacatgtcacattacaccattattgaataaataatgaataaataaataaataaagatgtatgtccttcccaagtatatcagagaactatctggacaatttctttctttcccaattctcagaatcagcagtattctgtcaagaaacatttatcgacgatgatggcaatagtcgattaaaatcagatgaagttttatttttaaaaaaaggttgagcggagagacaaggctgaaggtttggaagttgagacaaccatcttcaataaacgttttctcatctaagggctgtatgtacatcattttggggaaggtagagattgaaggaggaagaacatcactggaggaagagacagcagtttgtctttcgagtttcaataaagtttcaaaaatcttgcctaagttatatatttttttggcctttcccttttgatgtgacaataaactgtaatgcggctgtcgtttgtacgaaccgatattcagcagaataaatctgagcactttcagaaaaagaagcgt

SEQ ID NO: 22686 - DNA, 590 bp, Homo sapiens
atagctgccgctaatggagttggactcatgagtgagggagaaagtgcctgtgaatgacatcattatgcgacatcataggacagttttttttttcttttattcactcgtctttcttttatttcaactgatgatatcaggtggcttcttcatatgatttttaagtatctcgatgatgatgaagaacaaagacatcaatcaggattcaggaagacagcttttgcggaaaatgcttaaagggaagcatcaaggattggtgttgatatttgaaagtttaagagtggtatacttttattcagtcaacacatgacaaatgtaaaaggcactcatttgttgttcctggaagaagcctggcagcattccattcagacatctgccctttcatcgtcccactttttacttattgcagtcctttcagtctgaatatttcctcctgacgcatcttctgccgtccgaaatgactccctgctcccagatcctgtagcccttattattgacacctttcatttagaaatttagcacatgtcacattacaccattattgaataaataatgaataaataaataaataaagatgtatgtccttcccaagt

SEQ ID NO: 22687 - DNA, 1052 bp, Homo sapiens
tattccgtgatattgaataagtctcacaagatctggtgggtttatcaggggtttctgcttttgcttcttcctcagtttctcttgctgccgccgtgtaagaaggaccttttgcctcccaccatgattctaaggcctccccagccacgtggaactatatcaggtggcttcttcatatgatttttaagtatctcgatgatgatgaagaacaaagacatcaatcaggattcaggaagacagcttttgcggaaaatgcttaaagggaagcatcaaggattggtgttgatatttgaaagtttaagagtggtatacttttattcagtcaacacatgacaaatgtaaaaggcactcatttgttgttcctggaagaagcctggcagcattccattcagacatctgccctttcatcgtcccactttttacttattgcagtcctttcagtctgaatatttcctcctgacgcatcttctgccgtccgaaatgactccctgctcccagatcctgtagcccttattattgacacctttcatttagaaatttagcacatgtcacattacaccattattgaataaataatgaataaataaataaataaagatgtatgtccttcccaagtatatcagagaactatctggacaatttctttctttcccaattctcagaatcagcagtattctgtcaagaaacatttatcgacgatgatggcaatagtcgattaaaatcagatgaagttttatttttaaaaaaaggttgagcggagagacaaggctgaaggtttggaagttgagacaaccatcttcaataaacgttttctcatctaagggctgtatgtacatcattttggggaaggtagagattgaaggaggaagaacatcactggaggaagagacagcagtttgtctttcgagtttcaataaagtttcaaaaatcttgcctaagttatatatttttttggcctttcccttttgatgtgacaataaactgtaatgcggctgtcgtttgtacgaaccgatattcagcagaataaatctgagcactttcagaaaaagaagcgt

SEQ ID NO: 22688 - DNA, 486 bp, Homo sapiens
gcaccgtgtctggaacaagatagatgttcagcaaacacttcgggagtggatatgcttgtaacatggaaataagaaccgtttctaactcacagtcttatgcagattcatctggctgaatgtgagctgctggtgactccagggagtctggctgggttcaaagaagttgggaaatggaagaaagaggaacaggtggggctgaaagctttattatatccaacagggtcgatacagatgacataggcctgggcttgctcatggaatcccacctggaggcaggttgggctggaagctgcaaccttccgcatggtggggagaatgctgcctcctggagaagggaagacctggaggcagcagcctggtttcctcctcccctgtcagaggattgtctcctgcttgacttggggcgtagtcttaggccctcagggagctatttcagacacccaccaaatatttaactcatttaatatttaccactctctaatgtac

SEQ ID NO: 22689 - DNA, 519 bp, Homo sapiens
agaaaagttacggtgctttcacctattggtgctcaggtagttaaagtctgttttcagggcataagagacattttaatatccaaaatgaaaatttaaggtgaaggagaacatttcagaatctgctgtttattaaggtaaagatacctgttagtcgtgtggagccagttatttctaaccaagcagtatctggtgagagtttgtgtaacaccatgtgtggatattttacaattgaagttcagtggccttccctaaaggcatcctcttttaaaagggatttctgcaaaaccaaaattctctccgaaatacgcagaaaaactggcagctatgttagtgaggctccttagtgctgctgttgctgttagacagcataattaactttaggatgctaacatatgcgaaggatttatgtctctagaaccatttcccagggcgcagacttaccagctcctttcacttgtaaatctttccatttgccttccagtatctgaagaagggtggcagacacatctacggctggaa

SEQ ID NO: 22690 - DNA, 366 bp, Homo sapiens
agagtgtttttgggtgagatttacatttaaagtggtgaactctgagtaaagcagatcaccctccacaatgtgggtagtcctcatctaatcagctgaagggcctgaacagaacaaaacgctgacctccctgggcaagtgggaattttccagtagactgtttttggactgaaatttcaactctttcctgagtctccatcctgtcaggctgtcccatcagattttacactagccaagcctccacaatcacatgggccaattccttaatatatatacacagacagacacacacatacacacacacacacacacacacacacgttgatggttctttttctttggagaaccctgacttatacagtggttatg

SEQ ID NO: 22691 - DNA, 534 bp, Homo sapiens
gttttggcaaaacacagagtgccagggataacgtggagttcggcttattcatctgttatttgacttaggtttattgctgccatgattctgctctgtcccgggctcactgacctcagtgtgtttctgtttagcttgaccattggacacttctccagggttcgtggacagacgattactgcatgtccaagttcaagaatacctgctggattccaggatatagtgcaggggtcagcaaactctggcccacgggccctggcccgctgcccgtgtttgtaaataaagttttactgtcacacagacacaaccattcctttacatattgcctgtggctgcttttctcaccacaaaggcagagttgagtattcatctgggatggcctgcaaaatctgagatggttgctgtctgaccctttgcagagagaatttaccaatgtctgaaatgaaatcggccctccggatctgcaagttcctcatctgtggtttcaactaaccatggattgaaaatacgtggggaaagagaaaccaaaaaatgaca

SEQ ID NO: 22692 - DNA, 8035 bp, Homo sapiens
ggcgcagctccgacttcggacatggcgcacgctggcggtggcagcggtggcagcggtgccggcggccccgcgggccgggggctgagcggcgcccgctggggtcgctcgggctccgcaggccacgagaagctgccggtgcacgtagaagacgccctcacctatctggaccaggtgaagatccgctttggcagcgaccctgccacctacaacggcttcctggagatcatgaaggagttcaaaagccagagcatcgatactcctggagtcatcagacgtgtctcgcagctcttccacgagcaccctgacctcattgttggattcaacgcttttcttcccctcggatatagaatagacattcccaagaatggcaagttaaacatacagtcgcctctgacaagccaggagaattcgcacaaccacggggacggtgcagaggacttcaagcagcaggtgccgtataaagaggacaaaccccaggtgcccctggagtccgattccgtggaattcaacaacgccatcagctatgtgaataagattaaaacccgcttcctagaccacccagaaatctacaggtcattcctggagatcctgcacacgtaccagaaggagcagctgaacacgaggggccggccattccgaggcatgtctgaagaggaggtgttcaccgaggtggccaacctcttccggggccaggaggacctgctctcagagtttggacagttcctgcccgaagccaagcggtctctgttcacaggaaacgggccgtgcgagatgcacagcgtgcagaagaacgagcacgacaagaccccggagcacagcaggaagcgctcccggccctcgctcctccgccccgtgtctgcacccgccaagaaaaaaatgaaacttcgtggtaccaaagacctgtccatcgctgcagtggggaagtacgggactctgcaggaattttctttctttgacaaggtccgccgggtgctgaagagccaggaggtgtatgaaaacttcctccgctgcatcgcactcttcaaccaggagctggtgtctggctctgagctcctgcagctcgtcagcccatttctggggaaatttccagaactctttgcacagttcaagtccttcctgggggtaaaagagctgtccttcgcgccacccatgagcgacagatccggggacgggataagccgggaaattgattatgcatcctgcaagcgcataggatccagctaccgggcactccccaaaacctaccagcagcccaagtgcagtgggaggacagccatctgcaaggaggtactgaacgacacctgggtctccttcccttcctggtctgaggactccacgttcgtcagctccaagaagacaccgtacgaggagcagcttcaccgctgtgaggacgagcgcttcgagttagacgttgtcctggagacgaacctggccacaatccgtgtgttggaaagtgtgcagaagaagctgtctcggatggcgccggaagaccaggagaagttccggctggacgactccctgggaggcacgtcggaggtgatccagcgccgtgccatttatcgcatctatggcgacaaggccccggagatcatcgagagcctcaagaagaaccctgtcaccgctgtccccgttgtcctgaaaagactgaaggccaaggaagaggagtggcgggaggcccagcagggcttcaacaagatctggcgggagcagtatgagaaggcgtacctcaagtcccttgaccaccaggctgtgaacttcaagcagaacgacaccaaggccctgcgctccaagagcttgctcaacgagatcgagagcgtctacgacgagcaccaggagcagcactcggagggccgcagtgccccctctagcgagccgcacctcatctttgtgtacgaggaccggcagatcctggaggacgcagcagcgctcatcagctactacgtgaagcggcagccggccatccagaaggaggaccagggcaccatccaccagctgctgcaccagttcgtgcccagcctcttcttctctcagcagctggacctgggcgcctccgaggagtcagctgatgaggaccgggacagcccccaggggcagaccacagaccccagtgagcggaagaagccggcgccaggaccccacagtagccccccagaggagaagggggccttcggggatgccccggccactgagcagccacccctgccgcccccagccccgcacaagcccctggacgatgtctacagcctattttttgccaacaacaactggtacttcttcctgcgcctgcaccagaccctgtgctccaggctgctgaagatctaccgccaggcgcagaagcagcttctggagtatcggaccgagaaggagcgggagaagctgctgtgtgagggccgcagggagaagggcagcgaccccgccatggagctgcggctgaagcagcccagtgaagtggagctggaggagtactacccggccttcctggacatggtgcggagcctgctggagggcagcatcgaccccacgcagtacgaggacaccctacgcgagatgttcaccatccatgcctacgtgggcttcaccatggacaagctggtgcagaacattgcgcggcagctgcaccacctcgtgagcgatgacgtctgcctgaaggtggtggagctctacctgaacgagaagaagcggggtgccgctggtgggaacctgtcctcccgctgcgtccgcgctgctagggagaccagctaccagtggaaggctgagcgctgcatggccgacgagaactgcttcaaggtgatgttcctgcagcgcaaagggcaggtgatcatgaccatcgagctcctggacaccgaggaggcccagacggaggaccctgtggaggtccagcacctggctcggtacgtggagcagtatgtggggaccgagggcgcgtccagctcgcccactgagggcttcctcctgaaacctgtgttcctgcagaggaacctcaagaagttccgccgccggtggcagagcgagcaggcgcgggccctgcgcggtgaggccaggagctcctggaagcggctggtgggcgtggagagcgcctgcgacgtggactgccgcttcaagctcagcactcacaagatggtgttcatcgtgaactccgaggactacatgtaccgtcgcgggaccctctgccgggccaagcaggtgcagcccctggtcctgctccgccaccaccagcactttgaggagtggcacagccgctggctggaggacaatgtgacggtggaggcggctagcctggtgcaggactggctgatgggtgaggaggacgaggacatggtaccctgcaagacgctgtgtgagacagtgcacgtgcacggcctgcccgtgacccgctaccgcgtgcagtacagccgccgcccggcctcgccctgacccgccctcatgggcaccgggcaggcgcctcacagagcacagacgtgccctcggccttggtcgtgtcggggccgttttcttgaacgacgtgagaggcatctcccagcccctctgctgccggacagcgcactccagggcaggacgccgcccccgtggctcccggtctcctgtgggcctgctgtgtgccaaacctgagctacctgcacccgagccctggggctcagccccaccacaggggcgggtggacgtgctggccgaggaacaagcaatcatgtttgcgtccccgtccgtcacatgtgccaaatccctggcaggcagatggctcctgccccatattcttgccgtgtcttggaaaagtcacaggtgacagccctcctgaggcccacactttggagggggtccatgtccaagagaccctgacaaggaaggagttgagccctgggtaggcttgcttgaaaagtgagtccttccagaatattctcagagctgccagaaacatcatctgagggtttgggcatcagctctgcctggctggtgttcaggccctcagtcactttggaagtgagaagaacccttcagccaaacctttgggatcccattttgaagtccagagctggagcaggcgggcagtgccctgggagaccccgctctggataagacacccaaccccaactccagcagctggactctgggcccacaaggggagggaccccagccagtattccctcagagccggcacgaccctgctgtggggcggcgggcccagtcgtgttcctgcagtgggcaccctaggcgtatgtgtatacacgcacagatatttattcctttcgcttttagtggttgttatttctgtagcagccaagtcctgcggctccctggggctgagatctccctttgtggaactccgagagccgccctgacagtcccagccgccacccaaggagccccatccgcccacccaccctgggacccacgcggccactccagggatcattgttgtccttttgtgaggggctgaggcgactgtcccatggaggcatccaaggctttctgtgccaagaatcccaagtgactggggctggggaccacttctccaggcctctctccccgaccatgagagcccctggccctggcccctgcacaccagtaggcccagaataaccgccacccttgccatcctgcaacagctggactcaagtttccaggaagtggagatgtgtttctagaagtttcctgtggaacctggaggctcctgacgcctttgactccaggctgggcgattccgatgctgacccgtcctcctgggctccccacccccgctccccaagtgtcacacaggcactttgtacacatcctggttttctaagaagggaacttgccatcaagattcctgtaccaggcccacggccgtctcgggcagagccacctgggccccgggtgcagccggagaccccgccgagcccctcctcccagtattcccatccccgcatgcttctagggagcgcctcttttccgttcttgaggaatttctgttctggggcttgtccttcctttgcagctgttttgaatgtagttttccttttctatttatttgcacattaaagttaataattgaatattgaaaaaaaaaaaaaaaaaactcgagactagttctccccccatccctcaaattggcagcaccccagagttacccggtgacctggccaggctctgggcgtgaggccttcaccaatccaagggctattagtacagacgtgtaaatccttccaccccgacccgcacacacacccacactgctgccctggcgggggccatgggggtgatgaatgaccctccaacagccccacatgggttgtttctgtttctttggcttttctcgctccgcagtggagggtttactaggatttaagcttttgagtgcattgagaaccaagacagggcctggctccaactctgtgggccagaggtgggggactgctaggtcgagtctgcagcttcgccagtttcttggttgggacactcctctggcagccccagcaccaccacaaccccttgcagtgtgccccagtcccctggattcgctggactgcaaaaaggagcaccagggaaagctcagcaaaggctcaggaggcctcccgggtcctcgggagatgaagcatccgtgcctaggaaaaggggacagagggcaaggagagaagtgagagctacaattccagcattggagaagcgaggggcggggcgtcaacggcactgcttcaggacgcgcttgctgaaacgactccaacagctagttcacagcccagctttgtacgttggttaccatagctactgctgtcactgtagctgctcccgtagggtcgttgattcctgaacgtatcacatctcacctgcccccttcctcgtgggacgtgtcaagttgactttaaagcctaaggtggcttgtggggactgcaccagaaagtgtctaaccttgtgttccccgaaatcctttctctgacttaggaaccagcgccccctgctggagaagttttttcattttgttagccgacttctggtagcttagcaaagagaccagctgactgtctctcggcccagcccaccacgccgagtagcttgtgtggatgcagtcctgtgagggtgtgcataaccgttcccaggtgtacgcacgcgcgcgcgcgcgcacagacacacacacacacacacacacacacacacacacagtaaccacgggtaggcaccaggggctttgtacattcaggagctgcagagaggaaaggtctcccatgtaccagagaaggaaaagtctgatcccgaaacagcttgaacgaaaggtggttaacacgtgaccaatccccatggcagacagcgggctggtgaacaggaagagcacagaatctctgtggggcgatgctgcagcggctgaaaccacgtcaagtcccccagagcccggcattctatgtaagcatccacctgtgacgccgtggagcaggatcttcattcatctcaccagagcaacagcccagtcctgaggatgggagggacgtgacttagccttgggattccacgctcgccgccctcccttggccgccctactccccagtttcctggcgatgagccatttattgtgtctcacaccagcctcatttccaactccgacttcctacttagaatgtggcagtggctttgtgagtgagaatcctgatgagttttccagtggcctctgcagaagctggcccccttctaagggcatagctaacccccttcccactcctgagtcactgaattcgaggagggtggggcagggaaagggctggcccccctgctgaaatcttgattctgcatttgaggaaggtcagggtgccgctgggggagcagggagcggggagggaggaagaggggaatgcacatcttttgcgccactattaaggcacctgtcaccttacatctcaatctggaatcaaagtgccctgggttgagaagcagacctgggctctggtcacactttggtcactcattagctctaggaccagtcactaatctctgagactccattttctccagggaaacgaggcttgcccagatagactaacaaccctttagtgctccaagaagtgagaatttccgaaaaagatctgccggcccagagcactccctcttgccctaatcctggcagggtctggatgtatttacccaactctgatcttgcgtgcagggatgcttgctgatggatgaaagaccacaataaaacaagattagcagcaaaacaattttaattgtcagtgaaaagcaaacatgtttgtcagactctcctgtggagtcatttcaaatggtaactcttctcttgtaccaggaagcagctgtaggtggggtaatgggatctgtctcctggtgcagaggggcagcttatggcggcagcagcttcaacaagcccgtcccacggccagccctaactgggccaagtgcaagctcctgatgagctgctgggcctggcagcgttccccacttcctagtgccttgctcccctggaattccacagccaatcaaccacagcagccgtgtcctccttgccagaaataacatcattcgtacgtcctgcctttgtaaaaatcaagacccagttaaccatcacccacttcttgcccctgattgatggggtccctgagtacaagcgtcctgtgcaatcccctccctcctaccgctttcctagctaagccctgctagccccacaaatcagaatctgggtttggggtgctggagagatggtgggccccagctcttccccacatagcccacgctgctcagggcacggtctccaaccaggctcgagattgcctgcctgcccgctgcagccgcagggccccaccctgtggaaaaggaagcttcccccactcaactgcactgtccttttctgctgtctagtctgtgctaagggacactacttgtacacttttcaaacggtgccctaaattggaagagaaggaggggccaggaacacagccctctccgccgtctttctccacctccacttcaccactcctgctctagacttcttgtcttgcatctttgataacttggagtcataaccgagtggatgtcggaataaatgagagatttgaagtag

SEQ ID NO: 22693 - DNA, 6646 bp, Homo sapiens
ggcgcagctccgacttcggacatggcgcacgctggcggtggcagcggtggcagcggtgccggcggccccgcgggccgggggctgagcggcgcccgctggggtcgctcgggctccgcaggccacgagaagctgccggtgcacgtagaagacgccctcacctatctggaccaggtgaagatccgctttggcagcgaccctgccacctacaacggcttcctggagatcatgaaggagttcaaaagccagagcatcgatactcctggagtcatcagacgtgtctcgcagctcttccacgagcaccctgacctcattgttggattcaacgcttttcttcccctcggatatagaatagacattcccaagaatggcaagttaaacatacagtcgcctctgacaagccaggagaattcgcacaaccacggggacggtgcagaggacttcaagcagcaggtgccgtataaagaggacaaaccccaggtgcccctggagtccgattccgtggaattcaacaacgccatcagctatgtgaataagattaaaacccgcttcctagaccacccagaaatctacaggtcattcctggagatcctgcacacgtaccagaaggagcagctgaacacgaggggccggccattccgaggcatgtctgaagaggaggtgttcaccgaggtggccaacctcttccggggccaggaggacctgctctcagagtttggacagttcctgcccgaagccaagcggtctctgttcacaggaaacgggccgtgcgagatgcacagcgtgcagaagaacgagcacgacaagaccccggagcacagcaggaagcgctcccggccctcgctcctccgccccgtgtctgcacccgccaagaacaactggtacttcttcctgcgcctgcaccagaccctgtgctccaggctgctgaagatctaccgccaggcgcagaagcagcttctggagtatcggaccgagaaggagcgggagaagctgctgtgtgagggccgcagggagaagggcagcgaccccgccatggagctgcggctgaagcagcccagtgaagtggagctggaggagtactacccggccttcctggacatggtgcggagcctgctggagggcagcatcgaccccacgcagtacgaggacaccctacgcgagatgttcaccatccatgcctacgtgggcttcaccatggacaagctggtgcagaacattgcgcggcagctgcaccacctcgtgagcgatgacgtctgcctgaaggtggtggagctctacctgaacgagaagaagcggggtgccgctggtgggaacctgtcctcccgctgcgtccgcgctgctagggagaccagctaccagtggaaggctgagcgctgcatggccgacgagaactgcttcaaggtgatgttcctgcagcgcaaagggcaggtgatcatgaccatcgagctcctggacaccgaggaggcccagacggaggaccctgtggaggtccagcacctggctcggtacgtggagcagtatgtggggaccgagggcgcgtccagctcgcccactgagggcttcctcctgaaacctgtgttcctgcagaggaacctcaagaagttccgccgccggtggcagagcgagcaggcgcgggccctgcgcggtgaggccaggagctcctggaagcggctggtgggcgtggagagcgcctgcgacgtggactgccgcttcaagctcagcactcacaagatggtgttcatcgtgaactccgaggactacatgtaccgtcgcgggaccctctgccgggccaagcaggtgcagcccctggtcctgctccgccaccaccagcactttgaggagtggcacagccgctggctggaggacaatgtgacggtggaggcggctagcctggtgcaggactggctgatgggtgaggaggacgaggacatggtaccctgcaagacgctgtgtgagacagtgcacgtgcacggcctgcccgtgacccgctaccgcgtgcagtacagccgccgcccggcctcgccctgacccgccctcatgggcaccgggcaggcgcctcacagagcacagacgtgccctcggccttggtcgtgtcggggccgttttcttgaacgacgtgagaggcatctcccagcccctctgctgccggacagcgcactccagggcaggacgccgcccccgtggctcccggtctcctgtgggcctgctgtgtgccaaacctgagctacctgcacccgagccctggggctcagccccaccacaggggcgggtggacgtgctggccgaggaacaagcaatcatgtttgcgtccccgtccgtcacatgtgccaaatccctggcaggcagatggctcctgccccatattcttgccgtgtcttggaaaagtcacaggtgacagccctcctgaggcccacactttggagggggtccatgtccaagagaccctgacaaggaaggagttgagccctgggtaggcttgcttgaaaagtgagtccttccagaatattctcagagctgccagaaacatcatctgagggtttgggcatcagctctgcctggctggtgttcaggccctcagtcactttggaagtgagaagaacccttcagccaaacctttgggatcccattttgaagtccagagctggagcaggcgggcagtgccctgggagaccccgctctggataagacacccaaccccaactccagcagctggactctgggcccacaaggggagggaccccagccagtattccctcagagccggcacgaccctgctgtggggcggcgggcccagtcgtgttcctgcagtgggcaccctaggcgtatgtgtatacacgcacagatatttattcctttcgcttttagtggttgttatttctgtagcagccaagtcctgcggctccctggggctgagatctccctttgtggaactccgagagccgccctgacagtcccagccgccacccaaggagccccatccgcccacccaccctgggacccacgcggccactccagggatcattgttgtccttttgtgaggggctgaggcgactgtcccatggaggcatccaaggctttctgtgccaagaatcccaagtgactggggctggggaccacttctccaggcctctctccccgaccatgagagcccctggccctggcccctgcacaccagtaggcccagaataaccgccacccttgccatcctgcaacagctggactcaagtttccaggaagtggagatgtgtttctagaagtttcctgtggaacctggaggctcctgacgcctttgactccaggctgggcgattccgatgctgacccgtcctcctgggctccccacccccgctccccaagtgtcacacaggcactttgtacacatcctggttttctaagaagggaacttgccatcaagattcctgtaccaggcccacggccgtctcgggcagagccacctgggccccgggtgcagccggagaccccgccgagcccctcctcccagtattcccatccccgcatgcttctagggagcgcctcttttccgttcttgaggaatttctgttctggggcttgtccttcctttgcagctgttttgaatgtagttttccttttctatttatttgcacattaaagttaataattgaatattgaaaaaaaaaaaaaaaaaactcgagactagttctccccccatccctcaaattggcagcaccccagagttacccggtgacctggccaggctctgggcgtgaggccttcaccaatccaagggctattagtacagacgtgtaaatccttccaccccgacccgcacacacacccacactgctgccctggcgggggccatgggggtgatgaatgaccctccaacagccccacatgggttgtttctgtttctttggcttttctcgctccgcagtggagggtttactaggatttaagcttttgagtgcattgagaaccaagacagggcctggctccaactctgtgggccagaggtgggggactgctaggtcgagtctgcagcttcgccagtttcttggttgggacactcctctggcagccccagcaccaccacaaccccttgcagtgtgccccagtcccctggattcgctggactgcaaaaaggagcaccagggaaagctcagcaaaggctcaggaggcctcccgggtcctcgggagatgaagcatccgtgcctaggaaaaggggacagagggcaaggagagaagtgagagctacaattccagcattggagaagcgaggggcggggcgtcaacggcactgcttcaggacgcgcttgctgaaacgactccaacagctagttcacagcccagctttgtacgttggttaccatagctactgctgtcactgtagctgctcccgtagggtcgttgattcctgaacgtatcacatctcacctgcccccttcctcgtgggacgtgtcaagttgactttaaagcctaaggtggcttgtggggactgcaccagaaagtgtctaaccttgtgttccccgaaatcctttctctgacttaggaaccagcgccccctgctggagaagttttttcattttgttagccgacttctggtagcttagcaaagagaccagctgactgtctctcggcccagcccaccacgccgagtagcttgtgtggatgcagtcctgtgagggtgtgcataaccgttcccaggtgtacgcacgcgcgcgcgcgcgcacagacacacacacacacacacacacacacacacacacagtaaccacgggtaggcaccaggggctttgtacattcaggagctgcagagaggaaaggtctcccatgtaccagagaaggaaaagtctgatcccgaaacagcttgaacgaaaggtggttaacacgtgaccaatccccatggcagacagcgggctggtgaacaggaagagcacagaatctctgtggggcgatgctgcagcggctgaaaccacgtcaagtcccccagagcccggcattctatgtaagcatccacctgtgacgccgtggagcaggatcttcattcatctcaccagagcaacagcccagtcctgaggatgggagggacgtgacttagccttgggattccacgctcgccgccctcccttggccgccctactccccagtttcctggcgatgagccatttattgtgtctcacaccagcctcatttccaactccgacttcctacttagaatgtggcagtggctttgtgagtgagaatcctgatgagttttccagtggcctctgcagaagctggcccccttctaagggcatagctaacccccttcccactcctgagtcactgaattcgaggagggtggggcagggaaagggctggcccccctgctgaaatcttgattctgcatttgaggaaggtcagggtgccgctgggggagcagggagcggggagggaggaagaggggaatgcacatcttttgcgccactattaaggcacctgtcaccttacatctcaatctggaatcaaagtgccctgggttgagaagcagacctgggctctggtcacactttggtcactcattagctctaggaccagtcactaatctctgagactccattttctccagggaaacgaggcttgcccagatagactaacaaccctttagtgctccaagaagtgagaatttccgaaaaagatctgccggcccagagcactccctcttgccctaatcctggcagggtctggatgtatttacccaactctgatcttgcgtgcagggatgcttgctgatggatgaaagaccacaataaaacaagattagcagcaaaacaattttaattgtcagtgaaaagcaaacatgtttgtcagactctcctgtggagtcatttcaaatggtaactcttctcttgtaccaggaagcagctgtaggtggggtaatgggatctgtctcctggtgcagaggggcagcttatggcggcagcagcttcaacaagcccgtcccacggccagccctaactgggccaagtgcaagctcctgatgagctgctgggcctggcagcgttccccacttcctagtgccttgctcccctggaattccacagccaatcaaccacagcagccgtgtcctccttgccagaaataacatcattcgtacgtcctgcctttgtaaaaatcaagacccagttaaccatcacccacttcttgcccctgattgatggggtccctgagtacaagcgtcctgtgcaatcccctccctcctaccgctttcctagctaagccctgctagccccacaaatcagaatctgggtttggggtgctggagagatggtgggccccagctcttccccacatagcccacgctgctcagggcacggtctccaaccaggctcgagattgcctgcctgcccgctgcagccgcagggccccaccctgtggaaaaggaagcttcccccactcaactgcactgtccttttctgctgtctagtctgtgctaagggacactacttgtacacttttcaaacggtgccctaaattggaagagaaggaggggccaggaacacagccctctccgccgtctttctccacctccacttcaccactcctgctctagacttcttgtcttgcatctttgataacttggagtcataaccgagtggatgtcggaataaatgagagatttgaagtag

SEQ ID NO: 22694 - DNA, 5761 bp, Homo sapiens
gaggagccacctgggcccagctcccagtcacaatttttgcggggacagatgtttcctgctcacctcccgcatcctggtgacagtgaggcattgacccgtgtgtgtccccagggtggtcattggggcctgcagctcccggcacctgccaacaggtccagtgtgtgtgcacattactcagctaggccaaccccattcatttcctggggctaccaccacaatgaccacaaaccacgtggcttcaaacaacagaagtctattccctcaacgtcctggaggtcagcagtccacaaccacagtgtgggccgggcggtgctcctgccaaaggctctggggcggatccttcctgctcttccagcttccgggggcttctggcgctcctcagctgtggcctggttgtgtgagtcccgctgtcactgggtcctctgtcaagagctatagtctgttggggtctccgtcagggatcagagtcctctgcagcggctctcctcatgctctggcagtggggggcacagaacccctgtgagctcctgaactcagagtccagagtaagagtggccatagccctgctgtaggggcatcacgggctgtgtctctccctgtccccagcacctggctcggtacgtggagcagtatgtggggaccgagggcgcgtccagctcgcccactgagggcttcctcctgaaacctgtgttcctgcagaggaacctcaagaagttccgccgccggtggcagagcgagcaggcgcgggccctgcgcggtgaggccaggagctcctggaagcggctggtgggcgtggagagcgcctgcgacgtggactgccgcttcaagctcagcactcacaagatggtgttcatcgtgaactccgaggactacatgtaccgtcgcgggaccctctgccgggccaagcaggtgcagcccctggtcctgctccgccaccaccagcactttgaggagtggcacagccgctggctggaggacaatgtgacggtggaggcggctagcctggtgcaggactggctgatgggtgaggaggacgaggacatggtaccctgcaagacgctgtgtgagacagtgcacgtgcacggcctgcccgtgacccgctaccgcgtgcagtacagccgccgcccggcctcgccctgacccgccctcatgggcaccgggcaggcgcctcacagagcacagacgtgccctcggccttggtcgtgtcggggccgttttcttgaacgacgtgagaggcatctcccagcccctctgctgccggacagcgcactccagggcaggacgccgcccccgtggctcccggtctcctgtgggcctgctgtgtgccaaacctgagctacctgcacccgagccctggggctcagccccaccacaggggcgggtggacgtgctggccgaggaacaagcaatcatgtttgcgtccccgtccgtcacatgtgccaaatccctggcaggcagatggctcctgccccatattcttgccgtgtcttggaaaagtcacaggtgacagccctcctgaggcccacactttggagggggtccatgtccaagagaccctgacaaggaaggagttgagccctgggtaggcttgcttgaaaagtgagtccttccagaatattctcagagctgccagaaacatcatctgagggtttgggcatcagctctgcctggctggtgttcaggccctcagtcactttggaagtgagaagaacccttcagccaaacctttgggatcccattttgaagtccagagctggagcaggcgggcagtgccctgggagaccccgctctggataagacacccaaccccaactccagcagctggactctgggcccacaaggggagggaccccagccagtattccctcagagccggcacgaccctgctgtggggcggcgggcccagtcgtgttcctgcagtgggcaccctaggcgtatgtgtatacacgcacagatatttattcctttcgcttttagtggttgttatttctgtagcagccaagtcctgcggctccctggggctgagatctccctttgtggaactccgagagccgccctgacagtcccagccgccacccaaggagccccatccgcccacccaccctgggacccacgcggccactccagggatcattgttgtccttttgtgaggggctgaggcgactgtcccatggaggcatccaaggctttctgtgccaagaatcccaagtgactggggctggggaccacttctccaggcctctctccccgaccatgagagcccctggccctggcccctgcacaccagtaggcccagaataaccgccacccttgccatcctgcaacagctggactcaagtttccaggaagtggagatgtgtttctagaagtttcctgtggaacctggaggctcctgacgcctttgactccaggctgggcgattccgatgctgacccgtcctcctgggctccccacccccgctccccaagtgtcacacaggcactttgtacacatcctggttttctaagaagggaacttgccatcaagattcctgtaccaggcccacggccgtctcgggcagagccacctgggccccgggtgcagccggagaccccgccgagcccctcctcccagtattcccatccccgcatgcttctagggagcgcctcttttccgttcttgaggaatttctgttctggggcttgtccttcctttgcagctgttttgaatgtagttttccttttctatttatttgcacattaaagttaataattgaatattgaaaaaaaaaaaaaaaaaactcgagactagttctccccccatccctcaaattggcagcaccccagagttacccggtgacctggccaggctctgggcgtgaggccttcaccaatccaagggctattagtacagacgtgtaaatccttccaccccgacccgcacacacacccacactgctgccctggcgggggccatgggggtgatgaatgaccctccaacagccccacatgggttgtttctgtttctttggcttttctcgctccgcagtggagggtttactaggatttaagcttttgagtgcattgagaaccaagacagggcctggctccaactctgtgggccagaggtgggggactgctaggtcgagtctgcagcttcgccagtttcttggttgggacactcctctggcagccccagcaccaccacaaccccttgcagtgtgccccagtcccctggattcgctggactgcaaaaaggagcaccagggaaagctcagcaaaggctcaggaggcctcccgggtcctcgggagatgaagcatccgtgcctaggaaaaggggacagagggcaaggagagaagtgagagctacaattccagcattggagaagcgaggggcggggcgtcaacggcactgcttcaggacgcgcttgctgaaacgactccaacagctagttcacagcccagctttgtacgttggttaccatagctactgctgtcactgtagctgctcccgtagggtcgttgattcctgaacgtatcacatctcacctgcccccttcctcgtgggacgtgtcaagttgactttaaagcctaaggtggcttgtggggactgcaccagaaagtgtctaaccttgtgttccccgaaatcctttctctgacttaggaaccagcgccccctgctggagaagttttttcattttgttagccgacttctggtagcttagcaaagagaccagctgactgtctctcggcccagcccaccacgccgagtagcttgtgtggatgcagtcctgtgagggtgtgcataaccgttcccaggtgtacgcacgcgcgcgcgcgcgcacagacacacacacacacacacacacacacacacacacagtaaccacgggtaggcaccaggggctttgtacattcaggagctgcagagaggaaaggtctcccatgtaccagagaaggaaaagtctgatcccgaaacagcttgaacgaaaggtggttaacacgtgaccaatccccatggcagacagcgggctggtgaacaggaagagcacagaatctctgtggggcgatgctgcagcggctgaaaccacgtcaagtcccccagagcccggcattctatgtaagcatccacctgtgacgccgtggagcaggatcttcattcatctcaccagagcaacagcccagtcctgaggatgggagggacgtgacttagccttgggattccacgctcgccgccctcccttggccgccctactccccagtttcctggcgatgagccatttattgtgtctcacaccagcctcatttccaactccgacttcctacttagaatgtggcagtggctttgtgagtgagaatcctgatgagttttccagtggcctctgcagaagctggcccccttctaagggcatagctaacccccttcccactcctgagtcactgaattcgaggagggtggggcagggaaagggctggcccccctgctgaaatcttgattctgcatttgaggaaggtcagggtgccgctgggggagcagggagcggggagggaggaagaggggaatgcacatcttttgcgccactattaaggcacctgtcaccttacatctcaatctggaatcaaagtgccctgggttgagaagcagacctgggctctggtcacactttggtcactcattagctctaggaccagtcactaatctctgagactccattttctccagggaaacgaggcttgcccagatagactaacaaccctttagtgctccaagaagtgagaatttccgaaaaagatctgccggcccagagcactccctcttgccctaatcctggcagggtctggatgtatttacccaactctgatcttgcgtgcagggatgcttgctgatggatgaaagaccacaataaaacaagattagcagcaaaacaattttaattgtcagtgaaaagcaaacatgtttgtcagactctcctgtggagtcatttcaaatggtaactcttctcttgtaccaggaagcagctgtaggtggggtaatgggatctgtctcctggtgcagaggggcagcttatggcggcagcagcttcaacaagcccgtcccacggccagccctaactgggccaagtgcaagctcctgatgagctgctgggcctggcagcgttccccacttcctagtgccttgctcccctggaattccacagccaatcaaccacagcagccgtgtcctccttgccagaaataacatcattcgtacgtcctgcctttgtaaaaatcaagacccagttaaccatcacccacttcttgcccctgattgatggggtccctgagtacaagcgtcctgtgcaatcccctccctcctaccgctttcctagctaagccctgctagccccacaaatcagaatctgggtttggggtgctggagagatggtgggccccagctcttccccacatagcccacgctgctcagggcacggtctccaaccaggctcgagattgcctgcctgcccgctgcagccgcagggccccaccctgtggaaaaggaagcttcccccactcaactgcactgtccttttctgctgtctagtctgtgctaagggacactacttgtacacttttcaaacggtgccctaaattggaagagaaggaggggccaggaacacagccctctccgccgtctttctccacctccacttcaccactcctgctctagacttcttgtcttgcatctttgataacttggagtcataaccgagtggatgtcggaataaatgagagatttgaagtag

SEQ ID NO: 22695 - DNA, 4920 bp, Homo sapiens
ggcgcagctccgacttcggacatggcgcacgctggcggtggcagcggtggcagcggtgccggcggccccgcgggccgggggctgagcggcgcccgctggggtcgctcgggctccgcaggccacgagaagctgccggtgcacgtagaagacgccctcacctatctggaccaggtgaagatccgctttggcagcgaccctgccacctacaacggcttcctggagatcatgaaggagttcaaaagccagagcatcgatactcctggagtcatcagacgtgtctcgcagctcttccacgagcaccctgacctcattgttggattcaacgcttttcttcccctcggatatagaatagacattcccaagaatggcaagttaaacatacagtcgcctctgacaagccaggagaattcgcacaaccacggggacggtgcagaggacttcaagcagcaggtgccgtataaagaggacaaaccccaggtgcccctggagtccgattccgtggaattcaacaacgccatcagctatgtgaataagattaaaacccgcttcctagaccacccagaaatctacaggtcattcctggagatcctgcacacgtaccagaaggagcagctgaacacgaggggccggccattccgaggcatgtctgaagaggaggtgttcaccgaggtggccaacctcttccggggccaggaggacctgctctcagagtttggacagttcctgcccgaagccaagcggtctctgttcacaggaaacgggccgtgcgagatgcacagcgtgcagaagaacgagcacgacaagaccccggagcacagcaggaagcgctcccggccctcgctcctccgccccgtgtctgcacccgccaagaaaaaaatgaaacttcgtggtaccaaagacctgtccatcgctgcagtggggaagtacgggactctgcaggaattttctttctttgacaaggtccgccgggtgctgaagagccaggaggtgtatgaaaacttcctccgctgcatcgcactcttcaaccaggagctggtgtctggctctgagctcctgcagctcgtcagcccatttctggggaaatttccagaactctttgcacagttcaagtccttcctgggggtaaaagagctgtccttcgcgccacccatgagcgacagatccggggacgggataagccgggaaattgattatgcatcctgcaagcgcataggatccagctaccgggcactccccaaaacctaccagcagcccaagtgcagtgggaggacagccatctgcaaggaggtactgaacgacacctgggtctccttcccttcctggtctgaggactccacgttcgtcagctccaagaagacaccgtacgaggagcagcttcaccgctgtgaggacgagcgcttcgagttagacgttgtcctggagacgaacctggccacaatccgtgtgttggaaagtgtgcagaagaagctgtctcggatggcgccggaagaccaggagaagttccggctggacgactccctgggaggcacgtcggaggtgatccagcgccgtgccatttatcgcatctatggcgacaaggccccggagatcatcgagagcctcaagaagaaccctgtcaccgctgtccccgttgtcctgaaaagactgaaggccaaggaagaggagtggcgggaggcccagcagggcttcaacaagatctggcgggagcagtatgagaaggcgtacctcaagtcccttgaccaccaggctgtgaacttcaagcagaacgacaccaaggccctgcgctccaagagcttgctcaacgagatcgagagcgtctacgacgagcaccaggagcagcactcggagggccgcagtgccccctctagcgagccgcacctcatctttgtgtacgaggaccggcagatcctggaggacgcagcagcgctcatcagctactacgtgaagcggcagccggccatccagaaggaggaccagggcaccatccaccagctgctgcaccagttcgtgcccagcctcttcttctctcagcagctggacctgggcgcctccgaggagtcagctgatgaggaccgggacagcccccaggggcagaccacagaccccagtgagcggaagaagccggcgccaggaccccacagtagccccccagaggagaagggggccttcggggatgccccggccactgagcagccacccctgccgcccccagccccgcacaagcccctggacgatgtctacagcctattttttgccaacaacaactggtacttcttcctgcgcctgcaccagaccctgtgctccaggctgctgaagatctaccgccaggcgcagaagcagcttctggagtatcggaccgagaaggagcgggagaagctgctgtgtgagggccgcagggagaagggcagcgaccccgccatggagctgcggctgaagcagcccagtgaagtggagctggaggagtactacccggccttcctggacatggtgcggagcctgctggagggcagcatcgaccccacgcagtacgaggacaccctacgcgagatgttcaccatccatgcctacgtgggcttcaccatggacaagctggtgcagaacattgcgcggcagctgcaccacctcgtgagcgatgacgtctgcctgaaggtggtggagctctacctgaacgagaagaagcggggtgccgctggtgggaacctgtcctcccgctgcgtccgcgctgctagggagaccagctaccagtggaaggctgagcgctgcatggccgacgagaactgcttcaaggtgatgttcctgcagcgcaaagggcaggtgatcatgaccatcgagctcctggacaccgaggaggcccagacggaggaccctgtggaggtccagcacctggctcggtacgtggagcagtatgtggggaccgagggcgcgtccagctcgcccactgagggcttcctcctgaaacctgtgttcctgcagaggaacctcaagaagttccgccgccggtggcagagcgagcaggcgcgggccctgcgcggtgaggccaggagctcctggaagcggctggtgggcgtggagagcgcctgcgacgtggactgccgcttcaagctcagcactcacaagatggtgttcatcgtgaactccgaggactacatgtaccgtcgcgggaccctctgccgggccaagcaggtgcagcccctggtcctgctccgccaccaccagcactttgaggagtggcacagccgctggctggaggacaatgtgacggtggaggcggctagcctggtgcaggactggctgatgggtgaggaggacgaggacatggtaccctgcaagacgctgtgtgagacagtgcacgtgcacggcctgcccgtgacccgctaccgcgtgcagtacagccgccgcccggcctcgccctgacccgccctcatgggcaccgggcaggcgcctcacagagcacagacgtgccctcggccttggtcgtgtcggggccgttttcttgaacgacgtgagaggcatctcccagcccctctgctgccggacagcgcactccagggcaggacgccgcccccgtggctcccggtctcctgtgggcctgctgtgtgccaaacctgagctacctgcacccgagccctggggctcagccccaccacaggggcgggtggacgtgctggccgaggaacaagcaatcatgtttgcgtccccgtccgtcacatgtgccaaatccctggcaggcagatggctcctgccccatattcttgccgtgtcttggaaaagtcacaggtgacagccctcctgaggcccacactttggagggggtccatgtccaagagaccctgacaaggaaggagttgagccctgggtaggcttgcttgaaaagtgagtccttccagaatattctcagagctgccagaaacatcatctgagggtttgggcatcagctctgcctggctggtgttcaggccctcagtcactttggaagtgagaagaacccttcagccaaacctttgggaccccagccagtattccctcagagccggcacgaccctgctgtggggcggcgggcccagtcgtgttcctgcagtgggcaccctaggcgtatgtgtatacacgcacagatatttattcctttcgcttttagtggttgttatttctgtagcagccaagtcctgcggctccctggggctgagatctccctttgtggaactccgagagccgccctgacagtcccagccgccacccaaggagccccatccgcccacccaccctgggacccacgcggccactccagggatcattgttgtccttttgtgaggggctgaggcgactgtcccatggaggcatccaaggctttctgtgccaagaatcccaagtgactggggctggggaccacttctccaggcctctctccccgaccatgagagcccctggccctggcccctgcacaccagtaggcccagaataaccgccacccttgccatcctgcaacagctggactcaagtttccaggaagtggagatgtgtttctagaagtttcctgtggaacctggaggctcctgacgcctttgactccaggctgggcgattccgatgctgacccgtcctcctgggctccccacccccgctccccaagtgtcacacaggcactttgtacacatcctggttttctaagaagggaacttgccatcaagattcctgtaccaggcccacggccgtctcgggcagagccacctgggccccgggtgcagccggagaccccgccgagcccctcctcccagtattcccatccccgcatgcttctagggagcgcctcttttccgttcttgaggaatttctgttctggggcttgtccttcctttgcagctgttttgaatgtagttttccttttctatttatttgcacattaaagttaataattgaatattga

SEQ ID NO: 22696 - DNA, 4242 bp, Homo sapiens
ggcgcagctccgacttcggacatggcgcacgctggcggtggcagcggtggcagcggtgccggcggccccgcgggccgggggctgagcggcgcccgctggggtcgctcgggctccgcaggccacgagaagctgccggtgcacgtagaagacgccctcacctatctggaccaggtgaagatccgctttggcagcgaccctgccacctacaacggcttcctggagatcatgaaggagttcaaaagccagagcatcgatactcctggagtcatcagacgtgtctcgcagctcttccacgagcaccctgacctcattgttggattcaacgcttttcttcccctcggatatagaatagacattcccaagaatggcaagttaaacatacagtcgcctctgacaagccaggagaattcgcacaaccacggggacggtgcagaggacttcaagcagcaggtgccgtataaagaggacaaaccccaggtgcccctggagtccgattccgtggaattcaacaacgccatcagctatgtgaataagattaaaacccgcttcctagaccacccagaaatctacaggtcattcctggagatcctgcacacgtaccagaaggagcagctgaacacgaggggccggccattccgaggcatgtctgaagaggaggtgttcaccgaggtggccaacctcttccggggccaggaggacctgctctcagagtttggacagttcctgcccgaagccaagcggtctctgttcacaggaaacgggccgtgcgagatgcacagcgtgcagaagaacgagcacgacaagaccccggagcacagcaggaagcgctcccggccctcgctcctccgccccgtgtctgcacccgccaagaaaaaaatgaaacttcgtggtaccaaagacctgtccatcgctgcagtggggaagtacgggactctgcaggaattttctttctttgacaaggtccgccgggtgctgaagagccaggaggtgtatgaaaacttcctccgctgcatcgcactcttcaaccaggagctggtgtctggctctgagctcctgcagctcgtcagcccatttctggggaaatttccagaactctttgcacagttcaagtccttcctgggggtaaaagagctgtccttcgcgccacccatgagcgacagatccggggacgggataagccgggaaattgattatgcatcctgcaagcgcataggatccagctaccgggcactccccaaaacctaccagcagcccaagtgcagtgggaggacagccatctgcaaggaggtactgaacgacacctgggtctccttcccttcctggtctgaggactccacgttcgtcagctccaagaagacaccgtacgaggagcagcttcaccgctgtgaggacgagcgcttcgagttagacgttgtcctggagacgaacctggccacaatccgtgtgttggaaagtgtgcagaagaagctgtctcggatggcgccggaagaccaggagaagttccggctggacgactccctgggaggcacgtcggaggtgatccagcgccgtgccatttatcgcatctatggcgacaaggccccggagatcatcgagagcctcaagaagaaccctgtcaccgctgtccccgttgtcctgaaaagactgaaggccaaggaagaggagtggcgggaggcccagcagggcttcaacaagatctggcgggagcagtatgagaaggcgtacctcaagtcccttgaccaccaggctgtgaacttcaagcagaacgacaccaaggccctgcgctccaagagcttgctcaacgagatcgagagcgtctacgacgagcaccaggagcagcactcggagggccgcagtgccccctctagcgagccgcacctcatctttgtgtacgaggaccggcagatcctggaggacgcagcagcgctcatcagctactacgtgaagcggcagccggccatccagaaggaggaccagggcaccatccaccagctgctgcaccagttcgtgcccagcctcttcttctctcagcagctggacctgggcgcctccgaggagtcagctgatgaggaccgggacagcccccaggggcagaccacagaccccagtgagcggaagaagccggcgccaggaccccacagtagccccccagaggagaagggggccttcggggatgccccggccactgagcagccacccctgccgcccccagccccgcacaagcccctggacgatgtctacagcctattttttgccaacaacaactggtacttcttcctgcgcctgcaccagaccctgtgctccaggctgctgaagatctaccgccaggcgcagaagcagcttctggagtatcggaccgagaaggagcgggagaagctgctgtgtgagggccgcagggagaagggcagcgaccccgccatggagctgcggctgaagcagcccagtgaagtggagctggaggagtactacccggccttcctggacatggtgcggagcctgctggagggcagcatcgaccccacgcagtacgaggacaccctacgcgagatgttcaccatccatgcctacgtgggcttcaccatggacaagctggtgcagaacattgcgcggcagctgcaccacctcgtgagcgatgacgtctgcctgaaggtggtggagctctacctgaacgagaagaagcggggtgccgctggtgggaacctgtcctcccgctgcgtccgcgctgctagggagaccagctaccagtggaaggctgagcgctgcatggccgacgagaactgcttcaaggtgatgttcctgcagcgcaaagggcaggtgatcatgaccatcgagctcctggacaccgaggaggcccagacggaggaccctgtggaggtccagcacctggctcggtacgtggagcagtatgtggggaccgagggcgcgtccagctcgcccactgagggcttcctcctgaaacctgtgttcctgcagaggaacctcaagaagttccgccgccggtggcagagcgagcaggcgcgggccctgcgcggtgaggccaggagctcctggaagcggctggtgggcgtggagagcgcctgcgacgtggactgccgcttcaagctcagcactcacaagatggtgttcatcgtgaactccgaggactacatgtaccgtcgcgggaccctctgccgggccaagcaggtgcagcccctggtcctgctccgccaccaccagcactttgaggagtggcacagccgctggctggaggacaatgtgacggtggaggcggctagcctggtgcaggactggctgatgggtgaggaggacgaggacatggtaccctgcaagacgctgtgtgagacagtgcacgtgcacggcctgcccgtgacccgctaccgcgtgcagtacagccgccgcccggcctcgccctgacccgccctcatgggcaccgggcaggcgcctcacagagcacagacgtgccctcggccttggtcgtgtcggggccgttttcttgaacgacgtgagaggcatctcccagcccctctgctgccggacagcgcactccagggcaggacgccgcccccgtggctcccggtctcctgtgggcctgctgtgtgccaaacctgagctacctgcacccgagccctggggctcagccccaccacaggggcgggtggacgtgctggccgaggaacaagcaatcatgtttgcgtccccgtccgtcacatgtgccaaatccctggcaggcagatggctcctgccccatattcttgccgtgtcttggaaaagtcacaggtgacagccctcctgaggcccacactttggagggggtccatgtccaagagaccctgacaaggaaggagttgagccctgggtaggcttgcttgaaaagtgagtccttccagaatattctcagagctgccagaaacatcatctgagggtttgggcatcagctctgcctggctggtgttcaggccctcagtcactttggaagtgagaagaacccttcagccaaacctttgggatcccattttgaagtccagagctggagcaggcgggcagtgccctgggagaccccgctctggataagacacccaacccctcctcccagtattcccatccccgcatgcttctagggagcgcctcttttccgttcttgaggaatttctgttctggggcttgtccttcctttgcagctgttttgaatgtagttttccttttctatttatttgcacattaaagttaataattgaatattga

SEQ ID NO: 22697 - DNA, 2322 bp, Homo sapiens
ggcgcagctccgacttcggacatggcgcacgctggcggtggcagcggtggcagcggtgccggcggccccgcgggccgggggctgagcggcgcccgctggggtcgctcgggctccgcaggccacgagaagctgccggtgcacgtagaagacgccctcacctatctggaccaggtgaagatccgctttggcagcgaccctgccacctacaacggcttcctggagatcatgaaggagttcaaaagccagagcatcgatactcctggagtcatcagacgtgtctcgcagctcttccacgagcaccctgacctcattgttggattcaacgcttttcttcccctcggatatagaatagacattcccaagaatggcaagttaaacatacagtcgcctctgacaagccaggagaattcgcacaaccacggggacggtgcagaggacttcaagcagcaggtgccgtataaagaggacaaaccccaggtgcccctggagtccgattccgtggaattcaacaacgccatcagctatgtgaataagattaaaacccgcttcctagaccacccagaaatctacaggtcattcctggagatcctgcacacgtaccagaaggagcagctgaacacgaggggccggccattccgaggcatgtctgaagaggaggtgttcaccgaggtggccaacctcttccggggccaggaggacctgctctcagagtttggacagttcctgcccgaagccaagcggtctctgttcacaggaaacgggccgtgcgagatgcacagcgtgcagaagaacgagcacgacaagaccccggagcacagcaggaagcgctcccggccctcgctcctccgccccgtgtctgcacccgccaagaaaaaaatgaaacttcgtggtaccaaagacctgtccatcgctgcagtggggaagtacgggactctgcaggaattttctttctttgacaaggtccgccgggtgctgaagagccaggaggtgtatgaaaacttcctccgctgcatcgcactcttcaaccaggagctggtgtctggctctgagctcctgcagctcgtcagcccatttctggggtgagcagctgacttcccagggctccctaggggggttctgttcctgtcaactccatctacttggtttttagttactgtttttgagcaatgattgtgcttttctaaaatcctgtttattaattgacgtgattgatataattattgattcccatgcatttgtaaggagcaatacaccacctgggtaccctccagctggttcctttaccagtaacatctgtagtcagtatcctcaccagaatacagtgggtcctcgagtaatgccttttcatttaacactgttttaacaccgatgagaaaagaagacattcatttctggtctgagtggagtttgcacgttctccccatgtctgcgtggattttctcccacatcccaaagatgtgcatgttaggttaagtctaggttaagcggtgagtctccgtggtcccagcctgagtgagtgtggcggggtgagcgccctgcagtggggtggcgtcctgtccagggtgggtgccccactggtgctctgagctgctgggatagggtccggccacccaagatcctgaactggaataattgggtaaattgttattttacttgtttttactcatctttcttatctgtatgtgtggcttgcatttatttcagtgtttaatattagaagtgttttggtctctctttagaaatttggtgattgttttgtgaccaaaaatacgccgtaggaacgtcattcttgtttatgtgtcaattagcttgtggcaaaattggttttgttacacatcttttcaacttaaagacacagctttctaacacctgttgatgatgttgagtgaggacttactgtactgactctcacacaacccccgttctttccagactctccgtgttcctcatacacgtctggtgtgtgtgtttttatacagctttctcactgtggagggttgtgcgtccgccacagtgaagatactgaacggctccaggctggtctcgaactcctgacctcaagcagtctgcctgcctcggtctcccaacgtgctgagattatgggcgtgagccaccatgcctggccatgattcttttttttaatggttcttgcacatggtgggtgcacatattaacatgatcagtccattcagtccttagcccttttcccatttaccccagggatagtagttgacagcacttgtggctgtagcgttcaccccaagataactttgccatgaagcatctcatttttattattatttttgcattgctgtcatatat

SEQ ID NO: 22698 - DNA, 1147 bp, Homo sapiens
ggcgcagctccgacttcggacatggcgcacgctggcggtggcagcggtggcagcggtgccggcggccccgcgggccgggggctgagcggcgcccgctggggtcgctcgggctccgcaggccacgagaagctgccggtgcacgtagaagacgccctcacctatctggaccaggtgaagatccgctttggcagcgaccctgccacctacaacggcttcctggagatcatgaaggagttcaaaagccagagcatcgatactcctggagtcatcagacgtgtctcgcagctcttccacgagcaccctgacctcattgttggattcaacgcttttcttcccctcggatatagaatagacattcccaagaatggcaagttaaacatacagtcgcctctgacaagccaggagaattcgcacaaccacggggacggtgcagaggacttcaagcagcaggtgccgtataaagaggacaaaccccaggtgcccctggagtccgattccgtggaattcaacaacgccatcagctatgtgaataagattaaaacccgcttcctagaccacccagaaatctacaggtcattcctggagatcctgcacacgtaccagaaggagcagctgaacacgaggggccggccattccgaggcatgtctgaagaggaggtgttcaccgaggtggccaacctcttccggggccaggaggacctgctctcagagtttggacagttcctgcccgaagccaagcggtctctgttcacaggaaacgggccgtgcgagatgcacagcgtgcagaagaacgagcacgacaagaccccgatgctgacccgtcctcctgggctccccacccccgctccccaagtgtcacacaggcactttgtacacatcctggttttctaagaagggaacttgccatcaagattcctgtaccaggcccacggccgtctcgggcagagccacctgggccccgggtgcagccggagaccccgccgagcccctcctcccagtattcccatccccgcatgcttctagggagcgcctcttttccgttcttgaggaatttctgttctggggcttgtccttcctttgcagctgttttgaatgtagttttccttttctatttatttgcacattaaagttaataattgaatattga

SEQ ID NO: 22699 - DNA, 323 bp, Homo sapiens
ggccagattaggcagcctcggagggtggcagtgaacaccagctactcgggtttcctggtgattcccacatttgccccaggggtggcaggtgagggctgttgggccccatgggggcatttgttggggctctgtcatgccagagtttggcctgcgtgactttgcgctctccaggaggcatatggatgaggcggtgtgtctccgcaggtgaagtggagctggaggagtactacccggccttcctggacatggtgcggagcctgctggagggcagcatcgaccccacgcagtacgaggacaccctacgcgagatgttcaccatccat

SEQ ID NO: 22700 - DNA, 5036 bp, Homo sapiens
ggcgcagctccgacttcggacatggcgcacgctggcggtggcagcggtggcagcggtgccggcggccccgcgggccgggggctgagcggcgcccgctggggtcgctcgggctccgcaggccacgagaagctgccggtgcacgtagaagacgccctcacctatctggaccaggtgaagatccgctttggcagcgaccctgccacctacaacggcttcctggagatcatgaaggagttcaaaagccagagcatcgatactcctggagtcatcagacgtgtctcgcagctcttccacgagcaccctgacctcattgttggattcaacgcttttcttcccctcggatatagaatagacattcccaagaatggcaagttaaacatacagtcgcctctgacaagccaggagaattcgcacaaccacggggacggtgcagaggacttcaagcagcaggtgccgtataaagaggacaaaccccaggtgcccctggagtccgattccgtggaattcaacaacgccatcagctatgtgaataagattaaaacccgcttcctagaccacccagaaatctacaggtcattcctggagatcctgcacacgtaccagaaggagcagctgaacacgaggggccggccattccgaggcatgtctgaagaggaggtgttcaccgaggtggccaacctcttccggggccaggaggacctgctctcagagtttggacagttcctgcccgaagccaagcggtctctgttcacaggaaacgggccgtgcgagatgcacagcgtgcagaagaacgagcacgacaagaccccggagcacagcaggaagcgctcccggccctcgctcctccgccccgtgtctgcacccgccaagaaaaaaatgaaacttcgtggtaccaaagacctgtccatcgctgcagtggggaagtacgggactctgcaggaattttctttctttgacaaggtccgccgggtgctgaagagccaggaggtgtatgaaaacttcctccgctgcatcgcactcttcaaccaggagctggtgtctggctctgagctcctgcagctcgtcagcccatttctggggaaatttccagaactctttgcacagttcaagtccttcctgggggtaaaagagctgtccttcgcgccacccatgagcgacagatccggggacgggataagccgggaaattgattatgcatcctgcaagcgcataggatccagctaccgggcactccccaaaacctaccagcagcccaagtgcagtgggaggacagccatctgcaaggaggtactgaacgacacctgggtctccttcccttcctggtctgaggactccacgttcgtcagctccaagaagacaccgtacgaggagcagcttcaccgctgtgaggacgagcgcttcgagttagacgttgtcctggagacgaacctggccacaatccgtgtgttggaaagtgtgcagaagaagctgtctcggatggcgccggaagaccaggagaagttccggctggacgactccctgggaggcacgtcggaggtgatccagcgccgtgccatttatcgcatctatggcgacaaggccccggagatcatcgagagcctcaagaagaaccctgtcaccgctgtccccgttgtcctgaaaagactgaaggccaaggaagaggagtggcgggaggcccagcagggcttcaacaagatctggcgggagcagtatgagaaggcgtacctcaagtcccttgaccaccaggctgtgaacttcaagcagaacgacaccaaggccctgcgctccaagagcttgctcaacgagatcgagagcgtctacgacgagcaccaggagcagcactcggagggccgcagtgccccctctagcgagccgcacctcatctttgtgtacgaggaccggcagatcctggaggacgcagcagcgctcatcagctactacgtgaagcggcagccggccatccagaaggaggaccagggcaccatccaccagctgctgcaccagttcgtgcccagcctcttcttctctcagcagctggacctgggcgcctccgaggagtcagctgatgaggaccgggacagcccccaggggcagaccacagaccccagtgagcggaagaagccggcgccaggaccccacagtagccccccagaggagaagggggccttcggggatgccccggccactgagcagccacccctgccgcccccagccccgcacaagcccctggacgatgtctacagcctattttttgccaacaacaactggtacttcttcctgcgcctgcaccagaccctgtgctccaggctgctgaagatctaccgccaggcgcagaagcagcttctggagtatcggaccgagaaggagcgggagaagctgctgtgtgagggccgcagggagaagggcagcgaccccgccatggagctgcggctgaagcagcccagtgaagtggagctggaggagtactacccggccttcctggacatggtgcggagcctgctggagggcagcatcgaccccacgcagtacgaggacaccctacgcgagatgttcaccatccatgcctacgtgggcttcaccatggacaagctggtgcagaacattgcgcggcagctgcaccacctcgtgagcgatgacgtctgcctgaaggtggtggagctctacctgaacgagaagaagcggggtgccgctggtgggaacctgtcctcccgctgcgtccgcgctgctagggagaccagctaccagtggaaggctgagcgctgcatggccgacgagaactgcttcaaggtgatgttcctgcagcgcaaagggcaggtgatcatgaccatcgagctcctggacaccgaggaggcccagacggaggaccctgtggaggtccagcacctggctcggtacgtggagcagtatgtggggaccgagggcgcgtccagctcgcccactgagggcttcctcctgaaacctgtgttcctgcagaggaacctcaagaagttccgccgccggtggcagagcgagcaggcgcgggccctgcgcggtgaggccaggagctcctggaagcggctggtgggcgtggagagcgcctgcgacgtggactgccgcttcaagctcagcactcacaagatggtgttcatcgtgaactccgaggactacatgtaccgtcgcgggaccctctgccgggccaagcaggtgcagcccctggtcctgctccgccaccaccagcactttgaggagtggcacagccgctggctggaggacaatgtgacggtggaggcggctagcctggtgcaggactggctgatgggtgaggaggacgaggacatggtaccctgcaagacgctgtgtgagacagtgcacgtgcacggcctgcccgtgacccgctaccgcgtgcagtacagccgccgcccggcctcgccctgacccgccctcatgggcaccgggcaggcgcctcacagagcacagacgtgccctcggccttggtcgtgtcggggccgttttcttgaacgacgtgagaggcatctcccagcccctctgctgccggacagcgcactccagggcaggacgccgcccccgtggctcccggtctcctgtgggcctgctgtgtgccaaacctgagctacctgcacccgagccctggggctcagccccaccacaggggcgggtggacgtgctggccgaggaacaagcaatcatgtttgcgtccccgtccgtcacatgtgccaaatccctggcaggcagatggctcctgccccatattcttgccgtgtcttggaaaagtcacaggtgacagccctcctgaggcccacactttggagggggtccatgtccaagagaccctgacaaggaaggagttgagccctgggtaggcttgcttgaaaagtgagtccttccagaatattctcagagctgccagaaacatcatctgagggtttgggcatcagctctgcctggctggtgttcaggccctcagtcactttggaagtgagaagaacccttcagccaaacctttgggatcccattttgaagtccagagctggagcaggcgggcagtgccctgggagaccccgctctggataagacacccaaccccaactccagcagctggactctgggcccacaaggggagggaccccagccagtattccctcagagccggcacgaccctgctgtggggcggcgggcccagtcgtgttcctgcagtgggcaccctaggcgtatgtgtatacacgcacagatatttattcctttcgcttttagtggttgttatttctgtagcagccaagtcctgcggctccctggggctgagatctccctttgtggaactccgagagccgccctgacagtcccagccgccacccaaggagccccatccgcccacccaccctgggacccacgcggccactccagggatcattgttgtccttttgtgaggggctgaggcgactgtcccatggaggcatccaaggctttctgtgccaagaatcccaagtgactggggctggggaccacttctccaggcctctctccccgaccatgagagcccctggccctggcccctgcacaccagtaggcccagaataaccgccacccttgccatcctgcaacagctggactcaagtttccaggaagtggagatgtgtttctagaagtttcctgtggaacctggaggctcctgacgcctttgactccaggctgggcgattccgatgctgacccgtcctcctgggctccccacccccgctccccaagtgtcacacaggcactttgtacacatcctggttttctaagaagggaacttgccatcaagattcctgtaccaggcccacggccgtctcgggcagagccacctgggccccgggtgcagccggagaccccgccgagcccctcctcccagtattcccatccccgcatgcttctagggagcgcctcttttccgttcttgaggaatttctgttctggggcttgtccttcctttgcagctgttttgaatgtagttttccttttctatttatttgcacattaaagttaataattgaatattga

SEQ ID NO: 22701 - DNA, 6949 bp, Homo sapiens
ggcgcagctccgacttcggacatggcgcacgctggcggtggcagcggtggcagcggtgccggcggccccgcgggccgggggctgagcggcgcccgctggggtcgctcgggctccgcaggccacgagaagctgccggtgcacgtagaagacgccctcacctatctggaccaggtgaagatccgctttggcagcgaccctgccacctacaacggcttcctggagatcatgaaggagttcaaaagccagagcatcgatactcctggagtcatcagacgtgtctcgcagctcttccacgagcaccctgacctcattgttggattcaacgcttttcttcccctcggatatagaatagacattcccaagaatggcaagttaaacatacagtcgcctctgacaagccaggagaattcgcacaaccacggggacggtgcagaggacttcaagcagcaggtgccgtataaagaggacaaaccccaggtgcccctggagtccgattccgtggaattcaacaacgccatcagctatgtgaataagattaaaacccgcttcctagaccacccagaaatctacaggtcattcctggagatcctgcacacgtaccagaaggagcagctgaacacgaggggccggccattccgaggcatgtctgaagaggaggtgttcaccgaggtggccaacctcttccggggccaggaggacctgctctcagagtttggacagttcctgcccgaagccaagcggtctctgttcacaggaaacgggccgtgcgagatgcacagcgtgcagaagaacgagcacgacaagaccccggagcacagcaggaagcgctcccggccctcgctcctccgccccgtgtctgcacccgccaagaaaaaaatgaaacttcgtggtaccaaagacctgtccatcgctgcacagttcgtgcccagcctcttcttctctcagcagctggacctgggcgcctccgaggagtcagctgatgaggaccgggacagcccccaggggcagaccacagaccccagtgagcggaagaagccggcgccaggaccccacagtagccccccagaggagaagggggccttcggggatgccccggccactgagcagccacccctgccgcccccagccccgcacaagcccctggacgatgtctacagcctattttttgccaacaacaactggtacttcttcctgcgcctgcaccagaccctgtgctccaggctgctgaagatctaccgccaggcgcagaagcagcttctggagtatcggaccgagaaggagcgggagaagctgctgtgtgagggccgcagggagaagggcagcgaccccgccatggagctgcggctgaagcagcccagtgaagtggagctggaggagtactacccggccttcctggacatggtgcggagcctgctggagggcagcatcgaccccacgcagtacgaggacaccctacgcgagatgttcaccatccatgcctacgtgggcttcaccatggacaagctggtgcagaacattgcgcggcagctgcaccacctcgtgagcgatgacgtctgcctgaaggtggtggagctctacctgaacgagaagaagcggggtgccgctggtgggaacctgtcctcccgctgcgtccgcgctgctagggagaccagctaccagtggaaggctgagcgctgcatggccgacgagaactgcttcaaggtgatgttcctgcagcgcaaagggcaggtgatcatgaccatcgagctcctggacaccgaggaggcccagacggaggaccctgtggaggtccagcacctggctcggtacgtggagcagtatgtggggaccgagggcgcgtccagctcgcccactgagggcttcctcctgaaacctgtgttcctgcagaggaacctcaagaagttccgccgccggtggcagagcgagcaggcgcgggccctgcgcggtgaggccaggagctcctggaagcggctggtgggcgtggagagcgcctgcgacgtggactgccgcttcaagctcagcactcacaagatggtgttcatcgtgaactccgaggactacatgtaccgtcgcgggaccctctgccgggccaagcaggtgcagcccctggtcctgctccgccaccaccagcactttgaggagtggcacagccgctggctggaggacaatgtgacggtggaggcggctagcctggtgcaggactggctgatgggtgaggaggacgaggacatggtaccctgcaagacgctgtgtgagacagtgcacgtgcacggcctgcccgtgacccgctaccgcgtgcagtacagccgccgcccggcctcgccctgacccgccctcatgggcaccgggcaggcgcctcacagagcacagacgtgccctcggccttggtcgtgtcggggccgttttcttgaacgacgtgagaggcatctcccagcccctctgctgccggacagcgcactccagggcaggacgccgcccccgtggctcccggtctcctgtgggcctgctgtgtgccaaacctgagctacctgcacccgagccctggggctcagccccaccacaggggcgggtggacgtgctggccgaggaacaagcaatcatgtttgcgtccccgtccgtcacatgtgccaaatccctggcaggcagatggctcctgccccatattcttgccgtgtcttggaaaagtcacaggtgacagccctcctgaggcccacactttggagggggtccatgtccaagagaccctgacaaggaaggagttgagccctgggtaggcttgcttgaaaagtgagtccttccagaatattctcagagctgccagaaacatcatctgagggtttgggcatcagctctgcctggctggtgttcaggccctcagtcactttggaagtgagaagaacccttcagccaaacctttgggatcccattttgaagtccagagctggagcaggcgggcagtgccctgggagaccccgctctggataagacacccaaccccaactccagcagctggactctgggcccacaaggggagggaccccagccagtattccctcagagccggcacgaccctgctgtggggcggcgggcccagtcgtgttcctgcagtgggcaccctaggcgtatgtgtatacacgcacagatatttattcctttcgcttttagtggttgttatttctgtagcagccaagtcctgcggctccctggggctgagatctccctttgtggaactccgagagccgccctgacagtcccagccgccacccaaggagccccatccgcccacccaccctgggacccacgcggccactccagggatcattgttgtccttttgtgaggggctgaggcgactgtcccatggaggcatccaaggctttctgtgccaagaatcccaagtgactggggctggggaccacttctccaggcctctctccccgaccatgagagcccctggccctggcccctgcacaccagtaggcccagaataaccgccacccttgccatcctgcaacagctggactcaagtttccaggaagtggagatgtgtttctagaagtttcctgtggaacctggaggctcctgacgcctttgactccaggctgggcgattccgatgctgacccgtcctcctgggctccccacccccgctccccaagtgtcacacaggcactttgtacacatcctggttttctaagaagggaacttgccatcaagattcctgtaccaggcccacggccgtctcgggcagagccacctgggccccgggtgcagccggagaccccgccgagcccctcctcccagtattcccatccccgcatgcttctagggagcgcctcttttccgttcttgaggaatttctgttctggggcttgtccttcctttgcagctgttttgaatgtagttttccttttctatttatttgcacattaaagttaataattgaatattgaaaaaaaaaaaaaaaaaactcgagactagttctccccccatccctcaaattggcagcaccccagagttacccggtgacctggccaggctctgggcgtgaggccttcaccaatccaagggctattagtacagacgtgtaaatccttccaccccgacccgcacacacacccacactgctgccctggcgggggccatgggggtgatgaatgaccctccaacagccccacatgggttgtttctgtttctttggcttttctcgctccgcagtggagggtttactaggatttaagcttttgagtgcattgagaaccaagacagggcctggctccaactctgtgggccagaggtgggggactgctaggtcgagtctgcagcttcgccagtttcttggttgggacactcctctggcagccccagcaccaccacaaccccttgcagtgtgccccagtcccctggattcgctggactgcaaaaaggagcaccagggaaagctcagcaaaggctcaggaggcctcccgggtcctcgggagatgaagcatccgtgcctaggaaaaggggacagagggcaaggagagaagtgagagctacaattccagcattggagaagcgaggggcggggcgtcaacggcactgcttcaggacgcgcttgctgaaacgactccaacagctagttcacagcccagctttgtacgttggttaccatagctactgctgtcactgtagctgctcccgtagggtcgttgattcctgaacgtatcacatctcacctgcccccttcctcgtgggacgtgtcaagttgactttaaagcctaaggtggcttgtggggactgcaccagaaagtgtctaaccttgtgttccccgaaatcctttctctgacttaggaaccagcgccccctgctggagaagttttttcattttgttagccgacttctggtagcttagcaaagagaccagctgactgtctctcggcccagcccaccacgccgagtagcttgtgtggatgcagtcctgtgagggtgtgcataaccgttcccaggtgtacgcacgcgcgcgcgcgcgcacagacacacacacacacacacacacacacacacacacagtaaccacgggtaggcaccaggggctttgtacattcaggagctgcagagaggaaaggtctcccatgtaccagagaaggaaaagtctgatcccgaaacagcttgaacgaaaggtggttaacacgtgaccaatccccatggcagacagcgggctggtgaacaggaagagcacagaatctctgtggggcgatgctgcagcggctgaaaccacgtcaagtcccccagagcccggcattctatgtaagcatccacctgtgacgccgtggagcaggatcttcattcatctcaccagagcaacagcccagtcctgaggatgggagggacgtgacttagccttgggattccacgctcgccgccctcccttggccgccctactccccagtttcctggcgatgagccatttattgtgtctcacaccagcctcatttccaactccgacttcctacttagaatgtggcagtggctttgtgagtgagaatcctgatgagttttccagtggcctctgcagaagctggcccccttctaagggcatagctaacccccttcccactcctgagtcactgaattcgaggagggtggggcagggaaagggctggcccccctgctgaaatcttgattctgcatttgaggaaggtcagggtgccgctgggggagcagggagcggggagggaggaagaggggaatgcacatcttttgcgccactattaaggcacctgtcaccttacatctcaatctggaatcaaagtgccctgggttgagaagcagacctgggctctggtcacactttggtcactcattagctctaggaccagtcactaatctctgagactccattttctccagggaaacgaggcttgcccagatagactaacaaccctttagtgctccaagaagtgagaatttccgaaaaagatctgccggcccagagcactccctcttgccctaatcctggcagggtctggatgtatttacccaactctgatcttgcgtgcagggatgcttgctgatggatgaaagaccacaataaaacaagattagcagcaaaacaattttaattgtcagtgaaaagcaaacatgtttgtcagactctcctgtggagtcatttcaaatggtaactcttctcttgtaccaggaagcagctgtaggtggggtaatgggatctgtctcctggtgcagaggggcagcttatggcggcagcagcttcaacaagcccgtcccacggccagccctaactgggccaagtgcaagctcctgatgagctgctgggcctggcagcgttccccacttcctagtgccttgctcccctggaattccacagccaatcaaccacagcagccgtgtcctccttgccagaaataacatcattcgtacgtcctgcctttgtaaaaatcaagacccagttaaccatcacccacttcttgcccctgattgatggggtccctgagtacaagcgtcctgtgcaatcccctccctcctaccgctttcctagctaagccctgctagccccacaaatcagaatctgggtttggggtgctggagagatggtgggccccagctcttccccacatagcccacgctgctcagggcacggtctccaaccaggctcgagattgcctgcctgcccgctgcagccgcagggccccaccctgtggaaaaggaagcttcccccactcaactgcactgtccttttctgctgtctagtctgtgctaagggacactacttgtacacttttcaaacggtgccctaaattggaagagaaggaggggccaggaacacagccctctccgccgtctttctccacctccacttcaccactcctgctctagacttcttgtcttgcatctttgataacttggagtcataaccgagtggatgtcggaataaatgagagatttgaagtag

SEQ ID NO: 22702 - DNA, 6968 bp, Homo sapiens
ggtggttctggaaccaatctcccaggataccaagggagtgtccacttgaccaaagtcatgtttttccttaaaaactttatgcaccttcccatttgtataaggcagttggtattatgtatcaggatggtattatgtatcttggtactttctacactggctaacagtaaatcttggctcctggggcatgcagcgtcattcacggcatttcctcttggtgcaggtactgaacgacacctgggtctccttcccttcctggtctgaggactccacgttcgtcagctccaagaagacaccgtacgaggagcagcttcaccgctgtgaggacgagcgcttcgagttagacgttgtcctggagacgaacctggccacaatccgtgtgttggaaagtgtgcagaagaagctgtctcggatggcgccggaagaccaggagaagttccggctggacgactccctgggaggcacgtcggaggtgatccagcgccgtgccatttatcgcatctatggcgacaaggccccggagatcatcgagagcctcaagaagaaccctgtcaccgctgtccccgttgtcctgaaaagactgaaggccaaggaagaggagtggcgggaggcccagcagggcttcaacaagatctggcgggagcagtatgagaaggcgtacctcaagtcccttgaccaccaggctgtgaacttcaagcagaacgacaccaaggccctgcgctccaagagcttgctcaacgagatcgagagcgtctacgacgagcaccaggagcagcactcggagggccgcagtgccccctctagcgagccgcacctcatctttgtgtacgaggaccggcagatcctggaggacgcagcagcgctcatcagctactacgtgaagcggcagccggccatccagaaggaggaccagggcaccatccaccagctgctgcaccagttcgtgcccagcctcttcttctctcagcagctggacctgggcgcctccgaggagtcagctgatgaggaccgggacagcccccaggggcagaccacagaccccagtgagcggaagaagccggcgccaggaccccacagtagccccccagaggagaagggggccttcggggatgccccggccactgagcagccacccctgccgcccccagccccgcacaagcccctggacgatgtctacagcctattttttgccaacaacaactggtacttcttcctgcgcctgcaccagaccctgtgctccaggctgctgaagatctaccgccaggcgcagaagcagcttctggagtatcggaccgagaaggagcgggagaagctgctgtgtgagggccgcagggagaagggcagcgaccccgccatggagctgcggctgaagcagcccagtgaagtggagctggaggagtactacccggccttcctggacatggtgcggagcctgctggagggcagcatcgaccccacgcagtacgaggacaccctacgcgagatgttcaccatccatgcctacgtgggcttcaccatggacaagctggtgcagaacattgcgcggcagctgcaccacctcgtgagcgatgacgtctgcctgaaggtggtggagctctacctgaacgagaagaagcggggtgccgctggtgggaacctgtcctcccgctgcgtccgcgctgctagggagaccagctaccagtggaaggctgagcgctgcatggccgacgagaactgcttcaaggtgatgttcctgcagcgcaaagggcaggtgatcatgaccatcgagctcctggacaccgaggaggcccagacggaggaccctgtggaggtccagcacctggctcggtacgtggagcagtatgtggggaccgagggcgcgtccagctcgcccactgagggcttcctcctgaaacctgtgttcctgcagaggaacctcaagaagttccgccgccggtggcagagcgagcaggcgcgggccctgcgcggtgaggccaggagctcctggaagcggctggtgggcgtggagagcgcctgcgacgtggactgccgcttcaagctcagcactcacaagatggtgttcatcgtgaactccgaggactacatgtaccgtcgcgggaccctctgccgggccaagcaggtgcagcccctggtcctgctccgccaccaccagcactttgaggagtggcacagccgctggctggaggacaatgtgacggtggaggcggctagcctggtgcaggactggctgatgggtgaggaggacgaggacatggtaccctgcaagacgctgtgtgagacagtgcacgtgcacggcctgcccgtgacccgctaccgcgtgcagtacagccgccgcccggcctcgccctgacccgccctcatgggcaccgggcaggcgcctcacagagcacagacgtgccctcggccttggtcgtgtcggggccgttttcttgaacgacgtgagaggcatctcccagcccctctgctgccggacagcgcactccagggcaggacgccgcccccgtggctcccggtctcctgtgggcctgctgtgtgccaaacctgagctacctgcacccgagccctggggctcagccccaccacaggggcgggtggacgtgctggccgaggaacaagcaatcatgtttgcgtccccgtccgtcacatgtgccaaatccctggcaggcagatggctcctgccccatattcttgccgtgtcttggaaaagtcacaggtgacagccctcctgaggcccacactttggagggggtccatgtccaagagaccctgacaaggaaggagttgagccctgggtaggcttgcttgaaaagtgagtccttccagaatattctcagagctgccagaaacatcatctgagggtttgggcatcagctctgcctggctggtgttcaggccctcagtcactttggaagtgagaagaacccttcagccaaacctttgggatcccattttgaagtccagagctggagcaggcgggcagtgccctgggagaccccgctctggataagacacccaaccccaactccagcagctggactctgggcccacaaggggagggaccccagccagtattccctcagagccggcacgaccctgctgtggggcggcgggcccagtcgtgttcctgcagtgggcaccctaggcgtatgtgtatacacgcacagatatttattcctttcgcttttagtggttgttatttctgtagcagccaagtcctgcggctccctggggctgagatctccctttgtggaactccgagagccgccctgacagtcccagccgccacccaaggagccccatccgcccacccaccctgggacccacgcggccactccagggatcattgttgtccttttgtgaggggctgaggcgactgtcccatggaggcatccaaggctttctgtgccaagaatcccaagtgactggggctggggaccacttctccaggcctctctccccgaccatgagagcccctggccctggcccctgcacaccagtaggcccagaataaccgccacccttgccatcctgcaacagctggactcaagtttccaggaagtggagatgtgtttctagaagtttcctgtggaacctggaggctcctgacgcctttgactccaggctgggcgattccgatgctgacccgtcctcctgggctccccacccccgctccccaagtgtcacacaggcactttgtacacatcctggttttctaagaagggaacttgccatcaagattcctgtaccaggcccacggccgtctcgggcagagccacctgggccccgggtgcagccggagaccccgccgagcccctcctcccagtattcccatccccgcatgcttctagggagcgcctcttttccgttcttgaggaatttctgttctggggcttgtccttcctttgcagctgttttgaatgtagttttccttttctatttatttgcacattaaagttaataattgaatattgaaaaaaaaaaaaaaaaaactcgagactagttctccccccatccctcaaattggcagcaccccagagttacccggtgacctggccaggctctgggcgtgaggccttcaccaatccaagggctattagtacagacgtgtaaatccttccaccccgacccgcacacacacccacactgctgccctggcgggggccatgggggtgatgaatgaccctccaacagccccacatgggttgtttctgtttctttggcttttctcgctccgcagtggagggtttactaggatttaagcttttgagtgcattgagaaccaagacagggcctggctccaactctgtgggccagaggtgggggactgctaggtcgagtctgcagcttcgccagtttcttggttgggacactcctctggcagccccagcaccaccacaaccccttgcagtgtgccccagtcccctggattcgctggactgcaaaaaggagcaccagggaaagctcagcaaaggctcaggaggcctcccgggtcctcgggagatgaagcatccgtgcctaggaaaaggggacagagggcaaggagagaagtgagagctacaattccagcattggagaagcgaggggcggggcgtcaacggcactgcttcaggacgcgcttgctgaaacgactccaacagctagttcacagcccagctttgtacgttggttaccatagctactgctgtcactgtagctgctcccgtagggtcgttgattcctgaacgtatcacatctcacctgcccccttcctcgtgggacgtgtcaagttgactttaaagcctaaggtggcttgtggggactgcaccagaaagtgtctaaccttgtgttccccgaaatcctttctctgacttaggaaccagcgccccctgctggagaagttttttcattttgttagccgacttctggtagcttagcaaagagaccagctgactgtctctcggcccagcccaccacgccgagtagcttgtgtggatgcagtcctgtgagggtgtgcataaccgttcccaggtgtacgcacgcgcgcgcgcgcgcacagacacacacacacacacacacacacacacacacacagtaaccacgggtaggcaccaggggctttgtacattcaggagctgcagagaggaaaggtctcccatgtaccagagaaggaaaagtctgatcccgaaacagcttgaacgaaaggtggttaacacgtgaccaatccccatggcagacagcgggctggtgaacaggaagagcacagaatctctgtggggcgatgctgcagcggctgaaaccacgtcaagtcccccagagcccggcattctatgtaagcatccacctgtgacgccgtggagcaggatcttcattcatctcaccagagcaacagcccagtcctgaggatgggagggacgtgacttagccttgggattccacgctcgccgccctcccttggccgccctactccccagtttcctggcgatgagccatttattgtgtctcacaccagcctcatttccaactccgacttcctacttagaatgtggcagtggctttgtgagtgagaatcctgatgagttttccagtggcctctgcagaagctggcccccttctaagggcatagctaacccccttcccactcctgagtcactgaattcgaggagggtggggcagggaaagggctggcccccctgctgaaatcttgattctgcatttgaggaaggtcagggtgccgctgggggagcagggagcggggagggaggaagaggggaatgcacatcttttgcgccactattaaggcacctgtcaccttacatctcaatctggaatcaaagtgccctgggttgagaagcagacctgggctctggtcacactttggtcactcattagctctaggaccagtcactaatctctgagactccattttctccagggaaacgaggcttgcccagatagactaacaaccctttagtgctccaagaagtgagaatttccgaaaaagatctgccggcccagagcactccctcttgccctaatcctggcagggtctggatgtatttacccaactctgatcttgcgtgcagggatgcttgctgatggatgaaagaccacaataaaacaagattagcagcaaaacaattttaattgtcagtgaaaagcaaacatgtttgtcagactctcctgtggagtcatttcaaatggtaactcttctcttgtaccaggaagcagctgtaggtggggtaatgggatctgtctcctggtgcagaggggcagcttatggcggcagcagcttcaacaagcccgtcccacggccagccctaactgggccaagtgcaagctcctgatgagctgctgggcctggcagcgttccccacttcctagtgccttgctcccctggaattccacagccaatcaaccacagcagccgtgtcctccttgccagaaataacatcattcgtacgtcctgcctttgtaaaaatcaagacccagttaaccatcacccacttcttgcccctgattgatggggtccctgagtacaagcgtcctgtgcaatcccctccctcctaccgctttcctagctaagccctgctagccccacaaatcagaatctgggtttggggtgctggagagatggtgggccccagctcttccccacatagcccacgctgctcagggcacggtctccaaccaggctcgagattgcctgcctgcccgctgcagccgcagggccccaccctgtggaaaaggaagcttcccccactcaactgcactgtccttttctgctgtctagtctgtgctaagggacactacttgtacacttttcaaacggtgccctaaattggaagagaaggaggggccaggaacacagccctctccgccgtctttctccacctccacttcaccactcctgctctagacttcttgtcttgcatctttgataacttggagtcataaccgagtggatgtcggaataaatgagagatttgaagtag

SEQ ID NO: 22703 - DNA, 5552 bp, Homo sapiens
gaggagccacctgggcccagctcccagtcacaatttttgcggggacagatgtttcctgctcacctcccgcatcctggtgacagtgaggcattgacccgtgtgtgtccccagggtggtcattggggcctgcagctcccggcacctgccaacaggtccagtgtgtgtgcacattactcagctaggccaaccccattcatttcctggggctaccaccacaatgaccacaaaccacgtggcttcaaacaacagaagtctattccctcaacgtcctggaggtcagcagtccacaaccacagtgtgggccgggcggtgctcctgccaaaggctctggggcggatccttcctgctcttccagcttccgggggcttctggcgctcctcagctgtggcctggttgtcacctggctcggtacgtggagcagtatgtggggaccgagggcgcgtccagctcgcccactgagggcttcctcctgaaacctgtgttcctgcagaggaacctcaagaagttccgccgccggtggcagagcgagcaggcgcgggccctgcgcggtgaggccaggagctcctggaagcggctggtgggcgtggagagcgcctgcgacgtggactgccgcttcaagctcagcactcacaagatggtgttcatcgtgaactccgaggactacatgtaccgtcgcgggaccctctgccgggccaagcaggtgcagcccctggtcctgctccgccaccaccagcactttgaggagtggcacagccgctggctggaggacaatgtgacggtggaggcggctagcctggtgcaggactggctgatgggtgaggaggacgaggacatggtaccctgcaagacgctgtgtgagacagtgcacgtgcacggcctgcccgtgacccgctaccgcgtgcagtacagccgccgcccggcctcgccctgacccgccctcatgggcaccgggcaggcgcctcacagagcacagacgtgccctcggccttggtcgtgtcggggccgttttcttgaacgacgtgagaggcatctcccagcccctctgctgccggacagcgcactccagggcaggacgccgcccccgtggctcccggtctcctgtgggcctgctgtgtgccaaacctgagctacctgcacccgagccctggggctcagccccaccacaggggcgggtggacgtgctggccgaggaacaagcaatcatgtttgcgtccccgtccgtcacatgtgccaaatccctggcaggcagatggctcctgccccatattcttgccgtgtcttggaaaagtcacaggtgacagccctcctgaggcccacactttggagggggtccatgtccaagagaccctgacaaggaaggagttgagccctgggtaggcttgcttgaaaagtgagtccttccagaatattctcagagctgccagaaacatcatctgagggtttgggcatcagctctgcctggctggtgttcaggccctcagtcactttggaagtgagaagaacccttcagccaaacctttgggatcccattttgaagtccagagctggagcaggcgggcagtgccctgggagaccccgctctggataagacacccaaccccaactccagcagctggactctgggcccacaaggggagggaccccagccagtattccctcagagccggcacgaccctgctgtggggcggcgggcccagtcgtgttcctgcagtgggcaccctaggcgtatgtgtatacacgcacagatatttattcctttcgcttttagtggttgttatttctgtagcagccaagtcctgcggctccctggggctgagatctccctttgtggaactccgagagccgccctgacagtcccagccgccacccaaggagccccatccgcccacccaccctgggacccacgcggccactccagggatcattgttgtccttttgtgaggggctgaggcgactgtcccatggaggcatccaaggctttctgtgccaagaatcccaagtgactggggctggggaccacttctccaggcctctctccccgaccatgagagcccctggccctggcccctgcacaccagtaggcccagaataaccgccacccttgccatcctgcaacagctggactcaagtttccaggaagtggagatgtgtttctagaagtttcctgtggaacctggaggctcctgacgcctttgactccaggctgggcgattccgatgctgacccgtcctcctgggctccccacccccgctccccaagtgtcacacaggcactttgtacacatcctggttttctaagaagggaacttgccatcaagattcctgtaccaggcccacggccgtctcgggcagagccacctgggccccgggtgcagccggagaccccgccgagcccctcctcccagtattcccatccccgcatgcttctagggagcgcctcttttccgttcttgaggaatttctgttctggggcttgtccttcctttgcagctgttttgaatgtagttttccttttctatttatttgcacattaaagttaataattgaatattgaaaaaaaaaaaaaaaaaactcgagactagttctccccccatccctcaaattggcagcaccccagagttacccggtgacctggccaggctctgggcgtgaggccttcaccaatccaagggctattagtacagacgtgtaaatccttccaccccgacccgcacacacacccacactgctgccctggcgggggccatgggggtgatgaatgaccctccaacagccccacatgggttgtttctgtttctttggcttttctcgctccgcagtggagggtttactaggatttaagcttttgagtgcattgagaaccaagacagggcctggctccaactctgtgggccagaggtgggggactgctaggtcgagtctgcagcttcgccagtttcttggttgggacactcctctggcagccccagcaccaccacaaccccttgcagtgtgccccagtcccctggattcgctggactgcaaaaaggagcaccagggaaagctcagcaaaggctcaggaggcctcccgggtcctcgggagatgaagcatccgtgcctaggaaaaggggacagagggcaaggagagaagtgagagctacaattccagcattggagaagcgaggggcggggcgtcaacggcactgcttcaggacgcgcttgctgaaacgactccaacagctagttcacagcccagctttgtacgttggttaccatagctactgctgtcactgtagctgctcccgtagggtcgttgattcctgaacgtatcacatctcacctgcccccttcctcgtgggacgtgtcaagttgactttaaagcctaaggtggcttgtggggactgcaccagaaagtgtctaaccttgtgttccccgaaatcctttctctgacttaggaaccagcgccccctgctggagaagttttttcattttgttagccgacttctggtagcttagcaaagagaccagctgactgtctctcggcccagcccaccacgccgagtagcttgtgtggatgcagtcctgtgagggtgtgcataaccgttcccaggtgtacgcacgcgcgcgcgcgcgcacagacacacacacacacacacacacacacacacacacagtaaccacgggtaggcaccaggggctttgtacattcaggagctgcagagaggaaaggtctcccatgtaccagagaaggaaaagtctgatcccgaaacagcttgaacgaaaggtggttaacacgtgaccaatccccatggcagacagcgggctggtgaacaggaagagcacagaatctctgtggggcgatgctgcagcggctgaaaccacgtcaagtcccccagagcccggcattctatgtaagcatccacctgtgacgccgtggagcaggatcttcattcatctcaccagagcaacagcccagtcctgaggatgggagggacgtgacttagccttgggattccacgctcgccgccctcccttggccgccctactccccagtttcctggcgatgagccatttattgtgtctcacaccagcctcatttccaactccgacttcctacttagaatgtggcagtggctttgtgagtgagaatcctgatgagttttccagtggcctctgcagaagctggcccccttctaagggcatagctaacccccttcccactcctgagtcactgaattcgaggagggtggggcagggaaagggctggcccccctgctgaaatcttgattctgcatttgaggaaggtcagggtgccgctgggggagcagggagcggggagggaggaagaggggaatgcacatcttttgcgccactattaaggcacctgtcaccttacatctcaatctggaatcaaagtgccctgggttgagaagcagacctgggctctggtcacactttggtcactcattagctctaggaccagtcactaatctctgagactccattttctccagggaaacgaggcttgcccagatagactaacaaccctttagtgctccaagaagtgagaatttccgaaaaagatctgccggcccagagcactccctcttgccctaatcctggcagggtctggatgtatttacccaactctgatcttgcgtgcagggatgcttgctgatggatgaaagaccacaataaaacaagattagcagcaaaacaattttaattgtcagtgaaaagcaaacatgtttgtcagactctcctgtggagtcatttcaaatggtaactcttctcttgtaccaggaagcagctgtaggtggggtaatgggatctgtctcctggtgcagaggggcagcttatggcggcagcagcttcaacaagcccgtcccacggccagccctaactgggccaagtgcaagctcctgatgagctgctgggcctggcagcgttccccacttcctagtgccttgctcccctggaattccacagccaatcaaccacagcagccgtgtcctccttgccagaaataacatcattcgtacgtcctgcctttgtaaaaatcaagacccagttaaccatcacccacttcttgcccctgattgatggggtccctgagtacaagcgtcctgtgcaatcccctccctcctaccgctttcctagctaagccctgctagccccacaaatcagaatctgggtttggggtgctggagagatggtgggccccagctcttccccacatagcccacgctgctcagggcacggtctccaaccaggctcgagattgcctgcctgcccgctgcagccgcagggccccaccctgtggaaaaggaagcttcccccactcaactgcactgtccttttctgctgtctagtctgtgctaagggacactacttgtacacttttcaaacggtgccctaaattggaagagaaggaggggccaggaacacagccctctccgccgtctttctccacctccacttcaccactcctgctctagacttcttgtcttgcatctttgataacttggagtcataaccgagtggatgtcggaataaatgagagatttgaagtag

SEQ ID NO: 22704 - DNA, 2351 bp, Homo sapiens
ggcgcagctccgacttcggacatggcgcacgctggcggtggcagcggtggcagcggtgccggcggccccgcgggccgggggctgagcggcgcccgctggggtcgctcgggctccgcaggccacgagaagctgccggtgcacgtagaagacgccctcacctatctggaccaggtgaagatccgctttggcagcgaccctgccacctacaacggcttcctggagatcatgaaggagttcaaaagccagagcatcgatactcctggagtcatcagacgtgtctcgcagctcttccacgagcaccctgacctcattgttggattcaacgcttttcttcccctcggatatagaatagacattcccaagaatggcaagttaaacatacagtcgcctctgacaagccaggagaattcgcacaaccacggggacggtgcagaggacttcaagcagcaggtgccgtataaagaggacaaaccccaggtgcccctggagtccgattccgtggaattcaacaacgccatcagctatgtgaataagattaaaacccgcttcctagaccacccagaaatctacaggtcattcctggagatcctgcacacgtaccagaaggagcagctgaacacgaggggccggccattccgaggcatgtctgaagaggaggtgttcaccgaggtggccaacctcttccggggccaggaggacctgctctcagagtttggacagttcctgcccgaagccaagcggtctctgttcacaggaaacgggccgtgcgagatgcacagcgtgcagaagaacgagcacgacaagaccccggagcacagcaggaagcgctcccggccctcgctcctccgccccgtgtctgcacccgccaagaaaaaaatgaaacttcgtggtaccaaagacctgtccatcgctgcagtggggaagtacgggactctgcaggaattttctttctttgacaaggtccgccgggtgctgaagagccaggaggtgtatgaaaacttcctccgctgcatcgcactcttcaaccaggagctggtgtctggctctgagctcctgcagctcgtcagcccatttctggggtgagcagctgacttcccagggctccctaggggggttctgttcctgtcaactccatctacttggtttttagttactgtttttgagcaatgattgtgcttttctaaaatcctgtttattaattgacgtgattgatataattattgattcccatgcatttgtaaggagcaatacaccacctgggtaccctccagctggttcctttaccagtaacatctgtagtcagtatcctcaccagaatacagtgggtcctcgagtaatgccttttcatttaacactgttttaacaccgatgagaaaagaagacattcatttctggtctgagtggagtttgcacgttctccccatgtctgcgtggattttctcccacatcccaaagatgtgcatgttaggttaagtctaggttaagcggtgagtctccgtggtcccagcctgagtgagtgtggcggggtgagcgccctgcagtggggtggcgtcctgtccagggtgggtgccccactggtgctctgagctgctgggatagggtccggccacccaagatcctgaactggaataattgggtaaattgttattttacttgtttttactcatctttcttatctgtatgtgtggcttgcatttatttcagtgtttaatattagaagtgttttggtctctctttagaaatttggtgattgttttgtgaccaaaaatacgccgtaggaacgtcattcttgtttatgtgtcaattagcttgtggcaaaattggttttgttacacatcttttcaacttaaagacacagctttctaacacctgttgatgatgttgagtgaggacttactgtactgactctcacacaacccccgttctttccagactctccgtgttcctcatacacgtctggtgtgtgtgtttttatacagctttctcactgtggagggttgtgcgtccgccacagtgaagatactgaacggctccaggactgtcaagttctggccttgaccttttatctccatcccaaaaccctgcctcaagcagtctgcctgcctcggtctcccaacgtgctgagattatgggcgtgagccaccatgcctggccatgattcttttttttaatggttcttgcacatggtgggtgcacatattaacatgatcagtccattcagtccttagcccttttcccatttaccccagggatagtagttgacagcacttgtggctgtagcgttcaccccaagataactttgccatgaagcatctcatttttattattatttttgcattgctgtcatatat

SEQ ID NO: 22705 - DNA, 1690 bp, Homo sapiens
ggcgcagctccgacttcggacatggcgcacgctggcggtggcagcggtggcagcggtgccggcggccccgcgggccgggggctgagcggcgcccgctggggtcgctcgggctccgcaggccacgagaagctgccggtgcacgtagaagacgccctcacctatctggaccaggtgaagatccgctttggcagcgaccctgccacctacaacggcttcctggagatcatgaaggagttcaaaagccagagcatcgatactcctggagtcatcagacgtgtctcgcagctcttccacgagcaccctgacctcattgttggattcaacgcttttcttcccctcggatatagaatagacattcccaagaatggcaagttaaacatacagtcgcctctgacaagccaggagaattcgcacaaccacggggacggtgcagaggacttcaagcagcaggtgccgtataaagaggacaaaccccaggtgcccctggagtccgattccgtggaattcaacaacgccatcagctatgtgaataagattaaaacccgcttcctagaccacccagaaatctacaggtcattcctggagatcctgcacacgtaccagaaggagcagctgaacacgaggggccggccattccgaggcatgtctgaagaggaggtgttcaccgaggtggccaacctcttccggggccaggaggacctgctctcagagtttggacagttcctgcccgaagccaagcggtctctgttcacaggaaacgggccgtgcgagatgcacagcgtgcagaagaacgagcacgacaagaccccggagcacagcaggaagcgctcccggccctcgctcctccgccccgtgtctgcacccgccaagaaaaaaatgaaacttcgtggtaccaaagacctgtccatcgctgcagtggggaagtacgggactctgcaggaattttctttctttgacaaggtccgccgggtgctgaagagccaggaggtgtatgaaaacttcctccgctgcatcgcactcttcaaccaggagctggtgtctggctctgagctcctgcagctcgtcagcccatttctggggaaatttccagaactctttgcacagttcaagtccttcctgggggtaaaagagctgtccttcgcgccacccatgagcgacagatccggggacgggataagccgggaaattgattatgcatcctgcaagcgcataggatccagctaccgggcactccccaaaacctaccagcagcccaagtgcagtgggaggacagccatctgcaaggagcttgaccattggacacttctccagggttcgtggacagacgattactgcatgtccaagttcaagaatacctgctggattccaggatatagtgcaggggtcagcaaactctggcccacgggccctggcccgctgcccgtgtttgtaaataaagttttactgtcacacagacacaaccattcctttacatattgcctgtggctgcttttctcaccacaaaggcagagttgagtattcatctgggatggcctgcaaaatctgagatggttgctgtctgaccctttgcagagagaatttaccaatgtctgaaatgaaatcggccctccggatctgcaagttcctcatctgtggtttcaactaaccatggattgaaaatacgtggggaaagagaaaccaaaaaatgaca

SEQ ID NO: 22706 - DNA, 1319 bp, Homo sapiens
ggcgcagctccgacttcggacatggcgcacgctggcggtggcagcggtggcagcggtgccggcggccccgcgggccgggggctgagcggcgcccgctggggtcgctcgggctccgcaggccacgagaagctgccggtgcacgtagaagacgccctcacctatctggaccaggtgaagatccgctttggcagcgaccctgccacctacaacggcttcctggagatcatgaaggagttcaaaagccagagcatcgatactcctggagtcatcagacgtgtctcgcagctcttccacgagcaccctgacctcattgttggattcaacgcttttcttcccctcggatatagaatagacattcccaagaatggcaagttaaacatacagtcgcctctgacaagccaggagaattcgcacaaccacggggacggtgcagaggacttcaagcagcaggtgccgtataaagaggacaaaccccaggtgcccctggagtccgattccgtggaattcaacaacgccatcagctatgtgaataagattaaaacccgcttcctagaccacccagaaatctacaggtcattcctggagatcctgcacacgtaccagaaggagcagctgaacacgaggggccggccattccgaggcatgtctgaagaggaggtgttcaccgaggtggccaacctcttccggggccaggaggacctgctctcagagtttggacagttcctgcccgaagccaagcggtctctgttcacaggaaacgggccgtgcgagatgcacagcgtgcagaagaacgagcacgacaagaccccggagcacagcaggaagcgctcccggccctcgctcctccgccccgtgtctgcacccgccaagaaaaaaatgaaacttcgtggtaccaaagacctgtccatcgctgcagtggggaagtacgggactctgcaggaattttctttctttgacaaggtccgccgggtgctgaagagccaggaggtgtatgaaaacttcctccgctgcatcgcactcttcaaccaggagctggtgtctggctctgagctcctgcagctcgtcagcccatttctggggaaatttccagaactctttgcacagttcaagtccttcctgggggtaaaagagctgtccttcgcgccacccatgagcgacagatccggggacgggataagccgggaaattgattatgcatcctgcaagcgcataggatccagctaccgggcactccccaaaacctaccagcagcccaagtgcagtgggaggacagccatctgcaaggaggtagcgctccctggggctcaaatgttcgttga

SEQ ID NO: 22707 - DNA, 1455 bp, Homo sapiens
agcatttatcctttgagttatagacatattttacatttgaataaaaaatatttgaactaaggccgggtgcggtggctcacacctgtaatcccagcactttgggaggccaaggcgggtggatcatgaggtcaggagtttgagaccagcctgaccaacatggtgaaaccccgtctctactaaaaatacaaaaattagctgggtgtggtggggctcgcctgtaaccccagctactcaggagactgaggcaggagaatcgcttgaacctgggaggtggaggttgcagtgagtcgaggtcacaccactgcactccagcctgggcgacagagcgagactccatctcaaaaaaaaaaaaaaaaaaaaaaaatatatatatgtatatatatatatatatatatgtatatatgaactaatttatttaggcttaatctctaaaatttcagcctgatcttaaccaatgaaatttcaaaaacaaaaactgtacttcagtctacaattgaatggaattcagtgtagaccagtacaatggaatgtactggctgagatgggagggtcccttgagcccaggagtttgaggctgtagtgagctgtgattgtgtctgtgaatagtgactgcactccagcctaggtgacatagcaagatgccatctcaaagaaatatagatatataacataaaataaataactttatacatttcctggaggaaaagtactctgtaaattcaagagatctgaatcaaattactcaaccttttggaatttgatcctctactgtaatactcatatgctagattactgaattttcagagtgaaaaaaaattgacagggtaatatataggccatattatagtgaagatcataagtataaatgtcctcgtttaatctttccatattgaggacagcctctgcatataaaaatgttcattgggagaaaaattatttttaaaactaaatttttatagtagtcctccattactggcaattaaggagcaacccacaaaatgtcattatgtggttctttgattaggcataaaaagtattgcaaacagcttttctattcctttggaatatgaatctttttaatgtctaaagttaacctgcaacattttctagtaggacaagtcaatgtaaattaggtaatttttgcctgttttataccttctgttgcattttgttcaaatgaaaacattttttaaaacatgattgaatttttacttctcagataattggtttgagtgtggaatttcttttttaacactttgatatgtaagttagtgtaaattaatacttttataacactactaggctttatatttttatggaatgttttaaaatttgaaatttttgaagtgttaatttagcagtactttatcattatgtgccaatactgacaagaaaaacaattttttatgtatttaatatactatggtattcaataaattctattttaaaataaaa

SEQ ID NO: 22708 - DNA, 1372 bp, Homo sapiens
aatttccagtaactcctttttgcagtagctgctattaactagttccctttgaaacctcttttaaaagtaaaaatcaggccaaagtgctgggattacaggtgtgagccactgtgcccggccttgatcattttaaattcataaataatacttagcccctgagtaattataataaatatataattaatgcatatatcacccatagttaattaggaatattttattggcttaatgagcaaaatatgatcataaaatataagccatcatagcccagatgtatagcaataaaagagcttagattataatatctcacaatacaagtctgcattagcaatgacactgttataaaatatttataacactttctgatttaattttaaagagattcattcagtatctttttggcatttgaaatgaaaccttattttccctccacacaatagctgattaaaaacagcttttgaagaggtcccaggcaacacacacagaggggaaatggttagatacgtggggcatctttgtattttcacattaaaattcaatgttattcagacccaagtagatagataataaaagtggcattcaagttgggaatggtagcacaagcctgtagtctcagctactcaggaggctgaaatgggaagatcacttgagcacaggagtttgaggttttagtgcactgtgattgcacctgtgaatagccactgcacttcagcctgagtaacatagcaagaccccatctctttttttaaaatgttacatttataatcagtgaggaaaatataaactatacaataaatgaaagggtcattggccaattgtttggagggaaaaaatacaccatgttctaaaataaatttctagtgatttattgtgactttcatgcatttggatgattttaaagattttatataaaaatgaaaccatagccttacgagaagaaaatataaagaaaaacttgtatagtcttgggaggggggattatattatgtgaaacattaagtaaaatatttattttttaaatattaaaaaactaaaaactgtgctttagaagtcaccaaaaaattaaagggcaggctgggcatggtggatcacacctgtaatcccagctttgggaggctgaaatgggagaatcacttgaggcggggaagttcgagaccagcctgtgcaatataacaagacccccatctctccaaaaaaaaaaaaaaaaaaaaaaaaaagccaggcataatggcgtgtgcctatagtcctagctactcaggaggctgagatgggatgattgcttgagcccaggagtttgaggccacagtaagctatgattgcactattgcactctagcctgggtaacagtgtgagaacgagaccctgtctcaga

SEQ ID NO: 22709 - DNA, 583 bp, Homo sapiens
gtaaaagtttgtggctggtatccgagttcttttataaactagttgggaagaactgtgggggagagctgatgttccaaacagtagacaagcaggaatggagctgcagaaatgcaaacctgttaccactaccatggcatgcgaaaagaggcttcatataaaatgaaaagcttggacctgaaggtctttagggcccctttccagttctaaaattcaaatggatctaccctatattttgtccccttaggtgaaatagctctgtcctcaaaactaaattgctaagaaccgccttcagagatgacctctctcttccccactaattcctggcagctccccaaaacaaaatgttcggaaaacagaagtcaaccttcctctgtcagtccaaattacctctatgcctcaagccaacaacatgaggttcaggcaccctgatacatactgctaagtgagatgggaagagagagaacttcagaataattggcaatgttgttctagggaatcagtgtagaggtagatcttcccctattatttacctactttccaacttataaaagaaaaaaattagaaaagatcattcaagttgtta

SEQ ID NO: 22710 - DNA, 287 bp, Homo sapiens
actccttgaaaataatctctctgaggagtaagtggttttttctttttgttacagtaacatgaagtggtttccaaatctcatgagaaagaattagagaaaatgatgaaagatccaacggttcattagatattaaaattgacttgatgagaactcaataagagacctttaaaatctctatgtgtgattaaattcttaataaaaagaatctcccaacattttttaaagttgctcaacttgtggcctagatgttggagtctaataaaaacaaatgtcttctaatcccatga

SEQ ID NO: 22711 - DNA, 348 bp, Homo sapiens
gggtctattgtgtgtggatcctgcattcttaacataattttcagaaaatgtatgggttataacaatataaagaaaaatttccaaatttaatttacttctatctagtttggcttattgcagttggggaaaaattaggggcctaaaattaaattgccattttcatcaatttataatgtggcttttaaaaaggaaatggtatatgataaccattacaagatatgttggtttttaaaattttagtgcatacacctgtgccctgggtaactattataaacaaatcttttaaaatattttttattcaagaaaagtatggagcatgattggaaatagtgccttatgaatttgatt

SEQ ID NO: 22712 - DNA, 190 bp, Homo sapiens
gatatttttgtcccatactaaagagatgatcaagggatcctaaaaatattttatttgggtgattttcaaatgtcttttcatagcttaaatttcaatcgtagcttaaggatttcctccctaagtgaaaatagtttcagtttttcaaaaatagaactggtaatgtatggaattcaggtagtaaaaaaaaaaa

SEQ ID NO: 22713 - DNA, 366 bp, Homo sapiens
atgaacttcactagaatcttctctgggagttctcagcagagcaccatctcccagaagactctgtctctaaggagggaagtgaaggagcataaaaggactgattttttaaaaatcagcatttaatctgggcacggtggctcatgtctataatcccagcagtttgggaagccaagacgagaagattgcttgagcccaggagttctagaccagcctgggcaacatagtgagaccccatctctacaatttcttttaatgagccaggcatggtggcgcatgcctgtggtcccagctacttgagaggctgaggtgggaggatggcttgagcccaggaagtcaaggctgcagtaagccgtgatttcgccactg

SEQ ID NO: 22714 - DNA, 1162 bp, Homo sapiens
tggaacaggagaaaattgttaagtgtcaatttgctgccccttttttctgtaagtctatcttctataaagtaatgtagtccctattatcatgatgctatttcactatataacattattttcaatgcctgcatagtaaacacattgtaggggtataggctgaatttacgtaaccagttactgatattagagatgcagagtttttctaattgttttactgacaacagcaacacagaaatctccaacctcacatgcctacatttccactattgacttggaataaattcttacaagtgaaatttagtcaacatatataacttttatgtgacagttggtaaatgttgctaaatcaattttcagaaagcatatgccaatattggttgtacatatttcctgaaatccttgtctgcactaagtagcaacataaaaaaagaaacttttctgagtaataggtgaaagttttatctcactgttttaacttgtacttctgtggttacctgtgaggtttaacgcttttcaaatgattgttggtgttttgcatttttttagtgaataatctgttcgtattcttctttgttttgcaatatgggctttaaaaaacctatttctaattttatgtgttaaaattggtaacacatatagggcagaaatatgtgttaccattctgtagtttggctttggcttgtgttgaaaaggttttagaaagtcaaacagttttttgctttatgtatcatcaggaactgtgaagagctgaggttccacctcctcccaagctgacaagtgaccctcggagaagaaccgtgaaaacctcacaacagtgaagttagtttaaacaagttacaacgacaaacacattgtgccatccttatgatttcacctgttacttagttcacactgatgggtggctggtgtttaaatgctttccaagttcatttcatttattatacaaatgcctgtgaaatacccaggcagcatcattgcttccttctctagcctccaaaccgaatatccttttgctcaagcatccaggtaaaaaaagggggaccttaggaattgtgaatttgaagccagaagccatggtttacctaggaatggatttacttgccaagaactgtgacacctttataaataaagttactcatgttggcttttttgctctttaaat

SEQ ID NO: 22715 - DNA, 1108 bp, Homo sapiens
tggaacaggagaaaattgttaagtgtcaatttgctgccccttttttctgtaagtctatcttctataaagtaatgtagtccctattatcatgatgctatttcactatataacattattttcaatgcctgcatagtaaacacattgtaggggtataggctgaatttacgtaaccagttactgatattagagatgcagagtttttctaattgttttactgacaacagcaacacagaaatctccaacctcacatgcctacatttccactattgacttggaataaattcttacaagtgaaatttagtcaacatatataacttttatgtgacagttggtaaatgttgctaaatcaattttcagaaagcatatgccaatattggttgtacatatttcctgaaatccttgtctgcactaagtagcaacataaatacttctgtggttacctgtgaggtttaacgcttttcaaatgattgttggtgttttgcatttttttagtgaataatctgttcgtattcttctttgttttgcaatatgggctttaaaaaacctatttctaattttatgtgttaaaattggtaacacatatagggcagaaatatgtgttaccattctgtagtttggctttggcttgtgttgaaaaggttttagaaagtcaaacagttttttgctttatgtatcatcaggaactgtgaagagctgaggttccacctcctcccaagctgacaagtgaccctcggagaagaaccgtgaaaacctcacaacagtgaagttagtttaaacaagttacaacgacaaacacattgtgccatccttatgatttcacctgttacttagttcacactgatgggtggctggtgtttaaatgctttccaagttcatttcatttattatacaaatgcctgtgaaatacccaggcagcatcattgcttccttctctagcctccaaaccgaatatccttttgctcaagcatccaggtaaaaaaagggggaccttaggaattgtgaatttgaagccagaagccatggtttacctaggaatggatttacttgccaagaactgtgacacctttataaataaagttactcatgttggcttttttgctctttaaat

SEQ ID NO: 22716 - DNA, 470 bp, Homo sapiens
ggctatgtggcccccagttctccaaagtctccaccactcctcattgtgtgacactcagcccacagcacccatttatgctactagcctggcccctgtcacaagctatgggaaagcaaaaatccaccctaggccaggcactaatcatattttttggattgatgaaggggtagatgaatggatggatgaactttcaagatgctgcattatctcagagcaatgacctatctcagtgcatcaagcctatgttctatggcaaggtgcttcttgaatcagccatagtgtctgaatggtttgtttggaatggaaagtgttgagaaatcagggtgttgtctgatgccagaggtccccacatagggtgcaatctctgtgtggaattgatagaggcgtctgacaggtgggtggggttctggcactaggacagggtgcggggcggggcagtgaggcttcaaggagatggtatcataggatgc

SEQ ID NO: 22717 - DNA, 278 bp, Homo sapiens
caaccccacacaatgcagcctaaacgttccctcaaggtagcacgcaaggtaatcatgcgactcacttcatttgttttctgttcctctgggatcactgtcctttgttcctgatatccgtggtcttgttttacgtattttgcctttgtattgggtggttcaggcaggagggtaaatctaatccctattactccatcttggccagaagttgaagttaacctatggattttgatttgtaatgcactcactcttcttcatttttaatagtctgtatttttagt

SEQ ID NO: 22718 - DNA, 386 bp, Homo sapiens
atccttggtcctagagaaatcattgcaactcatcagtagtggcatctctgagaatcacatccatattattagtatttatcaaaaaagtcattattggccaggtgtggtggctcatgcctgtaatcccagcactttgggaggccgagaccagcaaatcacttgaggtcaggagtttgtgaccagcctggctaacatggtgaaaccccgtttccacgaaaaatacaaaaattagccaggcatggtggcgggcacctgtaatcccagctacttgggagactgaggcagaataatctcttgaacccgagagggggaggctgtagtgaactgagactgcaccactgcagtccagcctgggcaagagagtgagaatctgtctccaaaaaaaa

SEQ ID NO: 22719 - DNA, 259 bp, Homo sapiens
ggtggggatgcatgcaggtttggggttagatgtgattgtgcagttggtcctagccctacttgagggtagctggtgggccttcccatcctgcttctcttaggccggtccatagagaagcaagccccccgtcccctatccagcctaactcagacaactgccctgaatccaagagataatgctctgaccctggccacatttgctcctacaagctgtcccctttctgggagtttctcttgccatgtttttggatccttgatga

SEQ ID NO: 22720 - DNA, 386 bp, Homo sapiens
ttgattgttacctttgctgggctgaaggtttttaatttgatgtaatatctattgcctgtttttgcttttattgccagtgcttttaagttcatatcctaaaaatattcgctgagactaatgtcaaggagcttttcaatcctgtgtgtgcttccagtagatttataatttcaggtcttatgtttaaatcttcaatccattctgagttgattttttgtatggtatgaactaaggatccaatctcattcttctatatgtgaatattcagttttctcaacactattaagaagagtcttctttccccattttgtgttcatggcaactttgttgaaacttaactgaccataatatcatggatttactttggggctctctattcagcttccttg

SEQ ID NO: 22721 - DNA, 478 bp, Homo sapiens
actcttctctgctcttgtagcatgaaagcagccataaatgaatgagcatgggctatgttccagcaaaactttatttacaaaaacaggctgcaggctggatttggcctgtagtttgctggtccttgtttcagacattcctgtcatgatcccctatttgtcacaagagactgtcatatgcttagctaaaatccagatgacttggccgggcgtggtggctcacacctgtaatcctagcactttgggaggccaagacgggcagattgtctgagctcaggagtttgagaccagcctgggcaacgtggtgaaaccccatctctaccaaaatgcaaaaaatcgtccagacgtggtgcgattgcctgtaatcccagctactcgggaggctgaggcacaagaattgcttgaacctgggaggcggaggttgcagtgagccgagtaccacttaactccagcctgggcaacaaagtgaaactatgtctca

SEQ ID NO: 22722 - DNA, 115 bp, Homo sapiens
tgggagaggaacaggttgggggaggaaaatgaagagttcttttctcttctggtttccctgccctcccattcaaaggccaggaaatttctacagctaggcaggatgattggctccg

SEQ ID NO: 22723 - DNA, 692 bp, Homo sapiens
aatctccgcagattcgcccgatatcgcagtgggttttcccgcatggtgccgtctttcgaccggttcgcgcgatttcgtcggttggcggcggattcacagaatgtccggtatcccgggtggtctcgcgttacccgaggacctgcgtaactccgagctaccggagtgattcttccccccggttagcccctcatgtatctctttttgaaaacactcctctctttctccactctaatgatgaccaccgccttgtcttttatggtaatcactgttctttgggttttattactgcatttattggctaatatatgcatccctagaaaatgtagttttgtctgcttttatataaatggaatattactgcatgcagtcttttgatttgtgattgttttgctctaaggcttgtaagggtcatccatgttttgcatatagtttgtttattgtcattgccatagagtaaatcattgtatgaatatactgcagtttatttactgttgacatatgtttcagttgtttttaactactaggaaatgctactctgtacattcttgtatatgtaccttggtgcacatatgtatgtttttctagagtatatacagtggcatgggattgctgaattaaaaggtttgtatatcttatactagaagataataaaaacttttcctgatggattctgccaattcaaaaaaaaaaaa

SEQ ID NO: 22724 - DNA, 432 bp, Homo sapiens
aggctgagcctccccctctggccccccagtaactcccggcgtcacgcccaggccctcgctcaggggatctgagtagaggggaggcctgagtcaggacagccctccaagagtgggcagccaacgagggaccccctgaataaaaaccgcagaggaggtctgcccacctggcgtgggggccagggaggaggtgggcagggggaggggccttgcccgagaccagaggtggctgggggccgagggtcggcaggaagccaggcgaccgatgggcgcagcacagactgcctccacgtggccctgcacagcctggcctcactaggggaagggtgaagacagcagctggcgcttcccctcaaaaaaaccctgggggctcaaggccacccctgaggtctccaggctcctaggaacagggcctgacagggaaaaggctgacag

SEQ ID NO: 22725 - DNA, 438 bp, Homo sapiens
tgaagctagagaattacatgagtctgggaggtggaggttgcagtgagccgagatcgcgccactgcactctagcctggggacagagcgagactccatctcaaaaaaaaaaagaaagaaggctgggcgcagtggctcacgcctgtatcccagcacttcgggaggccgaggtaggcggatcacctgagatcaggagttcaagaccagcctggccaacatggtgaaaccctgtctctactaaaaatacaaaaaaatttaaccaagtgtggtagtgggcgcctgtaatcccagctactggggaggctgaggcaggagaattgcttgaatccgggaggtggaggttgaaatgagccgagattgtgccattgcactccagcctgggcaacaagagcagagagcattagaatcctttaataaagagcacaaacttgcctttaaagc

SEQ ID NO: 22726 - DNA, 572 bp, Homo sapiens
ccagaaaacttaagtaactcacctaagagcacacagctagaaaagctgactgtttcaagtcagcttcaaatcaccctagtgttctcttcctagtcaaatgactcctcaggcccttcatctgtaaatgtaactggtgactgaggcagtcaacatgaccagataattggtaacatcactttctgctcagttagcttttttttttttgagacaagtctcactctgttgcccaggctggagtgcagtggcctgtgatctcagctcactgcaacctccgcctcccaggctcaagcaattcttgtgtctcagcctcccgagtagctgggattacaggcatgtgccaccacgcctggctaatttttttagaaacagggtttcaccatgttggccgggctagtctcaaactcctgacctcaggtgatccgcccacctcagcctcccaaagtgctgggattacaggtgtgagccaccacgcccagcctgctcagttagcttttttaagaagggctagccgggcgcggtggctcacgcctgtaatcccagcattttgggaggccgaggcaggtaaatctcga

SEQ ID NO: 22727 - DNA, 413 bp, Homo sapiens
ataatataataatatatatgggattatagtagggttgggagaaaccctaattagctacattagaggaactcaaaatacagaatgaaatgatggttttaaataaggctagatatcataattagtcccagatggttcctttgtagtcaggagagttttaccaaacagccacatttgttttttttgaatgtcaaaatagaaaacaaattaggctcctgcactgtttcttaatacagcttctctggggctttgctttgtaggccttgtgacatgcccattgagacaaaaagattgtgttctccatgatacactcttcacaaggcagcagatgttctcagaaacaatgtctatgtccttggaaccaagagtttctctttcctcctgactgtaataatattaaacttttttaaaaaacc

SEQ ID NO: 22728 - DNA, 151 bp, Homo sapiens
tccttctatagttcactgctttcaaatcagtaatttgataccaatataggaccatctccctggtttttatgaaatctcttatggagaaaaaggtatcttatatagtcggctttcaaaatttaattgttcccatcgtcaacattcttgccca

SEQ ID NO: 22729 - DNA, 433 bp, Homo sapiens
cagggtttgttgggggaataatgatatgttaattagatagtggtaataattgtagagctttgtgaatatactagaaaccactgaactgcatgctttaaaaatggtgaattttatatgtgaagcatatttcagtaatagtaataaaatacaaaacaatttccgtgcctattgggctgggcatgatggctcatgcctgtattcccagcactttgggaggctgaggcaggtggatcacttgaggttaggagtttgagaccagcctggccaacatggtaaaacaccgtctctactaaaaatagaaaaattagccaggtatggtggcatgcaccacagtgcaatctcagctactcgggaggctgaggcaggataatcacttgaacccagaggtggaggttgcagtgagccaagattgcaccactgcactccagcctgg

SEQ ID NO: 22730 - DNA, 139 bp, Homo sapiens
aacgaggtaatagatatacgtggctctattttattcccttatttctctgcaagtttttcagtttttcaatcttgaacaactttttacacttgttaattataaataaaattatgcattttcattactagtaagggaagaa

SEQ ID NO: 22731 - DNA, 126 bp, Homo sapiens
atcattacaaagacttacccaaagcttttagagtcctgctttatgaagtacgtgcagtagctagaaactgcctcgttaattgaccatgggttcagaagcaccacaatttcccttcccctggaatgc

SEQ ID NO: 22732 - DNA, 568 bp, Homo sapiens
tactctgtatgtagaaaggctgaaaatagtacaactgcagtaattctgtcagctataagggacgtgtggactgagagggtagtcttaatagattgtgatcaactatatgtgaaaacattttgtgtagtgagttgatgtgtagtttacatgtaaactaactcctttagttcgaaaggaattttattttacgttaaaagattattttaggctgggctttagtggctcacgcctataatcccagcattttgaggggctgaggcaggaggatcgcttgagcccaggagttcaagactggcttgggcaaatggtgagactttgtctctaaaaaaattaaaaaattagccaggcatggtggtgcgagcccatggtctcaggtgggatgattgcttgagcccaggtgatagaacaaaaccctatctcaaaaaaaaaaaattttttttttgtatgtatgtaactctttacttatctactacctaataatccacaaaaatacccacaaatccttaattacgtggaggaggaggagatgataatagagatcattttaactttgaaagataatggattc

SEQ ID NO: 22733 - DNA, 774 bp, Homo sapiens
aaatgtaggggatgttattgccaatggaagtggctcttagccggaaggaaagctgggaaagggatggagcagaaaggtatttgtcccctgaagtccagctgtttccagctggactcttttctaaagtcctgccaatcaagccgtccctctgaagtcaagctgcttctctccaacgttcagctgcttcttctcatctccctttctctgctctcagccagtggaacctagggtttttatgggtacaggatggggggcagggtgggtcagagttggttttgggaaaagcaacactcaagtgggaaaacggggatgaaaagttttcactgtgggccatggttccaggcttgaaggtggagccctcgccagggaccctgcccttttctgcctagagcttatctgtctcctatccctatcagtaggaactcaccatctttagtaattcattcagtgtgtgtgtgtatatatctatgtatatgtatagaatatgaacctgtttcttgaaaaatccttctcattactcattaaataccagagatctatataattgagtctggctgtggcagtttgctaatgttaatttgtacacttatgttcccgtgatttagtaattcactccatttgggtgtttttaaaaaaatgtgtacatcaggccaggtgcagtggttcatgcctgtaatcccagcactttgggaggccagggtgggtggatcgcatgagaccatgagttcaagaccagcctgggcaacatggtgaaaccccatctctaccaaaaaa

SEQ ID NO: 22734 - DNA, 784 bp, Homo sapiens
caccaaggaagaagcattttggagccgtgaggatgctctgttggagacactctggatggtgagctgcaggttggcctgggacgttttctagttgttctctgaaatgtctctttttatcctttgctttgataaacaactgattgcccagggaccagtgaagaatcttgatgataaaactcctacttgtagtgaaagaatcatgggatcttttgcattttcttacatcaaaaacgaccttgaactgaaagctctctttaaaaaacaaacaaacaaacaacaacaacaaaaaacccaccctaccctgcatactatcacctgctaaactacccagtgtcagaaggacaacttcagagatgctgtggtggcagctgatagtgcctgacatttagtgagtgctcagcacgtgccgggcgttgttctgaatgcttcatgtggattagttcatttccccttccagcagccctgtgagctcaatactgttattatttacatcccacaggtaaagggaaactggggcacagtaggttgaaaaataacggaaattgagtttgtttgaaaaattttaaggctaaaagccttcagtcttatctaatcacatctatcttttgatttcgggttggatttttcttttgggaatcagtcaaaacccactgtgggttattaagagtagaagatgacttataaagggataatgaggatagcctccttttgctgggaagacagaatttttcattccaaattctaatctccagtgtcaccttgcatgtccatttctggatttata

SEQ ID NO: 22735 - DNA, 772 bp, Homo sapiens
ttagcaccaaatatttattctgataaagtgagtttaaaaaaaaaaaaaactagatcgattattgtctggcttggtctccaaaaacaagtccctgcaattgacagtggttgcatgaacttaagaataatagatccttaggaaggaaggctgttcattcagtcattcaacagaaaattagggtacttctgtgtcactgaggtgcagccccagtgaaatgaactcagaagcctccagtgtttataccactgagactggggcagagtagtctggagtgctgcatgtaaagctaggcactccccagtgatggagcttccagctgcccctaccattcggtgcacaagtgtccctgaacttcggtgaagtatgagccaccaagctccgcccaagggtgaccacagaagtagacaacttacgaaccagaaacatcaaccagcaaccccagacagtttatgtaagattgcttcattccagagagcagaactgggatccatgggcagaagtttcaaggggacagattccagttcgggagagagaagaaccctgtaactcttagaggcgcctttgagcaacgcgctctcaaggtgttccagcagggtgaggatcaccccccagaagtgctgctgggccaagccctgccttgaacaagatcctgaggtctcgcccaacagcaaggttctctggttagcaccaaatgagtggctcaacagttcgtgttgtggagcttcagaggcaggacaagcagtcatgggctgtggttggcggccgcaggccc

SEQ ID NO: 22736 - DNA, 376 bp, Homo sapiens
catgttgtctcccagcacttggtgtgtgtgatatgcagtatgtatttgcagaatgaaaagtctgagggctgacatcatatttcccactgtgcccagaaagagcacagttagtccacatgagctaatgggggcaaagggaagtgaggagggagaatgtactgccttatcatgttttctattacttggctgaagtaaaacagtcccaagccgatagtaagatagtgggctggaaagtggcgacaggtaaaggtgcacctttcttcctggggatgtgatgtgcatatcactacagaaatgtctttcctgaggtgatttcatgactttgtgtgaatgtacacctgtgacctcacccctcaggacagttttgaactggttg

SEQ ID NO: 22737 - DNA, 431 bp, Homo sapiens
gtctcttagaagacaaggtatccaggtatgaaaaccaattttgcagacattgtttaggatactaatggggaaagtcttcagtaacttttgttgaaagaatggatttcctgagtccttacagcatttagttaaataagtgtagatttctagaatcagagctaatattcctagacacttggtttagctgttactaactcatgaaccacagaaagaagaaataccttagaccatgcaagtttgacgatctctgtgaactttaccaactttagtttcagaattccatctttctaccttcccaaaaggttgaaagtgatatggacagtgaagtctgattaattgacagaacttttccatgttaataaaaattccggtaaaatggtttccttgttactagagatatagtttgggattccccaggctgaaaaaaaaaa

SEQ ID NO: 22738 - DNA, 762 bp, Homo sapiens
gaacatttcaattgcttttaccacccacagacaaccattattggatgatttttctcaaatgtttctccattttatttatttatacagtggagatcaaatatgtaaaattttgtttcctacatgtttttttgatttttacctaacaagcatttttccactctatggcaaatcttcatatgcattattttaatagctgcataatattctgttttgcaggtaaattatcttttaggccattttccatgactggacaatatgtggatatactctaatagtaacacacattcgtggcctttctcataaaaaatcattacaaatttccaatttctacaattgctcatggaggacaactaaagccttggctaaaaacttagcgacttaagtgtgaaacacagacacctccccagtaaattgtttacttgtccagaacgcccacctccagccatgtcacagaaccatgtacaactcttccttagagaagcggctctccgccttcattttcttgtctctgttgtaggtaatatatttgacaccaggagagaaaacacggaggacacagaaccaggtttcattgcctagactttgattttagtgacattgttgagtggcatatgtaacttccgtttgaatttccacaaagatccacgtagcatttcaggttcctgcaaagtgtgggtgttctgtcaagcttacctgtcatgtttgaatagtttcatatactttctttgtaatgtgtgataaccaagcctccaatctggtata

SEQ ID NO: 22739 - DNA, 425 bp, Homo sapiens
gccagactcggactgcctggcttgtctcagcacctttggggacccacttcccctctctgggaactggggaagctaacagagatcttgctaggggggtggaatcctgtatccatgtgaggttgtacccccaggctcctgagtggtttgaaagtggggaaccctggccgggcgcggtggctcatgcctataatcccagcactttgggaggctgaggcgggcggatcacaaggtcaggagatcgaaaccatcctggctaacacgatgaaaccccgtctctatgtgcgtggtggctggcacctgtagtcccagctgctcgggagtctgaggcaggagaatggcgtgaacccgggaggcggagcttgcagtgagccgagatcgccccactgcactccagcctgggcgacagagcgagactccatctcaaa

SEQ ID NO: 22740 - DNA, 453 bp, Homo sapiens
gccagaacagagttttaaagactaaataaatttagactttttcatatatatgagccatttcttttgtgaattgcctgctcagtcttcttttttctttgcctattttttcttattgacatctaagagctctttgcttgctaaggttattaaccttttgctacaaatattatgagaattcctttcttggtggggtgcagtgggtaacacctgtaatctcagtgatttggaaggtccaggtgggaggatcacttgaggccaggagttcaagatcagtctgggcgacatagtaagaccttgactctacaaaaaataaaaataaaaaaattagcagagtatgtgacatgtgcttgtagtctagttgcttgggagggtgaggtgagagaatatcttgagcccagtagtttgagattgtggtccagcttggatgacagaatgagaccctccctgcctcta

SEQ ID NO: 22741 - DNA, 1115 bp, Homo sapiens
tcgagacagggtctcactctgttgcccaggctggaattcagtggcgcgatctcgactcactgcaacctcaacttcctgggtttaagcaattctcctgcctcagcctcccaagtagctgggattacaggcactcgccaccacacccggctaatttgtatatttttagtagagacggggtttcactgtgttggtcaggctggtcttaaactcctaactttgtgatctgcccacctcggcctcccaaagtgctgggattaaaggtgtgagccaccgtgcccagccgataactgaatatttttaactactgtctacaggatcatttccaactgatcaataggctagatttcttttatatcggagcttaaacttcctgactcctattactcatcatccttgactcatacccacgagtcatcatctctgggccaggccacagaccatcaatcatttttttcatttagactttgtctatttcatttatttattaatttactactttataataaaagaaatagacatgaatcagaaaaaaaataggacaagagctgtgataaccctgttgtctatctgtagagcagttccctacagaaattagacatgtttcttgaactgacctgattgtttcaaacatgcattactcaacaaaatgtttcatatcaaccccatgttcattttggggacacggttagtcttctttaattatattttctacttattaataatgcattgaccactcttaaatggcccaaaccaagacaagaactttgacgattactcacatttgtctgtaggttcccttaaaacaacccatagagcaagtggtcatggcagaatcagtgccagggagtgactgttctgaggattacaaggaagagcagaagacaaaatttgagattttctatccattaattttttcattctaccttccatttactctgtcagttggtatttattgatttgttaatatttgcttatttcccccttaataaaataaatattgaacttacaattgacccagttgacctgagaattgacctaaaaatcacatagcctttgataactaataatcagtgctattgctctatcagtggctctatgattcttagccagagagt

SEQ ID NO: 22742 - DNA, 429 bp, Homo sapiens
aatataaacactcagaaaaagtgtgatcgttgaagccagttaaggagagcatatcacaaaactagaatgcaagggaagtggagtttgttttgtattttgctgggtcagattaggtaaccaaagcagtgcaaattcaggggagaggaatggctcaggagaatccaaacttggcttctatttttcaatgtaccacttgttctctgtgggatcttagaaaatggcataacctttctgagcctcggtttcctcttctgtaaagaagagtttgttatgcacatttttttaatctacatacggcaccagggaaaaggtggcatacagagtaggcagctactcccagtaccagggcaaacaacagaggtcatggtgtgaagcaggtgagtctgagcatcgtggtcaggggaagcactgcagccaaggatcccggta

SEQ ID NO: 22743 - DNA, 423 bp, Homo sapiens
ctgtacttttttaggtcctttgagtagcattactctttattttaaatgaggcgtacatctaagttagaactataggtgtatttatctctctttgtaaaaatgtgatgaagaacagcatgtcaccacatttgcgcgcataagaaaccatttgggcaggggaacaacgtggaaaagttggattgtgaagttttactctatggttagattaagatcacgcaaattactaagacctcaggactctattttgtatatcgtcatttataacatctttatagaaatgtcatagaattaaatcaacttttggcaacgctcggtagctcacgcctgtaatcccagaatttggggaggctgagtggggatgattgattgctggaggccaggagtttgacaccagcctcgtcaacaacccatctttacaaaaaa

SEQ ID NO: 22744 - DNA, 458 bp, Homo sapiens
gaattgattaggtgctgtcatgtaggaaagtatgcttttgtatgaaagtaataatgtcatttgttcatttttaatattagtaccaaggagaaaaccaaaaagggttcattaacaaatatagcaatatagcatatgcaataataataaattcaaatggtacaaaaagggataaaacaagaagtgaatgccttctttcctctttctagaagtttctctctccaaaggttcttgtggttgtttctagaaaaaagtatttcatggccaggcgcaatggctcatgcttacaatcctagcacttggggaggcccaggtggatggatttcttgagcccaggagttgagaccagcctgggcaacatggcaaaaccccatctctataaaaataaaaataaaataaaaagtaaaaagattttatgcatagtcccacatatctatttatattttctttatttttaaatg

SEQ ID NO: 22745 - DNA, 386 bp, Homo sapiens
tcataaacttttaataattacttaagtgattacaatgtatagccaaaattgagaacactaatatgaaaagtaggaagcctggaaaaagctgaaaaatgtgatttcaggtggagaatggacaataaaaccacaatacataaggtgctacacttagactgaagatatccaagtaagatatttgctttcatttaatacagtgtttcttaaatgtaatacactttactctaaagaaaatgaattctgctagacctgagtattcccttgacacaaattatttttattacattgttacgtaagcatattcaaaataaatattgcaatagatcccttatattaaaaaaatttatgtaactatacaaagaaatttggatttaatacaaacaaaa

SEQ ID NO: 22746 - DNA, 1124 bp, Homo sapiens
ggaaggtctaaaaaactatcatagtcaagagaagcctaaggagacatggcaatcaaataaaatgtaatgtcctggatgagaacctggaacagaaaataactaatgtttttatctaatctgagtgaactattgacttcagttaataatgtaacatggttcattaattgtaacatgtgtaccatactaataagggaaactgggtggagtgagggggtgtgtaggaactctgtattattttctccattttttgtacatataaactgtcctaaaatctgttttttaatgaaaaatctacagaaattaacgaaataatagcaaaatattttaaacaactctatcccactaaattgaaaaaaacttatggaaaatggacaaacacctggagaaactgactcgagaagaaatagaaaatttgaatattgctgtattcattaaagaaataaaaggtatcattaaaacctttctgcagtgaaaaaacaagactaaatgactttgccgtcaaattttttcaaacatttaaggggaaaaagaagccaattctacacaaataggagaaggaaggaaaacttcccaactcttgcatccaacagaacaatggtacccaaaaactgacaaaaattttgagagaaaataactatagaccgatacaacatatgaaaatcaactccaatattcctaaaaattctatcttcaatccaacaaattatacaatggataatacatcatgaccatcatgaccaagtttatatcccagaaatgcaatgaaataatatgagaaacaaaagaaagaaagcaatatagtcatctcaatagatttagaagacaaaatttttttgtttttttattatgtttatcacttatcctcaagtttgcatttatgatataaattctaagctaactaggaatagaacatcctcaaacaaataaatgacatctacagaacaagtacagctaacattatactaagatgactgagcacaggcaaggatgctgacttttaccatttttatttaacattgtaatggaggtcctagtcagttaagtggtgcaggaactataaataaaaagcacacaaatttgaaagggagacctaaatgtccttatttgctgatgacatgattgtg

SEQ ID NO: 22747 - DNA, 1122 bp, Homo sapiens
tgagcacgaaaccaaaaacagttgcactgaaatgggcaagaagagtaatgtcagtttatacatgacaaccccttcccaaagttgttacagctcatgccaagagaggacaccctggcctatgacttttccctcacagggaaggaaagagtagagcattcagccacaccttggcctttggacacactgtgtgaggaactggtctctgtctcccctcactcagagcactgatggaactggcatatttggatgcctaaggtcactgaggacaaagtgagtacaaaagaaagctgtgactcacacagctcagtgcaatgaaaagaatatgcacaacttgagatttctccctcaggagggaaaggagctcagtatgtgtctgatatactgattttccagggagctgcccaagaaattagtttttttctagcccaaccattatgccagtaggaccccacacgcactctagatgcctcagaactactgagaacaaagacagctgggtgttaagctgctgcatcagaggactcatggtatggcagacagataccacagaaagcaagagattgccagttcctgaaaaacagaaaccaggaaatccctctaattaggaatctacatgcacaaatacagagaagatactttcacagagtagaattgaaggtccccagaatctctatctgggctgattgtaaaagccagtctgggaagacaggaagaggtggctatttcttcaaatgtatagataccaatgcaaagctacaaagaacacgaagaaacagagaaatatgacacaaaagggaacaaaataaatcttaagaaactgatcataaagaaatggagagatatagaccaggcacagtggctcatgcctgtaattccagcattttgagagcctgaggcaggcggatcacctgaggtcaggagttcaagaccagcctggccaaacatggtgaaacccatctctactaaaattacaaaaattagccgggcatcatggccctgtaatcccagctactcaggaggctgaagcaccagaattgcttcaacccacgaagtggaggttgcagtgagccaagattgcaccactgcactccagcctgggtgacagagcaaaaccccatttca

SEQ ID NO: 22748 - DNA, 625 bp, Homo sapiens
ctacaccccgtttctactggagcaggagtagaggtttcctagctagagaagaacgtggacaatagctagtcctaccccattatcgattaccagagagaaatgacaggcctcccccaccctctttccccattcctgctctctctaatagtaatgagtcactaatcggggaaaggattgattaaaaaactcaatgttcttactgcttgggcatcttctctcacaggattttgtggatggatgaatgtatgtgcttattatgttaaaacgtgggattggctgtatcttctggctggctttatagttgtgccatgttggttcctcatggccaacctgtataaaagaataggaaagatgggccaggcgtggtcgttcacgcctgtaatcccagcactttgggcagccaaggtgggtgaatcacttgaggtcaggagttagcaagaccagcccggccaatatggtgaaaccctatctctgctaaaaatacaaaaaaacagctgagcatggtggtgcaagcctgtaaacccagctacttgggaggctgaggcaggagaatcccttgaacccaggaggcaaaggttgcagtgagccaaggtggcaccactgcactccagcctgggcgacagag

SEQ ID NO: 22749 - DNA, 552 bp, Homo sapiens
cataaatccaatataactgctgtccttaagagggaaattcagacagacagacagacagacagatagacacacacacggaagacgtgtgattccaggtgaggctggaaggagaaattggaatactgtagcttcaggtgaaggcatgccaaggactgccaggattacctgaagctaggatggaggcatgcaataggttcatccctagaacctcggagggagcacagtcctgctgacgccttgattgcagagtttccttctccagaactatgagaggataaatttgttgtgtcaagccacctgttttgtggtacttggttatggcagccctagcaacctattacaggggccaacatgtcagttctcaaatttcccccttttgtttgcccacaggacattatagcttcagcttgcgaatcaggaaatgtaatttcactcacttccatagtgccatcaagagaatgataaaatactgtgtgtttgttcatgtggtatgcccataccaattcagtggtcactgttcttaactgaacttaggtgtctttgggagaccaa

SEQ ID NO: 22750 - DNA, 375 bp, Homo sapiens
aggttgtgtaactttacacaaagtggaagcaataatcagggcaagacttaagagaaagtggatccaatgcaagaggagtaaagaaaaaaatccctcaaatgtatggagcagattgttttaattatctacagaatcttgtgccccaagaaattaatagctcaagtttccagcaagagtggtggatgagatggagagcatttatgtgagagagaaccaaggatattactaaaaatggaagggaagctgggttcctcctgggaaaacagatctctgtggctctatttgttctaactactatgcctgccttcatgtactttggtcatttaggggcctgcagaggacagttataaaatctgtggtcattctgccgtcgag

SEQ ID NO: 22751 - DNA, 330 bp, Homo sapiens
acctaggcacctgggaaaaggcagttaatgaaaactgactttgagtgggcccagatttagcagatgaagaattaaaaacatctattataaatatgcccaaagaattaatggaaaatgtggtatcaataaattagaaacatctcaacagaagtatgttaactataacaaaaaaattagaaattataaagctgaaaaataaaataactgaaatacatttactagatgggctcaacacattggacttggcagaagaatcagtgggcttgattttacacacacacacacacacacacacacacacactccaatttgaataacacaaaaaagatt

SEQ ID NO: 22752 - DNA, 453 bp, Homo sapiens
aagaattgggcacattagatgtgcaaaagttaaatcatagttaacagagattatggcaaaattgtaattaaattactataaagaggatattaaaatctaaaaacatttaaaagtcaagatgaggttataactgggttgtagcagattaggaaaaaaagtctagacccaaagcatagataagaatttctaaaaatgaccccatttaagaattcagaatgatgctgggccagtgttgcatacctatattcccagctactcagaaggctggggcaggaggatctcttgagcccaggagttagaggctgtagtatgctatgatcttgtctgtgaacagtcaccacactccagtctgggcaacatagcaagacccccatctcttaaaaagaattcaacatgaaattatagaattgaatatacttaatattggaggtgacttgtagatgatgtggacta

SEQ ID NO: 22753 - DNA, 276 bp, Homo sapiens
cttggcaggcagtaaaagcttcatttcagagagcttgagaaaaaactcaaaataattcacttcgacccaggccatttgacaaccgttagacttaactttacaaaataaaatgaaatcctaccacctgctgcttaaaatctccaattaatgctgtaaacagtgccttcatttaaaaaaccaatgagtaaatttctgcaagctgggtgcagacatttctacaaatttgctgtaaccttttgctcttgtctgcagtaagaagagccttccagattccaa

SEQ ID NO: 22754 - DNA, 508 bp, Homo sapiens
agtttgcagagagtcaaaagtaatattaacaaatggatttttgactgcacaggggctggcacccctattcctagagttgtctaagagtcaactataaaatttatgtatcatctaaatatgtgacttaacatattttgttataaataggtattatgtacaaatagactaagcataaaaattataaagtatacaaaaatagcctttttaaagatgaagtaccttatgactttatactgacttctaactgaagtctaagacctcatagttttttactcaacctcttttatatcttcaccttctttccccaacactgagaatcctagtcccttctaaagaaccacaatcttggatttctccattccccatcctccttacagttctcttccacaaaattctataaacgctcagcttcattattttccataatttaaaggaccagaatttttgtagctaaattatttatttgtgtgctttgagacatactaacttaaaatcatagaagttttaa

SEQ ID NO: 22755 - DNA, 446 bp, Homo sapiens
cctctggttttgtataggccttggctagaaagagtcaatgtttctgagctctcaaaccagttgctctcagaagataggaataccccaaggttcctggcatttttcctatttcatttttgttcagactgatattttgccaagagcacaatgactgaggaatgtagccatcatttgcagggtagtgattggttcccagcctggcttccacacaggacaggaagggaaagcatccctgagctctcctcagtatttccggatgtaatgaaagaggacatctttctacacaaagtcagccccaacttttggcttggtcacaggagttctgatagtactgtttggtgcactcatgggaaattgaaccagtcgtagccacagtctttcagagcctgggctctggggagtggaagtgaaaaataaagatgtggcttgttggattgtgatcccca

SEQ ID NO: 22756 - DNA, 282 bp, Homo sapiens
gaaaccaaggatcgaatgaagctgctgcaaaacaatcttgagttaaaactcaaagatcggcgtggcgcgctggctcacacctgtaatcccagcactttgggagtccaaggcaggtggatcaggaggtcaggagatcgagaccatcctcgctaacacggtgaaaccctatctctactaaaaatacaaaaaattacccgggcatggtggcgggtgcctgtagtcccagctactcgggatgctgaggcaggagaatggcgtgaacctgggaggcggagcttgcag

SEQ ID NO: 22757 - DNA, 2854 bp, Homo sapiens
cggcccggaagtgtagcgttgccatggcgagggccgggcgcggggcccgcccccgcagcgcctcagggagcgcggggcccactgacccgcggaagccagcggacccacttgtgcggcggtcggcgcggggcgcgaggtactggcacacggatgaggagtcgtagaagaggggcctgcagattgtgctctcagcaagcctgtcgtctagtggaagacactggccgggacacagagcccacgtgtggacaccgctgtgggttggtggcaggggtcgagcaggtgccatcaggcacatgaacggtggagtcttcaaaggtgtgagcagctgctggaagaggaggtgctcctgaagacactgcggccggcccgcctgtgcccttggtgccctggctgcctagagagcctcacccctgggccctggggccaggactccaggactctgactacctgccctcccccagcctcagcggctgcacctcctcgttagtactgatgcactgacctcggcacacagctgggaggggttgggggctgggtcatggctgctcccaggccccacccaggctcctgagcctagaaggtgaaaagaggactctcaggggctcacaggggctctcactgctggttggccctgccctcccttccccctcagcagggtgcccggaagctggaaccttgttatctgggtaattagtttcagaccctgcactgaggccggccaggtctcggggctgcctcccataggttgtgcaccctgaccccgagagggaggcgaggcgctgcttgtcgacagctagaggctggcctggggagcaggtttggggtgccctcccacactgccctccctgccccggcccatgccccccagggctgcctgggcctggttattgtgtggggcctcctgacccagccaagggcacgaagctctgggaaggggatgcccccgagggtgccagtccagctagctgccccacccctcaggcccagcctggcccccaagctccccactctggtgccccgagcagccctgtgggcaagcagccgccgccatggccgagcacctggagctgctggcagagatgcccatggtgggcaggatgagcacacaggagcggctgaagcatgcccagaagcggcgcgcccagcaggtgaagatgtgggcccaggctgagaaggaggcccagggcaagaagggtcctggggagcgtccccggaaggaggcagccagccaagggctcctgaagcaggtcctcttccctcccagtgttgtccttctggaggccgctgcccgaaatgacctggaagaagtccgccagttccttgggagtggggtcagccctgacttggccaacgaggacggcctgacggccctgcaccagtgctgcattgatgatttccgagagatggtgcagcagctcctggaggctggggccaacatcaatgcctgtgacagtgagtgctggacgcctctgcatgctgcggccacctgcggccacctgcacctggtggagctgctcatcgccagtggcgccaatctcctggcggtcaacaccgacgggaacatgccctatgacctgtgtgatgatgagcagacgctggactgcctggagactgccatggccgaccgtggcatcacccaggacagcatcgaggccgcccgggccgtgccagaactgcgcatgctggacgacatccggagccggctgcaggccggggcagacctccatgcccccctggaccacggggccacgctgctgcacgtcgcagccgccaacgggttcagcgaggcggctgccctgctgctggaacaccgagccagcctgagcgctaaggaccaagacggctgggagccgctgcacgccgcggcctactggggccaggtgcccctggtggagctgctcgtggcgcacggggccgacctgaacgcaaagtccctgatggacgagacgccccttgatgtgtgcggggacgaggaggtgcgggccaagctgctggagctgaagcacaagcacgacgccctcctgcgcgcccagagccgccagcgctccttgctgcgccgccgcacctccagcgccggcagccgcgggaaggtggtgaggcgggtgagcctaacccagcgcaccgacctgtaccgcaagcagcacgcccaggaggccatcgtgtggcaacagccgccgcccaccagcccggagccgcccgaggacaacgatgaccgccagacaggcgcagagctcaggccgccgcccccggaggaggacaaccccgaagtggtcaggccgcacaatggccgagtagggggctccccagtgcggcatctatactccaagcgactagaccggagtgtctcctaccagctgagccccctggacagcaccaccccccacaccctggtccacgacaaggcccaccacaccctggctgacctgaagcgccagcgagctgctgccaagctgcagcgacccccacctgaggggcccgagagccctgagacagctgagcctggcctgcctggtgacacggtgaccccccagcctgactgtggcttcagggcaggcggggacccacccctgctcaagctcacagccccggcggtggaggctcccgtggagaggaggccgtgctgcctgctcatgtgaggctgttgctcagcatgcaggggccctgtcgcgggcacagcccaaggctgcctccccacggtgcgtgccctggtgctgcgggtgcagcacggaaaccccggcttctactgtacaggacactggcccctctcaggtcagaagacatgcctggagggatgtctggctgcaaagactatttttatcctgcaactcttgataaagggctgttttgccatgga

SEQ ID NO: 22758 - DNA, 2949 bp, Homo sapiens
cggcccggaagtgtagcgttgccatggcgagggccgggcgcggggcccgcccccgcagcgcctcagggagcgcggggcccactgacccgcggaagccagcggacccacttgtgcggcggtcggcgcggggcgcgaggtactggcacacggatgaggagtcgtagaagaggggcctgcagattgtgctctcagcaagcctgtcgtctagtggaagacactggccgggacacagagcccacgtgtggacaccgctgtgggttggtggcaggggtcgagcaggtgccatcaggcacatgaacggtggagtcttcaaaggtgtgagcagctgctggaagaggaggtgctcctgaagacactgcggccggcccgcctgtgcccttggtgccctggctgcctagagagcctcacccctgggccctggggccaggactccaggactctgactacctgccctcccccagcctcagcggctgcacctcctcgttagtactgatgcactgacctcggcacacagctgggaggggttgggggctgggtcatggctgctcccaggccccacccaggctcctgagcctagaaggtgaaaagaggactctcaggggctcacaggggctctcactgctggttggccctgccctcccttccccctcagcagggtgcccggaagctggaaccttgttatctgggtaattagtttcagaccctgcactgaggccggccaggtctcggggctgcctcccataggttgtgcaccctgaccccgagagggaggcgaggcgctgcttgtcgacagctagaggctggcctggggagcaggtttggggtgccctcccacactgccctccctgccccggcccatgccccccagggctgcctgggcctggttattgtgtggggcctcctgacccagccaagggcacgaagctctgggaaggggatgcccccgagggtgccagtccagctagctgccccacccctcaggcccagcctggcccccaagctccccactctggtgccccgagcagccctgtgggcaagcagccgccgccatggccgagcacctggagctgctggcagagatgcccatggtgggcaggatgagcacacaggagcggctgaagcatgcccagaagcggcgcgcccagcaggtgaagatgtgggcccaggctgagaaggaggcccagggcaagaagggtcctggggagcgtccccggaaggaggcagccagccaagggctcctgaagcaggtcctcttccctcccagtgttgtccttctggaggccgctgcccgaaatgacctggaagaagtccgccagttccttgggagtggggtcagccctgacttggccaacgaggacggcctgacggccctgcaccagtgctgcattgatgatttccgagagatggtgcagcagctcctggaggctggggccaacatcaatgcctgtgacagtgagtgctggacgcctctgcatgctgcggccacctgcggccacctgcacctggtggagctgctcatcgccagtggcgccaatctcctggcggtcaacaccgacgggaacatgccctatgacctgtgtgatgatgagcagacgctggactgcctggagactgccatggccgaccgtggcatcacccaggacagcatcgaggccgcccgggccgtgccagaactgcgcatgctggacgacatccggagccggctgcaggccggggcagacctccatgcccccctggaccacggggccacgctggtgagggctggggggtgaggggcacacggggctgggggcctcgctacttggaggtgggggatggggccgaattcaggccgggcgcttgcctgcagctgcacgtcgcagccgccaacgggttcagcgaggcggctgccctgctgctggaacaccgagccagcctgagcgctaaggaccaagacggctgggagccgctgcacgccgcggcctactggggccaggtgcccctggtggagctgctcgtggcgcacggggccgacctgaacgcaaagtccctgatggacgagacgccccttgatgtgtgcggggacgaggaggtgcgggccaagctgctggagctgaagcacaagcacgacgccctcctgcgcgcccagagccgccagcgctccttgctgcgccgccgcacctccagcgccggcagccgcgggaaggtggtgaggcgggtgagcctaacccagcgcaccgacctgtaccgcaagcagcacgcccaggaggccatcgtgtggcaacagccgccgcccaccagcccggagccgcccgaggacaacgatgaccgccagacaggcgcagagctcaggccgccgcccccggaggaggacaaccccgaagtggtcaggccgcacaatggccgagtagggggctccccagtgcggcatctatactccaagcgactagaccggagtgtctcctaccagctgagccccctggacagcaccaccccccacaccctggtccacgacaaggcccaccacaccctggctgacctgaagcgccagcgagctgctgccaagctgcagcgacccccacctgaggggcccgagagccctgagacagctgagcctggcctgcctggtgacacggtgaccccccagcctgactgtggcttcagggcaggcggggacccacccctgctcaagctcacagccccggcggtggaggctcccgtggagaggaggccgtgctgcctgctcatgtgaggctgttgctcagcatgcaggggccctgtcgcgggcacagcccaaggctgcctccccacggtgcgtgccctggtgctgcgggtgcagcacggaaaccccggcttctactgtacaggacactggcccctctcaggtcagaagacatgcctggagggatgtctggctgcaaagactatttttatcctgcaactcttgataaagggctgttttgccatgga

SEQ ID NO: 22759 - DNA, 2942 bp, Homo sapiens
cggcccggaagtgtagcgttgccatggcgagggccgggcgcggggcccgcccccgcagcgcctcagggagcgcggggcccactgacccgcggaagccagcggacccacttgtgcggcggtcggcgcggggcgcgaggtactggcacacggatgaggagtcgtagaagaggggcctgcagattgtgctctcagcaagcctgtcgtctagtggaagacactggccgggacacagagcccacgtgtggacaccgctgtgggttggtggcaggggtcgagcaggtgccatcaggcacatgaacggtggagtcttcaaaggtgtgagcagctgctggaagaggaggtgctcctgaagacactgcggccggcccgcctgtgcccttggtgccctggctgcctagagagcctcacccctgggccctggggccaggactccaggactctgactacctgccctcccccagcctcagcggctgcacctcctcgttagtactgatgcactgacctcggcacacagctgggaggggttgggggctgggtcatggctgctcccaggccccacccaggctcctgagcctagaaggtgaaaagaggactctcaggggctcacaggggctctcactgctggttggccctgccctcccttccccctcagcagggtgcccggaagctggaaccttgttatctgggtaattagtttcagaccctgcactgaggccggccaggtctcggggctgcctcccataggttgtgcaccctgaccccgagagggaggcgaggcgctgcttgtcgacagctagaggctggcctggggagcaggtttggggtgccctcccacactgccctccctgccccggcccatgccccccagggctgcctgggcctggttattgtgtggggcctcctgacccagccaagggcacgaagctctgggaaggggatgcccccgagggtgccagtccagctagctgccccacccctcaggcccagcctggcccccaagctccccactctggtgccccgagcagccctgtgggcaagcagccgccgccatggccgagcacctggagctgctggcagagatgcccatggtgggcaggatgagcacacaggagcggctgaagcatgcccagaagcggcgcgcccagcaggtgaagatgtgggcccaggctgagaaggaggcccagggcaagaagggtcctggggagcgtccccggaaggaggcagccagccaagggctcctgaagcaggtcctcttccctcccagtgttgtccttctggaggccgctgcccgaaatgacctggaagaagtccgccagttccttgggagtggggtcagccctgacttggccaacgaggacggcctgacggccctgcaccagtgctgcattgatgatttccgagagatggtgcagcagctcctggaggctggggccaacatcaatgcctgtgacagtgagtgctggacgcctctgcatgctgcggccacctgcggccacctgcacctggtggagctgctcatcgccagtggcgccaatctcctggcggtcaacaccgacgggaacatgccctatgacctgtgtgatgatgagcagacgctggactgcctggagactgccatggccgaccgtggcatcacccaggacagcatcgaggccgcccgggccgtgccagaactgcgcatgctggacgacatccggagccggctgcaggccggggcagacctccatgcccccctggaccacggggccacgctgctgcacgtcgcagccgccaacgggttcagcgaggcggctgccctgctgctggaacaccgagccagcctgagcgctaaggaccaagacggctgggagccgctgcacgccgcggcctactggggccaggtgcccctggtggagctgctcgtggcgcacggggccgacctgaacgcaaagtccctgatggacgagacgccccttgatgtgtgcggggacgaggaggtgcgggccaagctgctggagctgaagcacaagcacgacgccctcctgcgcgcccagagccgccagcgctccttgctgcgccgccgcacctccagcgccggcagccgcgggaaggtggtgaggcgggtgagcctaacccagcgcaccgacctgtaccgcaagcagcacgcccaggaggccatcgtgtggcaacagccgccgcccaccagcccggagccgcccgaggacaacgatgaccgccagacaggcgcagagctcaggccgccgcccccggaggaggacaaccccgaagtggtcaggccgcacaatggccgagtagggggctccccagtgcggcatctatactccaagcgactagaccggagtgtctcctaccagctgagccccctggacagcaccaccccccacaccctggtccacgacaaggcccaccacaccctggctgacctgaagcgccagcgagctgctgccaagctgcagcgacccccacctgaggggcccgagagccctgagacagctgagcctggcctgcctggtgacacggtgaccccccagcctgactgtggcttcagggcaggcggggacccacccctgctcaagctcacagccccggcggtggaggctcccgtggagaggaggccgtgctgcctgctcatgtgaggctgttgctcagcatgcaggggccctgtcgcgggcacagcccaaggctgcctccccacggtgcgtgccctggtgctgcgggtgcagcacggaaaccccggcttctactgtacaggacactggcccctctcaggtcagaagacatgcctggagggatgtctggctgcaaagactatttttatcctgcaactcttgataaagggctgttttgccatggaaaaaaccccacacacacaccacagacacaaataaaaaaagggggggcacgccaaagaatcccccgagggggccccattaaggcatcca

SEQ ID NO: 22760 - DNA, 2792 bp, Homo sapiens
cggcccggaagtgtagcgttgccatggcgagggccgggcgcggggcccgcccccgcagcgcctcagggagcgcggggcccactgacccgcggaagccagcggacccacttgtgcggcggtcggcgcggggcgcgaggtactggcacacggatgaggagtcgtagaagaggggcctgcagattgtgctctcagcaagcctgtcgtctagtggaagacactggccgggacacagagcccacgtgtggacaccgctgtgggttggtggcaggggtcgagcaggtgccatcaggcacatgaacggtggagtcttcaaaggtgtgagcagctgctggaagaggaggtgctcctgaagacactgcggccggcccgcctgtgcccttggtgccctggctgcctagagagcctcacccctgggccctggggccaggactccaggactctgactacctgccctcccccagcctcagcggctgcacctcctcgttagtactgatgcactgacctcggcacacagctgggaggggttgggggctgggtcatggctgctcccaggccccacccaggctcctgagcctagaaggtgaaaagaggactctcaggggctcacaggggctctcactgctggttggccctgccctcccttccccctcagcagggtgcccggaagctggaaccttgttatctgggtaattagtttcagaccctgcactgaggccggccaggtctcggggctgcctcccataggttgtgcaccctgaccccgagagggaggcgaggcgctgcttgtcgacagctagaggctggcctggggagcaggtttggggtgccctcccacactgccctccctgccccggcccatgccccccagggctgcctgggcctggttattgtgtggggcctcctgacccagccaagggcacgaagctctgggaaggggatgcccccgagggtgccagtccagctagctgccccacccctcaggcccagcctggcccccaagctccccactctggtgccccgagcagccctgtgggcaagcagccgccgccatggccgagcacctggagctgctggcagagatgcccatggtgggcaggatgagcacacaggagcggctgaagcatgcccagaagcggcgcgcccagcaggtgaagatgtgggcccaggctgagaaggaggcccagggcaagaagggtcctggggagcgtccccggaaggaggcagccagccaagggctcctgaagcaggtcctcttccctcccagtgttgtccttctggaggccgctgcccgaaatgacctggaagaagtccgccagttccttgggagtggggtcagccctgacttggccaacgaggacggcctgacggccctgcaccagtgctgcattgatgatttccgagagatggtgcagcagctcctggaggctggggccaacatcaatgcctgtgacagtgagtgctggacgcctctgcatgctgcggccacctgcggccacctgcacctggtggagctgctcatcgccagtggcgccaatctcctggcggtcaacaccgacgggaacatgccctatgacctgtgtgatgatgagcagacgctggactgcctggagactgccatggccgaccgtggcatcacccaggacagcatcgaggccgcccgggccgtgccagaactgcgcatgctggacgacatccggagccggctgcaggccggggcagacctccatgcccccctggaccacggggccacgctgctgcacgtcgcagccgccaacgggttcagcgaggcggctgccctgctgctggaacaccgagccagcctgagcgctaaggaccaagacggctgggagccgctgcacgccgcggcctactggggccaggtgcccctggtggagctgctcgtggcgcacggggccgacctgaacgcaaagtccctgatggacgagacgccccttgatgtgtgcggggacgaggaggtgcgggccaagctgctggagctgaagcacaagcacgacgccctcctgcgcgcccagagccgccagcgctccttgctgcgccgccgcacctccagcgccggcagccgcgggaaggtggtgaggcgggtgagcctaacccagcgcaccgacctgtaccgcaagcagcacgcccaggaggccatcgtgtggcaacagccgccgcccaccagcccggagccgcccgaggacaacgatgaccgccagacaggcgcagagctcaggccgccgcccccggaggaggacaaccccgaagtggtcaggccgcacaatggccgagtagggggctccccagtgcggcatctatactccaagcgactagaccggagtgtctcctaccagctgagccccctggacagcaccaccccccacaccctggtccacgacaaggcccaccacaccctggctgacctgaagcgccagcgagctgctgccaagctgcagcgacccccacctgaggggcccgagagccctgagacagctgagcctggcctgcctggtgacacggtgaccggcggtggaggctcccgtggagaggaggccgtgctgcctgctcatgtgaggctgttgctcagcatgcaggggccctgtcgcgggcacagcccaaggctgcctccccacggtgcgtgccctggtgctgcgggtgcagcacggaaaccccggcttctactgtacaggacactggcccctctcaggtcagaagacatgcctggagggatgtctggctgcaaagactatttttatcctgcaactcttgataaagggctgttttgccatgga

SEQ ID NO: 22761 - DNA, 608 bp, Homo sapiens
agagttcaaacttggaattggacaaggcccttccgggtccaatgtagggggcgtccctggcaggtcatggtcccttcagaagttaacgccggaatccattaacccagatgacttttcttgtaaagcaccaccccccacaccctggtccacgacaaggcccaccacaccctggctgacctgaagcgccagcgagctgctgccaagctgcagcgacccccacctgaggggcccgagagccctgagacagctgagcctggcctgcctggtgacacggtgaccccccagcctgactgtggcttcagggcaggcggggacccacccctgctcaagctcacagccccggcggtggaggctcccgtggagaggaggccgtgctgcctgctcatgtgaggctgttgctcagcatgcaggggccctgtcgcgggcacagcccaaggctgcctccccacggtgcgtgccctggtgctgcgggtgcagcacggaaaccccggcttctactgtacaggacactggcccctctcaggtcagaagacatgcctggagggatgtctggctgcaaagactatttttatcctgcaactcttgataaagggctgttttgccatgga

SEQ ID NO: 22762 - DNA, 398 bp, Homo sapiens
cggcccggaagtgtagcgttgccatggcgagggccgggcgcggggcccgcccccgcagcgcctcagggagcgcggggcccactgacccgcggaagccagcggacccacttgtgcggcggtcggcgcggggcgcgaggtactggcacacggatgaggagtcgtagaagaggggcctgcagattgtgctctcagcaagcctgtcgtctagtggaagacactggccgggacacagagcccacggtgcgtgccctggtgctgcgggtgcagcacggaaaccccggcttctactgtacaggacactggcccctctcaggtcagaagacatgcctggagggatgtctggctgcaaagactatttttatcctgcaactcttgataaagggctgttttgccatgga

SEQ ID NO: 22763 - DNA, 149 bp, Homo sapiens
actccctctcctctctcctccccaggaaggtggtgaggcgggtgagcctaacccagcgcaccgacctgtaccgcaagcagcacgcccaggaggccatcgtgtggcaacagccgccgcccaccagcccggagccgcccgaggacaacgat

SEQ ID NO: 22764 - DNA, 2931 bp, Homo sapiens
cggcccggaagtgtagcgttgccatggcgagggccgggcgcggggcccgcccccgcagcgcctcagggagcgcggggcccactgacccgcggaagccagcggacccacttgtgcggcggtcggcgcggggcgcgagaagctactcaggaggctgaggcaggagaatcatttgaacccaggagctggaggttgcagtatttcatgcctacgcaggtactggcacacggatgaggagtcgtagaagaggggcctgcagattgtgctctcagcaagcctgtcgtctagtggaagacactggccgggacacagagcccacgtgtggacaccgctgtgggttggtggcaggggtcgagcaggtgccatcaggcacatgaacggtggagtcttcaaaggtgtgagcagctgctggaagaggaggtgctcctgaagacactgcggccggcccgcctgtgcccttggtgccctggctgcctagagagcctcacccctgggccctggggccaggactccaggactctgactacctgccctcccccagcctcagcggctgcacctcctcgttagtactgatgcactgacctcggcacacagctgggaggggttgggggctgggtcatggctgctcccaggccccacccaggctcctgagcctagaaggtgaaaagaggactctcaggggctcacaggggctctcactgctggttggccctgccctcccttccccctcagcagggtgcccggaagctggaaccttgttatctgggtaattagtttcagaccctgcactgaggccggccaggtctcggggctgcctcccataggttgtgcaccctgaccccgagagggaggcgaggcgctgcttgtcgacagctagaggctggcctggggagcaggtttggggtgccctcccacactgccctccctgccccggcccatgccccccagggctgcctgggcctggttattgtgtggggcctcctgacccagccaagggcacgaagctctgggaaggggatgcccccgagggtgccagtccagctagctgccccacccctcaggcccagcctggcccccaagctccccactctggtgccccgagcagccctgtgggcaagcagccgccgccatggccgagcacctggagctgctggcagagatgcccatggtgggcaggatgagcacacaggagcggctgaagcatgcccagaagcggcgcgcccagcaggtgaagatgtgggcccaggctgagaaggaggcccagggcaagaagggtcctggggagcgtccccggaaggaggcagccagccaagggctcctgaagcaggtcctcttccctcccagtgttgtccttctggaggccgctgcccgaaatgacctggaagaagtccgccagttccttgggagtggggtcagccctgacttggccaacgaggacggcctgacggccctgcaccagtgctgcattgatgatttccgagagatggtgcagcagctcctggaggctggggccaacatcaatgcctgtgacagtgagtgctggacgcctctgcatgctgcggccacctgcggccacctgcacctggtggagctgctcatcgccagtggcgccaatctcctggcggtcaacaccgacgggaacatgccctatgacctgtgtgatgatgagcagacgctggactgcctggagactgccatggccgaccgtggcatcacccaggacagcatcgaggccgcccgggccgtgccagaactgcgcatgctggacgacatccggagccggctgcaggccggggcagacctccatgcccccctggaccacggggccacgctgctgcacgtcgcagccgccaacgggttcagcgaggcggctgccctgctgctggaacaccgagccagcctgagcgctaaggaccaagacggctgggagccgctgcacgccgcggcctactggggccaggtgcccctggtggagctgctcgtggcgcacggggccgacctgaacgcaaagtccctgatggacgagacgccccttgatgtgtgcggggacgaggaggtgcgggccaagctgctggagctgaagcacaagcacgacgccctcctgcgcgcccagagccgccagcgctccttgctgcgccgccgcacctccagcgccggcagccgcgggaaggtggtgaggcgggtgagcctaacccagcgcaccgacctgtaccgcaagcagcacgcccaggaggccatcgtgtggcaacagccgccgcccaccagcccggagccgcccgaggacaacgatgaccgccagacaggcgcagagctcaggccgccgcccccggaggaggacaaccccgaagtggtcaggccgcacaatggccgagtagggggctccccagtgcggcatctatactccaagcgactagaccggagtgtctcctaccagctgagccccctggacagcaccaccccccacaccctggtccacgacaaggcccaccacaccctggctgacctgaagcgccagcgagctgctgccaagctgcagcgacccccacctgaggggcccgagagccctgagacagctgagcctggcctgcctggtgacacggtgaccccccagcctgactgtggcttcagggcaggcggggacccacccctgctcaagctcacagccccggcggtggaggctcccgtggagaggaggccgtgctgcctgctcatgtgaggctgttgctcagcatgcaggggccctgtcgcgggcacagcccaaggctgcctccccacggtgcgtgccctggtgctgcgggtgcagcacggaaaccccggcttctactgtacaggacactggcccctctcaggtcagaagacatgcctggagggatgtctggctgcaaagactatttttatcctgcaactcttgataaagggctgttttgccatgga

SEQ ID NO: 22765 - DNA, 2651 bp, Homo sapiens
gcagggagccgaaggctgccggtgggcgcttcgcgttttgttccaaggcaaaggtgtgtggattctccgcagcccgtcggtcaggtactggcacacggatgaggagtcgtagaagaggggcctgcagattgtgctctcagcaagcctgtcgtctagtggaagacactggccgggacacagagcccacgtgtggacaccgctgtgggttggtggcaggggtcgagcaggtgccatcaggcacatgaacggtggagtcttcaaaggtgtgagcagctgctggaagaggaggtgctcctgaagacactgcggccggcccgcctgtgcccttggtgccctggctgcctagagagccccacccaggctcctgagcctagaaggtgaaaagaggactctcaggggctcacaggggctctcactgctggttggccctgccctcccttccccctcagcagggtgcccggaagctggaaccttgttatctgggtaattagtttcagaccctgcactgaggccggccaggtctcggggctgcctcccataggttgtgcaccctgaccccgagagggaggcgaggcgctgcttgtcgacagctagaggctggcctggggagcaggtttggggtgccctcccacactgccctccctgccccggcccatgccccccagggctgcctgggcctggttattgtgtggggcctcctgacccagccaagggcacgaagctctgggaaggggatgcccccgagggtgccagtccagctagctgccccacccctcaggcccagcctggcccccaagctccccactctggtgccccgagcagccctgtgggcaagcagccgccgccatggccgagcacctggagctgctggcagagatgcccatggtgggcaggatgagcacacaggagcggctgaagcatgcccagaagcggcgcgcccagcaggtgaagatgtgggcccaggctgagaaggaggcccagggcaagaagggtcctggggagcgtccccggaaggaggcagccagccaagggctcctgaagcaggtcctcttccctcccagtgttgtccttctggaggccgctgcccgaaatgacctggaagaagtccgccagttccttgggagtggggtcagccctgacttggccaacgaggacggcctgacggccctgcaccagtgctgcattgatgatttccgagagatggtgcagcagctcctggaggctggggccaacatcaatgcctgtgacagtgagtgctggacgcctctgcatgctgcggccacctgcggccacctgcacctggtggagctgctcatcgccagtggcgccaatctcctggcggtcaacaccgacgggaacatgccctatgacctgtgtgatgatgagcagacgctggactgcctggagactgccatggccgaccgtggcatcacccaggacagcatcgaggccgcccgggccgtgccagaactgcgcatgctggacgacatccggagccggctgcaggccggggcagacctccatgcccccctggaccacggggccacgctgctgcacgtcgcagccgccaacgggttcagcgaggcggctgccctgctgctggaacaccgagccagcctgagcgctaaggaccaagacggctgggagccgctgcacgccgcggcctactggggccaggtgcccctggtggagctgctcgtggcgcacggggccgacctgaacgcaaagtccctgatggacgagacgccccttgatgtgtgcggggacgaggaggtgcgggccaagctgctggagctgaagcacaagcacgacgccctcctgcgcgcccagagccgccagcgctccttgctgcgccgccgcacctccagcgccggcagccgcgggaaggtggtgaggcgggtgagcctaacccagcgcaccgacctgtaccgcaagcagcacgcccaggaggccatcgtgtggcaacagccgccgcccaccagcccggagccgcccgaggacaacgatgaccgccagacaggcgcagagctcaggccgccgcccccggaggaggacaaccccgaagtggtcaggccgcacaatggccgagtagggggctccccagtgcggcatctatactccaagcgactagaccggagtgtctcctaccagctgagccccctggacagcaccaccccccacaccctggtccacgacaaggcccaccacaccctggctgacctgaagcgccagcgagctgctgccaagctgcagcgacccccacctgaggggcccgagagccctgagacagctgagcctggcctgcctggtgacacggtgaccccccagcctgactgtggcttcagggcaggcggggacccacccctgctcaagctcacagccccggcggtggaggctcccgtggagaggaggccgtgctgcctgctcatgtgaggctgttgctcagcatgcaggggccctgtcgcgggcacagcccaaggctgcctccccacggtgcgtgccctggtgctgcgggtgcagcacggaaaccccggcttctactgtacaggacactggcccctctcaggtcagaagacatgcctggagggatgtctggctgcaaagactatttttatcctgcaactcttgataaagggctgttttgccatgga

SEQ ID NO: 22766 - DNA, 2921 bp, Homo sapiens
cggcccggaagtgtagcgttgccatggcgagggccgggcgcggggcccgcccccgcagcgcctcagggagcgcggggcccactgacccgcggaagccagcggacccacttgtgcggcggtcggcgcggggcgcgaggtactggcacacggatgaggagtcgtagaagaggggcctgcagattgtgctctcagcaagcctgtcgtctagtggaagacactggccgggacacagagcccacgtgtggacaccgctgtgggttggtggcaggggtcgagcaggtgccatcaggcacatgaacggtggagtcttcaaaggtgtgagcagctgctggaagaggaggtgctcctgaagacactgcggccggcccgcctgtgcccttggtgccctggctgcctagagagcctcacccctgggccctggggccaggactccaggactctgactacctgccctcccccagcctcagcggctgcacctcctcgttagtactgatgcactgacctcggcacacagctgggaggggttgggggctgggtcatggctgctcccaggccccacccaggctcctgagcctagaaggtgaaaagaggactctcaggggctcacaggggctctcactgctggttggccctgccctcccttccccctcagcagggtgcccggaagctggaaccttgttatctgggtaattagtttcagaccctgcactgaggccggccaggtctcggggctgcctcccataggttgtgcaccctgaccccgagagggaggcgaggcgctgcttgtcgacagctagaggctggcctggggagcaggtttggggtgccctcccacactgccctccctgccccggcccatgccccccagggctgcctgggcctggttattgtgtggggcctcctgacccagccaagggcacgaagctctgggaaggggatgcccccgagggtgccagtccagctagctgccccacccctcaggcccagcctggcccccaagctccccactctggtgccccgagcagccctgtgggcaagcagccgccgccatggccgagcacctggagctgctggcagagatgcccatggtgggcaggatgagcacacaggagcggctgaagcatgcccagaagcggcgcgcccagcaggtgaagatgtgggcccaggctgagaaggaggcccagggcaagaagggtcctggggagcgtccccggaaggaggcagccagccaagggctcctgaagcaggtcctcttccctcccagtgttgtccttctggaggccgctgcccgaaatgacctggaagaagtccgccagttccttgggagtggggtcagccctgacttggccaacgaggacggcctgacggccctgcaccagtgctgcattgatgatttccgagagatggtgcagcagctcctggaggctggggccaacatcaatgcctgtgacagtgagtgctggacgcctctgcatgctgcggccacctgcggccacctgcacctggtggagctgctcatcgccagtggcgccaatctcctggcggtcaacaccgacgggaacatgccctatgacctgtgtgatgatgagcagacgctggactgcctggagactgccatggccgaccgtggtaggtgcggcggtgcggctgtgggagggctgccggtcgcgctccctctgagcctgccgcctcgcaggcatcacccaggacagcatcgaggccgcccgggccgtgccagaactgcgcatgctggacgacatccggagccggctgcaggccggggcagacctccatgcccccctggaccacggggccacgctgctgcacgtcgcagccgccaacgggttcagcgaggcggctgccctgctgctggaacaccgagccagcctgagcgctaaggaccaagacggctgggagccgctgcacgccgcggcctactggggccaggtgcccctggtggagctgctcgtggcgcacggggccgacctgaacgcaaagtccctgatggacgagacgccccttgatgtgtgcggggacgaggaggtgcgggccaagctgctggagctgaagcacaagcacgacgccctcctgcgcgcccagagccgccagcgctccttgctgcgccgccgcacctccagcgccggcagccgcgggaaggtggtgaggcgggtgagcctaacccagcgcaccgacctgtaccgcaagcagcacgcccaggaggccatcgtgtggcaacagccgccgcccaccagcccggagccgcccgaggacaacgatgaccgccagacaggcgcagagctcaggccgccgcccccggaggaggacaaccccgaagtggtcaggccgcacaatggccgagtagggggctccccagtgcggcatctatactccaagcgactagaccggagtgtctcctaccagctgagccccctggacagcaccaccccccacaccctggtccacgacaaggcccaccacaccctggctgacctgaagcgccagcgagctgctgccaagctgcagcgacccccacctgaggggcccgagagccctgagacagctgagcctggcctgcctggtgacacggtgaccccccagcctgactgtggcttcagggcaggcggggacccacccctgctcaagctcacagccccggcggtggaggctcccgtggagaggaggccgtgctgcctgctcatgtgaggctgttgctcagcatgcaggggccctgtcgcgggcacagcccaaggctgcctccccacggtgcgtgccctggtgctgcgggtgcagcacggaaaccccggcttctactgtacaggacactggcccctctcaggtcagaagacatgcctggagggatgtctggctgcaaagactatttttatcctgcaactcttgataaagggctgttttgccatgga

SEQ ID NO: 22767 - DNA, 2409 bp, Homo sapiens
cggcccggaagtgtagcgttgccatggcgagggccgggcgcggggcccgcccccgcagcgcctcagggagcgcggggcccactgacccgcggaagccagcggacccacttgtgcggcggtcggcgcggggcgcgaggtactggcacacggatgaggagtcgtagaagaggggcctgcagattgtgctctcagcaagcctgtcgtctagtggaagacactggccgggacacagagcccacgtgtggacaccgctgtgggttggtggcaggggtcgagcaggtgccatcaggcacatgaacggtggagtcttcaaaggtgtgagcagctgctggaagaggaggtgctcctgaagacactgcggccggcccgcctgtgcccttggtgccctggctgcctagagagcctcacccctgggccctggggccaggactccaggactctgactacctgccctcccccagcctcagcggctgcacctcctcgttagtactgatgcactgacctcggcacacagctgggaggggttgggggctgggtcatggctgctcccaggccccacccaggctcctgagcctagaagccctgtgggcaagcagccgccgccatggccgagcacctggagctgctggcagagatgcccatggtgggcaggatgagcacacaggagcggctgaagcatgcccagaagcggcgcgcccagcaggtgaagatgtgggcccaggctgagaaggaggcccagggcaagaagggtcctggggagcgtccccggaaggaggcagccagccaagggctcctgaagcaggtcctcttccctcccagtgttgtccttctggaggccgctgcccgaaatgacctggaagaagtccgccagttccttgggagtggggtcagccctgacttggccaacgaggacggcctgacggccctgcaccagtgctgcattgatgatttccgagagatggtgcagcagctcctggaggctggggccaacatcaatgcctgtgacagtgagtgctggacgcctctgcatgctgcggccacctgcggccacctgcacctggtggagctgctcatcgccagtggcgccaatctcctggcggtcaacaccgacgggaacatgccctatgacctgtgtgatgatgagcagacgctggactgcctggagactgccatggccgaccgtggcatcacccaggacagcatcgaggccgcccgggccgtgccagaactgcgcatgctggacgacatccggagccggctgcaggccggggcagacctccatgcccccctggaccacggggccacgctgctgcacgtcgcagccgccaacgggttcagcgaggcggctgccctgctgctggaacaccgagccagcctgagcgctaaggaccaagacggctgggagccgctgcacgccgcggcctactggggccaggtgcccctggtggagctgctcgtggcgcacggggccgacctgaacgcaaagtccctgatggacgagacgccccttgatgtgtgcggggacgaggaggtgcgggccaagctgctggagctgaagcacaagcacgacgccctcctgcgcgcccagagccgccagcgctccttgctgcgccgccgcacctccagcgccggcagccgcgggaaggtggtgaggcgggtgagcctaacccagcgcaccgacctgtaccgcaagcagcacgcccaggaggccatcgtgtggcaacagccgccgcccaccagcccggagccgcccgaggacaacgatgaccgccagacaggcgcagagctcaggccgccgcccccggaggaggacaaccccgaagtggtcaggccgcacaatggccgagtagggggctccccagtgcggcatctatactccaagcgactagaccggagtgtctcctaccagctgagccccctggacagcaccaccccccacaccctggtccacgacaaggcccaccacaccctggctgacctgaagcgccagcgagctgctgccaagctgcagcgacccccacctgaggggcccgagagccctgagacagctgagcctggcctgcctggtgacacggtgaccccccagcctgactgtggcttcagggcaggcggggacccacccctgctcaagctcacagccccggcggtggaggctcccgtggagaggaggccgtgctgcctgctcatgtgaggctgttgctcagcatgcaggggccctgtcgcgggcacagcccaaggctgcctccccacggtgcgtgccctggtgctgcgggtgcagcacggaaaccccggcttctactgtacaggacactggcccctctcaggtcagaagacatgcctggagggatgtctggctgcaaagactatttttatcctgcaactcttgataaagggctgttttgccatgga

SEQ ID NO: 22768 - DNA, 2834 bp, Homo sapiens
cggcccggaagtgtagcgttgccatggcgagggccgggcgcggggcccgcccccgcagcgcctcagggagcgcggggcccactgacccgcggaagccagcggacccacttgtgcggcggtcggcgcggggcgcgaggtactggcacacggatgaggagtcgtagaagaggggcctgcagattgtgctctcagcaagcctgtcgtctagtggaagacactggccgggacacagagcccacgtgtggacaccgctgtgggttggtggcaggggtcgagcaggtgccatcaggcacatgaacggtggagtcttcaaaggtgtgagcagctgctggaagaggaggtgctcctgaagacactgcggccggcccgcctgtgcccttggtgccctggctgcctagagagcctcacccctgggccctggggccaggactccaggactctgactacctgccctcccccagcctcagcggctgcacctcctcgttagtactgatgcactgacctcggcacacagctgggaggggttgggggctgggtcatggctgctcccaggccccacccaggctcctgagcctagaaggtgaaaagaggactctcaggggctcacaggggctctcactgctggttggccctgccctcccttccccctcagcagggtgcccggaagctggaaccttgttatctgggtaattagtttcagaccctgcactgaggccggccaggtctcggggctgcctcccataggttgtgcaccctgaccccgagagggaggcgaggcgctgcttgtcgacagctagaggctggcctggggagcaggtttggggtgccctcccacactgccctccctgccccggcccatgccccccagggctgcctgggcctggttattgtgtggggcctcctgacccagccaagggcacgaagctctgggaaggggatgcccccgagggtgccagtccagctagctgccccacccctcaggcccagcctggcccccaagctccccactctggtgccccgagcagccctgtgggcaagcagccgccgccatggccgagcacctggagctgctggcagagatgcccatggtgggcaggatgagcacacaggagcggctgaagcatgcccagaagcggcgcgcccagcaggtgaagatgtgggcccaggctgagaaggaggcccagggcaagaagggtcctggggagcgtccccggaaggaggcagccagccaagggctcctgaagcaggtcctcttccctcccagtgttgtccttctggaggccgctgcccgaaatgacctggaagaagtccgccagttccttgggagtggggtcagccctgacttggccaacgaggacggcctgacggccctgcaccagtgctgcattgatgatttccgagagatggtgcagcagctcctggaggctggggccaacatcaatgcctgtgacagtgagtgctggacgcctctgcatgctgcggccacctgcggccacctgcacctggtggagctgctcatcgccagtggcgccaatctcctggcggtcaacaccgacgggaacatgccctatgacctgtgtgatgatgagcagacgctggactgcctggagactgccatggccgaccgtggcatcacccaggacagcatcgaggccgcccgggccgtgccagaactgcgcatgctggacgacatccggagccggctgcaggccggggcagacctccatgcccccctggaccacggggccacgctgctgcacgtcgcagccgccaacgggttcagcgaggcggctgccctgctgctggaacaccgagccagcctgagcgctaaggaccaagacggctgggagccgctgcacgccgcggcctactggggccaggtgcccctggtggagctgctcgtggcgcacggggccgacctgaacgcaaagtccctgatggacgagacgccccttgatgtgtgcggggacgaggaggtgcgggccaagctgctggagctgaagcacaagcacgacgccctcctgcgcgcccagagccgccagcgctccttgctgcgccgccgcacctccagcgccggcagccgcgggaaggtggtgaggcgggtgagcctaacccagcgcaccgacctgtaccgcaagcagcacgcccaggaggccatcgtgtggcaacagccgccgcccaccagcccggagccgcccgaggacaacgatgaccgccagacaggcgcagagctcaggccgccgcccccggaggaggacaaccccgaagtggtcaggccgcacaatggccgagtagggggctccccagtgcggcatctatactccaagcgactagaccggagtgtctcctaccagctgagccccctggacagcaccaccccccacaccctggtccacgacaaggcccaccacaccctggctgacctgaagcgccagcgagctgctgccaagctgcagcgacccccacctgaggggcccgagagccctgagacagctgagcctggcctgcctggtgacacggtgaccccccagcctgactgtggcttcagggcaggcggggacccacccctgctcaagctcacagccccggtgcgtgccctggtgctgcgggtgcagcacggaaaccccggcttctactgtacaggacactggcccctctcaggtcagaagacatgcctggagggatgtctggctgcaaagactatttttatcctgcaactcttgataaagggctgttttgccatggaaaaaaccccacacacacaccacagacacaaataaaaaaagggggggcacgccaaagaatcccccgagggggccccattaaggcatcca

SEQ ID NO: 22769 - DNA, 1956 bp, Homo sapiens
cggcccggaagtgtagcgttgccatggcgagggccgggcgcggggcccgcccccgcagcgcctcagggagcgcggggcccactgacccgcggaagccagcggacccacttgtgcggcggtcggcgcggggcgcgaggtactggcacacggatgaggagtcgtagaagaggggcctgcagattgtgctctcagcaagcctgtcgtctagtggaagacactggccgggacacagagcccacgtgtggacaccgctgtgggttggtggcaggggtcgagcaggtgccatcaggcacatgaacggtggagtcttcaaaggtgtgagcagctgctggaagaggaggtgctcctgaagacactgcggccggcccgcctgtgcccttggtgccctggctgcctagagagcctcacccctgggccctggggccaggactccaggactctgactacctgccctcccccagcctcagcggctgcacctcctcgttagtactgatgcactgacctcggcacacagctgggaggggttgggggctgggtcatggctgctcccaggccccacccaggctcctgagcctagaaggtgaaaagaggactctcaggggctcacaggggctctcactgctggttggccctgccctcccttccccctcagcagggtgcccggaagctggaaccttgttatctgggtaattagtttcagaccctgcactgaggccggccaggtctcggggctgcctcccataggttgtgcaccctgaccccgagagggaggcgaggcgctgcttgtcgacagctagaggctggcctggggagcaggtttggggtgccctcccacactgccctccctgccccggcccatgccccccagggctgcctgggcctggttattgtgtggggcctcctgacccagccaagggcacgaagctctgggaaggggatgcccccgagggtgccagtccagctagctgccccacccctcaggcccagcctggcccccaagctccccactctggtgccccgagcagccctgtgggcaagcagccgccgccatggccgagcacctggagctgctggcagagatgcccatggtgggcaggatgagcacacaggagcggctgaagcatgcccagaagcggcgcgcccagcaggtgaagatgtgggcccaggctgagaaggaggcccagggcaagaagggtcctggggagcgtccccggaaggaggcagccagccaagggctcctgaagcaggtcctcttccctcccagtgttgtccttctggaggccgctgcccgaaatgacctggaagaagtccgccagttccttgggagtggggtcagccctgacttggccaacgaggacggcctgacggccctgcaccagtgctgcattgatgatttccgagagatggtgcagcagctcctggaggctggggccaacatcaatgcctgtgacagtgagtgctggacgcctctgcatgctgcggccacctgcggccacctgcacctggtggagctgctcatcgccagtggcgccaatctcctggcggtcaacaccgacgggaacatgccctatgacctgtgtgatgatgagcagacgctggactgcctggagactgccatggccgaccgtggtaggtgcggcggtgcggctgtgggagggctgccggtcgcgctccctctgagcctgccgcctcgcaggcatcacccaggacagcatcgaggccctgcctgctcatgtgaggctgttgctcagcatgcaggggccctgtcgcgggcacagcccaaggctgcctccccacggtgcgtgccctggtgctgcgggtgcagcacggaaaccccggcttctactgtacaggacactggcccctctcaggtcagaagacatgcctggagggatgtctggctgcaaagactatttttatcctgcaactcttgataaagggctgttttgccatgga

SEQ ID NO: 22770 - DNA, 2930 bp, Homo sapiens
  misc_feature (2820)..(2822): n is a, c, g, or t
atcgcatttaatcctagcaatatgtaagtttaaaggactgcattcccctctactttaaagcttatatcctagatactcagtttgtgaccttggttgacctttggcatttcacgcaagttgaacagcaaaatcaaagcagccatttttaattcgtcattcccaagccctatctgagtggttccaaagtcacctgagaggaaggtttaaattagtccctctcaccccaccattgctataaaacagcaacgttttcattccaattcagccataaagaggtttctcttcttactgggttttgaaatcatttccttttttctttcgtttgcccttcttccttcctgtgttgtactatctctccaaccacgtctataagcagactcaatcttcttgcagaggaagatgagctggcactctgcaaacttctttaataaggacccaaagtttacttgacattaacctctagtaggtgagaaattccaaaaaagctttggggtacattagaatttccaaagctctgaaagatatttcaggagatttaacagcagagttgcacttacacgtgaattctggtctatagtggtcatgtgagttaaattcgaatcctctacttgtatgaccctaggaatagattggaatactgcagaggaccaaagctgaggcatgctaaacagctgcttggaggtggaagcaagttcagtcacctactcagcttcctctctccaccacccagttcctccctcagtatcacattatttttttcttctgcttttcattaacctaactcatctcatcagtacaaccattttcttattctctaactacccccaattcctttagcctctccccacctgtccaaactcagctcagccgtgggccaatgcagcttacagacggttgcagagctaggaagaaaacccagctctcccaaccctgatcgtggaggtctctggccccccaacactgccttctgggggctgcattttttttttttttttgagaagaggtcttttgggatgcatggtgctccacatacagcttcacaaaatatttcattataagagaaaccccttgatttttatttctttttcttttgttttctggattacctgccttcagtaagcagatgcagacccacttgtaaggagtctggttagtgatgagaaaaggatgaaatctagatacaaaagtcaccttgaaggtgatgatggatctttaatccacttgactaagtgtctggaagagctacttgctcttccacccctcatctcaaatgagaggagcagaagtttaacttcctcaaatagcccagctctggctaaaacccaaagaagaaaggtcaaaggaagggaaagcatgtcaggggctggtttgtgacttggcaggaccaggaaacagcagccactgacagcccagagaaggtgactaagggctggcagaagattagaatgttaatttggctgctgtccggactaggaggccatgttcaatggcagtcagaatttgtgttctgcgcattgctgggtctataaatatgataagcaagtggtgacagaattatagtataaggtgatgtactacatgcagatcataaaggctttggttttaagacttaagtagaaaatccctctcctagcttattacccaacaatattcagataatgagcttttggagaatatctttttcctatcactagaaagatttacctgggaactgtctaaagtctacacacatatttccaaagcctttaaataccaactgcagcatggagagagaggggtggcagaagctgaaatgcctcaaaagccatttaagtgttacgttgcaggattttcagtccttctcgttatgtaaaagtagataaatatagacgttattctcaacactaccctatagtatcacagtggtccaaatgccagagcttacagataatgtcatcacagtgcctagaaactcgaactgtaatatatcgtagcattttcttggtgtttcttaaagtttctttccacaatacaaggtcctctctgcctcttgtttcttggagagttcaccccactgatgagtcttccttccctgttggactcagtcatttggggaacagtcttagaagcacatatcaaccaaggaagaaacttcctggatatctattgcccacttgcccaggtctaataaacactaaaggggggaaattgaaaggagctgccaactggtcaacgtggaagggcggttccaccctagattggtgtctttctttttcttcctttttttaaaaaaaatctatttcttaaataataataaatgcacatgatgtgttaaatatgtacatatatatttcaaaagaaaaaatggggcacaagattgtcttacaagtcgtgctggctaatttttagtttgtattcataagtggtttttaaaagccttttttaaagtgtaatttgcatgttctactttgattgtatgtaaacatattttagaacaaaaaatgtatttgtattttattgaatatagaggcaagaaaattgtacattgtttgaaatgttctttttgtaacagtttttattcataaagcatttttgtacatttaaaatgaacatggacttgctgttatttgaggcgtagatacatctagcatgcttactgtcatgctcctccatggtcttagatgttgggttttaaacatttttttctaaaagaaagctcagtcttttccgctaccagatcaggttagcacagtatagagcacttaactattaaaaaaaaaaagttaatcctattcatatgttattcattgtgtgaaattaaagacattcaattcagtcttnnnccgggaaaggcacaggacacggatttaaaaaaaaaaacccttggggggggggcccggggcccaattcccccttttggagaggggttacaataaagggccgggttttac

SEQ ID NO: 22771 - DNA, 2764 bp, Homo sapiens
  misc_feature (2654)..(2656): n is a, c, g, or t
atcgcatttaatcctagcaatatgtaagtttaaaggactgcattcccctctactttaaagcttatatcctagatactcagtttgtgaccttggttgacctttggcatttcacgcaagttgaacagcaaaatcaaagcagccatttttaattcgtcattcccaagccctatctgagtggttccaaagtcacctgagaggaaggtttaaattagtccctctcaccccaccattgctataaaacagcaacgttttcattccaattcagccataaagaggtttctcttcttactgggttttgaaatcatttccttttttctttcgtttgcccttcttccttcctgtgttgtactatctctccaaccacgtctataagcagactcaatcttcttgcagaggaagatgagctggcactctgcaaacttctttaataaggacccaaagtttacttgacattaacctctagtaggtgagaaattccaaaaaagctttggggtacattagaatttccaaagctctgaaagatatttcaggagatttaacagcagagttgcacttacacgtgaattctggtctatagtggtcatgtgagttaaattcgaatcctctacttgtatgaccctaggaatagattggaatactgcagaggaccaaagctgaggcatgctaaacagctgcttggaggtggaagcaagttcagtcacctactcagcttcctctctccaccacccagttcctccctcagtatcacattatttttttcttctgcttttcattaacctaactcatctcatcagtacaaccattttcttattctctaactacccccaattcctttagcctctccccacctgtccaaactcagctcagccgtgggccaatgcagcttacagacggttgcagagctaggaagaaaacccagctctcccaaccctgatcgtggaggtctctggccccccaacactgccttctgggggctgcattttttttttttttttgagaagaggtcttttgggatgcatggtgctccacatacagcttcacaaaatatttcattataagagaaaccccttgatttttatttctttttcttttgttttctggaagagctacttgctcttccacccctcatctcaaatagcccagctctggctaaaacccaaagaagaaaggtcaaaggaagggaaagcatgtcaggggctggtttgtgacttggcaggaccaggaaacagcagccactgacagcccagagaaggtgactaagggctggcagaagattagaatgttaatttggctgctgtccggactaggaggccatgttcaatggcagtcagaatttgtgttctgcgcattgctgggtctataaatatgataagcaagtggtgacagaattatagtataaggtgatgtactacatgcagatcataaaggctttggttttaagacttaagtagaaaatccctctcctagcttattacccaacaatattcagataatgagcttttggagaatatctttttcctatcactagaaagatttacctgggaactgtctaaagtctacacacatatttccaaagcctttaaataccaactgcagcatggagagagaggggtggcagaagctgaaatgcctcaaaagccatttaagtgttacgttgcaggattttcagtccttctcgttatgtaaaagtagataaatatagacgttattctcaacactaccctatagtatcacagtggtccaaatgccagagcttacagataatgtcatcacagtgcctagaaactcgaactgtaatatatcgtagcattttcttggtgtttcttaaagtttctttccacaatacaaggtcctctctgcctcttgtttcttggagagttcaccccactgatgagtcttccttccctgttggactcagtcatttggggaacagtcttagaagcacatatcaaccaaggaagaaacttcctggatatctattgcccacttgcccaggtctaataaacactaaaggggggaaattgaaaggagctgccaactggtcaacgtggaagggcggttccaccctagattggtgtctttctttttcttcctttttttaaaaaaaatctatttcttaaataataataaatgcacatgatgtgttaaatatgtacatatatatttcaaaagaaaaaatggggcacaagattgtcttacaagtcgtgctggctaatttttagtttgtattcataagtggtttttaaaagccttttttaaagtgtaatttgcatgttctactttgattgtatgtaaacatattttagaacaaaaaatgtatttgtattttattgaatatagaggcaagaaaattgtacattgtttgaaatgttctttttgtaacagtttttattcataaagcatttttgtacatttaaaatgaacatggacttgctgttatttgaggcgtagatacatctagcatgcttactgtcatgctcctccatggtcttagatgttgggttttaaacatttttttctaaaagaaagctcagtcttttccgctaccagatcaggttagcacagtatagagcacttaactattaaaaaaaaaaagttaatcctattcatatgttattcattgtgtgaaattaaagacattcaattcagtcttnnnccgggaaaggcacaggacacggatttaaaaaaaaaaacccttggggggggggcccggggcccaattcccccttttggagaggggttacaataaagggccgggttttac

SEQ ID NO: 22772 - DNA, 153 bp, Homo sapiens
taaaagaaagctcagtcttttccgctaccagatcaggttagcacagtatagagcacttaactattaaaaaaaaaaagttaatcctattcatatgttattcattgtgtgaaattaaagacattcaattcagtctaacatgagttgtgaattctt

SEQ ID NO: 22773 - DNA, 873 bp, Homo sapiens
ctcaagcttacttaattctcctgcctcagcctcctgagtagctgggactacagccacacactaccatccctggcttatttttatactttttgtagagatgggattttgtcatgttccctaggctggtctcaaactcctgggctcaagtgatttgcccaccctggcctcccagagtctggaattacaagtgtgagccaccatgcacagccctcatatttttaaaagataaaattattctcaggaggtctgagttaccactttaagatagcagaaaaacatttttaaaatggttaattttatctaaagaaagcaagctgtgaaaaataccatagttttaccaaataatgtttctaaaatccaaatgtattgatatacagtaacacactcaatatgtgacagttatgtacaagctactatgctgtatgctacagagaatatagcatagagaaccaaagatacagccctcaacctcgaggagtccagtaaaagaggtaagtgtcaaggaggaaatggtatcggtgaagataaaattacttcttgttgagtggatcaggagagacccttagagggcaatggcctgtgagttggatcttacaggtgtaatttgaacatagaaatagacacgcacacagaactttccttggaatggaaataatgagcaaaagtagaaagtaggaaattatggagcttgaagagaattactgaatagttcatggtattaacatgaaaaggggcaaggtaggaaataagtttggaaaggtaaaattccagtttttaacttaatgggtgaaaacagttctgcttttttttgtcttaaaaattaatatgagaaacaaatatgaactccatctttaatgaaactaggaaaaatat

SEQ ID NO: 22774 - DNA, 1406 bp, Homo sapiens
cgcggggtcgccgcggtgctgctgctcagtgggagcgggtcttcgcaactgtctccgcgtggcgcgcgcctctagccgcccttcccctggcggctacggccggagggagcggaggcgagcgggagtcgggctccatggagagcggcggacaactgggcagaggcggagctttcatctcggcaccctggttccagtgacccgcgctagcgtcccgtcccgcccgcgtcggagcggccgccggccccgggactgaccggcctcgccgcacctcccgcaccgactagcgctcccgggcgctcctgcgcccgactcgccctcgcccccactccccggcggggtggcggcggccgggcccccacggcggcggccggagcagcagcagcagcagcaggagcccgcctctatgatgaagttcaagcccaaccagacgcggacctacgaccgcgagggcttcaagaagcgggcggcgtgcctgtgcttccggagcgagcaggaggacgaggtgctgctggtgagtagcagccggtacccagaccagtggattgtcccaggaggaggaatggaacccgaggaggaacctggcggtgctgccgtgagggaagtttatgaggaggctggagtcaaaggaaaactaggcagacttctgggcatatttgagcagaaccaagaccgaaagcacagaacatatgtttatgttctaacagtcactgaaatattagaagattgggaagattctgttaatattggaaggaagagagagtggttcaaagtagaagatgctatcaaagttctccagtgtcataaacctgtacatgcagagtatctggaaaagctaaagctgggttgttccccagccaatggaaattctacagtcccttcccttccggataataatgccttgtttgtaaccgctgcacagacctctgggttgccatctagtgtaagatagagagaactgggtaggcctctcccaccatgtgcagtctcatggggagaggcttctttcgtttcctcgtcaaacatctgattgacgcttgcaaactgtctgaatttgccatgcaaggttttcaaacaatttgcatgtttttcagatgctttcaaatctttttttaaaaaaatagtgtaaaatattttaataagccaaagccatgtggaatttttgtttagatgccttaactgtgccacaccccacaaccccctatattattttggttgtctatttctcacagcatattttcagttttttgtccatttgacatcagtctgtggtttattttgtcatcagattacttgtgggtatacctaccccaaaattgttttctcattcacagcattagcatattcagcaaatccatctgtggtgggaattaaaaatattattggtattaaagaaatccattcacccc

SEQ ID NO: 22775 - DNA, 8593 bp, Homo sapiens
cgcggggtcgccgcggtgctgctgctcagtgggagcgggtcttcgcaactgtctccgcgtggcgcgcgcctctagccgcccttcccctggcggctacggccggagggagcggaggcgagcgggagtcgggctccatggagagcggcggacaactgggcagaggcggagctttcatctcggcaccctggttccagtgacccgcgctagcgtcccgtcccgcccgcgtcggagcggccgccggccccgggactgaccggcctcgccgcacctcccgcaccgactagcgctcccgggcgctcctgcgcccgactcgccctcgcccccactccccggcggggtggcggcggccgggcccccacggcggcggccggagcagcagcagcagcagcaggagcccgcctctatgatgaagttcaagcccaaccagacgcggacctacgaccgcgagggcttcaagaagcgggcggcgtgcctgtgcttccggagcgagcaggaggacgaggtgctgctggtgagtagcagccggtacccagaccagtggattgtcccaggaggaggaatggaacccgaggaggaacctggcggtgctgccgtgagggaagtttatgaggaggctggagtcaaaggaaaactaggcagacttctgggcatatttgagcagaaccaagaccgaaagcacagaacatatgtttatgttctaacagtcactgaaatattagaagattgggaagattctgttaatattggaaggaagagagagtggttcaaagtagaagatgctatcaaagttctccagtgtcataaacctgtacatgcagagtatctggaaaagctaaagctgggttgttccccagccaatggaaattctacagtcccttcccttccggataataatgccttgtttgtaaccgctgcacagacctctgggttgccatctagtgtaagatagagagaactgggtaggcctctcccaccatgtgcagtctcatggggagaggcttctttcgtttcctcgtcaaacatctgattgacgcttgcaaactgtctgaatttgccatgcaaggttttcaaacaatttgcatgtttttcagatgctttcaaatctttttttaaaaaaatagtgtaaaatattttaataagccaaagccatgtggaatttttgtttagatgccttaactgtgccacaccccacaaccccctatattattttggttgtctatttctcacagcatattttcagttttttgtccatttgacatcagtctgtggtttattttgtcatcagattacttgtgggtatacctaccccaaaattgttttctcattcacagcattagcatattcagcaaatccatctgtggtgggaattaaaaatattattggtattaaagaaatccattcaccccaaaacttgttttacaggattacaattttaattcaaaatttccagatttgggctatttctgtatgatccaataacttattttgtcacagggcttaatttgccatttttggggatttgtcgactcattttgtctgaattttcacaactggtattatgtcactagctacctgatacggctatttcccttataactcaatagtaccttaacacaaagtataactctgtagagttggtgaatattttagggaaatattagcaaaatgcatgtagtaaagacatcttatgaaaactgtattcatggaatttgatttagcatgctcagttgccagttcccattatcgatactctttctttgcagaataccttagaaccgttatttccctcagtgtagattgctcttaaaatgtattcagttatttagtggcccccacaggagtggagtcttgaaatctaattctaaatgccagtcagtgatgatcgcatcacagttgagtgaaatggccttcctgttcagctgttagagactgaagattgttagggcaccttagaatgtctcatcttttctaggttgtcaacaggtactatttgtcacataactaactttcgaggcactggaacatacctgaactaagaattaaatcttttactttatactcacttaaaatcaagaatcccatctaaaacacataggtaccttatctgaaactcttgcacttccccaaccagggcagaaatgaggtgggagaagtttgactaaaatgagggatgggggaaagtaaaagatgtttttttttttttgagactcgctttgtcacccaggctggagtgcaatggcacaatctcaactcaccgcaacctccgcctcccgggttcaagcgattctcctgcctcagcctcccgagtagttgggattacaggcgcctgcctccatgcctggctaattttgtatttttagtagagacagggtttcttcatgttggtcaggctggtctcaaactcctaacctcgtgatccgcctgcctcgacctcccaaagtgctgggattacaggcatgagccaccatgcccagccaaagatcatttttttatatagacttcagccctttgtaaatattgtaactggggagtatagagtagaaaaaaagtatagttaaaacatttgttctacaaattaacctttaaaaatataattactgctaaaaatagagtgctgttacacttaaggaaaattagtgccattttggaaatgagatcttgtgccataaatacagctgaactgaatataaatgttcacaaattaatgctgtcaaaggaatgagtaaagcagaaaaacttttaaccagcaacatttcaagtacgtagtgtgatcaaacatgatcatccagaatttttatatttttttctttgtacagaggttacatattctgggtgttcttttataaaggaaacattttaaatcccacaaattgacactttctatcttcaatggactaagatttttttggtcagtaatctctgaaatttccttaaattatatacttaacatagcagagaaactggattgtttttgtatataagactgcttccacctgaaatgctgtcataagtactgggggggtgggggagtgcccatcttgtacatgatattcttagaggtaataaggtaatgatgcatgaatttattttataaactcttggactatgtatttgacatgtaaaatatgtacagtattaacgtcaaccatctctttaaagttagcctataaatattgttgtataattttctttggtcagaaacacttggactgaatagtgacactcggtaaggattttcagtgccatttagcaaaacgtctttagtctatgcaactagcaaaaatctgcataatgcaacaacacagttttcacacttcaaattttacatgaggggttcttcacgattctcctggaacccagtctagcaaaatgagaggaaaggccctagggagatttatttctgttaaatagttaactctgctgagtatgacaaatagtgtctactatctcaaccctccaaaatttgcagagtgttgggactgtcatttgtgattttttttttttttttttggtggggtagttgaataaaattgggcagctaaatttttcagttccatgtgcctcccaaataaaaaacagaaaataagtagtttttgtgaattgacttgcagacaaagtagaaactgtgctgcatgatgttattttgtaaacagatgacattttctgaccaggcacatgccatccaattttctgtcaatcacactgttgtataaagcagcagaactgaaggggaaaaatgattgttgtatacactgaattgctttgcatggtctcatttgagataattgatgtaagaatcctgacttttttatatttggaaacatcaaataaaaatggaaaaaatgatcatggctttaaaaaaaaaacaaaaacacacacacatgaactcagatttgcaaaccaggtttctgaaactttgggtaaggtgtatgcttttaactttgaaatgtataaacacccagcggaaacgtatacctttcagtgcatagtgcattgtgtgcttaccctgggttgtttaaacttgtgttcaaatattccccctccaagtgaaagcctgtcgggaattccacagtaacacctttactgttctcccattgatgatcatatacgttacctcttcctagcggtacatttgtatgatccttactactggaattaccgggttaaaaggaaatgcttaccactaagatgtcagtattctcctcatggatattttcagtctcaatgttgccagtctaatagtatagtatgtggttgctttactgctgttctccccacccccgtggagttgtgtcattattttaatgaatgtgagctcttgacttactctagaattctaatacagatactttctgcactagtatcacttttattattgcagttccatttaaaagcataactggctaagtcaccgccccacccgccgcattacatttcctaaaacatactgctgccaaagaccaactgtagaatccttaagtcctgttcaagtgtcacttcattttttattaggggtttcttagttggagggcatgagaaacttggccctttccaatgttgtcttcacattggagtataagaattctctataggactcttttaatttttttttttttttggtagagatggggtcttgctgtgttgcccaggctggtctcaaactcctaggcttaagcagtcctccagcctcagccttctcaaagtgctaggatgattggcatgagccacctcgtctggcctgcaggtctttttaagcatttgctgttcaataataagcatcttctttatgcctagtatttgtgataagagcacaaaacaattttctaatctcaaagagcttatattctagtggggtagagataagtgatttatcttggtgtagttttggcttttttgtttgtttttttgagacagcatctcacactgtcgcccaggctggagtgcagtggtgcaatctcagcttactgtaacctccgcctgccaggttcaagcgattctcctgcctcatcctcccgaggagctgggatcacaggcgcctgccaccacgcccggctaatttttttgtatttttagtagagacggggtttcaccatattggccaggctggtctcaaactcctgacctcgtgatccgcctgcctcggcctccctaagtgctgggattatgggcgtgaaccaccgcacctggcctatcttggtgtttttacatccttcagtatttttcaaggttttacagcttttttatctatagacttataccatcttcaaaagcaatacaattttatttgtagacgtgatttcccccaccaaatgcacattttatggagctctaggacaaaagtcaggatgaaaagtaatctatcgctggtgctactttaataccttcctgactggtgccactggctaaattctagcagtacgatgagagggccattaaggcctatcttagcaagcaagacattatagcaaagacctaaacactcaaaggttcaacgtcttctagccagggaactattctctaattcttccaccttgatatgatttcagcaaattctgataacccggtattactcttaatgcatttttgtaacatttgacaaacatctcccaatatgtagactcccactctcctgatgctaatcagtatcagacaatggaagtaaattttcctgcttttctcaacttttcctcaaattcatgttagtgaagtactttcatttggccatcattatttatcaaccttaagaaacatgcctattgacgaagtaaatatactaggaattcaacgtatctacgggaatgtggacaaagacatataccaagacaaggcactagagtgaaaagccattaaaataaaatgctcagcagcaaaggatttgtaatggttaacttgcaatatatccatatggtgtaatattacagtcattagaaatgacatttgcgtaaggatctgagtggaaactgatacagcctgtcggagagctactgagtagtattttatcacagctgcatacataccctttcacccaacagttccactcctgggagtctagtcaacaaatggacaagttgcacaaccaagctatggtcaaatatgtgtgttgtaggatttatgaaactggtaccaatttaatattcaaatgtgattaagtcatggcaatctatttactggatactttgtggttaccaaagagctatgtgctgccacagggagtcctttcaatagtgattgaaaaaggcagaacactactagacagaactacctgttttatgcatgtattggcatacactgaaaaagcttagtcacttaaaatgaggttgtacagattgtagattttgtttttaaacgcctgtatggtttaaaaaatgttttgggaaatagacatgagcagggcagagaactacaacctacaggccaaaccccaccccactgcctgtttgtacggccaacaagtttaaaatttttttaatgttttaggtttttttttttttaaaaaaaatactatgcccatttgtttacaaatcgtctgtgggtgctttctcactacaatggcagaattcagtagttgagacagacctatggtccacaaaggccgaaatatttactgttttaggagaaaaaaacaacatgaattgtaataacttggacttacttggttgctcagtcctgatgtgtcctgttaaaacctaagagaaacagcaccaagttcaatctagtgcaatcagcctatcacatctaagctgcttttgccagatctgatatctactcccgaccttaagccaggagactttgtaaacttactaggttataataaaacttaagaactatcgatatttactaatctacatcatggaactatttcaaaagcagtcatatggtaagatggatcaggagtctttaaaaataaaactgagaaagaaaaatcatgtgatcaattcagtagtagagacagaggttggtatcaagtctatgttcatacacttaccagtgccacccagcagggccatacaagacacatgaaatgagatcagctcaagggtgacaagatgaaactgggagagggccggggagacccgaactcttaatattggattccacacaagaggaaaaattttagtccagctcccagcatggcagctaatggcaagttagtaccataaagccaactcttggaatatacctgacttccacgataaaatggagatgagtgcaggggtgagtgtatagttaagaaaacaaacaatatattactagtccaggtggtagatgacagatttttattatttacacttctctcaaattattacattcagcatgttttgctttttatgttatttaaagtataaaccctcatataattccctaagatgggtggcatgccaagtagctaaatgaaatatcatcccagcccaaaagtacttattcgaatgaaatattacatttttcttaaataaagcaataaattaggtaccctattatcatggtattttcttttttggccagcttttccagataaggttgtattgctactgcaactaacaaaaaagatgtggcagggctgggcagtcgattttcaggaagccacttaatgttcagattcttttcttctctcccaggactttgcagatgctgctgttccctctgcctggagatgttcatctggcctgaatccaaaagtctgtccaagttacttctcttttccatgacagagttacaactatttgtctgtcccccttgccccattagagtatatggtccccaaaggaaagccccatgccattcactcaccacctaatcatccccaacaactagtgggcaaacatgaaacacttttgttgaataatgtgtttcctttagcccagggattacaaagtcaaaggcttacaagggggaaggactagcaggtgtgctcggaggggactctagccaactggagagtaactggtgagaagacaatgacatgctcttagggtgtctgctactcagatcctctcagttaagtcccgtgcacaaaggtgggtcaggtctactgttgccagatcttcagatcattcaaaagttacccgaattctggattttcatgcaaatctcccaatttttaaaaatgttggcatcaaattcagaatgttttaaccagccacactgtgtgggccagggaaaacaggcccaaaggccaggtgaagctgcagttttcaactgctgccttggcctctcccagagccccttaagtcctaagaaggctcagtcaacacactggcactcgtttcatcccactggttgagaaagcaagtcttagcaaagtaatgggggagtcttaccaaaactgcaaaggaaaaaaatatgataccatgaaattagaaattcactgcatttgaaatgaaaatgacttatttctgtacttctataactcacaaatttagcagacatcatttagacatttttgtagtgcaacagatttaaatctggaatttcatggtttgtaaatcactatgtgatactagctataaccatgagcaatattacgggcagtaaatgttgatttctatttcgtttcttgaagttttgtgtggttcatttttaaagtgagattcaa

SEQ ID NO: 22776 - DNA, 7830 bp, Homo sapiens
  misc_feature (7716)..(7716): n is a, c, g, or t
cgcggggtcgccgcggtgctgctgctcagtgggagcgggtcttcgcaactgtctccgcgtggcgcgcgcctctagccgcccttcccctggcggctacggccggagggagcggaggcgagcgggagtcgggctccatggagagcggcggacaactgggcagaggcggagctttcatctcggcaccctggttccagtgacccgcgctagcgtcccgtcccgcccgcgtcggagcggccgccggccccgggactgaccggcctcgccgcacctcccgcaccgactagcgctcccgggcgctcctgcgcccgactcgccctcgcccccactccccggcggggtggcgggcggcggccggagcagcagcagcagcagcaggagcccgcctctatgatgaagttcaagcccaaccagacgcggacctacgaccgcgagggcttcaagaagcgggcggcgtgcctgtgcttccggagcgagcaggaggacgaggtgctgctggtgagtagcagccggtacccagaccagtggattgtcccaggaggaggaatggaacccgaggaggaacctggcggtgctgccgtgagggaagtttatgaggaggctggagtcaaaggaaaactaggcagacttctgggcatatttgagcagaaccaagaccgaaagcacagaacatatgtttatgttctaacagtcactgaaatattagaagattgggaagattctgttaatattggaaggaagagagagtggttcaaagtagaagatgctatcaaagttctccagtgtcataaacctgtacatgcagagtatctggaaaagctaaagctgggttgttccccagccaatggaaattctacagtcccttcccttccggataataatgccttgtttgtaaccgctgcacagacctctgggttgccatctagtgtaagatagagagaactgggtaggcctctcccaccatgtgcagtctcatggggagaggcttctttcgtttcctcgtcaaacatctgattgacgcttgcaaactgtctgaatttgccatgcaaggttttcaaacaatttgcatgtttttcagatgctttcaaatctttttttaaaaaaatagtgtaaaatattttaataagccaaagccatgtggaatttttgtttagatgccttaactgtgccacaccccacaaccccctatattattttggttgtctatttctcacagcatattttcagttttttgtccatttgacatcagtctgtggtttattttgtcatcagattacttgtgggtatacctaccccaaaattgttttctcattcacagcattagcatattcagcaaatccatctgtggtgggaattaaaaatattattggtattaaagaaatccattcaccccaaaacttgttttacaggattacaattttaattcaaaatttccagatttgggctatttctgtatgatccaataacttattttgtcacagggcttaatttgccatttttggggatttgtcgactcattttgtctgaattttcacaactggtattatgtcactagctacctgatacggctatttcccttataactcaatagtaccttaacacaaagtataactctgtagagttggtgaatattttagggaaatattagcaaaatgcatgtagtaaagacatcttatgaaaactgtattcatggaatttgatttagcatgctcagttgccagttcccattatcgatactctttctttgcagaataccttagaaccgttatttccctcagtgtagattgctcttaaaatgtattcagttatttagtggcccccacaggagtggagtcttgaaatctaattctaaatgccagtcagtgatgatcgcatcacagttgagtgaaatggccttcctgttcagctgttagagactgaagattgttagggcaccttagaatgtctcatcttttctaggttgtcaacaggtactatttgtcacataactaactttcgaggcactggaacatacctgaactaagaattaaatcttttactttatactcacttaaaatcaagaatcccatctaaaacacataggtaccttatctgaaactcttgcacttccccaaccagggcagaaatgaggtgggagaagtttgactaaaatgagggatgggggaaagtaaaagatgtttttttttttttgagactcgctttgtcacccaggctggagtgcaatggcacaatctcaactcaccgcaacctccgcctcccgggttcaagcgattctcctgcctcagcctcccgagtagttgggattacaggcgcctgcctccatgcctggctaattttgtatttttagtagagacagggtttcttcatgttggtcaggctggtctcaaactcctaacctcgtgatccgcctgcctcgacctcccaaagtgctgggattacaggcatgagccaccatgcccagccaaagatcatttttttatatagacttcagccctttgtaaatattgtaactggggagtatagagtagaaaaaaagtatagttaaaacatttgttctacaaattaacctttaaaaatataattactgctaaaaatagagtgctgttacacttaaggaaaattagtgccattttggaaatgagatcttgtgccataaatacagctgaactgaatataaatgttcacaaattaatgctgtcaaaggaatgagtaaagcagaaaaacttttaaccagcaacatttcaagtacgtagtgtgatcaaacatgatcatccagaatttttatatttttttctttgtacagaggttacatattctgggtgttcttttataaaggaaacattttaaatcccacaaattgacactttctatcttcaatggactaagatttttttggtcagtaatctctgaaatttccttaaattatatacttaacatagcagagaaactggattgtttttgtatataagactgcttccacctgaaatgctgtcataagtactgggggggtgggggagtgcccatcttgtacatgatattcttagaggtaataaggtaatgatgcatgaatttattttataaactcttggactatgtatttgacatgtaaaatatgtacagtattaacgtcaaccatctctttaaagttagcctataaatattgttgtataattttctttggtcagaaacacttggactgaatagtgacactcggtaaggattttcagtgccatttagcaaaacgtctttagtctatgcaactagcaaaaatctgcataatgcaacaacacagttttcacacttcaaattttacatgaggggttcttcacgattctcctggaacccagtctagcaaaatgagaggaaaggccctagggagatttatttctgttaaatagttaactctgctgagtatgacaaatagtgtctactatctcaaccctccaaaatttgcagagtgttgggactgtcatttgtgattttttttttttttttttggtggggtagttgaataaaattgggcagctaaatttttcagttccatgtgcctcccaaataaaaaacagaaaataagtagtttttgtgaattgacttgcagacaaagtagaaactgtgctgcatgatgttattttgtaaacagatgacattttctgaccaggcacatgccatccaattttctgtcaatcacactgttgtataaagcagcagaactgaaggggaaaaatgattgttgtatacactgaattgctttgcatggtctcatttgagataattgatgtaagaatcctgacttttttatatttggaaacatcaaataaaaatggaaaaaatgatcatggctttaaaaaaaaaacaaaaacacacacacatgaactcagatttgcaaaccaggtttctgaaactttgggtaaggtgtatgcttttaactttgaaatgtataaacacccagcggaaacgtatacctttcagtgcatagtgcattgtgtgcttaccctgggttgtttaaacttgtgttcaaatattccccctccaagtgaaagcctgtcgggaattccacagtaacacctttactgttctcccattgatgatcatatacgttacctcttcctagcggtacatttgtatgatccttactactggaattaccgggttaaaaggaaatgcttaccactaagatgtcagtattctcctcatggatattttcagtctcaatgttgccagtctaatagtatagtatgtggttgctttactgctgttctccccacccccgtggagttgtgtcattattttaatgaatgtgagctcttgacttactctagaattctaatacagatactttctgcactagtatcacttttattattgcagttccatttaaaagcataactggctaagtcaccgccccacccgccgcattacatttcctaaaacatactgctgccaaagaccaactgtagaatccttaagtcctgttcaagtgtcacttcattttttattaggggtttcttagttggagggcatgagaaacttggccctttccaatgttgtcttcacattggagtataagaattctctataggactcttttaatttttttttttttttggtagagatggggtcttgctgtgttgcccaggctggtctcaaactcctaggcttaagcagtcctccagcctcagccttctcaaagtgctaggatgattggcatgagccacctcgtctggcctgcaggtctttttaagcatttgctgttcaataataagcatcttctttatgcctagtatttgtgataagagcacaaaacaattttctaatctcaaagagcttatattctagtggggtagagataagtgatttatcttggtgtagttttggcttttttgtttgtttttttgagacagcatctcacactgtcgcccaggctggagtgcagtggtgcaatctcagcttactgtaacctccgcctgccaggttcaagcgattctcctgcctcatcctcccgaggagctgggatcacaggcgcctgccaccacgcccggctaatttttttgtatttttagtagagacggggtttcaccatattggccaggctggtctcaaactcctgacctcgtgatccgcctgcctcggcctccctaagtgctgggattatgggcgtgaaccaccgcacctggcctatcttggtgtttttacatccttcagtatttttcaaggttttacagcttttttatctatagacttataccatcttcaaaagcaatacaattttatttgtagacgtgatttcccccaccaaatgcacattttatggagctctaggacaaaagtcaggatgaaaagtaatctatcgctggtgctactttaataccttcctgactggtgccactggctaaattctagcagtacgatgagagggccattaaggcctatcttagcaagcaagacattatagcaaagacctaaacactcaaaggttcaacgtcttctagccagggaactattctctaattcttccaccttgatatgatttcagcaaattctgataacccggtattactcttaatgcatttttgtaacatttgacaaacatctcccaatatgtagactcccactctcctgatgctaatcagtatcagacaatggaagtaaattttcctgcttttctcaacttttcctcaaattcatgttagtgaagtactttcatttggccatcattatttatcaaccttaagaaacatgcctattgacgaagtaaatatactaggaattcaacgtatctacgggaatgtggacaaagacatataccaagacaaggcactagagtgaaaagccattaaaataaaatgctcagcagcaaaggatttgtaatggttaacttgcaatatatccatatggtgtaatattacagtcattagaaatgacatttgcgtaaggatctgagtggaaactgatacagcctgtcggagagctactgagtagtattttatcacagctgcatacataccctttcacccaacagttccactcctgggagtctagtcaacaaatggacaagttgcacaaccaagctatggtcaaatatgtgtgttgtaggatttatgaaactggtaccaatttaatattcaaatgtgattaagtcatggcaatctatttactggatactttgtggttaccaaagagctatgtgctgccacagggagtcctttcaatagtgattgaaaaaggcagaacactactagacagaactacctgttttatgcatgtattggcatacactgaaaaagcttagtcacttaaaatgaggttgtacagattgtagattttgtttttaaacgcctgtatggtttaaaaaatgttttgggaaatagacatgagcagggcagagaactacaacctacaggccaaaccccaccccactgcctgtttgtacggccaacaagtttaaaatttttttaatgttttaggtttttttttttttaaaaaaaatactatgcccatttgtttacaaatcgtctgtgggtgctttctcactacaatggcagaattcagtagttgagacagacctatggtccacaaaggccgaaatatttactgttttaggagaaaaaaacaacatgaattgtaataacttggacttacttggttgctcagtcctgatgtgtcctgttaaaacctaagagaaacagcaccaagttcaatctagtgcaatcagcctatcacatctaagctgcttttgccagatctgatatctactcccgaccttaagccaggagactttgtaaacttactaggttataataaaacttaagaactatcgatatttactaatctacatcatggaactatttcaaaagcagtcatatggtaagatggatcaggagtctttaaaaataaaactgagaaagaaaaatcatgtgatcaattcagtagtagagacagaggttggtatcaagtctatgttcatacacttaccagtgccacccagcagggccatacaagacacatgaaatgagatcagctcaagggtgacaagatgaaactgggagagggccggggagacccgaactcttaatattggattccacacaagaggaaaaattttagtccagctcccagcatggcagctaatggcaagttagtaccataaagccaactcttggaatatacctgacttccacgataaaatggagatgagtgcaggggtgagtgtatagttaagaaaacaaacaatatattactagtccaggtggtagatgacagatttttattatttacacttctctcaaattattacattcagcatgttttgctttttatgttatttaaagtataaaccctcatataattccctaagatgggtggcatgccaagtagctaaatgaaatatcatcccagcccaaaagtacttattcgaatgaaatattacatttttcttaaataaagcaataaattaggtaccctattatcatggtattttcttttttggccagcttttccagataaggttgtattgctactgcaactaacaaaaaagatgtggcagggctgggcacggtggctcacgcctgtaatcccagcactttgggaggccgaggcgggcagatcacgaggtcaggagatggagaccatcctggcccaacatggtgaaaccccgtctctactaaaaatacaaaaaattagccaggtgtggtggcaggtgtctgtagtcccagctcctcnggaggctgaggcaggagaatcgcttgaacgcgggaggcagaacctgcagtgagccaagatcatgccacagcactccagcctaaactacagagctagaaagtggctagagcagcc

SEQ ID NO: 22777 - DNA, 7761 bp, Homo sapiens
  misc_feature (7647)..(7647): n is a, c, g, or t
cgcggggtcgccgcggtgctgctgctcagtgggagcgggtcttcgcaactgtctccgcgtggcgcgcgcctctagccgcccttcccctggcggctacggccggagggagcggaggcgagcgggagtcgggctccatggagagcggcggacaactgggcagaggcggagctttcatctcggcaccctggttccagtgacccgcgctagcgtcccgtcccgcccgcgtcggagcggccgccggccccgggactgaccggcgcggccgggcccccacggcggcggccggagcagcagcagcagcagcaggagcccgcctctatgatgaagttcaagcccaaccagacgcggacctacgaccgcgagggcttcaagaagcgggcggcgtgcctgtgcttccggagcgagcaggaggacgaggtgctgctggtgagtagcagccggtacccagaccagtggattgtcccaggaggaggaatggaacccgaggaggaacctggcggtgctgccgtgagggaagtttatgaggaggctggagtcaaaggaaaactaggcagacttctgggcatatttgagcagaaccaagaccgaaagcacagaacatatgtttatgttctaacagtcactgaaatattagaagattgggaagattctgttaatattggaaggaagagagagtggttcaaagtagaagatgctatcaaagttctccagtgtcataaacctgtacatgcagagtatctggaaaagctaaagctgggttgttccccagccaatggaaattctacagtcccttcccttccggataataatgccttgtttgtaaccgctgcacagacctctgggttgccatctagtgtaagatagagagaactgggtaggcctctcccaccatgtgcagtctcatggggagaggcttctttcgtttcctcgtcaaacatctgattgacgcttgcaaactgtctgaatttgccatgcaaggttttcaaacaatttgcatgtttttcagatgctttcaaatctttttttaaaaaaatagtgtaaaatattttaataagccaaagccatgtggaatttttgtttagatgccttaactgtgccacaccccacaaccccctatattattttggttgtctatttctcacagcatattttcagttttttgtccatttgacatcagtctgtggtttattttgtcatcagattacttgtgggtatacctaccccaaaattgttttctcattcacagcattagcatattcagcaaatccatctgtggtgggaattaaaaatattattggtattaaagaaatccattcaccccaaaacttgttttacaggattacaattttaattcaaaatttccagatttgggctatttctgtatgatccaataacttattttgtcacagggcttaatttgccatttttggggatttgtcgactcattttgtctgaattttcacaactggtattatgtcactagctacctgatacggctatttcccttataactcaatagtaccttaacacaaagtataactctgtagagttggtgaatattttagggaaatattagcaaaatgcatgtagtaaagacatcttatgaaaactgtattcatggaatttgatttagcatgctcagttgccagttcccattatcgatactctttctttgcagaataccttagaaccgttatttccctcagtgtagattgctcttaaaatgtattcagttatttagtggcccccacaggagtggagtcttgaaatctaattctaaatgccagtcagtgatgatcgcatcacagttgagtgaaatggccttcctgttcagctgttagagactgaagattgttagggcaccttagaatgtctcatcttttctaggttgtcaacaggtactatttgtcacataactaactttcgaggcactggaacatacctgaactaagaattaaatcttttactttatactcacttaaaatcaagaatcccatctaaaacacataggtaccttatctgaaactcttgcacttccccaaccagggcagaaatgaggtgggagaagtttgactaaaatgagggatgggggaaagtaaaagatgtttttttttttttgagactcgctttgtcacccaggctggagtgcaatggcacaatctcaactcaccgcaacctccgcctcccgggttcaagcgattctcctgcctcagcctcccgagtagttgggattacaggcgcctgcctccatgcctggctaattttgtatttttagtagagacagggtttcttcatgttggtcaggctggtctcaaactcctaacctcgtgatccgcctgcctcgacctcccaaagtgctgggattacaggcatgagccaccatgcccagccaaagatcatttttttatatagacttcagccctttgtaaatattgtaactggggagtatagagtagaaaaaaagtatagttaaaacatttgttctacaaattaacctttaaaaatataattactgctaaaaatagagtgctgttacacttaaggaaaattagtgccattttggaaatgagatcttgtgccataaatacagctgaactgaatataaatgttcacaaattaatgctgtcaaaggaatgagtaaagcagaaaaacttttaaccagcaacatttcaagtacgtagtgtgatcaaacatgatcatccagaatttttatatttttttctttgtacagaggttacatattctgggtgttcttttataaaggaaacattttaaatcccacaaattgacactttctatcttcaatggactaagatttttttggtcagtaatctctgaaatttccttaaattatatacttaacatagcagagaaactggattgtttttgtatataagactgcttccacctgaaatgctgtcataagtactgggggggtgggggagtgcccatcttgtacatgatattcttagaggtaataaggtaatgatgcatgaatttattttataaactcttggactatgtatttgacatgtaaaatatgtacagtattaacgtcaaccatctctttaaagttagcctataaatattgttgtataattttctttggtcagaaacacttggactgaatagtgacactcggtaaggattttcagtgccatttagcaaaacgtctttagtctatgcaactagcaaaaatctgcataatgcaacaacacagttttcacacttcaaattttacatgaggggttcttcacgattctcctggaacccagtctagcaaaatgagaggaaaggccctagggagatttatttctgttaaatagttaactctgctgagtatgacaaatagtgtctactatctcaaccctccaaaatttgcagagtgttgggactgtcatttgtgattttttttttttttttttggtggggtagttgaataaaattgggcagctaaatttttcagttccatgtgcctcccaaataaaaaacagaaaataagtagtttttgtgaattgacttgcagacaaagtagaaactgtgctgcatgatgttattttgtaaacagatgacattttctgaccaggcacatgccatccaattttctgtcaatcacactgttgtataaagcagcagaactgaaggggaaaaatgattgttgtatacactgaattgctttgcatggtctcatttgagataattgatgtaagaatcctgacttttttatatttggaaacatcaaataaaaatggaaaaaatgatcatggctttaaaaaaaaaacaaaaacacacacacatgaactcagatttgcaaaccaggtttctgaaactttgggtaaggtgtatgcttttaactttgaaatgtataaacacccagcggaaacgtatacctttcagtgcatagtgcattgtgtgcttaccctgggttgtttaaacttgtgttcaaatattccccctccaagtgaaagcctgtcgggaattccacagtaacacctttactgttctcccattgatgatcatatacgttacctcttcctagcggtacatttgtatgatccttactactggaattaccgggttaaaaggaaatgcttaccactaagatgtcagtattctcctcatggatattttcagtctcaatgttgccagtctaatagtatagtatgtggttgctttactgctgttctccccacccccgtggagttgtgtcattattttaatgaatgtgagctcttgacttactctagaattctaatacagatactttctgcactagtatcacttttattattgcagttccatttaaaagcataactggctaagtcaccgccccacccgccgcattacatttcctaaaacatactgctgccaaagaccaactgtagaatccttaagtcctgttcaagtgtcacttcattttttattaggggtttcttagttggagggcatgagaaacttggccctttccaatgttgtcttcacattggagtataagaattctctataggactcttttaatttttttttttttttggtagagatggggtcttgctgtgttgcccaggctggtctcaaactcctaggcttaagcagtcctccagcctcagccttctcaaagtgctaggatgattggcatgagccacctcgtctggcctgcaggtctttttaagcatttgctgttcaataataagcatcttctttatgcctagtatttgtgataagagcacaaaacaattttctaatctcaaagagcttatattctagtggggtagagataagtgatttatcttggtgtagttttggcttttttgtttgtttttttgagacagcatctcacactgtcgcccaggctggagtgcagtggtgcaatctcagcttactgtaacctccgcctgccaggttcaagcgattctcctgcctcatcctcccgaggagctgggatcacaggcgcctgccaccacgcccggctaatttttttgtatttttagtagagacggggtttcaccatattggccaggctggtctcaaactcctgacctcgtgatccgcctgcctcggcctccctaagtgctgggattatgggcgtgaaccaccgcacctggcctatcttggtgtttttacatccttcagtatttttcaaggttttacagcttttttatctatagacttataccatcttcaaaagcaatacaattttatttgtagacgtgatttcccccaccaaatgcacattttatggagctctaggacaaaagtcaggatgaaaagtaatctatcgctggtgctactttaataccttcctgactggtgccactggctaaattctagcagtacgatgagagggccattaaggcctatcttagcaagcaagacattatagcaaagacctaaacactcaaaggttcaacgtcttctagccagggaactattctctaattcttccaccttgatatgatttcagcaaattctgataacccggtattactcttaatgcatttttgtaacatttgacaaacatctcccaatatgtagactcccactctcctgatgctaatcagtatcagacaatggaagtaaattttcctgcttttctcaacttttcctcaaattcatgttagtgaagtactttcatttggccatcattatttatcaaccttaagaaacatgcctattgacgaagtaaatatactaggaattcaacgtatctacgggaatgtggacaaagacatataccaagacaaggcactagagtgaaaagccattaaaataaaatgctcagcagcaaaggatttgtaatggttaacttgcaatatatccatatggtgtaatattacagtcattagaaatgacatttgcgtaaggatctgagtggaaactgatacagcctgtcggagagctactgagtagtattttatcacagctgcatacataccctttcacccaacagttccactcctgggagtctagtcaacaaatggacaagttgcacaaccaagctatggtcaaatatgtgtgttgtaggatttatgaaactggtaccaatttaatattcaaatgtgattaagtcatggcaatctatttactggatactttgtggttaccaaagagctatgtgctgccacagggagtcctttcaatagtgattgaaaaaggcagaacactactagacagaactacctgttttatgcatgtattggcatacactgaaaaagcttagtcacttaaaatgaggttgtacagattgtagattttgtttttaaacgcctgtatggtttaaaaaatgttttgggaaatagacatgagcagggcagagaactacaacctacaggccaaaccccaccccactgcctgtttgtacggccaacaagtttaaaatttttttaatgttttaggtttttttttttttaaaaaaaatactatgcccatttgtttacaaatcgtctgtgggtgctttctcactacaatggcagaattcagtagttgagacagacctatggtccacaaaggccgaaatatttactgttttaggagaaaaaaacaacatgaattgtaataacttggacttacttggttgctcagtcctgatgtgtcctgttaaaacctaagagaaacagcaccaagttcaatctagtgcaatcagcctatcacatctaagctgcttttgccagatctgatatctactcccgaccttaagccaggagactttgtaaacttactaggttataataaaacttaagaactatcgatatttactaatctacatcatggaactatttcaaaagcagtcatatggtaagatggatcaggagtctttaaaaataaaactgagaaagaaaaatcatgtgatcaattcagtagtagagacagaggttggtatcaagtctatgttcatacacttaccagtgccacccagcagggccatacaagacacatgaaatgagatcagctcaagggtgacaagatgaaactgggagagggccggggagacccgaactcttaatattggattccacacaagaggaaaaattttagtccagctcccagcatggcagctaatggcaagttagtaccataaagccaactcttggaatatacctgacttccacgataaaatggagatgagtgcaggggtgagtgtatagttaagaaaacaaacaatatattactagtccaggtggtagatgacagatttttattatttacacttctctcaaattattacattcagcatgttttgctttttatgttatttaaagtataaaccctcatataattccctaagatgggtggcatgccaagtagctaaatgaaatatcatcccagcccaaaagtacttattcgaatgaaatattacatttttcttaaataaagcaataaattaggtaccctattatcatggtattttcttttttggccagcttttccagataaggttgtattgctactgcaactaacaaaaaagatgtggcagggctgggcacggtggctcacgcctgtaatcccagcactttgggaggccgaggcgggcagatcacgaggtcaggagatggagaccatcctggcccaacatggtgaaaccccgtctctactaaaaatacaaaaaattagccaggtgtggtggcaggtgtctgtagtcccagctcctcnggaggctgaggcaggagaatcgcttgaacgcgggaggcagaacctgcagtgagccaagatcatgccacagcactccagcctaaactacagagctagaaagtggctagagcagcc

SEQ ID NO: 22778 - DNA, 4360 bp, Homo sapiens
cgcggggtcgccgcggtgctgctgctcagtgggagcgggtcttcgcaactgtctccgcgtggcgcgcgcctctagccgcccttcccctggcggctacggccggagggagcggaggcgagcgggagtcgggctccatggagagcggcggacaactgggcagaggcggagctttcatctcggcaccctggttccagtgacccgcgctagcgtcccgtcccgcccgcgtcggagcggccgccggccccgggactgaccggcctcgccgcacctcccgcaccgactagcgctcccgggcgctcctgcgcccgactcgccctcgcccccactccccggcggggtggcggcggccgggcccccacggcggcggccggagcagcagcagcagcagcaggagcccgcctctatgatgaagttcaagcccaaccagacgcggacctacgaccgcgagggcttcaagaagcgggcggcgtgcctgtgcttccggagcgagcaggaggacgaggtgctgctggtgagtagcagccggtacccagaccagtggattgtcccaggaggaggaatggaacccgaggaggaacctggcggtgctgccgtgagggaagtttatgaggaggctggagtcaaaggaaaactaggcagacttctgggcatatttgagcagaaccaagaccgaaagcacagaacatatgtttatgttctaacagtcactgaaatattagaagattgggaagattctgttaatattggaaggaagagagagtggttcaaagtagaagatgctatcaaagttctccagtgtcataaacctgtacatgcagagtatctggaaaagctaaagctgggttgttccccagccaatggaaattctacagtcccttcccttccggataataatgccttgtttgtaaccgctgcacagacctctgggttgccatctagtgtaagatagagagaactgggtaggcctctcccaccatgtgcagtctcatggggagaggcttctttcgtttcctcgtcaaacatctgattgacgcttgcaaactgtctgaatttgccatgcaaggttttcaaacaatttgcatgtttttcagatgctttcaaatctttttttaaaaaaatagtgtaaaatattttaataagccaaagccatgtggaatttttgtttagatgccttaactgtgccacaccccacaaccccctatattattttggttgtctatttctcacagcatattttcagttttttgtccatttgacatcagtctgtggtttattttgtcatcagattacttgtgggtatacctaccccaaaattgttttctcattcacagcattagcatattcagcaaatccatctgtggtgggaattaaaaatattattggtattaaagaaatccattcaccccaaaacttgttttacaggattacaattttaattcaaaatttccagatttgggctatttctgtatgatccaataacttattttgtcacagggcttaatttgccatttttggggatttgtcgactcattttgtctgaattttcacaactggtattatgtcactagctacctgatacggctatttcccttataactcaatagtaccttaacacaaagtataactctgtagagttggtgaatattttagggaaatattagcaaaatgcatgtagtaaagacatcttatgaaaactgtattcatggaatttgatttagcatgctcagttgccagttcccattatcgatactctttctttgcagaataccttagaaccgttatttccctcagtgtagattgctcttaaaatgtattcagttatttagtggcccccacaggagtggagtcttgaaatctaattctaaatgccagtcagtgatgatcgcatcacagttgagtgaaatggccttcctgttcagctgttagagactgaagattgttagggcaccttagaatgtctcatcttttctaggttgtcaacaggtactatttgtcacataactaactttcgaggcactggaacatacctgaactaagaattaaatcttttactttatactcacttaaaatcaagaatcccatctaaaacacataggtaccttatctgaaactcttgcacttccccaaccagggcagaaatgaggtgggagaagtttgactaaaatgagggatgggggaaagtaaaagatgtttttttttttttgagactcgctttgtcacccaggctggagtgcaatggcacaatctcaactcaccgcaacctccgcctcccgggttcaagcgattctcctgcctcagcctcccgagtagttgggattacaggcgcctgcctccatgcctggctaattttgtatttttagtagagacagggtttcttcatgttggtcaggctggtctcaaactcctaacctcgtgatccgcctgcctcgacctcccaaagtgctgggattacaggcatgagccaccatgcccagccaaagatcatttttttatatagacttcagccctttgtaaatattgtaactggggagtatagagtagaaaaaaagtatagttaaaacatttgttctacaaattaacctttaaaaatataattactgctaaaaatagagtgctgttacacttaaggaaaattagtgccattttggaaatgagatcttgtgccataaatacagctgaactgaatataaatgttcacaaattaatgctgtcaaaggaatgagtaaagcagaaaaacttttaaccagcaacatttcaagtacgtagtgtgatcaaacatgatcatccagaatttttatatttttttctttgtacagaggttacatattctgggtgttcttttataaaggaaacattttaaatcccacaaattgacactttctatcttcaatggactaagatttttttggtcagtaatctctgaaatttccttaaattatatacttaacatagcagagaaactggattgtttttgtatataagactgcttccacctgaaatgctgtcataagtactgggggggtgggggagtgcccatcttgtacatgatattcttagaggtaataaggtaatgatgcatgaatttattttataaactcttggactatgtatttgacatgtaaaatatgtacagtattaacgtcaaccatctctttaaagttagcctataaatattgttgtataattttctttggtcagaaacacttggactgaatagtgacactcggtaaggattttcagtgccatttagcaaaacgtctttagtctatgcaactagcaaaaatctgcataatgcaacaacacagttttcacacttcaaattttacatgaggggttcttcacgattctcctggaacccagtctagcaaaatgagaggaaaggccctagggagatttatttctgttaaatagttaactctgctgagtatgacaaatagtgtctactatctcaaccctccaaaatttgcagagtgttgggactgtcatttgtgattttttttttttttttttggtggggtagttgaataaaattgggcagctaaatttttcagttccatgtgcctcccaaataaaaaacagaaaataagtagtttttgtgaattgacttgcagacaaagtagaaactgtgctgcatgatgttattttgtaaacagatgacattttctgaccaggcacatgccatccaattttctgtcaatcacactgttgtataaagcagcagaactgaaggggaaaaatgattgttgtatacactgaattgctttgcatggtctcatttgagataattgatgtaagaatcctgacttttttatatttggaaacatcaaataaaaatggaaaaaatgatcatggctttaaaaaaaaaacaaaaacacacacacatgaactcagatttgcaaaccaggtttctgaaactttgggtaaggtgtatgcttttaactttgaaatgtataaacacccagcggaaacgtatacctttcagtgcatagtgcattgtgtgcttaccctgggttgtttaaacttgtgttcaaatattccccctccaagtgaaagcctgtcgggaattccacagtaacacctttactgttctcccattgatgatcatatacgttacctcttcctagcggtacatttgtatgatccttactactggaattaccgggttaaaaggaaatgcttaccactaagatgtcagtattctcctcatggatattttcagtctcaatgttgccagtctaatagtatagtatgtggttgctttactgctgttctccccacccccgtggagttgtgtcattattttaatgaatgtgagctcttgacttactctagaattctaatacagatactttctgcacta

SEQ ID NO: 22779 - DNA, 8539 bp, Homo sapiens
cgcggggtcgccgcggtgctgctgctcagtgggagcgggtcttcgcaactgtctccgcgtggcgcgcgcctctagccgcccttcccctggcggctacggccggagggagcggaggcgagcgggagtcgggctccatggagagcggcggacaactgggcagaggcggagctttcatctcggcaccctggttccagtgacccgcgctagcgtcccgtcccgcccgcgtcggagcggccgccggccccgggactgaccggcctcgccgcacctcccgcaccgactagcgctcccgggcgctcctgcgcccgactcgccctcgcccccactccccggcggggtggcggcggccgggcccccacggcggcggccggagcagcagcagcagcagcaggagcccgcctctatgatgaagttcaagcccaaccagacgcggacctacgaccgcgagggcttcaagaagcgggcggcgtgcctgtgcttccggagcgagcaggaggacgaggtgctgctggtgagtagcagccggtacccagaccagtggattgtcccaggaggaggaatggaacccgaggaggaacctggcggtgctgccgtgagggaagtttatgaggaggctggagtcaaaggaaaactaggcagacttctgggcatatttgagcagaaccaagaccgaaagcacagaacatatgtttatgttctaacagtcactgaaatattagaagattgggaagattctgttaatattggaaggaagagagagtggttcaaagtagaagatgctatcaaagttctccagtgtcataaacctgtacatgcagagtatctggaaaagctaaagctgggttgttccccagccaatggaaattctacagtcccttcccttccggataataatgccttgtttgtaaccgctgcacagacctctgggttgccatctagtgtaagatagagagaactgggtaggcctctcccaccatgtgcagtctcatggggagaggcttctttcgtttcctcgtcaaacatctgattgacgcttgcaaactgtctgaatttgccatgcaaggttttcaaacaatttgcatgtttttcagatgctttcaaatctttttttaaaaaaatagtgtaaaatattttaataagccaaagccatgtggaatttttgtttagatgccttaactgtgccacaccccacaaccccctatattattttggttgtctatttctcacagcatattttcagttttttgtccatttgacatcagtctgtggtttattttgtcatcagattacttgtgggtatacctaccccaaaattgttttctcattcacagcattagcatattcagcaaatccatctgtggtgggaattaaaaatattattggtattaaagaaatccattcaccccaaaacttgttttacaggattacaattttaattcaaaatttccagatttgggctatttctgtatgatccaataacttattttgtcacagggcttaatttgccatttttggggatttgtcgactcattttgtctgaattttcacaactggtattatgtcactagctacctgatacggctatttcccttataactcaatagtaccttaacacaaagtataactctgtagagttggtgaatattttagggaaatattagcaaaatgcatgtagtaaagacatcttatgaaaactgtattcatggaatttgatttagcatgctcagttgccagttcccattatcgatactctttctttgcagaataccttagaaccgttatttccctcagtgtagattgctcttaaaatgtattcagttatttagtggcccccacaggagtggagtcttgaaatctaattctaaatgccagtcagtgatgatcgcatcacagttgagtgaaatggccttcctgttcagctgttagagactgaagattgttagggcaccttagaatgtctcatcttttctaggttgtcaacaggtactatttgtcacataactaactttcgaggcactggaacatacctgaactaagaattaaatcttttactttatactcacttaaaatcaagaatcccatctaaaacacataggtaccttatctgaaactcttgcacttccccaaccagggcagaaatgaggtgggagaagtttgactaaaatgagggatgggggaaagtaaaagatgtttttttttttttgagactcgctttgtcacccaggctggagtgcaatggcacaatctcaactcaccgcaacctccgcctcccgggttcaagcgattctcctgcctcagcctcccgagtagttgggattacaggcgcctgcctccatgcctggctaattttgtatttttagtagagacagggtttcttcatgttggtcaggctggtctcaaactcctaacctcgtgatccgcctgcctcgacctcccaaagtgctgggattacaggcatgagccaccatgcccagccaaagatcatttttttatatagacttcagccctttgtaaatattgtaactggggagtatagagtagaaaaaaagtatagttaaaacatttgttctacaaattaacctttaaaaatataattactgctaaaaatagagtgctgttacacttaaggaaaattagtgccattttggaaatgagatcttgtgccataaatacagctgaactgaatataaatgttcacaaattaatgctgtcaaaggaatgagtaaagcagaaaaacttttaaccagcaacatttcaagtacgtagtgtgatcaaacatgatcatccagaatttttatatttttttctttgtacagaggttacatattctgggtgttcttttataaaggaaacattttaaatcccacaaattgacactttctatcttcaatggactaagatttttttggtcagtaatctctgaaatttccttaaattatatacttaacatagcagagaaactggattgtttttgtatataagactgcttccacctgaaatgctgtcataagtactgggggggtgggggagtgcccatcttgtacatgatattcttagaggtaataaggtaatgatgcatgaatttattttataaactcttggactatgtatttgacatgtaaaatatgtacagtattaacgtcaaccatctctttaaagttagcctataaatattgttgtataattttctttggtcagaaacacttggactgaatagtgacactcggtaaggattttcagtgccatttagcaaaacgtctttagtctatgcaactagcaaaaatctgcataatgcaacaacacagttttcacacttcaaattttacatgaggggttcttcacgattctcctggaacccagtctagcaaaatgagaggaaaggccctagggagatttatttctgttaaatagttaactctgctgagtatgacaaatagtgtctactatctcaaccctccaaaatttgcagagtgttgggactgtcatttgtgattttttttttttttttttggtggggtagttgaataaaattgggcagctaaatttttcagttccatgtgcctcccaaataaaaaacagaaaataagtagtttttgtgaattgacttgcagacaaagtagaaactgtgctgcatgatgttattttgtaaacagatgacattttctgaccaggcacatgccatccaattttctgtcaatcacactgttgtataaagcagcagaactgaaggggaaaaatgattgttgtatacactgaattgctttgcatggtctcatttgagataattgatgtaagaatcctgacttttttatatttggaaacatcaaataaaaatggaaaaaatgatcatggctttaaaaaaaaaacaaaaacacacacacatgaactcagatttgcaaaccaggtttctgaaactttgggtaaggtgtatgcttttaactttgaaatgtataaacacccagcggaaacgtatacctttcagtgcatagtgcattgtgtgcttaccctgggttgtttaaacttgtgttcaaatattccccctccaagtgaaagcctgtcgggaattccacagtaacacctttactgttctcccattgatgatcatatacgttacctcttcctagcggtacatttgtatgatccttactactggaattaccgggtttctcaatgttgccagtctaatagtatagtatgtggttgctttactgctgttctccccacccccgtggagttgtgtcattattttaatgaatgtgagctcttgacttactctagaattctaatacagatactttctgcactagtatcacttttattattgcagttccatttaaaagcataactggctaagtcaccgccccacccgccgcattacatttcctaaaacatactgctgccaaagaccaactgtagaatccttaagtcctgttcaagtgtcacttcattttttattaggggtttcttagttggagggcatgagaaacttggccctttccaatgttgtcttcacattggagtataagaattctctataggactcttttaatttttttttttttttggtagagatggggtcttgctgtgttgcccaggctggtctcaaactcctaggcttaagcagtcctccagcctcagccttctcaaagtgctaggatgattggcatgagccacctcgtctggcctgcaggtctttttaagcatttgctgttcaataataagcatcttctttatgcctagtatttgtgataagagcacaaaacaattttctaatctcaaagagcttatattctagtggggtagagataagtgatttatcttggtgtagttttggcttttttgtttgtttttttgagacagcatctcacactgtcgcccaggctggagtgcagtggtgcaatctcagcttactgtaacctccgcctgccaggttcaagcgattctcctgcctcatcctcccgaggagctgggatcacaggcgcctgccaccacgcccggctaatttttttgtatttttagtagagacggggtttcaccatattggccaggctggtctcaaactcctgacctcgtgatccgcctgcctcggcctccctaagtgctgggattatgggcgtgaaccaccgcacctggcctatcttggtgtttttacatccttcagtatttttcaaggttttacagcttttttatctatagacttataccatcttcaaaagcaatacaattttatttgtagacgtgatttcccccaccaaatgcacattttatggagctctaggacaaaagtcaggatgaaaagtaatctatcgctggtgctactttaataccttcctgactggtgccactggctaaattctagcagtacgatgagagggccattaaggcctatcttagcaagcaagacattatagcaaagacctaaacactcaaaggttcaacgtcttctagccagggaactattctctaattcttccaccttgatatgatttcagcaaattctgataacccggtattactcttaatgcatttttgtaacatttgacaaacatctcccaatatgtagactcccactctcctgatgctaatcagtatcagacaatggaagtaaattttcctgcttttctcaacttttcctcaaattcatgttagtgaagtactttcatttggccatcattatttatcaaccttaagaaacatgcctattgacgaagtaaatatactaggaattcaacgtatctacgggaatgtggacaaagacatataccaagacaaggcactagagtgaaaagccattaaaataaaatgctcagcagcaaaggatttgtaatggttaacttgcaatatatccatatggtgtaatattacagtcattagaaatgacatttgcgtaaggatctgagtggaaactgatacagcctgtcggagagctactgagtagtattttatcacagctgcatacataccctttcacccaacagttccactcctgggagtctagtcaacaaatggacaagttgcacaaccaagctatggtcaaatatgtgtgttgtaggatttatgaaactggtaccaatttaatattcaaatgtgattaagtcatggcaatctatttactggatactttgtggttaccaaagagctatgtgctgccacagggagtcctttcaatagtgattgaaaaaggcagaacactactagacagaactacctgttttatgcatgtattggcatacactgaaaaagcttagtcacttaaaatgaggttgtacagattgtagattttgtttttaaacgcctgtatggtttaaaaaatgttttgggaaatagacatgagcagggcagagaactacaacctacaggccaaaccccaccccactgcctgtttgtacggccaacaagtttaaaatttttttaatgttttaggtttttttttttttaaaaaaaatactatgcccatttgtttacaaatcgtctgtgggtgctttctcactacaatggcagaattcagtagttgagacagacctatggtccacaaaggccgaaatatttactgttttaggagaaaaaaacaacatgaattgtaataacttggacttacttggttgctcagtcctgatgtgtcctgttaaaacctaagagaaacagcaccaagttcaatctagtgcaatcagcctatcacatctaagctgcttttgccagatctgatatctactcccgaccttaagccaggagactttgtaaacttactaggttataataaaacttaagaactatcgatatttactaatctacatcatggaactatttcaaaagcagtcatatggtaagatggatcaggagtctttaaaaataaaactgagaaagaaaaatcatgtgatcaattcagtagtagagacagaggttggtatcaagtctatgttcatacacttaccagtgccacccagcagggccatacaagacacatgaaatgagatcagctcaagggtgacaagatgaaactgggagagggccggggagacccgaactcttaatattggattccacacaagaggaaaaattttagtccagctcccagcatggcagctaatggcaagttagtaccataaagccaactcttggaatatacctgacttccacgataaaatggagatgagtgcaggggtgagtgtatagttaagaaaacaaacaatatattactagtccaggtggtagatgacagatttttattatttacacttctctcaaattattacattcagcatgttttgctttttatgttatttaaagtataaaccctcatataattccctaagatgggtggcatgccaagtagctaaatgaaatatcatcccagcccaaaagtacttattcgaatgaaatattacatttttcttaaataaagcaataaattaggtaccctattatcatggtattttcttttttggccagcttttccagataaggttgtattgctactgcaactaacaaaaaagatgtggcagggctgggcagtcgattttcaggaagccacttaatgttcagattcttttcttctctcccaggactttgcagatgctgctgttccctctgcctggagatgttcatctggcctgaatccaaaagtctgtccaagttacttctcttttccatgacagagttacaactatttgtctgtcccccttgccccattagagtatatggtccccaaaggaaagccccatgccattcactcaccacctaatcatccccaacaactagtgggcaaacatgaaacacttttgttgaataatgtgtttcctttagcccagggattacaaagtcaaaggcttacaagggggaaggactagcaggtgtgctcggaggggactctagccaactggagagtaactggtgagaagacaatgacatgctcttagggtgtctgctactcagatcctctcagttaagtcccgtgcacaaaggtgggtcaggtctactgttgccagatcttcagatcattcaaaagttacccgaattctggattttcatgcaaatctcccaatttttaaaaatgttggcatcaaattcagaatgttttaaccagccacactgtgtgggccagggaaaacaggcccaaaggccaggtgaagctgcagttttcaactgctgccttggcctctcccagagccccttaagtcctaagaaggctcagtcaacacactggcactcgtttcatcccactggttgagaaagcaagtcttagcaaagtaatgggggagtcttaccaaaactgcaaaggaaaaaaatatgataccatgaaattagaaattcactgcatttgaaatgaaaatgacttatttctgtacttctataactcacaaatttagcagacatcatttagacatttttgtagtgcaacagatttaaatctggaatttcatggtttgtaaatcactatgtgatactagctataaccatgagcaatattacgggcagtaaatgttgatttctatttcgtttcttgaagttttgtgtggttcatttttaaagtgagattcaa

SEQ ID NO: 22780 - DNA, 4533 bp, Homo sapiens
cgcggggtcgccgcggtgctgctgctcagtgggagcgggtcttcgcaactgtctccgcgtggcgcgcgcctctagccgcccttcccctggcggctacggccggagggagcggaggcgagcgggagtcgggctccatggagagcggcggacaactgggcagaggcggagctttcatctcggcaccctggttccagtgacccgcgctagcgtcccgtcccgcccgcgtcggagcggccgccggccccgggactgaccggcctcgccgcacctcccgcaccgactagcgctcccgggcgctcctgcgcccgactcgccctcgcccccactccccggcggggtggcggcggccgggcccccacggcggcggccggagcagcagcagcagcagcaggagcccgcctctatgatgaagttcaagcccaaccagacgcggacctacgaccgcgagggcttcaagaagcgggcggcgtgcctgtgcttccggagcgagcaggaggacgaggtgctgctggtgagtagcagccggtacccagaccagtggattgtcccaggaggaggaatggaacccgaggaggaacctggcggtgctgccgtgagggaagtttatgaggaggctggagtcaaaggaaaactaggcagacttctgggcatatttgagcagaaccaagaccgaaagcacagaacatatgtttatgttctaacagtcactgaaatattagaagattgggaagattctgttaatattggaaggaagagagagtggttcaaagtagaagatgctatcaaagttctccagtgtcataaacctgtacatgcagagtatctggaaaagctaaagctgggttgttccccagccaatggaaattctacagtcccttcccttccggataataatgccttgtttgtaaccgctgcacagacctctgggttgccatctagtgtaagatagagagaactgggtaggcctctcccaccatgtgcagtctcatggggagaggcttctttcgtttcctcgtcaaacatctgattgacgcttgcaaactgtctgaatttgccatgcaaggttttcaaacaatttgcatgtttttcagatgctttcaaatctttttttaaaaaaatagtgtaaaatattttaataagccaaagccatgtggaatttttgtttagatgccttaactgtgccacaccccacaaccccctatattattttggttgtctatttctcacagcatattttcagttttttgtccatttgacatcagtctgtggtttattttgtcatcagattacttgtgggtatacctaccccaaaattgttttctcattcacagcattagcatattcagcaaatccatctgtggtgggaattaaaaatattattggtattaaagaaatccattcaccccaaaacttgttttacaggattacaattttaattcaaaatttccagatttgggctatttctgtatgatccaataacttattttgtcacagggcttaatttgccatttttggggatttgtcgactcattttgtctgaattttcacaactggtattatgtcactagctacctgatacggctatttcccttataactcaatagtaccttaacacaaagtataactctgtagagttggtgaatattttagggaaatattagcaaaatgcatgtagtaaagacatcttatgaaaactgtattcatggaatttgatttagcatgctcagttgccagttcccattatcgatactctttctttgcagaataccttagaaccgttatttccctcagtgtagattgctcttaaaatgtattcagttatttagtggcccccacaggagtggagtcttgaaatctaattctaaatgccagtcagtgatgatcgcatcacagttgagtgaaatggccttcctgttcagctgttagagactgaagattgttagggcaccttagaatgtctcatcttttctaggttgtcaacaggtactatttgtcacataactaactttcgaggcactggaacatacctgaactaagaattaaatcttttactttatactcacttaaaatcaagaatcccatctaaaacacataggtaccttatctgaaactcttgcacttccccaaccagggcagaaatgaggtgggagaagtttgactaaaatgagggatgggggaaagtaaaagatgtttttttttttttgagactcgctttgtcacccaggctggagtgcaatggcacaatctcaactcaccgcaacctccgcctcccgggttcaagcgattctcctgcctcagcctcccgagtagttgggattacaggcgcctgcctccatgcctggctaattttgtatttttagtagagacagggtttcttcatgttggtcaggctggtctcaaactcctaacctcgtgatccgcctgcctcgacctcccaaagtgctgggattacaggcatgagccaccatgcccagccaaagatcatttttttatatagacttcagccctttgtaaatattgtaactggggagtatagagtagaaaaaaagtatagttaaaacatttgttctacaaattaacctttaaaaatataattactgctaaaaatagagtgctgttacacttaaggaaaattagtgccattttggaaatgagatcttgtgccataaatacagctgaactgaatataaatgttcacaaattaatgctgtcaaaggaatgagtaaagcagaaaaacttttaaccagcaacatttcaagtacgtagtgtgatcaaacatgatcatccagaatttttatatttttttctttgtacagaggttacatattctgggtgttcttttataaaggaaacattttaaatcccacaaattgacactttctatcttcaatggactaagatttttttggtcagtaatctctgaaatttccttaaattatatacttaacatagcagagaaactggattgtttttgtatataagactgcttccacctgaaatgctgtcataagtactgggggggtgggggagtgcccatcttgtacatgatattcttagaggtaataaggtaatgatgcatgaatttattttataaactcttggactatgtatttgacatgtaaaatatgtacagtattaacgtcaaccatctctttaaagttagcctataaatattgttgtataattttctttggtcagaaacacttggactgaatagtgacactcggtaaggattttcagtgccatttagcaaaacgtctttagtctatgcaactagcaaaaatctgcataatgcaacaacacagttttcacacttcaaattttacatgaggggttcttcacgattctcctggaacccagtctagcaaaatgagaggaaaggccctagggagatttatttctgttaaatagttaactctgctgagtatgacaaatagtgtctactatctcaaccctccaaaatttgcagagtgttgggactgtcatttgtgattttttttttttttttttggtggggtagttgaataaaattgggcagctaaatttttcagttccatgtgcctcccaaataaaaaacagaaaataagtagtttttgtgaattgacttgcagacaaagtagaaactgtgctgcatgatgttattttgtaaacagatgacattttctgaccaggcacatgccatccaattttctgtcaatcacactgttgtataaagcagcagaactgaaggggaaaaatgattgttgtatacactgaattgctttgcatggtctcatttgagataattgatgtaagaatcctgacttttttatatttggaaacatcaaataaaaatggaaaaaatgaaaaaaaaaaaaaaaagagaagagctaaaatttaaactttttagaaagaaaaattaactttttggaacctggagtttaagcgagtaaatcttggggaacttggaagttaagggcagaaatttccttggatgccaaccattcaagaagccacaaattaattaaagggagaaaaaaggttgtgattacagttgtgaaccttaattcaaatgtgaacaactttcgttggtgcctccagggacacccacacaggttgacaggaaacagccccacagaaatctcagagagcctttttggccaaatttatcctactcgtgtaaggggacctagaatttttacaagaaaccacaagttgcatataagaaagttggacacatgtgcatcctaagtctggcggacaagggggccaaggggatttacaagaatactttctccaaggagagcacaaccatttttgtgcacaatttaagggcacctgtggacaagggcttgactataggcgaaacaatttctttctatgttccagaacaggcacaaatgtgatgatgtttctcgaagctgtgttacacccccaaactgtggaaaatggcgcctattaaacctacatctatttgggggccagaaaacaatctaaactaatgtgggtcgggaaacgggagtgttgggagaaatcttgggaaaggcctcaatc

SEQ ID NO: 22781 - DNA, 7428 bp, Homo sapiens
  misc_feature (7314)..(7314): n is a, c, g, or t
agcgggagtcaccatcttaacgtgcgaattgagttgaaagccggataaacctcgagtgctcagcgagaggagggtggaaatggcgtgctgctggtgagtagcagccggtacccagaccagtggattgtcccaggaggaggaatggaacccgaggaggaacctggcggtgctgccgtgagggaagtttatgaggaggctggagtcaaaggaaaactaggcagacttctgggcatatttgagcagaaccaagaccgaaagcacagaacatatgtttatgttctaacagtcactgaaatattagaagattgggaagattctgttaatattggaaggaagagagagtggttcaaagtagaagatgctatcaaagttctccagtgtcataaacctgtacatgcagagtatctggaaaagctaaagctgggttgttccccagccaatggaaattctacagtcccttcccttccggataataatgccttgtttgtaaccgctgcacagacctctgggttgccatctagtgtaagatagagagaactgggtaggcctctcccaccatgtgcagtctcatggggagaggcttctttcgtttcctcgtcaaacatctgattgacgcttgcaaactgtctgaatttgccatgcaaggttttcaaacaatttgcatgtttttcagatgctttcaaatctttttttaaaaaaatagtgtaaaatattttaataagccaaagccatgtggaatttttgtttagatgccttaactgtgccacaccccacaaccccctatattattttggttgtctatttctcacagcatattttcagttttttgtccatttgacatcagtctgtggtttattttgtcatcagattacttgtgggtatacctaccccaaaattgttttctcattcacagcattagcatattcagcaaatccatctgtggtgggaattaaaaatattattggtattaaagaaatccattcaccccaaaacttgttttacaggattacaattttaattcaaaatttccagatttgggctatttctgtatgatccaataacttattttgtcacagggcttaatttgccatttttggggatttgtcgactcattttgtctgaattttcacaactggtattatgtcactagctacctgatacggctatttcccttataactcaatagtaccttaacacaaagtataactctgtagagttggtgaatattttagggaaatattagcaaaatgcatgtagtaaagacatcttatgaaaactgtattcatggaatttgatttagcatgctcagttgccagttcccattatcgatactctttctttgcagaataccttagaaccgttatttccctcagtgtagattgctcttaaaatgtattcagttatttagtggcccccacaggagtggagtcttgaaatctaattctaaatgccagtcagtgatgatcgcatcacagttgagtgaaatggccttcctgttcagctgttagagactgaagattgttagggcaccttagaatgtctcatcttttctaggttgtcaacaggtactatttgtcacataactaactttcgaggcactggaacatacctgaactaagaattaaatcttttactttatactcacttaaaatcaagaatcccatctaaaacacataggtaccttatctgaaactcttgcacttccccaaccagggcagaaatgaggtgggagaagtttgactaaaatgagggatgggggaaagtaaaagatgtttttttttttttgagactcgctttgtcacccaggctggagtgcaatggcacaatctcaactcaccgcaacctccgcctcccgggttcaagcgattctcctgcctcagcctcccgagtagttgggattacaggcgcctgcctccatgcctggctaattttgtatttttagtagagacagggtttcttcatgttggtcaggctggtctcaaactcctaacctcgtgatccgcctgcctcgacctcccaaagtgctgggattacaggcatgagccaccatgcccagccaaagatcatttttttatatagacttcagccctttgtaaatattgtaactggggagtatagagtagaaaaaaagtatagttaaaacatttgttctacaaattaacctttaaaaatataattactgctaaaaatagagtgctgttacacttaaggaaaattagtgccattttggaaatgagatcttgtgccataaatacagctgaactgaatataaatgttcacaaattaatgctgtcaaaggaatgagtaaagcagaaaaacttttaaccagcaacatttcaagtacgtagtgtgatcaaacatgatcatccagaatttttatatttttttctttgtacagaggttacatattctgggtgttcttttataaaggaaacattttaaatcccacaaattgacactttctatcttcaatggactaagatttttttggtcagtaatctctgaaatttccttaaattatatacttaacatagcagagaaactggattgtttttgtatataagactgcttccacctgaaatgctgtcataagtactgggggggtgggggagtgcccatcttgtacatgatattcttagaggtaataaggtaatgatgcatgaatttattttataaactcttggactatgtatttgacatgtaaaatatgtacagtattaacgtcaaccatctctttaaagttagcctataaatattgttgtataattttctttggtcagaaacacttggactgaatagtgacactcggtaaggattttcagtgccatttagcaaaacgtctttagtctatgcaactagcaaaaatctgcataatgcaacaacacagttttcacacttcaaattttacatgaggggttcttcacgattctcctggaacccagtctagcaaaatgagaggaaaggccctagggagatttatttctgttaaatagttaactctgctgagtatgacaaatagtgtctactatctcaaccctccaaaatttgcagagtgttgggactgtcatttgtgattttttttttttttttttggtggggtagttgaataaaattgggcagctaaatttttcagttccatgtgcctcccaaataaaaaacagaaaataagtagtttttgtgaattgacttgcagacaaagtagaaactgtgctgcatgatgttattttgtaaacagatgacattttctgaccaggcacatgccatccaattttctgtcaatcacactgttgtataaagcagcagaactgaaggggaaaaatgattgttgtatacactgaattgctttgcatggtctcatttgagataattgatgtaagaatcctgacttttttatatttggaaacatcaaataaaaatggaaaaaatgatcatggctttaaaaaaaaaacaaaaacacacacacatgaactcagatttgcaaaccaggtttctgaaactttgggtaaggtgtatgcttttaactttgaaatgtataaacacccagcggaaacgtatacctttcagtgcatagtgcattgtgtgcttaccctgggttgtttaaacttgtgttcaaatattccccctccaagtgaaagcctgtcgggaattccacagtaacacctttactgttctcccattgatgatcatatacgttacctcttcctagcggtacatttgtatgatccttactactggaattaccgggttaaaaggaaatgcttaccactaagatgtcagtattctcctcatggatattttcagtctcaatgttgccagtctaatagtatagtatgtggttgctttactgctgttctccccacccccgtggagttgtgtcattattttaatgaatgtgagctcttgacttactctagaattctaatacagatactttctgcactagtatcacttttattattgcagttccatttaaaagcataactggctaagtcaccgccccacccgccgcattacatttcctaaaacatactgctgccaaagaccaactgtagaatccttaagtcctgttcaagtgtcacttcattttttattaggggtttcttagttggagggcatgagaaacttggccctttccaatgttgtcttcacattggagtataagaattctctataggactcttttaatttttttttttttttggtagagatggggtcttgctgtgttgcccaggctggtctcaaactcctaggcttaagcagtcctccagcctcagccttctcaaagtgctaggatgattggcatgagccacctcgtctggcctgcaggtctttttaagcatttgctgttcaataataagcatcttctttatgcctagtatttgtgataagagcacaaaacaattttctaatctcaaagagcttatattctagtggggtagagataagtgatttatcttggtgtagttttggcttttttgtttgtttttttgagacagcatctcacactgtcgcccaggctggagtgcagtggtgcaatctcagcttactgtaacctccgcctgccaggttcaagcgattctcctgcctcatcctcccgaggagctgggatcacaggcgcctgccaccacgcccggctaatttttttgtatttttagtagagacggggtttcaccatattggccaggctggtctcaaactcctgacctcgtgatccgcctgcctcggcctccctaagtgctgggattatgggcgtgaaccaccgcacctggcctatcttggtgtttttacatccttcagtatttttcaaggttttacagcttttttatctatagacttataccatcttcaaaagcaatacaattttatttgtagacgtgatttcccccaccaaatgcacattttatggagctctaggacaaaagtcaggatgaaaagtaatctatcgctggtgctactttaataccttcctgactggtgccactggctaaattctagcagtacgatgagagggccattaaggcctatcttagcaagcaagacattatagcaaagacctaaacactcaaaggttcaacgtcttctagccagggaactattctctaattcttccaccttgatatgatttcagcaaattctgataacccggtattactcttaatgcatttttgtaacatttgacaaacatctcccaatatgtagactcccactctcctgatgctaatcagtatcagacaatggaagtaaattttcctgcttttctcaacttttcctcaaattcatgttagtgaagtactttcatttggccatcattatttatcaaccttaagaaacatgcctattgacgaagtaaatatactaggaattcaacgtatctacgggaatgtggacaaagacatataccaagacaaggcactagagtgaaaagccattaaaataaaatgctcagcagcaaaggatttgtaatggttaacttgcaatatatccatatggtgtaatattacagtcattagaaatgacatttgcgtaaggatctgagtggaaactgatacagcctgtcggagagctactgagtagtattttatcacagctgcatacataccctttcacccaacagttccactcctgggagtctagtcaacaaatggacaagttgcacaaccaagctatggtcaaatatgtgtgttgtaggatttatgaaactggtaccaatttaatattcaaatgtgattaagtcatggcaatctatttactggatactttgtggttaccaaagagctatgtgctgccacagggagtcctttcaatagtgattgaaaaaggcagaacactactagacagaactacctgttttatgcatgtattggcatacactgaaaaagcttagtcacttaaaatgaggttgtacagattgtagattttgtttttaaacgcctgtatggtttaaaaaatgttttgggaaatagacatgagcagggcagagaactacaacctacaggccaaaccccaccccactgcctgtttgtacggccaacaagtttaaaatttttttaatgttttaggtttttttttttttaaaaaaaatactatgcccatttgtttacaaatcgtctgtgggtgctttctcactacaatggcagaattcagtagttgagacagacctatggtccacaaaggccgaaatatttactgttttaggagaaaaaaacaacatgaattgtaataacttggacttacttggttgctcagtcctgatgtgtcctgttaaaacctaagagaaacagcaccaagttcaatctagtgcaatcagcctatcacatctaagctgcttttgccagatctgatatctactcccgaccttaagccaggagactttgtaaacttactaggttataataaaacttaagaactatcgatatttactaatctacatcatggaactatttcaaaagcagtcatatggtaagatggatcaggagtctttaaaaataaaactgagaaagaaaaatcatgtgatcaattcagtagtagagacagaggttggtatcaagtctatgttcatacacttaccagtgccacccagcagggccatacaagacacatgaaatgagatcagctcaagggtgacaagatgaaactgggagagggccggggagacccgaactcttaatattggattccacacaagaggaaaaattttagtccagctcccagcatggcagctaatggcaagttagtaccataaagccaactcttggaatatacctgacttccacgataaaatggagatgagtgcaggggtgagtgtatagttaagaaaacaaacaatatattactagtccaggtggtagatgacagatttttattatttacacttctctcaaattattacattcagcatgttttgctttttatgttatttaaagtataaaccctcatataattccctaagatgggtggcatgccaagtagctaaatgaaatatcatcccagcccaaaagtacttattcgaatgaaatattacatttttcttaaataaagcaataaattaggtaccctattatcatggtattttcttttttggccagcttttccagataaggttgtattgctactgcaactaacaaaaaagatgtggcagggctgggcacggtggctcacgcctgtaatcccagcactttgggaggccgaggcgggcagatcacgaggtcaggagatggagaccatcctggcccaacatggtgaaaccccgtctctactaaaaatacaaaaaattagccaggtgtggtggcaggtgtctgtagtcccagctcctcnggaggctgaggcaggagaatcgcttgaacgcgggaggcagaacctgcagtgagccaagatcatgccacagcactccagcctaaactacagagctagaaagtggctagagcagcc

SEQ ID NO: 22782 - DNA, 4256 bp, Homo sapiens
cgcggggtcgccgcggtgctgctgctcagtgggagcgggtcttcgcaactgtctccgcgtggcgcgcgcctctagccgcccttcccctggcggctacggccggagggagcggaggcgagcgggagtcgggctccatggagagcggcggacaactgggcagaggcggagctttcatctcggcaccctggttccagtgacccgcgctagcgtcccgtcccgcccgcgtcggagcggccgccggccccgggactgaccggcctcgccgcacctcccgcaccgactagcgctcccgggcgctcctgcgcccgactcgccctcgcccccactccccggcggggtggcggcggccgggcccccacggcggcggccggagcagcagcagcagcagcaggagcccgcctctatgatgaagttcaagcccaaccagacgcggacctacgaccgcgagggcttcaagaagcgggcggcgtgcctgtgcttccggagcgagcaggaggacgaggtgctgctggtgagtagcagccggtacccagaccagtggattgtcccaggaggaggaatggaacccgaggaggaacctggcggtgctgccgtgagggaagtttatgaggaggctggagtcaaaggaaaactaggcagacttctgggcatatttgagcagaaccaagaccgaaagcacagaacatatgtttatgttctaacagtcactgaaatattagaagattgggaagattctgttaatattggaaggaagagagagtggttcaaagtagaagatgctatcaaagttctccagtgtcataaacctgtacatgcagagtatctggaaaagctaaagctgggttgttccccagccaatggaaattctacagtcccttcccttccggataataatgccttgtttgtaaccgctgcacagacctctgggttgccatctagtgtaagatagagagaactgggtaggcctctcccaccatgtgcagtctcatggggagaggcttctttcgtttcctcgtcaaacatctgattgacgcttgcaaactgtctgaatttgccatgcaaggttttcaaacaatttgcatgtttttcagatgctttcaaatctttttttaaaaaaatagtgtaaaatattttaataagccaaagccatgtggaatttttgtttagatgccttaactgtgccacaccccacaaccccctatattattttggttgtctatttctcacagcatattttcagttttttgtccatttgacatcagtctgtggtttattttgtcatcagattacttgtgggtatacctaccccaaaattgttttctcattcacagcattagcatattcagcaaatccatctgtggtgggaattaaaaatattattggtattaaagaaatccattcaccccaaaacttgttttacaggattacaattttaattcaaaatttccagatttgggctatttctgtatgatccaataacttattttgtcacagggcttaatttgccatttttggggatttgtcgactcattttgtctgaattttcacaactggtattatgtcactagctacctgatacggctatttcccttataactcaatagtaccttaacacaaagtataactctgtagagttggtgaatattttagggaaatattagcaaaatgcatgtagtaaagacatcttatgaaaactgtattcatggaatttgatttagcatgctcagttgccagttcccattatcgatactctttctttgcagaataccttagaaccgttatttccctcagtgtagattgctcttaaaatgtattcagttatttagtggcccccacaggagtggagtcttgaaatctaattctaaatgccagtcagtgatgatcgcatcacagttgagtgaaatggccttcctgttcagctgttagagactgaagattgttagggcaccttagaatgtctcatcttttctaggttgtcaacaggtactatttgtcacataactaactttcgaggcactggaacatacctgaactaagaattaaatcttttactttatactcacttaaaatcaagaatcccatctaaaacacataggtaccttatctgaaactcttgcacttccccaaccagggcagaaatgaggtgggagaagtttgactaaaatgagggatgggggaaagtaaaagatgtttttttttttttgagactcgctttgtcacccaggctggagtgcaatggcacaatctcaactcaccgcaacctccgcctcccgggttcaagcgattctcctgcctcagcctcccgagtagttgggattacaggcgcctgcctccatgcctggctaattttgtatttttagtagagacagggtttcttcatgttggtcaggctggtctcaaactcctaacctcgtgatccgcctgcctcgacctcccaaagtgctgggattacaggcatgagccaccatgcccagccaaagatcatttttttatatagacttcagccctttgtaaatattgtaactggggagtatagagtagaaaaaaagtatagttaaaacatttgttctacaaattaacctttaaaaatataattactgctaaaaatagagtgctgttacacttaaggaaaattagtgccattttggaaatgagatcttgtgccataaatacagctgaactgaatataaatgttcacaaattaatgctgtcaaaggaatgagtaaagcagaaaaacttttaaccagcaacatttcaagtacgtagtgtgatcaaacatgatcatccagaatttttatatttttttctttgtacagaggttacatattctgggtgttcttttataaaggaaacattttaaatcccacaaattgacactttctatcttcaatggactaagatttttttggtcagtaatctctgaaatttccttaaattatatacttaacatagcagagaaactggattgtttttgtatataagactgcttccacctgaaatgctgtatttgacatgtaaaatatgtacagtattaacgtcaaccatctctttaaagttagcctataaatattgttgtataattttctttggtcagaaacacttggactgaatagtgacactcggtaaggattttcagtgccatttagcaaaacgtctttagtctatgcaactagcaaaaatctgcataatgcaacaacacagttttcacacttcaaattttacatgaggggttcttcacgattctcctggaacccagtctagcaaaatgagaggaaaggccctagggagatttatttctgttaaatagttaactctgctgagtatgacaaatagtgtctactatctcaaccctccaaaatttgcagagtgttgggactgtcatttgtgattttttttttttttttttggtggggtagttgaataaaattgggcagctaaatttttcagttccatgtgcctcccaaataaaaaacagaaaataagtagtttttgtgaattgacttgcagacaaagtagaaactgtgctgcatgatgttattttgtaaacagatgacattttctgaccaggcacatgccatccaattttctgtcaatcacactgttgtataaagcagcagaactgaaggggaaaaatgattgttgtatacactgaattgctttgcatggtctcatttgagataattgatgtaagaatcctgacttttttatatttggaaacatcaaataaaaatggaaaaaatgatcatggctttaaaaaaaaaacaaaaacacacacacatgaactcagatttgcaaaccaggtttctgaaactttgggtaaggtgtatgcttttaactttgaaatgtataaacacccagcggaaacgtatacctttcagtgcatagtgcattgtgtgcttaccctgggttgtttaaacttgtgttcaaatattccccctccaagtgaaagcctgtcgggaattccacagtaacacctttactgttctcccattgatgatcatatacgttacctcttcctagcggtacatttgtatgatccttactactggaattaccgggttaaaaggaaatgcttaccactaagatgtcagtattctcctcatggatattttcagtctcaatgttgccagtctaatagtatagtatgtggttgctttactgctgttctccccacccccgtggagttgtgtcattattttaatgaatgtgagctcttgacttactctagaattctaatacagatactttctgcacta

SEQ ID NO: 22783 - DNA, 7475 bp, Homo sapiens
  misc_feature (7361)..(7361): n is a, c, g, or t
taacagacagtcctcgtgcttggaattgagtctagtcttggcaattcttgtgggtccatgaacccgcaagctgttggcataattatgcctcatttttaaaacggccttcccttcttaaagttttctgactgcagaaaaatgctacgtggcgctcccatctggctgttcctgtactgaagttctcagtgctgctggtgagtagcagccggtacccagaccagtggattgtcccaggaggaggaatggaacccgaggaggaacctggcggtgctgccgtgagggaagtttatgaggaggctggagtcaaaggaaaactaggcagacttctgggcatatttgagcagaaccaagaccgaaagcacagaacatatgtttatgttctaacagtcactgaaatattagaagattgggaagattctgttaatattggaaggaagagagagtggttcaaagtagaagatgctatcaaagttctccagtgtcataaacctgtacatgcagagtatctggttccggataataatgccttgtttgtaaccgctgcacagacctctgggttgccatctagtgtaagatagagagaactgggtaggcctctcccaccatgtgcagtctcatggggagaggcttctttcgtttcctcgtcaaacatctgattgacgcttgcaaactgtctgaatttgccatgcaaggttttcaaacaatttgcatgtttttcagatgctttcaaatctttttttaaaaaaatagtgtaaaatattttaataagccaaagccatgtggaatttttgtttagatgccttaactgtgccacaccccacaaccccctatattattttggttgtctatttctcacagcatattttcagttttttgtccatttgacatcagtctgtggtttattttgtcatcagattacttgtgggtatacctaccccaaaattgttttctcattcacagcattagcatattcagcaaatccatctgtggtgggaattaaaaatattattggtattaaagaaatccattcaccccaaaacttgttttacaggattacaattttaattcaaaatttccagatttgggctatttctgtatgatccaataacttattttgtcacagggcttaatttgccatttttggggatttgtcgactcattttgtctgaattttcacaactggtattatgtcactagctacctgatacggctatttcccttataactcaatagtaccttaacacaaagtataactctgtagagttggtgaatattttagggaaatattagcaaaatgcatgtagtaaagacatcttatgaaaactgtattcatggaatttgatttagcatgctcagttgccagttcccattatcgatactctttctttgcagaataccttagaaccgttatttccctcagtgtagattgctcttaaaatgtattcagttatttagtggcccccacaggagtggagtcttgaaatctaattctaaatgccagtcagtgatgatcgcatcacagttgagtgaaatggccttcctgttcagctgttagagactgaagattgttagggcaccttagaatgtctcatcttttctaggttgtcaacaggtactatttgtcacataactaactttcgaggcactggaacatacctgaactaagaattaaatcttttactttatactcacttaaaatcaagaatcccatctaaaacacataggtaccttatctgaaactcttgcacttccccaaccagggcagaaatgaggtgggagaagtttgactaaaatgagggatgggggaaagtaaaagatgtttttttttttttgagactcgctttgtcacccaggctggagtgcaatggcacaatctcaactcaccgcaacctccgcctcccgggttcaagcgattctcctgcctcagcctcccgagtagttgggattacaggcgcctgcctccatgcctggctaattttgtatttttagtagagacagggtttcttcatgttggtcaggctggtctcaaactcctaacctcgtgatccgcctgcctcgacctcccaaagtgctgggattacaggcatgagccaccatgcccagccaaagatcatttttttatatagacttcagccctttgtaaatattgtaactggggagtatagagtagaaaaaaagtatagttaaaacatttgttctacaaattaacctttaaaaatataattactgctaaaaatagagtgctgttacacttaaggaaaattagtgccattttggaaatgagatcttgtgccataaatacagctgaactgaatataaatgttcacaaattaatgctgtcaaaggaatgagtaaagcagaaaaacttttaaccagcaacatttcaagtacgtagtgtgatcaaacatgatcatccagaatttttatatttttttctttgtacagaggttacatattctgggtgttcttttataaaggaaacattttaaatcccacaaattgacactttctatcttcaatggactaagatttttttggtcagtaatctctgaaatttccttaaattatatacttaacatagcagagaaactggattgtttttgtatataagactgcttccacctgaaatgctgtcataagtactgggggggtgggggagtgcccatcttgtacatgatattcttagaggtaataaggtaatgatgcatgaatttattttataaactcttggactatgtatttgacatgtaaaatatgtacagtattaacgtcaaccatctctttaaagttagcctataaatattgttgtataattttctttggtcagaaacacttggactgaatagtgacactcggtaaggattttcagtgccatttagcaaaacgtctttagtctatgcaactagcaaaaatctgcataatgcaacaacacagttttcacacttcaaattttacatgaggggttcttcacgattctcctggaacccagtctagcaaaatgagaggaaaggccctagggagatttatttctgttaaatagttaactctgctgagtatgacaaatagtgtctactatctcaaccctccaaaatttgcagagtgttgggactgtcatttgtgattttttttttttttttttggtggggtagttgaataaaattgggcagctaaatttttcagttccatgtgcctcccaaataaaaaacagaaaataagtagtttttgtgaattgacttgcagacaaagtagaaactgtgctgcatgatgttattttgtaaacagatgacattttctgaccaggcacatgccatccaattttctgtcaatcacactgttgtataaagcagcagaactgaaggggaaaaatgattgttgtatacactgaattgctttgcatggtctcatttgagataattgatgtaagaatcctgacttttttatatttggaaacatcaaataaaaatggaaaaaatgatcatggctttaaaaaaaaaacaaaaacacacacacatgaactcagatttgcaaaccaggtttctgaaactttgggtaaggtgtatgcttttaactttgaaatgtataaacacccagcggaaacgtatacctttcagtgcatagtgcattgtgtgcttaccctgggttgtttaaacttgtgttcaaatattccccctccaagtgaaagcctgtcgggaattccacagtaacacctttactgttctcccattgatgatcatatacgttacctcttcctagcggtacatttgtatgatccttactactggaattaccgggttaaaaggaaatgcttaccactaagatgtcagtattctcctcatggatattttcagtctcaatgttgccagtctaatagtatagtatgtggttgctttactgctgttctccccacccccgtggagttgtgtcattattttaatgaatgtgagctcttgacttactctagaattctaatacagatactttctgcactagtatcacttttattattgcagttccatttaaaagcataactggctaagtcaccgccccacccgccgcattacatttcctaaaacatactgctgccaaagaccaactgtagaatccttaagtcctgttcaagtgtcacttcattttttattaggggtttcttagttggagggcatgagaaacttggccctttccaatgttgtcttcacattggagtataagaattctctataggactcttttaatttttttttttttttggtagagatggggtcttgctgtgttgcccaggctggtctcaaactcctaggcttaagcagtcctccagcctcagccttctcaaagtgctaggatgattggcatgagccacctcgtctggcctgcaggtctttttaagcatttgctgttcaataataagcatcttctttatgcctagtatttgtgataagagcacaaaacaattttctaatctcaaagagcttatattctagtggggtagagataagtgatttatcttggtgtagttttggcttttttgtttgtttttttgagacagcatctcacactgtcgcccaggctggagtgcagtggtgcaatctcagcttactgtaacctccgcctgccaggttcaagcgattctcctgcctcatcctcccgaggagctgggatcacaggcgcctgccaccacgcccggctaatttttttgtatttttagtagagacggggtttcaccatattggccaggctggtctcaaactcctgacctcgtgatccgcctgcctcggcctccctaagtgctgggattatgggcgtgaaccaccgcacctggcctatcttggtgtttttacatccttcagtatttttcaaggttttacagcttttttatctatagacttataccatcttcaaaagcaatacaattttatttgtagacgtgatttcccccaccaaatgcacattttatggagctctaggacaaaagtcaggatgaaaagtaatctatcgctggtgctactttaataccttcctgactggtgccactggctaaattctagcagtacgatgagagggccattaaggcctatcttagcaagcaagacattatagcaaagacctaaacactcaaaggttcaacgtcttctagccagggaactattctctaattcttccaccttgatatgatttcagcaaattctgataacccggtattactcttaatgcatttttgtaacatttgacaaacatctcccaatatgtagactcccactctcctgatgctaatcagtatcagacaatggaagtaaattttcctgcttttctcaacttttcctcaaattcatgttagtgaagtactttcatttggccatcattatttatcaaccttaagaaacatgcctattgacgaagtaaatatactaggaattcaacgtatctacgggaatgtggacaaagacatataccaagacaaggcactagagtgaaaagccattaaaataaaatgctcagcagcaaaggatttgtaatggttaacttgcaatatatccatatggtgtaatattacagtcattagaaatgacatttgcgtaaggatctgagtggaaactgatacagcctgtcggagagctactgagtagtattttatcacagctgcatacataccctttcacccaacagttccactcctgggagtctagtcaacaaatggacaagttgcacaaccaagctatggtcaaatatgtgtgttgtaggatttatgaaactggtaccaatttaatattcaaatgtgattaagtcatggcaatctatttactggatactttgtggttaccaaagagctatgtgctgccacagggagtcctttcaatagtgattgaaaaaggcagaacactactagacagaactacctgttttatgcatgtattggcatacactgaaaaagcttagtcacttaaaatgaggttgtacagattgtagattttgtttttaaacgcctgtatggtttaaaaaatgttttgggaaatagacatgagcagggcagagaactacaacctacaggccaaaccccaccccactgcctgtttgtacggccaacaagtttaaaatttttttaatgttttaggtttttttttttttaaaaaaaatactatgcccatttgtttacaaatcgtctgtgggtgctttctcactacaatggcagaattcagtagttgagacagacctatggtccacaaaggccgaaatatttactgttttaggagaaaaaaacaacatgaattgtaataacttggacttacttggttgctcagtcctgatgtgtcctgttaaaacctaagagaaacagcaccaagttcaatctagtgcaatcagcctatcacatctaagctgcttttgccagatctgatatctactcccgaccttaagccaggagactttgtaaacttactaggttataataaaacttaagaactatcgatatttactaatctacatcatggaactatttcaaaagcagtcatatggtaagatggatcaggagtctttaaaaataaaactgagaaagaaaaatcatgtgatcaattcagtagtagagacagaggttggtatcaagtctatgttcatacacttaccagtgccacccagcagggccatacaagacacatgaaatgagatcagctcaagggtgacaagatgaaactgggagagggccggggagacccgaactcttaatattggattccacacaagaggaaaaattttagtccagctcccagcatggcagctaatggcaagttagtaccataaagccaactcttggaatatacctgacttccacgataaaatggagatgagtgcaggggtgagtgtatagttaagaaaacaaacaatatattactagtccaggtggtagatgacagatttttattatttacacttctctcaaattattacattcagcatgttttgctttttatgttatttaaagtataaaccctcatataattccctaagatgggtggcatgccaagtagctaaatgaaatatcatcccagcccaaaagtacttattcgaatgaaatattacatttttcttaaataaagcaataaattaggtaccctattatcatggtattttcttttttggccagcttttccagataaggttgtattgctactgcaactaacaaaaaagatgtggcagggctgggcacggtggctcacgcctgtaatcccagcactttgggaggccgaggcgggcagatcacgaggtcaggagatggagaccatcctggcccaacatggtgaaaccccgtctctactaaaaatacaaaaaattagccaggtgtggtggcaggtgtctgtagtcccagctcctcnggaggctgaggcaggagaatcgcttgaacgcgggaggcagaacctgcagtgagccaagatcatgccacagcactccagcctaaactacagagctagaaagtggctagagcagcc

SEQ ID NO: 22784 - DNA, 4307 bp, Homo sapiens
cgcggggtcgccgcggtgctgctgctcagtgggagcgggtcttcgcaactgtctccgcgtggcgcgcgcctctagccgcccttcccctggcggctacggccggagggagcggaggcgagcgggagtcgggctccatggagagcggcggacaactgggcagaggcggagctttcatctcggcaccctggttccagtgacccgcgctagcgtcccgtcccgcccgcgtcggagcggccgccggccccgggactgaccggcctcgccgcacctcccgcaccgactagcgctcccgggcgctcctgcgcccgactcgccctcgcccccactccccggcggggtggcggcggccgggcccccacggcggcggccggagcagcagcagcagcagcaggagcccgcctctatgatgaagttcaagcccaaccagacgcggacctacgaccgcgagggcttcaagaagcgggcggcgtgcctgtgcttccggagcgagcaggaggacgaggtgctgctggtgagtagcagccggtacccagaccagtggattgtcccaggaggaggaatggaacccgaggaggaacctggcggtgctgccgtgagggaagtttatgaggaggctggagtcaaaggaaaactaggcagacttctgggcatatttgagcagaaccaagaccgaaagcacagaacatatgtttatgttctaacagtcactgaaatattagaagattgggaagattctgttaatattggaaggaagagagagtggttcaaagtagaagatgctatcaaagttctccagtgtcataaacctgtacatgcagagtatctggaaaagctaaagctgggttgttccccagccaatggaaattctacagtcccttcccttccggataataatgccttgtttgtaaccgctgcacagacctctgggttgccatctagtgtaagatagagagaactgggtaggcctctcccaccatgtgcagtctcatggggagaggcttctttcgtttcctcgtcaaacatctgattgacgcttgcaaactgtctgaatttgccatgcaaggttttcaaacaatttgcatgtttttcagatgctttcaaatctttttttaaaaaaatagtgtaaaatattttaataagccaaagccatgtggaatttttgtttagatgccttaactgtgccacaccccacaaccccctatattattttggttgtctatttctcacagcatattttcagttttttgtccatttgacatcagtctgtggtttattttgtcatcagattacttgtgggtatacctaccccaaaattgttttctcattcacagcattagcatattcagcaaatccatctgtggtgggaattaaaaatattattggtattaaagaaatccattcaccccaaaacttgttttacaggattacaattttaattcaaaatttccagatttgggctatttctgtatgatccaataacttattttgtcacagggcttaatttgccatttttggggatttgtcgactcattttgtctgaattttcacaactggtattatgtcactagctacctgatacggctatttcccttataactcaatagtaccttaacacaaagtataactctgtagagttggtgaatattttagggaaatattagcaaaatgcatgtagtaaagacatcttatgaaaactgtattcatggaatttgatttagcatgctcagttgccagttcccattatcgatactctttctttgcagaataccttagaaccgttatttccctcagtgtagattgctcttaaaatgtattcagttatttagtggcccccacaggagtggagtcttgaaatctaattctaaatgccagtcagtgatgatcgcatcacagttgagtgaaatggccttcctgttcagctgttagagactgaagattgttagggcaccttagaatgtctcatcttttctaggttgtcaacaggtactatttgtcacataactaactttcgaggcactggaacatacctgaactaagaattaaatcttttactttatactcacttaaaatcaagaatcccatctaaaacacataggtaccttatctgaaactcttgcacttccccaaccagggcagaaatgaggtgggagaagtttgactaaaatgagggatgggggaaagtaaaagatgtttttttttttttgagactcgctttgtcacccaggctggagtgcaatggcacaatctcaactcaccgcaacctccgcctcccgggttcaagcgattctcctgcctcagcctcccgagtagttgggattacaggcgcctgcctccatgcctggctaattttgtatttttagtagagacagggtttcttcatgttggtcaggctggtctcaaactcctaacctcgtgatccgcctgcctcgacctcccaaagtgctgggattacaggcatgagccaccatgcccagccaaagatcatttttttatatagacttcagccctttgtaaatattgtaactggggagtatagagtagaaaaaaagtatagttaaaacatttgttctacaaattaacctttaaaaatataattactgctaaaaatagagtgctgttacacttaaggaaaattagtgccattttggaaatgagatcttgtgccataaatacagctgaactgaatataaatgttcacaaattaatgctgtcaaaggaatgagtaaagcagaaaaaaatttttatatttttttctttgtacagaggttacatattctgggtgttcttttataaaggaaacattttaaatcccacaaattgacactttctatcttcaatggactaagatttttttggtcagtaatctctgaaatttccttaaattatatacttaacatagcagagaaactggattgtttttgtatataagactgcttccacctgaaatgctgtcataagtactgggggggtgggggagtgcccatcttgtacatgatattcttagaggtaataaggtaatgatgcatgaatttattttataaactcttggactatgtatttgacatgtaaaatatgtacagtattaacgtcaaccatctctttaaagttagcctataaatattgttgtataattttctttggtcagaaacacttggactgaatagtgacactcggtaaggattttcagtgccatttagcaaaacgtctttagtctatgcaactagcaaaaatctgcataatgcaacaacacagttttcacacttcaaattttacatgaggggttcttcacgattctcctggaacccagtctagcaaaatgagaggaaaggccctagggagatttatttctgttaaatagttaactctgctgagtatgacaaatagtgtctactatctcaaccctccaaaatttgcagagtgttgggactgtcatttgtgattttttttttttttttttggtggggtagttgaataaaattgggcagctaaatttttcagttccatgtgcctcccaaataaaaaacagaaaataagtagtttttgtgaattgacttgcagacaaagtagaaactgtgctgcatgatgttattttgtaaacagatgacattttctgaccaggcacatgccatccaattttctgtcaatcacactgttgtataaagcagcagaactgaaggggaaaaatgattgttgtatacactgaattgctttgcatggtctcatttgagataattgatgtaagaatcctgacttttttatatttggaaacatcaaataaaaatggaaaaaatgatcatggctttaaaaaaaaaacaaaaacacacacacatgaactcagatttgcaaaccaggtttctgaaactttgggtaaggtgtatgcttttaactttgaaatgtataaacacccagcggaaacgtatacctttcagtgcatagtgcattgtgtgcttaccctgggttgtttaaacttgtgttcaaatattccccctccaagtgaaagcctgtcgggaattccacagtaacacctttactgttctcccattgatgatcatatacgttacctcttcctagcggtacatttgtatgatccttactactggaattaccgggttaaaaggaaatgcttaccactaagatgtcagtattctcctcatggatattttcagtctcaatgttgccagtctaatagtatagtatgtggttgctttactgctgttctccccacccccgtggagttgtgtcattattttaatgaatgtgagctcttgacttactctagaattctaatacagatactttctgcacta

SEQ ID NO: 22785 - DNA, 3078 bp, Homo sapiens
cgcggggtcgccgcggtgctgctgctcagtgggagcgggtcttcgcaactgtctccgcgtggcgcgcgcctctagccgcccttcccctggcggctacggccggagggagcggaggcgagcgggagtcgggctccatggagagcggcggacaactgggcagaggcggagctttcatctcggcaccctggttccagtgacccgcgctagcgtcccgtcccgcccgcgtcggagcggccgccggccccgggactgaccggcctcgccgcacctcccgcaccgactagcgctcccgggcgctcctgcgcccgactcgccctcgcccccactccccggcggggtggcggcggccgggcccccacggcggcggccggagcagcagcagcagcagcaggagcccgcctctatgatgaagttcaagcccaaccagacgcggacctacgaccgcgagggcttcaagaagcgggcggcgtgcctgtgcttccggagcgagcaggaggacgaggtgctgctggtgagtagcagccggtacccagaccagtggattgtcccaggaggaggaatggaacccgaggaggaacctggcggtgctgccgtgagggaagtttatgaggaggctggagtcaaaggaaaactaggcagacttctgggcatatttgagcagaaccaagaccgaaagcacagaacatatgtttatgttctaacagtcactgaaatattagaagattgggaagattctgttaatattggaaggaagagagagtggttcaaagtagaagatgctatcaaagttctccagtgtcataaacctgtacatgcagagtatctggaaaagctaaagctgggttgttccccagccaatggaaattctacagtcccttcccttccggataataatgccttgtttgtaaccgctgcacagacctctgggttgccatctagtgtaagatagagagaactgggtaggcctctcccaccatgtgcagtctcatggggagaggcttctttcgtttcctcgtcaaacatctgattgacgcttgcaaactgtctgaatttgccatgcaaggttttcaaacaatttgcatgtttttcagatgctttcaaatctttttttaaaaaaatagtgtaaaatattttaataagccaaagccatgtggaatttttgtttagatgccttaactgtgccacaccccacaaccccctatattattttggttgtctatttctcacagcatattttcagttttttgtccatttgacatcagtctgtggtttattttgtcatcagattacttgtgggtatacctaccccaaaattgttttctcattcacagcattagcatattcagcaaatccatctgtggtgggaattaaaaatattattggtattaaagaaatccattcaccccaaaacttgttttacaggattacaattttaattcaaaatttccagatttgggctatttctgtatgatccaataacttattttgtcacagggcttaatttgccatttttggggatttgtcgactcattttgtctgaattttcacaactggtattatgtcactagctacctgatacggctatttcccttataactcaatagtaccttaacacaaagtataactctgtagagttggtgaatattttagggaaatattagcaaaatgcatgtagtaaagacatcttatgaaaactgtattcatggaatttgatttagcatgctcagttgccagttcccattatcgatactctttctttgcagaataccttagaaccgttatttccctcagtgtagattgctcttaaaatgtattcagttatttagtggcccccacaggagtggagtcttgaaatctaattctaaatgccagtcagtgatgatcgcatcacagttgagtgaaatggccttcctgttcagctgttagagactgaagattgttagggcaccttagaatgtctcatcttttctaggttgtcaacaggtactatttgtcacataactaactttcgaggcactggaacatacctgaactaagaattaaatcttttactttatactcacttaaaatcaagaatcccatctaaaacacataggtaccttatctgaaactcttgcacttccccaaccagggcagaaatgaggtgggagaagtttgactaaaatgagggatgggggaaagtaaaagatgtttttttttttttgagactcgctttgtcacccaggctggagtgcaatggcacaatctcaactcaccgcaacctccgcctcccgggttcaagcgattctcctgcctcagcctcccgagtagttgggattacaggcgcctgcctccatgcctggctaattttgtatttttagtagagacagggtttcttcatgttggtcaggctggtctcaaactcctaacctcgtgatccgcctgcctcgacctcccaaagtgctgggattacaggcatgagccaccatgcccagccaaagatcatttttttatatagacttcagccctttgtaaatattgtaactggggagtatagagtagaaaaaaagtatagttaaaacatttgttctacaaattaacctttaaaaatataattactgctaaaaatagagtgctgttacacttaaggaaaattagtgccattttggaaatgagatcttgtgccataaatacagctgaactgaatataaatgttcacaaattaatgctgtcaaaggaatgagtaaagcagaaaaacttttaaccagcaacatttcaagtacgtagtgtgatcaaacatgatcatccagaatttttatatttttttctttgtacagaggttacatattctgggtgttcttttataaaggaaacattttaaatcccacaaattgacactttctatcttcaatggactaagatttttttggtcagtaatctctgaaatttccttaaattatatacttaacatagcagagaaagtcgaccagttccgaacataaaaccgcgcacaccgactatagaggaacaaccaccgggcggagtgggcggaggaacccagacaagaacatcaaaataggagaagtaataaaggtaatg

SEQ ID NO: 22786 - DNA, 1698 bp, Homo sapiens
cgcggggtcgccgcggtgctgctgctcagtgggagcgggtcttcgcaactgtctccgcgtggcgcgcgcctctagccgcccttcccctggcggctacggccggagggagcggaggcgagcgggagtcgggctccatggagagcggcggacaactgggcagaggcggagctttcatctcggcaccctggttccagtgacccgcgctagcgtcccgtcccgcccgcgtcggagcggccgccggccccgggactgaccggcctcgccgcacctcccgcaccgactagcgctcccgggcgctcctgcgcccgactcgccctcgcccccactccccggcggggtggcggcggccgggcccccacggcggcggccggagcagcagcagcagcagcaggagcccgcctctatgatgaagttcaagcccaaccagacgcggacctacgaccgcgagggcttcaagaagcgggcggcgtgcctgtgcttccggagcgagcaggaggacgaggtgctgctggtgagtagcagccggtacccagaccagtggattgtcccaggaggaggaatggaacccgaggaggaacctggcggtgctgccgtgagggaagtttatgaggaggctggagtcaaaggaaaactaggcagacttctgggcatatttgagcagaaccaagaccgaaagcacagaacatatgtttatgttctaacagtcactgaaatattagaagattgggaagattctgttaatattggaaggaagagagagtggttcaaagtagaagatgctatcaaagttctccagtgtcataaacctgtacatgcagagtatctggaaaagctaaagctgggttgttccccagccaatggaaattctacagtcccttcccttccggataataatgccttgtttgtaaccgctgcacagacctctgggttgccatctagtgtaagatagagagaactgggtaggcctctcccaccatgtgcagtctcatggggagaggcttctttcgtttcctcgtcaaacatctgattgacgcttgcaaactgtctgaatttgccatgcaaggttttcaaacaatttgcatgtttttcagatgctttcaaatctttttttaaaaaaatagtgtaaaatattttaataagccaaagccatgtggaatttttgtttagatgccttaactgtgccacaccccacaaccccctatattattttggttgtctatttctcacagcatattttcagttttttgtccatttgacatcagtctgtggtttattttgtcatcagattacttgtgggtatacctaccccaaaattgttttctcattcacagcattagcatattcagcaaatccatctgtggtgggaattaaaaatattattggtattaaagaaatccattcaccccaaaacttgttttacaggattacaattttaattcaaaatttccagatttgggctatttctgtatgatccaataacttattttgtcacagggcttaatttgccatttttggggatttgtcgactcattttgtctgaattttcacaactggtattatgtcactagctacctgatacggctatttcccttataactcaatagtaccttaacacaaagtataactctgtagagttggtgaatattttagggaaatattagcaaaatgcatgtagtaaagacatcttatgaaaactgt

SEQ ID NO: 22787 - DNA, 2735 bp, Homo sapiens
ccggccccaggttgactaacccagtagactaactagcaaaatgcatgtagtaaagacatcttatgaaaactgtattcatggaatttgatttagcatgctcagttgccagttcccattatcgatactctttctttgcagaataccttagaaccgttatttccctcagtgtagattgctcttaaaatgtattcagttatttagtggcccccacaggagtggagtcttgaaatctaattctaaatgccagtcagtgatgatcgcatcacagttgagtgaaatggccttcctgttcagctgttagagactgaagattgttagggcaccttagaatgtctcatcttttctaggttgtcaacaggtactatttgtcacataactaactttcgaggcactggaacatacctgaactaagaattaaatcttttactttatactcacttaaaatcaagaatcccatctaaaacacataggtaccttatctgaaactcttgcacttccccaaccagggcagaaatgaggtgggagaagtttgactaaaatgagggatgggggaaagtaaaagatgtttttttttttttgagactcgctttgtcacccaggctggagtgcaatggcacaatctcaactcaccgcaacctccgcctcccgggttcaagcgattctcctgcctcagcctcccgagtagttgggattacaggcgcctgcctccatgcctggctaattttgtatttttagtagagacagggtttcttcatgttggtcaggctggtctcaaactcctaacctcgtgatccgcctgcctcgacctcccaaagtgctgggattacaggcatgagccaccatgcccagccaaagatcatttttttatatagacttcagccctttgtaaatattgtaactggggagtatagagtagaaaaaaagtatagttaaaacatttgttctacaaattaacctttaaaaatataattactgctaaaaatagagtgctgttacacttaaggaaaattagtgccattttggaaatgagatcttgtgccataaatacagctgaactgaatataaatgttcacaaattaatgctgtcaaaggaatgagtaaagcagaaaaacttttaaccagcaacatttcaagtacgtagtgtgatcaaacatgatcatccagaatttttatatttttttctttgtacagaggttacatattctgggtgttcttttataaaggaaacattttaaatcccacaaattgacactttctatcttcaatggactaagatttttttggtcagtaatctctgaaatttccttaaattatatacttaacatagcagagaaactggattgtttttgtatataagactgcttccacctgaaatgctgtcataagtactgggggggtgggggagtgcccatcttgtacatgatattcttagaggtaataaggtaatgatgcatgaatttattttataaactcttggactatgtatttgacatgtaaaatatgtacagtattaacgtcaaccatctctttaaagttagcctataaatattgttgtataattttctttggtcagaaacacttggactgaatagtgacactcggtaaggattttcagtgccatttagcaaaacgtctttagtctatgcaactagcaaaaatctgcataatgcaacaacacagttttcacacttcaaattttacatgaggggttcttcacgattctcctggaacccagtctagcaaaatgagaggaaaggccctagggagatttatttctgttaaatagttaactctgctgagtatgacaaatagtgtctactatctcaaccctccaaaatttgcagagtgttgggactgtcatttgtgattttttttttttttttttggtggggtagttgaataaaattgggcagctaaatttttcagttccatgtgcctcccaaataaaaaacagaaaataagtagtttttgtgaattgacttgcagacaaagtagaaactgtgctgcatgatgttattttgtaaacagatgacattttctgaccaggcacatgccatccaattttctgtcaatcacactgttgtataaagcagcagaactgaaggggaaaaatgattgttgtatacactgaattgctttgcatggtctcatttgagataattgatgtaagaatcctgacttttttatatttggaaacatcaaataaaaatggaaaaaatgatcatggctttaaaaaaaaaacaaaaacacacacacatgaactcagatttgcaaaccaggtttctgaaactttgggtaaggtgtatgcttttaactttgaaatgtataaacacccagcggaaacgtatacctttcagtgcatagtgcattgtgtgcttaccctgggttgtttaaacttgtgttcaaatattccccctccaagtgaaagcctgtcgggaattccacagtaacacctttactgttctcccattgatgatcatatacgttacctcttcctagcggtacatttgtatgatccttactactggaattaccgggttaaaaggaaatgcttaccactaagatgtcagtattctcctcatggatattttcagtctcaatgttgccagtctaatagtatagtatgtggttgctttactgctgttctccccacccccgtggagttgtgtcattattttaatgaatgtgagctcttgacttactctagaattctaatacagatactttctgcacta

SEQ ID NO: 22788 - DNA, 2245 bp, Homo sapiens
cgcggggtcgccgcggtgctgctgctcagtgggagcgggtcttcgcaactgtctccgcgtggcgcgcgcctctagccgcccttcccctggcggctacggccggagggagcggaggcgagcgggagtcgggctccatggagagcggcggacaactgggcagaggcggagctttcatctcggcaccctggttccagtgacccgcgctagcgtcccgtcccgcccgcgtcggagcggccgccggccccgggactgaccggcctcgccgcacctcccgcaccgactagcgctcccgggcgctcctgcgcccgactcgccctcgcccccactccccggcggggtggcggcggccgggcccccacggcggcggccggagcagcagcagcagcagcaggagcccgcctctatgatgaagttcaagcccaaccagacgcggacctacgaccgcgagggcttcaagaagcgggcggcgtgcctgtgcttccggagcgagcaggaggacgaggtgctgctggtgagtagcagccggtacccagaccagtggattgtcccaggaggaggaatggaacccgaggaggaacctggcggtgctgccgtgagggaagtttatgaggaggctggagtcaaaggaaaactaggcagacttctgggcatatttgagcagaaccaagaccgaaagcacagaacatatgtttatgttctaacagtcactgaaatattagaagattgggaagattctgttaatattggaaggaagagagagtggttcaaagtagaagatgctatcaaagttctccagtgtcataaacctgtacatgcagagtatctggaaaagctaaagctgggttgttccccagccaatggaaattctacagtcccttcccttccggataataatgccttgtttgtaaccgctgcacagacctctgggttgccatctagtgtaagatagagagaactgggtaggcctctcccaccatgtgcagtctcatggggagaggcttctttcgtttcctcgtcaaacatctgattgacgcttgcaaactgtctgaatttgccatgcaaggttttcaaacaatttgcatgtttttcagatgctttcaaatctttttttaaaaaaatagtgtaaaatattttaataagccaaagccatgtggaatttttgtttagatgccttaactgtgccacaccccacaaccccctatattattttggttgtctatttctcacagcatattttcagttttttgtccatttgacatcagtctgtggtttattttgtcatcagattacttgtgggtatacctaccccaaaattgttttctcattcacagcattagcatattcagcaaatccatctgtggtgggaattaaaaatattattggtattaaagaaatccattcaccccaaaacttgttttacaggattacaattttaattcaaaatttccagatttgggctatttctgtatgatccaataacttattttgtcacagggcttaatttgccatttttggggatttgtcgactcattttgtctgaattttcacaactggtattatgtcactagctacctgatacggctatttcccttataactcaatagtaccttaacacaaagtataactctgtagagttggtgaatattttagggaaatattagcaaaatgcatgtagtaaagacatcttatgaaaactgtattcatggaatttgatttagcatgctcagttgccagttcccattatcgatactctttctttgcagaataccttagaaccgttatttccctcagtgtagattgctcttaaaatgtattcagttatttagtggcccccacaggagtggagtcttgaaatctaattctaaatgccagtcagtgatgatcgcatcacagttgagtgaaatggccttcctgttcagctgttagagactgaagattgttagggcaccttagaatgtctcatcttttctaggttgtcaacaggtactatttgtcacataactaactttcgaggcactggaacatacctgaactaagaattaaatcttttactttatactcacttaaaatcaagaatcccatctaaaacacataggtaccttatctgaaactcttgcacttccccaaccagggcagaaatgaggtgggagaagtttgactaaaatgagggatgggggaaagtaaaagatgtttttttttttttgagactccagcctgggcaacaagagcgaaactctgtctaaaa

SEQ ID NO: 22789 - DNA, 5805 bp, Homo sapiens
ggggggagcgagcaggaggacgagacttcccaggacagtctagaaaaccagcttgagcccacctctctagttaatagctacgtggcgctcccatctggctgttcctgtactgaagttctcagtgctgctggtgagtagcagccggtacccagaccagtggattgtcccaggaggaggaatggaacccgaggaggaacctggcggtgctgccgtgagggaagtttatgaggaggctggagtcaaaggaaaactaggcagacttctgggcatatttgagcagaaccaagaccgaaagcacagaacatatgtttatgttctaacagtcactgaaatattagaagattgggaagattctgttaatattggaaggaagagagagtggttcaaagtagaagatgctatcaaagttctccagtgtcataaacctgtacatgcagagtatctggaaaagctaaagctgggttgttccccagccaatggaaattctacagtcccttcccttccggataataatgccttgtttgtaaccgctgcacagacctctgggttgccatctagtgtaagatagagagaactgggtaggcctctcccaccatgtgcagtctcatggggagaggcttctttcgtttcctcgtcaaacatctgattgacgcttgcaaactgtctgaatttgccatgcaaggttttcaaacaatttgcatgtttttcagatgctttcaaatctttttttaaaaaaatagtgtaaaatattttaataagccaaagccatgtgcctcccaaataaaaaacagaaaataagtagtttttgtgaattgacttgcagacaaagtagaaactgtgctgcatgatgttattttgtaaacagatgacattttctgaccaggcacatgccatccaattttctgtcaatcacactgttgtataaagcagcagaactgaaggggaaaaatgattgttgtatacactgaattgctttgcatggtctcatttgagataattgatgtaagaatcctgacttttttatatttggaaacatcaaataaaaatggaaaaaatgatcatggctttaaaaaaaaaacaaaaacacacacacatgaactcagatttgcaaaccaggtttctgaaactttgggtaaggtgtatgcttttaactttgaaatgtataaacacccagcggaaacgtatacctttcagtgcatagtgcattgtgtgcttaccctgggttgtttaaacttgtgttcaaatattccccctccaagtgaaagcctgtcgggaattccacagtaacacctttactgttctcccattgatgatcatatacgttacctcttcctagcggtacatttgtatgatccttactactggaattaccgggttaaaaggaaatgcttaccactaagatgtcagtattctcctcatggatattttcagtctcaatgttgccagtctaatagtatagtatgtggttgctttactgctgttctccccacccccgtggagttgtgtcattattttaatgaatgtgagctcttgacttactctagaattctaatacagatactttctgcactagtatcacttttattattgcagttccatttaaaagcataactggctaagtcaccgccccacccgccgcattacatttcctaaaacatactgctgccaaagaccaactgtagaatccttaagtcctgttcaagtgtcacttcattttttattaggggtttcttagttggagggcatgagaaacttggccctttccaatgttgtcttcacattggagtataagaattctctataggactcttttaatttttttttttttttggtagagatggggtcttgctgtgttgcccaggctggtctcaaactcctaggcttaagcagtcctccagcctcagccttctcaaagtgctaggatgattggcatgagccacctcgtctggcctgcaggtctttttaagcatttgctgttcaataataagcatcttctttatgcctagtatttgtgataagagcacaaaacaattttctaatctcaaagagcttatattctagtggggtagagataagtgatttatcttggtgtagttttggcttttttgtttgtttttttgagacagcatctcacactgtcgcccaggctggagtgcagtggtgcaatctcagcttactgtaacctccgcctgccaggttcaagcgattctcctgcctcatcctcccgaggagctgggatcacaggcgcctgccaccacgcccggctaatttttttgtatttttagtagagacggggtttcaccatattggccaggctggtctcaaactcctgacctcgtgatccgcctgcctcggcctccctaagtgctgggattatgggcgtgaaccaccgcacctggcctatcttggtgtttttacatccttcagtatttttcaaggttttacagcttttttatctatagacttataccatcttcaaaagcaatacaattttatttgtagacgtgatttcccccaccaaatgcacattttatggagctctaggacaaaagtcaggatgaaaagtaatctatcgctggtgctactttaataccttcctgactggtgccactggctaaattctagcagtacgatgagagggccattaaggcctatcttagcaagcaagacattatagcaaagacctaaacactcaaaggttcaacgtcttctagccagggaactattctctaattcttccaccttgatatgatttcagcaaattctgataacccggtattactcttaatgcatttttgtaacatttgacaaacatctcccaatatgtagactcccactctcctgatgctaatcagtatcagacaatggaagtaaattttcctgcttttctcaacttttcctcaaattcatgttagtgaagtactttcatttggccatcattatttatcaaccttaagaaacatgcctattgacgaagtaaatatactaggaattcaacgtatctacgggaatgtggacaaagacatataccaagacaaggcactagagtgaaaagccattaaaataaaatgctcagcagcaaaggatttgtaatggttaacttgcaatatatccatatggtgtaatattacagtcattagaaatgacatttgcgtaaggatctgagtggaaactgatacagcctgtcggagagctactgagtagtattttatcacagctgcatacataccctttcacccaacagttccactcctgggagtctagtcaacaaatggacaagttgcacaaccaagctatggtcaaatatgtgtgttgtaggatttatgaaactggtaccaatttaatattcaaatgtgattaagtcatggcaatctatttactggatactttgtggttaccaaagagctatgtgctgccacagggagtcctttcaatagtgattgaaaaaggcagaacactactagacagaactacctgttttatgcatgtattggcatacactgaaaaagcttagtcacttaaaatgaggttgtacagattgtagattttgtttttaaacgcctgtatggtttaaaaaatgttttgggaaatagacatgagcagggcagagaactacaacctacaggccaaaccccaccccactgcctgtttgtacggccaacaagtttaaaatttttttaatgttttaggtttttttttttttaaaaaaaatactatgcccatttgtttacaaatcgtctgtgggtgctttctcactacaatggcagaattcagtagttgagacagacctatggtccacaaaggccgaaatatttactgttttaggagaaaaaaacaacatgaattgtaataacttggacttacttggttgctcagtcctgatgtgtcctgttaaaacctaagagaaacagcaccaagttcaatctagtgcaatcagcctatcacatctaagctgcttttgccagatctgatatctactcccgaccttaagccaggagactttgtaaacttactaggttataataaaacttaagaactatcgatatttactaatctacatcatggaactatttcaaaagcagtcatatggtaagatggatcaggagtctttaaaaataaaactgagaaagaaaaatcatgtgatcaattcagtagtagagacagaggttggtatcaagtctatgttcatacacttaccagtgccacccagcagggccatacaagacacatgaaatgagatcagctcaagggtgacaagatgaaactgggagagggccggggagacccgaactcttaatattggattccacacaagaggaaaaattttagtccagctcccagcatggcagctaatggcaagttagtaccataaagccaactcttggaatatacctgacttccacgataaaatggagatgagtgcaggggtgagtgtatagttaagaaaacaaacaatatattactagtccaggtggtagatgacagatttttattatttacacttctctcaaattattacattcagcatgttttgctttttatgttatttaaagtataaaccctcatataattccctaagatgggtggcatgccaagtagctaaatgaaatatcatcccagcccaaaagtacttattcgaatgaaatattacatttttcttaaataaagcaataaattaggtaccctattatcatggtattttcttttttggccagcttttccagataaggttgtattgctactgcaactaacaaaaaagatgtggcagggctgggcagtcgattttcaggaagccacttaatgttcagattcttttcttctctcccaggactttgcagatgctgctgttccctctgcctggagatgttcatctggcctgaatccaaaagtctgtccaagttacttctcttttccatgacagagttacaactatttgtctgtcccccttgccccattagagtatatggtccccaaaggaaagccccatgccattcactcaccacctaatcatccccaacaactagtgggcaaacatgaaacacttttgttgaataatgtgtttcctttagcccagggattacaaagtcaaaggcttacaagggggaaggactagcaggtgtgctcggaggggactctagccaactggagagtaactggtgagaagacaatgacatgctcttagggtgtctgctactcagatcctctcagttaagtcccgtgcacaaaggtgggtcaggtctactgttgccagatcttcagatcattcaaaagttacccgaattctggattttcatgcaaatctcccaatttttaaaaatgttggcatcaaattcagaatgttttaaccagccacactgtgtgggccagggaaaacaggcccaaaggccaggtgaagctgcagttttcaactgctgccttggcctctcccagagccccttaagtcctaagaaggctcagtcaacacactggcactcgtttcatcccactggttgagaaagcaagtcttagcaaagtaatgggggagtcttaccaaaactgcaaaggaaaaaaatatgataccatgaaattagaaattcactgcatttgaaatgaaaatgacttatttctgtacttctataactcacaaatttagcagacatcatttagacatttttgtagtgcaacagatttaaatctggaatttcatggtttgtaaatcactatgtgatactagctataaccatgagcaatattacgggcagtaaatgttgatttctatttcgtttcttgaagttttgtgtggttcatttttaaagtgagattcaa

SEQ ID NO: 22790 - DNA, 335 bp, Homo sapiens
aatagagttataaccttgcagaggtttgagaatgttgtttatatacgaagtgcttctcaggctggaagtatacagttatggttcaccttacaggtgctgctggtgagtagcagccggtacccagaccagtggattgtcccaggaggaggaatggaacccgaggaggaacctggcggtgctgccgtgagggaagtttatgaggaggtgagatgttctttcacacaaattctgtttcggagttttaaaaacaaggccctttgctacataacactaagacagcgagacgggtccaggagtgctttttgcctgatgcaactttatttttaattttaatt

SEQ ID NO: 22791 - DNA, 381 bp, Homo sapiens
tctcgcctagcgggagtcaccatcttaacgtgcgaattgagttgaaagccggataaacctcgagtgctcagcgagaggagggtggaaatggcgtgagtgttgcagcagagcccttgtgcctcttttacatattttccttccatgttacagccgtttgcggtctcggattcgatctaagcatgtttgtggagtaacagacagtcctcgtgcttggaattgagtctagtcttggcaattcttgtgggtccatgaacccgcaagctgttggcataattatgcctcatttttaaaacggccttcccttcttaaagttttctgactgcagaaaaatggttagtgaaaaatgtggaataatgccaaaagggagacgatggactagag

SEQ ID NO: 22792 - DNA, 7846 bp, Homo sapiens
  misc_feature (7732)..(7732): n is a, c, g, or t
cgcggggtcgccgcggtgctgctgctcagtgggagcgggtcttcgcaactgtctccgcgtggcgcgcgcctctagccgcccttcccctggcggctacggccggagggagcggaggcgagcgggagtcgggctccatggagagcggcggacaactgggcagaggcggagctttcatctcggcaccctggttccagtgacccgcgctagcgtcccgtcccgcccgcgtcggagcggccgccggccccgggactgaccggcctcgccgcacctcccgcaccgactagcgctcccgggcgctcctgcgcccgactcgccctcgcccccactccccggcggggtggcggcggccgggcccccacggcggcggccggagcagcagcagcagcagcaggagcccgcctctatgatgaagttcaagcccaaccagacgcggacctacgaccgcgagggcttcaagaagcgggcggcgtgcctgtgcttccggagcgagcaggaggacgaggtgctgctggtgagtagcagccggtacccagaccagtggattgtcccaggaggaggaatggaacccgaggaggaacctggcggtgctgccgtgagggaagtttatgaggaggctggagtcaaaggaaaactaggcagacttctgggcatatttgagcagaaccaagaccgaaagcacagaacatatgtttatgttctaacagtcactgaaatattagaagattgggaagattctgttaatattggaaggaagagagagtggttcaaagtagaagatgctatcaaagttctccagtgtcataaacctgtacatgcagagtatctggaaaagctaaagctgggttgttccccagccaatggaaattctacagtcccttcccttccggataataatgccttgtttgtaaccgctgcacagacctctgggttgccatctagtgtaagatagagagaactgggtaggcctctcccaccatgtgcagtctcatggggagaggcttctttcgtttcctcgtcaaacatctgattgacgcttgcaaactgtctgaatttgccatgcaaggttttcaaacaatttgcatgtttttcagatgctttcaaatctttttttaaaaaaatagtgtaaaatattttaataagccaaagccatgtggaatttttgtttagatgccttaactgtgccacaccccacaaccccctatattattttggttgtctatttctcacagcatattttcagttttttgtccatttgacatcagtctgtggtttattttgtcatcagattacttgtgggtatacctaccccaaaattgttttctcattcacagcattagcatattcagcaaatccatctgtggtgggaattaaaaatattattggtattaaagaaatccattcaccccaaaacttgttttacaggattacaattttaattcaaaatttccagatttgggctatttctgtatgatccaataacttattttgtcacagggcttaatttgccatttttggggatttgtcgactcattttgtctgaattttcacaactggtattatgtcactagctacctgatacggctatttcccttataactcaatagtaccttaacacaaagtataactctgtagagttggtgaatattttagggaaatattagcaaaatgcatgtagtaaagacatcttatgaaaactgtattcatggaatttgatttagcatgctcagttgccagttcccattatcgatactctttctttgcagaataccttagaaccgttatttccctcagtgtagattgctcttaaaatgtattcagttatttagtggcccccacaggagtggagtcttgaaatctaattctaaatgccagtcagtgatgatcgcatcacagttgagtgaaatggccttcctgttcagctgttagagactgaagattgttagggcaccttagaatgtctcatcttttctaggttgtcaacaggtactatttgtcacataactaactttcgaggcactggaacatacctgaactaagaattaaatcttttactttatactcacttaaaatcaagaatcccatctaaaacacataggtaccttatctgaaactcttgcacttccccaaccagggcagaaatgaggtgggagaagtttgactaaaatgagggatgggggaaagtaaaagatgtttttttttttttgagactcgctttgtcacccaggctggagtgcaatggcacaatctcaactcaccgcaacctccgcctcccgggttcaagcgattctcctgcctcagcctcccgagtagttgggattacaggcgcctgcctccatgcctggctaattttgtatttttagtagagacagggtttcttcatgttggtcaggctggtctcaaactcctaacctcgtgatccgcctgcctcgacctcccaaagtgctgggattacaggcatgagccaccatgcccagccaaagatcatttttttatatagacttcagccctttgtaaatattgtaactggggagtatagagtagaaaaaaagtatagttaaaacatttgttctacaaattaacctttaaaaatataattactgctaaaaatagagtgctgttacacttaaggaaaattagtgccattttggaaatgagatcttgtgccataaatacagctgaactgaatataaatgttcacaaattaatgctgtcaaaggaatgagtaaagcagaaaaacttttaaccagcaacatttcaagtacgtagtgtgatcaaacatgatcatccagaatttttatatttttttctttgtacagaggttacatattctgggtgttcttttataaaggaaacattttaaatcccacaaattgacactttctatcttcaatggactaagatttttttggtcagtaatctctgaaatttccttaaattatatacttaacatagcagagaaactggattgtttttgtatataagactgcttccacctgaaatgctgtcataagtactgggggggtgggggagtgcccatcttgtacatgatattcttagaggtaataaggtaatgatgcatgaatttattttataaactcttggactatgtatttgacatgtaaaatatgtacagtattaacgtcaaccatctctttaaagttagcctataaatattgttgtataattttctttggtcagaaacacttggactgaatagtgacactcggtaaggattttcagtgccatttagcaaaacgtctttagtctatgcaactagcaaaaatctgcataatgcaacaacacagttttcacacttcaaattttacatgaggggttcttcacgattctcctggaacccagtctagcaaaatgagaggaaaggccctagggagatttatttctgttaaatagttaactctgctgagtatgacaaatagtgtctactatctcaaccctccaaaatttgcagagtgttgggactgtcatttgtgattttttttttttttttttggtggggtagttgaataaaattgggcagctaaatttttcagttccatgtgcctcccaaataaaaaacagaaaataagtagtttttgtgaattgacttgcagacaaagtagaaactgtgctgcatgatgttattttgtaaacagatgacattttctgaccaggcacatgccatccaattttctgtcaatcacactgttgtataaagcagcagaactgaaggggaaaaatgattgttgtatacactgaattgctttgcatggtctcatttgagataattgatgtaagaatcctgacttttttatatttggaaacatcaaataaaaatggaaaaaatgatcatggctttaaaaaaaaaacaaaaacacacacacatgaactcagatttgcaaaccaggtttctgaaactttgggtaaggtgtatgcttttaactttgaaatgtataaacacccagcggaaacgtatacctttcagtgcatagtgcattgtgtgcttaccctgggttgtttaaacttgtgttcaaatattccccctccaagtgaaagcctgtcgggaattccacagtaacacctttactgttctcccattgatgatcatatacgttacctcttcctagcggtacatttgtatgatccttactactggaattaccgggttaaaaggaaatgcttaccactaagatgtcagtattctcctcatggatattttcagtctcaatgttgccagtctaatagtatagtatgtggttgctttactgctgttctccccacccccgtggagttgtgtcattattttaatgaatgtgagctcttgacttactctagaattctaatacagatactttctgcactagtatcacttttattattgcagttccatttaaaagcataactggctaagtcaccgccccacccgccgcattacatttcctaaaacatactgctgccaaagaccaactgtagaatccttaagtcctgttcaagtgtcacttcattttttattaggggtttcttagttggagggcatgagaaacttggccctttccaatgttgtcttcacattggagtataagaattctctataggactcttttaatttttttttttttttggtagagatggggtcttgctgtgttgcccaggctggtctcaaactcctaggcttaagcagtcctccagcctcagccttctcaaagtgctaggatgattggcatgagccacctcgtctggcctgcaggtctttttaagcatttgctgttcaataataagcatcttctttatgcctagtatttgtgataagagcacaaaacaattttctaatctcaaagagcttatattctagtggggtagagataagtgatttatcttggtgtagttttggcttttttgtttgtttttttgagacagcatctcacactgtcgcccaggctggagtgcagtggtgcaatctcagcttactgtaacctccgcctgccaggttcaagcgattctcctgcctcatcctcccgaggagctgggatcacaggcgcctgccaccacgcccggctaatttttttgtatttttagtagagacggggtttcaccatattggccaggctggtctcaaactcctgacctcgtgatccgcctgcctcggcctccctaagtgctgggattatgggcgtgaaccaccgcacctggcctatcttggtgtttttacatccttcagtatttttcaaggttttacagcttttttatctatagacttataccatcttcaaaagcaatacaattttatttgtagacgtgatttcccccaccaaatgcacattttatggagctctaggacaaaagtcaggatgaaaagtaatctatcgctggtgctactttaataccttcctgactggtgccactggctaaattctagcagtacgatgagagggccattaaggcctatcttagcaagcaagacattatagcaaagacctaaacactcaaaggttcaacgtcttctagccagggaactattctctaattcttccaccttgatatgatttcagcaaattctgataacccggtattactcttaatgcatttttgtaacatttgacaaacatctcccaatatgtagactcccactctcctgatgctaatcagtatcagacaatggaagtaaattttcctgcttttctcaacttttcctcaaattcatgttagtgaagtactttcatttggccatcattatttatcaaccttaagaaacatgcctattgacgaagtaaatatactaggaattcaacgtatctacgggaatgtggacaaagacatataccaagacaaggcactagagtgaaaagccattaaaataaaatgctcagcagcaaaggatttgtaatggttaacttgcaatatatccatatggtgtaatattacagtcattagaaatgacatttgcgtaaggatctgagtggaaactgatacagcctgtcggagagctactgagtagtattttatcacagctgcatacataccctttcacccaacagttccactcctgggagtctagtcaacaaatggacaagttgcacaaccaagctatggtcaaatatgtgtgttgtaggatttatgaaactggtaccaatttaatattcaaatgtgattaagtcatggcaatctatttactggatactttgtggttaccaaagagctatgtgctgccacagggagtcctttcaatagtgattgaaaaaggcagaacactactagacagaactacctgttttatgcatgtattggcatacactgaaaaagcttagtcacttaaaatgaggttgtacagattgtagattttgtttttaaacgcctgtatggtttaaaaaatgttttgggaaatagacatgagcagggcagagaactacaacctacaggccaaaccccaccccactgcctgtttgtacggccaacaagtttaaaatttttttaatgttttaggtttttttttttttaaaaaaaatactatgcccatttgtttacaaatcgtctgtgggtgctttctcactacaatggcagaattcagtagttgagacagacctatggtccacaaaggccgaaatatttactgttttaggagaaaaaaacaacatgaattgtaataacttggacttacttggttgctcagtcctgatgtgtcctgttaaaacctaagagaaacagcaccaagttcaatctagtgcaatcagcctatcacatctaagctgcttttgccagatctgatatctactcccgaccttaagccaggagactttgtaaacttactaggttataataaaacttaagaactatcgatatttactaatctacatcatggaactatttcaaaagcagtcatatggtaagatggatcaggagtctttaaaaataaaactgagaaagaaaaatcatgtgatcaattcagtagtagagacagaggttggtatcaagtctatgttcatacacttaccagtgccacccagcagggccatacaagacacatgaaatgagatcagctcaagggtgacaagatgaaactgggagagggccggggagacccgaactcttaatattggattccacacaagaggaaaaattttagtccagctcccagcatggcagctaatggcaagttagtaccataaagccaactcttggaatatacctgacttccacgataaaatggagatgagtgcaggggtgagtgtatagttaagaaaacaaacaatatattactagtccaggtggtagatgacagatttttattatttacacttctctcaaattattacattcagcatgttttgctttttatgttatttaaagtataaaccctcatataattccctaagatgggtggcatgccaagtagctaaatgaaatatcatcccagcccaaaagtacttattcgaatgaaatattacatttttcttaaataaagcaataaattaggtaccctattatcatggtattttcttttttggccagcttttccagataaggttgtattgctactgcaactaacaaaaaagatgtggcagggctgggcacggtggctcacgcctgtaatcccagcactttgggaggccgaggcgggcagatcacgaggtcaggagatggagaccatcctggcccaacatggtgaaaccccgtctctactaaaaatacaaaaaattagccaggtgtggtggcaggtgtctgtagtcccagctcctcnggaggctgaggcaggagaatcgcttgaacgcgggaggcagaacctgcagtgagccaagatcatgccacagcactccagcctaaactacagagctagaaagtggctagagcagcc

SEQ ID NO: 22793 - DNA, 703 bp, Homo sapiens
gatcaggtaatctgtgaatagggacagttttcttttaaatctatacatttatctctttattttctggttaggatcctcaaaggtaatttttaatgaattactaggtcagttttgatgaactagaattgtcatttcggttcgcatagcagatacatgccttactggaacttggtatcaagtgactatatcctaatggaattgaatatgggatgttagagtgttgtttatcagttgagtctgttttggagacagaacttggatgcctttgctcaggatctcttcctatgacagttcttaggtagttgaatgttctctggttgaattgtggttcttggtgactgaagaaggactatctcaagttcccctttgtttctgaatttcccctgtggaatgaaagtcaaaagttgcgtacaaaagagcttttggactgagcctcgatatcattcctttctgtacttttgtgcttttagtgggatgatcttgatccaggctgaaggccagccaggcacctgtatagagtggaatgtatctagatgactgcgttgtttttgttcaatgattagaaactatttattaatcccaaattgtcatgatcaaaatatctatatccatgtctgcataatacatatactgagctggaaattttgccatgaagcaaacgttcattagtgttaagaccattattacgtattatatccatgtc

SEQ ID NO: 22794 - DNA, 387 bp, Homo sapiens
aaggttgaagtggaggtgcagaggatggcattttggggggtatagcatggcaagaaaaagcaaattgcttctttctttttaagaatatttatagacagaaagtgcccccaaatcaataaaaatattaggtttcccaaaagggacttattagtggagcatatttccagagtggagaggaggtggaatccagcttgtatactgaagacatttgaaaatgcagggcagatatccagagtggaggatggtggcgaacagtagtacatccacaagatgggaagtagttgttctgccattgaaatgattattgggaaacaccatgagaagtgcttaggatacaatgttgggtggaaaagctcattataaagtggtctgtgcactgatagaaaa

SEQ ID NO: 22795 - DNA, 922 bp, Homo sapiens
gacatgtcaagcgtgccaaaccttgctctcctaagtttgcttctttccttacacgtgtgctcttaacctcctgccatgccttactattggcaagcagatccctagaacttaggctttaacctgttgactttagagtggcttctaggtcatttcttcttttttacaagtctgcctgtctactaatatgcatcaggtgagtacaagggatagaaaaggcaagaaacaccaaagaggtacttcgtttttattgtttaatctgggttcttaatgggtactcttgagctgtccacattggtgggcattttaaaactaagagcacactaaaagtagaagataccatcacaatgcttatcctggagatgcttgctggggaacagctctgcagccagagcgccgtgcagggcagagtgtaaaactgaaagctggagggctggagaaacaaggactgttttaggttgagttaaagaagacttctgggatggggggatttcacggtgaatggatcttgtaggactggcaggtgggtgtaaggggggcacacatagagggccctgcacaggggacacttaagtactgtggtcctggtgctcagccttttcaccttagcacccctgatattcttttttctctcagtgaattaaaagctgttaccgatcatacagagtgcatttatgaagtagtaattagctttcccatgttttattaatcacatctgtgactgccaatcagagcttctgatcagcatgagataactggtgtgaccatactgagttgctgtaattctagcccagagcaaagaaacttgatgtctctgtcagtgtctgcagccttatcaggggtaaattcctgttcagcctactgcaatgctgaaatagcttgaagatcctcattactacctttgtggaccctcgaggggcctcag

SEQ ID NO: 22796 - DNA, 370 bp, Homo sapiens
gccaaagagctgagacagaagtacaacgtgcgatgcatgcccatccaaaaggatgatgaagttcaggttgtatgaggacactataaagatcagcaaattggcaaagtagtccaggtttacaggaagaaatatgttatctacaatgaatgggtgcagtgggaaaaagctaatggcacaactgtccacataggcattcaccctagcaaggtggtcatcactaggctaaaactggacaaagaccgcaaaaagatccttgaacggaaagccaaatctcgccaagtaggaaaggaaaagggcaaatacaaggaagaaacaattgtgaagatgcaggaataaagtaatcttatatacaagctttgattaaaacttg

SEQ ID NO: 22797 - DNA, 426 bp, Homo sapiens
gaagaaatcataagccctggaccccgaacctcggcggacttcccacacacctcttaagatggtggagaggtatgaggtaatggcttccaggtgtctcaggtcatctgggccaagggggaccctggctggaaggagcagaagagtaagaggaaaagtgcagggtgtgcgggaagaaatggggaatctgaggttctgagagcccccatggagggtgcattgtagctgctgttagcagtctgctgggcactggctgggggaaggtcatgaaaacaattgctttacaaagagcatccacagaaagtgtatttgaattacagttctttaatcaagttgttttactgacattggaactttgacctaagggttttaaccctcgtgtaaaggacatcttttttttttttcttttttttttgagacagactctca

SEQ ID NO: 22798 - DNA, 617 bp, Homo sapiens
cgttagaaggttactagttttaaagtaattagaaactaataaagtatgcaccgcctaggctatactgaatgtaatgtaattccttttggtaattaataatacctctaggaacacgttacaaaaataagagccatcagctgtagaatatcatattcataaatagtttataatgcaaaacagtaactttggtacctactgggtctattggttggaattcttttaacccttttcaataattatggagacacttgtccagaatttattatataaacttttttatacattagacttttacaaacaaatgctctcaaaattcaatattttcttcatgttcagtcaggatattaattcctagcttgctatgccagagtggtaaaagggggtagggcttcattttcaaaatgaacccagcaaagggaacccagaagtgctcagaaagggctttctgctaactaatgatggcaaacgtggtctgtgtgatggggtggcatctactttctgaaaatttttaattttaatttttgttgttttcgttttgttttgttttataacttgtgttttatttttgccaaatttggtttcattccctgcctgttccatttggaggtactacacta

SEQ ID NO: 22799 - DNA, 609 bp, Homo sapiens
gctgttgtccagtgtccccagcaccgagcgagtttgagtccatcagtcagtggatgccattttgaaggtgcagtctggtttcatggttagctgccataacatatgccaagtatcctgctcacatttacgtctctgaacaaatacgcatcagtctggtttcatggttagctgccgtaacatatgccaagtatcctgctcagatttatgtctctgaacaaatatgcattctgctttgttgtgagttccagacaagcactttaaccaaattggcaggcagtagagatagggaaggagtaattgaaaagtattagaaaataaaatgatccaggccaggtgcggtggctcatgcctgttaattccagcagtttgagaggcccaggtgggtggatcccttgaggttaggatttcaagaccaccttggccaacatggtgaaaccccatctctactaaaaatacaaaaattaattcgcgtagtggcacacacctgtaatcccagctactcggaaggctgaggcaggagaatcacctgaacccagatagcggccgttgcagtgagtcatcattgcaccactgtactccagcctcggcaacagagcgagactccatctc

SEQ ID NO: 22800 - DNA, 408 bp, Homo sapiens
cctggactgcatcatgaggaagcctttggagggtgttaagcagagtggtgacatgggcatgtcagagctttagatatatcatatggccaccatgtggagcctggtttgggggcttgagaaaagcaaaggtagaggcagttaggagattgttggaaagggttcaagaaaaactattgccagccaggcgcggtggctcatgcctgtaatcccaacacgttgggaggccgaggcgggtggatcatgaggtcaggagttcgagaccagcctggccaacgtggcgaaaccccatgtctactaaatacaaaaaattagccgagtatggtggcgggcgcctgtaatctcagctacttgggaggctgaggcaggagaattacttgaaccagggaggcaaaggttgtagtgagtcaa

SEQ ID NO: 22801 - DNA, 200 bp, Homo sapiens
cgggttttcgctgttttagccaggatggtctcgaattcctgacctcaggtggaccacccacctcggcctcccaaagtgctgggattccaggcgtgagccaccgcgcccggcctgccattttcattaaccacatatcttcgttgtcactttagcagttgtaggagaatctgctgacctcgcttcacaaattttttgaatct

SEQ ID NO: 22802 - DNA, 497 bp, Homo sapiens
gatctgctctcctcagcaatcagaagcttgaaactctggacctgggccagaatcatttgtggaagagtggcataattaagctctttggggttctaagacaaagaactggatccttgaagatactcaggttgaagacctatgaaactaatttggaaatcaagaagctgttggaggaagtgaaagaaaagaatcccaagctgactattgattgcaatgcttccggggcaacggcacctccgtgctgtgactttttttgctgagcagcctgggatcgctctacgaattacacaggaagcgggattcgggtctctaagatgtcttatgaatgcaggtcagagggtcacatgttaacactagagtctgtcgagaggtaggatttgacactggttttctcactatttttgggagattctgcacgagtcacgcacccccttcacatgacgctatgtactttctcacagggataataaagttagagcactctcgttgcagctgcg

SEQ ID NO: 22803 - DNA, 648 bp, Homo sapiens
agtgagctgagatgacaccactgcactccagcgtgggcagcagagtgagactccaccttaaaaaaaaaaattacataaaaaaaccacgaaaggctttgttcatttctatctttgggataatattttttcacttaatatatgtatcaacctatatttatttgagtactttctcatttacatctttaatccttatggaatttattttgtgtgtggtatgagtgttgcatttgcaattaaagaatgctatactgatggcctactggtatatttcattttaataacctggttgcctagctctgaagaagatttaaaagtcctctaacttttcatgccaaagaatgaattaattttctcaaaatgtttccactttcttttcattgtgcccaaattactctattggaccatctgcttttctaagattaaaactgctttctggagattggttgcacagcaacataaatgtacttaataatactgagtcatacacttagaaatggttaagatggtaaatcttgttatgtgtattttataatttttcctttgtcttaataattctatttttaaggaagctattctaaggaaataatctaataggaaaaaacccccagggaatggtatctcaattaaaaaaaataacaaaataactta

SEQ ID NO: 22804 - DNA, 1118 bp, Homo sapiens
ccaatgaatgttaataatataaggatataaacatgtcacatgacagtgcacatacatacagtattaatatacatgtattttacatatgtatttctgaaggcaatatattaagataaatttatctctggagtgaaagtttccaggtgactatattttgatttctagtgttaatattacttttgtaatcaagaaagttttaaatgttttttaaatagaaattggattttaattgcacctactgtcctgtttgaaaagctataccatgaaattatagaacatttcaagtgaacattcacagaacctagtaacagccctagccagtgctgctaaataagacacttcgtagatttttttttacagttagttagtaattatttggaatttcaaaaaaaaatttttttttccataaaactcctaacataaagggaccaggtccttattctaaactttggattaaagactgagggaatataacatctaatacatacttaaccattaccgtgactttttacttttttcccttttcctattttaaaatattgttttaggtttgtttttatttaataataattattttgaaggctattacttattgcgcattgatgtgccagatactgagctcaatgttttctcctcacaccctcttaggttaaatgaaaattatgcaaatgaccaagcaggtttaaaaaggttagggccatacaattatgtcaaattccaaactctgcttaactaccgtggtaacctttgatgtcctgtttctcaggcctgtggttctttaattttttataaaaaaggggaagagggatgaggtatcagatagctgatgttgaattcaaccgtttattttccaaagtagaaatacctatttatttttttcctgattatgaacattattttttaaaaggcaatttggaaagtgaaattttccctcgatataccataatttacaacagggtaccaaaatgtacactgtttatttttggaataattttggcagcagtctaaactttttgggatattacctaactgcatgtgaatggtcagttaccttgtataaagtcctaaggtgatgtgatttctctgacctcaatcattatcactttataggatatata

SEQ ID NO: 22805 - DNA, 458 bp, Homo sapiens
ccttccttctactcaaatttaaacatgactccccaggagccaaccaattcacccaccatatattccaaatctaccaagaatgcttagctccccttccccacaaggaagaaagggaggattaggcattccttttgctcctccttacaaaataatataataataataatgaaaatatggccaggcacagtggctcaagcctgtaattccaatactttgggaggctgaggtgggtaggttgcttgagcccaggagttcaagaccacctgggcgacgtggtgaaaccccatctctacaaaaaaaatccaaaaattagctgggcatggtggcacgcgcctgcagttccagctacttgggtgctgaagtgggaggatcgcttgagcctgggtggtcaaggctgcagtgagctgagatcacaccactgcactccaacctgggcaacacagcaagaccctgtctta

SEQ ID NO: 22806 - DNA, 489 bp, Homo sapiens
cagagttctaaaaccaaaatgaaaagtatagagatgattgtcctgtgaaatggccccaagcctcagacccattaccatctacctctggcctcacttgggggctactgtagatgctcagcacagaacctcttagctgtggttgtgacttcctggctggccaggcctgtaagaggcggaggaagaagtgctgtggcgagctctgtgactcagaggaaagcagccaggacatgacgtcctgcacgactgcctggggtggctgcagggaggtggcctagggacagatgaagctgcagtggggaccacctcccctgcagaagcagttttcttgtccctcctcatccaaacacactccaacttaaaaaatcattatgcataactccgaaagcaggtccatgctgtacctgtgtgtgtcctgccagatttctttgttcctgggggaaaacagcaataaacatcacattccttttcagtgttgaattgctactgctt

SEQ ID NO: 22807 - DNA, 706 bp, Homo sapiens
aaatatattgcagcttaagtgatttagccagattctcctccccacatctctccaggacacaattgtggttatcagttaggacactcttcactttgttttgataattctgagtgtgcaaggatgcttagaagacagttcttcctcctcgctccataggcttcccaaggagcacacaccaggacatcaggatgagagtcaagccaggttccctgtgcacacacatacacatgcatacactcatgcacacacacaccaccaccaccaccaatctccagccttggctcatcacccagaatgactgggatagagttagatgtagaattagatgtctagggaatttcccaggattattctagggcagaggtatcaaactggtggccacctgtgactctgcctgcctacaaatgaaatgtgtttggtcttcagaatgcttctgataaagttcagttaggagcccacatttaaatatggcaaggttttacatagaaacctgaattttcaatttggaaaatctggaagctgcagcaatcctgggccacatttccttatggtgacacttggttcagcccttttgaggcaaagcacgtcctctgcagttcactgcagccttgcaatcccaaatttatggacagtttcagggcagcagtacttctttcacacacagtgctaatatcaatgttttgaatgttcctattagatctcattt

SEQ ID NO: 22808 - DNA, 633 bp, Homo sapiens
tattaagaacttccactgtggcaagaatttaagcgaaaatgattcacagcccagtgtgaaataacagaatgcagccatttgagaagcagttgtaaattttacctactatgtatattgcgtatatgctttttaatttaaaatttccttatgctttttctttggtttttctagacttgatctattttttctttcattcctttgaaactagagttttgcattaaaaagtaaaaggagtatgttgataaacagaattctgacactacagaatcagctacaagagtctacatttaaagactagtggaaaatgagtgaagttcatcctcataaagtacttctgaatttgagttgaatacatggcaccttcaggatattatcctgctgctttgagatcctgaatatgccttgcaagtaataattaaactttatgctccatcctggctaacacggtgaaaccccgtctctactgaaaatacaaaaaaaaattagccgggcgaggtggcgggcgcctgtagtcccagctactcgggaggctgaggcaggagaatggcgtgaaccccagggggcggaggctgcagtgagccgagattgcgccactgcactccagcctgggcgacagcgagactccgtctcaaa

SEQ ID NO: 22809 - DNA, 506 bp, Homo sapiens
tattaagaacttccactgtggcaagaatttaagcgaaaatgattcacagcccagtgtgaaataacagaatgcagccatttgagaagcagttgtaaattttacctactatgtatattgcgtatatgctttttaatttaaaatttccttatgctttttctttggtttttctagacttgatctattttttctttcattcctttgaaactagagttttgcattaaaaagtaaaaggagtatgttgataaacagaattctgacactacagaatcagctacaagagtctacatttaaagactagtggaaaatgagtgaagttcatcctcataaagtacttctgaatttgagttgaatacatggcaccttcaggatattatcctgctgctttgagatcctgaatatgccttgcaagtaataattaaactttatgctccatcctggctaacacggtgaaaccccgtctctactgatttttcaccatggagtttcaccatgttggccaggctggt

SEQ ID NO: 22810 - DNA, 307 bp, Homo sapiens
aaaaaatgtagaaaaaaacagggtttcccctgtttggcccgggggggtcaaaatccctgaattgggagccccccccttgtggccccccaaaagcttggaaaccccgggataagccccccccttcaagccggggggcagggagggccccgtttcaaaaaaaaaaaaaaaaaaaaactttatgctgctgcttaggaaagatgaaattgggatgtggggacaaggatctgagcaaacaaatctggctttttggtgacaactatgcttagcctatttgaacaagagttatggctccattggaaagcaggac

SEQ ID NO: 22811 - DNA, 392 bp, Homo sapiens
actccagtgttcttccattaaatacccattttcttcagttgagttggaattggctttatgatacttgcaatgacaagagttttgactaatagcttatgcgtctgttaacattggtaaccaggaagaacacacagcagcatggaaaaggaattttgatgaattttacaaagagcacgatataaaattgtgactgatatgcattgcagttatttgcaataatcatgcctatgcaagacaagtgaaagagaagtattttaaaaatctatgggtggctgtaatcccagctactcaggaggctgaacatgagaattgctgaaacccaggaggcgaaggttgcagtgagccaagattgcaccactgcgccccaggctggaccacaaagcgaaactctc

SEQ ID NO: 22812 - DNA, 388 bp, Homo sapiens
gttattttaggcttaccgattctactactcatttgaaaatgatgaagtagtgcattctttcttacaaagaaagtttagtatccatccagtcagttacttttcatcctagtataatacccaatatgtaaaatcctgactgatggctgggtgcggtggctcacgcctgtaatcccagcactttgggaggccgaggcaggcggattacgaggtcaagagattgagaccatcctgaccaacatggtgaaatcccgtctctactaaaaatagaaaaattagctgagcatggtggcacattcctgtagtcccagctacttgggaggctgaggcaggagaatcgcttgaacccaggaggcagaggttgcagcaagccgagatggcgccactgcac

SEQ ID NO: 22813 - DNA, 407 bp, Homo sapiens
  misc_feature (371)..(371): n is a, c, g, or t
  misc_feature (393)..(393): n is a, c, g, or t
  misc_feature (403)..(403): n is a, c, g, or t
ttaagtgatagtaagttaatagtaacgtatacagattttataacataacactcataaagctagcaactttatagatttgtaaaaatgcagttgaaatgaccactgcagcttaatagttaatagttctttttggtgtctaatactcagaaacctgttggaaactaattttgtgtagtttgatatccactggccaaattaccatttgaatttactaaagaattcattgcttcactactgtaccatagtttataaaggactttttgagtgctctttgattcttgtctctgaaggaatcttaggcataatgccaacatagtgccaaccataatagttttccagtttaagtacttcctatttctatcttaaagggntgggcatgtgttttaaacaatntttaggttcnggta

SEQ ID NO: 22814 - DNA, 164 bp, Homo sapiens
agacgtcctctcagtaagggaccagatctcacaaaactcccggttctcagctgagctaggggcttggcatcaagtctttgtttgatctgatttactggataacctcaggcaggtgacttgaccgcacttcggggactttatcaggtaatactgtcaagagcagt

SEQ ID NO: 22815 - DNA, 744 bp, Homo sapiens
gagaccaggagttcgtgaccagcctgggcaacatggcaaaaacatgtctcttcaaaagtacaaaaaattagctgggcgtggtggcatgcacttctagtctcagctagttgggaagccgagaggggaggattgcttgagcctgggaggcagaggttgcagtgagccaagatcatgccactacagccttgatgagagagtgagaccctgtctcaggaaaaaaaaaaataattcatttccttgtggctttatgagtaaggacccagatttttttctggctatcatctggaagccactctcaagtcctagaggctgcccacagttctttgccaaagggttcactaacatgtctgttcacttacgccagtaaaagccaggcacagtggctcatgcctgtaatttcagctcagtgaagtagaggtgggaggatcacttgagaccagaagtttgagaccagccaagggctttcatttaattaagttaggcccacccaggacctgaccccaaaatcagctgattcacgacctcaattacatctgccaaacctcttatttttgccatgtttattacctaagcaatccacactaggggtcaggagtgggttgtggggacagcagaagcaggagttgtggggctacctagggtctgtcacgtggtcctttaataatctcatataatcctttcttgtgaattcctatggcatctatatggaagctattagtataataatatattctgtgcaatgtt

SEQ ID NO: 22816 - DNA, 160 bp, Homo sapiens
aagcgaggtggtaattggggctcataatgatggctgaagtgtcctctgaattatcaaagagcaattacattacagccagtcccattttagtgttaaacacattgtactgtatttgattctttggaaattggtgatccctttgtgatctctatgatgattc

SEQ ID NO: 22817 - DNA, 2023 bp, Homo sapiens
cattctggaaccgggaaggtacacccaggcatgacaatagcttctctcctcacagaaatttaactgatttcttcattctccatttagcaaggtcatggaagatttggaggaaacattatttgaagaatttgaaaactattcctatgacctagactattactctctggagtctgatttggaggagaaagtccagctgggagttgttcactgggtctccctggtgttatattgtttggcttttgttctgggaattccaggaaatgccatcgtcatttggttcacggggttcaagtggaagaagacagtcaccactctgtggttcctcaatctagccattgcggatttcatttttcttctctttctgcccctgtacatctcctatgtggccatgaatttccactggccctttggcatctggctgtgcaaagccaattccttcactgcccagttgaacatgtttgccagtgtttttttcctgacagtgatcagcctggaccactatatccacttgatccatcctgtcttatctcatcggcatcgaaccctcaagaactctctgattgtcattatattcatctggcttttggcttctctaattggcggtcctgccctgtacttccgggacactgtggagttcaataatcatactctttgctataacaattttcagaagcatgatcctgacctcactttgatcaggcaccatgttctgacttgggtgaaatttatcattggctatctcttccctttgctaacaatgagtatttgctacttgtgtctcatcttcaaggtgaagaagcgaacattcctgatctccagtaggcatttctggacaattctggttgtggttgtggcctttgtggtttgctggactccttatcacctgtttagcatttgggagctcaccattcaccacaatagctattcccaccatgtgatgcaggctggaatccccctctccactggtttggcattcctcaatagttgcttgaaccccatcctttatgtcctaattagtaagaagttccaagctcgcttccggtcctcagttgctgagatactcaagtacacactgtgggaagtcagctgttctggcacagtgagtgaacagctcaggaactcagaaaccaagaatctgtgtctcctggaaacagctcaataagttattacttttccacaaatcagtatatggctttttatgtgggtcctctgactgatgctttcagattaaaattgtttccaagatagagagccgactccactttcatagttattgtttctggtcactatataggcatcacatttttgtgtggatatgaaacttaggaaggatcctcttgactccttgtgatgtggcaataaattttttttaaaaaactgaaaatacttaggaaggatccgcataatttttttctgcaacttaaatgaaatgcatcattcttgttaattataccatggtgaattaatcacttttgaagcaatatcagttattttttgaataataacttttctaaagccttaagtcttaatattaaatatatgattagccaggcacggtggctgacacctgtaatcccagcactttgggaggccaaggtggggggattacccgaggtcaggaattcgagaccagcctgaccaacatggagaaaccccgtctctactaaaaatacaaaattagccggtcatggtggtgcatgtctgcaaacccagctactcgggaggctgaagcaggagaatcacttgaacctgggaggcagaggttgtggtgagccaacatcacaccattgcactccagcctgggcaacaagagtaaaactctgtctcaaaaataaataaataaaatagataaataaatatatgattaactaattttaaaaatgttaaaatgtattcttaaattcattttaattttgtacaataacctgctagacacatttttaaaatgcaacatgtgtacttaatttctttatgtaatctatgtatatacatttatgaattaaagtaattgttggttatctta

SEQ ID NO: 22818 - DNA, 992 bp, Homo sapiens
ttttttttttcatttttagtggagatggggttttaccatgttagccaggatggtctcgacctcctggcctcatgatctgcccacctcatcctcccaaagtgctaggattacaggcatgagccaccgcgcccggcccatatatagtcttttaaaatgtagtatcaggaggcaaaagaaagcaagaaaactttctggaggacagtttttcctaaagcaaaaaataaatggctttactaacaaatcacttcagaaattccatgtattcagttttgtaatcttggggagagaaggaatttctaaatgtcataaagataaaagccataaatgaaaatattaatgatttcactgcataaaaacttaataccacatcaaatgccagaaataaaatgaaaagtcatataacctgagatggatggcagaaaaatgggttaacatccttagtatacaggaacctcttgcatatgagttaatcagaagcagccacagataccaatagaaaaatgggctaacaatgaaaaattcaccccccaaaatgcagattgccattgaagataggaaatatgttcaaacttattagtagtcaaatgtaagctcaatttgcacctatagaattggcaaaaaatgagaaattaattataatacccgtgtagtaaaatggacactctgttgtactattggtcattgaatcaaagcagtcttgacagtatgcaaaatccttaaaatcatggacacttttgatcaagcaattccatatgtaagagtttatcctaagcaaatcattaggatgttggtcaaagtgtacagtgttaggaggaatacattttttgagataacactgcacaacatggtaactacagttaataatggtggtgctgggcacggtggctcacacctgtaatccccgcaccttggaaggctgaggtgggtggatcgtttgagcccaggaattcgagaccagcctgggcaacatggtgaaaccccatctctaccaa

SEQ ID NO: 22819 - DNA, 1472 bp, Homo sapiens
tttttgaaggtcacctgtatttccatagatatgtaattttatttaagcaggtttattatattaaggcggcgaggcagcgccgaagactacaagttccagcatgcaccgcgtccgggcgggttcgggctcccagcgagggcttcagggacgccagcccggaggcatcggccggaagtgtcgtagggcaaccacgtagtactctctgcgcatgtgcaaagcgctgtcgggggccgccctagctgccgtcgccgccgccggggctctatggtctctccctagagctttgccgttggaggcggctgctgcggtcttgtgagtttgaccagcgtcgagcggcagcaacatggaggaattcgactccgaagacttctctacgtcggaggaggacgaggactacgtgccgtcgggtggagagtatagtgaagatgatgtaaatgaattagtgaaggaagatgaagtggatggtgaagagcagacacagaaaacccaagggaaaaaaagaaaggcccagagcattccagccaggaagagaagacaaggtggcctctcattagaagaagaggaagaggaggatgccaattcagaatctgagggaagcagtagtgaggaggaagatgacgctgcagagcaggaaaaaggcattggatcagaggatgccaggaaaaagaaggaggacgaactctgggccagcttcctcaatgatgtgggaccaaaatcaaaagtgcccccaagtacacaagttaagaaaggagaggagactgaagagacaagttcaagtaaattgttggtaaaagcagaagagctagagaaacctaaagaaacagaaaaagttaaaatcaccaaggtgtttgattttgctggtgaagaagtaagggtaactaaggaagtggatgctacatctaaagaggccaaatccttcttcaagcagaatgagaaagaaaaaccacaggctaatgttccttcagctctgccatcactccctgccgggtcagggttaaaaagatcaagtggcatgagcagccttttggggaaaattggtgccaagaagcagaaaatgagcacccttgagaagtccaaactggactgggagagcttcaaggaggaagaggggattggtgaagaactggccatccataatcgagggaaagaggggtacattgaacggaaagccttcctcgaccgagtggatcacaggcagtttgaaattgagcgagatctcaggctgagcaaaatgaaaccttgatgttacgggctaaatcaagagcagcttaatcctgtttacaatgtgagctttttgtgcgtctgtgaaatgttttacagtgtttctcatcatctgtttcccagcaaggtcttttttttttctacattgaagttctgtctatgtatcttaatcacaaatggtttcattcactttacttttaaaaatttgtccttaaatgaataaataaaataaaagttggtcctgtgagagg

SEQ ID NO: 22820 - DNA, 1401 bp, Homo sapiens
tttttgaaggtcacctgtatttccatagatatgtaattttatttaagcaggtttattatattaaggcggcgaggcagcgccgaagactacaagttccagcatgcaccgcgtccgggcgggttcgggctcccagcgagggcttcagggacgccagcccggaggcatcggccggaagtgtcgtagggcaaccacgtagtactctctgcgcatgtgcaaagcgctgtcgggggccgccctagctgccgtcgccgccgccggggctctatggtctctccctagagctttgccgttggaggcggctgctgcggtcttgtgagtttgaccagcgtcgagcggcagcaacatggaggaattcgactccgaagacttctctacgtcggaggaggacgaggactacgtgccgtcgggtggagagtatagtgaagatgatgtaaatgaattagtgaaggaagatgaagtggatggtgaagagcagacacagaaaacccaagggaaaaaaagaaaggcccagagcattccagccaggaagagaagacaaggtggcctctcattagaagaagaggaagaggaggatgccaattcagaatctgagggaagcagtagtgaggaggaagatgacgctgcagagcaggaaaaaggcattggatcagaggatgccaggaaaaagaaggaggacgaactctgggccagcttcctcaatgatgtgggaccaaaatcaaaagtgcccccaagtacacaagttaagaaaggagaggagactgaagagacaagttcaagtaaattgttggtaaaagcagaagagctagagaaacctaaagaaacagaaaaagttaaaatcaccaaggtgtttgattttgctggtgaagaagtaagggtaactaaggaagtggatgctacatctaaagaggccaaatccttcttcaagcagaatgagaaagaaaaaccacaggctaatgttccttcagctctgccatcactccctgccgggtcagggtgagtatttgagtctcactccctgatgtacttggcacgttggagaagctttcagtgcaaatacctactttcgctgcagatcagactccttgcctgagagagagaattatgatgctgctttgcctttgctgcaatatttaccagaatggaagatgcaaaggaaaattagccataactttctcaggaggattgcttgaacccaggagtttgtgaccagcctgggcaatacagtaagaccctgtctcttaaaaaaaaaaaaattagctgggcatggtggcttgcacctctgtcctagctactgtggaggctgaggcaggaggatcccttgagcccagaaggttgaggctgcagtgagccgtgattgtgccactgcactccagcctgggtgacagagagatcctgtctctt

SEQ ID NO: 22821 - DNA, 751 bp, Homo sapiens
cagtgactctgagccatgttcattctttgtccagtagtatcacaagagctagagaatcctaaaacatccgtcacatgttaaaactcaccaaagtctatagatccagctggtcaagaagtaagggtaactaaggaagtggatgctacatctaaagaggccaaatccttcttcaagcagaatgagaaagaaaaaccacaggctaatgttccttcagctctgccatcactccctgccgggtcagggttaaaaagatcaagtggcatgagcagccttttggggaaaattggtgccaagaagcagaaaatgagcacccttgagaagtccaaactggactgggagagcttcaaggaggaagaggggattggtgaagaactggccatccataatcgagggaaagaggggtacattgaacggaaagccttcctcgaccgagtggatcacaggcagtttgaaattgagcgagatctcaggctgagcaaaatgaaaccttgatgttacgggctaaatcaagagcagcttaatcctgtttacaatgtgagctttttgtgcgtctgtgaaatgttttacagtgtttctcatcatctgtttcccagcaaggtcttttttttttctacattgaagttctgtctatgtatcttaatcacaaatggtttcattcactttacttttaaaaatttgtccttaaatgaataaataaaataaaagttggtcctgtgagaggataatgaagatgaaaaaaacacacaccttc

SEQ ID NO: 22822 - DNA, 912 bp, Homo sapiens
ttttttggtgctcagactttcatacattaagtctttttactatttcaaagatttctttgtcattctttggttgttacatttttctatagaaaaacaaaatagcatttttttttaaagaccatgttggatttgtcaaacctgactccagtgccagagtaaagagcgttgtactaacttaacgcttgtgtctgaatgaagttggccaaatgcttacatatgtttcctggtggtgattctttcagtattctcagttcacatgccactgggtcatcagaagacaagtatctggatttcggagccaacagtttgcttttatttaagctgcaagaccctccattgccataagatctgccactgccataataacaaaacctcagctggaacttctgctgcagccattgaggttaaaaagatcaagtggcatgagcagccttttggggaaaattggtgccaagaagcagaaaatgagcacccttgagaagtccaaactggactgggagagcttcaaggaggaagaggggattggtgaagaactggccatccataatcgagggaaagaggggtacattgaacggaaagccttcctcgaccgagtggatcacaggcagtttgaaattgagcgagatctcaggctgagcaaaatgaaaccttgatgttacgggctaaatcaagagcagcttaatcctgtttacaatgtgagctttttgtgcgtctgtgaaatgttttacagtgtttctcatcatctgtttcccagcaaggtcttttttttttctacattgaagttctgtctatgtatcttaatcacaaatggtttcattcactttacttttaaaaatttgtccttaaatgaataaataaaataaaagttggtcctgtgagaggataatgaagatgaaaaaaacacacaccttc

SEQ ID NO: 22823 - DNA, 681 bp, Homo sapiens
cattctgagttgatcttaagctcagcatgtactggggtgtgacccaaacagggaagttgacatcctctctactaaagttaatagaatgagaatgttcagggtcattgttcagtcccagcagtctggtgttcagtgtggacgttggcctgttggctcacaccaggcagagggggttaaaaagatcaagtggcatgagcagccttttggggaaaattggtgccaagaagcagaaaatgagcacccttgagaagtccaaactggactgggagagcttcaaggaggaagaggggattggtgaagaactggccatccataatcgagggaaagaggggtacattgaacggaaagccttcctcgaccgagtggatcacaggcagtttgaaattgagcgagatctcaggctgagcaaaatgaaaccttgatgttacgggctaaatcaagagcagcttaatcctgtttacaatgtgagctttttgtgcgtctgtgaaatgttttacagtgtttctcatcatctgtttcccagcaaggtcttttttttttctacattgaagttctgtctatgtatcttaatcacaaatggtttcattcactttacttttaaaaatttgtccttaaatgaataaataaaataaaagttggtcctgtgagaggataatgaagatgaaaaaaacacacaccttc

SEQ ID NO: 22824 - DNA, 968 bp, Homo sapiens
tgcaccttgacgctgtgccaagtgctgttttagccctttacgtgtaagatacaccacagcctgtgagtaagcatttgctttgtagattaggaaaccaaggaacatgcagtaaataactggcctagagtcacacagttaagctggaagttggaccttggcatgtgactccaaagccctgcctgaagcgctgctcctcccctccttgcaagcagagacctgccacacagagcccacagaggtctgaagaaggcaggatttcctgttcgtagctcaggagagcagacagtggtgttaagcaggaaaagcacattagaattccagtttacttacagtgctctccacaccaggaaggaaatgccccaaatatgaacatggcttccactaagataaatggccccaatctaggggattcccatttgcatcagaaaaactgttaatctagagatcagagtttttacctgctacatctttcatattttctttccttaggttaaaaagatcaagtggcatgagcagccttttggggaaaattggtgccaagaagcagaaaatgagcacccttgagaagtccaaactggactgggagagcttcaaggaggaagaggggattggtgaagaactggccatccataatcgagggaaagaggggtacattgaacggaaagccttcctcgaccgagtggatcacaggcagtttgaaattgagcgagatctcaggctgagcaaaatgaaaccttgatgttacgggctaaatcaagagcagcttaatcctgtttacaatgtgagctttttgtgcgtctgtgaaatgttttacagtgtttctcatcatctgtttcccagcaaggtcttttttttttctacattgaagttctgtctatgtatcttaatcacaaatggtttcattcactttacttttaaaaatttgtccttaaatgaataaataaaataaaagttggtcctgtgagagg

SEQ ID NO: 22825 - DNA, 882 bp, Homo sapiens
ttttttggtgctcagactttcatacattaagtctttttactatttcaaagatttctttgtcattctttggttgttacatttttctatagaaaaacaaaatagcatttttttttaaagaccatgttggatttgtcaaacctgactccagtgccagagtaaagagcgttgtactaacttaacgcttgtgtctgaatgaagttggccaaatgcttacatatgtttcctggtggtgattctttcagtattctcagttcacatgccactgggtcatcagaagacaagtatctggatttcggagccaacagtttgcttttatttaagctgcaagaccctccattgccataagatctgccactgccataataacaaaacctcagctggaacttctgctgcagccattgaggttaaaaagatcaagtggcatgagcagccttttggggaaaattggtgccaagaagcagaaaatgagcacccttgagaagtccaaactggactgggagagcttcaaggaggaagaggggattggtgaagaactggccatccataatcgagggaaagaggggtacattgaacggaaagccttcctcgaccgagtggatcacaggcagtttgaaattgagcgagatctcaggctgagcaaaatgaaaccttgatgttacgggctaaatcaagagcagcttaatcctgtttacaatgtgagctttttgtgcgtctgtgaaatgttttacagtgtttctcatcatctgtttcccagcaaggtcttttttttttctacattgaagttctgtctatgtatcttaatcacaaatggtttcattcactttacttttaaaaatttgtccttaaatgaataaataaaataaaagttggtcctgtgagagg

SEQ ID NO: 22826 - DNA, 582 bp, Homo sapiens
tttttgaaggtcacctgtatttccatagatatgtaattttatttaagcaggtttattatattaaggcggcgaggcagcgccgaagactacaagttccagcatgcaccgcgtccgggcgggttcgggctcccagcgagggcttcagggacgccagcccggaggcatcggccggaagtgtcgtagggcaaccacgtagtactctctgcgcatgtgcaaagcgctgtcgggggccgccctagctgccgtcgccgccgccggggctctatggtctctccctagagctttgccgttggaggcggctgctgcggtcttgtgagtttgaccagcgtcgagcggcagcaacatggaggaattcgactccgaagacttctctacgtcggaggaggacgaggactacgtgccgtcgggtgagcgattccgcctgaggcgagaagcgaattgccccgccccacgcctcacgtgaggcgcgctctgcccccgcgggcgtctgccctgtggcccaggtggtccaggggggctcctgttctcgagcgtccgctccctcaggcccctcatcctcggccgctccggcccgaggcgtgt

SEQ ID NO: 22827 - DNA, 786 bp, Homo sapiens
ttttgatgtatgtatgcaggaggcctagctttctcttacccaccaattcaacacaccactaaagccaagaaaaacagcatcaccatgctgctgtagagaaaagtgaggctcaaagatgttcattcctttgcccagctaatcagtgagctagagctaggacttgaacccatgcttgtgtaaaccggtattctttcttctgcccttaaagtcttgttagaaaattgcaacatcttcctgccacccagcctctaatatactttctcattgataagctgttgccttccttttattttcaccatccttgtttagaccaaatgtgagtggtttggattgtactggaagagtcatgggtggtcactctcggcaccatttactgtaacttagtttatccctgggggatgggactgtgcaggggaggagtttttcctactggattctactgacaaacactgttttcatcttctaggtacattgaacggaaagccttcctcgaccgagtggatcacaggcagtttgaaattgagcgagatctcaggctgagcaaaatgaaaccttgatgttacgggctaaatcaagagcagcttaatcctgtttacaatgtgagctttttgtgcgtctgtgaaatgttttacagtgtttctcatcatctgtttcccagcaaggtcttttttttttctacattgaagttctgtctatgtatcttaatcacaaatggtttcattcactttacttttaaaaatttgtccttaaatgaataaataaaataaaagttggtcctgtgagagg

SEQ ID NO: 22828 - DNA, 878 bp, Homo sapiens
ttttttggtgctcagactttcatacattaagtctttttactatttcaaagatttctttgtcattctttggttgttacatttttctatagaaaaacaaaatagcatttttttttaaagaccatgttggatttgtcaaacctgactccagtgccagagtaaagagcgttgtactaacttaacgcttgtgtctgaatgaagttggccaaatgcttacatatgtttcctggtggtgattctttcagtattctcagttcacatgccactgggtcatcagaagacaagtatctggatttcggagccaacagtttgcttttatttaagctgcaagaccctccattgccataagatctgccactgccataataacaaaacctcagctggaacttctgctgcagccattgaggtctgtacataggcctcctgctctcgcttctggttccatgtaatatcattgtttataaaaagaattagtgtctgttctgtataaaacaacactgtggggcagaagctttgcagtcattagtaagaggggccaccgtgaactacagttgcattgaaaagcaattcttttccctcttaggaaatagaactttaacttaggcttgcttttataacacctgaaggaatggaagaggaaagagtagtgttctcgagggtaccttaacttacagcttgtgttgtaggtcgagattggctgcattattatgttacatggtttcttgagccatggtgagcatattttccaaaccaaaaatcagcatagctattcggacagtattttttaagtcaaatgtaattacacatttagaagtaaaattaaaagttgagactgtccaggaaaacccagaacatagggatgccttgcctggaagacggga

SEQ ID NO: 22829 - DNA, 432 bp, Homo sapiens
ttctgtaaagtatagctttcctttatcaattggaacaatataaatatttaattcttttccctcaattttcaaaataggtagtaattttaaatagcagtctaaaatggtacaaatttttttttctgtctttttaatatcatgaggggctcacagatttttattcagtgtgttttcattttctaacaattacctgttttaatgttcaggtcttcactgctttggccagtaggagctctttcaggctggatcttgtatccttttaatttgatctttttattattattatttattttttatgagtcggcgtcctgcttactgtagccttcaattcctggcaggagaatcacttgaatccagtaggcagaggttgcagtgagccgagatcgtaccactgcactccagcctgggcaacagagcgagactctgtctcaa

SEQ ID NO: 22830 - DNA, 187 bp, Homo sapiens
atgccagctaatttttgtatttttagtagagacagtgtttctcatcatctgtttcccagcaaggtcttttttttttctacattgaagttctgtctatgtatcttaatcacaaatggtttcattcactttacttttaaaaatttgtccttaaatgaataaataaaataaaagttggtcctgtgagagg

SEQ ID NO: 22831 - DNA, 1502 bp, Homo sapiens
tttttgaaggtcacctgtatttccatagatatgtaattttatttaagcaggtttattatattaaggcggcgaggcagcgccgaagactacaagttccagcatgcaccgcgtccgggcgggttcgggctcccagcgagggcttcagggacgccagcccggaggcatcggccggaagtgtcgtagggcaaccacgtagtactctctgcgcatgtgcaaagcgctgtcgggggccgccctagctgccgtcgccgccgccggggctctatggtctctccctagagctttgccgttggaggcggctgctgcggtcttgtgagtttgaccagcgtcgagcggcagcaacatggaggaattcgactccgaagacttctctacgtcggaggaggacgaggactacgtgccgtcgggtggagagtatagtgaagatgatgtaaatgaattagtgaaggaagatgaagtggatggtgaagagcagacacagaaaacccaagggaaaaaaagaaaggcccagagcattccagccaggaagagaagacaaggtggcctctcattagaagaagaggaagaggaggatgccaattcagaatctgagggaagcagtagtgaggaggaagatgacgctgcagagcaggaaaaaggcattggatcagaggatgccaggaaaaagaaggaggacgaactctgggccagcttcctcaatgatgtgggaccaaaatcaaaagtgcccccaagtacacaagttaagaaaggagaggagactgaagagacaagttcaagtaaattgttggtaaaagcagaagagctagagaaacctaaagaaacagaaaaagttaaaatcaccaaggtgtttgattttgctggtgaagaagtaagggtaactaaggaagtggatgctacatctaaagaggccaaatccttcttcaagcagaatgagaaagaaaaaccacaggctaatgttccttcagctctgccatcactccctgccgggtcagggttaaaaagatcaagtggcatgagcagccttttggggaaaattggtgccaagaagcagaaaatgagcacccttgagaagtccaaactggactgggagagcttcaaggaggaagaggggattggtgaagaactggccatccataatcgagggaaagaggggtacattgaacggaaagccttcctcgaccgagtggatcacaggcagtttgaaattgagcgagatctcaggctgagcaaaatgaaaccttgatgttacgggctaaatcaagagcagcttaatcctgtttacaatgtgagctttttgtgcgtctgtgaaatgttttacagtgtttctcatcatctgtttcccagcaaggtcttttttttttctacattgaagttctgtctatgtatcttaatcacaaatggtttcattcactttacttttaaaaatttgtccttaaatgaataaataaaataaaagttggtcctgtgagaggataatgaagatgaaaaaaacacacaccttc

SEQ ID NO: 22832 - DNA, 1626 bp, Homo sapiens
taaaccattcaaatatccacactaagatattgcttagcgttaagtttttaacgtaattttaatagcttaagattttaagagaaaatatgaagacttagaagagtagcatgaggaaggaaaagataaaaggtttctaaaacatgacggaggttgagatgaagcttcttcatggagtaaaaaatgtatttaaaagaaaattgagagaaaggactacagagccccgaattaataccaatagaagggcaatgcttttagattaaaatgaaggtgacttaaacagcttaaagtttagtttaaaagttgtaggtgattaaaataatttgaaggcgatcttttaaaaagagatcaaaccgaaggtgattaaaagaccttgaaatccatgacgcagggagaattgcgtcatttaaagcctagttaacgcatttactaaacgcagacgaaaatggaaagattaattgggagtggtaggatgaaacaatttggagaagatagaagtttgaagtggatatttgaatggttttaaaccattcaaatatccacccgaggactacgtcccgtcgggtggagagtatagtgaagatgatgtaaatgaattagtgaaggaagatgaagtggatggtgaagagcagacacagaaaacccaagggaaaaaaagaaaggcccagagcattccagccaggaagagaagacaaggtggcctctcattagaagaagaggaagaggaggatgccaattcagaatctgagggaagcagtagtgaggaggaagatgacgctgcagagcaggaaaaaggcattggatcagaggatgccaggaaaaagaaggaggacgaactctgggccagcttcctcaatgatgtgggaccaaaatcaaaagtgcccccaagtacacaagttaagaaaggagaggagactgaagagacaagttcaagtaaattgttggtaaaagcagaagagctagagaaacctaaagaaacagaaaaagttaaaatcaccaaggtgtttgattttgctggtgaagaagtaagggtaactaaggaagtggatgctacatctaaagaggccaaatccttcttcaagcagaatgagaaagaaaaaccacaggctaatgttccttcagctctgccatcactccctgccgggtcagggttaaaaagatcaagtggcatgagcagccttttggggaaaattggtgccaagaagcagaaaatgagcacccttgagaagtccaaactggactgggagagcttcaaggaggaagaggggattggtgaagaactggccatccataatcgagggaaagaggggtacattgaacggaaagccttcctcgaccgagtggatcacaggcagtttgaaattgagcgagatctcaggctgagcaaaatgaaaccttgatgttacgggctaaatcaagagcagcttaatcctgtttacaatgtgagctttttgtgcgtctgtgaaatgttttacagtgtttctcatcatctgtttcccagcaaggtcttttttttttctacattgaagttctgtctatgtatcttaatcacaaatggtttcattcactttacttttaaaaatttgtccttaaatgaataaataaaataaaagttggtcctgtgagagg

SEQ ID NO: 22833 - DNA, 1649 bp, Homo sapiens
tttttgaaggtcacctgtatttccatagatatgtaattttatttaagcaggtttattatattaaggcggcgaggcagcgccgaagactacaagttccagcatgcaccgcgtccgggcgggttcgggctcccagcgagggcttcagggacgccagcccggaggcatcggccggaagtgtcgtagggcaaccacgtagtactctctgcgcatgtgcaaagcgctgtcgggggccgccctagctgccgtcgccgccgccggggctctatggtctctccctagagctttgccgttggaggcggctgctgcggtcttgtgagtttgaccagcgtcgagcggcagcaacatggaggaattcgactccgaagacttctctacgtcggaggaggacgaggactacgtgccgtcgggtcttcactgctttggccagtaggagctctttcaggctggatcttgtatccttttaatttgatctttttattattattatttattttttatgagtcggcgtcctgcttactgtagccttcaattcctgggctcaagtgatcctcctgcctcagcctccccagtagatggaactacaggtggagagtatagtgaagatgatgtaaatgaattagtgaaggaagatgaagtggatggtgaagagcagacacagaaaacccaagggaaaaaaagaaaggcccagagcattccagccaggaagagaagacaaggtggcctctcattagaagaagaggaagaggaggatgccaattcagaatctgagggaagcagtagtgaggaggaagatgacgctgcagagcaggaaaaaggcattggatcagaggatgccaggaaaaagaaggaggacgaactctgggccagcttcctcaatgatgtgggaccaaaatcaaaagtgcccccaagtacacaagttaagaaaggagaggagactgaagagacaagttcaagtaaattgttggtaaaagcagaagagctagagaaacctaaagaaacagaaaaagttaaaatcaccaaggtgtttgattttgctggtgaagaagtaagggtaactaaggaagtggatgctacatctaaagaggccaaatccttcttcaagcagaatgagaaagaaaaaccacaggctaatgttccttcagctctgccatcactccctgccgggtcagggttaaaaagatcaagtggcatgagcagccttttggggaaaattggtgccaagaagcagaaaatgagcacccttgagaagtccaaactggactgggagagcttcaaggaggaagaggggattggtgaagaactggccatccataatcgagggaaagaggggtacattgaacggaaagccttcctcgaccgagtggatcacaggcagtttgaaattgagcgagatctcaggctgagcaaaatgaaaccttgatgttacgggctaaatcaagagcagcttaatcctgtttacaatgtgagctttttgtgcgtctgtgaaatgttttacagtgtttctcatcatctgtttcccagcaaggtcttttttttttctacattgaagttctgtctatgtatcttaatcacaaatggtttcattcactttacttttaaaaatttgtccttaaatgaataaataaaataaaagttggtcctgtgagagg

SEQ ID NO: 22834 - DNA, 1546 bp, Homo sapiens
tttttgaaggtcacctgtatttccatagatatgtaattttatttaagcaggtttattatattaaggcggcgaggcagcgccgaagactacaagttccagcatgcaccgcgtccgggcgggttcgggctcccagcgagggcttcagggacgccagcccggaggcatcggccggaagtgtcgtagggcaaccacgtagtactctctgcgcatgtgcaaagcgctgtcgggggccgccctagctgccgtcgccgccgccggggctctatggtctctccctagagctttgccgttggaggcggctgctgcggtcttgtgagtttgaccagcgtcgagcggcagcaacatggaggaattcgactccgaagacttctctacgtcggaggaggacgaggactacgtgccgtcgggtggagagtatagtgaagatgatgtaaatgaattagtgaaggaagatgaagtggatggtgaagagcagacacagaaaacccaagggaaaaaaagaaaggcccagagcattccagccaggaagagaagacaaggtggcctctcattagaagaagaggaagaggaggatgccaattcagaatctgagggaagcagtagtgaggaggaagatgacgctgcagagcaggaaaaaggcattggatcagaggatgccaggaaaaagaaggaggacgaactctgggccagcttcctcaatgatgtgggaccaaaatcaaaagtgcccccaagtacacaagttaagaaaggagaggagactgaagagacaagttcaagtaaattgttggtaaaagcagaagagctagagaaacctaaagaaacagaaaaagttaaaatcaccaaggtgtttgattttgctggtgaagaagtaagggtaactaaggaagtggatgctacatctaaagaggccaaatccttcttcaagcagaatgagaaagaaaaaccacaggctaatgttccttcagctctgccatcactccctgccgggtcagggttaaaaagatcaagtggcatgagcagccttttggggaaaattggtgccaagaagcagaaaatgagcacccttgagaagtccaaactggactgggagagcttcaaggaggaagaggggattggtgaagaactggccatccataatcgagggaaagaggggtacattgaacggaaagccttcctcgaccgagtggatcacaggcagtttgaaattgagcgagatctcaggctgagcaaaatgaaaccttgatgttacgggctaaatcaagagcagcttaatcctgtttacaatgtgagctttttgtgcgtctgtgaaatgttttacagtgtttctcatcatctgtttcccagcaaggtcttttttttttctacattgaagttctgtctatgtatcttaatcacaaatggtttcattcactttacttttaaaaatttgtccttaaatgaataaataaaataaaagttggtcctgtgagagggaacaaaaaaagcaaaacgaaataaaaaaacaaggacagaaaaacaaataacaaaacacgaaagaagggggggc

SEQ ID NO: 22835 - DNA, 903 bp, Homo sapiens
cttttgggtctttgctgacatgttccccaccccgcagatggtgtctgtgagcttggagacatccagcatatgttcaaagacctggtgcagagcctttcttaactgacgaactctgggccagcttcctcaatgatgtgggaccaaaatcaaaagtgcccccaagtacacaagttaagaaaggagaggagactgaagagacaagttcaagtaaattgttggtaaaagcagaagagctagagaaacctaaagaaacagaaaaagttaaaatcaccaaggtgtttgattttgctggtgaagaagtaagggtaactaaggaagtggatgctacatctaaagaggccaaatccttcttcaagcagaatgagaaagaaaaaccacaggctaatgttccttcagctctgccatcactccctgccgggtcagggttaaaaagatcaagtggcatgagcagccttttggggaaaattggtgccaagaagcagaaaatgagcacccttgagaagtccaaactggactgggagagcttcaaggaggaagaggggattggtgaagaactggccatccataatcgagggaaagaggggtacattgaacggaaagccttcctcgaccgagtggatcacaggcagtttgaaattgagcgagatctcaggctgagcaaaatgaaaccttgatgttacgggctaaatcaagagcagcttaatcctgtttacaatgtgagctttttgtgcgtctgtgaaatgttttacagtgtttctcatcatctgtttcccagcaaggtcttttttttttctacattgaagttctgtctatgtatcttaatcacaaatggtttcattcactttacttttaaaaatttgtccttaaatgaataaataaaataaaagttggtcctgtgagagg

SEQ ID NO: 22836 - DNA, 1494 bp, Homo sapiens
tttttgaaggtcacctgtatttccatagatatgtaattttatttaagcaggtttattatattaaggcggcgaggcagcgccgaagactacaagttccagcatgcaccgcgtccgggcgggttcgggctcccagcgagggcttcagggacgccagcccggaggcatcggccggaagtgtcgtagggcaaccacgtagtactctctgcgcatgtgcaaagcgctgtcgggggccgccctagctgccgtcgccgccgccggggctctatggtctctccctagagctttgccgttggaggcggctgctgcggtcttgtgagtttgaccagcgtcgagcggcagcaacatggaggaattcgactccgaagacttctctacgtcggaggaggacgaggactacgtgccgtcgggtggagagtatagtgaagatgatgtaaatgaattagtgaaggaagatgaagtggatggtgaagagcagacacagaaaacccaagggaaaaaaagaaaggcccagagcattccagccaggaagagaagacaaggtggcctctcattagaagaagaggaagaggaggatgccaattcagaatctgagggaagcagtagtgaggaggaagatgacgctgcagagcaggaaaaaggcattggatcagaggatgccaggaaaaagaaggaggacgaactctgggccagcttcctcaatgatgtgggaccaaaatcaaaagtgcccccaagtacacaagttaagaaaggagaggagactgaagagacaagttcaagtaaattgttggtaaaagcagaagagctagagaaacctaaagaaacagaaaaagttaaaatcaccaaggtgtttgattttgctggtgaagaagtaagggtaactaaggaagtggatgctacatctaaagaggccaaatccttcttcaagcagaatgagaaagaaaaaccacaggctaatgttccttcagctctgccatcactccctgccgggtcagggttaaaaagatcaagtggcatgagcagccttttggggaaaattggtgccaagaagcagaaaatgagcacccttgagaagtccaaactggactgggagagcttcaaggaggaagaggggattggtgaagaactggccatccataatcgagggaaagagggatggattaaaggagcccagcccctaggccagtgaagggactggagctctgttcttcaccttggctgagcatgagaatcctctggtgacattttccaaagttcaggtgaccacctctgtacagagctgctgaatcaagagtctagaacaggtaggtcacaaatatctgcatctttaaattttacttctcaggtgattctcatgcacagccaaggttgagaatcactagaccacaggttcaaaattctagaggcataagacaggtacagtgacatgcacccatagtcccagctactcactgcactccagcctggacaacagagaaagacccggtctctttacca

SEQ ID NO: 22837 - DNA, 998 bp, Homo sapiens
tgcaccttgacgctgtgccaagtgctgttttagccctttacgtgtaagatacaccacagcctgtgagtaagcatttgctttgtagattaggaaaccaaggaacatgcagtaaataactggcctagagtcacacagttaagctggaagttggaccttggcatgtgactccaaagccctgcctgaagcgctgctcctcccctccttgcaagcagagacctgccacacagagcccacagaggtctgaagaaggcaggatttcctgttcgtagctcaggagagcagacagtggtgttaagcaggaaaagcacattagaattccagtttacttacagtgctctccacaccaggaaggaaatgccccaaatatgaacatggcttccactaagataaatggccccaatctaggggattcccatttgcatcagaaaaactgttaatctagagatcagagtttttacctgctacatctttcatattttctttccttaggttaaaaagatcaagtggcatgagcagccttttggggaaaattggtgccaagaagcagaaaatgagcacccttgagaagtccaaactggactgggagagcttcaaggaggaagaggggattggtgaagaactggccatccataatcgagggaaagaggggtacattgaacggaaagccttcctcgaccgagtggatcacaggcagtttgaaattgagcgagatctcaggctgagcaaaatgaaaccttgatgttacgggctaaatcaagagcagcttaatcctgtttacaatgtgagctttttgtgcgtctgtgaaatgttttacagtgtttctcatcatctgtttcccagcaaggtcttttttttttctacattgaagttctgtctatgtatcttaatcacaaatggtttcattcactttacttttaaaaatttgtccttaaatgaataaataaaataaaagttggtcctgtgagaggataatgaagatgaaaaaaacacacaccttc

SEQ ID NO: 22838 - DNA, 601 bp, Homo sapiens
gttttagctagtcatcaatttggtttggtatccaagccctgcctctggaatcctgtcctgcctactacttcatagccactatccaagataaggttaaaaagatcaagtggcatgagcagccttttggggaaaattggtgccaagaagcagaaaatgagcacccttgagaagtccaaactggactgggagagcttcaaggaggaagaggggattggtgaagaactggccatccataatcgagggaaagaggggtacattgaacggaaagccttcctcgaccgagtggatcacaggcagtttgaaattgagcgagatctcaggctgagcaaaatgaaaccttgatgttacgggctaaatcaagagcagcttaatcctgtttacaatgtgagctttttgtgcgtctgtgaaatgttttacagtgtttctcatcatctgtttcccagcaaggtcttttttttttctacattgaagttctgtctatgtatcttaatcacaaatggtttcattcactttacttttaaaaatttgtccttaaatgaataaataaaataaaagttggtcctgtgagaggataatgaagatgaaaaaaacacacaccttc

SEQ ID NO: 22839 - DNA, 1091 bp, Homo sapiens
tttttgaaggtcacctgtatttccatagatatgtaattttatttaagcaggtttattatattaaggcggcgaggcagcgccgaagactacaagttccagcatgcaccgcgtccgggcgggttcgggctcccagcgagggcttcagggacgccagcccggaggcatcggccggaagtgtcgtagggcaaccacgtagtactctctgcgcatgtgcaaagcgctgtcgggggccgccctagctgccgtcgccgccgccggggctctatggtctctccctagagctttgccgttggaggcggctgctgcggtcttgtgagtttgaccagcgtcgagcggcagcaacatggaggaattcgactccgaagacttctctacgtcggaggaggacgaggactacgtgccgtcgggtcttcactgctttggccagtaggagctctttcaggctggatcttgtatccttttaatttgatctttttattattattatttattttttatgagtcggcgtcctgcttactgtagccttcaattcctgggctcaagtgatcctcctgcctcagcctccccagtagatggaactacaggtggagagtatagtgaagatgatgtaaatgaattagtgaaggaagatgaagtggatggtgaagagcagacacagaaaacccaagggaaaaaaagaaaggcccagagcattccagccaggaagagaagacaaggtggcctctcattagaagaagaggaagaggaggatgccaattcagaatctgaggggtacattgaacggaaagccttcctcgaccgagtggatcacaggcagtttgaaattgagcgagatctcaggctgagcaaaatgaaaccttgatgttacgggctaaatcaagagcagcttaatcctgtttacaatgtgagctttttgtgcgtctgtgaaatgttttacagtgtttctcatcatctgtttcccagcaaggtcttttttttttctacattgaagttctgtctatgtatcttaatcacaaatggtttcattcactttacttttaaaaatttgtccttaaatgaataaataaaataaaagttggtcctgtgagagg

SEQ ID NO: 22840 - DNA, 830 bp, Homo sapiens
cattctgagttgatcttaagctcagcatgtactggggtgtgacccaaacagggaagttgacatcctctctactaaagttaatagaatgagaatgttcagggtcattgttcagtcccagcagtctggtgttcagtgtggacgttggcctgttggctcacaccaggcagagggggttaaaaagatcaagtggcatgagcagccttttggggaaaattggtgccaagaagcagaaaatgagcacccttgagaagtccaaactggactgggagagcttcaaggaggaagaggggattggtgaagaactggccatccataatcgagggaaagagggatggattaaaggagcccagcccctaggccagtgaagggactggagctctgttcttcaccttggctgagcatgagaatcctctggtgacattttccaaagttcaggtgaccacctctgtacagagctgctgaatcaagagtctagaacaggtacattgaacggaaagccttcctcgaccgagtggatcacaggcagtttgaaattgagcgagatctcaggctgagcaaaatgaaaccttgatgttacgggctaaatcaagagcagcttaatcctgtttacaatgtgagctttttgtgcgtctgtgaaatgttttacagtgtttctcatcatctgtttcccagcaaggtcttttttttttctacattgaagttctgtctatgtatcttaatcacaaatggtttcattcactttacttttaaaaatttgtccttaaatgaataaataaaataaaagttggtcctgtgagaggataatgaagatgaaaaaaacacacaccttc

SEQ ID NO: 22841 - DNA, 200 bp, Homo sapiens
catatacaaaagtaaagagagttgtaaaataacttccacatactcattgcccagtttcagtagttatcaacatgttttctaatctcatgtcatgtatttccctccacttttttttttcctggaatatcttaaagcaagttctgcgtcatattattgcactaggacatacttcactatgtatctctaatagagtctttctt

SEQ ID NO: 22842 - DNA, 399 bp, Homo sapiens
gccatgtggttcaggtgggcctgtcacctctctggggcacattcttcactaatgagcagagacactgggttagatctaggtgatcagggccatccccctcccatgtccaagcagacactgccacttaatcacagctttcttcctccttactgtcttccagcccacactcagccttagaatccttttcctacagccaggcagtaatagctgatggattaatcaaggtgaaaataaagatgaacctgagtttctgcccagagctagataatccccttgggtcccttctagttttataatttctccacagcagactcaacaaaagctcctgctctgtcatgatgtcccctggggtttggagagccttaccaggctccccagggtttccattggaaactcttc

SEQ ID NO: 22843 - DNA, 829 bp, Homo sapiens
agggagacaaaaacattttgatgagaagaataattatcattaaccttcatatttttggggaaaaaaggagttttcttgccatcaatatcttttcatacttgcccagagctcatctcctccttctgctgcagcctgggtggtcagcatgactttttgtctggatggctggtaggtggcacaccctgaagttgtgcaggagccatagtaaaagcatttcaggggaagatagtctaatgacactggagtctatctgtgtatcctcaaagggagaactgggcatctggcagataattccatcatcaaatctgtagtgagcctactgcaaaataagaattctctttagaaggctggtctgtggacatcattaaacaggagaaatttccacatggagaaatttcctgaaagaaactagataggaattaaaaaaaaaaagtatggctgttcacgcaactgttttctaagcttcccttcaaccatttctagactattctgagtaaagacttggaatatcccctgctttgttgtcgttaaggtcctgttcttgcgtacattcatttctctgcctcttttgttacaacatctcttccttatggaaatgttctcttgacttccagaagagtattgttcaatttccaagtttgtgtgtggtggccccaggacaagtctggtctgtgtcacaaagaattttagttcagttgctggttgatatcacagagatcaccagaaaggccaggggttgtccttaagttccctctgcctgcagtcctgctttgttttggacaagtaggagtgacaagcaggtcagcacagccctttagagatacctgca

SEQ ID NO: 22844 - DNA, 564 bp, Homo sapiens
gagactaaggggtgaagtaccttccctgtgagctcagaactttcacttaaaaacgcctaagcctagaggttgatgacatcacatgggctgtgtgtaatgtgtttgtagcctcattcacactgtgaataacttgttaaattgcatattttgaggtgtattttgaagctcttaggacatagttttagggacaaaaacaaaccccctagaatactgtttttaaccatagggcacttgttacctgcctctatatactgtaatctgaaagtaaagtttctagaatatttttgatgaaagtttcgggccgggcatggtggctcatgcctgtaatcctagcactttgggaagccaaggcgggtggatcactttaggccaggagtttgagattagcctggccgacatggtgaaaccccgcctctactaaaaatacaaaaattagctgggtgcggtgatgggcgcctgtaatcccagctactcaggaggctgaggcaggagaattgcttgaatctggaggagagtacgtagaaagtactccaaacccccgcctggaaaagaaacccaaaaaag

SEQ ID NO: 22845 - DNA, 416 bp, Homo sapiens
atgtctgccctgggcttggcaacaaacatgcagacatgagtgtttcatacctgccatctggggcctcctgaatgagacagtcctacacggattaatgcaatactttatcatagaggctgataagttaaaagggctgtattctatccacctgcagtgtgaaaagtgcacctgaacatgtaaatcctcctttaatgtcagaaggtagtattattatgctttgtccatggctttgtgtagcaaagaaagatacttggtgttttcccctgcttcctggtgcagagttcctaaaacccttggaattttcttttttagaaaaaaaaaattttttttttgagacagggtctctctgtcacccaggctggtgtgcagtggtgtgattgtagctcaatgcagcctcagcctcccaggctaaagca

SEQ ID NO: 22846 - DNA, 465 bp, Homo sapiens
gatggtccattgttcctcagcattctttctcttctcccaaattttccttagtattttaccctgctttagccaccaggttagaaattgcatgtgtgtgtatacccattttttcagttggctgtgaagcagagaatatcaactagttttggatgttgacccttgaaaatctttgggtgaaaatatgttcaaatccattgaatcctcattggaaaagaggtttaaccttcaaatccattacattcaacatctttggattcattccactctgaagaagatggaggtgttaatgagattgctgtacatgagcgtgaacaacgatgcagtggaaaagggatgttaacagcttagtgttcacctcctcaaaagttgaatgagttggccaggcacggtggctcacgcctgtaatcccaggactttgggaggctgaggcgggtgtatcacgaggtcaggagtttgagaccagcc

SEQ ID NO: 22847 - DNA, 327 bp, Homo sapiens
gtggtctgctgtcagtcatgcgatgccttatgagagtcaggttggaaagtaagccacattatcccgagttaataaaaaacccatttaaatgaaggtttcatggtttgtaaggtgtgacttaacccctaccttgcaatggacttaggccttgtttataatttagtatcttactgccacagtgttttgtcagtcttacatttttttctttcctttcccccccaaattcaaacaagtgtcagtaatgatttttttttttagatggagtcttactgttacccaggctggagtacagtggcacaatctcagctgaaatgattgtcctgcctc

SEQ ID NO: 22848 - DNA, 610 bp, Homo sapiens
ctgtaatcctagcactttgggaggctgaagtgggcagatcacttaaggtcaggagtttgagaccagccttaccaacgtggtgaaaccccgtctctagtaaaatatgaaaatcagccaggcttggtggcttgcgcctgtggtcccagctacttaggaggcagaggctcgaaaatcccttgaatctgggaggcagaggttgcagtgagccaagattgcatcactgtactctcacctgggagacagagcgagactctgactcaaaacaaaacaaaacacaaattcgttttatttattttgtatattttacaatataaaatatattatacattataagcaataactcccactcctccacccccaacccctggaactcctaatctactttctgtctctatgaatttgactactctagttacctcatataagtggaatcatacaatatttgtccttttgtgactggcttctttcacttagcctaatgtcctcaaggttcatccatgtcacagcatgtgacagaattatttatttatttatttatttattttgagacagagtctcgatctgttgcccaggctggagagcagtggtgtaatctcagctcactgcaacc

SEQ ID NO: 22849 - DNA, 414 bp, Homo sapiens
gtactatctgcagtttcaggcatccagtggggttttggaacctgtcccctgtggataaggagggactactgtattactgtcattcccttaaaagatttaattatggtcttaatgtcccagtcttttctatcttcccgttaatgggatgattttctagcccagtgctaggggccaccgtcatgccgagaaaaggcccttccttagggtgtggccagggtcttcccttgagaggctgagtctggtggaaccagcacagggccactcactgtgtttctgaagacagcccattagggggctgggtgtggtggctcacacctgtaatcccagcactttgggaggccaaagcgggagaatcacttgaggtctagaattctagaccagccaggccaacatggtgaaaccccgtctctacta

SEQ ID NO: 22850 - DNA, 486 bp, Homo sapiens
gcactggggttggctggggctaggagtttgtgatgaatccttccagtatttttctgaaaaccagtgaactattttgtaggtttctgtgtcgttagaaacatgcaaacctatccactaaaaccactccagttgatctattaagtcattcgttaggtcttacctggactctcttcactgtcactatcatgatctgtccacatcactggccctttctcctatcacctagctctcctgtgagcccagcactgatataaagtggtttctagtcttcttggactctcaatttaacttgcttcccatgggaatcttctaactgtttccccaaaccaccttgtagacattcatttctttgtttaggattctaagaataggaaagagagacataagctagattccattcctgtttcagtaagattatctttccaacacaagaaaggaatacatctaaaaaattctttcagcattttttcccgctttattgagaaa

SEQ ID NO: 22851 - DNA, 395 bp, Homo sapiens
tcacatattcttagactgagttttgtctctaggaagcaaaatatgaatttctgaagggtagggaccatatgccccaccccagttctggccaagtgttaaaaattaaatacagccgggtgcagtggctctcgcctgtaatcccaacactttgggaggccgaggtggacggatcacctcacgtcaggagttcgagaccagcctgaccaacatggtgaaaccctgtctccactaaaaatacaaaattagctgagtatggtggcacatgcctgtaatctcagctactcgggaggctgaggccagagaattgcttgaacccaggagatggaggttgtggtgagctgagaccacgccattgcactccagcctatacaacaagagcgaaactcccatctcca

SEQ ID NO: 22852 - DNA, 401 bp, Homo sapiens
gactatacagtagatgcctacttcatagtacaagttgtccaaatacatgaagttgcttcttgtttctttctttgctcttaagaaaaagatatggtgtgaaagatatgcagttaggctgggcgcggtggttcacgcctgtaatcccagcactttgggaggctgaggcgggtggatcacttgaggtcgggagttcgagaccagtctgaccaatgtggagaaaccctgtctctactaaaagtacaaaattagcctggcatggtggcacatacctgtaatcccagctactcaggaggctgaggcgggagaatcgcttgaacccaggagcaagaggttgtggtgagcggagatcgcaccatagcactccagtctgggcaacaagagtgaaactccgtctcaaagag

SEQ ID NO: 22853 - DNA, 226 bp, Homo sapiens
tgtgaagatgccagaccccaagggagaagtgggaggaggactggctttccaaaactcaccagtcaaataaaatccctttttgtagtgtggcaagagtgtgtgaggatcagagtaaggccccaagtgttacaccagtgagcttcctgaaatatctgggataggaagcacagtacttacaatcataattgtcctgtatgtatactatggtttcagagcatgggtagag

SEQ ID NO: 22854 - DNA, 472 bp, Homo sapiens
cagttatgcctagaatgaggaagaggctagttagaaaggacagagaatatctggggcttaaagtggtagtaaggagcttctatttcttgaaatccttctatccagtagagtgataaaagatctttctcacttcacttacttctgcatgatttattagattaatgtagaagggagtcacagaggctagcaaattccccacagtatgcccacagacgatattttgaaatgcatctaatgatcatattgtaatctcaaacatgccaaaagatgatgttccttatcctaacacactaacactaataccttcttccaactaatggtgtatttatatgttgtgtatgtttttgtctcaatttcatttttatttcccatttagagtacattagtttaggtccagtttaatgtgctcaaaaatccattaaattccttttaaatggccgtatgatagtaaaatcagtcgtgctctaagaaa

SEQ ID NO: 22855 - DNA, 336 bp, Homo sapiens
cctacctgtcagctcccagggcaccctaactttcacaccaagctgttttaaggcttccaaaggcctctctcaccagcctcttctatatcatgtgaacaacaaatcacgttccctcccctcttttcctactgattcagacagaatcttcattctgaacaacaaaaaattgacgtatatcttttgagatctagacttcacagcataaaaaaattgataaagcctactaattataccaagtagggtaaacagtggttaaattttttttaatgtgaagcttgactaaagtctacttacacagaactatcactatatgaacaatatggtagacaggtaatg

SEQ ID NO: 22856 - DNA, 334 bp, Homo sapiens
aagtggctgttaacagattttcaaatgcctgaagagattgctgagacctgctagagtcatacgttcggggaattaagtctttatcctagacaacaaggtacagatgcaaattgcagtgttattggagggtcaatcggcaaggatatgattatcccaaaatggagttcatcgaccctagctttcctttagattatatataaataaaagtgcagtcctcttctaatggccacagttggttttcttgtagcccagaaagtccaaattaaaggaaataaattcagttttatgttagccttccttggtgcatcagggtgtcagtggaaataggatcagg

SEQ ID NO: 22857 - DNA, 169 bp, Homo sapiens
aatggggacaccagaaggggaagagagaaaagcagcaatatttgatgcaataatgactgagaatttccccaaattaatgacagacaccacatcacagatccaggaaactcaagacattgagcctaggcatatagttttcaaatgtcagaaaatcaaagatggccatggt

SEQ ID NO: 22858 - DNA, 336 bp, Homo sapiens
aaacgtgtacaagacatcaacatatgaaagctccctacagtgttgttcatgataatagaatcagtgtaccagggtagacttaaacaatggagataacaacatggatgaatatcaacaacaatggggaacaaaaaagtaagatacgggagaacagacacattacgatcccagccatataaattgtaaaagagcaaaattaacgtttactgtatatgaagatgtttaggtagaaaaaccatccactgaaacaacaagttaatgggtgcagcacaccaacatggcacatatgtaacaaacctgcacgttgtgtacatgtaccctaaaacaaagtataat

SEQ ID NO: 22859 - DNA, 856 bp, Homo sapiens
tacagagaatcactttgctttatcaagtgttgagtcaaagtgttaagtaaaagttgacatgcctgcaacttatttttaaatagcaaatcataatcatcccacactgtctaaagcactaaacttaacatataaatcatatacccttactagaaagagctagctagaaaaatgtaaataataaaattaaaattgctaaactccctcattatgtatttataattagcagccaaattattaactctgttttcagaatttctgaaataggttgttgatattaaggaagccattcaacaaaaacctcaacaagtatagtcttaaaatcaaatcagcgaaataatcttttaaatgtttagctattcattagcatttgcattaaatttcagcagcagtggttgcttttagctttttgggatgttatttttctgcacaaacatactgcaaagaacacacttgaaaaaaataaaagttattcattttcatgctttacacatgactttgcaattgcactaatcagattttatttctcaaatagtagtcatggatcctagcaagtacttcttcatttatatggttgctctcctgtccatattctttgctcatatttactgtgtcatttgccttcaggtaccacagttacctggacatatgcccatttgcctagtttgacacagctacttaagggtaagcatcccgatctgtggaaaagtataaaaacaaaatcagggatctcagaatcacctttgttcacagtgattaccattatgttgataagtgaaaaacaaggaaggaaattctctgaaagaaaatgtcatgtattcagggatgggccttacaatgggaatacaggtgccacagt

SEQ ID NO: 22860 - DNA, 371 bp, Homo sapiens
gagtgagccaccatgcccggtgaactagccgtattttaaaacacaaataacattaaaacctatatttactaaggattaatattacaggacaaaattcacactaaataaaaattacattgactttataaaaagataacttttattagaaattaactattttatttgaaagttacgattttgattttatggtggcatattgtacctcctttgatcaatatgtacaaatttcaaaagtgataaaaaatatattctgtatatacttgtttaggatgacatttgatgttgcctgtatttgtataccatccagattctcattcttgactttgagatttgatttgaaatattttgaataaatgttaatcatgattatc

SEQ ID NO: 22861 - DNA, 614 bp, Homo sapiens
  misc_feature (571)..(571): n is a, c, g, or t
tgaggccaaaaaggcctttttttcttttatgtagtagaatataattatatttttaaaatgtgtatattttttcaaaaagtaaatttatttttattttatcataggttacaaataataattgtatatgtttacagggtatactgtgatgttatgatacatgtattcatagtgggatgattaaattaagctaattaacataaccatcacctcacatactgatttcattgtagtgaaaacatttggatttttttttagtaatttttaaacatgcattactattaattttagtcaccattatgtgtgtttaatgcttttcaactaacaaagaaaagaatttaaagagtgaatgttgtacttttttacatgaattgaatatacatttcctataaacatgattgcattgcgttatttcaaaatataagagttagtaatatggaaaatgatgaataagaacagttttataagttggtggggagtgtaaagagtagttggctggaagataagtgacccgcacattcattttggttctatggttgatccattcactggtgactctggttgcccaaaaggntttttttttttttcttctttttgctgacccgttcgcactgttc

SEQ ID NO: 22862 - DNA, 690 bp, Homo sapiens
tgaggccaaaaaggcctttttttcttttatgtagtagaatataattatatttttaaaatgtgtatattttttcaaaaagtaaatttatttttattttatcataggttacaaataataattgtatatgtttacagggtatactgtgatgttatgatacatgtattcatagtgggatgattaaattaagctaattaacataaccatcacctcacatactgatttcattgtagtgaaaacatttggatttttttttagtaatttttaaacatgcattactattaattttagtcaccattatgtgtgtttaatgcttttcaactaacaaagaaaagaatttaaagagtgaatgttgtacttttttacatgaattgaatatacatttcctataaacatgattgcattgcgttatttcaaaatataagagttagtaatatggaaaatgatgaataagaacagttttataagttggtggggagtgtaaagagtagttggctggaagataagtgacccgcacattcattttggttctatggttgatccattcactggtgactctgggaaaagattgactctgagaaagaacaaagtatatgaggtatattagcatgtattcatagtttaaatttaaaattatatgatttggagactgaatataatgctaaatttaataaaatatcgcattgaaagaag

SEQ ID NO: 22863 - DNA, 633 bp, Homo sapiens
  misc_feature (561)..(561): n is a, c, g, or t
  misc_feature (566)..(566): n is a, c, g, or t
  misc_feature (570)..(570): n is a, c, g, or t
  misc_feature (576)..(576): n is a, c, g, or t
  misc_feature (585)..(585): n is a, c, g, or t
  misc_feature (592)..(593): n is a, c, g, or t
tgaggccaaaaaggcctttttttcttttatgtagtagaatataattatatttttaaaatgtgtatattttttcaaaaagtaaatttatttttattttatcataggttacaaataataattgtatatgtttacagggtatactgtgatgttatgatacatgtattcatagtgggatgattaaattaagctaattaacataaccatcacctcacatactgatttcattgtagtgaaaacatttggatttttttttagtaatttttaaacatgcattactattaattttagtcaccattatgtgtgtttaatgcttttcaactaacaaagaaaagaatttaaagagtgaatgttgtacttttttacatgaattgaatatacatttcctataaacatgattgcattgcgttatttcaaaatataagagttagtaatatggaaaatgatgaataagaacagttttataagttggtggggagtgtaaagagtagttggctggaagataagtgacccgcacattcattttggttctatggttgatccattcactggtgactctggacntgggngggnagttgnccttaaaanttttttnntgggggagataaaagcgttgtgtcgcgtatgcaacccact

SEQ ID NO: 22864 - DNA, 920 bp, Homo sapiens
gaaagggcggggtggaggaggggaaagggcgggggtgatgccgcgcggtcgcaggcttgggatggtgttcgcgcctccgagacccggacagaggcaagcaggggcgccgtgggtgccagagaggcggaagaggaggcctgatggggataccttcctgctgtccttcctgagcacaacctggctgaaaacctggaggtcacaacagtacaaagaatcaaagtcaagatcttgtgccagagagcaaatgaactcttcctcttgctgagaaaacccaccctgctcacctaaaccctggccttgcctggtaattccatccatgcgcctggaaggccccagacatcaaggctctgaggggccaggcacggggagaacccagcagtgccctgccctgcagtctgagctaccagattccttgtgaagataatttgaggaccatgactcacccaaccacatttcctggggcctcaaattgaaaattcaggatgggcttttctatatgactggctgatatccaactatgccatggtctttacatgccatgaacattctttcctgccagagttctaagaatctgtgttctctgccttagaccttctgcagatgagcccacaggaagctccacgtgtagctgagctacatgcaccaggcctcagtttgccccaagtcccctgtgtactctctcatggcctgtggccaagaaatgtattctctcactttggacttaggagtccaaagagaagcccagaaacaaaattgcttgaacttgaatttgtgtgcgtgcgcacgtgtgcacgtggtggtgaaggtgtatgttttcggctgttctatgcgtcactgtcaccaaactcccaaataatagtaacatttgtttagatgatgtctgctgacaaatcacaaacacgacgctaactcgcaactct

SEQ ID NO: 22865 - DNA, 904 bp, Homo sapiens
gcctgggggttaaatcggccgagggcgcgcggtcgcaggcttgggatggtgttcgcgcctccgagacccggacagaggcaagcaggggcgccgtgggtgccagagaggcggaagaggaggcctgatggggataccttcctgctgtccttcctgagcacaacctggctgaaaacctggaggtcacaacagtacaaagaatcaaagtcaagatcttgtgccagagagcaaatgaactcttcctcttgctgagaaaacccaccctgctcacctaaaccctggccttgcctggtaattccatccatgcgcctggaaggccccagacatcaaggctctgaggggccaggcacggggagaacccagcagtgccctgccctgcagtctgagctaccagattccttgtgaagataatttgaggaccatgactcacccaaccacatttcctggggcctcaaattgaaaattcaggatgggcttttctatatgactggctgatatccaactatgccatggtctttacatgccatgaacattctttcctgccagagttctaagaatctgtgttctctgccttagaccttctgcagatgagcccacaggaagctccacgtgtagctgagctacatgcaccaggcctcagtttgccccaagtcccctgtgtactctctcatggcctgtggccaagaaatgtattctctcactttggacttaggagtccaaagagaagcccagaaacaaaattgcttgaacttgaatttgtgtgcgtgcgcacgtgtgcacgtggtggtgaaggtgtatgttttcggctgttctatgcgtcactgtcaccaaactcccaaataatagtaacatttgtttagatgatgtctgctgacaaatcacaaacacgacgctaactcgcaactct

SEQ ID NO: 22866 - DNA, 949 bp, Homo sapiens
gcctgggggttaaatcggccgagggcgcgcggtcgcaggcttgggatggtgttcgcgcctccgagacccggacagaggcaagcaggggcgccgtgggtgccagagaggcggaagaggaggcctgatggggtgagcacagggccagggcaggcactgcctgtgaatggcgccagggataccttcctgctgtccttcctgagcacaacctggctgaaaacctggaggtcacaacagtacaaagaatcaaagtcaagatcttgtgccagagagcaaatgaactcttcctcttgctgagaaaacccaccctgctcacctaaaccctggccttgcctggtaattccatccatgcgcctggaaggccccagacatcaaggctctgaggggccaggcacggggagaacccagcagtgccctgccctgcagtctgagctaccagattccttgtgaagataatttgaggaccatgactcacccaaccacatttcctggggcctcaaattgaaaattcaggatgggcttttctatatgactggctgatatccaactatgccatggtctttacatgccatgaacattctttcctgccagagttctaagaatctgtgttctctgccttagaccttctgcagatgagcccacaggaagctccacgtgtagctgagctacatgcaccaggcctcagtttgccccaagtcccctgtgtactctctcatggcctgtggccaagaaatgtattctctcactttggacttaggagtccaaagagaagcccagaaacaaaattgcttgaacttgaatttgtgtgcgtgcgcacgtgtgcacgtggtggtgaaggtgtatgttttcggctgttctatgcgtcactgtcaccaaactcccaaataatagtaacatttgtttagatgatgtctgctgacaaatcacaaacacgacgctaactcgcaactct

SEQ ID NO: 22867 - DNA, 383 bp, Homo sapiens
gcctgggctcagtgggactgtcaactggaatggccatatgtggactctcttagcatgatggtctcttctagaagcttgggttcccagagagaatgttcaagaggccccaaaggacaccacaaagcttctttatgaccaaggctcggaaatccaggaagcttgctcccatcacgctctattactccaacaagtcactcaggccagcccaggtccaagaggaggaaacctagactccatcttgcaatgtgaagaattgcaaataatttgtgtcacccttaagcaaccagcaactcatctaggttgattggcatttcagcaatgtggtgggaagtggtgggactgatgttgaagagggacttgaatgtcatgagaggctggggagg

SEQ ID NO: 22868 - DNA, 1326 bp, Homo sapiens
cagcgcctgtgcagatggcaagatccgaatttacaatttcctcaacgggaactgtatgaaggtgttaaaagccaatggcagaggtgatcctgtgctgtccttctttattcagggcaacaggatggtggtcaacacagagagcaatgttctcatgttccagtttgagcacataaagtggcagtatgccgtggaaaaaacgaaacaaaagaagaataaggagaaagaggaggaaaaagaagaaaatagtctcatggaaattctctctaagtgtaatattcaggttcacagcccaagagagtctgtatccagtaaacaaactgtgatccaagagctcctaccaggcaaacctcccaagtcccgagtactcctgaagccggccaagttctcttcagcagtgttaatagaggaacttcaaagtcaaggaaagtcaaaatcaccccgaagagatgatgatgcggagaaagcacaaaaacaaggacaattggaaactcctggaaaactgcccagtcacccaaagaaaaagtcttggaaaatccctatgtcacctgaccaattcctcctgactgttagcgccctgcagcacgcccgtaattccggggaatttgcctatccctgtaggccccaaacagaaattactgatgtctggggaccttcaatttcatacccaaggaaggtcttgaatttcaaaggaaaatcaatccaacgtgcagttgatcggttgagattgagcaatcctcctatagatgtgaaacgaaccagtattccccttgaaatccagaaactgcagcccaacttgaagatctctttgcacagtcctagagcccagtccaccatacccgagcccatgattatccgctccaggttctctggcagcttaaagggtggagaccaagtgaccagttcaattgaaagggctgtgtgcagtacgggtcccctgaccagtatgcaggtcattaaaccaaaccgcatgctagctccacaagtgggcacagccaccctgtctcttaagaaagaacggcctcgcatctatacagcccttgatccttttagagtgaacgctgagttcgtgctgttgaccgtgaaggaggagaaggagcaccaggaagccaagatgaaggaatatcaggccagggagtccactggagtggttgatccaggaaaagccagcaaagctgcatggatcaggaagatcaaaggcctgcctattgataatttcacgaagcaagggaaaacagcggcccctgaacttggacaaaatgtatttatctaaaccagccttgggaaattacagtgttttacaataaacagaaagccaagcggaaaaaa

SEQ ID NO: 22869 - DNA, 134 bp, Homo sapiens
aatgttcccttgtggtgatgaaaagaatgagtattctgcagcaattgggtgaagtgttctataaatgtcaggtctattaagtatggtgtctactttaacttttgtgtctctgttgattttctgtctggatgatc

SEQ ID NO: 22870 - DNA, 125 bp, Homo sapiens
gtaagctggggagataactgtggtcaaaaggacaagcctggagtctacacacaagtgacttattaccgaaactggattgcttcaaaaacaggcatctaattcacgataaaagttaaacaaagaaa

SEQ ID NO: 22871 - DNA, 336 bp, Homo sapiens
caggctggtcttgagctcctgacctcaagtaatccgcccactttggcctctaaagggctaggattacgggcattagccaccacacccagccacatatcaatattaaccttgaatgtaaatggcctaaatgctccgcttaaaacatacagagtggcaaattaaaaaaaaaaaaaaaagacccaaccatctgctgccagcaagagacccccccacacacactggttaaagacagttacagactcaaagaggtgaaaaaagatttatcatgcaaatggaaaacaaatgccagcagtagtatccattctcgtatcagataaacttcaaaccaataacagt

SEQ ID NO: 22872 - DNA, 366 bp, Homo sapiens
gacatgggcacagtcattttagtgaaacctaagaaagtgcagaggaaaggagagatgctaagaaagtacaaaggaaaggagctaaagctagccatgtaaggccttgcagaaggggatgcctgagttaagtttgcaatgagaagtgaaaaatgcaggaaggcatggttggctagaccatctgcgacagcatgggcctgtgcagaaagaaggcccactgggtgctagatgtctgattgggtcagaactgtgttatgcacatgcccatctgggtctgtgaaacaaatgaacttcatccagctgcttcagaaagaattaaacaggtcccaggatgctcatcacctgaaagaactgaagcatgcacctgga

SEQ ID NO: 22873 - DNA, 592 bp, Homo sapiens
gttgctactctaggacactgcttagctcatcagttcttagatttcaagattccatttactacaaaaaactgaaaatgatctttagggaccaatacagaatcaccaacttcttaagacattaaaaataaaaatcccctgactgcctcttactcaaaatagtcccttagtcaagagtgtagtgcttgacttttggctttacccactaattagaagtatgtaaccttaggccaggtacttagcctttcagtgctcaaacgaggtaagcacagtacctgcctcatggatgcttgtgagcactgagaatagtgtctcacacatagtaagagctatgtaaatgttagatgttatttgttataattactagtttgcagttgtggggaagttatttaatctcttttgtcttagtttcctaacttgcaaaatgtaaacaatgatacttcatagggttgtggtaaggattaaacaaactaaaagttattaagtgtatagaactgtttggcgcatagtaagctctttataagcatgggccatcactatcactactattttttaaaggatattttaacattaaaagaataaatgtggcattttg

SEQ ID NO: 22874 - DNA, 481 bp, Homo sapiens
cagtgggaaactaatagagcatctttcctttttttctagttaaaggactcacttgtacgtgtacacatttctcaggagtcctgtcaaccactgggaagaaagaggctggacttctgcattgaacccaggaacggggtttcacagcaatggaaacctggggttaaatatcaatggaaccttacatgacttgaagaatctttaatacaagctaggttttgaccccaaattagacatttggcagcctctcattacagtctatcttgcaaacctcagtgtggcaaggaatcagattcacccacactccctagtctaaaggattgtcctctgatccttccaggtggattaagccctttctaatctgtcatggacagagcaatgtacctgcctttgtttgttttccttaattctttcaagtgcctttgggtaataaatggttgcgtactcaggtttttagtccaaattttttttcttcaactctagg

SEQ ID NO: 22875 - DNA, 413 bp, Homo sapiens
tctttctatccttactcctgagagagttcagagttttaaaatatgtccctgtggtttcacctattttccactcaatagtaaaatagtcaaagattaaaatatctttctctaaaaaacatttctcattttttttgcattcgaattgttgacagaccaaaataaaacaaaaaacaaaaaaattcacaagaatgttctgaaatagtttcgtgatttgcataatattattcattctgtggaatctactagaggtgatttttagaagaaaaattataaaattatccaatgaactcagcttttcaaagagcagatgcttccaaagtatttttaaactgaactccttgtgttacatgaagttttataaaaacttatctctaatcattttattcagtgacctaattatcttcagtctatca

SEQ ID NO: 22876 - DNA, 196 bp, Homo sapiens
ctatgggtttatggcagtgactctcaactaggggcacttttttttttgccctctccatccacagatatttggcatgtctggggcaattttttagctgtcacactacgcagtgctattgacatctagtgaatagagaacagagtcactgctaaatgtcctacaatgtacaggatatcctccataaagaagaattttc

SEQ ID NO: 22877 - DNA, 315 bp, Homo sapiens
tacaaagtctatattttaccatcattaatactgaatattatatttcaataagaatctttagaattttaagagaaatttgagtattaaaaaaattatctaatatacccaattagaatcttttcacatgagactacagagaaagatttgtatttgtaacaaaaaattagctgggcatggtggcaggtgcctgtaatcccagctacttgggaggctgaggcaggagaatcgcttgaacccgggaggcggaggttgcagtgagccgagatcatgccattgcatttcagcctgggcaacaagagcgaaactctgtctcaa

SEQ ID NO: 22878 - DNA, 569 bp, Homo sapiens
ttgcaggggaaggagctggatcagactgacagggtttcactcagactatttcaaacaatgaggagccttgacctcattcccaacttttgccgtccatagtggttgatttcttgttttctctttctctctttttttaacagaaactcttaagctcaaggctaaattacagtggggacttgcctttgtctacagtccatggtttctgtattggctcaagccttgaaatcttgaaacaagcctaaattaaaattttctcttagcttaagaaaaaaagttacatattgtcaagacccttatgtgtgtggtccattaaaaaggtcttgatattagaagataacagcaaattgtttcttatcccacaacagctttgcctttcagtgtcctttgtggtggttttcgtaggtcagtggtacaattcaacactcttccaataagccataataataattgttggcacaactgttattacaacaggacttgcctgggttccatctattaatttttacagacagtaggaagctcacaccgaggagacattggtaacttcctggacaagggcaaagaaagga

SEQ ID NO: 22879 - DNA, 148 bp, Homo sapiens
gcccccatgcccagcctttcattctctcttaccatggattccttttgtttttcttttatggacttattttttttcccccttcttttctttttgcccttggtacagtaactctgtttcttcttcgtaaatgttctcattttctctttag

SEQ ID NO: 22880 - DNA, 530 bp, Homo sapiens
gagatggagtcttgctctttggcccaggctggagtgcagtgatgtgatctcagctccatctcccaggttcaagcaattctcccacctcagtctcctgaagagctgggacaggtgcgcaccaccgtgcccagctaatttttgtatttttagcagagacggtgttagcccggctggtctcacactgacctcaagtgatctgtccgccttggcctcccaaagtgccgggattacaggcatgagccaccgcgcccagcctcattgaaaatttacttttcaataccagactgcagagttctttggggcagagacactctgtcagtgtgctctttttccaaagtatctcctgctatcagtttttccccttgaaccaagtcttcctaacaaatttgttgtgtcattgctttctagggaactggaccagcaaatgtggcctttagtggttaatctcatctgtgccaaaatttagttgctaccagagtgaaatttggtgtgtaaataatgttcagaggaaatgtggttggagtgtagta

SEQ ID NO: 22881 - DNA, 420 bp, Homo sapiens
acaactggtgagcactgaggagcctagggccgcggtactgtgctggagtcggtgatctcaggctacagtttatataagacatcaccactgggggaagctggttgaagggttcacaggactgtatgtgcaggaacttcttgtggttctgtattacttcaaaataaaacgttttttaaaaacccactttatagaaacaaaatgaggcttttttttttctagaaagacagctgacaaacaaaatgagattttaattaacgaacaaactgaatactgaaatgcaaagtaaagaatgattatgtatggctgggcacggtggctcacgcctgtaatcccagcactttgggaggccgagttgggtggatcgcctgaggccaggagtttgagatgagactgggtaacatacagggacgccattttttc

SEQ ID NO: 22882 - DNA, 456 bp, Homo sapiens
tctggattcaattttctctttgagggaaagtaccataatagttcttgcatttattactgttagtaatgaattctcagattttaattgtctgaaaaagtcttaacttacctatatgttgcatattttctcctatatgtgttgtataaagtataacaaagagaaaatcgtttttagtcattattatgccttcacttttaaatgataggttaactgggtataaaattctgggtacacaggcatattttttctcagcactttgaatatatttatgtctgttgttaatttattgcttcttagctctgaaaccacccttctttgccacactttgtgatattggacctaaactctgtagattacatttctcccttgacagatggcttagtgttaggttctgccaatagagggcacaagagggacactgaaagcctgggaaaagaaggaagagggaactttgtt

SEQ ID NO: 22883 - DNA, 382 bp, Homo sapiens
gctgcctgtcgtgacttcccagtgcatccttcctgtgcgctcttactaggctgtcctaaccgggccattttccctgagggtctcagacccagtcctgagtcgcaggagtcctttcccatggccacctcgctgtggaactgtttgtatggtcctactgacttcctctcttcagcttctgactctgacacggtttcgtccggaaacttccttttctgaccttcctggccagggtctccctcctcactttcctgtcacctcctggggctcctttgaagagtctgcccctcctctgtccctgcctgagacattggggttcccaggtgtgcccctgtcttgcacctgcacttcttcttctgccttgtgttctcgaggatgtggcctc

SEQ ID NO: 22884 - DNA, 399 bp, Homo sapiens
gaagcagggaatgctatccattgtaaccctctaccaggggctctgttacagtaatatataacaaatatgtcttctatttatcactttttaacagagtttttttaattagaaaataatctggagaggtttttaaaaatacagatctccagccaggcgctgtggctcacaccagtaatcctagcactttgggaggccgaggcaggtggattgcccgagctcaggagttcaagagcagcctgggcaacacagtgaaaccccatctctactaaaatacaaaaaatcagctgggcatggtggcgcctgtgttcccagttactcaggaggctgaggcaggagaatcacttgaacctaggaggcggaggttgcagtgagccaagattgcgccactgcactccagcc

SEQ ID NO: 22885 - DNA, 395 bp, Homo sapiens
gtaatactaccactggactaaaaagttccactgcttctccacctcacaacgatccaagaacttcaatgactgccagtgacccgcactccacaagtaagtcaacaatacttccaggcacaatgattcccatcttacgcagtaaccagcaccaccagaccacatcccagtaaccaagctccacacctctcctaaaaccccagtattaaaatacatcatcactggagggccttttaagtccgaaaggtcctgacttgctcctagcaatgcagactaaagacaatcctaaatcaaaacaaaaaggctccctgtccagccaacaccgactcctccctcaacttcgagctagctccgcacactcaagtcagcctgggggcactctgacagggtgggcagag

SEQ ID NO: 22886 - DNA, 890 bp, Homo sapiens
agctactcaggagactgaggcagaagaatcacttgaaccccgggaggtggaggttgtagtgagccaagatcgtgccactgcactccagcctgggcgacaaagtgaaactctgttctcaaaaaaaaacaacaaaacaaaaagtaacaacaaaaaagaaactatattccaaaaatccaaatttcattggcagtttgttctgggagcttcagacacatagaaggtgtcagttaaccagttcttacctaagaggtactgctaagagcctagtccctaagcaaagggagcttcagagaaacacagaaggtgccagttaaccagttcttacctaagaggtactgctaagagcctagtccctaagcaaaggacattcctcgtagctctgtcctgtctcctcatctccaaaatactttaccttctactttgaaatgcccactattatattcaaaagccctagttacttccagggaaaattatctattgagcaatgaatttcggtagcttcaattggattccaactcttgagcaagttttcatctcccttgcctgaatggccctggggaggactatttaaattgggggcgagtggatgaggatgctaaacctagaggtctcccaattaccaaaggcacctgggcaccagggactaaagtttgtctcaggaatttactgagatatgaggctgagataaaatcattttttggtacataaggtatcttgaacaaagcagatcagtttaacacaaaatcaacaatcgtaatttccctttttaaatttccaaatctatgtagcaatatcctttcctttaattcattcatcatctctattcactttttgtattctgtaaatcatttgaacttttataagaattatattttccccttgaggtcaca

SEQ ID NO: 22887 - DNA, 585 bp, Homo sapiens
atatgagatattcagcagagcccatggcctctgctggacagacagtgggaaggggaagctctgtgggggccctaaaagaatttcttgttaaccccccgaggttggcccttcctctccactggccatgatccacctgaagggaacttgagcatttaattcaacagaccagcatatacttcctcctgtggcctgatgagcaagtggagtgagcccaggcctgcagagtgacacaacagtaggtagacagttgcagaaggaaatagctgacccagaaggactctgggccagggccacccagcatgggaactggtttacacatgctatggaaactctgttttgatcacatgggaaacttcaggagctgatttttccctgccttgctcaatcctcttttgaaccctatcttaatgataacatggtagcgggagagggcagctctttcagaaggcaaaccccaggaaggcagacatttctgctttgtctgtgttattcactgccctattccaagaacctagagcagtgccttgtacttagcaggtcctcaataaatgattgttgtatgacaatcacacttgcctgtctgac

SEQ ID NO: 22888 - DNA, 527 bp, Homo sapiens
aaagaaagaaagaaaaagaaaaaagtgatttgaataggcatatttagagacatccctctttcacttatttgcttaaagactttcttttttttcaaaaccgatttatttgtcaaccatttcatgtcatgggttcagatgaatccaatatttgtatgaagcgtgcatctttttgtctggctttaaaataatcatctataacacaaaaatatccctctatgatccttacaattttaccattagcaatttctagaattatcagtggaggtgcatagtaaaggtaatatagtccaggtttctagcaaatgaatgcccctttcaaacctctgataaggggttatccagttgtttttgtatatttctgataatgtaaacatgtatctttttctattgttgttaatactgatttatcacagattaatacaattacagagtttgaattaatcatttttcaaatgagaaaactgagatcgaaggaataaattatttacccaatgtcatacagcagattttgacaaagccagaaggat

SEQ ID NO: 22889 - DNA, 194 bp, Homo sapiens
gtgtgggtgtatagtacagtctctggtgtaagtaagtgctctatagtaatgtcagctaccacacccagccagaacctgctttctaaaagcaccctaaacctctttggttgtgaatttatatattctctgccttccaagggctggtctttgaggatattgcttggaactaagttcatacagtagatattttattt

SEQ ID NO: 22890 - DNA, 428 bp, Homo sapiens
tgcgatcactcccgagcaggagggaggcaccctgctgcccagtagtagcaccactcctagaggaggagggcccagcctgtatgggggcagtggggccccccaccaggcatccatcctgcctggcccagatggtccctctgctggtggctggcttcgggtggtggctccgggaagcacacatttccaggaagggccctgtaatcaagtgaagttgccggatgtccttgagtcactggctcctcttcgtcttgactcctccgttgttgcttccggtcactccctagtcttggctcctttttcttcccttctctgtgctgttctaattcccaggaggtgagggaaggtttccccttcacctcctgctgacctgcttctcccctggcctgaagcctgtggttctgggatggggatgaggataaggatgaggt

SEQ ID NO: 22891 - DNA, 742 bp, Homo sapiens
gctactacaagaagggtgtttcagaaacgctctatcaaaagaaacgttacactctgtgagttgaacgcacacgtcactaagcactttctgagaacgattctatctactttttacatgaagatgtttccttttctagcagagacttcaaagtgctctaaatatccacttgggaattctacaaaaacggtgtctcaaaactgctctatcaaagggaatgttccattctgtgagtcgaatgcacacatccgaagaagttactgagaattcttctctgtaggtttagatgaagaaatcccgtttccaacgaaggcctctaggaggtccaattatccacttgcagattctacagaaagagtgtttcaaaactgctctatcaagagaaatggtccaccgtgtgtgtggaatgcagccatcacacattagtttctgagattgcttctgtcttggttttatggggagatatttccatttctagcataggcttcaaggcgctctaaatatccgcttggaaatactacaaaaacagtgtttcaaaactgctgtatccaaaggaaggtgccactcgctgagttgaatgcacacatcacaaagaagtttctgagaattcttctgtctagatttatacgaagaaatcccgtttccaacgaaggcctcaaagaagtccaaatatcccattgcaaattctacaaaaggagtgtttcccaactgctctgtcaagaggaatgttgcactctgtgacttg

SEQ ID NO: 22892 - DNA, 235 bp, Homo sapiens
gcccagttgaccctgtgtttttgaaacacccgagtgtgtccagtaatctgcgaacattatgaagtcctacccctaaaattcttaaagatatatttcagtgcagttaaactgcagtcatgtgtcacttaacaatgaggatatgttctgagtgaacttcctagagtgaacttccacaaacctagttggtgtagcctactacacacctaggctatatggtataggctattgctcctag

SEQ ID NO: 22893 - DNA, 222 bp, Homo sapiens
ctctgagataagtgaagtaagaccaactgcagaacagtgtgtatagaatactaccatctgggtaaagaaagaggaatttttaatttctggaaagatgcctctggatagggaactgtgttgctggggaagaggggtgagacggagacttttcactgcagacccttttaaaccttaaacctgtgaatgttttagtgataaaaataaataaaatttaaatctaaa

SEQ ID NO: 22894 - DNA, 228 bp, Homo sapiens
atattccaaaagcagtcccaggggcttgttcgctaccagcagtttcccaaaggttctgccttctgcagaaaacacattacccaacttgtgtcacccttcaactatgtcagaacagctgccatggaagttccctttagattagaaactgccttcaagaaaaagaggccacaaaatggaccttgatggtctgttcatccaggcggaattcgctatttgctcaaattgaat

SEQ ID NO: 22895 - DNA, 122 bp, Homo sapiens
tgaggtctacatttacagttaagagtattagtgacttgtatgtgggagaattgggtctactctaacacaagtgtgttcttttcattgtagtgtacctgttatataaatataaaatctgtata

SEQ ID NO: 22896 - DNA, 484 bp, Homo sapiens
ttctgtaaaattcgatggaccaccaattggatagtaagagctgcccagcctggacttacattctttcaattaatacataaaacaaaaagggggatatgcagggagccgaaggcccgtgggacgtgaccagctcagcatttcgctggaggctatatgatcaaacagcaaactgtttatcatgaatgcaggatgtgggcaaactcacattgtcctgccaccaaaacgtttgctgagggacatcattccctgatggctccttgaagttatctacggagaaaattagcgcctattgttcaaagcatgtagttcaaagcctgctgtgaaccaaacagctgactgacaattacccgacaatcaccgcccccaaccccgctttttcgctatctcttttgcctaataaatatggagggctgtgtaaaccagggcccttgtccactagaggcaaggttccccctgaccccttcttccaaatatactcttttgc

SEQ ID NO: 22897 - DNA, 479 bp, Homo sapiens
accctgcctgaggatactgtgtgtgtgtgtgcacgcgcatgttcgcaagtgtgtgatatgtacacccattacacactcttctcaccctccctgcctgaggacacactgtgtgcttgtgtgcatgcgcatgtgcgtatggtacacccattacgcgcaccccctcaccctgcacctgcctgtcagatcactcctctttcagcccattcatttgttcagcaaactttttttttttttggaataagagtttaaaaggcttttctttatttgggttttcaaaaaatttcctatctttgacttgtttttatgtcgttttctttttaaatttaaatccttaaagaaatttgccatttatcatggcacatggtattgtgtacatggcaattatgttcatacctataaacagcaattatgtaggaaatagaatcataaataagcatataatcttatgaataaatttaaatgaataataatttttggtt

SEQ ID NO: 22898 - DNA, 304 bp, Homo sapiens
tataatttgtgctactagagcgtcttggaaacccaggcctataataaaaggcaatagccatcttcttactaagttttgggagttcttgtaggccttggctatcttgcatgaattttacctggttgtgagagctagtgtcaacctgataatattgattatccttgctctagaagtttgtttgtcccttagggtgatggtatacatctaaacattttagtgctggctgataaaagaaataatgtcaaacgtttaaccacaaaaatctctactgtgctttctcgcatgattaccattaagacgttca

SEQ ID NO: 22899 - DNA, 234 bp, Homo sapiens
tcttgcttgcccctctatagtctgttctcaacacagtagccagtgtaatctttttatagtggaagttagatcacttccagtagttccatctcactctacctaccttacacaccttatctcttactactctccttttctgctccactagagccacactggtcttcttgctattccttcaacagaacaagaatgtgcctttcttatggctgttgtgctccctgttctttctgcctg

SEQ ID NO: 22900 - DNA, 388 bp, Homo sapiens
aatggcttagcagactcatagagacatgttttcactcctgtgtgatttccttctcagcctcagcttcctcactgtgtttatgaatgctagaaatctatgtattttaagacctgcttaaaaaataaatgtggtgtgggccatccgaggtgacactgtttaattcacagagcgaatgagtcgtgctctggatctccctggagaggatgctccccatagctctgtttcatgcagatgctagttggaaatgagatttattaactggctctctgcccactgcatctttgtttgtatactccaggcttttaagaatgaatgtataagtctagaggactatttccacatgggtgttttgagcatgcgactacagtagcacatgtttctgaatact

SEQ ID NO: 22901 - DNA, 396 bp, Homo sapiens
gcctcggcctcccaaagtgctgggattacaggcgtgagccaccgcaccccgccctaatgtttgtatttttagtagagacggggtttcaccatgtttgccaggctggccttgaactcctgacctcaggtgatccgcccacctcagcctcccaaagtgctaggattacaggcctgagccaccacaccagggctaaggaagggctattactgaaaaggatggggcatgtttcatatttaacaatcagcccaaggttcccctgcagttcactcacatgtccttctgtgggcgtgtgtcttcgtgcacacctaaaaccatgtccgagtcgatggcgtgtccttatccatggcattgtcctgggtatgggctgacccaggcccaaccaccctgctgtctcct

SEQ ID NO: 22902 - DNA, 388 bp, Homo sapiens
tcacgcaagcatggttaacgtccctaaaacccgccggactttctgtaagaagtgtggcaagcaccaaccccataaagtgacacagtacaagaagggcaaggattctctgtacgcccagggaaagcggcgttatgacaggaagcagagtggctatggtgggcaaactaagccgattttccggaaaaaggctaaaactacaaagaagattgtgctaaggcttgagtgcgttgagcccaactgcagatctaagagaatgctggctattaaaagatgcaagcattttgaactgggaggagataagaagagaaagggccaagtgatccagttctaagtgtcatcttttattatgaagacaataaaatcttgagtttatgttcaaaaaaaaaaa

SEQ ID NO: 22903 - DNA, 338 bp, Homo sapiens
ttttttttttaatctgtggaagaaagtttgaagtatttatgtaaccagattttaattcaaaaataactgtaaaaatcaggaaaatgtgtattttgtgcatatttatgctgattcgtatactgctcaattccattgtgttggggagaatatgaaatgaatgtacaacaggaaatgaattgcattctgtagcagtgataaaacaagctctgggcattacgtttttaagtgaagttttccttaagttttaaaaaaattttattccaacagcaaaacccacacgtaaacattgcaagctactactgcactccagcctgggtgacagggcaagaccctatctc

SEQ ID NO: 22904 - DNA, 405 bp, Homo sapiens
gtctctccccaaacttgttcagttttcctggggctcccattccctggattctgttactttctccttaaatattgatggctcgttgctagcagttccccccaaaccatgacgtaactgtgtcttctgtcaatttcaccacgttcttgcaaatggaggcaactcctgataagacccaatcccagatcagcctgggctgccgagagcttccaagaacatcaggtaaatggagactgatgctaaagtcacagccgccgagttcagcaggttcttaaagccatcgtgagccttctccgcctcttgcctgctttgtctttactttttcctctctgtggttttttttcccccaccagcatttaaatatcaacaagtctttcttacctgaaaaataaataccttgaacagaaa

SEQ ID NO: 22905 - DNA, 179 bp, Homo sapiens
gcttccggtgggttgaggtcaagttgatcatcctacaattcacatcaagaattacacagctgacaaatctcactggtggccacgctgagaaagcccagttcattccttcccagtgccagagagaaggtgtgggcatcagagaggtgagtttcttaccaaccaagtaagggacattcatc

SEQ ID NO: 22906 - DNA, 223 bp, Homo sapiens
taattagtttatgtatcactaacaacagaattgctactctaacatgtattccacaacccctgaatctgcacaacagattatattttgggaacctgaataatagtttagatttttctatgtgctttaaatataaattcagaaataaaatcagcaaaaatacaaaagtagtcaatttttaaaaaaatgttacttatctttttccacagagtcaaaagggacaaat

SEQ ID NO: 22907 - DNA, 457 bp, Homo sapiens
taacctggttattgtaagcatctaggattttagggttgcttattaccttagcattactgagactgctgatggacacaacttctttggctaaagggaagataaaaatagactgaaactaaaattgttctgctttacaaagacaactcccgatccgcagacctcaatttgaattacaatcagacagcaaggcttgaagaggctggcaatattccatcagagagaacaataaatgtatgaagtctgaataatgaaggaaacatttacaaatacacttgacagaagaagaagggaggcagggtggtggctcacgcctggaagcccagcactttcggaacccaggacaggcagattggttgagctgaggaattcgagatcagcctgggaaacatggtgaaaccccgactctacaaaaaatacaaaaattagccgggcacggttgcacaggcctatagtccca

SEQ ID NO: 22908 - DNA, 663 bp, Homo sapiens
tgagtatttacaacttatacatgtaattgaattctcactacagccctaggatgtacatattattaaccacttatataggtaagaaagctgaggctctgagaagtttagtaacttgtcaactgtcacccaactaaaaagtttcagagctgaggatttagacttagagctgtgtaacttcaatacacagactctatctacttcacaacctgcaatgtgattctgattcctttaattcctgttgtatgtactatgtcagctcaaacccctacccctgtccctgcccatacctccacccactcacctccctaacctccttatgtccctcgcagtagcaagatgtaggtgataggaaggacttcggtgtgagaattagaaatgatgtaaatgtttacgcaggagtgctgggataggagtcgggatggtgagggtagttagatttttgcctcacttgccctgaaagtggtaatagggagaaaccaatctgaattacaattacttaaatgtatcacagactgtcactttgtattcctccaacatgtttggtaacaagtgtttaatgtatgttaaaacaaagaaggtttttatacccttccattaaaatatgtcagtgggcccttccattttatggagtggaatgggaaggcccttgacagccaggaacca

SEQ ID NO: 22909 - DNA, 460 bp, Homo sapiens
taagtgtatatgattgttacctatatgcacattgttgtacagcatatctctagaaaggtctcatctagcatgactgaaatcctatacccatcaaactgcaactaactttcccctctccaaaaacaccattttagtttgtatgagtttgactcctttagatgcctcatgtaagaagaatcaggcagtgttgttgttgtttttgagatgggcttatttcacttagcataatgtcttccaaattcttgttgcagcatgtgacaggatttccttctctttttaacaccttcatttataggtcagctatgtggaagacagaataatttccccgtagaaataaataatggcagatattgcaggacaacccaccaaaacccatataaatcttacttgaaacagtattgagagtagccctctatcacttgatttacaccctccttcttccgtcccaccctccttgttg

SEQ ID NO: 22910 - DNA, 481 bp, Homo sapiens
aaatcacagagttgattatttttcccaaataagagatgggcaggaaagtgatatttcaaatctcaaaaaacacaagccctcttgcttctattccccaccataaattctttttggctccaagtggtggaggaaaaggaggtggcaggcaggggtggcttgcagccacactcccgtgttgtcattcttccccagcagaccacctctggggctgcctcctccacagaggccaagcgtattgcatgtctgccgccttgcccctcgagattaaaaatatcatgtctggtctgaaaacactttctcaaggctgttcctgaacactacctacccacccagattagaagactgcgtctgttaatctaaaacatgtttctagcagaggaggaaggagtgccttcattactcccaggagctgctcccatccttcgggaggaattcaatttggagcggaaatggagaatttcatcagatcttaagtaggagc

SEQ ID NO: 22911 - DNA, 547 bp, Homo sapiens
acttctgtaagcagagacctctgtatccccaggacctagaaggttacccagacatagtagttgcttaattaaaaaaaattattgattgaatgaaagaagactattaaatgttcagttcttctttttttattctgattccctgtgtatccaggggcctcttatttggctgcatgtatgagtttggctgtaatgaaagtattggccgtatatgaccataaacaggcattcctatttctgtcacagttatatttgtcattctgtattaatacatctatatcctgatttctattgaagcatggttaattttgtttgcttctaagcaatgtagctaccctgttgatgctgataaaaataaatttctgaacctataagactgaggattgggcctaggttgtagtaaattggcaagataatggatgctaccctgtcaagagtcctctgaagagaaaagtctgccacccttcaccaggtagaaactccaggcagtgccacattttccagtttgacgccctgtgataccctgaaaagacagatgtttgactctttt

SEQ ID NO: 22912 - DNA, 378 bp, Homo sapiens
tatttcttcctcatctctgtatgttgtcttttgttatatttttaaatttaataatttttcaaactaaatttactttgttcttgagatactaaaggtatcaaattgagtataaagaatattctttgtggccgggcgcagtggctcacgcctgtaatcccagcactttgggaggctgaggcgggcagatcacaaagtcaggagataaagaccatcctggctaacagggtgaaagcccatctctactaaaaatataaaaaaaaaataagccaggcgtggtggcgggcgcctgtagtcccagctactcgggaggctgaggcaggagaatggcatcaacccaggagacggagcttgcagtgagccgagactgcgccactgcac

SEQ ID NO: 22913 - DNA, 873 bp, Homo sapiens
tgaggctgctgtcgccggtgcctgtggacagcagctgcccctgccctcccatctgttcccaggacaagtggaccccatgtttccatgtggaaggatgcatctctggggtgaacgaggggaacaatagactggggcttgctccagctgcatttgcatggcatgccccagtgtactatggcagcagagaatggaggaacactgggtctgcagtgctgaagggtttggggagtggagagcaagggtgctctttcggggctggacagcccgtcttgtgacagtgactcccagtgagccccagaaatgacaagcgtgtcttggcagagccagcacacaagtggatgtgaagtgcccgtcttgacctcctcatcaggctgctgcaggcctctggcgggcagggcactgggagaggccctgagaatgtccttttggtttggagaaggcagtgtgaggctgcacagtcaattcatcggtgccttagtccaagaaaataaaaaccactaagaagcttttgtgaagaggctcttgattgcagcatagtgggagggagggagctgcctggcctgtgtcctcattgccctgggacctccctctctgatgggaagcgtgtggctggagcaggcggcttctgtctggttcttaggggctggttgtggagtgggaagaattgggtgggctctgtctgagctctgagggaggattcagggtttgcacaaaaccctgcccacagcaggtcctgtgtgcaccagcagggctctggccttccgcgggacagtcctcggggagaggaaggttggagccgctgcgagcctggctccccagggctctgcccctgtacttttttcagcccatgtccagggcagactgagctctgaa

SEQ ID NO: 22914 - DNA, 750 bp, Homo sapiens
atatgtgctgaagaatactgtttttcaaaatactccagtttttaacccgtttgtgccagaggttgcgaattttttgtgtgaaaaatcaggccttggcaatgaccttgagcagtagaatataaatcccacaagcttagcgttccagtaatggaacactaggcataaatgggttaacaagtggtaactaagggctatataaaatttggttaacccttgacagcagcagtgcataccagatacttcatgactttcataggttagagtgttttattctcagttatttgaacactcacagtattcatcccacccatagtgacacagctctatgctaagggatcataaatgaattcacacagggtgcctgttcctgcagtatcaccacgtagtgaaggagacatgcattcagctaatgacagtgggaaacagcaaaccacagaggccggtcctgtggaagcacacaggagagaagcaccagctgctgcgtcatctggcacttgactcacttgaggaaaacggttgttttccaacgaggtcatgttcttagagctttttctgacatgttacttttatatattcttcttatgaagtcaaattgtaaaaatccattctcatttgatgtatttcccacattgcacatttattgcacttcagaacctggaaattgtatgctaagtatgctttgtattttgctttttaaagaactaactcatctggtttcaggactagatctactgtagaaagaaaaaaaaa

SEQ ID NO: 22915 - DNA, 180 bp, Homo sapiens
agcaaaatatagggatatagtttggagagtaaggctctggttttgatttaataggagttccaagataagcaatcttaggagggcctagtactgtccccaaacttttctagcaagacagagaagttgctattttctattcttgatgggcaggagtcagtcagtgaaagaatacagctatgg

SEQ ID NO: 22916 - DNA, 203 bp, Homo sapiens
taacctattaaattagaaaagatttttcttaaaagctaatacacaatgctgttgatggaggaagggtattcttacagttgtcggtagaagagtaaattggtacaagccttctggaaatcagtctaacatatcaagagactaaaaatattcatatcctttttactaattccactccaaggaatcaatctgaaagaaataatcag

SEQ ID NO: 22917 - DNA, 537 bp, Homo sapiens
gcctcctgaagtgctaggattacaagcatgagctactgcactcggccagtgcaaacacttctttgcgatccttcagtagccctcagtagtcctgtactcacaatcttatcggccctctgtggcaacaactccaggtctgccagcacaggtaggatccagctttcataccttcccagggcctgaactcggtcatgcagccattgtgtactccctgttttctgtactctctatcatccttccccagggcttcctctctctggaagcaccttggccattaaaccagcctggtggcctagaggacatcctactggaactaggatgtgattctcttaggccccctctctcagctgccctctctcaaaaagcaagctctccttggttctattaaaaatgtgtcggccgggcgtggtggctcatgcctgtaatcccagcactttgggaggctgaggcaggagaattgcttgggaggcagaggttgcagtgagccaagatcgcgccactgcactccagcctgggcgacagagcaagcctctgtct

SEQ ID NO: 22918 - DNA, 503 bp, Homo sapiens
attgttaaactctgtggtattttttttctttgtgtgtgttttatgagttagcattattttatagaaagatttagggatttattatttatattatttatattactattatttagattattctgacagtcttctgtgtcctcagacaagttagcagagcacagatataatacattagtcagaatttttccatttccgtgttcagattaatcttagaataatttttacctgtctttgttaacaggtattatgcttttaacttcttaactcctagtacatgagtaaaaggtagtaatcatgacatagccaaatgacagagtgcttgtatttgccacaaagcatgtagttccttgtaaatccttgagaaaggtaaattatctctctctctttttttgagatggagtctcgctccgtcgccaggctggagtgcggtgagccgagatggcaccattacactctaacctaggcaacaagagcaaaactctgtctcttaaacaaaaaaaaaa

SEQ ID NO: 22919 - DNA, 205 bp, Homo sapiens
atcttttcacatatttcagtgtattttttttatagatttaaaatatacctgaaaacttttctaggaagaataattattcatggaaagagcattgtaatggcatgttttggggagaaaagacatgccaagtcttgtttactacatttaagatgtttacaactatactgggctgctttattaacaatactgtacttgcataatatgg

SEQ ID NO: 22920 - DNA, 314 bp, Homo sapiens
tttttgttttttttttttcattttcaacagaagagagttgatttggtttggctgtgtccccacccaagtcttatcttgaattctagttcccataatcctcacatgtcatgggagggacctggtgggaggtaattgaatcatgagggtggtttctcccattctgttcttgtgataacgagttctcatgagatcttatggttttataagcatctggcatttcccctgcttgcactccttctctctcctgccgctgtgtgaagaggtgccttccaccatgattgtaaatttcctgaggcctccccagccctgtggaa

SEQ ID NO: 22921 - DNA, 502 bp, Homo sapiens
ggtggcggggaagagagagagagagagagagagaaacctatatggccagaggtttagttctctatgtaaattatcaatcctctttttcttcatctttgccagcctgtcctatatcaaatcagttcagccgaatcacagccagaaagacccctgtgcctagaacagggcgcatgtttgcttaattcacctccagacccactcctcagcccagtcttgtttgcaagcacccctccctcactcagcatgtctgggttagctttgcaaccacagagtcactggaggcaaagagtgccttaggtagcaggaggtgaaaagtgttccctgggaatgtcttttccacctgatccccattcccgagcatccttgggtcacccatggcctgcctccagtgggtgcagagggtagctccttccagagggcccaggtgctaatgacaggtcatggcatctgaagcctgggctggctcaggaggcagaagaaagtgagcaactgtggctcctgc

SEQ ID NO: 22922 - DNA, 433 bp, Homo sapiens
gatttaagccacagacattgcccaaattatagcctagcactaacaacactaacattaaagtaatagagtactctttagcttgctgttgtgatggatttttaaggaagcagtatttccttagaaaccacattaaaacctaccaattttgtgaacatttataagaatacatctgagtcatttttgttagagaaatattgaacactaaaactgtagcagttctaagatagagtgctgttaaatgttttgaacaacaggagtttattgcatagactgaactaataaaggactgaaataattttttaatgttatgaaaaatataattcttcagcgaactaaggtatttaaatactttgtatatcttgcaatacagttacttccattgcactgacttaaaaggatgtccctcattttgtaacttattgttttgataatg

SEQ ID NO: 22923 - DNA, 186 bp, Homo sapiens
aaaaatgtcattgtgcatgaaacatttctttatataggattattttctcaggatagatttccacattagtggaattactgggtcaaaatgaatgaagtttcaatacatgttgccaacccactttcccaaagatgatttgaattttcaccactgatttacgagaacacctcaacctcttcgctgtct

SEQ ID NO: 22924 - DNA, 2499 bp, Homo sapiens
ggcctgagagccgactgaggccttgtggactgcagtgggccctccggtccctctaaacccccaggcctcctctctgcttggtatctgtttgggattgaagaccgttggttccataaacctccatgaagatgggagtctacctgaagaggcagcggaggaggaaatggcaggtcctaatcaactctgcattcgccgctggactaccaagcatgtagctgtgtggctgaaggatgaaggcttttttgaatatgtggacattttatgcaataagcaccgacttgatggaatcacattgctaacattgactgaatatgatctccggtctcctcctctggaaatcaaagtcttaggggacattaaaaggttaatgctctcagtccgaaaattgcagaaaatacatattgatgttttagaagagatgggctacaacagtgacagtcccatgggttccatgacccctttcatcagtgctcttcagagtacagactggctctgtaatggggagctttcccatgactgtgacggacccataactgacttgaattctgatcagtaccagtacatgaatggtaaaaacaaacattctgttcgaagattggacccagaatactggaagactatactgagttgtatatatgtttttatagtatttggatttacatctttcattatggttatagtccatgagcgagtgcctgacatgcagacctatccaccactcccagatatattcttagacagcgttcctagaatcccatgggcctttgccatgacggaagtatgtggcatgattctgtgctatatttggctcctggttcttcttcttcacaagcacaggtcaatacttctgcgaaggctctgtagtctgatgggaactgtattcttgcttcgctgctttaccatgtttgtgacctccctctccgtgccaggacaacacctgcagtgtactggaaagatatatggcagtgtatgggagaaattacatcgagcctttgccatttggagtggctttggtatgaccctgactggcgttcacacatgtggagattacatgtttagtggccacacagtcgtcctaactatgctgaatttctttgtcaccgaatatacaccaagaagctggaatttcttgcacactttatcctgggttctcaacctctttggaatcttcttcatcttggctgcccatgaacattattctattgatgtgtttattgctttttatataacaacaagactctttttgtactaccatactctggccaataccagagcatatcagcagagtaggagagcaaggatttggtttcccatgttctctttttttgaatgcaatgttaatggcacagtacctaatgaatattgttggccattttcaaaaccagcaataatgaaaagactaattggatgaatactatctttctaatgaatttgtgattaaatatataatagttgttgaaaatgagtaactttgcgttctccccctaggttgttcttagatgcctggcttatgtgttgacaaagtaaagttttctgttctgagcaaagttatgattataaaaagcaagaaagaacaatcaagagtccttatgtagctatttgaacagaaagcttaagtagatgttttctgccccttctctttaggaagacttaatgttgtgattgaagtcaggctgtacccttacctgttgagtatttgcttattgaactttaaacaagtcaacttgagcagtttgctggttgaggaattttcattgatttccagtagggctctagtcaagaaataatatgttttgaagctccttattacctttagaagaagaaaccctaacaagtgacagtacttgttctttggactaatctttgtttcattttaaaaaatgcaaccctgggacatgatctgttttactgacaaagagtttttgccttctgaaccatctttaaatatactgagcataccaggatgcctgaaataagaagagaatgaaagaggccatagatgacgtgacagagtactggctaggatgccattggtctcctcattaatgcaaatgtagggctggcatatttcaccaaagatgcaacaaaagatgcagtgccagtgtgaccctcagtgagtattcatgagggaaaaatggctgcatccataaaaataaatgggcttaatgttagtggtataggtacccagaataacttctttgtgctatagttgttagatgacagttcaattttatgcttttttaatggtgttattaaatgagccaaataggagtgttttaccagatgttagataaagttcttaatgccgttaagtagggaggtatgcatgcaaagaattgttttctcctgaaaagaaacttacagcacgcaaaatataactttttggtttttgaaatttatcattcttggctgttggaagtaaacagtctcagacatacttggatatgaaaaagtttcgttgttttttacttttaaatataatggtgtatatacattctt

SEQ ID NO: 22925 - DNA, 2440 bp, Homo sapiens
ccggcgaggcggggagggccccggactccgacggcggctcggacgccgactcggaggtgggtccggggagcccgactcggaccgcggaggcagcggaggaggaaatggcaggtcctaatcaactctgcattcgccgctggactaccaagcatgtagctgtgtggctgaaggatgaaggcttttttgaatatgtggacattttatgcaataagcaccgacttgatggaatcacattgctaacattgactgaatatgatctccggtctcctcctctggaaatcaaagtcttaggggacattaaaaggttaatgctctcagtccgaaaattgcagaaaatacatattgatgttttagaagagatgggctacaacagtgacagtcccatgggttccatgacccctttcatcagtgctcttcagagtacagactggctctgtaatggggagctttcccatgactgtgacggacccataactgacttgaattctgatcagtaccagtacatgaatggtaaaaacaaacattctgttcgaagattggacccagaatactggaagactatactgagttgtatatatgtttttatagtatttggatttacatctttcattatggttatagtccatgagcgagtgcctgacatgcagacctatccaccactcccagatatattcttagacagcgttcctagaatcccatgggcctttgccatgacggaagtatgtggcatgattctgtgctatatttggctcctggttcttcttcttcacaagcacaggtcaatacttctgcgaaggctctgtagtctgatgggaactgtattcttgcttcgctgctttaccatgtttgtgacctccctctccgtgccaggacaacacctgcagtgtactggaaagatatatggcagtgtatgggagaaattacatcgagcctttgccatttggagtggctttggtatgaccctgactggcgttcacacatgtggagattacatgtttagtggccacacagtcgtcctaactatgctgaatttctttgtcaccgaatatacaccaagaagctggaatttcttgcacactttatcctgggttctcaacctctttggaatcttcttcatcttggctgcccatgaacattattctattgatgtgtttattgctttttatataacaacaagactctttttgtactaccatactctggccaataccagagcatatcagcagagtaggagagcaaggatttggtttcccatgttctctttttttgaatgcaatgttaatggcacagtacctaatgaatattgttggccattttcaaaaccagcaataatgaaaagactaattggatgaatactatctttctaatgaatttgtgattaaatatataatagttgttgaaaatgagtaactttgcgttctccccctaggttgttcttagatgcctggcttatgtgttgacaaagtaaagttttctgttctgagcaaagttatgattataaaaagcaagaaagaacaatcaagagtccttatgtagctatttgaacagaaagcttaagtagatgttttctgccccttctctttaggaagacttaatgttgtgattgaagtcaggctgtacccttacctgttgagtatttgcttattgaactttaaacaagtcaacttgagcagtttgctggttgaggaattttcattgatttccagtagggctctagtcaagaaataatatgttttgaagctccttattacctttagaagaagaaaccctaacaagtgacagtacttgttctttggactaatctttgtttcattttaaaaaatgcaaccctgggacatgatctgttttactgacaaagagtttttgccttctgaaccatctttaaatatactgagcataccaggatgcctgaaataagaagagaatgaaagaggccatagatgacgtgacagagtactggctaggatgccattggtctcctcattaatgcaaatgtagggctggcatatttcaccaaagatgcaacaaaagatgcagtgccagtgtgaccctcagtgagtattcatgagggaaaaatggctgcatccataaaaataaatgggcttaatgttagtggtataggtacccagaataacttctttgtgctatagttgttagatgacagttcaattttatgcttttttaatggtgttattaaatgagccaaataggagtgttttaccagatgttagataaagttcttaatgccgttaagtagggaggtatgcatgcaaagaattgttttctcctgaaaagaaacttacagcacgcaaaatataactttttggtttttgaaatttatcattcttggctgttggaagtaaacagtctcagacatacttggatatgaaaaagtttcgttgttttttacttttaaatataatggtgtatatacattctt

SEQ ID NO: 22926 - DNA, 750 bp, Homo sapiens
cccacacagggcaggcaccccacacagggcacagaccccacgcaccccacacggggcaggcagctcacacagggcccagaccccacgcaccccacacagggcacagaccccacgcaccccacacagggcacagaccccacacaccccacacagggcaggcacctcacacagggcacagaccccatgcatcccacacagggcaggcaccccacacagggcacagaccccacacaccccacacagggcaggcaccccacacagggcacagaccccacgcaccccacacagggcagggatcccacgcagggcacagatcccacgcagggcagggccagcccaaggccaggcccctcccctgtagatctcctcccaggcaggaccagagccacagtcacttccacactatctccttccctagaaacctctgcagactcttcctcctctcctcgatacacaggggcccctgccacagcctgactctctgccacctcgtgagtctctggaaagcagggtcggcctctgaatacagaggacttgggtcctgccggaggatgcttggccagtgggtgctggcacgtgagcagcccccggggagtcagagtggggctgcagcgaaggccgtggtggtcgaggtgagggtggtggccaggtcttgttgccgcagtgaggattctggggttaccctaagagccaccacattcaggcactcaagaaaaagcacgtcaaaataaaatattttcacctgattaa

SEQ ID NO: 22927 - DNA, 541 bp, Homo sapiens
gcggccgctccaacatcagaatggccccacacagggcaggcaccccacacagggcacagaccccacgcaccccacacagggcagggatcccacgcagggcacagatcccacgcagggcagggccagcccaaggccaggcccctcccctgtagatctcctcccaggcaggaccagagccacagtcacttccacactatctccttccctagaaacctctgcagactcttcctcctctcctcgatacacaggggcccctgccacagcctgactctctgccacctcgtgagtctctggaaagcagggtcggcctctgaatacagaggacttgggtcctgccggaggatgcttggccagtgggtgctggcacgtgagcagcccccggggagtcagagtggggctgcagcgaaggccgtggtggtcgaggtgagggtggtggccaggtcttgttgccgcagtgaggattctggggttaccctaagagccaccacattcaggcactcaagaaaaagcacgtcaaaataaaatattttcacctgattaa

SEQ ID NO: 22928 - DNA, 1218 bp, Homo sapiens
  misc_feature (816)..(816): n is a, c, g, or t
  misc_feature (823)..(823): n is a, c, g, or t
cccacacagggcaggcaccccacacagggcacagaccccacgcaccccacacggggcaggcagctcacacagggcccagaccccacgcaccccacacagggcacagaccccacgcaccccacacagggcacagaccccacacaccccacacagggcaggcacctcacacagggcacagaccccatgcatcccacacagggcaggcaccccacacagggcacagaccccacacaccccacacagggcaggcaccccacacagggcacagaccccacgcaccccacacagggcagggatcccacgcagggcacagatcccacgcagggcagggccagcccaaggccaggcccctcccctgtagatctcctcccaggcaggaccagagccacagtcacttccacactatctccttccctagaaacctctgcagactcttcctcctctcctcgatacacaggggcccctgccacagcctgactctctgccacctcgtgagtctctggaaagcagggtcggcctctgaatacagaggacttgggtcctgccggaggatgcttggccagtgggtgctggcacgtgagcagcccccggggagtcagagtggggctgcagcgaaggccgtggtggtcgaggtgagggtggtggccaggtcttgttgccgcagtgaggattctggggttaccctaagagccaccacattcaggcactcaagaaaaagcacgtcaaaataaaatattttcacctgattaaaaaaaaaaaaaaaaaaaaaaaaaaaaaaaaaaaaaaaaaaaaataaaaaaaaaaaaaaaaaataanttttggnccgattaggccaattaaattttagttttaagcaagcttatgcatccggccgtaattcaagctcgctgggacaattacccctataaagagttttttttctttccactggccgccgttttacattataaggccgggaaaatctttggggtggcccaatttaattgtcttgaggcaattccccttttagggggggggttaaaaaaaaagggccccccttttacccctttcaaaagttaaaccctggattgccaaaataaatggggggggaaaaactcctttttaaagggggtgaaattttgaaaaggacgccttttttacccttaaaaaaaatggggaaaatttggtaaataaaatgaaaggccctattttttaaaaattgcccaattttgaaacgtg

SEQ ID NO: 22929 - DNA, 378 bp, Homo sapiens
tgcggaatgccaacgtaacaaagtccaagtcaaaggtcaagctgtgcactaaaatctctcaagtcacccgcttggccctcttccaaatgtactttacttcctttcattcctgctctaaaactttttaataaactttcactcctgctgtaaaacttgcatcggtctctcctgccttatgcccctcagtctaagtctttcttctgaggaggcaaaaattgaggttgctgcagacctgtccagatttgccacgctaacaacacagcatactgaacttgactctgaaataagagaagctggcctgagtaagacttagaaatacagaggaaaaatgatatgattgcctacttgtagtataaacatatactttgtggagataaa

SEQ ID NO: 22930 - DNA, 570 bp, Homo sapiens
tgacttgctgaaaaatagaaaccagatgggaagtatattagcattatgattgaaataagggtaaatgagcaatgtgtgaaggttttcactgacttcacctaaaagatagtttagctacttgaattttagtaaatagaatttttcctttatttcatcggtccccccaccttttttttttttttgcacctgccttgtaaatttaatagttaagtgacctctgcctagaggatgatatttggggaggtttgatgtttcctgtgggaataagacgattcacaggtgagagtggggccacattagctgttattgtttccatgggtcagtgtggaaaatggattaatcatattctaaacgttcatggacctcattacagtcacaattgtctattctgtttcctaccctgaacacattaaaatggtaggaactaatgccttatttaattactaaaagccaccattttctttgatagattgagctacagattgtaaacttcatgtatttctttataagtcaacccttttcaaagatatgcacatcaaactgaatgaataaataaatattgagaagttg

SEQ ID NO: 22931 - DNA, 1231 bp, Homo sapiens
  misc_feature (1231)..(1231): n is a, c, g, or t
tctgaccagcaccatggcggtggcaagaacaagcgccttacgaaaggcggcaaaaagggagccaagaagaaagtggttgatccattttctaagaaagattggtatgatgtgaaagcacctgctatgttcaatataagaaatattggaaagacgctcgtcaccaggacccaaggaaccaaaattgcatctgatggtctcaagggtcgtgtgtttgaagtgagtcttgctgatttgcagaatgatgaagttgcatttagaaaattcaagctgattactgaagatgttcagggtaaaaactgcctgactaacttccatggcatggatcttacccgtgacaaaatgtgttccatggtcaaaaaatggcagacaatgattgaagctcacgttgatgtcaagactaccgatggttacttgcttcgtctgttctgtgttggttttactaaaaaacgcaacaatcagatacggaagacctcttatgctcagcaccaacaggtccgccaaatccggaagaagatgatggaaatcatgacccgagaggtgcagacaaatgacttgaaagaagtggtcaataaattgattccagacagcattggaaaagacatagaaaaggcttgccaatctatttatcctctccatgatgtcttcgttagaaaagtaaaaatgctgaagaagcccaagtttgaattgggaaagctcatggagcttcatggtgaaggcagtagttctggaaaagccactggggacgagacaggtgctaaagttgaacgagctgatggatatgaaccaccagtccaagaatctgtttaaagttcagacttcaaatagtggcaaataaaaagtgctatttgtgaaaaaaaaaaaaacaaaaaaaaaaaaaaaaaaaaaaaaaaaaaaaaaaaaaaaaaaaaaaaaaaaaaaaaaaaaaaaaaaaaaaaaagaaaaaaaaataaaaaaaaaaagaggggggggccgccgcaattaatgtatttctctaggtgggagggacgctagagattgaaatcgaccacacgagatttgttgatatcacaggagggggacccctcaattgagtagcgattcgtttagaatagactgacacggctggcgtcgcttaattaacgacgctcgggtgacgtgagcagaaaaattaggttcatcgatcgtatattcttggagcaaagccaccatttaggcgggtggaaggaaatataggtgggaagaagacacatan

SEQ ID NO: 22932 - DNA, 547 bp, Homo sapiens
agtttgttttgtctcagcataaatcataggatcgacatctattagtcaaataggcaaactgttcccatctttcaccctgtcagaccattagaagatgggccacagcaacattttttttttcgttttccaaatccaaaatgaaatttggaaaaagctgctaattagaattcttctccaaacccagttaaaactgagaactacttattctgtcataaaaacttatgagagatttcctaagtctatatacatacagagatatagttctgcttgtgataagttggaaagagtgcatcgttttatgagttggcaagaatatacttgatcttagccaaaaggcccagaagtgatgacttggcaagaataaatgcttagcgtttacttattcatgaagcatttacaggccaggcaaggtggcttatgcctgtaatcccagggctttggaaagccaaggtgggagaatcacttgaggccaggagttcaaggttacagtgaggtatgtcatgccactgcactctagcctgggtgacagagtgagaccctgactctt

SEQ ID NO: 22933 - DNA, 516 bp, Homo sapiens
gctggtcagttctgctctaggccagctcagctgattttagtggtcacctggcagctaggttgaagccgggttgacggccgcattcacatatctgatggttgtcctgatgttatctgggcccacagggtgacttggctacgtgtccataattatctagctggctagcctgggcttgttcacagtggtggttgcagggttcctaaaagcagcagaagagggctggccccagtgtgcaaagcacctcttaagccactgcttgcacaacatttgctcttgtcctgttggccaaagcaagttacatggctaagtccacagtcattgtgggcagggcctacccaaagatgtggatgcaaagaagctgagcaaattagggttcgtttctgcaacactcctccataacatacattcagaaaagcattcacccataatattacagtggggtgccattcacagatgggacacccatgtagccagcacccaaatccagcaatggaaacatgaccagcctgccagaat

SEQ ID NO: 22934 - DNA, 508 bp, Homo sapiens
caaactccagcctgccctgcctgtctcctgcaggcggctacctctgggcaggtgcaggtttcagggtgcatatggaggggaagtgatggtgggggtaccccgtgtttgcagagctggcgggagaccacggcattcctatggcccatgtcccctcacccccgcccccctgccccagcgctgctgaacctcgacgtgtgtgtctgaaggtctccatccgtgcctctccagacgttgcccaccttcccctttgctgggcagtttgtgtaacgcggccagcaggcaccgcgaggccttgcttcctcacctctcgcccgctgtcggagctccatgagttgagcttgactgtccggggagtggagccacctctagcaggtacctgggtgtacctgttatcacccatctgtcagctgccgctagacagcggagggagcccagcatgggggagagaggggacactcagagggttgtctgagcagaggtggttctttcagaatcagaggaaggttgt

SEQ ID NO: 22935 - DNA, 413 bp, Homo sapiens
gtcacggttgatcttgtttatactctattcgcacgcctatttccctaccttcctacccccaactcacctgatgtacttagaagcaagttgtgggcagcattttgatatctacttcaaaaacttaaaaaattttttttttctatagtactgtttttttttcttaacttttaaaactttgttaatcccagaactttgggaggccgaggtgggtggatcatgaggtcaggagattgagaccatcctggctaacatggtgaaaccccgtctctactaaaaatacaaaaaattagccaggcatggtggcacatgcctgtagtcccagctactccggaggctgaggcaggagaatggcatgaacccgggaggcggagcttgcagtgagccgagatcgcaccactgcactccagcctggg

SEQ ID NO: 22936 - DNA, 445 bp, Homo sapiens
gaatgaaaatgttagaattctatgacaagccgtaggttataatggaactaattctggaccaagaatcaggagtcctgagtcctggctcttagaaaggaattgtagtatgcagtatttaaagaatgtagactttggattagtgacacagctttaaatctcagctcttttgtgtagctgtataataattgtataaatttaagcaaattggttaacattttagggccatgtataaaatatgaccagtaaattcctgtcttttcaagttgttaggagtaaatgagacaacatgaagtacaaagatgctacactatgtgatagtgattaaaatactgtaaatttgagctggtccgaaggtagtgagttaactcaattgattatgtagtcagtaacagatcgaacttgttctattctgttgccccccttttcactattgcactcgactagt

SEQ ID NO: 22937 - DNA, 413 bp, Homo sapiens
tttagtaatatacttgtcaaacctaagaaacacattagtacatcactaattaactaaactccagacttcgatcagttggtgaacatggtgtttttcaggctgcctctctgtaaagccatgatttcccctttccctactcttctttggaggcaagtcactaaccctagcccaccctcaaggggaggaggggaggaactaaggtctgtttcctgtagggaccagcgtctacatatattatttagaattgtattgaaagaaatatctcactcaccctaacttttaaaaagatacaatgggatatgatatgatttatggcctggacaagatcgtatagacttgtttctttctgctcttctctgttaaatatgataataaacgctggaaatagcacaagaggcaaccaaaagagaatg

SEQ ID NO: 22938 - DNA, 456 bp, Homo sapiens
ccttcatgaagacttccatgaatacaatgaagatagaaaaggaaaagcttgagttgtttgaaatcatgtaatgtaattgtctttcccagaaactgactgtcgttttctcttacgcacagcgggttgaggtatggaatatgaattggatgagatgtttatctctgatgaatacatgttgactggtgtgagtaattgctgcctaggaaaaggactttaatctccttcatacctcctgggtaaattctgctgatttagtaggaggaaggaaaatttagagacaattgggtgtgttggaaatcaacttggtcagcacaatagcccagaagtcaagaattgaggagtatttccagggcttaccattgactctcttgggatcacatcagttaataatttctattactactccgagggcactcatgagcagcagaaatcacctctgtcaaaatagctctgtga

SEQ ID NO: 22939 - DNA, 424 bp, Homo sapiens
tcaaaagatgaaaactgcagagcgatttcaaagcccgtcagctgtttggcattgagacaactaaaattctgtaagaagggcaaatggggtcaaaacacaaaaggaaatacaatattgcctttaacaacggcaactatttctgaggcaaaatgtcacatgtcacctctgtgaaactttaggatagaagcaaatacagatgagtgaggttcctgcagctcatctctgtgaacatggattgttggagaacccgcagcccgctcgggtaaccaacaggaaactggccaggagcaagcctatcaatcaaatcatccactctaacctgccagaagggttctctaaaagagtttttaaaacttaaggcaaaggaaactcagcagtcatatatttatctgaattttcaagaagttttgactaagaactgctc

SEQ ID NO: 22940 - DNA, 246 bp, Homo sapiens
catgtgtcagaacccatagagctatacaacatacagagtgcactctaatgtaaacaatggactttagttcataataatgtaccaatattggttcatcaactgtaagaaatgtacaactcaaacgcagatgttactaatagaactgtgagagagtagagaggggttatatgagaactctattcctatctcctcgatttttttcataaatctaaaactgctctgaaaatagtgtgcgaaaatgtcatt

SEQ ID NO: 22941 - DNA, 409 bp, Homo sapiens
tgtataaccttccattgaatacttcaattttattgaaatttattttttaaaatacctaaggattgtctttaaaaaatctctattagttgatcaaaataactgttaggaacaaaatgaagctacttctatttgtgttggaaattttaataatgaggcaaaataatattattgaaatatatctactatataaaacatttttcctatagaaaaaatgtagttataaggatttgaaaaattaagttattggaaatttactctacaactgctagatagatgaaaatttgaaaaataacagaatgccttcttcctccctttcccattttttgacccctggcaactactgatctgtgtccatctctatcattttatcatttcaagaatgttacatgagtaaaatcatacactatgt

SEQ ID NO: 22942 - DNA, 1414 bp, Homo sapiens
cccgccccggacacaaagctgctccgcgggagcccgcctcacctgcagcacggggcgccgcgggccttcgagaaccatcggaccccgctccggcgcgcgcgtcacagcccaggcctcccggagccgcccggcgccgccgcccccgccgccatttcctcgcgctcgccgtcgcctcgtccccgctgtcaggttactccattcacctgggcctgcagcagcctgcgccgcgcctccgcctcgacccctcccgccggcgcctgcggagactgcgcagcgcccggctggccggcagccagcgcacggcccgcggcaacggcgcacagccgcttggagaatcccactggctcccgcaccgcccctccgcgcccccacgctccgctcgccccgtggcggcatgagagcgagcctgtgattggacagggcctggcggtgaaaggttaatcccggccccccagccactcaggagcagggagacagcgggcgcgcgcgcggaggccggagaggcgtttgcggcccagcgcctggactggaccttggcgttgggccgcagttgcccggagtttttggggcccccgggaacccgcgcgccgaggccggctaagtttggcagactctctgagctctcggaattcgactgcctccattgttgctccttctggcacccacagaccgtaacgtggccgtaattgtttcccggagagcttagcttccctctgagcacctccctcccctttttaaagtaccttcccactcgcctgcgtttcctcgcgttagtggtgcaggggcctccgcatttggggaaataacaaacacccacttccgccccccaccccaaccgggatccccagataatgagaaatagatggtggccctctgtttgtaagctgttcatttgcataggtcggaaccgcgcaccacagcttgaagctaggaattaaaatatcggtgggaattaaataagtggctggcttaaagaacatcttcttaatttatccccaaatgtagacatctcttcagtggaccccctgataggccggtttgctccaggtgaggtgtgctcacagcaactgcaaccgtgtttctttcagaccatgggcgtgagcagaacctactatgcgcccctgctgcctgggctgtgctgttcagtttggggccaccagccccacatggctcctgagcacttaaagtatggctagtcggaatcgagatatatgcattctttaccaaataatgttcaaaaaattgttacatgttgaagtgataaactttttccatatattgggataaaagttttatatgtttattttttagtgtgggttctacagaattttaaatgtcacctgtggcctgcattatattgccattgggcaggctgatctagggcttgcatgcctgtgatccttaggtgcaccct

SEQ ID NO: 22943 - DNA, 1637 bp, Homo sapiens
cccgccccggacacaaagctgctccgcgggagcccgcctcacctgcagcacggggcgccgcgggccttcgagaaccatcggaccccgctccggcgcgcgcgtcacagcccaggcctcccggagccgcccggcgccgccgcccccgccgccatttcctcgcgctcgccgtcgcctcgtccccgctgtcaggttactccattcacctgggcctgcagcagcctgcgccgcgcctccgcctcgacccctcccgccggcgcctgcggagactgcgcagcgcccggctggccggcagccagcgcacggcccgcggcaacggcgcacagccgcttggagaatcccactggctcccgcaccgcccctccgcgcccccacgctccgctcgccccgtggcggcatgagagcgagcctgtgattggacagggcctggcggtgaaaggttaatcccggccccccagccactcaggagcagggagacagcgggcgcgcgcgcggaggccggagaggcgtttgcggcccagcgcctggactggaccttggcgttgggccgcagttgcccggagtttttggggcccccgggaacccgcgcgccgaggccggctaagtttggcagactctctgagctctcggaattcgactgcctccattgttgctccttctggcacccacagaccgtaacgtggccgtaattgtttcccggagagcttagcttccctctgagcacctccctcccctttttaaagtaccttcccactcgcctgcgtttcctcgcgttagtggtgcaggggcctccgcatttggggaaataacaaacacccacttccgccccccaccccaaccgggatccccagataatgagaaatagatggtggccctctgtttgtaagctgttcatttgcataggtcggaaccgcgcaccacagcttgaagctaggaattaaaatatcggtgggaattaaataagtggctggcttaaagaacatcttcttaatttatccccaaatgtagacatctcttcagtggaccccctgataggccggtttgctccagaagagacggggtttcaccatgttggccatgatggtctcgatttctgaccttgtcatccgtccgccttggcctcccaaagtgctgggattacgggcgtgagccaccgtacccagcctgcttcctgttttaacagacgaagaaatggaataacttccaacaacacaggttggagctgaaggagtgcccaggctgcggatggaggaaggacgtgctcgggagaaggtgaagatgggagagaagcaagatcttctgtgtttggaccaaggacacatttccttactccatagcagctgtggtcagtggcttagctcggacaaggagatgagagcccatgtgttgtgagggttcttctgggaactctgagaaggcaggagccgcccccgcccttcactgcctctcttccattctgcagcatggaatatggatgtgtggtctggatgtacagacaccattttggaccataaagacaaggacgattgtctaaggatgacacagccagagcactgagagtggcgagaaggacaggggagctgctgtgccaagcaggactgtctctcttaagagaaaaataaaatttattggtgtttaaa

SEQ ID NO: 22944 - DNA, 1303 bp, Homo sapiens
cccgccccggacacaaagctgctccgcgggagcccgcctcacctgcagcacggggcgccgcgggccttcgagaaccatcggaccccgctccggcgcgcgcgtcacagcccaggcctcccggagccgcccggcgccgccgcccccgccgccatttcctcgcgctcgccgtcgcctcgtccccgctgtcaggttactccattcacctgggcctgcagcagcctgcgccgcgcctccgcctcgacccctcccgccggcgcctgcggagactgcgcagcgcccggctggccggcagccagcgcacggcccgcggcaacggcgcacagccgcttggagaatcccactggctcccgcaccgcccctccgcgcccccacgctccgctcgccccgtggcggcatgagagcgagcctgtgattggacagggcctggcggtgaaaggttaatcccggccccccagccactcaggagcagggagacagcgggcgcgcgcgcggaggccggagaggcgtttgcggcccagcgcctggactggaccttggcgttgggccgcagttgcccggagtttttggggcccccgggaacccgcgcgccgaggccggctaagtttggcagactctctgagctctcggaattcgactgcctccattgttgctccttctggcacccacagaccacatctcttcagtggaccccctgataggccggtttgctccagaagagacggggtttcaccatgttggccatgatggtctcgatttctgaccttgtcatccgtccgccttggcctcccaaagtgctgggattacgggcgtgagccaccgtacccagcctgcttcctgttttaacagacgaagaaatggaataacttccaacaacacaggttggagctgaaggagtgcccaggctgcggatggaggaaggacgtgctcgggagaaggtgaagatgggagagaagcaagatcttctgtgtttggaccaaggacacatttccttactccatagcagctgtggtcagtggcttagctcggacaaggagatgagagcccatgtgttgtgagggttcttctgggaactctgagaaggcaggagccgcccccgcccttcactgcctctcttccattctgcagcatggaatatggatgtgtggtctggatgtacagacaccattttggaccataaagacaaggacgattgtctaaggatgacacagccagagcactgagagtggcgagaaggacaggggagctgctgtgccaagcaggactgtctctcttaagagaaaaataaaatttattggtgtttaaa

SEQ ID NO: 22945 - DNA, 1713 bp, Homo sapiens
tgcatatgatcgtaatgatcagccaggcttacatatagagcagagtgactgctctatattctccactgatactctggcatttattataaaaagttgaaggatggcagttaaattgttcagcatatcccaagaatatcttttccctttgaagaagagtggcctccctattctttgcaattccaagaattaaaagtacagataaatactacaaattggctccctttgccttgtttcctataaacctgttttgtttgtcccacagaggaggaagatgactatctctttgatgatcctctgccaatacctttaaggcacaaagttccatacccggaaacttttcaccctgaggtattttcaatgactgcagtatcagaaaagcagcctgaaaaactgagacaaaccccaggatgctgcagagcagagtgtatgcagagctctcgtttcacaaactttgtagattgtgaagaatccaacagtgaaagtgaagaagaagtaggaatcccagcttcactgcaaggagatctgggctctgtacttcacctgcaaaaggctgatggggatgtaccccagtgggaagtattctttaaaagaaatgatgaaatcacagatgagagtttggaaaacttcccttcctccacagtggcagggggatctcagtcaccaaagcttttcagtgactctgatggagaatcaactcacatctcctcccagaattcttcccagtcaacacacataacagaacaaggaagtcaaggctgggacagccaatctgatactgttttgttatcttcccaagagagaaacagtggggatattacttccttggacaaagctgactacagaccaacaatcaaagagaatattcctgcctctctcatggaacaaaatgtaatttgcccaaaggatacttactctgatttgaaaagcagagataaagatgtgacaatagttcctagtactggagaaccaactactctaagcagtgagacacatatacccgaggaaaaaagtttgctaaatcttagcacaaatgcagattcccagagctcttctgattttgaagttccctcaactccagaagctgagttacctaaacgagagcatttacaatatttatatgagaagctggcaactggtgagagtatagcagtcaaaaaaagaaaatgctcactcttagatacctaagaattcaaagcgtttcaacctagagcaaccactaaaaaacctgcacagagatgacagtcaatattacaatagagaaaatacagtacttaaaaatgttcaaataacctggttgggtgtggtggctcacacttgtaatcccagcactttgaggtgggcaatggcttgagcccaggagttcgacaccagcctggccaacacagtgaaatgtgtctctacttacaaaaaaaaaaaaaaaaaaaaagccaggcatggtggtgggctactctggaggcccttgaggaccacttgagcccaggagattgaggctgcagtgagccatgactgtgccactgcacctctagtctgggtgacagagcaagaccctgtttaaaaaagaaaaaggccaggcacggtggctcatgcctgtaatcccagctacgcaggaggccaaggcaggagaatcacttgaacctgggaggtggtggttgcagtgagctgagattgtgtcattgcactccagcctgggcaacaagagcaaaactctgtctc

SEQ ID NO: 22946 - DNA, 1865 bp, Homo sapiens
gcatatgctttggtgtcatatctaagaaactatttgatccaagatcatgaaaattgactcccatgttacataattttacagtcagttttgactgtatcttcctgcttcttgaatttctgataatttgtttttgaatgccatacattctgaattttacctttttaggtcctgcataattttgggatttctaaaaacattcttgagctttgttctggcatgtggttagcatgtttatagtttgatcttttcgtgtcttttacctttgttatgcaggaacagagtagcatttagtatatggttaattttccccactactgaggcaaggctcttcttggttcttttacaaatgcccatggatcatgaggttttccactctggctgttgggaccaggacaagacactgttcctggcacgaggaggaagatgactatctctttgatgatcctctgccaatacctttaaggcacaaagttccatacccggaaacttttcaccctgaggtattttcaatgactgcagtatcagaaaagcagcctgaaaaactgagacaaaccccaggatgctgcagagcagagtgtatgcagagctctcgtttcacaaactttgtagattgtgaagaatccaacagtgaaagtgaagaagaagtaggaatcccagcttcactgcaaggagatctgggctctgtacttcacctgcaaaaggctgatggggatgtaccccagtgggaagtattctttaaaagaaatgatgaaatcacagatgagagtttggaaaacttcccttcctccacagtggcagggggatctcagtcaccaaagcttttcagtgactctgatggagaatcaactcacatctcctcccagaattcttcccagtcaacacacataacagaacaaggaagtcaaggctgggacagccaatctgatactgttttgttatcttcccaagagagaaacagtggggatattacttccttggacaaagctgactacagaccaacaatcaaagagaatattcctgcctctctcatggaacaaaatgtaatttgcccaaaggatacttactctgatttgaaaagcagagataaagatgtgacaatagttcctagtactggagaaccaactactctaagcagtgagacacatatacccgaggaaaaaagtttgctaaatcttagcacaaatgcagattcccagagctcttctgattttgaagttccctcaactccagaagctgagttacctaaacgagagcatttacaatatttatatgagaagctggcaactggtgagagtatagcagtcaaaaaaagaaaatgctcactcttagatacctaagaattcaaagcgtttcaacctagagcaaccactaaaaaacctgcacagagatgacagtcaatattacaatagagaaaatacagtacttaaaaatgttcaaataacctggttgggtgtggtggctcacacttgtaatcccagcactttgaggtgggcaatggcttgagcccaggagttcgacaccagcctggccaacacagtgaaatgtgtctctacttacaaaaaaaaaaaaaaaaaaaaagccaggcatggtggtgggctactctggaggcccttgaggaccacttgagcccaggagattgaggctgcagtgagccatgactgtgccactgcacctctagtctgggtgacagagcaagaccctgtttaaaaaagaaaaaggccaggcacggtggctcatgcctgtaatcccagctacgcaggaggccaaggcaggagaatcacttgaacctgggaggtggtggttgcagtgagctgagattgtgtcattgcactccagcctgggcaacaagagcaaaactctgtctc

SEQ ID NO: 22947 - DNA, 2636 bp, Homo sapiens
gcttcccggaagtggcggcgcggtcagggctggccttggcttcagctgcggttttggggtcccggactctgggatcggcggcgctatgagttctttcgaggggcagatggccgagtatccaactatctccatagaccgcttcgatagggagaacctgagggcccgcgcctacttcctgtcccactgccacaaagatcacatgaaaggattaagagcccctaccttgaaaagaaggttggagtgcagcttgaaggtttatctatactgttcacctgtgactaaggagttgttgttaacgagcccgaaatacagattttggaagaaacgaattatatctattgaaatcgagactcctacccagatatctttagtggatgaagcatcaggagaggtttttatttcagggcaataatggaactgtcctgtacacaggagacttcagattggcgcaaggagaagctgctagaatggagcttctgcactccgggggcagagtcaaagacatccaaagtgtatatttggatactacgttctgtgatccaagattttaccaaattccaagtcgggaggagtgtttaagtggagtcttagagctggtccgaagctggatcactcggagcccgtaccatgttgtgtggctgaactgcaaagcggcttatggctatgaatatctgttcaccaaccttagtgaagaattaggagtccaggttcatgtgaataagctagacatgtttaggaacatgcctgagatccttcatcatctcacaacagaccgcaacactcagatccatgcatgccggcatcccaaggcagaggaatattttcagtggagcaaattaccctgtggaattacttccagaaatagaattccactccacataatcagcattaagccatccaccatgtggtttggagaaaggagcagaaaaacaaatgtaattgtgaggactggagagagttcatacagagcttgtttttcttttcactcctcctacagtgagattaaagatttcttgagctacctctgtcctgtgaacgcatatccaaatgtcattccagttggcacaactatggataaagttgtcgaaatcttaaagcctttatgccggtcttcccaaagtacggagccaaagtataaaccactgggaaaactgaagagagctagaacagttcaccgagactcagaggaggaagatgactatctctttgatgatcctctgccaatacctttaaggcacaaagttccatacccggaaacttttcaccctgaggtattttcaatgactgcagtatcagaaaagcagcctgaaaaactgagacaaaccccaggatgctgcagagcagagtgtatgcagagctctcgtttcacaaactttgtagattgtgaagaatccaacagtgaaagtgaagaagaagtaggaatcccagcttcactgcaaggagatctgggctctgtacttcacctgcaaaaggctgatggggatgtaccccagtgggaagtattctttaaaagaaatgatgaaatcacagatgagagtttggaaaacttcccttcctccacagtggcagggggatctcagtcaccaaagcttttcagtgactctgatggagaatcaactcacatctcctcccagaattcttcccagtcaacacacataacagaacaaggaagtcaaggctgggacagccaatctgatactgttttgttatcttcccaagagagaaacagtggggatattacttccttggacaaagctgactacagaccaacaatcaaagagaatattcctgcctctctcatggaacaaaatgtaatttgcccaaaggatacttactctgatttgaaaagcagagataaagatgtgacaatagttcctagtactggagaaccaactactctaagcagtgagacacatatacccgaggaaaaaagtttgctaaatcttagcacaaatgcagattcccagagctcttctgattttgaagttccctcaactccagaagctgagttacctaaacgagagcatttacaatatttatatgagaagctggcaactggtgagagtatagcagtcaaaaaaagaaaatgctcactcttagatacctaagaattcaaagcgtttcaacctagagcaaccactaaaaaacctgcacagagatgacagtcaatattacaatagagaaaatacagtacttaaaaatgttcaaataacctggttgggtgtggtggctcacacttgtaatcccagcactttgaggtgggcaatggcttgagcccaggagttcgacaccagcctggccaacacagtgaaatgtgtctctacttacaaaaaaaaaaaaaaaaaaaaagccaggcatggtggtgggctactctggaggcccttgaggaccacttgagcccaggagattgaggctgcagtgagccatgactgtgccactgcacctctagtctgggtgacagagcaagaccctgtttaaaaaagaaaaaggccaggcacggtggctcatgcctgtaatcccagctacgcaggaggccaaggcaggagaatcacttgaacctgggaggtggtggttgcagtgagctgagattgtgtcattgcactccagcctgggcaacaagagcaaaactctgtctc

SEQ ID NO: 22948 - DNA, 2692 bp, Homo sapiens
gcttcccggaagtggcggcgcggtcagggctggccttggcttcagctgcggttttggggtcccggactctgggatcggcggcgctatgagttctttcgaggggcagatggccgagtatccaactatctccatagaccgcttcgatagggagaacctgagggcccgcgcctacttcctgtcccactgccacaaagatcacatgaaaggattaagagcccctaccttgaaaagaaggttggagtgcagcttgaaggtttatctatactgttcacctgtgactaaggagttgttgttaacgagcccgaaatacagattttggaagaaacgaattatatctattgaaatcgagactcctacccagatatctttagtggatgaagcatcaggagagaaggaagagattgttgtgactctcttaccagctggtcactgtccgggatcagttatgtttttatttcagggcaataatggaactgtcctgtacacaggagacttcagattggcgcaaggagaagctgctagaatggagcttctgcactccgggggcagagtcaaagacatccaaagtgtatatttggatactacgttctgtgatccaagattttaccaaattccaagtcgggaggagtgtttaagtggagtcttagagctggtccgaagctggatcactcggagcccgtaccatgttgtgtggctgaactgcaaagcggcttatggctatgaatatctgttcaccaaccttagtgaagaattaggagtccaggttcatgtgaataagctagacatgtttaggaacatgcctgagatccttcatcatctcacaacagaccgcaacactcagatccatgcatgccggcatcccaaggcagaggaatattttcagtggagcaaattaccctgtggaattacttccagaaatagaattccactccacataatcagcattaagccatccaccatgtggtttggagaaaggagcagaaaaacaaatgtaattgtgaggactggagagagttcatacagagcttgtttttcttttcactcctcctacagtgagattaaagatttcttgagctacctctgtcctgtgaacgcatatccaaatgtcattccagttggcacaactatggataaagttgtcgaaatcttaaagcctttatgccggtcttcccaaagtacggagccaaagtataaaccactgggaaaactgaagagagctagaacagttcaccgagactcagaggaggaagatgactatctctttgatgatcctctgccaatacctttaaggcacaaagttccatacccggaaacttttcaccctgaggtattttcaatgactgcagtatcagaaaagcagcctgaaaaactgagacaaaccccaggatgctgcagagcagagtgtatgcagagctctcgtttcacaaactttgtagattgtgaagaatccaacagtgaaagtgaagaagaagtaggaatcccagcttcactgcaaggagatctgggctctgtacttcacctgcaaaaggctgatggggatgtaccccagtgggaagtattctttaaaagaaatgatgaaatcacagatgagagtttggaaaacttcccttcctccacagtggcagggggatctcagtcaccaaagcttttcagtgactctgatggagaatcaactcacatctcctcccagaattcttcccagtcaacacacataacagaacaaggaagtcaaggctgggacagccaatctgatactgttttgttatcttcccaagagagaaacagtggggatattacttccttggacaaagctgactacagaccaacaatcaaagagaatattcctgcctctctcatggaacaaaatgtaatttgcccaaaggatacttactctgatttgaaaagcagagataaagatgtgacaatagttcctagtactggagaaccaactactctaagcagtgagacacatatacccgaggaaaaaagtttgctaaatcttagcacaaatgcagattcccagagctcttctgattttgaagttccctcaactccagaagctgagttacctaaacgagagcatttacaatatttatatgagaagctggcaactggtgagagtatagcagtcaaaaaaagaaaatgctcactcttagatacctaagaattcaaagcgtttcaacctagagcaaccactaaaaaacctgcacagagatgacagtcaatattacaatagagaaaatacagtacttaaaaatgttcaaataacctggttgggtgtggtggctcacacttgtaatcccagcactttgaggtgggcaatggcttgagcccaggagttcgacaccagcctggccaacacagtgaaatgtgtctctacttacaaaaaaaaaaaaaaaaaaaaagccaggcatggtggtgggctactctggaggcccttgaggaccacttgagcccaggagattgaggctgcagtgagccatgactgtgccactgcacctctagtctgggtgacagagcaagaccctgtttaaaaaagaaaaaggccaggcacggtggctcatgcctgtaatcccagctacgcaggaggccaaggcaggagaatcacttgaacctgggaggtggtggttgcagtgagctgagattgtgtcattgcactccagcctgggcaacaagagcaaaactctgtctc

SEQ ID NO: 22949 - DNA, 3099 bp, Homo sapiens
gcttcccggaagtggcggcgcggtcagggctggccttggcttcagctgcggttttggggtcccggactctgggatcggcggcgctatgagttctttcgaggggcagatggccgagtatccaactatctccatagaccgcttcgatagggagaacctgagggcccgcgcctacttcctgtcccactgccacaaagatcacatgaaaggattaagagcccctaccttgaaaagaaggttggagtgcagatgaggaaactgaggaaccagagaggttaaattagttgcccagtgtcacacagccagtaagtggcaggaccaggattccagccagcttgaaggtttatctatactgttcacctgtgactaaggagttgttgttaacgagcccgaaatacagattttggaagaaacgaattagcagtcacaacagcagggttgttcctgttgtctctggcattcagcttgaagttactacaggtcagcccggccagcagtcaggaaggaaagctggaagagaagtggaggggaacagagacaaactggaaggcagaatggcccactaggacagaccgaaacccacttctgtctctcacttcctctggcctcaatagtgctggtctcccgctttggctctgaagcacatgcacctgccccaggactcggaggagctgcacacgggcacccagcagaagctgatgttgctgcggccctgccccagactctgagttaagccagaagatatctattgaaatcgagactcctacccagatatctttagtggatgaagcatcaggagagaaggaagagattgttgtgactctcttaccagctggtcactgtccgggatcagttatgtttttatttcagggcaataatggaactgtcctgtacacaggagacttcagattggcgcaaggagaagctgctagaatggagcttctgcactccgggggcagagtcaaagacatccaaagtgtatatttggatactacgttctgtgatccaagattttaccaaattccaagtcgggaggagtgtttaagtggagtcttagagctggtccgaagctggatcactcggagcccgtaccatgttgtgtggctgaactgcaaagcggcttatggctatgaatatctgttcaccaaccttagtgaagaattaggagtccaggttcatgtgaataagctagacatgtttaggaacatgcctgagatccttcatcatctcacaacagaccgcaacactcagatccatgcatgccggcatcccaaggcagaggaatattttcagtggagcaaattaccctgtggaattacttccagaaatagaattccactccacataatcagcattaagccatccaccatgtggtttggagaaaggagcagaaaaacaaatgtaattgtgaggactggagagagttcatacagagcttgtttttcttttcactcctcctacagtgagattaaagatttcttgagctacctctgtcctgtgaacgcatatccaaatgtcattccagttggcacaactatggataaagttgtcgaaatcttaaagcctttatgccggtcttcccaaagtacggagccaaagtataaaccactgggaaaactgaagagagctagaacagttcaccgagactcagaggaggaagatgactatctctttgatgatcctctgccaatacctttaaggcacaaagttccatacccggaaacttttcaccctgaggtattttcaatgactgcagtatcagaaaagcagcctgaaaaactgagacaaaccccaggatgctgcagagcagagtgtatgcagagctctcgtttcacaaactttgtagattgtgaagaatccaacagtgaaagtgaagaagaagtaggaatcccagcttcactgcaaggagatctgggctctgtacttcacctgcaaaaggctgatggggatgtaccccagtgggaagtattctttaaaagaaatgatgaaatcacagatgagagtttggaaaacttcccttcctccacagtggcagggggatctcagtcaccaaagcttttcagtgactctgatggagaatcaactcacatctcctcccagaattcttcccagtcaacacacataacagaacaaggaagtcaaggctgggacagccaatctgatactgttttgttatcttcccaagagagaaacagtggggatattacttccttggacaaagctgactacagaccaacaatcaaagagaatattcctgcctctctcatggaacaaaatgtaatttgcccaaaggatacttactctgatttgaaaagcagagataaagatgtgacaatagttcctagtactggagaaccaactactctaagcagtgagacacatatacccgaggaaaaaagtttgctaaatcttagcacaaatgcagattcccagagctcttctgattttgaagttccctcaactccagaagctgagttacctaaacgagagcatttacaatatttatatgagaagctggcaactggtgagagtatagcagtcaaaaaaagaaaatgctcactcttagatacctaagaattcaaagcgtttcaacctagagcaaccactaaaaaacctgcacagagatgacagtcaatattacaatagagaaaatacagtacttaaaaatgttcaaataacctggttgggtgtggtggctcacacttgtaatcccagcactttgaggtgggcaatggcttgagcccaggagttcgacaccagcctggccaacacagtgaaatgtgtctctacttacaaaaaaaaaaaaaaaaaaaaagccaggcatggtggtgggctactctggaggcccttgaggaccacttgagcccaggagattgaggctgcagtgagccatgactgtgccactgcacctctagtctgggtgacagagcaagaccctgtttaaaaaagaaaaaggccaggcacggtggctcatgcctgtaatcccagctacgcaggaggccaaggcaggagaatcacttgaacctgggaggtggtggttgcagtgagctgagattgtgtcattgcactccagcctgggcaacaagagcaaaactctgtctc

SEQ ID NO: 22950 - DNA, 2551 bp, Homo sapiens
gcttcccggaagtggcggcgcggtcagggctggccttggcttcagctgcggttttggggtcccggactctgggatcggcggcgctatgagttctttcgaggggcagatggccgagtatccaactatctccatagaccgcttcgatagggagaacctgagggcccgcgcctacttcctgtcccactgccacaaagatcacatgaaaggattaagagcccctaccttgaaaagaaggttggagtgcagatatctattgaaatcgagactcctacccagatatctttagtggatgaagcatcaggagaggtttttatttcagggcaataatggaactgtcctgtacacaggagacttcagattggcgcaaggagaagctgctagaatggagcttctgcactccgggggcagagtcaaagacatccaaagtgtatatttggatactacgttctgtgatccaagattttaccaaattccaagtcgggaggagtgtttaagtggagtcttagagctggtccgaagctggatcactcggagcccgtaccatgttgtgtggctgaactgcaaagcggcttatggctatgaatatctgttcaccaaccttagtgaagaattaggagtccaggttcatgtgaataagctagacatgtttaggaacatgcctgagatccttcatcatctcacaacagaccgcaacactcagatccatgcatgccggcatcccaaggcagaggaatattttcagtggagcaaattaccctgtggaattacttccagaaatagaattccactccacataatcagcattaagccatccaccatgtggtttggagaaaggagcagaaaaacaaatgtaattgtgaggactggagagagttcatacagagcttgtttttcttttcactcctcctacagtgagattaaagatttcttgagctacctctgtcctgtgaacgcatatccaaatgtcattccagttggcacaactatggataaagttgtcgaaatcttaaagcctttatgccggtcttcccaaagtacggagccaaagtataaaccactgggaaaactgaagagagctagaacagttcaccgagactcagaggaggaagatgactatctctttgatgatcctctgccaatacctttaaggcacaaagttccatacccggaaacttttcaccctgaggtattttcaatgactgcagtatcagaaaagcagcctgaaaaactgagacaaaccccaggatgctgcagagcagagtgtatgcagagctctcgtttcacaaactttgtagattgtgaagaatccaacagtgaaagtgaagaagaagtaggaatcccagcttcactgcaaggagatctgggctctgtacttcacctgcaaaaggctgatggggatgtaccccagtgggaagtattctttaaaagaaatgatgaaatcacagatgagagtttggaaaacttcccttcctccacagtggcagggggatctcagtcaccaaagcttttcagtgactctgatggagaatcaactcacatctcctcccagaattcttcccagtcaacacacataacagaacaaggaagtcaaggctgggacagccaatctgatactgttttgttatcttcccaagagagaaacagtggggatattacttccttggacaaagctgactacagaccaacaatcaaagagaatattcctgcctctctcatggaacaaaatgtaatttgcccaaaggatacttactctgatttgaaaagcagagataaagatgtgacaatagttcctagtactggagaaccaactactctaagcagtgagacacatatacccgaggaaaaaagtttgctaaatcttagcacaaatgcagattcccagagctcttctgattttgaagttccctcaactccagaagctgagttacctaaacgagagcatttacaatatttatatgagaagctggcaactggtgagagtatagcagtcaaaaaaagaaaatgctcactcttagatacctaagaattcaaagcgtttcaacctagagcaaccactaaaaaacctgcacagagatgacagtcaatattacaatagagaaaatacagtacttaaaaatgttcaaataacctggttgggtgtggtggctcacacttgtaatcccagcactttgaggtgggcaatggcttgagcccaggagttcgacaccagcctggccaacacagtgaaatgtgtctctacttacaaaaaaaaaaaaaaaaaaaaagccaggcatggtggtgggctactctggaggcccttgaggaccacttgagcccaggagattgaggctgcagtgagccatgactgtgccactgcacctctagtctgggtgacagagcaagaccctgtttaaaaaagaaaaaggccaggcacggtggctcatgcctgtaatcccagctacgcaggaggccaaggcaggagaatcacttgaacctgggaggtggtggttgcagtgagctgagattgtgtcattgcactccagcctgggcaacaagagcaaaactctgtctc

SEQ ID NO: 22951 - DNA, 1467 bp, Homo sapiens
cgtcgacggagatgtgagttgattctccatcagagtcactgaaaagctttggtgactgagatccccctgccactgtggaggaagggaagttttccaaactctcatctgtgatttcatcatttcttttaaagaatacttcccactggggtacaaaccccaggatgctgcagagcagagtgtatgcagagctctcgtttcacaaactttgtagattgtgaagaatccaacagtgaaagtgaagaagaagtaggaatcccagcttcactgcaaggagatctgggctctgtacttcacctgcaaaaggctgatggggatgtaccccagtgggaagtattctttaaaagaaatgatgaaatcacagatgagagtttggaaaacttcccttcctccacagtggcagggggatctcagtcaccaaagcttttcagtgactctgatggagaatcaactcacatctcctcccagaattcttcccagtcaacacacataacagaacaaggaagtcaaggctgggacagccaatctgatactgttttgttatcttcccaagagagaaacagtggggatattacttccttggacaaagctgactacagaccaacaatcaaagagaatattcctgcctctctcatggaacaaaatgtaatttgcccaaaggatacttactctgatttgaaaagcagagataaagatgtgacaatagttcctagtactggagaaccaactactctaagcagtgagacacatatacccgaggaaaaaagtttgctaaatcttagcacaaatgcagattcccagagctcttctgattttgaagttccctcaactccagaagctgagttacctaaacgagagcatttacaatatttatatgagaagctggcaactggtgagagtatagcagtcaaaaaaagaaaatgctcactcttagatacctaagaattcaaagcgtttcaacctagagcaaccactaaaaaacctgcacagagatgacagtcaatattacaatagagaaaatacagtacttaaaaatgttcaaataacctggttgggtgtggtggctcacacttgtaatcccagcactttgaggtgggcaatggcttgagcccaggagttcgacaccagcctggccaacacagtgaaatgtgtctctacttacaaaaaaaaaaaaaaaaaaaaagccaggcatggtggtgggctactctggaggcccttgaggaccacttgagcccaggagattgaggctgcagtgagccatgactgtgccactgcacctctagtctgggtgacagagcaagaccctgtttaaaaaagaaaaaggccaggcacggtggctcatgcctgtaatcccagctacgcaggaggccaaggcaggagaatcacttgaacctgggaggtggtggttgcagtgagctgagattgtgtcattgcactccagcctgggcaacaagagcaaaactctgtctc

SEQ ID NO: 22952 - DNA, 920 bp, Homo sapiens
gcatatgctttggtgtcatatctaagaaactatttgatccaagatcatgaaaattgactcccatgttacataattttacagtcagttttgactgtatcttcctgcttcttgaatttctgataatttgtttttgaatgccatacattctgaattttacctttttaggtcctgcataattttgggatttctaaaaacattcttgagctttgttctggcatgtggttagcatgtttatagtttgatcttttcgtgtcttttacctttgttatgcaggaacagagtagcatttagtatatggttaattttccccactactgaggcaaggctcttcttggttcttttacaaatgcccatggatcatgaggttttccactctggctgttgggaccaggacaagacactgttcctggcacggtgagttctgggcactttctttccttttgtttgagtgattcgttgcctggctgcaggtagtttccttacaagcacatgctgcttagtgcactgaacacgtggtggggacgcctctgcagcttttcagagtttctgtgcagcactctcctctctggtcttctgctctgtaaactccaggtacatttatttcttcaatgttccacttccacctcacatcaaggatgtccatgggctctatccagatgttccctccctgactggaatctgttatgaagcagggagtcaggcaatcataggactcatctgtgtcttatttctcatgtcattgtccttaattgctcgatgtccattttcttgagagatagtttctgatttttcgttatttcaagtgggaggttaaatctagtccgttactccatcttacctggaagcaaaagtcctttcttcctttaatcttttgtgccttttatgcatctacccaatccacactcctttttgataaatgt

SEQ ID NO: 22953 - DNA, 2637 bp, Homo sapiens
gcttcccggaagtggcggcgcggtcagggctggccttggcttcagctgcggttttggggtcccggactctgggatcggcggcgctatgagttctttcgaggggcagatggccgagtatccaactatctccatagaccgcttcgatagggagaacctgagggcccgcgcctacttcctgtcccactgccacaaagatcacatgaaaggattaagagcccctaccttgaaaagaaggttggagtgcagcttgaaggtttatctatactgttcacctgtgactaaggagttgttgttaacgagcccgaaatacagattttggaagaaacgaattatatctattgaaatcgagactcctacccagatatctttagtggatgaagcatcaggagagaaggaagagattgttgtgactctcttaccagctggtcactgtccgggatcagttatgtttttatttcagggcaataatggaactgtcctgtacacaggagacttcagattggcgcaaggagaagctgctagaatggagcttctgcactccgggggcagagtcaaagacatccaaagtgtatatttggatactacgttctgtgatccaagattttaccaaattccaagtcgggaggagtgtttaagtggagtcttagagctggtccgaagctggatcactcggagcccgtaccatgttgtgtggctgaactgcaaagcggcttatggctatgaatatctgttcaccaaccttagtgaagaattaggagtccaggttcatgtgaataagctagacatgtttaggaacatgcctgagatccttcatcatctcacaacagaccgcaacactcagatccatgcatgccggcatcccaaggcagaggaatattttcagtggagcaaattaccctgtggaattacttccagaaatagaattccactccacataatcagcattaagccatccaccatgtggtttggagaaaggagcagaaaaacaaatgtaattgtgagattaaagatttcttgagctacctctgtcctgtgaacgcatatccaaatgtcattccagttggcacaactatggataaagttgtcgaaatcttaaagcctttatgccggtcttcccaaagtacggagccaaagtataaaccactgggaaaactgaagagagctagaacagttcaccgagactcagaggaggaagatgactatctctttgatgatcctctgccaatacctttaaggcacaaagttccatacccggaaacttttcaccctgaggtattttcaatgactgcagtatcagaaaagcagcctgaaaaactgagacaaaccccaggatgctgcagagcagagtgtatgcagagctctcgtttcacaaactttgtagattgtgaagaatccaacagtgaaagtgaagaagaagtaggaatcccagcttcactgcaaggagatctgggctctgtacttcacctgcaaaaggctgatggggatgtaccccagtgggaagtattctttaaaagaaatgatgaaatcacagatgagagtttggaaaacttcccttcctccacagtggcagggggatctcagtcaccaaagcttttcagtgactctgatggagaatcaactcacatctcctcccagaattcttcccagtcaacacacataacagaacaaggaagtcaaggctgggacagccaatctgatactgttttgttatcttcccaagagagaaacagtggggatattacttccttggacaaagctgactacagaccaacaatcaaagagaatattcctgcctctctcatggaacaaaatgtaatttgcccaaaggatacttactctgatttgaaaagcagagataaagatgtgacaatagttcctagtactggagaaccaactactctaagcagtgagacacatatacccgaggaaaaaagtttgctaaatcttagcacaaatgcagattcccagagctcttctgattttgaagttccctcaactccagaagctgagttacctaaacgagagcatttacaatatttatatgagaagctggcaactggtgagagtatagcagtcaaaaaaagaaaatgctcactcttagatacctaagaattcaaagcgtttcaacctagagcaaccactaaaaaacctgcacagagatgacagtcaatattacaatagagaaaatacagtacttaaaaatgttcaaataacctggttgggtgtggtggctcacacttgtaatcccagcactttgaggtgggcaatggcttgagcccaggagttcgacaccagcctggccaacacagtgaaatgtgtctctacttacaaaaaaaaaaaaaaaaaaaaagccaggcatggtggtgggctactctggaggcccttgaggaccacttgagcccaggagattgaggctgcagtgagccatgactgtgccactgcacctctagtctgggtgacagagcaagaccctgtttaaaaaagaaaaaggccaggcacggtggctcatgcctgtaatcccagctacgcaggaggccaaggcaggagaatcacttgaacctgggaggtggtggttgcagtgagctgagattgtgtcattgcactccagcctgggcaacaagagcaaaactctgtctc

SEQ ID NO: 22954 - DNA, 2777 bp, Homo sapiens
gcttcccggaagtggcggcgcggtcagggctggccttggcttcagctgcggttttggggtcccggactctgggatcggcggcgctatgagttctttcgaggggcagatggccgagtatccaactatctccatagaccgcttcgatagggagaacctgagggcccgcgcctacttcctgtcccactgccacaaagatcacatgaaaggattaagagcccctaccttgaaaagaaggttggagtgcagatgaggaaactgaggaaccagagaggttaaattagttgcccagtgtcacacagccagtaagtggcaggaccaggattccagccagcttgaaggtttatctatactgttcacctgtgactaaggagttgttgttaacgagcccgaaatacagattttggaagaaacgaattatatctattgaaatcgagactcctacccagatatctttagtggatgaagcatcaggagagaaggaagagattgttgtgactctcttaccagctggtcactgtccgggatcagttatgtttttatttcagggcaataatggaactgtcctgtacacaggagacttcagattggcgcaaggagaagctgctagaatggagcttctgcactccgggggcagagtcaaagacatccaaagtgtatatttggatactacgttctgtgatccaagattttaccaaattccaagtcgggaggagtgtttaagtggagtcttagagctggtccgaagctggatcactcggagcccgtaccatgttgtgtggctgaactgcaaagcggcttatggctatgaatatctgttcaccaaccttagtgaagaattaggagtccaggttcatgtgaataagctagacatgtttaggaacatgcctgagatccttcatcatctcacaacagaccgcaacactcagatccatgcatgccggcatcccaaggcagaggaatattttcagtggagcaaattaccctgtggaattacttccagaaatagaattccactccacataatcagcattaagccatccaccatgtggtttggagaaaggagcagaaaaacaaatgtaattgtgaggactggagagagttcatacagagcttgtttttcttttcactcctcctacagtgagattaaagatttcttgagctacctctgtcctgtgaacgcatatccaaatgtcattccagttggcacaactatggataaagttgtcgaaatcttaaagcctttatgccggtcttcccaaagtacggagccaaagtataaaccactgggaaaactgaagagagctagaacagttcaccgagactcagaggaggaagatgactatctctttgatgatcctctgccaatacctttaaggcacaaagttccatacccggaaacttttcaccctgaggtattttcaatgactgcagtatcagaaaagcagcctgaaaaactgagacaaaccccaggatgctgcagagcagagtgtatgcagagctctcgtttcacaaactttgtagattgtgaagaatccaacagtgaaagtgaagaagaagtaggaatcccagcttcactgcaaggagatctgggctctgtacttcacctgcaaaaggctgatggggatgtaccccagtgggaagtattctttaaaagaaatgatgaaatcacagatgagagtttggaaaacttcccttcctccacagtggcagggggatctcagtcaccaaagcttttcagtgactctgatggagaatcaactcacatctcctcccagaattcttcccagtcaacacacataacagaacaaggaagtcaaggctgggacagccaatctgatactgttttgttatcttcccaagagagaaacagtggggatattacttccttggacaaagctgactacagaccaacaatcaaagagaatattcctgcctctctcatggaacaaaatgtaatttgcccaaaggatacttactctgatttgaaaagcagagataaagatgtgacaatagttcctagtactggagaaccaactactctaagcagtgagacacatatacccgaggaaaaaagtttgctaaatcttagcacaaatgcagattcccagagctcttctgattttgaagttccctcaactccagaagctgagttacctaaacgagagcatttacaatatttatatgagaagctggcaactggtgagagtatagcagtcaaaaaaagaaaatgctcactcttagatacctaagaattcaaagcgtttcaacctagagcaaccactaaaaaacctgcacagagatgacagtcaatattacaatagagaaaatacagtacttaaaaatgttcaaataacctggttgggtgtggtggctcacacttgtaatcccagcactttgaggtgggcaatggcttgagcccaggagttcgacaccagcctggccaacacagtgaaatgtgtctctacttacaaaaaaaaaaaaaaaaaaaaagccaggcatggtggtgggctactctggaggcccttgaggaccacttgagcccaggagattgaggctgcagtgagccatgactgtgccactgcacctctagtctgggtgacagagcaagaccctgtttaaaaaagaaaaaggccaggcacggtggctcatgcctgtaatcccagctacgcaggaggccaaggcaggagaatcacttgaacctgggaggtggtggttgcagtgagctgagattgtgtcattgcactccagcctgggcaacaagagcaaaactctgtctc

SEQ ID NO: 22955 - DNA, 2904 bp, Homo sapiens
gcttcccggaagtggcggcgcggtcagggctggccttggcttcagctgcggttttggggtcccggactctgggatcggcggcgctatgagttctttcgaggggcagatggccgagtatccaactatctccatagaccgcttcgatagggagaacctgagggcccgcgcctacttcctgtcccactgccacaaagatcacatgaaaggattaagagcccctaccttgaaaagaaggttggagtgcagatgaggaaactgaggaaccagagaggttaaattagttgcccagtgtcacacagccagtaagtggcaggaccaggattccagccagcttgaaggtttatctatactgttcacctgtgactaaggagttgttgttaacgagcccgaaatacagattttggaagaaacgaatttgctggtctcccgctttggctctgaagcacatgcacctgccccaggactcggaggagctgcacacgggcacccagcagaagctgatgttgctgcggccctgccccagactctgagttaagccagaagatatctattgaaatcgagactcctacccagatatctttagtggatgaagcatcaggagagaaggaagagattgttgtgactctcttaccagctggtcactgtccgggatcagttatgtttttatttcagggcaataatggaactgtcctgtacacaggagacttcagattggcgcaaggagaagctgctagaatggagcttctgcactccgggggcagagtcaaagacatccaaagtgtatatttggatactacgttctgtgatccaagattttaccaaattccaagtcgggaggagtgtttaagtggagtcttagagctggtccgaagctggatcactcggagcccgtaccatgttgtgtggctgaactgcaaagcggcttatggctatgaatatctgttcaccaaccttagtgaagaattaggagtccaggttcatgtgaataagctagacatgtttaggaacatgcctgagatccttcatcatctcacaacagaccgcaacactcagatccatgcatgccggcatcccaaggcagaggaatattttcagtggagcaaattaccctgtggaattacttccagaaatagaattccactccacataatcagcattaagccatccaccatgtggtttggagaaaggagcagaaaaacaaatgtaattgtgaggactggagagagttcatacagagcttgtttttcttttcactcctcctacagtgagattaaagatttcttgagctacctctgtcctgtgaacgcatatccaaatgtcattccagttggcacaactatggataaagttgtcgaaatcttaaagcctttatgccggtcttcccaaagtacggagccaaagtataaaccactgggaaaactgaagagagctagaacagttcaccgagactcagaggaggaagatgactatctctttgatgatcctctgccaatacctttaaggcacaaagttccatacccggaaacttttcaccctgaggtattttcaatgactgcagtatcagaaaagcagcctgaaaaactgagacaaaccccaggatgctgcagagcagagtgtatgcagagctctcgtttcacaaactttgtagattgtgaagaatccaacagtgaaagtgaagaagaagtaggaatcccagcttcactgcaaggagatctgggctctgtacttcacctgcaaaaggctgatggggatgtaccccagtgggaagtattctttaaaagaaatgatgaaatcacagatgagagtttggaaaacttcccttcctccacagtggcagggggatctcagtcaccaaagcttttcagtgactctgatggagaatcaactcacatctcctcccagaattcttcccagtcaacacacataacagaacaaggaagtcaaggctgggacagccaatctgatactgttttgttatcttcccaagagagaaacagtggggatattacttccttggacaaagctgactacagaccaacaatcaaagagaatattcctgcctctctcatggaacaaaatgtaatttgcccaaaggatacttactctgatttgaaaagcagagataaagatgtgacaatagttcctagtactggagaaccaactactctaagcagtgagacacatatacccgaggaaaaaagtttgctaaatcttagcacaaatgcagattcccagagctcttctgattttgaagttccctcaactccagaagctgagttacctaaacgagagcatttacaatatttatatgagaagctggcaactggtgagagtatagcagtcaaaaaaagaaaatgctcactcttagatacctaagaattcaaagcgtttcaacctagagcaaccactaaaaaacctgcacagagatgacagtcaatattacaatagagaaaatacagtacttaaaaatgttcaaataacctggttgggtgtggtggctcacacttgtaatcccagcactttgaggtgggcaatggcttgagcccaggagttcgacaccagcctggccaacacagtgaaatgtgtctctacttacaaaaaaaaaaaaaaaaaaaaagccaggcatggtggtgggctactctggaggcccttgaggaccacttgagcccaggagattgaggctgcagtgagccatgactgtgccactgcacctctagtctgggtgacagagcaagaccctgtttaaaaaagaaaaaggccaggcacggtggctcatgcctgtaatcccagctacgcaggaggccaaggcaggagaatcacttgaacctgggaggtggtggttgcagtgagctgagattgtgtcattgcactccagcctgggcaacaagagcaaaactctgtctc

SEQ ID NO: 22956 - DNA, 1344 bp, Homo sapiens
gcttcccggaagtggcggcgcggtcagggctggccttggcttcagctgcggttttggggtcccggactctgggatcggcggcgctatgagttctttcgaggggcagatggccgagtatccaactatctccatagaccgcttcgatagggagaacctgagggcccgcgcctacttcctgtcccactgccacaaagatcacatgaaaggattaagagcccctaccttgaaaagaaggttggagtgcagcttgaaggtttatctatactgttcacctgtgactaaggagttgttgttaacgagcccgaaatacagattttggaagaaacgaattatatctattgaaatcgagactcctacccagatatctttagtggatgaagcatcaggagagaaggaagagattgttgtgactctcttaccagctggtcactgtccgggatcagttatgtttttatttcagggcaataatggaactgtcctgtacacaggagacttcagattggcgcaaggagaagctgctagaatggagcttctgcactccgggggcagagtcaaagacatccaaagtgtatatttggatactacgttctgtgatccaagattttaccaaattccaagtcgggaggagtgtttaagtggagtcttagagctggtccgaagctggatcactcggagcccgtaccatgttgtgtggctgaactgcaaagcggcttatggctatgaatatctgttcaccaaccttagtgaagaattaggagtccaggttcatgtgaataagctagacatgtttaggaacatgcctgagatccttcatcatctcacaacagaccgcaacactcagatccatgcatgccggcatcccaaggcagaggaatattttcagtggagcaaattaccctgtggaattacttccagaaatagaattccactccacataatcagcattaagccatccaccatgtggtttggagaaaggagcagaaaaacaaatgtaattgtgaggactggagagagttcatacagagcttgtttttcttttcactcctcctacagtgagattaaagatttcttgagctacctctgtcctgtgaacgcatatccaaatgtcattccagttggcacaactatggataaagttgtcgaaatcttaaagcctttatgccggtcttcccaaagtacggagccaaagtataaaccactgggaaaactgaagagagctagaacagttcaccgagactcaggtaagaaaaatggtcctgggttcagaggggtgggctccctgcaaacactgctttccagggagcttgggtctgggagaagtggccttgggcagagtggacctgg

SEQ ID NO: 22957 - DNA, 746 bp, Homo sapiens
gcttcccggaagtggcggcgcggtcagggctggccttggcttcagctgcggttttggggtcccggactctgggatcggcggcgctatgagttctttcgaggggcagatggccgagtatccaactatctccatagaccgcttcgatagggagaacctgagggcccgcgcctacttcctgtcccactgccacaaagatcacatgaaaggattaagagcccctaccttgaaaagaaggttggagtgcagatgaggaaactgaggaaccagagaggttaaattagttgcccagtgtcacacagccagtaagtggcaggaccaggattccagccaggtctgtctgattgcagagcctatgtatcagtcatctgctgctgcgtaacaaattacttcaaaatggagtgacttaacactgatcatgtcttattgctcagtttctgtggatcagggattgacagggtagaatgggaaaactcacacagctaggggctagaaccatttggcatgtttttttgtttgtttgtttgtttgtttgtttgaagcagagtcgaactctgctgcccaggcaggagtgcagtggcgtgatgttggctcactgcaatctctgcctcccaggttcaagcgattctccctgctcgggaggctgaggcgggagaatcgcttgaacctgggaagtggagtttgcagtgagacgagatcacaccattgcgctccagcctgggtaacagagcaagactccatctcaaaaa

SEQ ID NO: 22958 - DNA, 553 bp, Homo sapiens
caccttttggctagtatgaagaatgctgctgtgaacagtcaggcacacatttttgtgtggccatcggttttcgcttatcttggttctataactagtggtgaaattgctcagtcccatgggaattctgtttgttgagtggacaaggattccacttgtttctaggatttggagtgtgaggaaattgggagaaaaggcacattgttaaaaggtacataaatgtgttctgtgaaggagggctttgttgagctaggtcctaatgataactgctttccattactattttttctttattttctttttagaaggaagagattgttgtgactctcttaccagctggtcactgtccgggatcagttatgtaagggggtcatttattttgtcattttattatatgtagacacatattgtatttgtagaaataaatttttagggtctaaaattaatagggggctgggtgcagtggcacatgtctgtaatcccagtgctttgggaggctgacgcgggaggattgcttgagcttgggagttggaggctgcagtgagtttttttttta

SEQ ID NO: 22959 - DNA, 393 bp, Homo sapiens
gtgtatgtgcatgcgtgtgtgagtatgcacacatagtgtgtgcacgtgtgtttgtgtgcatgatatcatccacctccacatctgacctttgattgagaaggggatttgtcctccctctgcagagcagtcacaacagcagggttgttcctgttgtctctggcattcagcttgaagttactacaggtcagcccggccagcagtcaggaaggaaagctggaagagaagtggaggggaacagagacaaactggaaggcagaatggcccactaggacagaccgaaacccacttctgtctctcacttcctctggcctcaatagtgctggtctcccgctttggctctgaagcacatgcacctgccccaggactcggaggagctgcacacgggcacccagc

SEQ ID NO: 22960 - DNA, 2622 bp, Homo sapiens
acccggggctcccacatttcagcaggtgccggagctggagctcccaccgccgccgcccgtgcctccggctgccggcgcccctgcctttggctcttcctccccactcgcccgctccccctggcggagccggcgcgcccggggtgccgctccctgcctggcgcgctccgcacctggaggtgccttgcccctctcctgcccacctcggaatttccctgtggctcctttgatccttcgagtctccagctcctctcccttccacctgtttcccccaagaaaggcaggatcctggtccctgctacgtttctggggccatggctggtctgggccccggcgtaggcgattcagaggggggaccccggcccctgttttgcagaaagggggctctgaggcagaaggtggtccacgaagtcaagagccacaagttcaccgctcgcttcttcaagcagcccaccttctgcagccactgcaccgacttcatctggggtatcggaaagcagggcctgcaatgtcaagtctgcagctttgtggttcatcgacgatgccacgaatttgtgaccttcgagtgtccaggcgctgggaagggcccccagacggacgacccccggaacaaacacaagttccgcctgcatagctacagcagccccaccttctgcgaccactgtggctccctcctctacgggcttgtgcaccagggcatgaaatgttcttgctgcgagatgaacgtgcaccggcgctgtgtgcgtagcgtgccctccctgtgcggtgtggaccacaccgagcgccgcgggcgcctgcagctggagatccgggctcccacagcagatgagatccacgtaactgttggcgaggcccgtaacctaattcctatggaccccaatggtctctctgatccctatgtgaaactgaagctcatcccagaccctcggaacctgacgaaacagaagacccgaacggtgaaagccacgctaaaccctgtgtggaatgagacctttgtgttcaacctgaagccaggggatgtggagcgccggctcagcgtggaggtgtgggactgggaccggacctcccgcaacgacttcatgggggccatgtcctttggcgtctcggagctgctcaaggcgcccgtggatggctggtacaagttactgaaccaggaggagggcgagtattacaatgtgccggtggccgatgctgacaactgcagcctcctccagaagtttgaggcttgtaactaccccctggaattgtatgagcgggtgcggatgggcccctcttcctctcccatcccctccccttcccctagtcccaccgaccccaagcgctgcttcttcggggcgagtccaggacgcctgcacatctccgacttcagcttcctcatggttctaggaaaaggcagttttgggaaggtgatgctggccgagcgcaggggctctgatgagctctacgccatcaagatcttgaaaaaggacgtgatcgtccaggacgacgatgtggactgcacgctggtggagaaacgtgtgctggcgctggggggccggggtcctggcggccggccccacttcctcacccagctccactccaccttccagaccccggaccgcctgtatttcgtgatggagtacgtcaccgggggagacttgatgtaccacattcaacagctgggcaagtttaaggagccccatgcagcgttctacgcggcagaaatcgctatcggcctcttcttccttcacaatcagggcatcatctacagggacctgaagctggacaatgtgatgctggatgctgagggacacatcaagatcactgactttggcatgtgtaaggagaacgtcttccccgggacgacaacccgcaccttctgcgggaccccggactacatagccccggagatcattgcctaccagccctatgggaagtctgtcgattggtggtcctttggagttctgctgtatgagatgttggcaggacagcctcccttcgatggggaggacgaggaggagctgtttcaggccatcatggaacaaactgtcacctaccccaagtcgctttcccgggaagccgtggccatctgcaaggggttcctgaccaagcacccagggaagcgcctgggctcagggcctgatggggaacctaccatccgtgcacatggctttttccgctggattgactgggagcggctggaacgattggagatcccgcctcctttcagaccccgcccgtgtggccgcagcggcgagaactttgacaagttcttcacgcgggcggcgccagcgctgacccctccagaccgcctagtcctggccagcatcgaccaggccgatttccagggcttcacctacgtgaaccccgacttcgtgcacccggatgcccgcagccccaccagcccagtgcctgtgcccgtcatgtaatctcacccgccgccactaggtgtccccaacgtcccctccgccgtgccggcggcagccccacttcacccccaacttcaccaccccctgtcccattctagatcctgcaccccagcattccagctctgcccccgcgggttctagacgcccctcccaagcgttcctggccttctgaactccatacagcctctacagccgtcccgcgttcaagacttgagcg

SEQ ID NO: 22961 - DNA, 310 bp, Homo sapiens
gacgtccccacccaccccgtcctccaggttctacgcggcagaaatcgctatcggcctcttcttccttcacaatcagggcatcatctacagggacctgaagctggacaatgtgatgctggatgctgagggacacatcaagatcactgactttggcatgtgtaaggagaacgtcttccccgggacgacaacccgcaccttctgcgggaccccggactacatagccccggagatcatttgcctaccacccttatgggaattctgtcgtttggtgctcctcagaagtttcgctgaataagatgtgggttagaca

SEQ ID NO: 22962 - DNA, 432 bp, Homo sapiens
actgggctattcttttgtaagcagggaatgagatactggttattaaagattttggtaaagtgtaagttactgtaaggcatgattcaggactgcgtcccacaagtccccggaccaggagccagttcggattgtcttgtgggatgtaccaagtttccctggtttacagaggctttttgcctctctgaagcctgagctggccagatggagagctctgtggaaaacttccagcagtgtgtgttgggccaagcactcgaggtgtgaagaaatgtaaaactttcaagtgataatatctagcatcgtgtatgcagccttgaaaaatgacccaacctttgtagaaattctctgttatcactaaccctcttccataatgagcggaggatttcccaagaattgggattctgataagagtcctgcaaaagttgaaaagttttc

SEQ ID NO: 22963 - DNA, 538 bp, Homo sapiens
ctgttaactgacgctgcaggcccagcaactgctccagtctctgcttccacgagattgtcaaattgggcagcagttgggaaatcaatggatatcttcccagtataaatcccaaaatgttcctgaaatggggttacttctgtcccaattgagacagacgtttcaaattccaaataagaggtagtagggtacaacagcacagaaggtactttaaggaagcttgagtcctcagatgcagaagaatttttttccaaactggaatcagaatccagaaaaggctgataggaaataccaacaatgttgacattcccagtttcaatgggcacaggagaaccctcattcattaaatcaggaatatccaacttgctcagcatcccaactccagaaacaaagaatccctataagtttactaaagacaatgacaatttctccatgttggtcaggctggtctcaaactctcgacctcaggtgatctgcctgcctcggcctcccaaagtgctgagattagaggtatgagtcaccgcgcctgggctaaattata

SEQ ID NO: 22964 - DNA, 477 bp, Homo sapiens
gtaagatgaggatttcttttccaatttcagcacagaaggtactttaaggaagcttgagtcctcagatgcagaagaatttttttccaaactggaatcagaatccagaaaaggtgaatttactttcatgctgccagtttcttggaatttaggggaaatattagttaagctgagttccgccatttctgagtgaccagaaatctttttagtcccacaaatatccaaagattgatgaaacacacaagtgtgagcttcacaattctgcgccatttgcctactgattttttcatcatgaataggtggtaaaatccaagatatattacttttaagaagagcaggaggagagcctaaggcatctacctctggttctggcttatcttcatatttggaggcagcaggagaaagctcagcttggcaattctctttaaggccagcatctgaacatttctctcctatctcattatgattaattgattgaaa

SEQ ID NO: 22965 - DNA, 648 bp, Homo sapiens
ctgttaactgacgctgcaggcccagcaactgctccagtctctgcttccacgagattgtcaaattgggcagcagttgggaaatcaatggatatcttcccagtataaatcccaaaatgttcctgaaatggggttacttctgtcccaattgagacagacgtttcaaattccaaataagaggtagtagggtacaacagcacagaaggtactttaaggaagcttgagtcctcagatgcagaagaatttttttccaaactggaatcagaatccagaaaaggctgataggaaataccaacaatgttgacattcccagtttcaatgggcacaggagaaccctcattcattaaatcaggaatatccaacttgctcagcatcccaactccagaaacaaagaatccctataagtttactaaagacaatgacaatttctccatgttggtcaggctggtctcaaactctcgacctcaggtgatctgcctgcctcggcctcccaaagtgctgagattagagggttttctataaacatactgcctaagactgtaaatgaaaacgagacagcaccttgaggacaaaatgcacttcagtcaaaatgaacgtttttggatctgattttacaactatgtaaattaaaaaggttcagaccagctgata

SEQ ID NO: 22966 - DNA, 468 bp, Homo sapiens
tttaatcaaaatgggaaatgttttgtcacataataattgatcatgagtctgatgacaagtggttctgggcatctatcaaatgaacattaatacataatacattttttaagtcaccagataaaggtctttatattacaatttctacattttcagatttgtttatctttgtgttctctcagggaatttgcaccatttgtttatcattttgtgtcaaaatatccgtactggcattctaggccttgtggggataagagacatacaaggaagggccctggctccagagcttccagccactgctctgtctttgccatatgggtctagtactactcgctactactctctagggtttccatgtagaatgcttcaatatttcaatctaatggcagacctttcttccaacctaaacaatttccagacatacagtcttagccagccaaatgtcatcttttctgaataggtcagtgtgca

SEQ ID NO: 22967 - DNA, 1297 bp, Homo sapiens
tagattccagacattgtatagaagaacatttggaaactcactgccttgttttgtttctctctgaccaccagtgcatgcagcccctgtcatgtaccgcctgtttgctcaaatcaatcatgaccctttcatgtgaaatctttagtgttgtgagcccttaaaagggacagaaattgtgcattcaaggagcttggattttaaggcagcagcttgctgatgccaccagctgaaaaaagcccttccttctccaactcggtgtctgagaagttttgtctgcagctcatcctgctacagaatgaactccttgtaattctacaagatatgccatgggccttttcacaggggacacaggcttcttaaaacaacccggcttcctcaccctatgtcctttatttacaaagctgtgctcctattcatgagcatggaatgtttttccatttgtttgtgacatctcttatttctttcaggggtatcttgtaattctcattatatatatcttttgcttccttggttagctgtatttttaggtattttagtcttcttgtggcaattgtgaatgggattgcattcctgatttggctcttggcttgaatgttattaacgccacattttttaaatagacaaaaatatgagattaaaaatgttgaattttactaacaataaaagttgttcaaaggaaaactataaggttcttgtttcaactctgtcataggaagaacaggacagtgagctggcacagagttagggaaattgactgtgtctcatattggctagtgagagtgatctgttggaattgtatatcaaaattttaatgtacatacattttgtctagcaattctactattgggtatttatatagtacatataaatataaatgtatatgtttagtaaatatatacttatagttagtaaatatattttatatctatttagtaaatatactaaatgtcaggcctctgagcccaagctaagccatcatatcccctgtgacctgcatgtacatacgtccagatggcctgaagcaagtgaagaatcacaaaagaagtgaaaatggcctgttcctgccttaactgatgacattaccttgtgaaattccttctcctggctcatcctggctcaaaagctcccccactaagcaacttgtgacacccacctctgcccgccagagaacaaccccctttgactgtaattttcctttaccaacccaaatcctgtaaaatggtcccaaccctatctcccttcactgactgtcttttcggactcagccagcctgcacccaggtgattaaaaagctttattg

SEQ ID NO: 22968 - DNA, 410 bp, Homo sapiens
atccgtattaaagaccatgtgagatgtaggtattatcacttgcaatttattttatgaaaatgaggctcaaagaggtttgtgacttgtccaaagctcaagcctgttctttttccatgagactgccttcatttgcattatctcctaagatcttcacaaggatcctaagagacaggtcaagcaggttttatcattattaccacttaagattgcagaaaacaaactcagactcccttcttgcgaataatcacgtagctagtgttcagaacatacctgctctgttccaggtatctcactaggcatttgagaggtattatttatttctaccactaccctgtgaggtaggtactgttatcctgttatattccataataaattggaagagttggagtttgaaactaaactgtaaatta

SEQ ID NO: 22969 - DNA, 1860 bp, Homo sapiens
  misc_feature (150)..(150): n is a, c, g, or t
  misc_feature (152)..(152): n is a, c, g, or t
  misc_feature (155)..(155): n is a, c, g, or t
  misc_feature (181)..(181): n is a, c, g, or t
  misc_feature (212)..(212): n is a, c, g, or t
  misc_feature (230)..(230): n is a, c, g, or t
  misc_feature (277)..(277): n is a, c, g, or t
  misc_feature (303)..(303): n is a, c, g, or t
  misc_feature (323)..(323): n is a, c, g, or t
  misc_feature (713)..(713): n is a, c, g, or t
  misc_feature (732)..(732): n is a, c, g, or t
  misc_feature (928)..(928): n is a, c, g, or t
  misc_feature (1153)..(1153): n is a, c, g, or t
  misc_feature (1241)..(1241): n is a, c, g, or t
  misc_feature (1435)..(1435): n is a, c, g, or t
  misc_feature (1495)..(1495): n is a, c, g, or t
  misc_feature (1523)..(1523): n is a, c, g, or t
  misc_feature (1547)..(1547): n is a, c, g, or t
  misc_feature (1677)..(1677): n is a, c, g, or t
  misc_feature (1682)..(1682): n is a, c, g, or t
gacatcacggacagggcgacttctatgtagatgaggcagcgcagaggctgctgcttcgccacttgctgcttcaccacgaaggagttcccgtgccctgggagcgggttcaggaccgctgatcggaagacacagagcacagccaagacctgnanagngccctcatccggctggaggaggagcngcagaggagtgccagcctggcccaggtgaangccatgctccgagaacanctggaccaggcaggctcggccaaccaggctctgagtgaggacatacnaaaggtgaccaatgactggacacgcngccgcaaggagctggagcancgggaggcggcgtggaggcgcgaggaggagggacctgctgcagctgggaggggagctggcccggacatcacgagctgtccaggaggcgggcctgggactgagcacgggcctacggctggcagagagccgggccgaggcagccctggagaaacaggccctgctgcaggcccagctggaggagcagctgcgggacaaggtgctccgcgagaaggacctggcgcagcagcagatgcaaagcgacctggacaaggctgacctcagtgccagagtgacagagctgggcctggcagtgaagcgtcttgagaagcagaatctggagaaggatcaggtcaacaaggacctcactgagaagcttgaggccctggaatccctgcggctacaggagcaggnggccctggagacagagganggagaggggctacagcagaccctaagggacctggcacaggccgtcttgtcagactctgagagcggcgtccagctgagcggctctgagcgcaccgcggatgcttccaacggcagcctgcgggggctctcgggccagcggaccccgtccccaccgcggcgctcctcgcccggccgaggccgttcaccccgccgaggcncctccccggcctgctcagactcctccacgctcgccctgatccactccgccctgcacaagcgccagctgcaggtccaggacatgcgtgggcgctatgaggcaagccaggacctactgggcaccctgcggaagcagcttagcgacagcgagagcgagcggcgggccctagaggaacagctgcagcgcctgcgggacaagaccgacggcgccatgcaggcccacgagnacgcccagcgcgaggtgcagcggctgcggagcgccaacgagctcctgagcaggctggggcacaattggtccatcacagctcactgtancctggaactcccagactcaagcgatcctcccacctctacctcccaactgcccctagttgggggcctgggcctggcctggggaaggatatgggaccgaagcctgagagttaggtttccactcccttcctctgtgccctcaccaccctctgagccctcacctccctgggttcctgggcaactctgatctcagcctngaggatagtagacaagccgccaacatttctaaattttttgtagagatgggggtctcactntgttgcccatgctggtcttgaactcctngcttcaatcactcctcccacctcngcctcccaaattgctgggattacaggcataagccactgtgcctggctctattaaaatttaattaaaatttttaaaaagtgaaaattcaggctgggtgtggtggctcacacccagcttgctggctaacacngtganacccccatctctactaaaaatacaacaaattacccggacatggtggcgggcgcctgtattcccagctacttgggaggctgaggcaggagaatggcgtgaacccgggaggcggagcttgcagtgagtggagattgcgccactgcactccagcctgggggacagagcgagactccgtctc

SEQ ID NO: 22970 - DNA, 1296 bp, Homo sapiens
  misc_feature (364)..(364): n is a, c, g, or t
  misc_feature (589)..(589): n is a, c, g, or t
  misc_feature (677)..(677): n is a, c, g, or t
  misc_feature (871)..(871): n is a, c, g, or t
  misc_feature (931)..(931): n is a, c, g, or t
  misc_feature (959)..(959): n is a, c, g, or t
  misc_feature (983)..(983): n is a, c, g, or t
  misc_feature (1113)..(1113): n is a, c, g, or t
  misc_feature (1118)..(1118): n is a, c, g, or t
aggccaaatgatgtcttcccaataaatgggaggcctcagcggcgagccgaggactgagctagtggaggaggtgaaatcaggaaggcttcttgtaagaggcagcatttggaatgaggcagcccccagcctcgcctgggcgtctttgcccagctaaccccgcggttcctaagtcagcagcctccttctgcctccctcccccaccctcaggccgtcttgtcagactctgagagcggcgtccagctgagcggctctgagcgcaccgcggatgcttccaacggcagcctgcgggggctctcgggccagcggaccccgtccccaccgcggcgctcctcgcccggccgaggccgttcaccccgccgaggcncctccccggcctgctcagactcctccacgctcgccctgatccactccgccctgcacaagcgccagctgcaggtccaggacatgcgtgggcgctatgaggcaagccaggacctactgggcaccctgcggaagcagcttagcgacagcgagagcgagcggcgggccctagaggaacagctgcagcgcctgcgggacaagaccgacggcgccatgcaggcccacgagnacgcccagcgcgaggtgcagcggctgcggagcgccaacgagctcctgagcaggctggggcacaattggtccatcacagctcactgtancctggaactcccagactcaagcgatcctcccacctctacctcccaactgcccctagttgggggcctgggcctggcctggggaaggatatgggaccgaagcctgagagttaggtttccactcccttcctctgtgccctcaccaccctctgagccctcacctccctgggttcctgggcaactctgatctcagcctngaggatagtagacaagccgccaacatttctaaattttttgtagagatgggggtctcactntgttgcccatgctggtcttgaactcctngcttcaatcactcctcccacctcngcctcccaaattgctgggattacaggcataagccactgtgcctggctctattaaaatttaattaaaatttttaaaaagtgaaaattcaggctgggtgtggtggctcacacccagcttgctggctaacacngtganacccccatctctactaaaaatacaacaaattacccggacatggtggcgggcgcctgtattcccagctacttgggaggctgaggcaggagaatggcgtgaacccgggaggcggagcttgcagtgagtggagattgcgccactgcactccagcctgggggacagagcgagactccgtctc

SEQ ID NO: 22971 - DNA, 415 bp, Homo sapiens
aaaggaagcttgtattaatcaataaaatatccagaaacaatgtctgtgaaacaagtgcttttatccacatttggcaaaagagccaataataaaaacaccaatctataagcaacagctaaaaagaaaagcagctgatttaatttctcactctattgttcaaattagcattttaaaccattgcaccttaattaaagccactcttttaggtacaataatcacaggcaaagcaactactatgtagggtaactataaatgatcaaaacaggacacttttgaaaatgaatggagcactattaataattatgccagggcaatatgcataatctaagcaaaccagccattccactactaataacctcctagatgctgagcttttaaacttacaaggtgttaccaatcccatgaagttcccccc

SEQ ID NO: 22972 - DNA, 375 bp, Homo sapiens
ggtcggtaacttgagcatcctctcgctcctggaatcttggtgcgaggtacggataatgtttagttcaaaacaaaataagtggccgggtgcggtggctcaaacctgtaatcctcgtgctttgagaggccgaggtgggcagatcatttgaggtcaggagttcgcgatcagcctggtcagcatggtcaaaccccgtctctactaaaaacacaaaaattagccaggcgtggtggcacgcgcctgtagtcccagctactcgggaggctgaggcaggagaatcgcttgaatccgggaggtgaggttgcagtgagccgagatggtgccactgcactgtagcctggccgacagagcaagactgttgtctcaaaacaaaaaaaa

SEQ ID NO: 22973 - DNA, 508 bp, Homo sapiens
agcccgcctagggaccgcaccgtcctctgcactttcacagtgaagcctgtgtctctctccgagaagtgtcacgtgtgtcgtgggaatcacgggaattgcttccttaattctcctttcttaatgagggcttgggacagcgctgcctgtttcacatgggacgagcagctggtggtttctggctggcgtgggaccagcgcttcggctgtgtcatcacatctggtggcctgtccagctgggtgtcattgtctcttgtctcttggctgaggcaactgtgatgccatgggggtcacgcttgtgtcagggccaacccagttcttcccatgcacacctctcctgctggagtgcttttccttatgatgacgtgttggatcagtgtggagaatgcagagaggctctgggcctctccttcccatacctactccctggagccgcgatacccggcaagggagcccgtagccagaggctcctttaaatttcattagaataaagatttgattacacagctaaa

SEQ ID NO: 22974 - DNA, 316 bp, Homo sapiens
cttggaattaatttctagaaatggaattatttactcaaaggagatgaacatttttaagtctctggatacacctaatcatattgctttagttataccaatttgcatggcatgtacaggaatgcgtatgggagtgatagcagttgcattatcatttaaaaatctgttaatatggtggttgaaaagttacatcttgttattcatttgatttacctttctttaatgattgaggttaaattatttttcctatgtttattagatagttatagttcttcttttgtgcatgtctgttcaaaaagaacttatttatttgaaaaaa

SEQ ID NO: 22975 - DNA, 600 bp, Homo sapiens
gcccttcttctagagccatggccaagagggagatgaggacatggaaagtagagcgagactcaccaaaaggccacctgcattgaagaaggggagagatgatgatcatggtgggcagtattaagggctggttcatgtacagaaatctccagccttttctaaaagcaattgaagtgccacttccttctccctgcgctggctgcctcctggagtccttccttggacatcagctataagggcctctccagcacaaagcttagggctctatccacaggaaagtaatgctacccacaaaccatccctcagcaacagtctcagcccggaggaacccagaggcagccatagcctttcttttgttccgatgaactagtttgcactacaaatgcagatggggaaacaggaaaagcaaggcttccaaagtctactgacataagaacctggaatcctacccatagtctctgttctgtcctctccctaaagtatatctctctctcaagggagtcatttgaaaatggagaaagtcccccagaataccccaggcctataacgatcacagccacggatggggacaatctgccttctgaaggaagcaggcaaagccct

SEQ ID NO: 22976 - DNA, 391 bp, Homo sapiens
ggactgttcttttagctcttgactaggtcgttttggatctggactttcccaggtcattttggatctggactttcccactgggtgttggtaacaacctcccttcaccctcaacaagggccatgttgggtaggggtgggactggattattttaaagaaaataccattcatttagaacatctgttagttgagggtagaatttatttattttttatttatttatttatttattttttgagacggagttctctgttctgtcctctccctaaagtatatctctctctcaagggagtcatttgaaaatggagaaagtcccccagaataccccaggcctataacgatcacagccacggatggggacaatctgccttctgaaggaagcaggcaaagccct

SEQ ID NO: 22977 - DNA, 435 bp, Homo sapiens
tctcagatgagaacctaacatctagttagtaaaaatctactcatagctcatattctttatttttctttctgtagcagcttctgcacttctattctatctaagactgcagaatttgtccaacttgacattcagattctgcttcaatttccatttggtgctactagcattgtagcttttaaatatttgatgactttctgaaaacaggcagttttcctagccatgtttgatgttttgagaaacacagaacttgacaaaaagtcaatccaattcatatatgcctcttatttaggaaatacaagcttattcaaagacacaaattagctttgctgttaaaagcattctgtttgaagagtttgaagtttaactggtggcaaacttccaccaatgtttccagattaatttttttaaatctccaaggcaatatgtttctccatg

SEQ ID NO: 22978 - DNA, 335 bp, Homo sapiens
  misc_feature (1)..(1): n is a, c, g, or t
ngttcggatatctagcaggtttgcctctcaatccataaacctgggtctctagtgaactgctattccagtctctaattccactgggctggaaattacagattggttgttactggactccaggaggctcccaaagtctcacagaaatccaggagacttaaatgatccaagggcaggaaagaaggctgctcatcccagcctagcagcggatttgctcctcagtcttcagtgtctaagctcagagcagttcctgcaagtctacctccaggcaagggaatctaccgaggtggggcacccctgggggctgtgcctctctaaggcacaccaggtaccctctt

SEQ ID NO: 22979 - DNA, 173 bp, Homo sapiens
acttcagctgtggcagttgcagaaggtcctgctacgtcatcctctctgccgtggtctctcgtgtcagtgttcactgtcagtttgggtggtcaaaatgaattttatctttcatgctttatgtttctaccctttactcaggctatcatacaataaaaagtattgcctgttttaat

SEQ ID NO: 22980 - DNA, 838 bp, Homo sapiens
ctctctctctcttctaacatcaatgcagctcctggtatgtggtcgttctcaggcccaaaggcccattttgcttttggctgcaactctgtaactctgtaacagagaccaagtgcctgcagggagcagatgtttggggcagtatctgctaaggtggctttgctgaaacttgtttctctcattgggtcttggaagtggcgaataggacgttcctatagaaaaactcagaaagagactgtgaaagataatcttaaagaggcactcacgaaacacaagctccttctccgggaaaaagaatcatcacccttgttatcccatgaaaattcatcttctccttttcagctgatatgaggacttgatctgtcctttcctataagtgccatctgtgtttaaatgaggctgttactctaactcaaagcagacttgcaagagtaaaataatcaatcttcatcatattgctgcactttcgacagttaattttctagagtaatttgtcattgtgaggagcataagatttgtctgaatttgtgtcaaaggttattgactgaattgccacctcatcttttcagtcaatctataaatatgggcaagtttgggcagaggctaatggccttctcactaaggggatgagattgtccaagttaggcaactgataagaggtagaaatatctattgtgtcacccatttcttgtggtagcattgacttaaagttaatctcagaaacttcacttaaccttcttaatccttttcttcctgtaaaacaaggctaaaaattgtcataactatattctagtttccacaaaagctaatctaagtcttaaaaattaaaatttttattgtg

SEQ ID NO: 22981 - DNA, 420 bp, Homo sapiens
ccacaaggactcaaatatagaagtacagagtccttctcaggccatatttagtttgctttaacaatatgttatgaaagttttaagagtcatacattcttctttttatattctaaaagtattcaatattagatgatttaaaagccacattttaaaaaattttttgattttttttaagttccggagtacatatgcaggatgtgcaggtaggttacacaggtaaacatgtgtcatggtgttttgctgcacctatcaacccatcacctaggtattaagcccagcatgcattagctttcttccctaatgctctcaccacccctactctcccctgacaggccccagtgtgtgttattcccctccctgtgtccatgtgttctccttgttcgctcccacttataagcgagaacatgcagtgtttggttt

SEQ ID NO: 22982 - DNA, 415 bp, Homo sapiens
agcaccatttattaagcggtgtatcctttcccccagtttatgtttttgtatgctttgtcaaagatcagttagttgtgagtatttggctttatttctgggttccttcctgttctgttctattggtctatgtatctacttttatatcaatatcatgctgttttggttactatagccttgtagtataagttgaactcaggttatgtgatgcctccagatctgtttttttgcttaggattgctttggttatttgggctctttttcagttccacataaaatttaggatttttttttccaattttgtgaaaagcaatgttggtagtttgataggaattgcattgaacatataggttgctttgggccgtatgatcattttcatgatactgattctcccaatccatgagcgtgagatgtattt

SEQ ID NO: 22983 - DNA, 321 bp, Homo sapiens
tgttccttatggtggagtggaaaaaacccagagtccagcacatctggattcttgtctctctctcctaaccaaccgtgtgtgacttgagtagagcacgtgcccctctaagtctcggtgctcttatctgtgagctggggatgatagtgataactccatgggattgttgggaagaatacatgagataaagtttttcaaatgcttgggaccgtgtatgactacaaagtttatcgtcccagcactttgggaagcagaggtaggaggatggcttgagcccagaagtttgaggttacggtgagctttgattgcactgctacagtgtac

SEQ ID NO: 22984 - DNA, 189 bp, Homo sapiens
tttgaagaccaagtcatggagcatgacctcttagttactgaccttttgttatagattaacttctttccttattttcttgtttctgtctcagaccagattgtatctgagataaaagacatcttggctgaggtaaaagaccccttgactattacatccttaacatggaatgttaaatacacctttcccaaa

SEQ ID NO: 22985 - DNA, 189 bp, Homo sapiens
ctgtgccactctgtcccacacccacccccgtgcctactgttggcggagtccttttggagcatatttccacagccatacccccacccccacccccagtctcagtgccccagagcctgctggggaaccagtgggccagggaatggtgacataagccatctcccgtggaggggcaggcccgttttgaatgac

SEQ ID NO: 22986 - DNA, 310 bp, Homo sapiens
aactccaaagtctatactcttcctttatactactccgtttccctattacctgtgaagatgacagaaggaaagatcagggagaaaggggatgacttgagttttgaaattctgataggatcaaatttgagggaagttttagttctctaatacagagcagagtgattctcttgagtcaaggatgtgtgtgggaaagagtaacctagaatgggactaagacccccttcaggtcacctagtagctccttgtagatgggtcgaaggatttgagaaattgaagaaaagtgtttacatgaaagaggaaagtactattt

SEQ ID NO: 22987 - DNA, 408 bp, Homo sapiens
gcactccttaccccctgatggcttgtgagctctgggaagacagaaccacaccttatccctttttgtatttacagtacccaaaagaatgttctaattaatgaattcccactagaccagaaactcttgagtgcatgcagagaaagtagaacactctgtccctgctcctgtgacttgcccggccctgggaagctgacacacacatcctggtcaataagcctgacataccctgaggtcaggccccatctatcatggcctcatcaagcaaacccacagggagccaggattctagtctcgagagagggagcactttctaaaatatcgtaagtcttaaactccatcctccataagaacaacagtctttaggtttccagagaacctaaaatgacatctcacgctataaaatgaagg

SEQ ID NO: 22988 - DNA, 273 bp, Homo sapiens
ggtcgacctcattggaccgtatacttacatgagtgagttttgttgcatgtaaatcatactacaataggccgagcatgagagctcatgcctgtagtcccacttgaaaagatgtttaacatcattagtcattagtgaaatgcaaattaagatcaccgtgagacattactacctgtctgttagactagagaaattacaggtggctcacacttgtaatcccaacacttgagaaggctgagacggcgagatcaattgccctcaggtgttcgagaccag

SEQ ID NO: 22989 - DNA, 196 bp, Homo sapiens
tttaatcactgaatgtattctgagtaactgtgtttctctgtcccatagataacattgttttgcagtttttagcaatgtaaagcaaatactgtcaccattttactggtaatccaagcccttgttaaatgttattccaaggcttaaaataacactggcatttagtgtcgataataaagtacaggttgagtatccctaa

SEQ ID NO: 22990 - DNA, 609 bp, Homo sapiens
caattcaacaagaggatataacaattctaaaaatatatacactcaacaccagagtacacaaacatataaagcatatattattagatctaaaaggagagacatcctgcaatataataagagtagaagtctttaacaccccactttcaacaatgaacagatcaactagatagaaaaccaacaaagaaacattggacttacaatgacatacaccaaatgaacctagcagaaatatacagaagattccgcccaacagctatggaatacacattctcctcaactgcacatgaaacatttttcaggatagatcgtatttcaggccacaaaataagtcttaacaaattgaagaagatagagataatttaagtatttttttaggccacaatggtatagaactagaaatcaatcataacaaaaacttcagtaaccttactaatacatgggaaattaaacaagatgctcccaagtaaccaaaaggccaaagaagaaattaaaaggaaaattaaacctttctttgagacaaatgtacatggaaatacatcatatcaaaccctataagacacaggaaaagctgttcagagaggacagtttataacaaaaaatgcctacatg

SEQ ID NO: 22991 - DNA, 312 bp, Homo sapiens
tagtgttcaagacagcgatatgttggtttttcaagctgtaaacaagtttgatgcacatatgggttcctgtttcccttgcattcaaactctggacccttctgagtatctgtaactgacacattgtagaccacaaatttagatggagggaatgctttctaatactgagtcagctgcctctctgctaccctaattactgtttgataataacattttccagtgggacaaaatgtggaggtgaaagacagtgatattgatgatcctgaccctgtgtaagcctaggctaatgtgtgtgtttgtgtcctagattttaac

SEQ ID NO: 22992 - DNA, 3737 bp, Homo sapiens
ctcgatctgagccacaacttcatatccagctttccgtggagcgacctgcgcaacctgagcgcgctgcagctgctcaaaatgaaccacaaccgcctgggctctctgccccgggacgcactcggtgcgctacccgacctgcgttccctgcgcatcaacaacaaccggctgcgtacgctggcgcctggcaccttcgacgcgcttagcgcgctgtcacacttgcaactctatcacaatcccttccactgcggctgcggccttgtgtggctgcaggcctgggccgcgagcacccgggtgtccttacccgagcccgactccattgcttgtgcctcgcctcccgcgctgcagggggtgccggtgtaccgcctgcccgccctgccctgtgcaccgcccagcgtgcatctgagtgccgagccaccgcttgaagcacccggcaccccactgcgcgcaggactggcgttcgtgttacactgcatcgccgacggccaccctacgcctcgcctgcaatggcaacttcagatccccggtggcaccgtagtcttagagccaccggttctgagcggggaggacgacggggttggggcggaggaaggagagggagaaggagatggggatttgctgacgcagacccaagcccaaacgccgactccagcacccgcttggccggcgcccccagccacaccgcgcttcctggccctcgcaaatggctccctgttggtgcccctcctgagtgccaaggaggcgggcgtctacacttgccgtgcacacaatgagctgggcgccaactctacgtcaatacgcgtggcggtggcagcaaccgggcccccaaaacacgcgcctggcgccgggggagaacccgacggacaggccccgacctctgagcgcaagtccacagccaagggccggggcaacagcgtcctgccttccaaacccgagggcaaaatcaaaggccaaggcctggccaaggtcagcattctcggggagaccgagacggagccggaggaggacacaagtgagggagaggaggccgaagaccagatcctcgcggacccggcggaggagcagcgctgtggcaacggggacccctctcggtacgtttctaaccacgcgttcaaccagagcgcagagctcaagccgcacgtcttcgagctgggcgtcatcgcgctggatgtggcggagcgcgaggcgcgggtgcagctgactccgctggctgcgcgctggggccctgggcccggcggggctggcggagccccgcgacccgggcggcgacccctgcgcctactctatctgtgtccagcggggggcggcgcggcagtgcagtggtcccgcgtagaggaaggcgtcaacgcctactggttccgcggcctgcggccgggtaccaactactccgtgtgcctggcgctggcgggcgaagcctgccacgtgcaagtggtgttttccaccaagaaggagctcccatcgctgctggtcatagtggcagtgagcgtattcctcctggtgctggccacagtgccccttctgggcgccgcctgctgccatctgctggctaaacacccgggcaagccctaccgtctgatcctgcggcctcaggcccctgaccctatggagaagcgcatcgccgcagacttcgacccgcgtgcttcgtacctcgagtccgagaaaagctacccggcaggcggcgaggcgggcggcgaggagccagaggacgtgcagggggagggccttgatgaagacgcggagcagggagacccaagtggggacctgcagagagaggagagcctggcggcctgctcactggtggagtcccagtccaaggccaaccaagaggagttcgaggcgggctctgagtacagcgatcggctgcccctgggcgccgaggcggtcaacatcgcccaggagattaatggcaactacaggcagacggcaggctgaacctccgcccgtccggcccgcccattcccgacctccacctagggtgcctgggagcagcagtctagggctggcaggacttatgtcccccgtccccaaccttcacctactcctcccccttactactccccaaccttgactaccagggacttctattagggagtgggccgatttcaccagtccctgctacccacggctgccattctccctgcgggctgaatccccttccccgccaagcacagtgtttatcttaccccatgcaagactccacccgcagacggtgggcgatatctatgtccctccattcccgtcgcgattatctgcgaaatccaccccgcagcccgccccaccgtgggctctggagccagaggaaacgagcgaagactttggaaacctcgcggtaacgcggtggtttcgggggccagccaaggccagtggagtgctgtggggtcccacctcgacccctcctcctccctttctttctttcctttttttttattttttaattttatttatttatttatttattttttgacggagtcttggtctgtcgccaggctggagtgcagtggcgcgatctcggctcactgcatcttccgcctcccgggttcaagcgattctcctgcctcagcctgcctagtagctgggactacaggcgcgcgccaccacgaccagctaatttcttctatttttagtagagacggggtttcaccatgttggccaggatggtctggatctcttgacctcaggtgatccatctgcctcggcctctcaaagtgctgggattacaggcgtgaggcaccgcgcccggcccctcctccctttcaatccctactcccagaagccgggattcgtggcaacccctagtttttagttccaaagcctcctgccggcagggaaccaaatccttctgtcctcccacccccaccccacttctggccagttggagtccagcccggtgcctggggcgcctttcagctccgcgctcagattttcctgttttcgttgttttcaaagacagcgacatttcgggtctggtgctaacacccccttcccagcctctgggaaaatcgagtgtgtgtgtcggggggtagggagggaatgcgttttctgtcgtctctctcctaacttaaagcgccgcaggaccgcgcgccccttggcggctgagcctgtggacttggtcgcgggccaatttcgttgtccgtgtgttgggctttccggaggtctgtgcgcccaacagcgccgctcccgcggctccacccgacccagaccctagctggaaagcgccggaggcggaggaagctgactgtggcctcccgggccgcggctctctggagggctcgcgccctagttcgcacaaagcctgctcgtgactgtgcgactgtgcgacgggatccggatggagccgagcccctccgtcctcgcgtctcggtcctcgcgtcgccccgccccacccgcccctgcttcggcgggaatcgtgtttgcccggcgtgtagtccctgacaagcgtgccctgtaggagaaaagtctgtgtcctgtgaagtgtgaccgtgtagtgtaggggggcgggcgggggggcggatgggcggggagggagggaaggggaggggcgcggcgcggcgactcggggcggggttcttttttccattttgaaagaaagcgtcggggttggggtggggggagtttcagtcctcgggatcagccctctccgcgaagcgcagcacaagcgcgggcctgggacggagtagccccccggagcccgtgcccttttctaaacgcgtctgtatgcagtcaataaaacaatcgatttg

SEQ ID NO: 22993 - DNA, 394 bp, Homo sapiens
ctttgttggatgcatagtttgcaaataattttcccattctgtagattgtttgtttactctgttgacagtttcttttgctgtgtaaaagctctttagtttaattagttctcacttgtcaatttttggtttttgttgcaattgcttttgaggatatgctgataaattctttgtcaaagctgatgtcaagaatggtgtttcccacgtgtatgagtctgttctcatgctgctaataaagacatacctgagactgaataatttataaaggaaagaggtttaattgactcacagttcagtatggctggggaggcctcaggaaacttacaatcatggtggaaggagaagcaagcacatccttcctcacatggcagcagcaaggaaaattaatgagcaaaag

SEQ ID NO: 22994 - DNA, 6398 bp, Homo sapiens
cgcggacccactgggttgccaagctcgcgccggatgcggagcgcggtgctgccggtggagcttcaggtcttgatagactttctgtaaagaaggaatgatttggtgatggagtgttcccactgaccgatggactcaaagaagagaagctcaacagaggcagaaggatccaaggaaagaggcctggtccatatctggcaggcaggatcctttcccataacaccagagagattgccaggctggggaggaaagactgttttgcaggcagccctcggagtgaaacatggagttcttctgactgaagatggtgaggtctacagctttgggactcttccctggagaagtggaccagtggagatttgtccaagtagccccattctagaaaatgccctggttgggcaatatgttattactgtggcaacaggaagcttccatagtggagcagtgacagacaatggtgtcgcgtacatgtggggagagaattctgctggccagtgtgcagtagccaaccagcagtatgtgccggaaccaaatcctgtcagcattgctgattctgaggccagccctttgttagcagtcaggattttacagttggcgtgtggcgaggagcacactctggcattgtcaataagcagagagatttgggcatggggtaccggttgtcagttgggtctcattaccactgccttcccagtgacaaagccgcaaaaggtagaacatcttgctgggcgagtggtgcttcaagttgcctgtggtgctttccacagcttagcccttgtacaatgcctcccttcccaggatctgaagccagtcccagaacgatgcaaccagtgcagccagctcttgattactatgactgacaaagaagaccatgtgattatatcagacagtcattgttgcccattaggtgtgacactgacagaatctcaggcagaaaaccatgccagcactgctctcagcccctccactgaaacccttgacaggcaggaagaagtatttgagaacactcttgtagcaaatgatcagtctgttgctactgaactgaatgcagtaagtgctcagatcacaagcagcgatgccatgtcctctcaacaaaatgtcatgggaacaactgaaatttcctctgccagaaacataccatcataccctgacacccaagcagtcaatgaatacctacggaaactgtcagatcattcagtaagagaggactcagagcatggtgaaaagccagtgccatctcagcctcttttagaagaagcaattcctaatctccacagcccgcctaccacaagcacctcagccctaaacagcctggtggtctcttgtgcatctgctgttggtgtgagagtggctgctacttatgaagctggtgccttgtcactgaagaaagttatgaacttttatagtacaaccccttgtgaaactggagctcaggcaggcagtagtgccattggccccgaaggtttgaaagatagcagggaagaacaggttaaacaggaatcaatgcaaggaaagaaaagttcaagtcttgtggatatcagagaagaagaaacagagggaggcagtcgaagactctccctccctggattgttgtcacaagtttcccccaggctcttaagaaaggctgcacgggtgaaaacgaggacagtggttctgacccccacatacagtggagaagcagatgcgctcctgccttctctgagaacagaagtgtggacctgggggaaagggaaggaagggcagctggggcacggcgatgttctgcctaggcttcaaccgttgtgtgtaaaatgtctggatggcaaagaagtaatccatctggaggcaggtggttaccattctcttgcacttactgcgaaatcccaggtttactcatggggtagcaatacctttggtcaacttgggcattccgattttccaacaacagttcctcgtcttgcaaagataagcagtgaaaatggagtctggagcatagctgcaggcagggattattccctgtttttagtggatacagaagacttccagcctgggttatattacagtggccgacaggaccctacagaaggtgacaaccttccagagaatcacagtggttctaagactccagtacttctctcctgtagtaagcttggatatataagcagagtgacagcaggaaaagatagctatttagccttggtggataaaaacattatggggtatattgccagtctccacgagttagctactacagaaagacgattctattcaaaactaagtgatatcaaatctcagattctcaggcctcttctcagtttagaaaatttgggcactacaactacagtccagctgttgcaggaggtggctagccgattcagcaagctgtgttacctcattggtcagcatggagcctcattgagcagcttccttcatggggtaaaggaagccaggagtttggtcatcctgaagcattcaagtctcttcttggatagttatacagagtattgcacatctattacaaatttcctggttatgggaggattccagcttcttgctaagcctgccattgatttcctaaataaaaaccaagagctgttgcaagatttgtcagaagtgaatgacgaaaacactcagttgatggaaatactgaatactttgtttttcttgccaatcagacgacttcataattacgcaaaagttttgctaaagcttgctacttgttttgaagtggcatctccagaatatcagaaactgcaggattccagttcttgttatgagtgtcttgctctccatctcggcaggaaaaggaaggaagcagaatacacactgggcttctggaagaccttccccggaaaaatgacggattccttgaggaagccagagcgtcgactgctgtgtgagagtagtaaccgagccctgtctctgcagcatgctgggaggttttccgtgaattggttcattctctttaatgatgccctggtccatgcccagttctccacgcaccatgttttccctctggccacgctgtgggcagagccactgtctgaagaagctggtggtgtgaatggcttaaagataactacacctgaggagcagttcactctcatttcatctacaccccaggaaaagacaaagtggctacgagctataagccaagccgtagatcaggctttgagagggatgtctgatctccccccttatggaagtggtagcagtgttcagagacaggaaccacccatttcacgcagtgccaaatatactttctacaaggatcctcgcctaaaggatgccacctatgatggacgctggctttcagggaagcctcatggcagaggggttttgaagtggcctgatggaaagatgtattctggcatgttcaggaatggcttggaagatgggtatggagaatacagaatcccaaacaaggcaatgaacaaagaagaccattatgtgggccattggaaagaaggaaaaatgtgcggtcaaggagtctacagctatgcttctggtgaagtatttgagggctgttttcaagataatatgcgtcatggtcatggtcttctacgaagtgggaaattgacgtcctcttctcctagtatgttcattggccagtgggtaatggataagaaagcaggatatggtgtctttgatgatatcactaggggggaaaagtatatgggaatgtggcaagatgatgtgtgtcaagggaatggtgtggtggttacccagtttggattatactacgagggcaactttcaccttaataaaatgatgggaaatggggttttgctttccgaagatgatactatctatgaaggagaattttcagatgactggactcttagtggaaagggaacactgactatgccaaatggagactacattgaaggttattttagtggagaatggggatctgggataaaaatcactggaacctacttcaaacctagtctatatgagagtgataaagacagacctaaagttttcaggaagctaggaaacctggcagtgccagctgatgagaagtggaaagcggtgtttgacgaatgttggcgccaactgggctgtgagggcccaggccaaggggaagtttggaaagcatgggacaatattgctgtggccttgaccaccagtcggcgccagcacagagacagtccagaaatactgagtcgttcacagactcagacactagagagtttggaattcattccacagcatgttggtgccttctctgtggagaaatatgatgacatcaggaaatatttaataaaggcctgtgacactcctctgcaccccctgggcaggcttgtggagacactggttgcagtgtatagaatgacatacgtgggcgtaggagccaaccgcaggttattgcaggaggctgtaaaggagattaagtcctatcttaagcgaattttccagctggtgaggttcttatttcctgagctgcctgaagaaggcagcacaattcctctctctgctcctctgccaaccgaaaggaagtctttttgcactgggaagtcagattcccgatctgaatcaccagagccaggttatgtagtaacgagttctggattattgcttcctgtgctgctacctcggctctacccaccgctgtttatgctttatgctttggataatgatcgcgaggaagacatttactgggaatgtgtccttcgactaaataagcagccagatattgctctcctgggctttcttggggtgcagaggaaattttggccagcaaccttgtcaatccttggagagagtaaaaaggttttgccaaccacgaaagatgcttgttttgcctcagcagtagaatgtctgcagcagatcagcacaacatttaccccatcagacaaacttaaggtcatccagcagacttttgaggagatctctcagagtgtcctggcgtcactccacgaagacttcttgtggtccatggatgacttgtttcctgttttcttatatgtggtgctacgggccaggattaggaatttaggctctgaggtacacctcattgaggatctaatggacccctatcttcagcatggggaacagggtataatgttcaccaccttgaaggcatgttactaccagattcagcgtgagaagcttaactaggctgcataacagcttgaaaactggattatctactacagagtgttataacaccatctggagtcttcctgtagtggcaaaaaagaacagtgttgaaattggaaaggactttgtgttatttaggttgttagaatgagccttaccaataataagagccctgagcccagaaaaaaggactgtatagtttaaagggaggattgaaagggaggtaaaaaatcagattagaccagttcttggcctatgataagttccaaaaataccatttatctactatttgaaaaaagaagaggatatcccttcctacagtaaagggtatgtcagctacatgaagttgtaagaaaagcttccagtagagcttcttatattaaagaagttgatggatatttttgaatttctggtttgcctgaatccacctgcagttaccccgatccgtttgcaagaaccagatcgtacttgaaactatagtggccacactctgccttcctgagtcccttccagtcatgtgtgcatcatgtctctttgccaagggaggggagaaaggaacttttaaactgcagttttaactttttctaagctgtttcttgatgggagaggttctgtgcaaaactaccacattctgtccccaaaatgtggaatgcatccaaataggagtcttctgcctcttaacttaaaagaacataggaattttgtttttggtttctttatcatgctacagagagtgaatacactggaattcagacaccgactctgagctgctaggaacctcatttgtccatgtgcaaacgctgtattccaaggcctgtgaatggcagcctgaggaagttttgcatgcaggctgtgttttcgagcaggactaacaactgggaaataagcaaaaaactgcatcgatccccagcctggtgttgttcttccctatacttcacactgaactcaggatgggaagaaaaaggaaacaagctttggctttttccatctcaaaagtattgtggcacctcaacatttcagtgttttgctttttaaaaaatgccctattgtaagttgttggtttatactgtataagtaacactagtagctgttttgaataacataggtgctcttcctcatctcatctcctacaccgtggtgagcatacagagtgtcctgatttgtgttaagtgactgagaagatgttaattacttttgaaaaaggatcatggtttttgctctactttataatcaagacaagtgtttattaaaatactgttttggaatgttggctgtaatgtaacagcaattttcataataaaaggcattcatcttta

SEQ ID NO: 22995 - DNA, 2670 bp, Homo sapiens
cgcggacccactgggttgccaagctcgcgccggatgcggagcgcggtgctgccggtggagcttcaggtcttgatagactttctgtaaagaaggaatgatttggtgatggagtgttcccactgaccgatggactcaaagaagagaagctcaacagaggcagaaggatccaaggaaagaggcctggtccatatctggcaggcaggatcctttcccataacaccagagagattgccaggctggggaggaaagactgttttgcaggcagccctcggagtgaaacatggagttcttctgactgaagatggtgaggtctacagctttgggactcttccctggagaagtggaccagtggagatttgtccaagtagccccattctagaaaatgccctggttgggcaatatgttattactgtggcaacaggaagcttccatagtggagcagtgacagacaatggtgtcgcgtacatgtggggagagaattctgctggccagtgtgcagtagccaaccagcagtatgtgccggaaccaaatcctgtcagcattgctgattctgaggccagccctttgttagcagtcaggattttacagttggcgtgtggcgaggagcacactctggcattgtcaataagcagagagatttgggcatggggtaccggttgtcagttgggtctcattaccactgccttcccagtgacaaagccgcaaaaggtagaacatcttgctgggcgagtggtgcttcaagttgcctgtggtgctttccacagcttagcccttgtacaatgcctcccttcccaggatctgaagccagtcccagaacgatgcaaccagtgcagccagctcttgattactatgactgacaaagaagaccatgtgattatatcagacagtcattgttgcccattaggtgtgacactgacagaatctcaggcagaaaaccatgccagcactgctctcagcccctccactgaaacccttgacaggcaggaagaagtatttgagaacactcttgtagcaaatgatcagtctgttgctactgaactgaatgcagtaagtgctcagatcacaagcagcgatgccatgtcctctcaacaaaatgtcatgggaacaactgaaatttcctctgccagaaacataccatcataccctgacacccaagcagtcaatgaatacctacggaaactgtcagatcattcagtaagagaggactcagagcatggtgaaaagccagtgccatctcaggtacctgctcaattttataaaataaaagtgtgtctagagttgaactgtatgggcttttctttagaaactttaaaatgagtaaggcttggtagcattttttattttttgagtttgattataattttgttttatcaggcaagcctagataaaggaaagaacctggattaattcaaaatcactctttatgtttgttctggccctttatgatattgaaaggtgtcatgttgggcttgttttataagtaggagcatttcatttttttttcttgctagtactttttttctatggctaaagtactgaattttggtgggccctgaatagtttaatataactagagattcacaaagattcttcttacttgtgtttgtaacactcttcagaattctgtagagaaaagtcttttccttctttaacagggaagattgttttgtggcagatccttcaattgtaggcagatttaaaacttacaggcaattacatgtttcagtttttttcaattatagctgtggtccttactgggcttaatttgaagaggtggctaatattttatctttttgtttgtttgtttttgagatggggtcttgctctgtcacccaggctggagtgcagtaatgcgattgtggctcactgcagcctcgatctcccaggttcaagcgatcctcccatttcagccttccaagtagctgggactatacacatgccaccacacctgctgattttatttttaagtagagtagagcctgttgcccaggctcatctcaaactcctgagctcaagcaatcctcccacctcagcctcccaaagtgttgagattacaggcatgagccatcatgcccagcctattttatatatcttattaaaactattttcattttgaagatttgtggtagaatgaacaaaagttgtttatcagtagcacatggtaaagtttgagttcccgcttaaactaaattgttttaaaaggattatttctgtgttttactcttagtgtggccttttgattttgctttaccaaaactgtaagaaaacaaaacaaaagatcatactcataaaagatctgtcctgcagtgtttctttttaggtttttgaaaccacatagcctcttgattctcaattcttattgtttactctgtcagaatgtgaacatgaaggtatttttagaaatagtctttatttcacaatctattcactgaaacttgtgggtatttgaatttttaaaaaaatcaaggataagctgtttggagaaaggtattataaagtctgaacaaagcaaaagtagtagtttaacaagaatgcatgtagaaaattcttagactgtacatgcttatcacattttacttactttgttaaacattggaagtttttgttacttatgctagtaacaatgtgtgtgtttctattgaattaaatttaatttatttaaattaaatg

SEQ ID NO: 22996 - DNA, 372 bp, Homo sapiens
agttcagtgtgaagtatagggaagaacaacaccaggctggggatcgatgcagtattgtggcacctcaacatttcagtgttttgctttttaaaaaatgccctattgtaagttgttggtttatactgtataagtaacactagtagctgttttgaataacataggtgctcttcctcatctcatctcctacaccgtggtgagcatacagagtgtcctgatttgtgttaagtgactgagaagatgttaattacttttgaaaaaggatcatggtttttgctctactttataatcaagacaagtgtttattaaaatactgttttggaatgttggctgtaatgtaacagcaattttcataataaaaggcattcatcttta

SEQ ID NO: 22997 - DNA, 273 bp, Homo sapiens
tgttgtgagtgtaaattagtgtgatgagtaggggaagggagcctactagggtgtagaataggaagtatgtgcctgcgttcaggcgttctggctggttgcctcatgggggagacggacctcgtggtttgtgattcttatatgtggtgctacgggccaggattaggaatttaggctctgaggtacacctcattgaggatctaatggacccctatcttcagcatggggaacagggtataatgttcaccaccttgaaggtgagtatagttattattt

SEQ ID NO: 22998 - DNA, 6530 bp, Homo sapiens
cgcggacccactgggttgccaagctcgcgccggatgcggagcgcggtgctgccggtggagcttcaggtcttgatagactttctgtaaagaaggaatgatttggtgatggagtgttcccactgaccgatggactcaaagaagagaagctcaacagaggcagaaggatccaaggaaagaggcctggtccatatctggcaggcaggatcctttcccataacaccagagagattgccaggctggggaggaaagactgttttgcaggcagccctcggagtgaaacatggagttcttctgactgaagatggtgaggtctacagctttgggactcttccctggagaagtggaccagtggagatttgtccaagtagccccattctagaaaatgccctggttgggcaatatgttattactgtggcaacaggaagcttccatagtggagcagtgacagacaatggtgtcgcgtacatgtggggagagaattctgctggccagtgtgcagtagccaaccagcagtatgtgccggaaccaaatcctgtcagcattgctgattctgaggccagccctttgttagcagtcaggattttacagttggcgtgtggcgaggagcacactctggcattgtcaataagcagagagatttgggcatggggtaccggttgtcagttgggtctcattaccactgccttcccagtgacaaagccgcaaaaggtagaacatcttgctgggcgagtggtgcttcaagttgcctgtggtgctttccacagcttagcccttgtacaatgcctcccttcccaggatctgaagccagtcccagaacgatgcaaccagtgcagccagctcttgattactatgactgacaaagaagaccatgtgattatatcagacagtcattgttgcccattaggtgtgacactgacagaatctcaggcagaaaaccatgccagcactgctctcagcccctccactgaaacccttgacaggcaggaagaagtatttgagaacactcttgtagcaaatgatcagtctgttgctactgaactgaatgcagtaagtgctcagatcacaagcagcgatgccatgtcctctcaacaaaatgtcatgggaacaactgaaatttcctctgccagaaacataccatcataccctgacacccaagcagtcaatgaatacctacggaaactgtcagatcattcagtaagagaggactcagagcatggtgaaaagccagtgccatctcagcctcttttagaagaagcaattcctaatctccacagcccgcctaccacaagcacctcagccctaaacagcctggtggtctcttgtgcatctgctgttggtgtgagagtggctgctacttatgaagctggtgccttgtcactgaagaaagttatgaacttttatagtacaaccccttgtgaaactggagctcaggcaggcagtagtgccattggccccgaaggtttgaaagatagcagggaagaacaggttaaacaggaatcaatgcaaggaaagaaaagttcaagtcttgtggatatcagagaagaagaaacagagggaggcagtcgaagactctccctccctggattgttgtcacaagtttcccccaggctcttaagaaaggctgcacgggtgaaaacgaggacagtggttctgacccccacatacagtggagaagcagatgcgctcctgccttctctgagaacagaagtgtggacctgggggaaagggaaggaagggcagctggggcacggcgatgttctgcctaggcttcaaccgttgtgtgtaaaatgtctggatggcaaagaagtaatccatctggaggcaggtggttaccattctcttgcacttactgcgaaatcccaggtttactcatggggtagcaatacctttggtcaacttgggcattccgattttccaacaacagttcctcgtcttgcaaagataagcagtgaaaatggagtctggagcatagctgcaggcagggattattccctgtttttagtggatacagaagacttccagcctgggttatattacagtggccgacaggaccctacagaaggtgacaaccttccagagaatcacagtggttctaagactccagtacttctctcctgtagtaagcttggatatataagcagagtgacagcaggaaaagatagctatttagccttggtggataaaaacattatggggtatattgccagtctccacgagttagctactacagaaagacgattctattcaaaactaagtgatatcaaatctcagattctcaggcctcttctcagtttagaaaatttgggcactacaactacagtccagctgttgcaggaggtggctagccgattcagcaagctgtgttacctcattggtcagcatggagcctcattgagcagcttccttcatggggtaaaggaagccaggagtttggtcatcctgaagcattcaagtctcttcttggatagttatacagagtattgcacatctattacaaatttcctggttatgggaggattccagcttcttgctaagcctgccatgtaagcaaacccacaccttccagttatcattctctccgccaaagatgacattttatagtgctctgttttcgagtgctcagggaaagctttgacttcatcattttaccaaacaagtcaaaatataaactttcatgatttcctaaataaaaaccaagagctgttgcaagatttgtcagaagtgaatgacgaaaacactcagttgatggaaatactgaatactttgtttttcttgccaatcagacgacttcataattacgcaaaagttttgctaaagcttgctacttgttttgaagtggcatctccagaatatcagaaactgcaggattccagttcttgttatgagtgtcttgctctccatctcggcaggaaaaggaaggaagcagaatacacactgggcttctggaagaccttccccggaaaaatgacggattccttgaggaagccagagcgtcgactgctgtgtgagagtagtaaccgagccctgtctctgcagcatgctgggaggttttccgtgaattggttcattctctttaatgatgccctggtccatgcccagttctccacgcaccatgttttccctctggccacgctgtgggcagagccactgtctgaagaagctggtggtgtgaatggcttaaagataactacacctgaggagcagttcactctcatttcatctacaccccaggaaaagacaaagtggctacgagctataagccaagccgtagatcaggctttgagagggatgtctgatctccccccttatggaagtggtagcagtgttcagagacaggaaccacccatttcacgcagtgccaaatatactttctacaaggatcctcgcctaaaggatgccacctatgatggacgctggctttcagggaagcctcatggcagaggggttttgaagtggcctgatggaaagatgtattctggcatgttcaggaatggcttggaagatgggtatggagaatacagaatcccaaacaaggcaatgaacaaagaagaccattatgtgggccattggaaagaaggaaaaatgtgcggtcaaggagtctacagctatgcttctggtgaagtatttgagggctgttttcaagataatatgcgtcatggtcatggtcttctacgaagtgggaaattgacgtcctcttctcctagtatgttcattggccagtgggtaatggataagaaagcaggatatggtgtctttgatgatatcactaggggggaaaagtatatgggaatgtggcaagatgatgtgtgtcaagggaatggtgtggtggttacccagtttggattatactacgagggcaactttcaccttaataaaatgatgggaaatggggttttgctttccgaagatgatactatctatgaaggagaattttcagatgactggactcttagtggaaagggaacactgactatgccaaatggagactacattgaaggttattttagtggagaatggggatctgggataaaaatcactggaacctacttcaaacctagtctatatgagagtgataaagacagacctaaagttttcaggaagctaggaaacctggcagtgccagctgatgagaagtggaaagcggtgtttgacgaatgttggcgccaactgggctgtgagggcccaggccaaggggaagtttggaaagcatgggacaatattgctgtggccttgaccaccagtcggcgccagcacagagacagtccagaaatactgagtcgttcacagactcagacactagagagtttggaattcattccacagcatgttggtgccttctctgtggagaaatatgatgacatcaggaaatatttaataaaggcctgtgacactcctctgcaccccctgggcaggcttgtggagacactggttgcagtgtatagaatgacatacgtgggcgtaggagccaaccgcaggttattgcaggaggctgtaaaggagattaagtcctatcttaagcgaattttccagctggtgaggttcttatttcctgagctgcctgaagaaggcagcacaattcctctctctgctcctctgccaaccgaaaggaagtctttttgcactgggaagtcagattcccgatctgaatcaccagagccaggttatgtagtaacgagttctggattattgcttcctgtgctgctacctcggctctacccaccgctgtttatgctttatgctttggataatgatcgcgaggaagacatttactgggaatgtgtccttcgactaaataagcagccagatattgctctcctgggctttcttggggtgcagaggaaattttggccagcaaccttgtcaatccttggagagagtaaaaaggttttgccaaccacgaaagatgcttgttttgcctcagcagtagaatgtctgcagcagatcagcacaacatttaccccatcagacaaacttaaggtcatccagcagacttttgaggagatctctcagagtgtcctggcgtcactccacgaagacttcttgtggtccatggatgacttgtttcctgttttcttatatgtggtgctacgggccaggattaggaatttaggctctgaggtacacctcattgaggatctaatggacccctatcttcagcatggggaacagggtataatgttcaccaccttgaaggcatgttactaccagattcagcgtgagaagcttaactaggctgcataacagcttgaaaactggattatctactacagagtgttataacaccatctggagtcttcctgtagtggcaaaaaagaacagtgttgaaattggaaaggactttgtgttatttaggttgttagaatgagccttaccaataataagagccctgagcccagaaaaaaggactgtatagtttaaagggaggattgaaagggaggtaaaaaatcagattagaccagttcttggcctatgataagttccaaaaataccatttatctactatttgaaaaaagaagaggatatcccttcctacagtaaagggtatgtcagctacatgaagttgtaagaaaagcttccagtagagcttcttatattaaagaagttgatggatatttttgaatttctggtttgcctgaatccacctgcagttaccccgatccgtttgcaagaaccagatcgtacttgaaactatagtggccacactctgccttcctgagtcccttccagtcatgtgtgcatcatgtctctttgccaagggaggggagaaaggaacttttaaactgcagttttaactttttctaagctgtttcttgatgggagaggttctgtgcaaaactaccacattctgtccccaaaatgtggaatgcatccaaataggagtcttctgcctcttaacttaaaagaacataggaattttgtttttggtttctttatcatgctacagagagtgaatacactggaattcagacaccgactctgagctgctaggaacctcatttgtccatgtgcaaacgctgtattccaaggcctgtgaatggcagcctgaggaagttttgcatgcaggctgtgttttcgagcaggactaacaactgggaaataagcaaaaaactgcatcgatccccagcctggtgttgttcttccctatacttcacactgaactcaggatgggaagaaaaaggaaacaagctttggctttttccatctcaaaagtattgtggcacctcaacatttcagtgttttgctttttaaaaaatgccctattgtaagttgttggtttatactgtataagtaacactagtagctgttttgaataacataggtgctcttcctcatctcatctcctacaccgtggtgagcatacagagtgtcctgatttgtgttaagtgactgagaagatgttaattacttttgaaaaaggatcatggtttttgctctactttataatcaagacaagtgtttattaaaatactgttttggaatgttggctgtaatgtaacagcaattttcataataaaaggcattcatcttta

SEQ ID NO: 22999 - DNA, 2718 bp, Homo sapiens
atcaggataattctggcctcatagaacaagttgggaagtgttccctcctcccctattttctgaaagtttgcgaagctttggtattatttcttctttgaatgtttgggagaattcaccaatgaagtcttctgggcctaagcattactttggaacactgactatgccaaatggagactacattgaaggttattttagtggagaatggggatctgggataaaaatcactggaacctacttcaaacctagtctatatgagagtgataaagacagacctaaagttttcaggaagctaggaaacctggcagtgccagctgatgagaagtggaaagcggtgtttgacgaatgttggcgccaactgggctgtgagggcccaggccaaggggaagtttggaaagcatgggacaatattgctgtggccttgaccaccagtcggcgccagcacagagacagtccagaaatactgagtcgttcacagactcagacactagagagtttggaattcattccacagcatgttggtgccttctctgtggagaaatatgatgacatcaggaaatatttaataaaggcctgtgacactcctctgcaccccctgggcaggcttgtggagacactggttgcagtgtatagaatgacatacgtgggcgtaggagccaaccgcaggttattgcaggaggctgtaaaggagattaagtcctatcttaagcgaattttccagctggtgaggttcttatttcctgagctgcctgaagaaggcagcacaattcctctctctgctcctctgccaaccgaaaggaagtctttttgcactgggaagtcagattcccgatctgaatcaccagagccaggttatgtagtaacgagttctggattattgcttcctgtgctgctacctcggctctacccaccgctgtttatgctttatgctttggataatgatcgcgaggaagacatttactgggaatgtgtccttcgactaaataagcagccagatattgctctcctgggctttcttggggtgcagaggaaattttggccagcaaccttgtcaatccttggagagagtaaaaaggttttgccaaccacgaaagatgcttgttttgcctcagcagtagaatgtctgcagcagatcagcacaacatttaccccatcagacaaacttaaggtcatccagcagacttttgaggagatctctcagagtgtcctggcgtcactccacgaagacttcttgtggtccatggatgacttgtttcctgttttcttatatgtggtgctacgggccaggattaggaatttaggctctgaggtacacctcattgaggatctaatggacccctatcttcagcatggggaacagggtataatgttcaccaccttgaaggcatgttactaccagattcagcgtgagaagcttaactaggctgcataacagcttgaaaactggattatctactacagagtgttataacaccatctggagtcttcctgtagtggcaaaaaagaacagtgttgaaattggaaaggactttgtgttatttaggttgttagaatgagccttaccaataataagagccctgagcccagaaaaaaggactgtatagtttaaagggaggattgaaagggaggtaaaaaatcagattagaccagttcttggcctatgataagttccaaaaataccatttatctactatttgaaaaaagaagaggatatcccttcctacagtaaagggtatgtcagctacatgaagttgtaagaaaagcttccagtagagcttcttatattaaagaagttgatggatatttttgaatttctggtttgcctgaatccacctgcagttaccccgatccgtttgcaagaaccagatcgtacttgaaactatagtggccacactctgccttcctgagtcccttccagtcatgtgtgcatcatgtctctttgccaagggaggggagaaaggaacttttaaactgcagttttaactttttctaagctgtttcttgatgggagaggttctgtgcaaaactaccacattctgtccccaaaatgtggaatgcatccaaataggagtcttctgcctcttaacttaaaagaacataggaattttgtttttggtttctttatcatgctacagagagtgaatacactggaattcagacaccgactctgagctgctaggaacctcatttgtccatgtgcaaacgctgtattccaaggcctgtgaatggcagcctgaggaagttttgcatgcaggctgtgttttcgagcaggactaacaactgggaaataagcaaaaaactgcatcgatccccagcctggtgttgttcttccctatacttcacactgaactcaggatgggaagaaaaaggaaacaagctttggctttttccatctcaaaagtattgtggcacctcaacatttcagtgttttgctttttaaaaaatgccctattgtaagttgttggtttatactgtataagtaacactagtagctgttttgaataacataggtgctcttcctcatctcatctcctacaccgtggtgagcatacagagtgtcctgatttgtgttaagtgactgagaagatgttaattacttttgaaaaaggatcatggtttttgctctactttataatcaagacaagtgtttattaaaatactgttttggaatgttggctgtaatgtaacagcaattttcataataaaaggcattcatcttta

SEQ ID NO: 23000 - DNA, 1586 bp, Homo sapiens
aaaaaactttgttttagaataagacgggaaatgaaaaaattttgtctatactaattacaagtaggcaaaagacagccactagataggggaactagaaaggaacagggaaaagtgaaatcagttaaatctgttgggccatcagctgaatttgttcataagggattttgtttctttagtcccatatgcattgctctctttatgtaatttctttaaaagtgaatttgaaattattttgaacttttcttccaggcatgttactaccagattcagcgtgagaagcttaactaggctgcataacagcttgaaaactggattatctactacagagtgttataacaccatctggagtcttcctgtagtggcaaaaaagaacagtgttgaaattggaaaggactttgtgttatttaggttgttagaatgagccttaccaataataagagccctgagcccagaaaaaaggactgtatagtttaaagggaggattgaaagggaggtaaaaaatcagattagaccagttcttggcctatgataagttccaaaaataccatttatctactatttgaaaaaagaagaggatatcccttcctacagtaaagggtatgtcagctacatgaagttgtaagaaaagcttccagtagagcttcttatattaaagaagttgatggatatttttgaatttctggtttgcctgaatccacctgcagttaccccgatccgtttgcaagaaccagatcgtacttgaaactatagtggccacactctgccttcctgagtcccttccagtcatgtgtgcatcatgtctctttgccaagggaggggagaaaggaacttttaaactgcagttttaactttttctaagctgtttcttgatgggagaggttctgtgcaaaactaccacattctgtccccaaaatgtggaatgcatccaaataggagtcttctgcctcttaacttaaaagaacataggaattttgtttttggtttctttatcatgctacagagagtgaatacactggaattcagacaccgactctgagctgctaggaacctcatttgtccatgtgcaaacgctgtattccaaggcctgtgaatggcagcctgaggaagttttgcatgcaggctgtgttttcgagcaggactaacaactgggaaataagcaaaaaactgcatcgatccccagcctggtgttgttcttccctatacttcacactgaactcaggatgggaagaaaaaggaaacaagctttggctttttccatctcaaaagtattgtggcacctcaacatttcagtgttttgctttttaaaaaatgccctattgtaagttgttggtttatactgtataagtaacactagtagctgttttgaataacataggtgctcttcctcatctcatctcctacaccgtggtgagcatacagagtgtcctgatttgtgttaagtgactgagaagatgttaattacttttgaaaaaggatcatggtttttgctctactttataatcaagacaagtgtttattaaaatactgttttggaatgttggctgtaatgtaacagcaattttcataataaaaggcattcatcttta

SEQ ID NO: 23001 - DNA, 4403 bp, Homo sapiens
cgcggacccactgggttgccaagctcgcgccggatgcggagcgcggtgctgccggtggagcttcaggtcttgatagactttctgtaaagaaggaatgatttggtgatggagtgttcccactgaccgatggactcaaagaagagaagctcaacagaggcagaaggatccaaggaaagaggcctggtccatatctggcaggcaggatcctttcccataacaccagagagattgccaggctggggaggaaagactgttttgcaggcagccctcggagtgaaacatggagttcttctgactgaagatggtgaggtctacagctttgggactcttccctggagaagtggaccagtggagatttgtccaagtagccccattctagaaaatgccctggttgggcaatatgttattactgtggcaacaggaagcttccatagtggagcagtgacagacaatggtgtcgcgtacatgtggggagagaattctgctggccagtgtgcagtagccaaccagcagtatgtgccggaaccaaatcctgtcagcattgctgattctgaggccagccctttgttagcagtcaggattttacagttggcgtgtggcgaggagcacactctggcattgtcaataagcagagagatttgggcatggggtaccggttgtcagttgggtctcattaccactgccttcccagtgacaaagccgcaaaaggtagaacatcttgctgggcgagtggtgcttcaagttgcctgtggtgctttccacagcttagcccttgtacaatgcctcccttcccaggatctgaagccagtcccagaacgatgcaaccagtgcagccagctcttgattactatgactgacaaagaagaccatgtgattatatcagacagtcattgttgcccattaggtgtgacactgacagaatctcaggcagaaaaccatgccagcactgctctcagcccctccactgaaacccttgacaggcaggaagaagtatttgagaacactcttgtagcaaatgatcagtctgttgctactgaactgaatgcagtaagtgctcagatcacaagcagcgatgccatgtcctctcaacaaaatgtcatgggaacaactgaaatttcctctgccagaaacataccatcataccctgacacccaagcagtcaatgaatacctacggaaactgtcagatcattcagtaagagaggactcagagcatggtgaaaagccagtgccatctcagcctcttttagaagaagcaattcctaatctccacagcccgcctaccacaagcacctcagccctaaacagcctggtggtctcttgtgcatctgctgttggtgtgagagtggctgctacttatgaagctggtgccttgtcactgaagaaagttatgaacttttatagtacaaccccttgtgaaactggagctcaggcaggcagtagtgccattggccccgaaggtttgaaagatagcagggaagaacaggttaaacaggaatcaatgcaaggaaagaaaagttcaagtcttgtggatatcagagaagaagaaacagagggaggcagtcgaagactctccctccctggattgttgtcacaagtttcccccaggctcttaagaaaggctgcacgggtgaaaacgaggacagtggttctgacccccacatacagtggagaagcagatgcgctcctgccttctctgagaacagaagtgtggacctgggggaaagggaaggaagggcagctggggcacggcgatgttctgcctaggcttcaaccgttgtgtgtaaaatgtctggatggcaaagaagtaatccatctggaggcaggtggttaccattctcttgcacttactgcgaaatcccaggtttactcatggggtagcaatacctttggtcaacttgggcattccgattttccaacaacagttcctcgtcttgcaaagataagcagtgaaaatggagtctggagcatagctgcaggcagggattattccctgtttttagtggatacagaagacttccagcctgggttatattacagtggccgacaggaccctacagaaggtgacaaccttccagagaatcacagtggttctaagactccagtacttctctcctgtagtaagcttggatatataagcagagtgacagcaggaaaagatagctatttagccttggtggataaaaacattatggggtatattgccagtctccacgagttagctactacagaaagacgattctattcaaaactaagtgatatcaaatctcagattctcaggcctcttctcagtttagaaaatttgggcactacaactacagtccagctgttgcaggaggtggctagccgattcagcaagctgtgttacctcattggtcagcatggagcctcattgagcagcttccttcatggggtaaaggaagccaggagtttggtcatcctgaagcattcaagtctcttcttggatagttatacagagtattgcacatctattacaaatttcctggttatgggaggattccagcttcttgctaagcctgccattgatttcctaaataaaaaccaagagctgttgcaagatttgtcagaagtgaatgacgaaaacactcagttgatggaaatactgaatactttgtttttcttgccaatcagacgacttcataattacgcaaaagttttgctaaagcttgctacttgttttgaagtggcatctccagaatatcagaaactgcaggattccagttcttgttatgagtgtcttgctctccatctcggcaggaaaaggaaggaagcagaatacacactgggcttctggaagaccttccccggaaaaatgacggattccttgaggaagccagagcgtcgactgctgtgtgagagtagtaaccgagccctgtctctgcagcatgctgggaggttttccgtgaattggttcattctctttaatgatgccctggtccatgcccagttctccacgcaccatgttttccctctggccacgctgtgggcagagccactgtctgaagaagctggtggtgtgaatggcttaaagataactacacctgaggagcagttcactctcatttcatctacaccccaggaaaagacaaagtggctacgagctataagccaagccgtagatcaggctttgagagggatgtctgatctccccccttatggaagtggtagcagtgttcagagacaggaaccacccatttcacgcagtgccaaatatactttctacaaggatcctcgcctaaaggatgccacctatgatggacgctggctttcagggaagcctcatggcagaggggttttgaagtggcctgatggaaagatgtattctggcatgttcaggaatggcttggaagatgggtatggagaatacagaatcccaaacaaggcaatgaacaaagaagaccattatgtgggccattggaaagaaggaaaaatgtgcggtcaaggagtctacagctatgcttctggtgaagtatttgagggctgttttcaagataatatgcgtcatggtcatggtcttctacgaagtgggaaattgacgtcctcttctcctagtatgttcattggccagtgggtaatggataagaaagcaggatatggtgtctttgatgatatcactaggggggaaaagtatatgggaatgtggcaagatgatgtgtgtcaagggaatggtgtggtggttacccagtttggattatactacgagggcaactttcaccttaataaaatgatgggaaatggggttttgctttccgaagatgatactatctatgaaggagaattttcagatgactggactcttagtggaaaggttggaaactagctttctttttttttctccctaataaattcttttactaatttttttttactttaaaaatagctgatttacatgccataaaattcacccctttcaagtgcacgtttcagtgatttttggtcaacatggctgtacaaaccaccaccacaatccagtttcagaacatttccatcgcccaagaaaatcccttctgctcattcagtgacttccatttccacctaaagtcccagccaaccactaatcacccttaatcactctatagatttgccttttttgggccttttgtataaatggaatcatacatgcaatctcctctatgtggcttcttacacttaggataatgtttttgttttttccatattgtggcatgtatagtatttgttcctttttatggctgaatagtgttccaaaactacattttgtttatccttttaccagttgatggacattgggttatttccaactttagactattgtaaataatgctgctataaacttttgaatgcagtttcttgtgtagacatatgttttcattttcatttctcaagtagatgcctggagtgtaa

SEQ ID NO: 23002 - DNA, 946 bp, Homo sapiens
ttctttccaaccacagctatgcttctggtgaagtatttgagggctgttttcaagataatatgcgtcatggtcatggtcttctacgaagtgggaaattgacgtcctcttctcctagtatgttcattggccagtgggtaatggataagaaagcaggatatggtgtctttgatgatatcactaggggggaaaagtatatgggaatgtggcaagatgatgtgtgtcaagggaatggtgtggtggttacccagtttggattatactacgagggcaactttcaccttaataaaatgatgggaaatggggttttgctttccgaagatgatactatctatgaaggagaattttcagatgactggactcttagtggaaaggttggaaactagctttctttttttttctccctaataaattcttttactaatttttttttactttaaaaatagctgatttacatgccataaaattcacccctttcaagtgcacgtttcagtgatttttggtcaacatggctgtacaaaccaccaccacaatccagtttcagaacatttccatcgcccaagaaaatcccttctgctcattcagtgacttccatttccacctaaagtcccagccaaccactaatcacccttaatcactctatagatttgccttttttgggccttttgtataaatggaatcatacatgcaatctcctctatgtggcttcttacacttaggataatgtttttgttttttccatattgtggcatgtatagtatttgttcctttttatggctgaatagtgttccaaaactacattttgtttatccttttaccagttgatggacattgggttatttccaactttagactattgtaaataatgctgctataaacttttgaatgcagtttcttgtgtagacatatgttttcattttcatttctcaagtagatgcctggagtgtaa

SEQ ID NO: 23003 - DNA, 6344 bp, Homo sapiens
cgcggacccactgggttgccaagctcgcgccggatgcggagcgcggtgctgccggtggagcttcaggtcttgatagactttctgtaaagaaggaatgatttggtgatggagtgttcccactgaccgatggactcaaagaagagaagctcaacagaggcagaaggatccaaggaaagaggcctggtccatatctggcaggcaggatcctttcccataacaccagagagattgccaggctggggaggaaagactgttttgcaggcagccctcggagtgaaacatggagttcttctgactgaagatggtgaggtctacagctttgggactcttccctggagaagtggaccagtggagatttgtccaagtagccccattctagatggagcagtgacagacaatggtgtcgcgtacatgtggggagagaattctgctggccagtgtgcagtagccaaccagcagtatgtgccggaaccaaatcctgtcagcattgctgattctgaggccagccctttgttagcagtcaggattttacagttggcgtgtggcgaggagcacactctggcattgtcaataagcagagagatttgggcatggggtaccggttgtcagttgggtctcattaccactgccttcccagtgacaaagccgcaaaaggtagaacatcttgctgggcgagtggtgcttcaagttgcctgtggtgctttccacagcttagcccttgtacaatgcctcccttcccaggatctgaagccagtcccagaacgatgcaaccagtgcagccagctcttgattactatgactgacaaagaagaccatgtgattatatcagacagtcattgttgcccattaggtgtgacactgacagaatctcaggcagaaaaccatgccagcactgctctcagcccctccactgaaacccttgacaggcaggaagaagtatttgagaacactcttgtagcaaatgatcagtctgttgctactgaactgaatgcagtaagtgctcagatcacaagcagcgatgccatgtcctctcaacaaaatgtcatgggaacaactgaaatttcctctgccagaaacataccatcataccctgacacccaagcagtcaatgaatacctacggaaactgtcagatcattcagtaagagaggactcagagcatggtgaaaagccagtgccatctcagcctcttttagaagaagcaattcctaatctccacagcccgcctaccacaagcacctcagccctaaacagcctggtggtctcttgtgcatctgctgttggtgtgagagtggctgctacttatgaagctggtgccttgtcactgaagaaagttatgaacttttatagtacaaccccttgtgaaactggagctcaggcaggcagtagtgccattggccccgaaggtttgaaagatagcagggaagaacaggttaaacaggaatcaatgcaaggaaagaaaagttcaagtcttgtggatatcagagaagaagaaacagagggaggcagtcgaagactctccctccctggattgttgtcacaagtttcccccaggctcttaagaaaggctgcacgggtgaaaacgaggacagtggttctgacccccacatacagtggagaagcagatgcgctcctgccttctctgagaacagaagtgtggacctgggggaaagggaaggaagggcagctggggcacggcgatgttctgcctaggcttcaaccgttgtgtgtaaaatgtctggatggcaaagaagtaatccatctggaggcaggtggttaccattctcttgcacttactgcgaaatcccaggtttactcatggggtagcaatacctttggtcaacttgggcattccgattttccaacaacagttcctcgtcttgcaaagataagcagtgaaaatggagtctggagcatagctgcaggcagggattattccctgtttttagtggatacagaagacttccagcctgggttatattacagtggccgacaggaccctacagaaggtgacaaccttccagagaatcacagtggttctaagactccagtacttctctcctgtagtaagcttggatatataagcagagtgacagcaggaaaagatagctatttagccttggtggataaaaacattatggggtatattgccagtctccacgagttagctactacagaaagacgattctattcaaaactaagtgatatcaaatctcagattctcaggcctcttctcagtttagaaaatttgggcactacaactacagtccagctgttgcaggaggtggctagccgattcagcaagctgtgttacctcattggtcagcatggagcctcattgagcagcttccttcatggggtaaaggaagccaggagtttggtcatcctgaagcattcaagtctcttcttggatagttatacagagtattgcacatctattacaaatttcctggttatgggaggattccagcttcttgctaagcctgccattgatttcctaaataaaaaccaagagctgttgcaagatttgtcagaagtgaatgacgaaaacactcagttgatggaaatactgaatactttgtttttcttgccaatcagacgacttcataattacgcaaaagttttgctaaagcttgctacttgttttgaagtggcatctccagaatatcagaaactgcaggattccagttcttgttatgagtgtcttgctctccatctcggcaggaaaaggaaggaagcagaatacacactgggcttctggaagaccttccccggaaaaatgacggattccttgaggaagccagagcgtcgactgctgtgtgagagtagtaaccgagccctgtctctgcagcatgctgggaggttttccgtgaattggttcattctctttaatgatgccctggtccatgcccagttctccacgcaccatgttttccctctggccacgctgtgggcagagccactgtctgaagaagctggtggtgtgaatggcttaaagataactacacctgaggagcagttcactctcatttcatctacaccccaggaaaagacaaagtggctacgagctataagccaagccgtagatcaggctttgagagggatgtctgatctccccccttatggaagtggtagcagtgttcagagacaggaaccacccatttcacgcagtgccaaatatactttctacaaggatcctcgcctaaaggatgccacctatgatggacgctggctttcagggaagcctcatggcagaggggttttgaagtggcctgatggaaagatgtattctggcatgttcaggaatggcttggaagatgggtatggagaatacagaatcccaaacaaggcaatgaacaaagaagaccattatgtgggccattggaaagaaggaaaaatgtgcggtcaaggagtctacagctatgcttctggtgaagtatttgagggctgttttcaagataatatgcgtcatggtcatggtcttctacgaagtgggaaattgacgtcctcttctcctagtatgttcattggccagtgggtaatggataagaaagcaggatatggtgtctttgatgatatcactaggggggaaaagtatatgggaatgtggcaagatgatgtgtgtcaagggaatggtgtggtggttacccagtttggattatactacgagggcaactttcaccttaataaaatgatgggaaatggggttttgctttccgaagatgatactatctatgaaggagaattttcagatgactggactcttagtggaaagggaacactgactatgccaaatggagactacattgaaggttattttagtggagaatggggatctgggataaaaatcactggaacctacttcaaacctagtctatatgagagtgataaagacagacctaaagttttcaggaagctaggaaacctggcagtgccagctgatgagaagtggaaagcggtgtttgacgaatgttggcgccaactgggctgtgagggcccaggccaaggggaagtttggaaagcatgggacaatattgctgtggccttgaccaccagtcggcgccagcacagagacagtccagaaatactgagtcgttcacagactcagacactagagagtttggaattcattccacagcatgttggtgccttctctgtggagaaatatgatgacatcaggaaatatttaataaaggcctgtgacactcctctgcaccccctgggcaggcttgtggagacactggttgcagtgtatagaatgacatacgtgggcgtaggagccaaccgcaggttattgcaggaggctgtaaaggagattaagtcctatcttaagcgaattttccagctggtgaggttcttatttcctgagctgcctgaagaaggcagcacaattcctctctctgctcctctgccaaccgaaaggaagtctttttgcactgggaagtcagattcccgatctgaatcaccagagccaggttatgtagtaacgagttctggattattgcttcctgtgctgctacctcggctctacccaccgctgtttatgctttatgctttggataatgatcgcgaggaagacatttactgggaatgtgtccttcgactaaataagcagccagatattgctctcctgggctttcttggggtgcagaggaaattttggccagcaaccttgtcaatccttggagagagtaaaaaggttttgccaaccacgaaagatgcttgttttgcctcagcagtagaatgtctgcagcagatcagcacaacatttaccccatcagacaaacttaaggtcatccagcagacttttgaggagatctctcagagtgtcctggcgtcactccacgaagacttcttgtggtccatggatgacttgtttcctgttttcttatatgtggtgctacgggccaggattaggaatttaggctctgaggtacacctcattgaggatctaatggacccctatcttcagcatggggaacagggtataatgttcaccaccttgaaggcatgttactaccagattcagcgtgagaagcttaactaggctgcataacagcttgaaaactggattatctactacagagtgttataacaccatctggagtcttcctgtagtggcaaaaaagaacagtgttgaaattggaaaggactttgtgttatttaggttgttagaatgagccttaccaataataagagccctgagcccagaaaaaaggactgtatagtttaaagggaggattgaaagggaggtaaaaaatcagattagaccagttcttggcctatgataagttccaaaaataccatttatctactatttgaaaaaagaagaggatatcccttcctacagtaaagggtatgtcagctacatgaagttgtaagaaaagcttccagtagagcttcttatattaaagaagttgatggatatttttgaatttctggtttgcctgaatccacctgcagttaccccgatccgtttgcaagaaccagatcgtacttgaaactatagtggccacactctgccttcctgagtcccttccagtcatgtgtgcatcatgtctctttgccaagggaggggagaaaggaacttttaaactgcagttttaactttttctaagctgtttcttgatgggagaggttctgtgcaaaactaccacattctgtccccaaaatgtggaatgcatccaaataggagtcttctgcctcttaacttaaaagaacataggaattttgtttttggtttctttatcatgctacagagagtgaatacactggaattcagacaccgactctgagctgctaggaacctcatttgtccatgtgcaaacgctgtattccaaggcctgtgaatggcagcctgaggaagttttgcatgcaggctgtgttttcgagcaggactaacaactgggaaataagcaaaaaactgcatcgatccccagcctggtgttgttcttccctatacttcacactgaactcaggatgggaagaaaaaggaaacaagctttggctttttccatctcaaaagtattgtggcacctcaacatttcagtgttttgctttttaaaaaatgccctattgtaagttgttggtttatactgtataagtaacactagtagctgttttgaataacataggtgctcttcctcatctcatctcctacaccgtggtgagcatacagagtgtcctgatttgtgttaagtgactgagaagatgttaattacttttgaaaaaggatcatggtttttgctctactttataatcaagacaagtgtttattaaaatactgttttggaatgttggctgtaatgtaacagcaattttcataataaaaggcattcatcttta

SEQ ID NO: 23004 - DNA, 2811 bp, Homo sapiens
cgcgaccacttctacccacggcaggatatggtgtcttgatgatatcactaggggggaaaagtatatgggaatgtggcaagatgatgtgtgtcaagggaatggtgtggtggttacccagtttggattatactacgagggcaactttcaccttaataaaatgatgggaaatggggttttgctttccgaagatgatactatctatgaaggagaattttcagatgactggactcttagtggaaagggaacactgactatgccaaatggagactacattgaaggttattttagtggagaatggggatctgggataaaaatcactggaacctacttcaaacctagtctatatgagagtgataaagacagacctaaagttttcaggaagctaggaaacctggcagtgccagctgatgagaagtggaaagcggtgtttgacgaatgttggcgccaactgggctgtgagggcccaggccaaggggaagtttggaaagcatgggacaatattgctgtggccttgaccaccagtcggcgccagcacagagacagtccagaaatactgagtcgttcacagactcagacactagagagtttggaattcattccacagcatgttggtgccttctctgtggagaaatatgatgacatcaggaaatatttaataaaggcctgtgacactcctctgcaccccctgggcaggcttgtggagacactggttgcagtgtatagaatgacatacgtgggcgtaggagccaaccgcaggttattgcaggaggctgtaaaggagattaagtcctatcttaagcgaattttccagctggtgaggttcttatttcctgagctgcctgaagaaggcagcacaattcctctctctgctcctctgccaaccgaaaggaagtctttttgcactgggaagtcagattcccgatctgaatcaccagagccaggttatgtagtaacgagttctggattattgcttcctgtgctgctacctcggctctacccaccgctgtttatgctttatgctttggataatgatcgcgaggaagacatttactgggaatgtgtccttcgactaaataagcagccagatattgctctcctgggctttcttggggtgcagaggaaattttggccagcaaccttgtcaatccttggagagagtaaaaaggttttgccaaccacgaaagatgcttgttttgcctcagcagtagaatgtctgcagcagatcagcacaacatttaccccatcagacaaacttaaggtcatccagcagacttttgaggagatctctcagagtgtcctggcgtcactccacgaagacttcttgtggtccatggatgacttgtttcctgttttcttatatgtggtgctacgggccaggattaggaatttaggctctgaggtacacctcattgaggatctaatggacccctatcttcagcatggggaacagggtataatgttcaccaccttgaaggcatgttactaccagattcagcgtgagaagcttaactaggctgcataacagcttgaaaactggattatctactacagagtgttataacaccatctggagtcttcctgtagtggcaaaaaagaacagtgttgaaattggaaaggactttgtgttatttaggttgttagaatgagccttaccaataataagagccctgagcccagaaaaaaggactgtatagtttaaagggaggattgaaagggaggtaaaaaatcagattagaccagttcttggcctatgataagttccaaaaataccatttatctactatttgaaaaaagaagaggatatcccttcctacagtaaagggtatgtcagctacatgaagttgtaagaaaagcttccagtagagcttcttatattaaagaagttgatggatatttttgaatttctggtttgcctgaatccacctgcagttaccccgatccgtttgcaagaaccagatcgtacttgaaactatagtggccacactctgccttcctgagtcccttccagtcatgtgtgcatcatgtctctttgccaagggaggggagaaaggaacttttaaactgcagttttaactttttctaagctgtttcttgatgggagaggttctgtgcaaaactaccacattctgtccccaaaatgtggaatgcatccaaataggagtcttctgcctcttaacttaaaagaacataggaattttgtttttggtttctttatcatgctacagagagtgaatacactggaattcagacaccgactctgagctgctaggaacctcatttgtccatgtgcaaacgctgtattccaaggcctgtgaatggcagcctgaggaagttttgcatgcaggctgtgttttcgagcaggactaacaactgggaaataagcaaaaaactgcatcgatccccagcctggtgttgttcttccctatacttcacactgaactcaggatgggaagaaaaaggaaacaagctttggctttttccatctcaaaagtattgtggcacctcaacatttcagtgttttgctttttaaaaaatgccctattgtaagttgttggtttatactgtataagtaacactagtagctgttttgaataacataggtgctcttcctcatctcatctcctacaccgtggtgagcatacagagtgtcctgatttgtgttaagtgactgagaagatgttaattacttttgaaaaaggatcatggtttttgctctactttataatcaagacaagtgtttattaaaatactgttttggaatgttggctgtaatgtaacagcaattttcataataaaaggcattcatcttta

SEQ ID NO: 23005 - DNA, 2663 bp, Homo sapiens
cgcggacccactgggttgccaagctcgcgccggatgcggagcgcggtgctgccggtggagcttcaggtcttgatagactttctgtaaagaaggaatgatttggtgatggagtgttcccactgaccgatggactcaaagaagagaagctcaacagaggcagaaggatccaaggaaagaggcctggtccatatctggcaggcaggatcctttcccataacaccagagagattgccaggctggggaggaaagactgttttgcaggcagccctcggagtgaaacatggagttcttctgactgaagatggtgaggtctacagctttgggactcttccctggagaagtggaccagtggagatttgtccaagtagccccattctagaaaatgccctggttgggcaatatgttattactgtggcaacaggaagcttccatagtggagcagtgacagacaatggtgtcgcgtacatgtggggagagaattctgctggccagtgtgcagtagccaaccagcagtatgtgccggaaccaaatcctgtcagcattgctgattctgaggccagccctttgttagcagtcaggattttacagttggcgtgtggcgaggagcacactctggcattgtcaataagcagagagatttgggcatggggtaccggttgtcagttgggtctcattaccactgccttcccagtgacaaagccgcaaaaggtagaacatcttgctgggcgagtggtgcttcaagttgcctgtggtgctttccacagcttagcccttgtacaatgcctcccttcccaggatctgaagccagtcccagaacgatgcaaccagtgcagccagctcttgattactatgactgacaaagaagaccatgtgattatatcagacagtcattgttgcccattaggtgtgacactgacagaatctcaggcagaaaaccatgccagcactgctctcagcccctccactgaaacccttgacaggcaggaagaagtatttgagaacactcttgtagcaaatgatcagtctgttgctactgaactgaatgcagtaagtgctcagatcacaagcagcgatgccatgtcctctcaacaaaatgtcatgggaacaactgaaatttcctctgccagaaacataccatcataccctgacacccaagcagtcaatgaatacctacggaaactgtcagatcattcagtaagagaggactcagagcatggtgaaaagccagtgccatctcagcctcttttagaagaagcaattcctaatctccacagcccgcctaccacaagcacctcagccctaaacagcctggtggtctcttgtgcatctgctgttggtgtgagagtggctgctacttatgaagctggtgccttgtcactgaagaaagttatgaacttttatagtacaaccccttgtgaaactggagctcaggcaggcagtagtgccattggccccgaaggtttgaaagatagcagggaagaacaggttaaacaggaatcaatgcaaggaaagaaaagttcaagtcttgtggatatcagagaagaagaaacagagggaggcagtcgaagactctccctccctggattgttgtcacaagtttcccccaggctcttaagaaaggctgcacgggtgaaaacgaggacagtggttctgacccccacatacagtggagaagcagatgcgctcctgccttctctgagaacagaagtgtggacctgggggaaagggaaggaagggcagctggggcacggcgatgttctgcctaggcttcaaccgttgtgtgtaaaatgtctggatggcaaagaagtaatccatctggaggcaggtggttaccattctcttgcacttactgcgaaatcccaggtttactcatggggtagcaatacctttggtcaacttgggcattccgattttccaacaacagttcctcgtcttgcaaagataagcagtgaaaatggagtctggagcatagctgcaggcagggattattccctgtttttagtggatacagaagacttccagcctgggttatattacagtggccgacaggaccctacagaaggtgacaaccttccagagaatcacagtggttctaagactccagtacttctctcctgtagtaagcttggatatataagcagagtgacagcaggaaaagatagctatttagccttggtggataaaaacattatggggtatattgccagtctccacgagttagctactacagaaagacgattctattcaaaactaagtgatatcaaatctcagattctcaggcctcttctcagtttagaaaatttgggcactacaactacagtccagctgttgcaggaggtggctagccgattcagcaagctgtgttacctcattggtcagcatggagcctcattgagcagcttccttcatggggtaaaggaagccaggagtttggtcatcctgaagcattcaagtctcttcttggatagttatacagagcaagtatccagtcccgtgtcatgttcaatctctgcagggttattctgccaaggagaacagctccttaatcagaagagactagattagggagagtgatataaggtaatagaaattgcaaagcagtattttaatcttaagccaactatagttctggattgctaaaatttagtcttctctaaatgaaa

SEQ ID NO: 23006 - DNA, 318 bp, Homo sapiens
atagtcttgtttttactgtgatcggtagaagtatgttgtaaaatctcaaaagctatgtaaatatgtacagcaagcagtatgatttatggaaagattactcagattcatgagacctctttgttcttgtctcatttctactaataacaacctgagtgatttttttgaacaaatgccttaaccttctggttaaggttctctgatctgtctaatctggaagttgatgtttacgatctgtctgtttgggccagatgagggaatctggggctctcaaatgtgttgcttaaaccacagaaaatatatatatatatatatatatat

SEQ ID NO: 23007 - DNA, 223 bp, Homo sapiens
agaggcaccactaatgtctatctgttctacccaaagaaaggcaatgcatacaaacgcaattaataaaagagaatttgtaattcgtaggtataaatttattgccaaggtttgcataagaatgcaacatctgccgatttcctgaagtagctacttcagctcagataagtcccaacatacattttctaattcgaacaattcccagttactgtaaaaggcacatctc

SEQ ID NO: 23008 - DNA, 446 bp, Homo sapiens
cagctagatacagagtgtcgattggtgcattcacaaaccttgagctaaacgcagggtgctgattggtgtgtttacaaaccttgagctagatacagagtgccgactggtgtatttacaatccctgagctagacgtaaagattctccaaggccccaccagagtagctagatacagagtgtcgattggtgcactccctccttccaggaattactggaaggagggagtgctagaatgggggtaaaccacaggaactaatttcttctctctgtaactatcagacatcaaagatgcatgttttgttgatattgtgtccggaattggtgggttcttggtctcactgacttcaagaatgaagccacggaccctcgcggtgagtgctacagctcttaaggtggcatgtctggagtttgttccttctgatgttcggatgtgttcggagtttcttcc

SEQ ID NO: 23009 - DNA, 440 bp, Homo sapiens
tctctttgtacacacccattccctagtctgttttgaagcaaattctagacatttctttttcttttaattattttggagatggagtctcgctctgtcgtccaggttagagtgcagttgtgcagtcttggctcactgcaacctctacctccctggttcaagccattctccttcctcagcctcccaagtagctgggattataggcacccaccatcacgcctggctaattttgtatttttgtaagatgacatttcaccattttggccaggctggtttcaaacttctggcctctagtgatccgtctgcttcggcttcccaaagtgctgggattacaggcgtgagccacgatccccggcctctggacatttcagaataatcaaagattcagtcagtgttcagattgccctgataaaatttctccttaatcatctcttgctaactta

SEQ ID NO: 23010 - DNA, 459 bp, Homo sapiens
ccatttttaataagactatatcaagtatcttttgtgtataaaggattttgtgcctttaaatttgctttttaatgataaggtctcaggggtgaaatggaattaaaatgtataacatttgaatttgttggtagatatttttgataaattgattttgctaatgaattatactcccttatatgtcattatcaccatttcatccagtccttagaaacatggtgtgtattctttaaaaaaaaagttgcatttctttcacacataggctactttacatagtctacacagtattgatctattttactgctgtttacctctaaaatatttgtttaaaaaatgaattaactagaaggtggtggttgcacagcattatgaatgtacaaaacgccactgaattgttccctttaaaatggttaattttatgttatgcaaatttcacctcaataaagtgtgtacatgtgtgta

SEQ ID NO: 23011 - DNA, 433 bp, Homo sapiens
tgttgctgtgaacattggtgtacaaagagtgttttaagttcctgctttcactacttttggatgtatgcccgtaagaggaattgctggatcatatggtgattctatctttaatatatttgagaaatctctatacagttttccataccagctgcaaagcagttccagtttctccacatgatcacccacactttacctttttctcttggtttgatcatagccattctagtggcagtgaagtggtaatttgtggttttgatttgcatatccctaatgattggtgatattgaacatctttccatgtgcttattggatttatttatttatttgtttcggtttttttgaaatagggtctcactctgtcacccagactggagtgcagtagcatgatcacagcacactgcagcctgacctcctgagctcaagtgattcttct

SEQ ID NO: 23012 - DNA, 415 bp, Homo sapiens
cctctaggctgtgggacttcctgacctgggggcaggtgctacgagacccctggggctgcaccccactgttctgtggactcaccccactcaccccattcacccctgggcagccggttgttcacggtcacaggtctggacccaggatgggggacagagtaataaaaagtaagaagacattctgggctgggcgtggtggctcaggcctgtaatcccagcactttgggaggccgagggaggtggatcacctgaggtcaggagttcaagaccagcctgaccaacatggtgaaaccctgtctctactaaaaatacaaaattggccgggcgcggtggctcatgcctgtaatcccagctactcgggaggctgaggcaggagaatggcgtgaacccaggaggcggagctttcagtgagctgaga

SEQ ID NO: 23013 - DNA, 862 bp, Homo sapiens
tgcactcccgcctgggccacagagcaagactccgtctcaaaaaaaaaaagtatctttaatttttggagtgtattgaagctcttgtgggttgaagaggtggagctgaaggatgtgggatggaggcagcctggcttagttgttgggtggttagggggttgcgaagcgaagagagggtctgggaggctggttggctccacagctgtttcacagacattttgtttaattcttagagcaattttgtaaaatcagtgtcatcattcccctttaaccgttggaagacatgagtctgagttgaagttaaagagaagcttctgattctaagtcaagtctctctctgttgccttcctccgggcaggagggctgtgatgtatcctggcgagcctgggggcgatccagtcttaggaggtgggaggcctgcattgcagagagcagaggtgaatgggcctcccaggttgagcttgtgatgggcaagtagactggcacgggatgaggttggcagtggggagaggtaggatgcagtgcggggaaatgggcctttccacctgagaaaggcgagtgtgtctgcgtttgataatcctttgatatttgcgtatctgttattttcaagaatcacatttcacatagaaagccatgtgacagtttttaaattaaaaaaaaaaaaggtagaaattccagagatcttgtcttaggtatttactgccagctacaaacaaaccccttttgaatttacttaacaaggaatttaataaaagtagctctggcattcagccgcagccctgcccacattcctgttagctgaggtcacctgactctgcttgtcgtttttgcacaggcagacgtgtgcattctggagagcagggag

SEQ ID NO: 23014 - DNA, 399 bp, Homo sapiens
gaaatcggaaacaactaagatgccttctaccatggggggaagataataaatctgatatttaatattgataaattaagaaatatcaatataaacattttatttagaaagatggaaacaggctgggtgtagtggatcacacctgtaatcccagcattttgggaggccaaggtgggtggatcacctgagatcaggagttggagaccagcctggccaacatggtgaaactccatctctactaacaatacaaaaattagctgggcatggtggcgggcgccagtaatcctagctactcaggaggctgaggcaggagaatcgcttgaacctggaaagtggaggtttcagtgagccgagatcgcaccattgcactccagcctggaagacgagtgaaaccctatctca

SEQ ID NO: 23015 - DNA, 421 bp, Homo sapiens
gcaaactccatatgaaaggctgagggtggttgccatgaacacaattttagattatctccttcttcattcaagctttcagaaagagcttgccaccagatttgttaaaaggatcccagctcacgtgagtgatttcttggcacaaaaagccttcctttcctgttatattacagcttgtgtgccgcatttcttcaacaggcaagttctccttcacaaacagaaagcaagctcgtgcaaccgatggcaatcctaaagctacatttagatagcccaattcctcagctttagctttaaaacgattagaatcattttccctcaaacatctttattgcttcacctgaactggccaatattttgtaagggttttttctattctttctttttttttctttttgctaataaggctaataagaaaacaatcttc

SEQ ID NO: 23016 - DNA, 483 bp, Homo sapiens
attttcagagacttacttgttttaaataattttcaccactgaaatggttgtttcactgtggaaaaaatccatcgatttccctatcctgccactctagaagccccagcaagcaatactttccacatttatttgagattgatacagttattatttcaaattttagttgaagaaacaaagttgagagagaatacgtaatttgcttgtcactgtgtttcttaatttagtataattctcaagcctatggtattaaattcaataagtacttagggggaaaatagatgaatgaacaaatgtttctgaacattttttagaaacgctttaagtccactaattagaatcaaatatctttaagtatttttaccaaaagaaaaaaaaacagatgaaatatatgccaatgtcatgagttgagtcatgatactataattataagccagagattagtgagcagatatgggttcttttggtcctcttttagaatatagt

SEQ ID NO: 23017 - DNA, 2321 bp, Homo sapiens
gaaaaggtttgacatgaccagattagcagtcaagaaaggtgccccactcactgggacagagaatgcgtgggaaggggtcaagactggcagcaagatgagctatgaattgttggtggtcatcgaggagggagatgagggtgactggactagggaacttcctgtggtgatggagaggagtcagtgtcaaggtctcacttagaaaaacttgggaggtctaactggccaggctcggtcaactgtgggggtggtaagaggcagcaatcaaggatggctttcaagatctttggcccaagctgctgggtagagggtggtgcctgtcactgagtcaggcagcacaggaggaggggcaggcgtgctgagtggggatgggtgcgttcactttgggacatgctgagcagtacttgctatgggactcaacgacttatgacttgaagacttcgcagagctgacctaacctccctgtgcttaccgtgcctcatctgtaataggagaataagaataattagaaaaaataactaattagtttcatttgttgagtctaggagaatgttctccttttatactgcagagtggtattttcttgtcaggtcttcccaagtaaaatgggaatgtctcgacttgcccatacagtggcttgattttacctgtctgctttgggtatcaccaccattcggcatgtattgccaatactaaacaaataagtaaatacataaattcaaagtaacaggtgtttattatcacgtgtgtgctgtaatagcccatcagcctgtccctcagacaaataaactctctttaaatcttctaaacttcctcttgaagcccacctctccctccaggggctggacagggcatttgggacccaggatctctaacactctcttctctgggaagccatctcccactgcccaggatgctggatgggaggtgagtgcaacgggcctgtggggttgtcagttggcggaagaaatctgtagatccagggagagaatcgagccacatgtgtggatttggaaatgacagtgtatggctgcacagcacgaaggggatgaagtcacagacacctggatttaaatcgagactccaccatttatttcttgtacgactttggggaggttacttaatctctttgtggctcagttacttcatttgtaaaatgaaatgataatattctgggagaatggttcatgtttccttccttcataaactgctgttcacgaggcggcttcttccagggttaaaaaggaatctactatccatgtatctgctaggacagacattgttgcgtgtcacttgactcctgaaatacgccacggtaaagaaatctctgtacactttcgtgttctgggaagtcactgaccacacaggaccaattattctccatgagacttagataagggatgctgtctgcccactctgtgccgtgactcccagatggcagacaccaccagtccttgttcttttgtctcatgaatgtgttgtaaccaagcgagttatagagaaacgccacacttttgagacaaattaaggggacctttattagctggcgacctacaggcagctaacgctcaaaattctctcggccccaaggaaggggctagttttgtttttataccgtggtctaaacaggggaggggggagtttagctgaagcaattttacagaagcagaataggcaaaaagttaaaaaaaattaattggttatagaagcagttacaaaaaataaacagttccaggtgcaggggcttaaactatgattaagagataaatgcaggggcttttaggtaccttccaccgagcacattcccgagctgttggtacagcctgcctcaatatcttaccagcaggtgtattcttggatgtgcttggactcagcttgcactagttattcccttaagggggataaagggggctgcaagtgaagaaactaaaatggagtctgtccggctctctctgctaggaaagagtcactcaggttaaaacaaggtagggtatcacaaatgattcacttagacgggaagtctgtcctcctaaaagtagctaggcacagagagaaacattccctgttcagctggctgagacttccgctgattaaaaaaaaaacaaaaaaccctgccccataaatctccccactgaaaccggtgtactccttcctatgaaagtaaaagacacccccgccccgccccggttaccccaacagtgtgatttccacttctggggcgctctccctaaggcagtagcctgaataatttcaatgtattggattgtttggtttctgtctttaccaaggtgcatttatcattcatgcaaaaacagtaaaaaaaa

SEQ ID NO: 23018 - DNA, 366 bp, Homo sapiens
tggaaaggagaacgctcagaggaaagtgagcaaccatgccctgtaaggcacgattgaatgtgaagagcccggtacagtgcctggcacgaagaggcacttgatacatatttttgaatgaattaatgaactaatgctctctgaattatctatttgtgggtttttctagactcccatctccacatcaggagatgtcctatacttagctggtgtcagaggatttccaatagaaaaattttttcagtgtatttaaagatgtcaccactggtgtcaaatgaagctatggccggccatccatatgaagggacaagggctggatcgggagccctgaacgaaggagcatctgctggcttgtcctgagatacctgt

SEQ ID NO: 23019 - DNA, 405 bp, Homo sapiens
attgatgacacgtaccttcttttattactgggtcctcagtttgtattactggggtcctcaagttacagttgctgtggctggttgtcagcaggatgtgcctatgcaactagtcccccaagaaagcctcagaccccaagacccaaacaggcttccctgagcagagatatttcacacatgtccctgcagtttgctgccggaagacacatcctgtgtggccttggacaagacttgtgccagacctccctgaacttgccgatgtacatctttttcctgctgcttttgtgttctttactgtaacaaactttagccacaagtataatttgctcttgggagtcctagcaaaatcaccaaacttggggtggtcatgggaataccaaaacaggagagtatatgtttgacaaatta

SEQ ID NO: 23020 - DNA, 353 bp, Homo sapiens
ctccaggctctcagggcattggagcctgttcctggtacatccttctactccaaataccaagtacagtgcttggaacatggtggcagatctttaaaattgtgtttcttttcttttttctttttttttttttttttgagactgaatctcgctctgttgcctgggctggagtgcagtggcatgatctcggctcactgcaacctctgcctcctgggttcaagtgattctcctgcctcagcctcccgagtagctgggactaccggtgtgtaccaccaagcccagctaatttttgtatttttagtagtgacggggtttcaggcctgatagggaccctcagaattgtcctgctgcagggc

SEQ ID NO: 23021 - DNA, 262 bp, Homo sapiens
aatctcctcttcccctaacttggaaagcacctcttggtcctctgaaattctaccttacttgatagagagtgaatatctcacatggactgcatttatgcaccaaatgccttatctccttttttcactgcactttctttttctctaaatacaagctctggcttcttctatctttggattgcctaaagtcccttacagtttgaagatgctaaatatttattgtgtgggataaatttatctcgcaaagagcaatgtgttgatggca

SEQ ID NO: 23022 - DNA, 481 bp, Homo sapiens
aatagggtatcactatgttgtcctggctgctctcgaactcttggctttaagtgatcctcctaccttagcctcccaaagtgttgggattacaggcatgagccacgcaccaggccagtgtgttctttaccatctttaaatgaaaccttccctcaaccttccattcctctacggctaccactaatggtataaacttgccttttatttatcacatcatttgcttttctgttatccttccacatatactgctctgcagaaatcacgctcagtaggaccaccagtgacctcttcattgttaaacacagtggtgccaatcagccctggccatcctctcaactgacttgaatcagctgatagcatttgatactgttgatcatttccttctccttaaaattcccacttttcctggtctttggcagctttactccctcccacattttcttcagtctttctggatgcttctcatcaggctccttttcctgcc

SEQ ID NO: 23023 - DNA, 648 bp, Homo sapiens
attgagaagttgccgtgggactagggtgccaagactgctgagattctggcagaggcactgccattggcacccctggcccagacagtgtctgctgtgctgtccctggaagctggagctccaacagggaatattggtgtagctgtgcataggccataagccacacttgagccagtgggcagggagaaggaatgtcattctcccttcaccactggggaaggaaaggggaaagggctcaagttatcataggggcttacatgctgagcagctataacctaggtgttcagaacacctggaagatgcatttatttaggggtcacaaatagtgaaattaatatttgaggaatatcagtcacgtgttgtgggcttttatccttaacgtttaatttttacaatcttgtgtaaaaatttatccatgataataacataacttctttaaggttggagtggctggcaagagcagagccttaatttgactttagctctggctggtctggaagcttttacttttttgttaatcccacttcctcactctgtcattcagcattatcatgatcgtgaacaaaattgtactgagaaagtttgtataagtgatatgaacggtattgtattgaacatccattaaagggttgctacactttaaaaaaaaaa

SEQ ID NO: 23024 - DNA, 3622 bp, Homo sapiens
  misc_feature (386)..(386): n is a, c, g, or t
gcgagccttccatggtgcagcgcatgtgggccgaggcggccgggcctgctggcggcgccgagccgctgtttccgggctcccggcggagccgcagcgtgtgggacgccgtgcgcctggaggtgggcgtccccgacagctgcccggtggtgctgcacagcttcacgcagctagaccccgacctgccgcgcccggagagctccacgcaggagatcggtgaggagctgatcaacggagtcatctactccatctccctgcgcaaggtgcagctgcaccacggaggcaacaaggggcagcgctggctcgggtatgagaatgagtcggccctgaacctttatgagacttgcaaggtgcggaccgtgaaggctggcacgctggagaagctggtngagcacctggtgccagccttccagggcagcgacctctcctacgtcaccatcttcctgtgtacctatagagccttcaccaccacccaacaggtcctggacctgctgttcaaaaggtacggtagatgtgacgccctcacggcctcctctagatacggctgcatcctcccctattccgacgaggatggtggaccccaggaccaacttaaaaatgccatctcctccatcctgggcacctggctggaccagtactcggaggatttctgtcaacctccggactttccctgcctcaagcagctggtggcctacgtgcagctcaacatgccaggctcagacctggagcgccgtgcccaccttctcctggcccagctggagcactcggaacccattgaggcagagcctgaggctctgtcaccagtgccagctctaaaaccaactccagagctcgagctagctctaacaccagctcgagcacccagcccagtgccggctccagccccggagccagagccagctccaacaccagctccaggttcagagctagaagtagctccagcaccagctccggagctccagcaggctccagagccagctgtgggactagaatcggctccagcgccagctctggaactagagccagctccagaacaggatccagctccctcacaaactctagagctggagccagctccagcaccagttccatcattacagccttcctggccttcacctgtggttgcagagaacgggctgagtgaggagaagcctcacctcttggtgttccctccagatctggtggcagagcagtttacactgatggatgcggaactgttcaagaaggtggtgccctaccactgcctgggctccatctggtcccagcgggacaagaagggcaaggagcacctggcgcccaccatccgcgccactgtcacccagttcaacagtgtggccaactgtgtcatcaccacctgcctcgggaaccgaagcacgaaagccccagacagggccagggtggtggagcactggatcgaggtggccagggagtgccggatcctcaagaacttctcgtcactgtatgccatcctctctgccctgcagagcaactccatccaccgtctgaagaagacgtgggaagacgtttccagggacagtttccggatctttcagaagctgtcagagatcttctcagatgagaacaactactcattgagccgggagctgctcatcaaggagggcacctccaagtttgccaccctggagatgaaccccaagagagcccagaaacggccgaaggagacgggcatcatccagggcaccgttccctacctgggcacgttcctcaccgacctggtgatgctggacactgccatgaaggactatctgtatggcagactcatcaactttgagaagaggaggaaggagttcgaggtgatcgcccagatcaagctgctgcagtcggcctgcaacaactacagcatcgcgccagatgagcaatttggggcctggttccgggccgtggagcggctcagcgagactgagagctacaacctgtcgtgcgagctggagcccccatccgagtcagccagcaacaccctcaggaccaagaagaacacagccattgtcaagcgctggagcgaccgccaggcccccagcactgagctcagtaccagtggcagctcccactccaagtcctgtgaccagctcaggtgtggcccctacctcagcagcggggacatcgctgacgcgctcagcgtgcactcggccggctcctctagctccgacgtggaggagatcaacatcagcttcgtcccggagtctcctgatggccaggaaaagaagttctgggaatcagcctcacagtcatccccggagacctccggcatcagctcagcctccagcagcacctcgtcctcctcagcctccaccacgcccgtggctgccacacgcacccacaagcgctctgtctcagggctctgcaactccagctccgcgctgccgctctacaaccagcaggtgggcgactgctgtatcatccgcgtcagcctggacgtggacaatggcaacatgtacaagagcatcctggtgaccagccaagataaggctccggctgtaatccgcaaggccatggacaaacacaacctggaggaggaggagccggaggactatgagctgctgcagattctctcagatgaccggaagctgaagatccctgaaaacgccaacgtcttctatgccatgaactctactgccaactatgactttgtcctgaagaagcggaccttcaccaagggagtgaaggtcaagcacggagccagctccaccctccctcgcatgaagcagaaaggactcaagattgccaagggcatcttctgagggcatcctcccagggtctggctggctggtagccaagcacttatggaccagagtggcccaggccagctgggcgccttcctcccacctgccagcccagggtaccccagactccagtttcatcctgaacctctcccgctgctgggattgacgcctgccattggtcaggctgacctggcctcccgtggaccactcgctgccttaggtgccttctgctctctggaaccagaggactagctgacttttgccaaggagcagtgccaacgggcatggcatggtgccctgcctgcccccgggcgccacctctgtacacttccctgacaccttcccaggtgtgggtcactgccacctgtgcccatgggcaccccagagcacccactgtgaccactgcagttctctcatgcccacaggcactggcctgtgaccttcgcaggggtcccggcccctcccaccactctagcctttctcaggctgcaccaaagattccatcatcagggccaactgagagtgagggagtctcacccaccgcttaccccagccctcccctgggagcagagagagaaaccctcttcatggaccagactctgcacccggtgagtgaggacagtcccagctgagtcccatcgatgttgaatctcatgccactgcaagtgccattcaccactgcgtcctgggctttacgagaccatgcaagacgggggttagtgaggaaggaggatttggggtgggggtggggtgattgaatatttgtataaaaagcaaaaagaaaaaaaaaatgtttgtttactgattggggaggggcaatatttatttgttgtaaatagcaaatgctagacttgaatattatattaaaatcctgtttctactat

SEQ ID NO: 23025 - DNA, 1189 bp, Homo sapiens
taactaacggctaggtacgaggctgggtggcggtgaccagccaagataaggctccggctgtaatccgcaaggccatggacaaacacaacctggaggaggaggagccggaggactatgagctgctgcagattctctcagatgaccggaagctgaagatccctgaaaacgccaacgtcttctatgccatgaactctactgccaactatgactttgtcctgaagaagcggaccttcaccaagggagtgaaggtcaagcacggagccagctccaccctccctcgcatgaagcagaaaggactcaagattgccaagggcatcttctgagggcatcctcccagggtctggctggctggtagccaagcacttatggaccagagtggcccaggccagctgggcgccttcctcccacctgccagcccagggtaccccagactccagtttcatcctgaacctctcccgctgctgggattgacgcctgccattggtcaggctgacctggcctcccgtggaccactcgctgccttaggtgccttctgctctctggaaccagaggactagctgacttttgccaaggagcagtgccaacgggcatggcatggtgccctgcctgcccccgggcgccacctctgtacacttccctgacaccttcccaggtgtgggtcactgccacctgtgcccatgggcaccccagagcacccactgtgaccactgcagttctctcatgcccacaggcactggcctgtgaccttcgcaggggtcccggcccctcccaccactctagcctttctcaggctgcaccaaagattccatcatcagggccaactgagagtgagggagtctcacccaccgcttaccccagccctcccctgggagcagagagagaaaccctcttcatggaccagactctgcacccggtgagtgaggacagtcccagctgagtcccatcgatgttgaatctcatgccactgcaagtgccattcaccactgcgtcctgggctttacgagaccatgcaagacgggggttagtgaggaaggaggatttggggtgggggtggggtgattgaatatttgtataaaaagcaaaaagaaaaaaaaaatgtttgtttactgattggggaggggcaatatttatttgttgtaaatagcaaatgctagacttgaatattatattaaaatcctgtttctactat

SEQ ID NO: 23026 - DNA, 1184 bp, Homo sapiens
aagatagtcatagtgcgaggccgggttgtgaccagccaagataaggctccggctgtaatccgcaaggccatggacaaacacaacctggaggaggaggagccggaggactatgagctgctgcagattctctcagatgaccggaagctgaagatccctgaaaacgccaacgtcttctatgccatgaactctactgccaactatgactttgtcctgaagaagcggaccttcaccaagggagtgaaggtcaagcacggagccagctccaccctccctcgcatgaagcagaaaggactcaagattgccaagggcatcttctgagggcatcctcccagggtctggctggctggtagccaagcacttatggaccagagtggcccaggccagctgggcgccttcctcccacctgccagcccagggtaccccagactccagtttcatcctgaacctctcccgctgctgggattgacgcctgccattggtcaggctgacctggcctcccgtggaccactcgctgccttaggtgccttctgctctctggaaccagaggactagctgacttttgccaaggagcagtgccaacgggcatggcatggtgccctgcctgcccccgggcgccacctctgtacacttccctgacaccttcccaggtgtgggtcactgccacctgtgcccatgggcaccccagagcacccactgtgaccactgcagttctctcatgcccacaggcactggcctgtgaccttcgcaggggtcccggcccctcccaccactctagcctttctcaggctgcaccaaagattccatcatcagggccaactgagagtgagggagtctcacccaccgcttaccccagccctcccctgggagcagagagagaaaccctcttcatggaccagactctgcacccggtgagtgaggacagtcccagctgagtcccatcgatgttgaatctcatgccactgcaagtgccattcaccactgcgtcctgggctttacgagaccatgcaagacgggggttagtgaggaaggaggatttggggtgggggtggggtgattgaatatttgtataaaaagcaaaaagaaaaaaaaaatgtttgtttactgattggggaggggcaatatttatttgttgtaaatagcaaatgctagacttgaatattatattaaaatcctgtttctactat

SEQ ID NO: 23027 - DNA, 3576 bp, Homo sapiens
  misc_feature (1360)..(1360): n is a, c, g, or t
  misc_feature (1507)..(1507): n is a, c, g, or t
ttggggaggggcaatatttatttgttgtaaatagcaaatgctagacttgaatattatattaaaatcctgtttctactataaaaaaaaaaaaaaatgtatgccatcctctctgccctgcagagcaactccatccaccgtctgaagaagacgtgggaagacgtttccagggacagtttccggatctttcagaagctgtcagagatcttctcagatgagaacaactactcattgagccgggagctgctcatcaaggagggcacctccaagtttgccaccctggagatgaaccccaagagagcccagaaacggccgaaggagacgggcatcatccagggcaccgttccctacctgggcacgttcctcaccgacctggtgatgctggacactgccatgaaggactatctgtatggcagactcatcaactttgagaagaggaggaaggagttcgaggtgatcgcccagatcaagctgctgcagtcggcctgcaacaactacagcatcgcgccagatgagcaatttggggcctggttccgggccgtggagcggctcagcgagactgagagctacaacctgtcgtgcgagctggagcccccatccgagtcagccagcaacaccctcaggaccaagaagaacacagccattgtcaagcgctggagcgaccgccaggcccccagcactgagctcagtaccagtggcagctcccactccaagtcctgtgaccagctcaggtgtggcccctacctcagcagcggggacatcgctgacgcgctcagcgtgcactcggccggctcctctagctccgacgtggaggagatcaacatcagcttcgtcccggagtctcctgatggccaggaaaagaaggtgactgcctgcccttctccccaatatcctttcccatctccccactccaaatccatgcatggggccaggaagccctggatcctgaacacagcttctagaaggttccccatctggcagctggcctggggtgcccccacagggcagtgggatctgctgatcttaccgtctccctcagttctgggaatcagcctcacagtcatccccggagacctccggcatcagctcagcctccagcagcacctcgtcctcctcagcctccaccacgcccgtggctgccacacgcacccacaagcgctctgtctcagggctctgcaactccagctccgcgctgccgctctacaaccagcaggtgggcgactgctgtatcatccgcgtcagcctggacgtggacaatggcaacatgtacaagagcatcctggtaagccggcgggggtggcctgggtgcctccctccactggcggcaaatgcaccctgaacacagtgcaccatccctgccctnccggggtctaccttgtagttggcggggaaggacagatgtcagccaggtacagaaatgaagaaggtagtgatcagggacaaggctggcctgagggcagagggggaggaaaggagcagccgtgcaaagcccccaggagctgaaggggcngtgctgtaggggaggtgaggtcagggaagtatccagggcctggccacataggccctgagccctgccaggacctcgactttctcggggaggaagacaggagcaatgatggctggcttctctgtctggcgtgggctggtaccagagccgcaggggtgttggttaggaggccgctgtggcaaccaggctgggagccctggaaggggccagcagggtcagagtctagacaggatttggagacagcagatgggaattgctcacagaatgggtttgcctgggggctctttcttcatcctccaggtgtcctgcgacagatgaaccatttgtaacccccaccctctgtaccccagccctgggtcaggtgccccattattcacacacgctcctgacccctcattgccaggagctagcatggttgtcattaagcagtcacctgtggccctatgtccgagttccgcctgtgctctggccctcagggtcaaggtagcaggggcctggcctatgctgaccacactgagcatcctggccggcccctcctttcttacctccagggcttggactagggactgtctgttccccaggctcagtgatgctgttatcctggaggggcaagtgcttctcaaggaagtgtgggaggagggaacagtctcttacaggagaagcagggtaggcactgctgggacagacccctcctcattccatggaggcctcacatggggaacagaaggacggaggcctcacttggggagtaggagaatgtgacaaggccctctccggacccagcacctggccagaggctgtgagtgcctgtgcttggtgctgaggggactccagagggtccttggccactgcactctgggggagccgctccagggtcttttccctgatggtccatcccccgccgcgatgcaggtggtgaccagccaagataaggctccggctgtaatccgcaaggccatggacaaacacaacctggaggaggaggagccggaggactatgagctgctgcagattctctcagatgaccggaagctgaagatccctgaaaacgccaacgtcttctatgccatgaactctactgccaactatgactttgtcctgaagaagcggaccttcaccaagggagtgaaggtcaagcacggagccagctccaccctccctcgcatgaagcagaaaggactcaagattgccaagggcatcttctgagggcatcctcccagggtctggctggctggtagccaagcacttatggaccagagtggcccaggccagctgggcgccttcctcccacctgccagcccagggtaccccagactccagtttcatcctgaacctctcccgctgctgggattgacgcctgccattggtcaggctgacctggcctcccgtggaccactcgctgccttaggtgccttctgctctctggaaccagaggactagctgacttttgccaaggagcagtgccaacgggcatggcatggtgccctgcctgcccccgggcgccacctctgtacacttccctgacaccttcccaggtgtgggtcactgccacctgtgcccatgggcaccccagagcacccactgtgaccactgcagttctctcatgcccacaggcactggcctgtgaccttcgcaggggtcccggcccctcccaccactctagcctttctcaggctgcaccaaagattccatcatcagggccaactgagagtgagggagtctcacccaccgcttaccccagccctcccctgggagcagagagagaaaccctcttcatggaccagactctgcacccggtgagtgaggacagtcccagctgagtcccatcgatgttgaatctcatgccactgcaagtgccattcaccactgcgtcctgggctttacgagaccatgcaagacgggggttagtgaggaaggaggatttggggtgggggtggggtgattgaatatttgtataaaaagcaaaaagaaaaaaaaaatgtttgtttactgattggggaggggcaatatttatttgttgtaaatagcaaatgctagacttgaatattatattaaaatcctgtttctactat

SEQ ID NO: 23028 - DNA, 2261 bp, Homo sapiens
ttggggaggggcaatatttatttgttgtaaatagcaaatgctagacttgaatattatattaaaatcctgtttctactataaaaaaaaaaaaaaatgtatgccatcctctctgccctgcagagcaactccatccaccgtctgaagaagacgtgggaagacgtttccagggacagtttccggatctttcagaagctgtcagagatcttctcagatgagaacaactactcattgagccgggagctgctcatcaaggagggcacctccaagtttgccaccctggagatgaaccccaagagagcccagaaacggccgaaggagacgggcatcatccagggcaccgttccctacctgggcacgttcctcaccgacctggtgatgctggacactgccatgaaggactatctgtatggcagactcatcaactttgagaagaggaggaaggagttcgaggtgatcgcccagatcaagctgctgcagtcggcctgcaacaactacagcatcgcgccagatgagcaatttggggcctggttccgggccgtggagcggctcagcgagactgagagctacaacctgtcgtgcgagctggagcccccatccgagtcagccagcaacaccctcaggaccaagaagaacacagccattgtcaagcgctggagcgaccgccaggcccccagcactgagctcagtaccagtggcagctcccactccaagtcctgtgaccagctcaggtgtggcccctacctcagcagcggggacatcgctgacgcgctcagcgtgcactcggccggctcctctagctccgacgtggaggagatcaacatcagcttcgtcccggagtctcctgatggccaggaaaagaagttctgggaatcagcctcacagtcatccccggagacctccggcatcagctcagcctccagcagcacctcgtcctcctcagcctccaccacgcccgtggctgccacacgcacccacaagcgctctgtctcagggctctgcaactccagctccgcgctgccgctctacaaccagcaggtgggcgactgctgtatcatccgcgtcagcctggacgtggacaatggcaacatgtacaagagcatcctggtgaccagccaagataaggctccggctgtaatccgcaaggccatggacaaacacaacctggaggaggaggagccggaggactatgagctgctgcagattctctcagatgaccggaagctgaagatccctgaaaacgccaacgtcttctatgccatgaactctactgccaactatgactttgtcctgaagaagcggaccttcaccaagggagtgaaggtcaagcacggagccagctccaccctccctcgcatgaagcagaaaggactcaagattgccaagggcatcttctgagggcatcctcccagggtctggctggctggtagccaagcacttatggaccagagtggcccaggccagctgggcgccttcctcccacctgccagcccagggtaccccagactccagtttcatcctgaacctctcccgctgctgggattgacgcctgccattggtcaggctgacctggcctcccgtggaccactcgctgccttaggtgccttctgctctctggaaccagaggactagctgacttttgccaaggagcagtgccaacgggcatggcatggtgccctgcctgcccccgggcgccacctctgtacacttccctgacaccttcccaggtgtgggtcactgccacctgtgcccatgggcaccccagagcacccactgtgaccactgcagttctctcatgcccacaggcactggcctgtgaccttcgcaggggtcccggcccctcccaccactctagcctttctcaggctgcaccaaagattccatcatcagggccaactgagagtgagggagtctcacccaccgcttaccccagccctcccctgggagcagagagagaaaccctcttcatggaccagactctgcacccggtgagtgaggacagtcccagctgagtcccatcgatgttgaatctcatgccactgcaagtgccattcaccactgcgtcctgggctttacgagaccatgcaagacgggggttagtgaggaaggaggatttggggtgggggtggggtgattgaatatttgtataaaaagcaaaaagaaaaaaaaaatgtttgtttactgattggggaggggcaatatttatttgttgtaaatagcaaatgctagacttgaatattatattaaaatcctgtttctactat

SEQ ID NO: 23029 - DNA, 6422 bp, Homo sapiens
  misc_feature (386)..(386): n is a, c, g, or t
  misc_feature (2721)..(2721): n is a, c, g, or t
  misc_feature (2868)..(2868): n is a, c, g, or t
gcgagccttccatggtgcagcgcatgtgggccgaggcggccgggcctgctggcggcgccgagccgctgtttccgggctcccggcggagccgcagcgtgtgggacgccgtgcgcctggaggtgggcgtccccgacagctgcccggtggtgctgcacagcttcacgcagctagaccccgacctgccgcgcccggagagctccacgcaggagatcggtgaggagctgatcaacggagtcatctactccatctccctgcgcaaggtgcagctgcaccacggaggcaacaaggggcagcgctggctcgggtatgagaatgagtcggccctgaacctttatgagacttgcaaggtgcggaccgtgaaggctggcacgctggagaagctggtngagcacctggtgccagccttccagggcagcgacctctcctacgtcaccatcttcctgtgtacctatagagccttcaccaccacccaacaggtcctggacctgctgttcaaaaggtacggtagatgtgacgccctcacggcctcctctagatacggctgcatcctcccctattccgacgaggatggtggaccccaggaccaacttaaaaatgccatctcctccatcctgggcacctggctggaccagtactcggaggatttctgtcaacctccggactttccctgcctcaagcagctggtggcctacgtgcagctcaacatgccaggctcagacctggagcgccgtgcccaccttctcctggcccagctggagcactcggaacccattgaggcagagcctgaggctctgtcaccagtgccagctctaaaaccaactccagagctcgagctagctctaacaccagctcgagcacccagcccagtgccggctccagccccggagccagagccagctccaacaccagctccaggttcagagctagaagtagctccagcaccagctccggagctccagcaggctccagagccagctgtgggactagaatcggctccagcgccagctctggaactagagccagctccagaacaggatccagctccctcacaaactctagagctggagccagctccagcaccagttccatcattacagccttcctggccttcacctgtggttgcagagaacgggctgagtgaggagaagcctcacctcttggtgttccctccagatctggtggcagagcagtttacactgatggatgcggaactgttcaagaaggtggtgccctaccactgcctgggctccatctggtcccagcgggacaagaagggcaaggagcacctggcgcccaccatccgcgccactgtcacccagttcaacagtgtggccaactgtgtcatcaccacctgcctcgggaaccgaagcacgaaagccccagacagggccagggtggtggagcactggatcgaggtggccagggagtgccggatcctcaagaacttctcgtcactgtatgccatcctctctgccctgcagagcaactccatccaccgtctgaagaagacgtgggaagacgtttccagggacagtttccggatctttcagaagctgtcagagatcttctcagatgagaacaactactcattgagccgggagctgctcatcaaggagggcacctccaagtttgccaccctggagatgaaccccaagagagcccagaaacggccgaaggagacgggcatcatccagggcaccgttccctacctgggcacgttcctcaccgacctggtgatgctggacactgccatgaaggactatctgtatggcagactcatcaactttgagaagaggaggaaggagttcgaggtgatcgcccagatcaagctgctgcagtcggcctgcaacaactacagcatcgcgccagatgagcaatttggggcctggttccgggccgtggagcggctcagcgagactgagagctacaacctgtcgtgcgagctggagcccccatccgagtcagccagcaacaccctcaggaccaagaagaacacagccattgtcaagcgctggagcgaccgccaggcccccagcactgagctcagtaccagtggcagctcccactccaagtcctgtgaccagctcaggtgtggcccctacctcagcagcggggacatcgctgacgcgctcagcgtgcactcggccggctcctctagctccgacgtggaggagatcaacatcagcttcgtcccggagtctcctgatggccaggaaaagaaggtgactgcctgcccttctccccaatatcctttcccatctccccactccaaatccatgcatggggccaggaagccctggatcctgaacacagcttctagaaggttccccatctggcagctggcctggggtgcccccacagggcagtgggatctgctgatcttaccgtctccctcagttctgggaatcagcctcacagtcatccccggagacctccggcatcagctcagcctccagcagcacctcgtcctcctcagcctccaccacgcccgtggctgccacacgcacccacaagcgctctgtctcagggctctgcaactccagctccgcgctgccgctctacaaccagcaggtgggcgactgctgtatcatccgcgtcagcctggacgtggacaatggcaacatgtacaagagcatcctggtaagccggcgggggtggcctgggtgcctccctccactggcggcaaatgcaccctgaacacagtgcaccatccctgccctnccggggtctaccttgtagttggcggggaaggacagatgtcagccaggtacagaaatgaagaaggtagtgatcagggacaaggctggcctgagggcagagggggaggaaaggagcagccgtgcaaagcccccaggagctgaaggggcngtgctgtaggggaggtgaggtcagggaagtatccagggcctggccacataggccctgagccctgccaggacctcgactttctcggggaggaagacaggagcaatgatggctggcttctctgtctggcgtgggctggtaccagagccgcaggggtgttggttaggaggccgctgtggcaaccaggctgggagccctggaaggggccagcagggtcagagtctagacaggatttggagacagcagatgggaattgctcacagaatgggtttgcctgggggctctttcttcatcctccaggtgtcctgcgacagatgaaccatttgtaacccccaccctctgtaccccagccctgggtcaggtgccccattattcacacacgctcctgacccctcattgccaggagctagcatggttgtcattaagcagtcacctgtggccctatgtccgagttccgcctgtgctctggccctcagggtcaaggtagcaggggcctggcctatgctgaccacactgagcatcctggccggcccctcctttcttacctccagggcttggactagggactgtctgttccccaggctcagtgatgctgttatcctggaggggcaagtgcttctcaaggaagtgtgggaggagggaacagtctcttacaggagaagcagggtaggcactgctgggacagacccctcctcattccatggaggcctcacatggggaacagaaggacggaggcctcacttggggagtaggagaatgtgacaaggccctctccggacccagcacctggccagaggctgtgagtgcctgtgcttggtgctgaggggactccagagggtccttggccactgcactctgggggagccgctccagggtcttttccctgatggtccatcccccgccgcgatgcaggtggtgaccagccaagataaggctccggctgtaatccgcaaggccatggacaaacacaacctggaggaggaggagccggaggactatgagctgctgcagattctctcagatgaccggagtaagtcagaagaccagagggcgatggcagagggggcaggtccacaccactccccagccccaggttggaagcctttggccccagaaaattcaccagcagagtgtgggtagacactgtggacagggcagccctggctgcccccattgtctgcttgctgtccccagcaaccactggacctccccagtgtgtgcccttccctaggcgtgaacaggcagttcaaagctcacatcagtgaggagcaaagagaaaaggcatttttcactgggacaggttagccacgtggcccactggaagggacgctttctggctaagacaagaaaacatgtgctctacaaagaatggtgacagctgtggaccaaagtgtcaagtgttaaaatccatgagtgtgtgattctaaaagcagaacaggctactaggaggccaactcagtattctagaaactgggaaagtgtcaagaaccagtgcaggctcagagtggggtatcctgggcctggagacgctgggcaagctccttaagccctctgtgcttgtcttctcatcccccaaatggaaatgaaagtagccagtgtgttcatcatatatgtaaaaatctatatgtatgtatatatgtgtatatatatgcatgtatatgtgtgtgtatatatatgcatgtatatgtgtgtgtatatatatgcatgtatatataaagcatctatgtgcaccataaaagttaactataaatactatcatcgctgttttctttccagtgagctgaacaccacctcccaccattagcccagacagtaagcaatgactcctgtgatccctagaagttacagtctaaatcctctggcagcttcttgcaccatttcggttaggtgggcagggtaggcgggacccccatcttacagaaaaggaagactgaggcctagagaggttaaagatgacgaaaagccacacgatgtcggcaggagcacaaatcgagcccagctctggtttatagcaggctgtgggccagaggagatggtgggaaatggagccaaaaggaagtgcttgccgggtgccagggttcaaggagtacaggcctccctggaacgggcgccagagccctggggcaggcctgtcctttcctggtccttggatcccttgtcctgagtagggcaggattctgggaggtgacctggattctagaaagcctgttccaggtgggcagccagcactgcagtatgggcaggacggggtgaccctctgccagctcaggccaagccggggggttctggagtcagtccctgtttaaacaagagtcatcaggttttgtgaggacctcagcagagtctgtcctcaggcaggagtcattgagaggggtccttggagttctggagctgtattggaggggatctgaggtctgtggctcaagacagtccttgtatgggctctcaagcggtaggggtatcctgcagggcccccaggagcatccctgatcacccctctgcccctccccaccagagctgaagatccctgaaaacgccaacgtcttctatgccatgaactctactgccaactatgactttgtcctgaagaagcggaccttcaccaagggagtgaaggtcaagcacggagccagctccaccctccctcgcatgaagcagaaaggactcaagattgccaagggcatcttctgagggcatcctcccagggtctggctggctggtagccaagcacttatggaccagagtggcccaggccagctgggcgccttcctcccacctgccagcccagggtaccccagactccagtttcatcctgaacctctcccgctgctgggattgacgcctgccattggtcaggctgacctggcctcccgtggaccactcgctgccttaggtgccttctgctctctggaaccagaggactagctgacttttgccaaggagcagtgccaacgggcatggcatggtgccctgcctgcccccgggcgccacctctgtacacttccctgacaccttcccaggtgtgggtcactgccacctgtgcccatgggcaccccagagcacccactgtgaccactgcagttctctcatgcccacaggcactggcctgtgaccttcgcaggggtcccggcccctcccaccactctagcctttctcaggctgcaccaaagattccatcatcagggccaactgagagtgagggagtctcacccaccgcttaccccagccctcccctgggagcagagagagaaaccctcttcatggaccagactctgcacccggtgagtgaggacagtcccagctgagtcccatcgatgttgaatctcatgccactgcaagtgccattcaccactgcgtcctgggctttacgagaccatgcaagacgggggttagtgaggaaggaggatttggggtgggggtggggtgattgaatatttgtataaaaagcaaaaagaaaaaaaaaatgtttgtttactgattggggaggggcaatatttatttgttgtaaatagcaaatgctagacttgaatattatattaaaatcctgtttctactat

SEQ ID NO: 23030 - DNA, 3460 bp, Homo sapiens
  misc_feature (1360)..(1360): n is a, c, g, or t
  misc_feature (1507)..(1507): n is a, c, g, or t
ttggggaggggcaatatttatttgttgtaaatagcaaatgctagacttgaatattatattaaaatcctgtttctactataaaaaaaaaaaaaaatgtatgccatcctctctgccctgcagagcaactccatccaccgtctgaagaagacgtgggaagacgtttccagggacagtttccggatctttcagaagctgtcagagatcttctcagatgagaacaactactcattgagccgggagctgctcatcaaggagggcacctccaagtttgccaccctggagatgaaccccaagagagcccagaaacggccgaaggagacgggcatcatccagggcaccgttccctacctgggcacgttcctcaccgacctggtgatgctggacactgccatgaaggactatctgtatggcagactcatcaactttgagaagaggaggaaggagttcgaggtgatcgcccagatcaagctgctgcagtcggcctgcaacaactacagcatcgcgccagatgagcaatttggggcctggttccgggccgtggagcggctcagcgagactgagagctacaacctgtcgtgcgagctggagcccccatccgagtcagccagcaacaccctcaggaccaagaagaacacagccattgtcaagcgctggagcgaccgccaggcccccagcactgagctcagtaccagtggcagctcccactccaagtcctgtgaccagctcaggtgtggcccctacctcagcagcggggacatcgctgacgcgctcagcgtgcactcggccggctcctctagctccgacgtggaggagatcaacatcagcttcgtcccggagtctcctgatggccaggaaaagaaggtgactgcctgcccttctccccaatatcctttcccatctccccactccaaatccatgcatggggccaggaagccctggatcctgaacacagcttctagaaggttccccatctggcagctggcctggggtgcccccacagggcagtgggatctgctgatcttaccgtctccctcagttctgggaatcagcctcacagtcatccccggagacctccggcatcagctcagcctccagcagcacctcgtcctcctcagcctccaccacgcccgtggctgccacacgcacccacaagcgctctgtctcagggctctgcaactccagctccgcgctgccgctctacaaccagcaggtgggcgactgctgtatcatccgcgtcagcctggacgtggacaatggcaacatgtacaagagcatcctggtaagccggcgggggtggcctgggtgcctccctccactggcggcaaatgcaccctgaacacagtgcaccatccctgccctnccggggtctaccttgtagttggcggggaaggacagatgtcagccaggtacagaaatgaagaaggtagtgatcagggacaaggctggcctgagggcagagggggaggaaaggagcagccgtgcaaagcccccaggagctgaaggggcngtgctgtaggggaggtgaggtcagggaagtatccagggcctggccacataggccctgagccctgccaggacctcgactttctcggggaggaagacaggagcaatgatggctggcttctctgtctggcgtgggctggtaccagagccgcaggggtgttggttaggaggccgctgtggcaaccaggctgggagccctggaaggggccagcagggtcagagtctagacaggatttggagacagcagatgggaattgctcacagaatgggtttgcctgggggctctttcttcatcctccaggtgtcctgcgacagatgaaccatttgtaacccccaccctctgtaccccagccctgggtcaggtgccccattattcacacacgctcctgacccctcattgccaggagctagcatggttgtcattaagcagtcacctgtggccctatgtccgagttccgcctgtgctctggccctcagggtcaaggtagcaggggcctggcctatgctgaccacactgagcatcctggccggcccctcctttcttacctccagggcttggactagggactgtctgttccccaggctcagtgatgctgttatcctggaggggcaagtgcttctcaaggaagtgtgggaggagggaacagtctcttacaggagaagcagggtaggcactgctgggacagacccctcctcattccatggaggcctcacatggggaacagaaggacggaggcctcacttggggagtaggagaatgtgacaaggccctctccggacccagcacctggccagaggctgtgaccagccaagataaggctccggctgtaatccgcaaggccatggacaaacacaacctggaggaggaggagccggaggactatgagctgctgcagattctctcagatgaccggaagctgaagatccctgaaaacgccaacgtcttctatgccatgaactctactgccaactatgactttgtcctgaagaagcggaccttcaccaagggagtgaaggtcaagcacggagccagctccaccctccctcgcatgaagcagaaaggactcaagattgccaagggcatcttctgagggcatcctcccagggtctggctggctggtagccaagcacttatggaccagagtggcccaggccagctgggcgccttcctcccacctgccagcccagggtaccccagactccagtttcatcctgaacctctcccgctgctgggattgacgcctgccattggtcaggctgacctggcctcccgtggaccactcgctgccttaggtgccttctgctctctggaaccagaggactagctgacttttgccaaggagcagtgccaacgggcatggcatggtgccctgcctgcccccgggcgccacctctgtacacttccctgacaccttcccaggtgtgggtcactgccacctgtgcccatgggcaccccagagcacccactgtgaccactgcagttctctcatgcccacaggcactggcctgtgaccttcgcaggggtcccggcccctcccaccactctagcctttctcaggctgcaccaaagattccatcatcagggccaactgagagtgagggagtctcacccaccgcttaccccagccctcccctgggagcagagagagaaaccctcttcatggaccagactctgcacccggtgagtgaggacagtcccagctgagtcccatcgatgttgaatctcatgccactgcaagtgccattcaccactgcgtcctgggctttacgagaccatgcaagacgggggttagtgaggaaggaggatttggggtgggggtggggtgattgaatatttgtataaaaagcaaaaagaaaaaaaaaatgtttgtttactgattggggaggggcaatatttatttgttgtaaatagcaaatgctagacttgaatattatattaaaatcctgtttctactat

SEQ ID NO: 23031 - DNA, 488 bp, Homo sapiens
aaagtgcagttaaatggtggtgctgttgttaaaaggtggaagatctcataggcttctagccagggccgagttatctccccagaagagctctgtgcctctgtggacccacttagtaagccattgtactggagttgctttaaggctccctacagccctgatgacctgtgctcagcattctttcagctttctgcctctttgtatatctttcaagcttgagaaagatcctctatagatcaggaagatgtgtccagtaagagatttgacctttgctggtttcttgacatgggctttgatgaaacccttttagcatgctcactttagatgattcttctcaagggggatgtcagccccaggaccccccagacctccatccctaaacccgggcttgcgtgtctggcaacccagggccagcacttcgttcttacactcagctgagtggtagtcctgccaccattgctgtggctctgggactatagcctctgccttag

SEQ ID NO: 23032 - DNA, 272 bp, Homo sapiens
caaacccagcttctcagagggaaacatttcatagggacttatgaacagaagtgatgtctaggcagccataagaatcgtagatccccgcatccgccctttataaatagcaagcttttagggtaaagacgtgcagctagtcatgtcttcagactttcttccaagattcatgaccactggggaggttaggtaagcatctttatgagggtttatctgtgtacagcgttgcttcaagaccttactgcagaatacctttgtgtgtggagatcaaacat

SEQ ID NO: 23033 - DNA, 402 bp, Homo sapiens
gaccagtcctggtaccaattcttcctagtcaggagacaggagaaacctacttataacaaggagatctaatagaaagtatttaaaaacacgtactggagaactagaagggcaaagaggggatactgacatattacacaggtagtaactggaagatgcagtgaccatctctatggctggtggtgaaaaagggaaagcattaggattattcaaattttaagcttggagagagtctaaagatgtggaatttaatttagggaggagccctttcttggctgatactggagccttgaactcagaatgaacctcagagagctgggaatagactttttgttttttttgagacggaatctcgctctgtcaccaggctggagtgcagtggtgcgatctctgctcgctgcaacc

SEQ ID NO: 23034 - DNA, 172 bp, Homo sapiens
catcactctgttctcctgctgcactccccgtgctgagatagtgaaaatagtagtcaacaaatactgagggaactcagagaccagtgccggtgcaggtcctcgcatgctgagtgtgccagtcccctgggcccactgttctttctctatactttgtctttgtgtcttatttctt

SEQ ID NO: 23035 - DNA, 448 bp, Homo sapiens
agagggatgctggaggcaggagaagggagaagagctgtggagcttcctgttttgcttgttgcccctgtaagtggtctggcctgagatcccagtctcttgggaccttacagtttctatgatgtggtcaccgtttggtccagctgcccagacttgctaaacatcccttgggctggtcctccaggccctgagataccctccaaaggattaggggtgccctcttctcccacagcagcttggaaagtaccataaattcacttgttctcttaatttgtgaaacctcctggacttgtctatgaagagctcctcagaaacaccctcttcattacaatgttaaattaaaatttagtagacgaggcacatagcagaataaactttcaattaaaatatacacactgcgatggtgaagggagactggagagaacttgccggcatctttgccgtgaatgtg

SEQ ID NO: 23036 - DNA, 390 bp, Homo sapiens
gaaaatcttcacaattctttgtacagaaatctcttctgtacaaaaatatattttaaaagtgtctggagtttctgttgttattatgcttacacgtcattgtttgaatcaatctgataaagtattttttaggcacactaacattattttcaagattaaaatcaggtcaagacttttttactatatttccttttatgcaaacatttaaataaaatttctaatgtttcccttttttggcagatgctgacaatataaattataaacttttagaatagaataaaatcctggaattactcagatatatttgtaagtttcatccaaacatttataaatttatgtcagatagcagaagaggattgtgaaaatattttaactttcaccaaaagttaaagc

SEQ ID NO: 23037 - DNA, 633 bp, Homo sapiens
ggagaaggtggggagctgcttggggagtcagggaatctggcagttgggctcagagctctgattttatcaagatgtgattcttctctccatgcctcagtttcttcgtctgtgaagagaggaccctgactcctgctctgccgtcctcctggggcatggtgctgaggagtgccaggccacctgacagcccactgattcatctctttgcatcttagtttcttttaagatgtaaaatggggatagtaagaatagttacctcttagcattgctgggcagagtgagtaagataatgatgcacattgagtttagctcagtgccaggcacataataaggataaaggttattggtgattaaaaagacaaagcagcagtcagccttttcaggttgtgaagaaaataccttttttttcccccttctttttactctcacttgctgaaaagctctcaagtgtttgaagtggggtttggaatcctgcatcaccaactcactgactggtactgaggcctgagacaggttagttttgctttaaacattctgaagcctctattttctcatctgcaagatggggagctaataatgatagtctcccaaggtggtgcagagtcagagagctagcatatagaaatcatctggcat

SEQ ID NO: 23038 - DNA, 659 bp, Homo sapiens
agaaaggtcttgaacttctacttcagtgcaggcttcatgtaccagatgcacaaatgagcattagtaaatggagctggttcttagtagaaaatttccattaatccaacaccgagtgtagaagaatctctgtagtcttgtaaatagacttaagaataattattaagaattaagaattattgtgattaattaattaattaaaatgatactggttttgccaccatttcttcaggtatttctcttaagatgaaactgttttgtttttctgtttctaccagtcctgacttttgatatcaatggaaatcagcttagcaaaaacaaacaaaacaaaacaaaacaaaacacccctttgagctatctctctccatataccacttaggggtgagttcaaaatgcagggaccccttctgtgtattttacaatccaagactgaaaatacaaatgaagaggaacacagagcaatcataaaacaggcataccacttgacaatgcagctagctgccccaccgactggagcacctcacgtgtgtgcctgctaccttcacttccaaatatctaaatagtgccctgcaaaaaactagaaacttggggaacatttgtggaataaataaatgcttttgataatgatggagagtaaaagtggaggaaggaggagaacaggc

SEQ ID NO: 23039 - DNA, 744 bp, Homo sapiens
attggatagagatcctattgaatgcagtaaaccaagtgtgatatagaacattaaattaaaaagcaagacataactatgggaaaataattttttgtttttgttttattatggagattgaattttattggtgtttctgtatctgataaaatcataagtttttaaaaaaataataatttgcctgtcagtaattgattttctattgttgaacctattctgggctaaatgagcaggcatgatacaacagcctaggcatgatacaaggatgactaggaagaactagaatgatgatgatgacagtaatagtggaaaattgagagttataatggtagatagaagggagaacgtgtttaaaaagggcattaactttgatattaaatgctttaaatcagaagttttgtgattgcattaccctatcagtgaaagaattgagtatgtacccccagtgtttgtgtttatttaaaactgcatagtactggctgggggcggtggctcatgtctgtaatccctgtactttgggaggccatggtgggtgggtcacttgaggtcaggaccagctgggccaacatggtgaaaccctgtctctactaaaaatacaaaaattagccaggcatggtggcatggccgatagacccagctactcgggaggctgaggcacgagaatcacttgaacccaggaggaggagtttgcaattagccgcgatcgcgccgctgcactccagcctgggagacaagagtgagactgtc

SEQ ID NO: 23040 - DNA, 361 bp, Homo sapiens
taaaagaaagcacagtttgtgccaacatttattaactcgataaagttaaaaaagctatgatatgtatttcttggttattgaacaatggaacagacacattatcaacactgaataatttatagacattttacactgagaaaccatttgttggaaaaagagtttcaaagtggaatttttttaagatgtaaaggcattttttgggggtggggtggggagacaggatcttatgctgttgcccaagctggagtgcagtggcatgatcttggctcactgcattcttgaccccaggaggcggaggttgcagtgaacggagattgcgccattgcactccagcctgggtgacagaaaaagactctgtatg

SEQ ID NO: 23041 - DNA, 1961 bp, Homo sapiens
  misc_feature (512)..(512): n is a, c, g, or t
tggcttctcactcggctccttacacaagaggcatttttttaactgtctctgcttaaaacaaggtgtttttgagtcagcagccctttgggtgggtctcgtcctcttgggcacccgacacccaccccacggcgggagccccaggtggccccggaggccaccgggaagcgtgaactacatctcccagggttccccggggcggaggacgcccacccggattggccagggttcgctgacgctcagtgttttggcccggacggtcacatgtttcctttgttgtgagctgcggcagagactggtggctggaggagacgccggcgctggagagtgcgctgcgccgcccgccgctgagggaccgcggggttagccactgctggctgcttccagtgttcgccgagaggtaccgggggtgacagctccgggaccggccgaaaggcgaggaaccggtgtggaaattaaaagaacacacatattttgactggggctttgatcaaccaaatgctaaaaagccacanaaagaagatccctaatagtcatttctcaacaattatatagtcaactgatgtaacaatggtactaatattgggacgcagactaaacagagaggatcttggggtgcgtgattccccagcaactaagcgaaaagtttttgaaatggaccccaaatctctgacaggtcatgagttttttgacttctcttcaggatcatcccatgccgaaaacatactccagatatttaatgaatttcgtgatagccgcttattcacagatgttatcatttgtgtggaaggaaaagaatttccttgccatagagctgtgctctcagcctgtagcagctacttcagagctatgttttgtaatgaccacagggaaagccgagaaatgttggttgagatcaatggtattttagctgaagctatggaatgttttttgcagtatgtttatactggaaaggtgaagatcactacagagaatgtacagtatctctttgagacatcaagcctctttcagattagtgttctccgtgatgcatgtgccaagttcttggaggagcaacttgatccttgtaattgcttaggaatccagcgctttgctgatacccattcactcaaaacactcttcacaaaatgcaaaaattttgcgttacagacttttgaggatgtatcccagcacgaagaatttcttgagcttgacaaagatgaagtatatgttgtcggtggctatgatgggcaaaacagacttagcagcgtagaatgttatgattccttttcaaatcgatggactgaagttgctccccttaaggaagccgtgagttctcctgcagtgactagctgtgtaggcaaactgtttgtgattggtggaggacctgatgataatacttgttctgataaggttcaatcttatgatccagaaaccaattcttggctacttcgtgcagctatcccaattgccaaaaggtgtataacagctgtatccctaaacaacctgatctatgttgccggtggactgaccaaggcaatatactgttacgatccagttgaagattactggatgcacgtacagaatacattcagccgtcaggaaaactgtggtatgtctgtgtgtaatggtaaaatatatatcctgggcggaagacgggaaaatggagaagccacagacactattctctgttatgatcctgcaacaagtatcatcacaggggtagctgcaatgcccaggccagtgtcctatcatggctgtgtgactattcatagatacaatgagaaatgctttaaactctgaagacaggatacctcaccgaagaagccacactgatccaagatgggaggttttaaaaactctacagtgggaacttcacatatctcctttgtgccatatgcaaaaaatagtaaaaataataatttggtgcctttctcctcaaaatatcaatctttcaaactataataaagcctttcctataattg

SEQ ID NO: 23042 - DNA, 966 bp, Homo sapiens
gtgggcggtacccgagggagagttcgagcttttattggcgagtttttatggtcactaggtgggcctgcccgtgggccattcttcccgtccccggggagccggggcgggcgggggagcgggcgttccgccggcgcagtccccgcctaacctccccaccttcttaccactccaggactcagtttcttaatttagttcctaatggacccgccctcaagttctggacaccccgggtgaagactgttaacgcggcgggtgcgggaggcgcgcgctcccgcccctgctgcgggcggctggtagcctcggtggccgccgccgccgctgctgctgcctgatcctgcaggcagttctgggcacgcagagatcggctaccgtggcctgccctccgaggaccggaaaattaacaccctttaactagtgtcgcgttatctgccgggtggttcgcaggaagtcctgcgaacacgttgttgccagttctgtaaacgtgtttagatagctaaatatagatcacagtgccacatcttagggggccccacggtcacccctgaggcagtggctgttcacaattgattttagtggattttaatgattaatcacttgctcttgtgggcagcttttcaaaaatcacgtctttgtatttgcagctacagactgggtccaccagctaagaggttggtttttattagggttgtaaaatagatttaaaatctgcttgttgttggctgagatttaaaagcagatttctactatttaaaaaagatagtttgaagatactcccctaaaaagtaaagattcttccatactcggctcggatgagttgttttccttgtttgagggattctaggtcacacacttctatgttttaattcccgtggtaattcaaaatgtttgagaagtgggttgcgactgtgtcgttttaaaattgtacattaagctgacggtaataaaatcttcaagaccaatcatttt

SEQ ID NO: 23043 - DNA, 642 bp, Homo sapiens
ccgggcccggggaattccccggggaattccatgttttctttacctatgccttggtggcacagatctcttggtgacagctatatcatgataaattatcgtgtgtgcattgttttgcatttcaaggtggaagaatcaacagccgtgatgtctggatttataactcacagttaaatatttggatcagagttgcctctctcaataaaggcagatggcgtcacaaaatggctgtcctccttggtaaagtaagagaaaccactttttattactattgctggtacctttccaaagtaaataccacagctgaatctttcattttactcaccctctgggtattttggattcaaattgtatttccttccatttctaacctcaatagataaaccaaagatataaacaatatgacactgtacttttgaatggatattttgttctcctaatttggaattcatggcagtgtagcacatttctcttctcatgcatcactgaagtccaaatgcctaagaagcattggaaaataaggagttacatcaaatacagacaggccaatgtctaacccacgcagttggtttttttttactaactttgcaagtccggcagagatatattgtccaaggcatgtattttatcttttttattttaaat

SEQ ID NO: 23044 - DNA, 442 bp, Homo sapiens
tgttaccaaatcctttatcttcaatggttaattttttgtttatatatttggttaaacaggaaaactgtggtatgtctgtgtgtaatggtaaaatatatatcctgggcggaagacgggaaaatggagaagccacagacactattctctgttatgatcctgcaacaagtatcatcacaggggtagctgcaatgcccaggccagtgtcctatcatggctgtgtgactattcatagatacaatgagaaatgctttaaactctgaagacaggatacctcaccgaagaagccacactgatccaagatgggaggttttaaaaactctacagtgggaacttcacatatctcctttgtgccatatgcaaaaaatagtaaaaataataatttggtgcctttctcctcaaaatatcaatctttcaaactataataaagcctttcctataattg

SEQ ID NO: 23045 - DNA, 591 bp, Homo sapiens
tggcttctcactcggctccttacacaagaggcatttttttaactgtctctgcttaaaacaaggtgtttttgagtcagcagccctttgggtgggtctcgtcctcttgggcacccgacacccaccccacggcgggagccccaggtggccccggaggccaccgggaagcgtgaactacatctcccagggttccccggggcggaggacgcccacccggattggccagggttcgctgacgctcagtgttttggcccggacggtcacatgtttcctttgttgtgagctgcggcagagactggtggctggaggagacgccggcgctggagagtgcgctgcgccgcccgccgctgagggaccgcggggttagccactgctggctgcttccagtgttcgccgagaggtaccgggggtgacagctccgggaccggccgaaaggcgaggaaccggaagcccgggggagtgcgaccgcctcaaatccagccttcttgtttggtgggacgaccgtcggttctgtccgggaggaatgacggggtcaaggtggggtccccagggccgcgggcccgtgaagccccattaaagcgattgcgaaatgca

SEQ ID NO: 23046 - DNA, 4489 bp, Homo sapiens
  misc_feature (512)..(512): n is a, c, g, or t
tggcttctcactcggctccttacacaagaggcatttttttaactgtctctgcttaaaacaaggtgtttttgagtcagcagccctttgggtgggtctcgtcctcttgggcacccgacacccaccccacggcgggagccccaggtggccccggaggccaccgggaagcgtgaactacatctcccagggttccccggggcggaggacgcccacccggattggccagggttcgctgacgctcagtgttttggcccggacggtcacatgtttcctttgttgtgagctgcggcagagactggtggctggaggagacgccggcgctggagagtgcgctgcgccgcccgccgctgagggaccgcggggttagccactgctggctgcttccagtgttcgccgagaggtaccgggggtgacagctccgggaccggccgaaaggcgaggaaccggtgtggaaattaaaagaacacacatattttgactggggctttgatcaaccaaatgctaaaaagccacanaaagaagatccctaatagtcatttctcaacaattatatagtcaactgatgtaacaatggtactaatattgggacgcagactaaacagagaggatcttggggtgcgtgattccccagcaactaagcgaaaagtttttgaaatggaccccaaatctctgacaggtcatgagttttttgacttctcttcaggatcatcccatgccgaaaacatactccagatatttaatgaatttcgtgatagccgcttattcacagatgttatcatttgtgtggaaggaaaagaatttccttgccatagagctgtgctctcagcctgtagcagctacttcagagctatgttttgtaatgaccacagggaaagccgagaaatgttggttgagatcaatggtattttagctgaagctatggaatgttttttgcagtatgtttatactggaaaggtgaagatcactacagagaatgtacagtatctctttgagacatcaagcctctttcagattagtgttctccgtgatgcatgtgccaagttcttggaggagcaacttgatccttgtaattgcttaggaatccagcgctttgctgatacccattcactcaaaacactcttcacaaaatgcaaaaattttgcgttacagacttttgaggatgtatcccagcacgaagaatttcttgagcttgacaaagatgaacttattgattatatttgtagtgatgaacttgttattggtaaagaggagatggtttttgaagccgtcatgcgttgggtctatcgtgccgttgatctgagaagaccactgttacacgagctcctgacacatgtgagactccctctgttgcatcccaactactttgttcaaacagttgaagtggaccaattgatccagaattctcctgagtgttatcagttgttgcatgaagcaagacggtaccacatacttgggaatgaaatgatgtccccaaggactaggccacgcaggtccactggctattctgaggtgatagttgtcgttggaggatgtgagcgagttggaggatttaatcttccatacactgagtgctacgatcctgtaacaggagaatggaagtctttggctaagcttccagaatttaccaaatcagagtatgcagtctgtgctctaaggaatgacattcttgtttcaggtggaagaatcaacagccgtgatgtctggatttataactcacagttaaatatttggatcagagttgcctctctcaataaaggcagatggcgtcacaaaatggctgtcctccttggtaaagtatatgttgtcggtggctatgatgggcaaaacagacttagcagcgtagaatgttatgattccttttcaaatcgatggactgaagttgctccccttaaggaagccgtgagttctcctgcagtgactagctgtgtaggcaaactgtttgtgattggtggaggacctgatgataatacttgttctgataaggttcaatcttatgatccagaaaccaattcttggctacttcgtgcagctatcccaattgccaaaaggtgtataacagctgtatccctaaacaacctgatctatgttgccggtggactgaccaaggcaatatactgttacgatccagttgaagattactggatgcacgtacagaatacattcagccgtcaggaaaactgtggtatgtctgtgtgtaatggtaaaatatatatcctgggcggaagacgggaaaatggagaagccacagacactattctctgttatgatcctgcaacaagtatcatcacaggggtagctgcaatgcccaggccagtgtcctatcatggctgtgtgactattcatagatacaatgagaaatgctttaaactctgaagacaggatacctcaccgaagaagccacactgatccaagatgggaggttttaaaaactctacagtgggaacttcacatatctcctttgtgccatatgcaaaaaatagtaaaaataataatttggtgcctttctcctcaaaatatcaatctttcaaactataataaagcctttcctataattgaaaaaaaaaacttttttgttaaaggtaatggtggttgttacttggcctttgaagagtgtacctttgtaagtatttgtaagaagtctatgtgaattaggaaatgtctgtctgcataccttttaggagcgtgtgaatggtgtcttcacttattatgtatgtttatctgtatgtatattccttattttgtcatatatgtagagaaaattgcatgacttgaggcatcatttaggttgaagaagttaatgcttaggatgcattctaggagaaaaaatcagttttaaaaacctttgttgttaacaaagtatatccagattggttaattttattgaagggtttttttctgtaattgataaaaatgtaatgacaacaattcaggcatcataaaatactgaactattgtgactttattcttagaattgctgtcttacattaaacatgtttttagggggaagttaggtaggagatagaaaaataagtgcccctacaagggggattaaaattacaagttaattcctaagagaaaaatggaatggcctttgaggggaaaagacccactatggctctcaaagtttttatgcatcatctcttcaatcctctaagaaagcctcttttcttaacttgataaagcagtggaaacccattttgcaatattgttttgtgaaaaacagggacagacagccaggtacagagactcacacctgtactcccaactactcagcaggctggggcaggaggattgcttgagcccaggagtctgaggctacagtgagctatgaacgcacacggcaccctagcctgggcaacaggttgcgacactgtctcaagagaaaagaaaaagaaaaatagggataggttttccttcctagcccagtagagtttgacctcattagtatggtgctttgggtgaggacctcttccttgattatcccactttctagtgaacagctaaaattcctgagagtctctactgttaaggtacctttaataggataaagcagggaccacctatctcagtgggtccatttttcttttaaaattagttatctgaaaaaacttagcagtagttcccatctttaaggtaagtctttcatttggtccccattgtgtaaaatactaatcaacattttcaagcttctgtacaacagactgcttttgtctagatttctcaactccactttataaagcttatcagttttcagagaggaatgtgaattttttttctaatgcaaataaatggatatggcaggaactacagcataagtgattattgtgattctgggtggacggatataatttacaacatttagggatgttctaggtagcctgctgtagtttgacttccagtcactgttgtctttcacattataatttgtatatttcttgtgatagaagggatgatgcaaatatgtaattaaagtgtcaccagatttctgttaaaaccaaggttgaaataaaaagcctaacattggtaagctacattgttttctcattttagaatgattcagagatttcagatagacattttttaaactttaatgcttagctagaatctacattctgaggaaaactctaaaaaacttaaaaatttttagggaatttttatttttcaaatcataattttaaaatgatagataccattttgtgataacaacaattcagaaaacaattttctatcctcttagttgaaagaatgtaggtacagtttggatacttgtactttaattttagagtaaacatctgcattatactcttatagataatagaattatttagttaagaaattctttacagtaaatgagataatgtgtgaaaaagtattttgtaaatgctgaggattctacaaatgatagttgttattttcatgtgtatttgtaagatcatgtccatttcatgaatataggacttcacataaaaaaagactttctcaagacaaatta

SEQ ID NO: 23047 - DNA, 2876 bp, Homo sapiens
tgattgaggatcctctctaattatcaggagctgtgctctaggatgacatactgtttcaggtggaagaatcaacagccgtgatgtctggatttataactcacagttaaatatttggatcagagttgcctctctcaataaaggcagatggcgtcacaaaatggctgtcctccttggtaaagtatatgttgtcggtggctatgatgggcaaaacagacttagcagcgtagaatgttatgattccttttcaaatcgatggactgaagttgctccccttaaggaagccgtgagttctcctgcagtgactagctgtgtaggcaaactgtttgtgattggtggaggacctgatgataatacttgttctgataaggttcaatcttatgatccagaaaccaattcttggctacttcgtgcagctatcccaattgccaaaaggtgtataacagctgtatccctaaacaacctgatctatgttgccggtggactgaccaaggcaatatactgttacgatccagttgaagattactggatgcacgtacagaatacattcagccgtcaggaaaactgtggtatgtctgtgtgtaatggtaaaatatatatcctgggcggaagacgggaaaatggagaagccacagacactattctctgttatgatcctgcaacaagtatcatcacaggggtagctgcaatgcccaggccagtgtcctatcatggctgtgtgactattcatagatacaatgagaaatgctttaaactctgaagacaggatacctcaccgaagaagccacactgatccaagatgggaggttttaaaaactctacagtgggaacttcacatatctcctttgtgccatatgcaaaaaatagtaaaaataataatttggtgcctttctcctcaaaatatcaatctttcaaactataataaagcctttcctataattgaaaaaaaaaacttttttgttaaaggtaatggtggttgttacttggcctttgaagagtgtacctttgtaagtatttgtaagaagtctatgtgaattaggaaatgtctgtctgcataccttttaggagcgtgtgaatggtgtcttcacttattatgtatgtttatctgtatgtatattccttattttgtcatatatgtagagaaaattgcatgacttgaggcatcatttaggttgaagaagttaatgcttaggatgcattctaggagaaaaaatcagttttaaaaacctttgttgttaacaaagtatatccagattggttaattttattgaagggtttttttctgtaattgataaaaatgtaatgacaacaattcaggcatcataaaatactgaactattgtgactttattcttagaattgctgtcttacattaaacatgtttttagggggaagttaggtaggagatagaaaaataagtgcccctacaagggggattaaaattacaagttaattcctaagagaaaaatggaatggcctttgaggggaaaagacccactatggctctcaaagtttttatgcatcatctcttcaatcctctaagaaagcctcttttcttaacttgataaagcagtggaaacccattttgcaatattgttttgtgaaaaacagggacagacagccaggtacagagactcacacctgtactcccaactactcagcaggctggggcaggaggattgcttgagcccaggagtctgaggctacagtgagctatgaacgcacacggcaccctagcctgggcaacaggttgcgacactgtctcaagagaaaagaaaaagaaaaatagggataggttttccttcctagcccagtagagtttgacctcattagtatggtgctttgggtgaggacctcttccttgattatcccactttctagtgaacagctaaaattcctgagagtctctactgttaaggtacctttaataggataaagcagggaccacctatctcagtgggtccatttttcttttaaaattagttatctgaaaaaacttagcagtagttcccatctttaaggtaagtctttcatttggtccccattgtgtaaaatactaatcaacattttcaagcttctgtacaacagactgcttttgtctagatttctcaactccactttataaagcttatcagttttcagagaggaatgtgaattttttttctaatgcaaataaatggatatggcaggaactacagcataagtgattattgtgattctgggtggacggatataatttacaacatttagggatgttctaggtagcctgctgtagtttgacttccagtcactgttgtctttcacattataatttgtatatttcttgtgatagaagggatgatgcaaatatgtaattaaagtgtcaccagatttctgttaaaaccaaggttgaaataaaaagcctaacattggtaagctacattgttttctcattttagaatgattcagagatttcagatagacattttttaaactttaatgcttagctagaatctacattctgaggaaaactctaaaaaacttaaaaatttttagggaatttttatttttcaaatcataattttaaaatgatagataccattttgtgataacaacaattcagaaaacaattttctatcctcttagttgaaagaatgtaggtacagtttggatacttgtactttaattttagagtaaacatctgcattatactcttatagataatagaattatttagttaagaaattctttacagtaaatgagataatgtgtgaaaaagtattttgtaaatgctgaggattctacaaatgatagttgttattttcatgtgtatttgtaagatcatgtccatttcatgaatataggacttcacataaaaaaagactttctcaagacaaatta

SEQ ID NO: 23048 - DNA, 2680 bp, Homo sapiens
  misc_feature (512)..(512): n is a, c, g, or t
tggcttctcactcggctccttacacaagaggcatttttttaactgtctctgcttaaaacaaggtgtttttgagtcagcagccctttgggtgggtctcgtcctcttgggcacccgacacccaccccacggcgggagccccaggtggccccggaggccaccgggaagcgtgaactacatctcccagggttccccggggcggaggacgcccacccggattggccagggttcgctgacgctcagtgttttggcccggacggtcacatgtttcctttgttgtgagctgcggcagagactggtggctggaggagacgccggcgctggagagtgcgctgcgccgcccgccgctgagggaccgcggggttagccactgctggctgcttccagtgttcgccgagaggtaccgggggtgacagctccgggaccggccgaaaggcgaggaaccggtgtggaaattaaaagaacacacatattttgactggggctttgatcaaccaaatgctaaaaagccacanaaagaagatccctaatagtcatttctcaacaattatatagtcaactgatgtaacaatggtactaatattgggacgcagactaaacagagaggatcttggggtgcgtgattccccagcaactaagcgaaaagtttttgaaatggaccccaaatctctgacaggtcatgagttttttgacttctcttcaggatcatcccatgccgaaaacatactccagatatttaatgaatttcgtgatagccgcttattcacagatgttatcatttgtgtggaaggaaaagaatttccttgccatagagctgtgctctcagcctgtagcagctacttcagagctatgttttgtaatgaccacagggaaagccgagaaatgttggttgagatcaatggtattttagctgaagctatggaatgttttttgcagtatgtttatactggaaaggtgaagatcactacagagaatgtacagtatctctttgagacatcaagcctctttcagattagtgttctccgtgatgcatgtgccaagttcttggaggagcaacttgatccttgtaattgcttaggaatccagcgctttgctgatacccattcactcaaaacactcttcacaaaatgcaaaaattttgcgttacagacttttgaggatgtatcccagcacgaagaatttcttgagcttgacaaagatgaacttattgattatatttgtagtgatgaacttgttattggtaaagaggagatggtttttgaagccgtcatgcgttgggtctatcgtgccgttgatctgagaagaccactgttacacgagctcctgacacatgtgagactccctctgttgcatcccaactactttgttcaaacagttgaagtggaccaattgatccagaattctcctgagtgttatcagttgttgcatgaagcaagacggtaccacatacttgggaatgaaatgatgtccccaaggactaggccacgcaggtccactggctattctgaggtgatagttgtcgttggaggatgtgagcgagttggaggatttaatcttccatacactgagtgctacgatcctgtaacaggagaatggaagtctttggctaagcttccagaatttaccaaatcagagtatgcagtctgtgctctaaggaatgacattcttgtttcaggtggaagaatcaacagccgtgatgtctggatttataactcacagttaaatatttggatcagagttgcctctctcaataaaggcagatggcgtcacaaaatggctgtcctccttggtaaagtatatgttgtcggtggctatgatgggcaaaacagacttagcagcgtagaatgttatgattccttttcaaatcgatggactgaagttgctccccttaaggaagccgtgagttctcctgcagtgactagctgtgtaggcaaactgtttgtgattggtggaggacctgatgataatacttgttctgataaggttcaatcttatgatccagaaaccaattcttggctacttcgtgcagctatcccaattgccaaaaggtgtataacagctgtatccctaaacaacctgatctatgttgccggtggactgaccaaggcaatatactgttacgatccagttgaagattactggatgcacgtacagaatacattcagccgtcaggtaataacatgaagcagtacaaaagaaaaataaatctaagagggaccaagtacataatcattattaatacactggaatttcaattttaaaatatttcaggctgggcgtggtggctcacgcctgtggtcccagcactttgggaggccgaggtggatagatcacttgaggtcaggagttcaagaccagcctggctaatatggtgaaaccccgtctctactaaaaaattatggccaggcgtggtggttcatgcctgtaatcccagcactttgggaggctgaggcaggccaatcacctgaggtcgggagttcgagaccagcctgaccaacatggagaaaccccgtctctgctaaaaatacaaaattagctgggcgtggtggcgcattgcctgtaatcccagctactagggaggctgcggcaggagaattgcttgaacccgggaggtggaggtcgcggtgagccgagatcgagccattgcactccagcctggacagcaggagcgaaactccgtctc

SEQ ID NO: 23049 - DNA, 2379 bp, Homo sapiens
tgttaccaaatcctttatcttcaatggttaattttttgtttatatatttggttaaacaggaaaactgtggtatgtctgtgtgtaatggtaaaatatatatcctgggcggaagacgggaaaatggagaagccacagacactattctctgttatgatcctgcaacaagtatcatcacaggggtagctgcaatgcccaggccagtgtcctatcatggctgtgtgactattcatagatacaatgagaaatgctttaaactctgaagacaggatacctcaccgaagaagccacactgatccaagatgggaggttttaaaaactctacagtgggaacttcacatatctcctttgtgccatatgcaaaaaatagtaaaaataataatttggtgcctttctcctcaaaatatcaatctttcaaactataataaagcctttcctataattgaaaaaaaaaacttttttgttaaaggtaatggtggttgttacttggcctttgaagagtgtacctttgtaagtatttgtaagaagtctatgtgaattaggaaatgtctgtctgcataccttttaggagcgtgtgaatggtgtcttcacttattatgtatgtttatctgtatgtatattccttattttgtcatatatgtagagaaaattgcatgacttgaggcatcatttaggttgaagaagttaatgcttaggatgcattctaggagaaaaaatcagttttaaaaacctttgttgttaacaaagtatatccagattggttaattttattgaagggtttttttctgtaattgataaaaatgtaatgacaacaattcaggcatcataaaatactgaactattgtgactttattcttagaattgctgtcttacattaaacatgtttttagggggaagttaggtaggagatagaaaaataagtgcccctacaagggggattaaaattacaagttaattcctaagagaaaaatggaatggcctttgaggggaaaagacccactatggctctcaaagtttttatgcatcatctcttcaatcctctaagaaagcctcttttcttaacttgataaagcagtggaaacccattttgcaatattgttttgtgaaaaacagggacagacagccaggtacagagactcacacctgtactcccaactactcagcaggctggggcaggaggattgcttgagcccaggagtctgaggctacagtgagctatgaacgcacacggcaccctagcctgggcaacaggttgcgacactgtctcaagagaaaagaaaaagaaaaatagggataggttttccttcctagcccagtagagtttgacctcattagtatggtgctttgggtgaggacctcttccttgattatcccactttctagtgaacagctaaaattcctgagagtctctactgttaaggtacctttaataggataaagcagggaccacctatctcagtgggtccatttttcttttaaaattagttatctgaaaaaacttagcagtagttcccatctttaaggtaagtctttcatttggtccccattgtgtaaaatactaatcaacattttcaagcttctgtacaacagactgcttttgtctagatttctcaactccactttataaagcttatcagttttcagagaggaatgtgaattttttttctaatgcaaataaatggatatggcaggaactacagcataagtgattattgtgattctgggtggacggatataatttacaacatttagggatgttctaggtagcctgctgtagtttgacttccagtcactgttgtctttcacattataatttgtatatttcttgtgatagaagggatgatgcaaatatgtaattaaagtgtcaccagatttctgttaaaaccaaggttgaaataaaaagcctaacattggtaagctacattgttttctcattttagaatgattcagagatttcagatagacattttttaaactttaatgcttagctagaatctacattctgaggaaaactctaaaaaacttaaaaatttttagggaatttttatttttcaaatcataattttaaaatgatagataccattttgtgataacaacaattcagaaaacaattttctatcctcttagttgaaagaatgtaggtacagtttggatacttgtactttaattttagagtaaacatctgcattatactcttatagataatagaattatttagttaagaaattctttacagtaaatgagataatgtgtgaaaaagtattttgtaaatgctgaggattctacaaatgatagttgttattttcatgtgtatttgtaagatcatgtccatttcatgaatataggacttcacataaaaaaagactttctcaagacaaatta

SEQ ID NO: 23050 - DNA, 3126 bp, Homo sapiens
  misc_feature (512)..(512): n is a, c, g, or t
tggcttctcactcggctccttacacaagaggcatttttttaactgtctctgcttaaaacaaggtgtttttgagtcagcagccctttgggtgggtctcgtcctcttgggcacccgacacccaccccacggcgggagccccaggtggccccggaggccaccgggaagcgtgaactacatctcccagggttccccggggcggaggacgcccacccggattggccagggttcgctgacgctcagtgttttggcccggacggtcacatgtttcctttgttgtgagctgcggcagagactggtggctggaggagacgccggcgctggagagtgcgctgcgccgcccgccgctgagggaccgcggggttagccactgctggctgcttccagtgttcgccgagaggtaccgggggtgacagctccgggaccggccgaaaggcgaggaaccggtgtggaaattaaaagaacacacatattttgactggggctttgatcaaccaaatgctaaaaagccacanaaagaagatccctaatagtcatttctcaacaattatatagtcaactgatgtaacaatggtactaatattgggacgcagactaaacagagaggatcttggggtgcgtgattccccagcaactaagcgaaaagtttttgaaatggaccccaaatctctgacaggtcatgagttttttgacttctcttcaggatcatcccatgccgaaaacatactccagatatttaatgaatttcgtgatagccgcttattcacagatgttatcatttgtgtggaaggaaaagaatttccttgccatagagctgtgctctcagcctgtagcagctacttcagagctatgttttgtaatgaccacagggaaagccgagaaatgttggttgagatcaatggtattttagctgaagctatggaatgttttttgcagtatgtttatactggaaaggtgaagatcactacagagaatgtacagtatctctttgagacatcaagcctctttcagattagtgttctccgtgatgcatgtgccaagttcttggaggagcaacttgatccttgtaattgcttaggaatccagcgctttgctgatacccattcactcaaaacactcttcacaaaatgcaaaaattttgcgttacagacttttgaggatgtatcccagcacgaagaatttcttgagcttgacaaagatgaacttattgattatatttgtagtgatgaacttgttattggtaaagaggagatggtttttgaagccgtcatgcgttgggtctatcgtgccgttgatctgagaagaccactgttacacgagctcctgacacatgtgagactccctctgttgcatcccaactactttgttcaaacagttgaagtggaccaattgatccagaattctcctgagtgttatcagttgttgcatgaagcaagacggtaccacatacttgggaatgaaatgatgtccccaaggactaggccacgcaggtccactggctattctgaggtgatagttgtcgttggaggatgtgagcgagttggaggatttaatcttccatacactgagtgctacgatcctgtaacaggagaatggaagtctttggctaagcttccagaatttaccaaatcagagtatgcagtctgtgctctaaggaatgacattcttgtttcaggtggaagaatcaacagccgtgatgtctggatttataactcacagttaaatatttggatcagagttgcctctctcaataaaggcagatggcgtcacaaaatggctgtcctccttggtaaagtatatgttgtcggtggctatgatgggcaaaacagacttagcagcgtagaatgttatgattccttttcaaatcgatggactgaagttgctccccttaaggaagccgtgagttctcctgcagtgactagctgtgtaggcaaactgtttgtgattggtggaggacctgatgataatacttgttctgataaggttcaatcttatgatccagaaaccaattcttggctacttcgtgcagctatcccaattgccaaaaggtgtataacagctgtatccctaaacaacctgatctatgttgccggtggactgaccaaggcaatatactgttacgatccagttgaagattactggatgcacgtacagaatacattcagccgtcaggaaaactgtggtatgtctgtgtgtaatggtaaaatatatatcctgggcggaagacgggaaaatggagaagccacagacactattctctgttatgatcctgcaacaagtatcatcacaggggtagctgcaatgcccaggccagtgtcctatcatggctgtgtgactattcatagatacaatgagaaatgctttaaactctgaagacaggatacctcaccgaagaagccacactgatccaagatgggaggttttaaaaactctacagtgggaacttcacatatctcctttgtgccatatgcaaaaaatagtaaaaataataatttggtgcctttctcctcaaaatatcaatctttcaaactataataaagcctttcctataattgaaaaaaaaaacttttttgttaaaggtaatggtggttgttacttggcctttgaagagtgtacctttgtaagtatttgtaagaagtctatgtgaattaggaaatgtctgtctgcataccttttaggagcgtgtgaatggtgtcttcacttattatgtatgtttatctgtatgtatattccttattttgtcatatatgtagagaaaattgcatgacttgaggcatcatttaggttgaagaagttaatgcttaggatgcattctaggagaaaaaatcagttttaaaaacctttgttgttaacaaagtatatccagattggttaattttattgaagggtttttttctgtaattgataaaaatgtaatgacaacaattcaggcatcataaaatactgaactattgtgactttattcttagaattgctgtcttacattaaacatgtttttagggggaagttaggtaggagatagaaaaataagtgcccctacaagggggattaaaattacaagttaattcctaagagaaaaatggaatggcctttgaggggaaaagacctgtaatcctcgagatcgactca

SEQ ID NO: 23051 - DNA, 2358 bp, Homo sapiens
agagaccaagaagaaagcgcgtagccgcggacatttcagaaaactgtggtatgtctgtgtgtaatggtaaaatatatatcctgggcggaagacgggaaaatggagaagccacagacactattctctgttatgatcctgcaacaagtatcatcacaggggtagctgcaatgcccaggccagtgtcctatcatggctgtgtgactattcatagatacaatgagaaatgctttaaactctgaagacaggatacctcaccgaagaagccacactgatccaagatgggaggttttaaaaactctacagtgggaacttcacatatctcctttgtgccatatgcaaaaaatagtaaaaataataatttggtgcctttctcctcaaaatatcaatctttcaaactataataaagcctttcctataattgaaaaaaaaaacttttttgttaaaggtaatggtggttgttacttggcctttgaagagtgtacctttgtaagtatttgtaagaagtctatgtgaattaggaaatgtctgtctgcataccttttaggagcgtgtgaatggtgtcttcacttattatgtatgtttatctgtatgtatattccttattttgtcatatatgtagagaaaattgcatgacttgaggcatcatttaggttgaagaagttaatgcttaggatgcattctaggagaaaaaatcagttttaaaaacctttgttgttaacaaagtatatccagattggttaattttattgaagggtttttttctgtaattgataaaaatgtaatgacaacaattcaggcatcataaaatactgaactattgtgactttattcttagaattgctgtcttacattaaacatgtttttagggggaagttaggtaggagatagaaaaataagtgcccctacaagggggattaaaattacaagttaattcctaagagaaaaatggaatggcctttgaggggaaaagacccactatggctctcaaagtttttatgcatcatctcttcaatcctctaagaaagcctcttttcttaacttgataaagcagtggaaacccattttgcaatattgttttgtgaaaaacagggacagacagccaggtacagagactcacacctgtactcccaactactcagcaggctggggcaggaggattgcttgagcccaggagtctgaggctacagtgagctatgaacgcacacggcaccctagcctgggcaacaggttgcgacactgtctcaagagaaaagaaaaagaaaaatagggataggttttccttcctagcccagtagagtttgacctcattagtatggtgctttgggtgaggacctcttccttgattatcccactttctagtgaacagctaaaattcctgagagtctctactgttaaggtacctttaataggataaagcagggaccacctatctcagtgggtccatttttcttttaaaattagttatctgaaaaaacttagcagtagttcccatctttaaggtaagtctttcatttggtccccattgtgtaaaatactaatcaacattttcaagcttctgtacaacagactgcttttgtctagatttctcaactccactttataaagcttatcagttttcagagaggaatgtgaattttttttctaatgcaaataaatggatatggcaggaactacagcataagtgattattgtgattctgggtggacggatataatttacaacatttagggatgttctaggtagcctgctgtagtttgacttccagtcactgttgtctttcacattataatttgtatatttcttgtgatagaagggatgatgcaaatatgtaattaaagtgtcaccagatttctgttaaaaccaaggttgaaataaaaagcctaacattggtaagctacattgttttctcattttagaatgattcagagatttcagatagacattttttaaactttaatgcttagctagaatctacattctgaggaaaactctaaaaaacttaaaaatttttagggaatttttatttttcaaatcataattttaaaatgatagataccattttgtgataacaacaattcagaaaacaattttctatcctcttagttgaaagaatgtaggtacagtttggatacttgtactttaattttagagtaaacatctgcattatactcttatagataatagaattatttagttaagaaattctttacagtaaatgagataatgtgtgaaaaagtattttgtaaatgctgaggattctacaaatgatagttgttattttcatgtgtatttgtaagatcatgtccatttcatgaatataggacttcacataaaaaaagactttctcaagacaaatta

SEQ ID NO: 23052 - DNA, 1654 bp, Homo sapiens
tggcttctcactcggctccttacacaagaggcatttttttaactgtctctgcttaaaacaaggtgtttttgagtcagcagccctttgggtgggtctcgtcctcttgggcacccgacacccaccccacggcgggagccccaggtggccccggaggccaccgggaagcgtgaactacatctcccagggttccccggggcggaggacgcccacccggattggccagggttcgctgacgctcagtgttttggcccggacggtcacatgtttcctttgttgtgagctgcggcagagactggtggctggaggagacgccggcgctggagagtgcgctgcgccgcccgccgctgagggaccgcggggttagccactgctggctgcttccagtgttcgccgagaggtaccgggggtgacagctccgggaccggccgaaaggcgaggaaccggtcagagtctgagtcctcgggggcggaggggcgacggcggtcctgaccaccggggtgtctgcgggagggcagccagcggcggccggcctctcagagccagactggcggtctgcggagaggctgcagctgggctacagggcccctttctgaggcgaggggcctccagggttcacctggggggtcttcctcccccgcttggtagctacagccctgagggagggcgcgcgcgcctcctggcactacggcccggaaccgcggcgcggctggtgcggcctggctagggcggggtggttgccgggactgggggtagccgcaggtgcggtaggctagtcgccgcggggagccggggcgggcgggggagcgggcgttccgccggcgcagtccccgcctaacctccccaccttcttaccactccaggactcagtttcttaatttagttcctaatggacccgccctcaagttctggacaccccgggtgaagactgttaacgcggcgggtgcgggaggcgcgcgctcccgcccctgctgcgggcggctggtagcctcggtggccgccgccgccgctgctgctgcctgatcctgcaggcagttctgggcacgcagagatcggctaccgtggcctgccctccgaggaccggaaaattaacaccctttaactagtgtcgcgttatctgccgggtggttcgcaggaagtcctgcgaacacgttgttgccagttctgtaaacgtgtttagatagctaaatatagatcacagtgccacatcttagggggccccacggtcacccctgaggcagtggctgttcacaattgattttagtggattttaatgattaatcacttgctcttgtgggcagcttttcaaaaatcacgtctttgtatttgcagctacagactgggtccaccagctaagaggttggtttttattagggttgtaaaatagatttaaaatctgcttgttgttggctgagatttaaaagcagatttctactatttaaaaaagatagtttgaagatactcccctaaaaagtaaagattcttccatactcggctcggatgagttgttttccttgtttgagggattctaggtcacacacttctatgttttaattcccgtggtaattcaaaatgtttgagaagtgggttgcgactgtgtcgttttaaaattgtacattaagctgacggtaataaaatcttcaagaccaatcatttt

SEQ ID NO: 23053 - DNA, 1364 bp, Homo sapiens
  misc_feature (512)..(512): n is a, c, g, or t
tggcttctcactcggctccttacacaagaggcatttttttaactgtctctgcttaaaacaaggtgtttttgagtcagcagccctttgggtgggtctcgtcctcttgggcacccgacacccaccccacggcgggagccccaggtggccccggaggccaccgggaagcgtgaactacatctcccagggttccccggggcggaggacgcccacccggattggccagggttcgctgacgctcagtgttttggcccggacggtcacatgtttcctttgttgtgagctgcggcagagactggtggctggaggagacgccggcgctggagagtgcgctgcgccgcccgccgctgagggaccgcggggttagccactgctggctgcttccagtgttcgccgagaggtaccgggggtgacagctccgggaccggccgaaaggcgaggaaccggtgtggaaattaaaagaacacacatattttgactggggctttgatcaaccaaatgctaaaaagccacanaaagaagatccctaatagtcatttctcaacaattatatagtcaactgatgtaacaatggtactaatattgggacgcagactaaacagagaggatcttggggtgcgtgattccccagcaactaagcgaaaagtttttgaaatggaccccaaatctctgacaggtcatgagttttttgacttctcttcaggatcatcccatgccgaaaacatactccagatatttaatgaatttcgtgatagccgcttattcacagatgttatcatttgtgtggaaggaaaagaatttccttgccatagagctgtgctctcagcctgtagcagctacttcagagctatgttttgtaatgaccacagggaaagccgagaaatgttggttgagatcaatggtattttagctgaagctatggaatgttttttgcagtatgtttatactggaaaggtgaagatcactacagagaatgtacagtatctctttgagacatcaagcctctttcagattagtgttctccgtgatgcatgtgccaagttcttggaggagcaacttgatccttgtaattgcttaggaatccagcgctttgctgatacccattcactcaaaacactcttcacaaaatgcaaaaattttgcgttacagacttttgaggatgtatcccagcacgaagaatttcttgagcttgacaaagatgaacttattgattatatttgtagtgatgaagggttttcttcttgctacttttaatactgattttctcatcgaggaatatattagtactttctgctgttctctccattggtttcaagacttaatattatatcctcttctcactccctcagtttctgtgtcctgcccgt

SEQ ID NO: 23054 - DNA, 408 bp, Homo sapiens
catgaagcaagacggtaccacatacttgggaatgaaatgatgtccccaaggactaggccacgcaggtgagaagactgttttcaaatatagttaacaaaagtttttaatatatctttaaacctcctgaatgcaatctcagtgttgtcatttatatgcactgtctacctgtggctgtatataattttagatttattttggattatatgtcactagaatgtctttcctagtgaattctagattcaacagtagcattttttgttattgttgttttgtgctatcaaacagtgtagcaaagggtctttgcaactgtgcatatctcaacatatttctactaatttctcttaacctttgtagggccccaaaccattccacttttctttccaaagagtctttggatacagggtagct

SEQ ID NO: 23055 - DNA, 441 bp, Homo sapiens
ctgaccaccggggtgtctgcgggagggcagccagcggcggccggcctctcagagccagactggcggtctgcggagaggctgcagctgggctacagggcccctttctgaggcgaggggcctccagggttcacctggggggtcttcctcccccgcttggtagctacagccctgagggagggcgcgcgcgcctcctggcactacggcccggaaccgcggcgcggctggtgcggcctggctagggcggggtggttgccgggactgggggtagccgcaggtgcggtaggctagtcgccgcggggccgggcgccgccgggggaggcggctgggcagacgggtgctgcttgttgccgatgggctgcgaacggggcgctgctttttatttcaggaagcccgggggagtgcgaccgcctcaaatccagccttcttgtttggtgggacgac

SEQ ID NO: 23056 - DNA, 320 bp, Homo sapiens
tctttacgactagctcaaataaatcaaaattttgctcttgaattgagtagaggatcaaactcccagaaatattaccactacttgatatgatcacgaaataagttttgttatcaaaagataaagaatggatgcagctttagtcttcatttgcttcattccaagtgctgttgcaatatttcccgtacctgaggaaactcaaagggatggctttaatgctatcagaaatctgagtccttagagtaagaaaataaatacaaaatattcaaaaattgcttgtactaaatagcgcatattgacaacaatagtcaaacataatatgc

SEQ ID NO: 23057 - DNA, 392 bp, Homo sapiens
agaccccactcttgccctcctgtgtccctcagcccctaagatgcccgccttgctctgtcgcatccaatgactataagacttaactgttcaagaggaagaaagggaagctcaagggctctactttttttttttaaacaaaataaaaacagtcattactgttgctacccatcttcctgaaaagttaggagaataaatgactgtttgtggggaaaacatactaagcaattaaagttttactttttgctcatcagaaataatgtattgattaatagtttccaaatgttttctttacaaacttttttaatttttgaaaacactgttttgcataaggaatattcaaaggaaaaaacccatgccctagtatgattaaaataaatgttacatcttccagt

SEQ ID NO: 23058 - DNA, 373 bp, Homo sapiens
gcttcagcccttcgaggagcccagacctgggagatctttgagccagggctgtgacttcctctttggggacctgtggtgtttggggtctccaagcctttgggcaacaccgcattctccagtgccagccatggaagctgcttgtggtgtccctagtccagccgcagcctcacagagagctggcacccctgctggcacctggagctgcctgccccacagcagcagccagtgtgtcggtgcagtggctgaatcccatgcttgctcacacaccccttgctgctccacacctgactctcagtctcccttagaggtgtgggatctgggctggtagtgtgagctgagaacagcatgctaggccaagggggcagaatgagcc

SEQ ID NO: 23059 - DNA, 452 bp, Homo sapiens
gatgcacaagacattttagttttaatgagtcaaatttatctcttttctttgttattgcttgtgctttggtgttgtagttaagaaaccatggcctaatccaaggtcataaagatttgcatctattttttccttcgaagagttttatcactttcattgaggtctttgattcattttagttatttttttatatgatgttgaggaaggggctcaaattcattcttttctatgtggatattcagttgtcctagaaccattgttgaaaagaatagtctttcctcatgaaatgacttttgtatccttgttggaaatcacatgatgtatgggtttatttctggattcttgattttatcccattgatacatatgtttatcctcatgccagtaacacatttttgtttaccgtatctttgtagtaagttttgaagccagaaagtatgagtcctccaactttat

SEQ ID NO: 23060 - DNA, 427 bp, Homo sapiens
tgcctgccatttagagtcttacattttgaaataaatcagatacagtaagtggttttccttaattcaaaataatggccctgtccatgatataaacactaactttgagtgttatcttacatagcaatagccagttgtgtatagctttttctctgaaagaatcttgtatcctcttctgtaagtatctttctctactctttgaaatgtaactatcattaacacccaacaaacatcttttggtaaatgactttaatagttacttaaggcatagtgttccatattattttcttgacttttgccaagaaatttccttccataaagttccctctgttttttcctctccttctcacccctcgacacatgcacacagatgtaattttatgtcccttcttagtctcagttgttctttttgtttttttttctcacttta

SEQ ID NO: 23061 - DNA, 168 bp, Homo sapiens
tcatatatctgtgaataacagaatttcaaggttagaggtctattcaaaaaaggtgggttcttgcccataaggaaggaagagatcactttaggcagttactgataatttaaaacttttgtctttcagttggtgcaagcattcatttattcacaattttaaatcttatac

SEQ ID NO: 23062 - DNA, 698 bp, Homo sapiens
gacacaggtcttgctcacagggttcttgccataaagtagacaagttatgtctgctgatcaatctctttaagagaggaattggtgtcaacatggtgcaaaacaaaattttacgttcaaatgttcctgcaagttctcaagtagataactgatggccaaaattgttaagcttcaattttcagctttcgtttgatttttctcttttttttactcagtcgtttataagcatactgatatttttgtctgacccaaaaaggtcagaaaatggaattatcagaaaaaagttctaaatgtagatatacgtgttggtaggggtgaatttctctaccccgtaacctcatccccaattcagataaatgctaggttttatatccattttagttgtgaaggaaaatataaaaatgtggattgtagtgacacaagattgattaatcagcgggtttttttaaaagaagacatggtagacagtgatttatttgtatgtaactattgaagttttttcttaaatgttagtgatattcatcgttcccattaactagttattcagatttttgaaaatcctttttctgtgaaagctatcctaacctggaggatgtctcttttctttcctctgtacttaagaagcttttcttgttagggaaataatttagaattagatttaggctatgttctgttcttctaaaaggcttagttgtcaaaaa

SEQ ID NO: 23063 - DNA, 606 bp, Homo sapiens
tagggaaaggatctatctacctctttgctctactgcagccagaagtttcctagcatgcgtcattttgggattcttttttattttccctaccctctttcctaagcaaggaaaagaagtacttacctttattctcccagaattgtgtgtccccatagattgaagaatcaatagagtgagaactagtgaacagataaaaatagctcagtccttcacagcttcctttgtaataatagaaataggagacaaataggagaaaaaggaagtgctctttataaattgtatgaagtattaagtatggtacttgctacctgcacaacccaggcatgagattagcacttggtgttagtcacacccccttaggccactactcattgccaccatttcaaagcctgtgggttgagtagattcttatataaaggtgactttcctaacctaaagagattgggcccaaaagcacaagtttcttctgattcttcctagacactacatactggaaaagacaagggaatagagacgcttccttttcacatgtcatccctctttcccttatgtgtccagccttgaaggggaatgttatttctactcatcccctaccccaacccttaa

SEQ ID NO: 23064 - DNA, 529 bp, Homo sapiens
ctgcaaattagccaaccctaagatgttgctataaacagctggtaggcgattgacataagtcatgtatctgaaagctcaattagatggagaattattaactagtttagtccactgactggatatcgctgattgaaatcctgcatctcctccaggagaatggagtgagtggctgatcctttatgcaaattagcccttttctgtatcttcttaagaccagtgttaaagccaattattatatagcatggcagaaaagagaggggctcatcattctgagacaagcttaaaggtgtgaaaatcaaggaagataggctggtagatggcattagattaggtagtacaagttttcatccctatttgtttgggttaaaatatgtggggagttgtgcctatataaattcttatgtgtgatgattactgctagttattatcttatgattgtttacaatctgtattagctattgatctaaaccattttattgttttctttcaagagattttaactaataaactttcattcacaaatcaaaaa

SEQ ID NO: 23065 - DNA, 773 bp, Homo sapiens
agcacatttaaaatatccccaggcagaaccaggtgattttataaaaccagtctatttctccccaacctcaggggcaggtgggccaggagaaacactttcctggtggaaggcacaggatctgcccaacccaccggctctcagccctgtttgcagggaagctaagaaggacttctggaggcagtctgacgtagtggtgaagagttagcctgcctaggttcaaatcctgcctctggcattcaccggctgtgtgtgaccttgggtgagtgacctaacctttctaggtctcggtccttcatttgaaaatggtggtaatcgcatcatcttacttattagaaggtgtgttaatacgcacctagtgttataaactgcacctggtacacacctgatcagcgtggcggggatggcctaattattgtaattatgggatggccttcctcttcacttattgatctgtgtatgaaacgtaagctccacggggccactggtttttgcctgttttgttcacttgtgtgtccccagcacctaagaccctctgcacctgtctgtgtctccttcctcagtgccaacccaaggagggatttccagaccttagggatttttgcggcccctaaaattgtagtgacaacaatctattttcatatccaatgttggtccgcactgtatgtgaaggagtgaagctggtgggtgggggctggtgcaagtattgaggaaggacgatgctcacagcctcagcccaggggacagcggcagtggggcctgggggaccgggagag

SEQ ID NO: 23066 - DNA, 345 bp, Homo sapiens
tggaattttgattttgtgtaactaatttttggggttgagcacagtacattaatcattgaattaggaaactatctagtaaaactagtgtattttgtgagttgtatgaggatcattgctttagtagataaacatttcccaaagaggtcactggtgaaaagacattaaaatagggagtctgaaattgtaacaatttatggaacttgttagattacttacctaaaaaatgttttctatgatagcttttgtgtgtgtatatgtcttctggtgtgacatttcagagtgttactgaattttcccctccacaacttattttgttggctttttattgtagctattttatctaga

SEQ ID NO: 23067 - DNA, 534 bp, Homo sapiens
gcagtgatcagagatgctgtaggacatgttgggagctagtctggaaatacctgtgaggaacttgggttggctggtggcctctatcctgagccagcaagtgtgcacatacatggttactgataatcaggagtgtgcactttgatcctgggcaagtgacacgatccctgctttggcactaaatttaccaatatctaagtgccagagatagctggtgagagcctgcagtgttctcagaaataaagtacacctggaaaaaaatagttattttttcccttgttaaagtaatatacaaaagaaaatacagaaaactggaaaaacagaatgaaccttagaagaaactaataataatagccaagacctatagagactcaggggctagacatggttctaagctctttaccatataaatatacttactcctcactatagctctgggaggtagataactatttctaactctattttacagagaagtaagggggcctggagctgttaggtgacttgcccgaggttgcctagcttgtaaaggcagag

SEQ ID NO: 23068 - DNA, 259 bp, Homo sapiens
ggtcgacccggaccaacacaaaaggtggcggaaagtacgttggatcaatagcaaagattgttatttagataacgaattaatctccctgttatagtactttttgtagtgaactttgcacccctttcataagaaaaaggaatttagagagagaagaaagtctcaaacaggattaaggttttaattacaattccctatcgaaatagtatgtttgatgagctgatcttatcaattaatagtaacattaaagcacaagaaacag

SEQ ID NO: 23069 - DNA, 474 bp, Homo sapiens
aaaaatcaacatagtgtctgaactaatgtgccagagatatgaaatgaaagcaatttataatttttaaaaaagtatttcaatatgcaaatgctgaggttacacacaagaagaacaaagacaagtcacacatatttctaaaacgttccgaagggggtatcccctcctaacctcactcccgttgtagcctcactttgcccctcacaccctctgacgtttgaacccttgggccagagagtagaacctgcaataggacccatcctttttcaaatttgttcccatgcagtgggactgtcacgaatatgtttataaatgttatgccataatatatacatgaaagtatagactacttaaatgctagtttggaattttagagcagtttgcattaattcctcttacaaatttatattcactttcttatttaagctgtttttgaactagagtgaattagagagccaagacttatctttataaatt

SEQ ID NO: 23070 - DNA, 513 bp, Homo sapiens
attttttgtagagacggggctcttgctgtttcccaggctggtctcgaatttctgggctcaagcaatcctctagccttggcctcccacttcattagcactaggattacaggcgtgagtcaccttgcctggtcttaaaatgtttgtttttaaattaccactactggtgatagaagtgtatgtacaggtaggtagatggtgaatgaatatttgacttaggacagcaaactggcatggcagctgtacagatgacctggcatttaatcccagggtgtgtttgagcccaccatctggaagccattcctgaaaacaaacacgatttctctaccttttgttttcattttcaactgtgaggtttgtatttcagtttagaaaatactcaagttgggccgggtgcagtggctcacacttgtaatcccagcactttgggaggccgaggtgggcggatcatgaggtcaggagtttgagaccaacctgtccagcatggtgaaaccccgtctctagtaaaaatacaaa

SEQ ID NO: 23071 - DNA, 1208 bp, Homo sapiens
ctgaaatattaactgtttcttaataaaaagttacctgaaataacaacaaaatacaactcctcagctagcttgctgttaaaccacatgaagtctgttaaaagctatttcatttattcagaataataaggaacttgggactggattatcacaaaagaggaaagctcctacagaaaaaaataaaatcaaacgacctagagtacactaatcgcatctaccctttagttaccaaacattaaatgtttttaaaaattgaaagcctgaatgtgactgtgatagatttgggtagtaatttaaagatgagtacctgaagaattctgcttcagagtataatgatgacccttcttgagttttgaacacctgaaattgtaatcactgaaatattaactgtttcttaataaaaagttacctgaaataacaacaaaatacaactcctcagctagcttgctgttaaaccacattgaagtctgttaaaagatatttatttttcttgtaaatatctgaagctgtagcttagtggaaattttagcaaggtaatggattttgctttaaaatgtctgccttacaaattcataacaacaagatttgtcagtcagcatttattcatgttttccctgatttttatcttctcaccattttacctcttttaacaggagcctgagcacaaggtttaatgaggaagctggggctataaatatgtgtgtatatatgtatatgtatgtttgtacaaatctccatgatgtttgccaagtttgaatgcgcaaaacttggaaaatgtgacaataaagaataaaagtagtaactcaaaaaaaaaaaaaaaaagaattgcaggccaggcacggtggctcatgcttgtaatcccaccactttgggaggccaaggtgggtggactgcttgaacccagaagttcaagaccagcctggacaacatggcgaaaccccatctctgcaaaaaatagcaaaaaattagccgggcatgctgtttgatgcttgtagtcccagctacttgggaggctgaggcatgagaattacttgaactcaggaggcagaggttgcagtgagctgaaatcatgccactgcaactccagcctgggtgacagaatgagaccctgtctcaaaaaaaataaatgaattgcttaacatttctgatatttgttatttagaatattgccctattagattaaaacatactgttattggaactctgtattg

SEQ ID NO: 23072 - DNA, 6103 bp, Homo sapiens
tggggtaggggcggcgccgagtcgggggagggggctgtgcgccgggctggcgcccgaccccagccaccgccctgcggccagcgcgtcccccgactcgccgcccggagaccccgaggctccaacgagttcagaaatgtccagaaatgacaaagaaccgttttttgtgaagtttttaaagtcttcagacaattccaaatgtttttttaaagctctcgagtccataaaagaattccaatcagaagaatatcttcagattattacagaagaagaggcattgaagataaaggagaatgatagatcactttatatctgtgacccttttagtggcgttgtctttgatcacctcaaaaagcttggctgcagaattgttggtcctcaagtagtcatattttgtatgcaccaccagcgatgtgtcccaagagccgaacatccagtttataatatggttatgtctgatgtaaccatatcttgtacaagtctggaaaaagaaaaaagggaagaagttcataaatatgtacaaatgatgggcggacgagtatacagagaccttaatgtatcagtaactcaccttattgcaggagaagttggtagcaaaaaatatttagttgctgcaaacctgaagaaacctattttgcttccctcttggataaaaacactttgggagaagtcacaagagaaaaaaataactagatatactgatataaacatggaagatttcaagtgtcctatttttcttggttgcataatctgtgtgactggcttatgtggcttagacaggaaagaagttcagcaactcacagttaagcatggaggtcaatacatgggacaattgaaaatgaatgaatgtacacacctcattgtgcaagaaccaaaaggtcagaagtatgagtgtgccaagagatggaatgtacactgtgtgaccacacagtggttttttgacagtattgagaaaggtttttgtcaggatgaatccatatacaagacagaacctagaccagaagcaaagactatgcccaattcttcaactcctaccagccagatcaacacaattgatagtcgtactctttcagatgtcagcaatatttccaacataaatgcaagttgcgtaagtgaatcaatatgtaattcacttaacagcaaactggagcctacacttgaaaatctagaaaatctggatgtcagtgcatttcaagcacctgaagatttattagatggttgtcggatatatctttgcggttttagtggcagaaagctagataaactgagaagacttattaacagtggaggtggagttcgttttaaccagctaaatgaagatgtaactcatgttattgtgggagattatgatgatgaattgaagcagttttggaataaatcagcccacaggcctcatgtagtgggagcaaagtggttgctagagtgtttcagtaaaggttatatgctttctgaagaaccatatatccatgctaattaccagccagtggaaattccagtttcacatcagcctgaaagtaaagcagctcttttaaaaaagaagaacagcagcttctctaagaaagactttgctcctagtgaaaagcatgagcaagctgatgaagatctgctctctcaatatgaaaatggtagctccacagtagttgaggctaagacgtctgaagccaggccctttaatgattctactcatgctgagcccttgaatgattctactcacatttctttgcaagaagaaaaccagtcttctgtcagtcattgtgtccctgatgtttctacaattactgaagaaggcttatttagccaaaagagtttccttgttttgggttttagtaatgaaaatgaatctaacatcgcaaacatcataaaagaaaatgctgggaaaatcatgtcccttctgagcagaactgttgcggattatgctgtggttcctctgctggggtgtgaagtggaagccactgtgggagaagttgttacaaatacatggctggttacttgcatagactatcagactttgtttgatccaaagtcgaatcctctcttcacaccagttccagtaatgacaggaatgactcctttagaggattgtgttatttcatttagccagtgtgctggagcagaaaaagagtctttaacattcctagcaaacctccttggagcaagtgttcaagaatactttgttcgcaaatccaatgcaaagaaaggcatgtttgccagtactcatcttatactgaaagaacgtggtggctctaaatatgaagctgcaaagaagtggaatttacctgccgttactatagcttggctgttggagactgctagaacgggaaagagagcagacgaaagccattttctgattgaaaattcaactaaagaagaacgaagtttggaaacagaaataacaaatggaatcaatctaaattcagatactgcagagcatcctggcacacgcctgcaaactcacagaaaaaccgtcgttacacctttagatatgaaccgctttcagagtaaagctttccgtgctgtggtctcacaacatgccagacaggtcgcagcctccccagcagtaggacaaccacttcagaaggagccctcgttacacctggatacaccatcaaaattcctgtccaaggacaaactcttcaagccttcctttgatgtgaaggatgcacttgcagccttggaaactccaggacgtcccagccaacagaaaaggaaaccgagtacgccactctcagaagttattgtcaaaaacttgcaacttgctttggcaaatagctctcgaaatgctgtcgctctttctgccagccctcaactgaaagaggcccagtcagagaaggaagaagccccaaagccacttcacaaagtagtggtatgtgttagtaaaaaactcagtaagaagcagagtgaactaaatgggatcgcagcctctctaggagcagattacaggtggagttttgatgaaacagtgactcatttcatctatcaagggcggccaaatgacactaatcgggagtataaatctgtaaaagaaagaggagtacacattgtttccgagcactggcttttagattgtgcccaagagtgtaaacatcttcctgaatctctttatccacatacttataatcccaaaatgagcttggatatcagcgcagtgcaagatggccggctctgtaatagtcgactactctcagctgtgtcttcaacaaaggatgatgagccagatcctttgattttagaagaaaatgatgtagacaatatggccaccaataataaagagtcagcaccatcaaatggaagtggaaagaatgactctaaaggagttctgacacagaccttagagatgagagagaactttcagaagcagttacaggagataatgtctgcaacatcaatagtgaaaccccaagggcagaggacttccctttcaagaagtggttgtaacagcgcatcttcaacccctgacagcactcgctctgctcgcagtggacgaagtagagtcctagaggcactgaggcagtctcgtcagacagtacctgatgtcaacacagagccttcccaaaatgaacagatcatttgggatgaccctacagcaagggaggagagagcaaggcttgccagcaatttgcagtggcctagttgtcccacacaatactctgagcttcaggttgacattcaaaacttggaggattctccttttcaaaagcctttacatgattcagaaattgctaaacaggctgtctgtgatcctggaaacatacgtgtgactgaagctcccaaacacccaatctctgaagaactggaaactcccataaaagacagccacctgatccctacgcctcaagcccccagtattgcctttccactcgccaacccccctgtggctccgcaccctagagaaaagattataacgatagaggagactcatgaagaattaaaaaaacagtacatatttcagttatcatctctgaatcctcaagaacgtattgactattgtcatctgattgagaaactaggtggattggtgatagaaaagcagtgctttgatcccacctgtacacacattgttgtgggacatccacttcgaaacgagaagtatttagcctcagtggcagctgggaagtgggtgcttcatcgctcctaccttgaagcctgcaggactgctggacacttcgtgcaggaagaagactatgaatggggaagtagttccatacttgatgttttgactggaatcaatgtacagcaacgaagactagcacttgcagcaatgagatggagaaaaaaaatccagcaaagacaagaatctggcattgttgagggagcatttagtgggtggaaggttattttacatgtggatcagtctcgagaagcaggcttcaaacgccttcttcagtcaggaggagcaaaggtgctacctggtcattctgtacctttatttaaagaggccacacatcttttttctgacttgaataaactgaaaccagatgactcaggagttaatatagcagaagctgctgcccagaacgtgtactgcttgagaacagaatacattgctgattatctcatgcaggaatcacctcctcatgtagaaaattactgtctaccagaagctatttcatttattcagaataataaggaacttgggactggattatcacaaaagaggaaagctcctacagaaaaaaataaaatcaaacgacctagagtacactaatcgcatctaccctttagttaccaaacattaaatgtttttaaaaattgaaagcctgaatgtgactgtgatagatttgggtagtaatttaaagatgagtacctgaagaattctgcttcagagtataatgatgacccttcttgagttttgaacacctgaaattgtaatcactgaaatattaactgtttcttaataaaaagttacctgaaataacaacaaaatacaactcctcagctagcttgctgttaaaccacattgaagtctgttaaaagatatttatttttcttgtaaatatctgaagctgtagcttagtggaaattttagcaaggtaatggattttgctttaaaatgtctgccttacaaattcataacaacaagatttgtcagtcagcatttattcatgttttccctgatttttatcttctcaccattttacctcttttaacaggagcctgagcacaaggtttaatgaggaagctggggctataaatatgtgtgtatatatgtatatgtatgtttgtacaaatctccatgatgtttgccaagtttgaatgcgcaaaacttggaaaatgtgacaataaagaataaaagtagtaactcaaattagtattaagatgtgtttacatagataaattttttaaaagagcaccctggcatctgttcttctgttgaagcaacaaaacatttatgtaacgtaaaaaatgaattgcaggggcctgggtgcggtggctcgtgcctgtaatcccagcactttgggaggctgaggcaggcggatcgtctgaggtcgggagtttgagaccagcctgaccaacatggagaaacctcatctgtactaaaaatacaaaaaattagcccagtgtggtggcacatgcctgtaatcccagctactcaggaggctgaggcaggagaatcgcttgaacccgggaggcggaggttgcggtgagctgagatcgcgccattgcactccagcctgggcaacaagagcgaaactccatctcaaaaaaaaaaaaaaaaagaattgcaggccaggcacggtggctcatgcttgtaatcccaccactttgggaggccaaggtgggtggactgcttgaacccagaagttcaagaccagcctggacaacatggcgaaaccccatctctgcaaaaaatagcaaaaaattagccgggcatgctgtttgatgcttgtagtcccagctacttgggaggctgaggcatgagaattacttgaactcaggaggcagaggttgcagtgagctgaaatcatgccactgcaactccagcctgggtgacagaatgagaccctgtctcaaaaaaaataaatgaattgcttaacatttctgatatttgttatttagaatattgccctattagattaaaacatactgttattggaactctgtattg

SEQ ID NO: 23073 - DNA, 6989 bp, Homo sapiens
tggggtaggggcggcgccgagtcgggggagggggctgtgcgccgggctggcgcccgaccccagccaccgccctgcggccagcgcgtcccccgactcgccgcccggagaccccgaggctccaacgagttcagaaatgtccagaaatgacaaagaaccgttttttgtgaagtttttaaagtcttcagacaattccaaatgtttttttaaagctctcgagtccataaaagaattccaatcagaagaatatcttcagattattacagaagaagaggcattgaagataaaggagaatgatagatcactttatatctgtgacccttttagtggcgttgtctttgatcacctcaaaaagcttggctgcagaattgttggtcctcaagtagtcatattttgtatgcaccaccagcgatgtgtcccaagagccgaacatccagtttataatatggttatgtctgatgtaaccatatcttgtacaagtctggaaaaagaaaaaagggaagaagttcataaatatgtacaaatgatgggcggacgagtatacagagaccttaatgtatcagtaactcaccttattgcaggagaagttggtagcaaaaaatatttagttgctgcaaacctgaagaaacctattttgcttccctcttggataaaaacactttgggagaagtcacaagagaaaaaaataactagatatactgatataaacatggaagatttcaagtgtcctatttttcttggttgcataatctgtgtgactggcttatgtggcttagacaggaaagaagttcagcaactcacagttaagcatggaggtcaatacatgggacaattgaaaatgaatgaatgtacacacctcattgtgcaagaaccaaaaggtcagaagtatgagtgtgccaagagatggaatgtacactgtgtgaccacacagtggttttttgacagtattgagaaaggtttttgtcaggatgaatccatatacaagacagaacctagaccagaagcaaagactatgcccaattcttcaactcctaccagccagatcaacacaattgatagtcgtactctttcagatgtcagcaatatttccaacataaatgcaagttgcgtaagtgaatcaatatgtaattcacttaacagcaaactggagcctacacttgaaaatctagaaaatctggatgtcagtgcatttcaagcacctgaagatttattagatggttgtcggatatatctttgcggttttagtggcagaaagctagataaactgagaagacttattaacagtggaggtggagttcgttttaaccagctaaatgaagatgtaactcatgttattgtgggagattatgatgatgaattgaagcagttttggaataaatcagcccacaggcctcatgtagtgggagcaaagtggttgctagagtgtttcagtaaaggttatatgctttctgaagaaccatatatccatgctaattaccagccagtggaaattccagtttcacatcagcctgaaagtaaagcagctcttttaaaaaagaagaacagcagcttctctaagaaagactttgctcctagtgaaaagcatgagcaagctgatgaagatctgctctctcaatatgaaaatggtagctccacagtagttgaggctaagacgtctgaagccaggccctttaatgattctactcatgctgagcccttgaatgattctactcacatttctttgcaagaagaaaaccagtcttctgtcagtcattgtgtccctgatgtttctacaattactgaagaaggcttatttagccaaaagagtttccttgttttgggttttagtaatgaaaatgaatctaacatcgcaaacatcataaaagaaaatgctgggaaaatcatgtcccttctgagcagaactgttgcggattatgctgtggttcctctgctggggtgtgaagtggaagccactgtgggagaagttgttacaaatacatggctggttacttgcatagactatcagactttgtttgatccaaagtcgaatcctctcttcacaccagttccagtaatgacaggaatgactcctttagaggattgtgttatttcatttagccagtgtgctggagcagaaaaagagtctttaacattcctagcaaacctccttggagcaagtgttcaagaatactttgttcgcaaatccaatgcaaagaaaggcatgtttgccagtactcatcttatactgaaagaacgtggtggctctaaatatgaagctgcaaagaagtggaatttacctgccgttactatagcttggctgttggagactgctagaacgggaaagagagcagacgaaagccattttctgattgaaaattcaactaaagaagaacgaagtttggaaacagaaataacaaatggaatcaatctaaattcagatactgcagagcatcctggcacacgcctgcaaactcacagaaaaaccgtcgttacacctttagatatgaaccgctttcagagtaaagctttccgtgctgtggtctcacaacatgccagacaggtcgcagcctccccagcagtaggacaaccacttcagaaggagccctcgttacacctggatacaccatcaaaattcctgtccaaggacaaactcttcaagccttcctttgatgtgaaggatgcacttgcagccttggaaactccaggacgtcccagccaacagaaaaggaaaccgagtacgccactctcagaagttattgtcaaaaacttgcaacttgctttggcaaatagctctcgaaatgctgtcgctctttctgccagccctcaactgaaagaggcccagtcagagaaggaagaagccccaaagccacttcacaaagtagtggtatgtgttagtaaaaaactcagtaagaagcagagtgaactaaatgggatcgcagcctctctaggagcagattacaggtggagttttgatgaaacagtgactcatttcatctatcaagggcggccaaatgacactaatcgggagtataaatctgtaaaagaaagaggagtacacattgtttccgagcactggcttttagattgtgcccaagagtgtaaacatcttcctgaatctctttatccacatacttataatcccaaaatgagcttggatatcagcgcagtgcaagatggccggctctgtaatagtcgactactctcagctgtgtcttcaacaaaggatgatgagccagatcctttgattttagaagaaaatgatgtagacaatatggccaccaataataaagagtcagcaccatcaaatggaagtggaaagaatgactctaaaggagttctgacacagaccttagagatgagagagaactttcagaagcagttacaggagataatgtctgcaacatcaatagtgaaaccccaagggcagaggacttccctttcaagaagtggttgtaacagcgcatcttcaacccctgacagcactcgctctgctcgcagtggacgaagtagagtcctagaggcactgaggcagtctcgtcagacagtacctgatgtcaacacagagccttcccaaaatgaacagatcatttgggatgaccctacagcaagggaggagagagcaaggcttgccagcaatttgcagtggcctagttgtcccacacaatactctgagcttcaggttgacattcaaaacttggaggattctccttttcaaaagcctttacatgattcagaaattgctaaacagggtaacaagaaagaaatctttgcatttgtttgtattaagtacatgttgacctcttaaaaataaacagatgagcatgttgtagttctctgatctgaatgtgcaaacaaaaaaaacttcgtagatatttctggttttggtttaaacttgagccagaaaaataatttgtaaattgaggtacttcatcagtaaattgaaaaacattttcataaatttggaaatttagaattgggcgtttttttctagacatggtgtctaccattgttcttttattctagctaaccctttttgtgtttgtggagttaatgcttggtttttcttcctatcatcttattttcatttaagtcttttgaattctgcctagcacatacctacatttgttctttggattgtatgagtttctttctgaattctcctattttttttcttccttgagctttaccttaaaaacaaaattttcctatctctcatcttttttcttccttttcttctttttcacattgcatgatgacctcccattagatatatagatttatctctgcttctgcttttctccaagtgtagaattgctctcatgttacaaatttgggttacacttaacaatgaaaacttggtatttaaggaaaatgttgggagaagcccacagataacacacttgctctgtttaatgctaataaattgcattttttctttattgttattattgtcacatgcagatgggatgcatttatttataagttctggggataggatacttttttgcctgtactttttacattccagagtttgtgcttgacttcatcttgactaagacagatgagaatatttcctagaatttgtttttagtcttatttggatcctgtcacactgcagcattttattgtcctcagctgtctgtgatcctggaaacatacgtgtgactgaagctcccaaacacccaatctctgaagaactggaaactcccataaaagacagccacctgatccctacgcctcaagcccccagtattgcctttccactcgccaacccccctgtggctccgcaccctagagaaaagattataacgatagaggagactcatgaagaattaaaaaaacagtacatatttcagttatcatctctgaatcctcaagaacgtattgactattgtcatctgattgagaaactaggtggattggtgatagaaaagcagtgctttgatcccacctgtacacacattgttgtgggacatccacttcgaaacgagaagtatttagcctcagtggcagctgggaagtgggtgcttcatcgctcctaccttgaagcctgcaggactgctggacacttcgtgcaggaagaagactatgaatggggaagtagttccatacttgatgttttgactggaatcaatgtacagcaacgaagactagcacttgcagcaatgagatggagaaaaaaaatccagcaaagacaagaatctggcattgttgagggagcatttagtgggtggaaggttattttacatgtggatcagtctcgagaagcaggcttcaaacgccttcttcagtcaggaggagcaaaggtgctacctggtcattctgtacctttatttaaagaggccacacatcttttttctgacttgaataaactgaaaccagatgactcaggagttaatatagcagaagctgctgcccagaacgtgtactgcttgagaacagaatacattgctgattatctcatgcaggaatcacctcctcatgtagaaaattactgtctaccagaagctatttcatttattcagaataataaggaacttgggactggattatcacaaaagaggaaagctcctacagaaaaaaataaaatcaaacgacctagagtacactaatcgcatctaccctttagttaccaaacattaaatgtttttaaaaattgaaagcctgaatgtgactgtgatagatttgggtagtaatttaaagatgagtacctgaagaattctgcttcagagtataatgatgacccttcttgagttttgaacacctgaaattgtaatcactgaaatattaactgtttcttaataaaaagttacctgaaataacaacaaaatacaactcctcagctagcttgctgttaaaccacattgaagtctgttaaaagatatttatttttcttgtaaatatctgaagctgtagcttagtggaaattttagcaaggtaatggattttgctttaaaatgtctgccttacaaattcataacaacaagatttgtcagtcagcatttattcatgttttccctgatttttatcttctcaccattttacctcttttaacaggagcctgagcacaaggtttaatgaggaagctggggctataaatatgtgtgtatatatgtatatgtatgtttgtacaaatctccatgatgtttgccaagtttgaatgcgcaaaacttggaaaatgtgacaataaagaataaaagtagtaactcaaattagtattaagatgtgtttacatagataaattttttaaaagagcaccctggcatctgttcttctgttgaagcaacaaaacatttatgtaacgtaaaaaatgaattgcaggggcctgggtgcggtggctcgtgcctgtaatcccagcactttgggaggctgaggcaggcggatcgtctgaggtcgggagtttgagaccagcctgaccaacatggagaaacctcatctgtactaaaaatacaaaaaattagcccagtgtggtggcacatgcctgtaatcccagctactcaggaggctgaggcaggagaatcgcttgaacccgggaggcggaggttgcggtgagctgagatcgcgccattgcactccagcctgggcaacaagagcgaaactccatctcaaaaaaaaaaaaaaaaagaattgcaggccaggcacggtggctcatgcttgtaatcccaccactttgggaggccaaggtgggtggactgcttgaacccagaagttcaagaccagcctggacaacatggcgaaaccccatctctgcaaaaaatagcaaaaaattagccgggcatgctgtttgatgcttgtagtcccagctacttgggaggctgaggcatgagaattacttgaactcaggaggcagaggttgcagtgagctgaaatcatgccactgcaactccagcctgggtgacagaatgagaccctgtctcaaaaaaaataaatgaattgcttaacatttctgatatttgttatttagaatattgccctattagattaaaacatactgttattggaactctgtattg

SEQ ID NO: 23074 - DNA, 6804 bp, Homo sapiens
ctgagaaattatatagtcatctttatttttttcttgtaatgatttgctgatttctctacagtggtcatcaactttggtaaagaattggtgaatgttacaaaatgtaattttgtaagactggtggtcttttccttcttaactcatttaaacttttctcttttttgtagcttggctgcagaattgttggtcctcaagtagtcatattttgtatgcaccaccagcgatgtgtcccaagagccgaacatccagtttataatatggttatgtctgatgtaaccatatcttgtacaagtctggaaaaagaaaaaagggaagaagttcataaatatgtacaaatgatgggcggacgagtatacagagaccttaatgtatcagtaactcaccttattgcaggagaagttggtagcaaaaaatatttagttgctgcaaacctgaagaaacctattttgcttccctcttggataaaaacactttgggagaagtcacaagagaaaaaaataactagatatactgatataaacatggaagatttcaagtgtcctatttttcttggttgcataatctgtgtgactggcttatgtggcttagacaggaaagaagttcagcaactcacagttaagcatggaggtcaatacatgggacaattgaaaatgaatgaatgtacacacctcattgtgcaagaaccaaaaggtcagaagtatgagtgtgccaagagatggaatgtacactgtgtgaccacacagtggttttttgacagtattgagaaaggtttttgtcaggatgaatccatatacaagacagaacctagaccagaagcaaagactatgcccaattcttcaactcctaccagccagatcaacacaattgatagtcgtactctttcagatgtcagcaatatttccaacataaatgcaagttgcgtaagtgaatcaatatgtaattcacttaacagcaaactggagcctacacttgaaaatctagaaaatctggatgtcagtgcatttcaagcacctgaagatttattagatggttgtcggatatatctttgcggttttagtggcagaaagctagataaactgagaagacttattaacagtggaggtggagttcgttttaaccagctaaatgaagatgtaactcatgttattgtgggagattatgatgatgaattgaagcagttttggaataaatcagcccacaggcctcatgtagtgggagcaaagtggttgctagagtgtttcagtaaaggttatatgctttctgaagaaccatatatccatgctaattaccagccagtggaaattccagtttcacatcagcctgaaagtaaagcagctcttttaaaaaagaagaacagcagcttctctaagaaagactttgctcctagtgaaaagcatgagcaagctgatgaagatctgctctctcaatatgaaaatggtagctccacagtagttgaggctaagacgtctgaagccaggccctttaatgattctactcatgctgagcccttgaatgattctactcacatttctttgcaagaagaaaaccagtcttctgtcagtcattgtgtccctgatgtttctacaattactgaagaaggcttatttagccaaaagagtttccttgttttgggttttagtaatgaaaatgaatctaacatcgcaaacatcataaaagaaaatgctgggaaaatcatgtcccttctgagcagaactgttgcggattatgctgtggttcctctgctggggtgtgaagtggaagccactgtgggagaagttgttacaaatacatggctggttacttgcatagactatcagactttgtttgatccaaagtcgaatcctctcttcacaccagttccagtaatgacaggaatgactcctttagaggattgtgttatttcatttagccagtgtgctggagcagaaaaagagtctttaacattcctagcaaacctccttggagcaagtgttcaagaatactttgttcgcaaatccaatgcaaagaaaggcatgtttgccagtactcatcttatactgaaagaacgtggtggctctaaatatgaagctgcaaagaagtggaatttacctgccgttactatagcttggctgttggagactgctagaacgggaaagagagcagacgaaagccattttctgattgaaaattcaactaaagaagaacgaagtttggaaacagaaataacaaatggaatcaatctaaattcagatactgcagagcatcctggcacacgcctgcaaactcacagaaaaaccgtcgttacacctttagatatgaaccgctttcagagtaaagctttccgtgctgtggtctcacaacatgccagacaggtcgcagcctccccagcagtaggacaaccacttcagaaggagccctcgttacacctggatacaccatcaaaattcctgtccaaggacaaactcttcaagccttcctttgatgtgaaggatgcacttgcagccttggaaactccaggacgtcccagccaacagaaaaggaaaccgagtacgccactctcagaagttattgtcaaaaacttgcaacttgctttggcaaatagctctcgaaatgctgtcgctctttctgccagccctcaactgaaagaggcccagtcagagaaggaagaagccccaaagccacttcacaaagtagtggtatgtgttagtaaaaaactcagtaagaagcagagtgaactaaatgggatcgcagcctctctaggagcagattacaggtggagttttgatgaaacagtgactcatttcatctatcaagggcggccaaatgacactaatcgggagtataaatctgtaaaagaaagaggagtacacattgtttccgagcactggcttttagattgtgcccaagagtgtaaacatcttcctgaatctctttatccacatacttataatcccaaaatgagcttggatatcagcgcagtgcaagatggccggctctgtaatagtcgactactctcagctgtgtcttcaacaaaggatgatgagccagatcctttgattttagaagaaaatgatgtagacaatatggccaccaataataaagagtcagcaccatcaaatggaagtggaaagaatgactctaaaggagttctgacacagaccttagagatgagagagaactttcagaagcagttacaggagataatgtctgcaacatcaatagtgaaaccccaagggcagaggacttccctttcaagaagtggttgtaacagcgcatcttcaacccctgacagcactcgctctgctcgcagtggacgaagtagagtcctagaggcactgaggcagtctcgtcagacagtacctgatgtcaacacagagccttcccaaaatgaacagatcatttgggatgaccctacagcaagggaggagagagcaaggcttgccagcaatttgcagtggcctagttgtcccacacaatactctgagcttcaggttgacattcaaaacttggaggattctccttttcaaaagcctttacatgattcagaaattgctaaacagggtaacaagaaagaaatctttgcatttgtttgtattaagtacatgttgacctcttaaaaataaacagatgagcatgttgtagttctctgatctgaatgtgcaaacaaaaaaaacttcgtagatatttctggttttggtttaaacttgagccagaaaaataatttgtaaattgaggtacttcatcagtaaattgaaaaacattttcataaatttggaaatttagaattgggcgtttttttctagacatggtgtctaccattgttcttttattctagctaaccctttttgtgtttgtggagttaatgcttggtttttcttcctatcatcttattttcatttaagtcttttgaattctgcctagcacatacctacatttgttctttggattgtatgagtttctttctgaattctcctattttttttcttccttgagctttaccttaaaaacaaaattttcctatctctcatcttttttcttccttttcttctttttcacattgcatgatgacctcccattagatatatagatttatctctgcttctgcttttctccaagtgtagaattgctctcatgttacaaatttgggttacacttaacaatgaaaacttggtatttaaggaaaatgttgggagaagcccacagataacacacttgctctgtttaatgctaataaattgcattttttctttattgttattattgtcacatgcagatgggatgcatttatttataagttctggggataggatacttttttgcctgtactttttacattccagagtttgtgcttgacttcatcttgactaagacagatgagaatatttcctagaatttgtttttagtcttatttggatcctgtcacactgcagcattttattgtcctcagctgtctgtgatcctggaaacatacgtgtgactgaagctcccaaacacccaatctctgaagaactggaaactcccataaaagacagccacctgatccctacgcctcaagcccccagtattgcctttccactcgccaacccccctgtggctccgcaccctagagaaaagattataacgatagaggagactcatgaagaattaaaaaaacagtacatatttcagttatcatctctgaatcctcaagaacgtattgactattgtcatctgattgagaaactaggtggattggtgatagaaaagcagtgctttgatcccacctgtacacacattgttgtgggacatccacttcgaaacgagaagtatttagcctcagtggcagctgggaagtgggtgcttcatcgctcctaccttgaagcctgcaggactgctggacacttcgtgcaggaagaagactatgaatggggaagtagttccatacttgatgttttgactggaatcaatgtacagcaacgaagactagcacttgcagcaatgagatggagaaaaaaaatccagcaaagacaagaatctggcattgttgagggagcatttagtgggtggaaggttattttacatgtggatcagtctcgagaagcaggcttcaaacgccttcttcagtcaggaggagcaaaggtgctacctggtcattctgtacctttatttaaagaggccacacatcttttttctgacttgaataaactgaaaccagatgactcaggagttaatatagcagaagctgctgcccagaacgtgtactgcttgagaacagaatacattgctgattatctcatgcaggaatcacctcctcatgtagaaaattactgtctaccagaagctatttcatttattcagaataataaggaacttgggactggattatcacaaaagaggaaagctcctacagaaaaaaataaaatcaaacgacctagagtacactaatcgcatctaccctttagttaccaaacattaaatgtttttaaaaattgaaagcctgaatgtgactgtgatagatttgggtagtaatttaaagatgagtacctgaagaattctgcttcagagtataatgatgacccttcttgagttttgaacacctgaaattgtaatcactgaaatattaactgtttcttaataaaaagttacctgaaataacaacaaaatacaactcctcagctagcttgctgttaaaccacattgaagtctgttaaaagatatttatttttcttgtaaatatctgaagctgtagcttagtggaaattttagcaaggtaatggattttgctttaaaatgtctgccttacaaattcataacaacaagatttgtcagtcagcatttattcatgttttccctgatttttatcttctcaccattttacctcttttaacaggagcctgagcacaaggtttaatgaggaagctggggctataaatatgtgtgtatatatgtatatgtatgtttgtacaaatctccatgatgtttgccaagtttgaatgcgcaaaacttggaaaatgtgacaataaagaataaaagtagtaactcaaattagtattaagatgtgtttacatagataaattttttaaaagagcaccctggcatctgttcttctgttgaagcaacaaaacatttatgtaacgtaaaaaatgaattgcaggggcctgggtgcggtggctcgtgcctgtaatcccagcactttgggaggctgaggcaggcggatcgtctgaggtcgggagtttgagaccagcctgaccaacatggagaaacctcatctgtactaaaaatacaaaaaattagcccagtgtggtggcacatgcctgtaatcccagctactcaggaggctgaggcaggagaatcgcttgaacccgggaggcggaggttgcggtgagctgagatcgcgccattgcactccagcctgggcaacaagagcgaaactccatctcaaaaaaaaaaaaaaaaagaattgcaggccaggcacggtggctcatgcttgtaatcccaccactttgggaggccaaggtgggtggactgcttgaacccagaagttcaagaccagcctggacaacatggcgaaaccccatctctgcaaaaaatagcaaaaaattagccgggcatgctgtttgatgcttgtagtcccagctacttgggaggctgaggcatgagaattacttgaactcaggaggcagaggttgcagtgagctgaaatcatgccactgcaactccagcctgggtgacagaatgagaccctgtctcaaaaaaaataaatgaattgcttaacatttctgatatttgttatttagaatattgccctattagattaaaacatactgttattggaactctgtattg

SEQ ID NO: 23075 - DNA, 6676 bp, Homo sapiens
ctatagatagccaggaaaataagtatgtatcttcacagaaataattgtatgagaatattcatagttacttatgcacagtagttaccaagtaaacctgtctcccatcagaaaaatggatatcaaattgtgtgataatcatacaatcaataggatattacttggccaaaacaaaatgaaacaagggaagaagttcataaatatgtacaaatgatgggcggacgagtatacagagaccttaatgtatcagtaactcaccttattgcaggagaagttggtagcaaaaaatatttagttgctgcaaacctgaagaaacctattttgcttccctcttggataaaaacactttgggagaagtcacaagagaaaaaaataactagatatactgatataaacatggaagatttcaagtgtcctatttttcttggttgcataatctgtgtgactggcttatgtggcttagacaggaaagaagttcagcaactcacagttaagcatggaggtcaatacatgggacaattgaaaatgaatgaatgtacacacctcattgtgcaagaaccaaaaggtcagaagtatgagtgtgccaagagatggaatgtacactgtgtgaccacacagtggttttttgacagtattgagaaaggtttttgtcaggatgaatccatatacaagacagaacctagaccagaagcaaagactatgcccaattcttcaactcctaccagccagatcaacacaattgatagtcgtactctttcagatgtcagcaatatttccaacataaatgcaagttgcgtaagtgaatcaatatgtaattcacttaacagcaaactggagcctacacttgaaaatctagaaaatctggatgtcagtgcatttcaagcacctgaagatttattagatggttgtcggatatatctttgcggttttagtggcagaaagctagataaactgagaagacttattaacagtggaggtggagttcgttttaaccagctaaatgaagatgtaactcatgttattgtgggagattatgatgatgaattgaagcagttttggaataaatcagcccacaggcctcatgtagtgggagcaaagtggttgctagagtgtttcagtaaaggttatatgctttctgaagaaccatatatccatgctaattaccagccagtggaaattccagtttcacatcagcctgaaagtaaagcagctcttttaaaaaagaagaacagcagcttctctaagaaagactttgctcctagtgaaaagcatgagcaagctgatgaagatctgctctctcaatatgaaaatggtagctccacagtagttgaggctaagacgtctgaagccaggccctttaatgattctactcatgctgagcccttgaatgattctactcacatttctttgcaagaagaaaaccagtcttctgtcagtcattgtgtccctgatgtttctacaattactgaagaaggcttatttagccaaaagagtttccttgttttgggttttagtaatgaaaatgaatctaacatcgcaaacatcataaaagaaaatgctgggaaaatcatgtcccttctgagcagaactgttgcggattatgctgtggttcctctgctggggtgtgaagtggaagccactgtgggagaagttgttacaaatacatggctggttacttgcatagactatcagactttgtttgatccaaagtcgaatcctctcttcacaccagttccagtaatgacaggaatgactcctttagaggattgtgttatttcatttagccagtgtgctggagcagaaaaagagtctttaacattcctagcaaacctccttggagcaagtgttcaagaatactttgttcgcaaatccaatgcaaagaaaggcatgtttgccagtactcatcttatactgaaagaacgtggtggctctaaatatgaagctgcaaagaagtggaatttacctgccgttactatagcttggctgttggagactgctagaacgggaaagagagcagacgaaagccattttctgattgaaaattcaactaaagaagaacgaagtttggaaacagaaataacaaatggaatcaatctaaattcagatactgcagagcatcctggcacacgcctgcaaactcacagaaaaaccgtcgttacacctttagatatgaaccgctttcagagtaaagctttccgtgctgtggtctcacaacatgccagacaggtcgcagcctccccagcagtaggacaaccacttcagaaggagccctcgttacacctggatacaccatcaaaattcctgtccaaggacaaactcttcaagccttcctttgatgtgaaggatgcacttgcagccttggaaactccaggacgtcccagccaacagaaaaggaaaccgagtacgccactctcagaagttattgtcaaaaacttgcaacttgctttggcaaatagctctcgaaatgctgtcgctctttctgccagccctcaactgaaagaggcccagtcagagaaggaagaagccccaaagccacttcacaaagtagtggtatgtgttagtaaaaaactcagtaagaagcagagtgaactaaatgggatcgcagcctctctaggagcagattacaggtggagttttgatgaaacagtgactcatttcatctatcaagggcggccaaatgacactaatcgggagtataaatctgtaaaagaaagaggagtacacattgtttccgagcactggcttttagattgtgcccaagagtgtaaacatcttcctgaatctctttatccacatacttataatcccaaaatgagcttggatatcagcgcagtgcaagatggccggctctgtaatagtcgactactctcagctgtgtcttcaacaaaggatgatgagccagatcctttgattttagaagaaaatgatgtagacaatatggccaccaataataaagagtcagcaccatcaaatggaagtggaaagaatgactctaaaggagttctgacacagaccttagagatgagagagaactttcagaagcagttacaggagataatgtctgcaacatcaatagtgaaaccccaagggcagaggacttccctttcaagaagtggttgtaacagcgcatcttcaacccctgacagcactcgctctgctcgcagtggacgaagtagagtcctagaggcactgaggcagtctcgtcagacagtacctgatgtcaacacagagccttcccaaaatgaacagatcatttgggatgaccctacagcaagggaggagagagcaaggcttgccagcaatttgcagtggcctagttgtcccacacaatactctgagcttcaggttgacattcaaaacttggaggattctccttttcaaaagcctttacatgattcagaaattgctaaacagggtaacaagaaagaaatctttgcatttgtttgtattaagtacatgttgacctcttaaaaataaacagatgagcatgttgtagttctctgatctgaatgtgcaaacaaaaaaaacttcgtagatatttctggttttggtttaaacttgagccagaaaaataatttgtaaattgaggtacttcatcagtaaattgaaaaacattttcataaatttggaaatttagaattgggcgtttttttctagacatggtgtctaccattgttcttttattctagctaaccctttttgtgtttgtggagttaatgcttggtttttcttcctatcatcttattttcatttaagtcttttgaattctgcctagcacatacctacatttgttctttggattgtatgagtttctttctgaattctcctattttttttcttccttgagctttaccttaaaaacaaaattttcctatctctcatcttttttcttccttttcttctttttcacattgcatgatgacctcccattagatatatagatttatctctgcttctgcttttctccaagtgtagaattgctctcatgttacaaatttgggttacacttaacaatgaaaacttggtatttaaggaaaatgttgggagaagcccacagataacacacttgctctgtttaatgctaataaattgcattttttctttattgttattattgtcacatgcagatgggatgcatttatttataagttctggggataggatacttttttgcctgtactttttacattccagagtttgtgcttgacttcatcttgactaagacagatgagaatatttcctagaatttgtttttagtcttatttggatcctgtcacactgcagcattttattgtcctcagctgtctgtgatcctggaaacatacgtgtgactgaagctcccaaacacccaatctctgaagaactggaaactcccataaaagacagccacctgatccctacgcctcaagcccccagtattgcctttccactcgccaacccccctgtggctccgcaccctagagaaaagattataacgatagaggagactcatgaagaattaaaaaaacagtacatatttcagttatcatctctgaatcctcaagaacgtattgactattgtcatctgattgagaaactaggtggattggtgatagaaaagcagtgctttgatcccacctgtacacacattgttgtgggacatccacttcgaaacgagaagtatttagcctcagtggcagctgggaagtgggtgcttcatcgctcctaccttgaagcctgcaggactgctggacacttcgtgcaggaagaagactatgaatggggaagtagttccatacttgatgttttgactggaatcaatgtacagcaacgaagactagcacttgcagcaatgagatggagaaaaaaaatccagcaaagacaagaatctggcattgttgagggagcatttagtgggtggaaggttattttacatgtggatcagtctcgagaagcaggcttcaaacgccttcttcagtcaggaggagcaaaggtgctacctggtcattctgtacctttatttaaagaggccacacatcttttttctgacttgaataaactgaaaccagatgactcaggagttaatatagcagaagctgctgcccagaacgtgtactgcttgagaacagaatacattgctgattatctcatgcaggaatcacctcctcatgtagaaaattactgtctaccagaagctatttcatttattcagaataataaggaacttgggactggattatcacaaaagaggaaagctcctacagaaaaaaataaaatcaaacgacctagagtacactaatcgcatctaccctttagttaccaaacattaaatgtttttaaaaattgaaagcctgaatgtgactgtgatagatttgggtagtaatttaaagatgagtacctgaagaattctgcttcagagtataatgatgacccttcttgagttttgaacacctgaaattgtaatcactgaaatattaactgtttcttaataaaaagttacctgaaataacaacaaaatacaactcctcagctagcttgctgttaaaccacattgaagtctgttaaaagatatttatttttcttgtaaatatctgaagctgtagcttagtggaaattttagcaaggtaatggattttgctttaaaatgtctgccttacaaattcataacaacaagatttgtcagtcagcatttattcatgttttccctgatttttatcttctcaccattttacctcttttaacaggagcctgagcacaaggtttaatgaggaagctggggctataaatatgtgtgtatatatgtatatgtatgtttgtacaaatctccatgatgtttgccaagtttgaatgcgcaaaacttggaaaatgtgacaataaagaataaaagtagtaactcaaattagtattaagatgtgtttacatagataaattttttaaaagagcaccctggcatctgttcttctgttgaagcaacaaaacatttatgtaacgtaaaaaatgaattgcaggggcctgggtgcggtggctcgtgcctgtaatcccagcactttgggaggctgaggcaggcggatcgtctgaggtcgggagtttgagaccagcctgaccaacatggagaaacctcatctgtactaaaaatacaaaaaattagcccagtgtggtggcacatgcctgtaatcccagctactcaggaggctgaggcaggagaatcgcttgaacccgggaggcggaggttgcggtgagctgagatcgcgccattgcactccagcctgggcaacaagagcgaaactccatctcaaaaaaaaaaaaaaaaagaattgcaggccaggcacggtggctcatgcttgtaatcccaccactttgggaggccaaggtgggtggactgcttgaacccagaagttcaagaccagcctggacaacatggcgaaaccccatctctgcaaaaaatagcaaaaaattagccgggcatgctgtttgatgcttgtagtcccagctacttgggaggctgaggcatgagaattacttgaactcaggaggcagaggttgcagtgagctgaaatcatgccactgcaactccagcctgggtgacagaatgagaccctgtctcaaaaaaaataaatgaattgcttaacatttctgatatttgttatttagaatattgccctattagattaaaacatactgttattggaactctgtattg

SEQ ID NO: 23076 - DNA, 5701 bp, Homo sapiens
tttttatgggctttggtgagggaggtagatgtaactcatgttattgtgggagattatgatgatgaattgaagcagttttggaataaatcagcccacaggcctcatgtagtgggagcaaagtggttgctagagtgtttcagtaaaggttatatgctttctgaagaaccatatatccatgctaattaccagccagtggaaattccagtttcacatcagcctgaaagtaaagcagctcttttaaaaaagaagaacagcagcttctctaagaaagactttgctcctagtgaaaagcatgagcaagctgatgaagatctgctctctcaatatgaaaatggtagctccacagtagttgaggctaagacgtctgaagccaggccctttaatgattctactcatgctgagcccttgaatgattctactcacatttctttgcaagaagaaaaccagtcttctgtcagtcattgtgtccctgatgtttctacaattactgaagaaggcttatttagccaaaagagtttccttgttttgggttttagtaatgaaaatgaatctaacatcgcaaacatcataaaagaaaatgctgggaaaatcatgtcccttctgagcagaactgttgcggattatgctgtggttcctctgctggggtgtgaagtggaagccactgtgggagaagttgttacaaatacatggctggttacttgcatagactatcagactttgtttgatccaaagtcgaatcctctcttcacaccagttccagtaatgacaggaatgactcctttagaggattgtgttatttcatttagccagtgtgctggagcagaaaaagagtctttaacattcctagcaaacctccttggagcaagtgttcaagaatactttgttcgcaaatccaatgcaaagaaaggcatgtttgccagtactcatcttatactgaaagaacgtggtggctctaaatatgaagctgcaaagaagtggaatttacctgccgttactatagcttggctgttggagactgctagaacgggaaagagagcagacgaaagccattttctgattgaaaattcaactaaagaagaacgaagtttggaaacagaaataacaaatggaatcaatctaaattcagatactgcagagcatcctggcacacgcctgcaaactcacagaaaaaccgtcgttacacctttagatatgaaccgctttcagagtaaagctttccgtgctgtggtctcacaacatgccagacaggtcgcagcctccccagcagtaggacaaccacttcagaaggagccctcgttacacctggatacaccatcaaaattcctgtccaaggacaaactcttcaagccttcctttgatgtgaaggatgcacttgcagccttggaaactccaggacgtcccagccaacagaaaaggaaaccgagtacgccactctcagaagttattgtcaaaaacttgcaacttgctttggcaaatagctctcgaaatgctgtcgctctttctgccagccctcaactgaaagaggcccagtcagagaaggaagaagccccaaagccacttcacaaagtagtggtatgtgttagtaaaaaactcagtaagaagcagagtgaactaaatgggatcgcagcctctctaggagcagattacaggtggagttttgatgaaacagtgactcatttcatctatcaagggcggccaaatgacactaatcgggagtataaatctgtaaaagaaagaggagtacacattgtttccgagcactggcttttagattgtgcccaagagtgtaaacatcttcctgaatctctttatccacatacttataatcccaaaatgagcttggatatcagcgcagtgcaagatggccggctctgtaatagtcgactactctcagctgtgtcttcaacaaaggatgatgagccagatcctttgattttagaagaaaatgatgtagacaatatggccaccaataataaagagtcagcaccatcaaatggaagtggaaagaatgactctaaaggagttctgacacagaccttagagatgagagagaactttcagaagcagttacaggagataatgtctgcaacatcaatagtgaaaccccaagggcagaggacttccctttcaagaagtggttgtaacagcgcatcttcaacccctgacagcactcgctctgctcgcagtggacgaagtagagtcctagaggcactgaggcagtctcgtcagacagtacctgatgtcaacacagagccttcccaaaatgaacagatcatttgggatgaccctacagcaagggaggagagagcaaggcttgccagcaatttgcagtggcctagttgtcccacacaatactctgagcttcaggttgacattcaaaacttggaggattctccttttcaaaagcctttacatgattcagaaattgctaaacagggtaacaagaaagaaatctttgcatttgtttgtattaagtacatgttgacctcttaaaaataaacagatgagcatgttgtagttctctgatctgaatgtgcaaacaaaaaaaacttcgtagatatttctggttttggtttaaacttgagccagaaaaataatttgtaaattgaggtacttcatcagtaaattgaaaaacattttcataaatttggaaatttagaattgggcgtttttttctagacatggtgtctaccattgttcttttattctagctaaccctttttgtgtttgtggagttaatgcttggtttttcttcctatcatcttattttcatttaagtcttttgaattctgcctagcacatacctacatttgttctttggattgtatgagtttctttctgaattctcctattttttttcttccttgagctttaccttaaaaacaaaattttcctatctctcatcttttttcttccttttcttctttttcacattgcatgatgacctcccattagatatatagatttatctctgcttctgcttttctccaagtgtagaattgctctcatgttacaaatttgggttacacttaacaatgaaaacttggtatttaaggaaaatgttgggagaagcccacagataacacacttgctctgtttaatgctaataaattgcattttttctttattgttattattgtcacatgcagatgggatgcatttatttataagttctggggataggatacttttttgcctgtactttttacattccagagtttgtgcttgacttcatcttgactaagacagatgagaatatttcctagaatttgtttttagtcttatttggatcctgtcacactgcagcattttattgtcctcagctgtctgtgatcctggaaacatacgtgtgactgaagctcccaaacacccaatctctgaagaactggaaactcccataaaagacagccacctgatccctacgcctcaagcccccagtattgcctttccactcgccaacccccctgtggctccgcaccctagagaaaagattataacgatagaggagactcatgaagaattaaaaaaacagtacatatttcagttatcatctctgaatcctcaagaacgtattgactattgtcatctgattgagaaactaggtggattggtgatagaaaagcagtgctttgatcccacctgtacacacattgttgtgggacatccacttcgaaacgagaagtatttagcctcagtggcagctgggaagtgggtgcttcatcgctcctaccttgaagcctgcaggactgctggacacttcgtgcaggaagaagactatgaatggggaagtagttccatacttgatgttttgactggaatcaatgtacagcaacgaagactagcacttgcagcaatgagatggagaaaaaaaatccagcaaagacaagaatctggcattgttgagggagcatttagtgggtggaaggttattttacatgtggatcagtctcgagaagcaggcttcaaacgccttcttcagtcaggaggagcaaaggtgctacctggtcattctgtacctttatttaaagaggccacacatcttttttctgacttgaataaactgaaaccagatgactcaggagttaatatagcagaagctgctgcccagaacgtgtactgcttgagaacagaatacattgctgattatctcatgcaggaatcacctcctcatgtagaaaattactgtctaccagaagctatttcatttattcagaataataaggaacttgggactggattatcacaaaagaggaaagctcctacagaaaaaaataaaatcaaacgacctagagtacactaatcgcatctaccctttagttaccaaacattaaatgtttttaaaaattgaaagcctgaatgtgactgtgatagatttgggtagtaatttaaagatgagtacctgaagaattctgcttcagagtataatgatgacccttcttgagttttgaacacctgaaattgtaatcactgaaatattaactgtttcttaataaaaagttacctgaaataacaacaaaatacaactcctcagctagcttgctgttaaaccacattgaagtctgttaaaagatatttatttttcttgtaaatatctgaagctgtagcttagtggaaattttagcaaggtaatggattttgctttaaaatgtctgccttacaaattcataacaacaagatttgtcagtcagcatttattcatgttttccctgatttttatcttctcaccattttacctcttttaacaggagcctgagcacaaggtttaatgaggaagctggggctataaatatgtgtgtatatatgtatatgtatgtttgtacaaatctccatgatgtttgccaagtttgaatgcgcaaaacttggaaaatgtgacaataaagaataaaagtagtaactcaaattagtattaagatgtgtttacatagataaattttttaaaagagcaccctggcatctgttcttctgttgaagcaacaaaacatttatgtaacgtaaaaaatgaattgcaggggcctgggtgcggtggctcgtgcctgtaatcccagcactttgggaggctgaggcaggcggatcgtctgaggtcgggagtttgagaccagcctgaccaacatggagaaacctcatctgtactaaaaatacaaaaaattagcccagtgtggtggcacatgcctgtaatcccagctactcaggaggctgaggcaggagaatcgcttgaacccgggaggcggaggttgcggtgagctgagatcgcgccattgcactccagcctgggcaacaagagcgaaactccatctcaaaaaaaaaaaaaaaaagaattgcaggccaggcacggtggctcatgcttgtaatcccaccactttgggaggccaaggtgggtggactgcttgaacccagaagttcaagaccagcctggacaacatggcgaaaccccatctctgcaaaaaatagcaaaaaattagccgggcatgctgtttgatgcttgtagtcccagctacttgggaggctgaggcatgagaattacttgaactcaggaggcagaggttgcagtgagctgaaatcatgccactgcaactccagcctgggtgacagaatgagaccctgtctcaaaaaaaataaatgaattgcttaacatttctgatatttgttatttagaatattgccctattagattaaaacatactgttattggaactctgtattg

SEQ ID NO: 23077 - DNA, 6082 bp, Homo sapiens
tggggtaggggcggcgccgagtcgggggagggggctgtgcgccgggctggcgcccgaccccagccaccgccctgcggccagcgcgtcccccgactcgccgcccggagaccccgaggctccaacgagttcagaaatgtccagaaatgacaaagaaccgttttttgtgaagtttttaaagtcttcagacaattccaaatgtttttttaaagctctcgagtccataaaagaattccaatcagaagaatatcttcagattattacagaagaagaggcattgaagataaaggagaatgatagatcactttatatctgtgacccttttagtggcgttgtctttgatcacctcaaaaagcttggctgcagaattgttggtcctcaagtagtcatattttgtatgcaccaccagcgatgtgtcccaagagccgaacatccagtttataatatggttatgtctgatgtaaccatatcttgtacaagtctggaaaaagaaaaaagggaagaagttcataaatatgtacaaatgatgggcggacgagtatacagagaccttaatgtatcagtaactcaccttattgcaggagaagttggtagcaaaaaatatttagttgctgcaaacctgaagaaacctattttgcttccctcttggataaaaacactttgggagaagtcacaagagaaaaaaataactagatatactgatataaacatggaagatttcaagtgtcctatttttcttggttgcataatctgtgtgactggcttatgtggcttagacaggaaagaagttcagcaactcacagttaagcatggaggtcaatacatgggacaattgaaaatgaatgaatgtacacacctcattgtgcaagaaccaaaaggtcagaagtatgagtgtgccaagagatggaatgtacactgtgtgaccacacagtggttttttgacagtattgagaaaggtttttgtcaggatgaatccatatacaagacagaacctagaccagaagcaaagactatgcccaattcttcaactcctaccagccagatcaacacaattgatagtcgtactctttcagatgtcagcaatatttccaacataaatgcaagttgcgtaagtgaatcaatatgtaattcacttaacagcaaactggagcctacacttgaaaatctagaaaatctggatgtcagtgcatttcaagcacctgaagatttattagatggttgtcggatatatctttgcggttttagtggcagaaagctagataaactgagaagacttattaacagtggaggtggagttcgttttaaccagctaaatgaagatgtaactcatgttattgtgggagattatgatgatgaattgaagcagttttggaataaatcagcccacaggcctcatgtagtgggagcaaagtggttgctagagtgtttcagtaaaggttatatgctttctgaagaaccatatatccatgctaattaccagccagtggaaattccagtttcacatcagcctgaaagtaaagcagctcttttaaaaaagaagaacagcagcttctctaagaaagactttgctcctagtgaaaagcatgagcaagctgatgaagatctgctctctcaatatgaaaatggtagctccacagtagctccccagcagtaggacaaccacttcagaaggagccctcgttacacctggatacaccatcaaaattcctgtccaaggacaaactcttcaagccttcctttgatgtgaaggatgcacttgcagccttggaaactccaggacgtcccagccaacagaaaaggaaaccgagtacgccactctcagaagttattgtcaaaaacttgcaacttgctttggcaaatagctctcgaaatgctgtcgctctttctgccagccctcaactgaaagaggcccagtcagagaaggaagaagccccaaagccacttcacaaagtagtggtatgtgttagtaaaaaactcagtaagaagcagagtgaactaaatgggatcgcagcctctctaggagcagattacaggtggagttttgatgaaacagtgactcatttcatctatcaagggcggccaaatgacactaatcgggagtataaatctgtaaaagaaagaggagtacacattgtttccgagcactggcttttagattgtgcccaagagtgtaaacatcttcctgaatctctttatccacatacttataatcccaaaatgagcttggatatcagcgcagtgcaagatggccggctctgtaatagtcgactactctcagctgtgtcttcaacaaaggatgatgagccagatcctttgattttagaagaaaatgatgtagacaatatggccaccaataataaagagtcagcaccatcaaatggaagtggaaagaatgactctaaaggagttctgacacagaccttagagatgagagagaactttcagaagcagttacaggagataatgtctgcaacatcaatagtgaaaccccaagggcagaggacttccctttcaagaagtggttgtaacagcgcatcttcaacccctgacagcactcgctctgctcgcagtggacgaagtagagtcctagaggcactgaggcagtctcgtcagacagtacctgatgtcaacacagagccttcccaaaatgaacagatcatttgggatgaccctacagcaagggaggagagagcaaggcttgccagcaatttgcagtggcctagttgtcccacacaatactctgagcttcaggttgacattcaaaacttggaggattctccttttcaaaagcctttacatgattcagaaattgctaaacagggtaacaagaaagaaatctttgcatttgtttgtattaagtacatgttgacctcttaaaaataaacagatgagcatgttgtagttctctgatctgaatgtgcaaacaaaaaaaacttcgtagatatttctggttttggtttaaacttgagccagaaaaataatttgtaaattgaggtacttcatcagtaaattgaaaaacattttcataaatttggaaatttagaattgggcgtttttttctagacatggtgtctaccattgttcttttattctagctaaccctttttgtgtttgtggagttaatgcttggtttttcttcctatcatcttattttcatttaagtcttttgaattctgcctagcacatacctacatttgttctttggattgtatgagtttctttctgaattctcctattttttttcttccttgagctttaccttaaaaacaaaattttcctatctctcatcttttttcttccttttcttctttttcacattgcatgatgacctcccattagatatatagatttatctctgcttctgcttttctccaagtgtagaattgctctcatgttacaaatttgggttacacttaacaatgaaaacttggtatttaaggaaaatgttgggagaagcccacagataacacacttgctctgtttaatgctaataaattgcattttttctttattgttattattgtcacatgcagatgggatgcatttatttataagttctggggataggatacttttttgcctgtactttttacattccagagtttgtgcttgacttcatcttgactaagacagatgagaatatttcctagaatttgtttttagtcttatttggatcctgtcacactgcagcattttattgtcctcagctgtctgtgatcctggaaacatacgtgtgactgaagctcccaaacacccaatctctgaagaactggaaactcccataaaagacagccacctgatccctacgcctcaagcccccagtattgcctttccactcgccaacccccctgtggctccgcaccctagagaaaagattataacgatagaggagactcatgaagaattaaaaaaacagtacatatttcagttatcatctctgaatcctcaagaacgtattgactattgtcatctgattgagaaactaggtggattggtgatagaaaagcagtgctttgatcccacctgtacacacattgttgtgggacatccacttcgaaacgagaagtatttagcctcagtggcagctgggaagtgggtgcttcatcgctcctaccttgaagcctgcaggactgctggacacttcgtgcaggaagaagactatgaatggggaagtagttccatacttgatgttttgactggaatcaatgtacagcaacgaagactagcacttgcagcaatgagatggagaaaaaaaatccagcaaagacaagaatctggcattgttgagggagcatttagtgggtggaaggttattttacatgtggatcagtctcgagaagcaggcttcaaacgccttcttcagtcaggaggagcaaaggtgctacctggtcattctgtacctttatttaaagaggccacacatcttttttctgacttgaataaactgaaaccagatgactcaggagttaatatagcagaagctgctgcccagaacgtgtactgcttgagaacagaatacattgctgattatctcatgcaggaatcacctcctcatgtagaaaattactgtctaccagaagctatttcatttattcagaataataaggaacttgggactggattatcacaaaagaggaaagctcctacagaaaaaaataaaatcaaacgacctagagtacactaatcgcatctaccctttagttaccaaacattaaatgtttttaaaaattgaaagcctgaatgtgactgtgatagatttgggtagtaatttaaagatgagtacctgaagaattctgcttcagagtataatgatgacccttcttgagttttgaacacctgaaattgtaatcactgaaatattaactgtttcttaataaaaagttacctgaaataacaacaaaatacaactcctcagctagcttgctgttaaaccacattgaagtctgttaaaagatatttatttttcttgtaaatatctgaagctgtagcttagtggaaattttagcaaggtaatggattttgctttaaaatgtctgccttacaaattcataacaacaagatttgtcagtcagcatttattcatgttttccctgatttttatcttctcaccattttacctcttttaacaggagcctgagcacaaggtttaatgaggaagctggggctataaatatgtgtgtatatatgtatatgtatgtttgtacaaatctccatgatgtttgccaagtttgaatgcgcaaaacttggaaaatgtgacaataaagaataaaagtagtaactcaaattagtattaagatgtgtttacatagataaattttttaaaagagcaccctggcatctgttcttctgttgaagcaacaaaacatttatgtaacgtaaaaaatgaattgcaggggcctgggtgcggtggctcgtgcctgtaatcccagcactttgggaggctgaggcaggcggatcgtctgaggtcgggagtttgagaccagcctgaccaacatggagaaacctcatctgtactaaaaatacaaaaaattagcccagtgtggtggcacatgcctgtaatcccagctactcaggaggctgaggcaggagaatcgcttgaacccgggaggcggaggttgcggtgagctgagatcgcgccattgcactccagcctgggcaacaagagcgaaactccatctcaaaaaaaaaaaaaaaaagaattgcaggccaggcacggtggctcatgcttgtaatcccaccactttgggaggccaaggtgggtggactgcttgaacccagaagttcaagaccagcctggacaacatggcgaaaccccatctctgcaaaaaatagcaaaaaattagccgggcatgctgtttgatgcttgtagtcccagctacttgggaggctgaggcatgagaattacttgaactcaggaggcagaggttgcagtgagctgaaatcatgccactgcaactccagcctgggtgacagaatgagaccctgtctcaaaaaaaataaatgaattgcttaacatttctgatatttgttatttagaatattgccctattagattaaaacatactgttattggaactctgtattg

SEQ ID NO: 23078 - DNA, 3218 bp, Homo sapiens
ggtcgactgtaggaggtctagagtatccacgccgcgctgtcgctgattacaggtggagttttgatgaaacagtgactcatttcatctatcaagggcggccaaatgacactaatcgggagtataaatctgtaaaagaaagaggagtacacattgtttccgagcactggcttttagattgtgcccaagagtgtaaacatcttcctgaatctctttatccacatacttataatcccaaaatgagcttggatatcagcgcagtgcaagatggccggctctgtaatagtcgactactctcagctgtgtcttcaacaaaggatgatgagccagatcctttgattttagaagaaaatgatgtagacaatatggccaccaataataaagagtcagcaccatcaaatggaagtggaaagaatgactctaaaggagttctgacacagaccttagagatgagagagaactttcagaagcagttacaggagataatgtctgcaacatcaatagtgaaaccccaagggcagaggacttccctttcaagaagtggttgtaacagcgcatcttcaacccctgacagcactcgctctgctcgcagtggacgaagtagagtcctagaggcactgaggcagtctcgtcagacagtacctgatgtcaacacagagccttcccaaaatgaacagatcatttgggatgaccctacagcaagggaggagagagcaaggcttgccagcaatttgcagtggcctagttgtcccacacaatactctgagcttcaggttgacattcaaaacttggaggattctccttttcaaaagcctttacatgattcagaaattgctaaacaggctgtctgtgatcctggaaacatacgtgtgactgaagctcccaaacacccaatctctgaagaactggaaactcccataaaagacagccacctgatccctacgcctcaagcccccagtattgcctttccactcgccaacccccctgtggctccgcaccctagagaaaagattataacgatagaggagactcatgaagaattaaaaaaacagtacatatttcagttatcatctctgaatcctcaagaacgtattgactattgtcatctgattgagaaactaggtggattggtgatagaaaagcagtgctttgatcccacctgtacacacattgttgtgggacatccacttcgaaacgagaagtatttagcctcagtggcagctgggaagtgggtgcttcatcgctcctaccttgaagcctgcaggactgctggacacttcgtgcaggaagaagactatgaatggggaagtagttccatacttgatgttttgactggaatcaatgtacagcaacgaagactagcacttgcagcaatgagatggagaaaaaaaatccagcaaagacaagaatctggcattgttgagggagcatttagtgggtggaaggttattttacatgtggatcagtctcgagaagcaggcttcaaacgccttcttcagtcaggaggagcaaaggtgctacctggtcattctgtacctttatttaaagaggccacacatcttttttctgacttgaataaactgaaaccagatgactcaggagttaatatagcagaagctgctgcccagaacgtgtactgcttgagaacagaatacattgctgattatctcatgcaggaatcacctcctcatgtagaaaattactgtctaccagaagctatttcatttattcagaataataaggaacttgggactggattatcacaaaagaggaaagctcctacagaaaaaaataaaatcaaacgacctagagtacactaatcgcatctaccctttagttaccaaacattaaatgtttttaaaaattgaaagcctgaatgtgactgtgatagatttgggtagtaatttaaagatgagtacctgaagaattctgcttcagagtataatgatgacccttcttgagttttgaacacctgaaattgtaatcactgaaatattaactgtttcttaataaaaagttacctgaaataacaacaaaatacaactcctcagctagcttgctgttaaaccacattgaagtctgttaaaagatatttatttttcttgtaaatatctgaagctgtagcttagtggaaattttagcaaggtaatggattttgctttaaaatgtctgccttacaaattcataacaacaagatttgtcagtcagcatttattcatgttttccctgatttttatcttctcaccattttacctcttttaacaggagcctgagcacaaggtttaatgaggaagctggggctataaatatgtgtgtatatatgtatatgtatgtttgtacaaatctccatgatgtttgccaagtttgaatgcgcaaaacttggaaaatgtgacaataaagaataaaagtagtaactcaaattagtattaagatgtgtttacatagataaattttttaaaagagcaccctggcatctgttcttctgttgaagcaacaaaacatttatgtaacgtaaaaaatgaattgcaggggcctgggtgcggtggctcgtgcctgtaatcccagcactttgggaggctgaggcaggcggatcgtctgaggtcgggagtttgagaccagcctgaccaacatggagaaacctcatctgtactaaaaatacaaaaaattagcccagtgtggtggcacatgcctgtaatcccagctactcaggaggctgaggcaggagaatcgcttgaacccgggaggcggaggttgcggtgagctgagatcgcgccattgcactccagcctgggcaacaagagcgaaactccatctcaaaaaaaaaaaaaaaaagaattgcaggccaggcacggtggctcatgcttgtaatcccaccactttgggaggccaaggtgggtggactgcttgaacccagaagttcaagaccagcctggacaacatggcgaaaccccatctctgcaaaaaatagcaaaaaattagccgggcatgctgtttgatgcttgtagtcccagctacttgggaggctgaggcatgagaattacttgaactcaggaggcagaggttgcagtgagctgaaatcatgccactgcaactccagcctgggtgacagaatgagaccctgtctcaaaaaaaataaatgaattgcttaacatttctgatatttgttatttagaatattgccctattagattaaaacatactgttattggaactctgtattg

SEQ ID NO: 23079 - DNA, 6591 bp, Homo sapiens
tggggtaggggcggcgccgagtcgggggagggggctgtgcgccgggctggcgcccgaccccagccaccgccctgcggccagcgcgtcccccgactcgccgcccggagaccccgaggctccaacgagttcagaaatgtccagaaatgacaaagaaccgttttttgtgaagtttttaaagtcttcagacaattccaaatgtttttttaaagctctcgagtccataaaagaattccaatcagaagaatatcttcagattattacagaagaagaggcattgaagataaaggagaatgatagatcactttatatctgtgacccttttagtggcgttgtctttgatcacctcaaaaagcttggctgcagaattgttggtcctcaagtagtcatattttgtatgcaccaccagcgatgtgtcccaagagccgaacatccagtttataatatggttatgtctgatgtaaccatatcttgtacaagtctggaaaaagaaaaaagggaagaagttcataaatatgtacaaatgatgggcggacgagtatacagagaccttaatgtatcagtaactcaccttattgcaggagaagttggtagcaaaaaatatttagttgctgcaaacctgaagaaacctattttgcttccctcttggataaaaacactttgggagaagtcacaagagaaaaaaataactagatatactgatataaacatggaagatttcaagtgtcctatttttcttggttgcataatctgtgtgactggcttatgtggcttagacaggaaagaagttcagcaactcacagttaagcatggaggtcaatacatgggacaattgaaaatgaatgaatgtacacacctcattgtgcaagaaccaaaaggtcagaagtatgagtgtgccaagagatggaatgtacactgtgtgaccacacagtggttttttgacagtattgagaaaggtttttgtcaggatgaatccatatacaagacagaacctagaccagaagcaaagactatgcccaattcttcaactcctaccagccagatcaacacaattgatagtcgtactctttcagatgtcagcaatatttccaacataaatgcaagttgcgtaagtgaatcaatatgtaattcacttaacagcaaactggagcctacacttgaaaatctagaaaatctggatgtcagtgcatttcaagcacctgaagatttattagatggttgtcggatatatctttgcggttttagtggcagaaagctagataaactgagaagacttattaacagtggaggtggagttcgttttaaccagctaaatgaagatgtaactcatgttattgtgggagattatgatgatgaattgaagcagttttggaataaatcagcccacaggcctcatgtagtgggagcaaagtggttgctagagtgtttcagtaaaggttatatgctttctgaagaaccatatatccatgctaattaccagccagtggaaattccagtttcacatcagcctgaaagtaaagcagctcttttaaaaaagaagaacagcagcttctctaagaaagactttgctcctagtgaaaagcatgagcaagctgatgaagatctgctctctcaatatgaaaatggtagctccacagtagttgaggctaagacgtctgaagccaggccctttaatgattctactcatgctgagcccttgaatgattctactcacatttctttgcaagaagaaaaccagtcttctgtcagtcattgtgtccctgatgtttctacaattactgaagaaggcttatttagccaaaagagtttccttgttttgggttttagtaatgaaaatgaatctaacatcgcaaacatcataaaagaaaatgctgggaaaatcatgtcccttctgagcagaactgttgcggattatgctgtggttcctctgctggggtgtgaagtggaagccactgtgggagaagttgttacaaatacatggctggttacttgcatagactatcagactttgtttgatccaaagtcgaatcctctcttcacaccagttccagtaatgacaggaatgactcctttagaggattgtgttatttcatttagccagtgtgctggagcagaaaaagagtctttaacattcctagcaaacctccttggagcaagtgttcaagaatactttgttcgcaaatccaatgcaaagaaaggcatgtttgccagtactcatcttatactgaaagaacgtggtggctctaaatatgaagctgcaaagaagtggaatttacctgccgttactatagcttggctgttggagactgctagaacgggaaagagagcagacgaaagccattttctgattgaaaattcaactaaagaagaacgaagtttggaaacagaaataacaaatggaatcaatctaaattcagatactgcagagcatcctggcacacgcctgcaaactcacagaaaaaccgtcgttacacctttagatatgaaccgctttcagagtaaagctttccgtgctgtggtctcacaacatgccagacaggtcgcagcctccccagcagtaggacaaccacttcagaaggagccctcgttacacctggatacaccatcaaaattcctgtccaaggacaaactcttcaagccttcctttgatgtgaaggatgcacttgcagccttggaaactccaggacgtcccagccaacagaaaaggaaaccgagtacgccactctcagaagttattgtcaaaaacttgcaacttgctttggcaaatagctctcgaaatgctgtcgctctttctgccagccctcaactgaaagaggcccagtcagagaaggaagaagccccaaagccacttcacaaagtagtggtatgtgttagtaaaaaactcagtaagaagcagagtgaactaaatgggatcgcagcctctctaggagcagattacaggtggagttttgatgaaacagtgactcatttcatctatcaagggcggccaaatgacactaatcgggagtataaatctgtaaaagaaagaggagtacacattgtttccgagcactggcttttagattgtgcccaagagtgtaaacatcttcctgaatctctttatccacatacttataatcccaaaatgagcttggatatcagcgcagtgcaagatggccggctctgtaatagtcgactactctcagctgtgtcttcaacaaaggatgatgagccagatcctttgattttagaagaaaatgatgtagacaatatggccaccaataataaagagtcagcaccatcaaatggaagtggaaagaatgactctaaaggagttctgacacagaccttagagatgagagagaactttcagaagcagttacaggagataatgtctgcaacatcaatagtgaaaccccaagggcagaggacttccctttcaagaagtggttgtaacagcgcatcttcaacccctgacagcactcgctctgctcgcagtggacgaagtagagtcctagaggcactgaggcagtctcgtcagacagtacctgatgtcaacacagagccttcccaaaatgaacagatcatttgggatgaccctacagcaagggaggagagagcaaggcttgccagcaatttgcagtggcctagttgtcccacacaatactctgagcttcaggttgacattcaaaacttggaggattctccttttcaaaagcctttacatgattcagaaattgctaaacagggtaacaagaaagaaatctttgcatttgtttgtattaagtacatgttgacctcttaaaaataaacagatgagcatgttgtagttctctgatctgaatgtgcaaacaaaaaaaacttcgtagatatttctggttttggtttaaacttgagccagaaaaataatttgtaaattgaggtacttcatcagtaaattgaaaaacattttcataaatttggaaatttagaattgggcgtttttttctagacatggtgtctaccattgttcttttattctagctaaccctttttgtgtttgtggagttaatgcttggtttttcttcctatcatcttattttcatttaagtcttttgaattctgcctagcacatacctacatttgttctttggattgtatgagtttctttctgaattctcctattttttttcttccttgagctttaccttaaaaacaaaattttcctatctctcatcttttttcttccttttcttctttttcacattgcatgatgacctcccattagatatatagatttatctctgcttctgcttttctccaagtgtagaattgctctcatgttacaaatttgggttacacttaacaatgaaaacttggtatttaaggaaaatgttgggagaagcccacagataacacacttgctctgtttaatgctaataaattgcattttttctttattgttattattgtcacatgcagatgggatgcatttatttataagttctggggataggatacttttttgcctgtactttttacattccagagtttgtgcttgacttcatcttgactaagacagatgagaatatttcctagaatttgtttttagtcttatttggatcctgtcacactgcagcattttattgtcctcagctgtctgtgatcctggaaacatacgtgtgactgaagctcccaaacacccaatctctgaagaactggaaactcccataaaagacagccacctgatccctacgcctcaagcccccagtattgcctttccactcgccaacccccctgtggctccgcaccctagagaaaagattataacgatagaggagactcatgaagaattaaaaaaacagtacatatttcagttatcatctctgaatcctcaagaacgtattgactattgtcatctgattgagaaactaggtggattggtgatagaaaagcagtgctttgatcccacctgtacacacattgttgtgggacatccacttcgaaacgagaagtatttagcctcagtggcagctgggaagtgggtgcttcatcgctcctaccttgaagcctgcaggactgctggacacttcgtgcaggaagaagactatgaatggggaagtagttccatacttgatgttttgactggaatcaatgtacagcaacgaagactagcacttgcagcaatgagatggagaaaaaaaatccagcaaagacaagaatctggcattgttgagggagcatttagtgggtggaaggttattttacatgtggatcagtctcgagaagcaggcttcaaacgccttcttcagtcaggaggagcaaaggtgctacctggtcattctgtacctttatttaaagaggccacacatcttttttctgacttgaataaactgaaaccagatgactcaggagttaatatagcagaagctgctgcccagaacgtgtactgcttgagaacagaatacattgctgattatctcatgcaggaatcacctcctcatgtagaaaattactgtctaccagaagctatttcatttattcagaataataaggaacttgggactggattatcacaaaagaggaaagctcctacagaaaaaaataaaatcaaacgacctagagtacactaatcgcatctaccctttagttaccaaacattaaatgtttttaaaaattgaaagcctgaatgtgactgtgatagatttgggtagtaatttaaagatgagtacctgaagaattctgcttcagagtataatgatgacccttcttgagttttgaacacctgaaattgtaatcactgaaatattaactgtttcttaataaaaagttacctgaaataacaacaaaatacaactcctcagctagcttgctgttaaaccacattgaagtctgttaaaagatatttatttttcttgtaaatatctgaagctgtagcttagtggaaattttagcaaggtaatggattttgctttaaaatgtctgccttacaaattcataacaacaagatttgtcagtcagcatttattcatgttttccctgatttttatcttctcaccattttacctcttttaacaggagcctgagcacaaggtttaatgaggaagctggggctataaatatgtgtgtatatatgtatatgtatgtttgtacaaatctccatgatgtttgccaagtttgaatgcgcaaaacttggaaaatgtgacaataaagaataaaagtagtaactcaaaaaaaaaaaaaaaaagaattgcaggccaggcacggtggctcatgcttgtaatcccaccactttgggaggccaaggtgggtggactgcttgaacccagaagttcaagaccagcctggacaacatggcgaaaccccatctctgcaaaaaatagcaaaaaattagccgggcatgctgtttgatgcttgtagtcccagctacttgggaggctgaggcatgagaattacttgaactcaggaggcagaggttgcagtgagctgaaatcatgccactgcaactccagcctgggtgacagaatgagaccctgtctcaaaaaaaataaatgaattgcttaacatttctgatatttgttatttagaatattgccctattagattaaaacatactgttattggaactctgtattg

SEQ ID NO: 23080 - DNA, 6091 bp, Homo sapiens
tggggtaggggcggcgccgagtcgggggagggggctgtgcgccgggctggcgcccgaccccagccaccgccctgcggccagcgcgtcccccgactcgccgcccggagaccccgaggctccaacgagttcagaaatgtccagaaatgacaaagaaccgttttttgtgaagtttttaaagtcttcagacaattccaaatgtttttttaaagctctcgagtccataaaagaattccaatcagaagaatatcttcagattattacagaagaagaggcattgaagataaaggagaatgatagatcactttatatctgtgacccttttagtggcgttgtctttgatcacctcaaaaagcttggctgcagaattgttggtcctcaagtagtcatattttgtatgcaccaccagcgatgtgtcccaagagccgaacatccagtttataatatggttatgtctgatgtaaccatatcttgtacaagtctggaaaaagaaaaaagggaagaagttcataaatatgtacaaatgatgggcggacgagtatacagagaccttaatgtatcagtaactcaccttattgcaggagaagttggtagcaaaaaatatttagttgctgcaaacctgaagaaacctattttgcttccctcttggataaaaacactttgggagaagtcacaagagaaaaaaataactagatatactgatataaacatggaagatttcaagtgtcctatttttcttggttgcataatctgtgtgactggcttatgtggcttagacaggaaagaagttcagcaactcacagttaagcatggaggtcaatacatgggacaattgaaaatgaatgaatgtacacacctcattgtgcaagaaccaaaaggtcagaagtatgagtgtgccaagagatggaatgtacactgtgtgaccacacagtggttttttgacagtattgagaaaggtttttgtcaggatgaatccatatacaagacagaacctagaccagaagcaaagactatgcccaattcttcaactcctaccagccagatcaacacaattgatagtcgtactctttcagatgtcagcaatatttccaacataaatgcaagttgcgtaagtgaatcaatatgtaattcacttaacagcaaactggagcctacacttgaaaatctagaaaatctggatgtcagtgcatttcaagcacctgaagatttattagatggttgtcggatatatctttgcggttttagtggcagaaagctagataaactgagaagacttattaacagtggaggtggagttcgttttaaccagctaaatgaagatgtaactcatgttattgtgggagattatgatgatgaattgaagcagttttggaataaatcagcccacaggcctcatgtagtgggagcaaagtggttgctagagtgtttcagtaaaggttatatgctttctgaagaaccatatatccatgctaattaccagccagtggaaattccagtttcacatcagcctgaaagtaaagcagctcttttaaaaaagaagaacagcagcttctctaagaaagactttgctcctagtgaaaagcatgagcaagctgatgaagatctgctctctcaatatgaaaatggtagctccacagtagttgaggctaagacgtctgaagccaggccctttaatgattctactcatgctgagcccttgaatgattctactcacatttctttgcaagaagaaaaccagtcttctgtcagtcattgtgtccctgatgtttctacaattactgaagaaggcttatttagccaaaagagtttccttgttttgggttttagtaatgaaaatgaatctaacatcgcaaacatcataaaagaaaatgctgggaaaatcatgtcccttctgagcagaactgttgcggattatgctgtggttcctctgctggggtgtgaagtggaagccactgtgggagaagttgttacaaatacatggctggttacttgcatagactatcagactttgtttgatccaaagtcgaatcctctcttcacaccagttccagtaatgacaggaatgactcctttagaggattgtgttatttcatttagccagtgtgctggagcagaaaaagagtctttaacattcctagcaaacctccttggagcaagtgttcaagaatactttgttcgcaaatccaatgcaaagaaaggcatgtttgccagtactcatcttatactgaaagaacgtggtggctctaaatatgaagctgcaaagaagtggaatttacctgccgttactatagcttggctgttggagactgctagaacgggaaagagagcagacgaaagccattttctgattgaaaattcaactaaagaagaacgaagtttggaaacagaaataacaaatggaatcaatctaaattcagatactgcagagcatcctggcacacgcctgcaaactcacagaaaaaccgtcgttacacctttagatatgaaccgctttcagagtaaagctttccgtgctgtggtctcacaacatgccagacaggtcgcagcctccccagcagtaggacaaccacttcagaaggagccctcgttacacctggatacaccatcaaaattcctgtccaaggacaaactcttcaagccttcctttgatgtgaaggatgcacttgcagccttggaaactccaggacgtcccagccaacagaaaaggaaaccgagtacgccactctcagaagttattgtcaaaaacttgcaacttgctttggcaaatagctctcgaaatgctgtcgctctttctgccagccctcaactgaaagaggcccagtcagagaaggaagaagccccaaagccacttcacaaagtagtggtatgtgttagtaaaaaactcagtaagaagcagagtgaactaaatgggatcgcagcctctctaggagcagattacaggtggagttttgatgaaacagtgactcatttcatctatcaagggcggccaaatgacactaatcgggagtataaatctgtaaaagaaagaggagtacacattgtttccgagcactggcttttagattgtgcccaagagtgtaaacatcttcctgaatctctttatccacatacttataatcccaaaatgagcttggatatcagcgcagtgcaagatggccggctctgtaatagtcgactactctcagctgtgtcttcaacaaaggatgatgagccagatcctttgattttagaagaaaatgatgtagacaatatggccaccaataataaagagtcagcaccatcaaatggaagtggaaagaatgactctaaaggagttctgacacagaccttagagatgagagagaactttcagaagcagttacaggagataatgtctgcaacatcaatagtgaaaccccaagggcagaggacttccctttcaagaagtggttgtaacagcgcatcttcaacccctgacagcactcgctctgctcgcagtggacgaagtagagtcctagaggcactgaggcagtctcgtcagacagtacctgatgtcaacacagagccttcccaaaatgaacagatcatttgggatgaccctacagcaagggaggagagagcaaggcttgccagcaatttgcagtggcctagttgtcccacacaatactctgagcttcaggttgacattcaaaacttggaggattctccttttcaaaagcctttacatgattcagaaattgctaaacagggtaacaagaaagaaatctttgcatttgtttgtattaagtacatgttgacctcttaaaaataaacagatgagcatgttgtagttctctgatctgaatgtgcaaacaaaaaaaacttcgtagatatttctggttttggtttaaacttgagccagaaaaataatttgtaaattgaggtacttcatcagtaaattgaaaaacattttcataaatttggaaatttagaattgggcgtttttttctagacatggtgtctaccattgttcttttattctagctaaccctttttgtgtttgtggagttaatgcttggtttttcttcctatcatcttattttcatttaagtcttttgaattctgcctagcacatacctacatttgttctttggattgtatgagtttctttctgaattctcctattttttttcttccttgagctttaccttaaaaacaaaattttcctatctctcatcttttttcttccttttcttctttttcacattgcatgatgacctcccattagatatatagatttatctctgcttctgcttttctccaagtgtagaattgctctcatgttacaaatttgggttacacttaacaatgaaaacttggtatttaaggaaaatgttgggagaagcccacagataacacacttgctctgtttaatgctaataaattgcattttttctttattgttattattgtcacatgcagatgggatgcatttatttataagttctggggataggatacttttttgcctgtactttttacattccagagtttgtgcttgacttcatcttgactaagacagatgagaatatttcctagaatttgtttttagtcttatttggatcctgtcacactgcagcattttattgtcctcagctgtctgtgatcctggaaacatacgtgtgactgaagctcccaaacacccaatctctgaagaactggaaactcccataaaagacagccacctgatccctacgcctcaagcccccagtattgcctttccactcgccaacccccctgtggctccgcaccctagagaaaagattataacgatagaggagactcatgaagaattaaaaaaacagtacatatttcagttatcatctctgaatcctcaagaacgtattgactattgtcatctgattgagaaactaggtggattggtgatagaaaagcagtgctttgatcccacctgtacacacattgttgtgggacatccacttcgaaacgagaagtatttagcctcagtggcagctgggaagtgggtgcttcatcgctcctaccttgaagcctgcaggactgctggacacttcgtgcaggaagaagactatgaatggggaagtagttccatacttgatgttttgactggaatcaatgtacagcaacgaagactagcacttgcagcaatgagatggagaaaaaaaatccagcaaagacaagaatctggcattgttgagggagcatttagtgggtggaaggttattttacatgtggatcagtctcgagaagcaggcttcaaacgccttcttcagtcaggaggagcaaaggtgctacctggtcattctgtacctttatttaaagaggccacacatcttttttctgacttgaataaactgaaaccagatgactcaggagttaatatagcagaagctgctgcccagaacgtgtactgcttgagaacagaatacattgctgattatctcatgcaggaatcacctcctcatgtagaaaattactgtctaccagaagctatttcatttattcagaataataaggaacttgggactggattatcacaaaagaggaaagctcctacagaaaaaaataaaatcaaacgacctagagtacactaatcgcatctaccctttagttaccaaacattaaatgtttttaaaaattgaaagcctgaatgtgactgtgatagatttgggtagtaatttaaagatgagtacctgaagaattctgcttcagagtataatgatgacccttcttgagttttgaacacctgaaattgtaatcactgaaatattaactgtttcttaataaaaagttacctgaaataacaacaaaatacaactcctcagctagcttgctgttaaaccacattgaagtctgttaaaagatatttatttttcttgtaaatatctgaagctgtagcttagtggaaattttagcaaggtaatggattttgctttaaaatgtctgccttacaaattcataacaacaagatttgtcagtcagcatttattcatgttttccctgatttttatcttctcaccattttacctcttttaacaggagcctgagcacaaggttaactcagagcggtgagcctcatgtgggatcctctagacag

SEQ ID NO: 23081 - DNA, 6869 bp, Homo sapiens
tggggtaggggcggcgccgagtcgggggagggggctgtgcgccgggctggcgcccgaccccagccaccgccctgcggccagcgcgtcccccgactcgccgcccggagaccccgaggctccaacgagttcagaaatgtccagaaatgacaaagaaccgttttttgtgaagtttttaaagtcttcagacaattccaaatgtttttttaaagctctcgagtccataaaagaattccaatcagaagaatatcttcagattattacagaagaagaggcattgaagataaaggagaatgatagatcactttatatctgtgacccttttagtggcgttgtctttgatcacctcaaaaagcttggctgcagaattgttggtcctcaagtagtcatattttgtatgcaccaccagcgatgtgtcccaagagccgaacatccagtttataatatggttatgtctgatgtaaccatatcttgtacaagtctggaaaaagaaaaaagggaagaagttcataaatatgtacaaatgatgggcggacgagtatacagagaccttaatgtatcagtaactcaccttattgcaggagaagttggtagcaaaaaatatttagttgctgcaaacctgaagaaacctattttgcttccctcttggataaaaacactttgggagaagtcacaagagaaaaaaataactagatatactgatataaacatggaagatttcaagtgtcctatttttcttggttgcataatctgtgtgactggcttatgtggcttagacaggaaagaagttcagcaactcacagttaagcatggaggtcaatacatgggacaattgaaaatgaatgaatgtacacacctcattgtgcaagaaccaaaaggtcagaagtatgagtgtgccaagagatggaatgtacactgtgtgaccacacagtggttttttgacagtattgagaaaggtttttgtcaggatgaatccatatacaagacagaacctagaccagaagcaaagactatgcccaattcttcaactcctaccagccagatcaacacaattgatagtcgtactctttcagatgtcagcaatatttccaacataaatgcaagttgcgtaagtgaatcaatatgtaattcacttaacagcaaactggagcctacacttgaaaatctagaaaatctggatgtcagtgcatttcaagcacctgaagatttattagatggttgtcggatatatctttgcggttttagtggcagaaagctagataaactgagaagacttattaacagtggaggtggagttcgttttaaccagctaaatgaagatgtaactcatgttattgtgggagattatgatgatgaattgaagcagttttggaataaatcagcccacaggcctcatgtagtgggagcaaagtggttgctagagtgtttcagtaaaggttatatgctttctgaagaaccatatatccatgctaattaccagccagtggaaattccagtttcacatcagcctgaaagtaaagcagctcttttaaaaaagaagaacagcagcttctctaagaaagactttgctcctagtgaaaagcatgagcaagctgatgaagatctgctctctcaatatgaaaatggtagctccacagtagttgaggctaagacgtctgaagccaggccctttaatgattctactcatgctgagcccttgaatgattctactcacatttctttgcaagaagaaaaccagtcttctgtcagtcattgtgtccctgatgtttctacaattactgaagaaggcttatttagccaaaagagtttccttgttttgggttttagtaatgaaaatgaatctaacatcgcaaacatcataaaagaaaatgctgggaaaatcatgtcccttctgagcagaactgttgcggattatgctgtggttcctctgctggggtgtgaagtggaagccactgtgggagaagttgttacaaatacatggctggttacttgcatagactatcagactttgtttgatccaaagtcgaatcctctcttcacaccagttccagtaatgacaggaatgactcctttagaggattgtgttatttcatttagccagtgtgctggagcagaaaaagagtctttaacattcctagcaaacctccttggagcaagtgttcaagaatactttgttcgcaaatccaatgcaaagaaaggcatgtttgccagtactcatcttatactgaaagaacgtggtggctctaaatatgaagctgcaaagaagtggaatttacctgccgttactatagcttggctgttggagactgctagaacgggaaagagagcagacgaaagccattttctgattgaaaattcaactaaagaagaacgaagtttggaaacagaaataacaaatggaatcaatctaaattcagatactgcagagcatcctggcacacgcctgcaaactcacagaaaaaccgtcgttacacctttagatatgaaccgctttcagagtaaagctttccgtgctgtggtctcacaacatgccagacaggtcgcagcctccccagcagtaggacaaccacttcagaaggagccctcgttacacctggatacaccatcaaaattcctgtccaaggacaaactcttcaagccttcctttgatgtgaaggatgcacttgcagccttggaaactccaggacgtcccagccaacagaaaaggaaaccgagtacgccactctcagaagttattgtcaaaaacttgcaacttgctttggcaaatagctctcgaaatgctgtcgctctttctgccagccctcaactgaaagaggcccagtcagagaaggaagaagccccaaagccacttcacaaagtagtggtatgtgttagtaaaaaactcagtaagaagcagagtgaactaaatgggatcgcagcctctctaggagcagattacaggtggagttttgatgaaacagtgactcatttcatctatcaagggcggccaaatgacactaatcgggagtataaatctgtaaaagaaagaggagtacacattgtttccgagcactggcttttagattgtgcccaagagtgtaaacatcttcctgaatctctttatccacatacttataatcccaaaatgagcttggatatcagcgcagtgcaagatggccggctctgtaatagtcgactactctcagctgtgtcttcaacaaaggatgatgagccagatcctttgattttagaagaaaatgatgtagacaatatggccaccaataataaagagtcagcaccatcaaatggaagtggaaagaatgactctaaaggagttctgacacagaccttagagatgagagagaactttcagaagcagttacaggagataatgtctgcaacatcaatagtgaaaccccaagggcagaggacttccctttcaagaagtggttgtaacagcgcatcttcaacccctgacagcactcgctctgctcgcagtggacgaagtagagtcctagaggcactgaggcagtctcgtcagacagtacctgatgtcaacacagagccttcccaaaatgaacagatcatttgggatgaccctacagcaagggaggagagagcaaggcttgccagcaatttgcagtggcctagttgtcccacacaatactctgagcttcaggttgacattcaaaacttggaggattctccttttcaaaagcctttacatgattcagaaattgctaaacagggtaacaagaaagaaatctttgcatttgtttgtattaagtacatgttgacctcttaaaaataaacagatgagcatgttgtagttctctgatctgaatgtgcaaacaaaaaaaacttcgtagatatttctggttttggtttaaacttgagccagaaaaataatttgtaaattgaggtacttcatcagtaaattgaaaaacattttcataaatttggaaatttagaattgggcgtttttttctagacatggtgtctaccattgttcttttattctagctaaccctttttgtgtttgtggagttaatgcttggtttttcttcctatcatcttattttcatttaagtcttttgaattctgcctagcacatacctacatttgttctttggattgtatgagtttctttctgaattctcctattttttttcttccttgagctttaccttaaaaacaaaattttcctatctctcatcttttttcttccttttcttctttttcacattgcatgatgacctcccattagatatatagatttatctctgcttctgcttttctccaagtgtagaattgctctcatgttacaaatttgggttacacttaacaatgaaaacttggtatttaaggaaaatgttgggagaagcccacagataacacacttgctctgtttaatgctaataaattgcattttttctttattgttattattgtcacatgcagatgggatgcatttatttataagttctggggataggatacttttttgcctgtactttttacattccagagtttgtgcttgacttcatcttgactaagacagatgagaatatttcctagaatttgtttttagtcttatttggatcctgtcacactgcagcattttattgtcctcagctgtctgtgatcctggaaacatacgtgtgactgaagctcccaaacacccaatctctgaagaactggaaactcccataaaagacagccacctgatccctacgcctcaagcccccagtattgcctttccactcgccaacccccctgtggctccgcaccctagagaaaagattataacgatagaggagactcatgaagaattaaaaaaacagtacatatttcagttatcatctctgaatcctcaagaacgtattgactattgtcatctgattgagaaactaggtggattggtgatagaaaagcagtgctttgatcccacctgtacacacattgttgtgggacatccacttcgaaacgagaagtatttagcctcagtggcagctgggaagtgggtgcttcatcgctcctaccttgaagcctgcaggactgctggacacttcgtgcaggaagaagactatgaatggggaagtagttccatacttgatgttttgactggaatcaatgtacagcaacgaagactagcacttgcagcaatgagatggagaaaaaaaatccagcaaagacaagaatctggcattgttgagggagcatttagtgggtggaaggttattttacatgtggatcagtctcgagaagcaggcttcaaacgccttcttcagtcaggaggagcaaaggtgctacctggtcattctgtacctttatttaaagaggccacacatcttttttctgacttgaataaactgaaaccagatgactcaggagttaatatagcagaagctgctgcccagaacgtgtactgcttgagaacagaatacattgctgattatctcatgcaggaatcacctcctcatgtagaaaattactgtctaccagaagctatttcatttattcagaataataaggaacttgggactggattatcacaaaagaggaaagctcctacagaaaaaaataaaatcaaacgacctagagtacactaatcgcatctaccctttagttaccaaacattaaatgtttttaaaaattgaaagcctgaatgtgactgtgatagatttgggtagtaatttaaagatgagtacctgaagaattctgcttcagagtataatgatgacccttcttgagttttgaacacctgaaattgtaatcactgaaatattaactgtttcttaataaaaagttacctgaaataacaacaaaatacaactcctcagctagcttgctgttaaaccacattgaagtctgttaaaagatatttatttttcttgtaaatatctgaagctgtagcttagtggaaattttagcaaggagcctgagcacaaggtttaatgaggaagctggggctataaatatgtgtgtatatatgtatatgtatgtttgtacaaatctccatgatgtttgccaagtttgaatgcgcaaaacttggaaaatgtgacaataaagaataaaagtagtaactcaaattagtattaagatgtgtttacatagataaattttttaaaagagcaccctggcatctgttcttctgttgaagcaacaaaacatttatgtaacgtaaaaaatgaattgcaggggcctgggtgcggtggctcgtgcctgtaatcccagcactttgggaggctgaggcaggcggatcgtctgaggtcgggagtttgagaccagcctgaccaacatggagaaacctcatctgtactaaaaatacaaaaaattagcccagtgtggtggcacatgcctgtaatcccagctactcaggaggctgaggcaggagaatcgcttgaacccgggaggcggaggttgcggtgagctgagatcgcgccattgcactccagcctgggcaacaagagcgaaactccatctcaaaaaaaaaaaaaaaaagaattgcaggccaggcacggtggctcatgcttgtaatcccaccactttgggaggccaaggtgggtggactgcttgaacccagaagttcaagaccagcctggacaacatggcgaaaccccatctctgcaaaaaatagcaaaaaattagccgggcatgctgtttgatgcttgtagtcccagctacttgggaggctgaggcatgagaattacttgaactcaggaggcagaggttgcagtgagctgaaatcatgccactgcaactccagcctgggtgacagaatgagaccctgtctcaaaaaaaataaatgaattgcttaacatttctgatatttgttatttagaatattgccctattagattaaaacatactgttattggaactctgtattg

SEQ ID NO: 23082 - DNA, 5808 bp, Homo sapiens
tggggtaggggcggcgccgagtcgggggagggggctgtgcgccgggctggcgcccgaccccagccaccgccctgcggccagcgcgtcccccgactcgccgcccggagaccccgaggctccaacgagttcagaaatgtccagaaatgacaaagaaccgttttttgtgaagtttttaaagtcttcagacaattccaaatgtttttttaaagctctcgagtccataaaagaattccaatcagaagaatatcttcagattattacagaagaagaggcattgaagataaaggagaatgatagatcactttatatctgtgacccttttagtggcgttgtctttgatcacctcaaaaagcttggctgcagaattgttggtcctcaagtagtcatattttgtatgcaccaccagcgatgtgtcccaagagccgaacatccagtttataatatggttatgtctgatgtaaccatatcttgtacaagtctggaaaaagaaaaaagggaagaagttcataaatatgtacaaatgatgggcggacgagtatacagagaccttaatgtatcagtaactcaccttattgcaggagaagttggtagcaaaaaatatttagttgctgcaaacctgaagaaacctattttgcttccctcttggataaaaacactttgggagaagtcacaagagaaaaaaataactagatatactgatataaacatggaagatttcaagtgtcctatttttcttggttgcataatctgtgtgactggcttatgtggcttagacaggaaagaagttcagcaactcacagttaagcatggaggtcaatacatgggacaattgaaaatgaatgaatgtacacacctcattgtgcaagaaccaaaaggtcagaagtatgagtgtgccaagagatggaatgtacactgtgtgaccacacagtggttttttgacagtattgagaaaggtttttgtcaggatgaatccatatacaagacagaacctagaccagaagcaaagactatgcccaattcttcaactcctaccagccagatcaacacaattgatagtcgtactctttcagatgtcagcaatatttccaacataaatgcaagttgcgtaagtgaatcaatatgtaattcacttaacagcaaactggagcctacacttgaaaatctagaaaatctggatgtcagtgcatttcaagcacctgaagatttattagatggttgtcggatatatctttgcggttttagtggcagaaagctagataaactgagaagacttattaacagtggaggtggagttcgttttaaccagctaaatgaagatgtaactcatgttattgtgggagattatgatgatgaattgaagcagttttggaataaatcagcccacaggcctcatgtagtgggagcaaagtggttgctagagtgtttcagtaaaggttatatgctttctgaagaaccatatatccatgctaattaccagccagtggaaattccagtttcacatcagcctgaaagtaaagcagctcttttaaaaaagaagaacagcagcttctctaagaaagactttgctcctagtgaaaagcatgagcaagctgatgaagatctgctctctcaatatgaaaatggtagctccacagtagttgaggctaagacgtctgaagccaggccctttaatgattctactcatgctgagcccttgaatgattctactcacatttctttgcaagaagaaaaccagtcttctgtcagtcattgtgtccctgatgtttctacaattactgaagaaggcttatttagccaaaagagtttccttgttttgggttttagtaatgaaaatgaatctaacatcgcaaacatcataaaagaaaatgctgggaaaatcatgtcccttctgagcagaactgttgcggattatgctgtggttcctctgctggggtgtgaagtggaagccactgtgggagaagttgttacaaatacatggctggttacttgcatagactatcagactttgtttgatccaaagtcgaatcctctcttcacaccagttccagtaatgacaggaatgactcctttagaggattgtgttatttcatttagccagtgtgctggagcagaaaaagagtctttaacattcctagcaaacctccttggagcaagtgttcaagaatactttgttcgcaaatccaatgcaaagaaaggcatgtttgccagtactcatcttatactgaaagaacgtggtggctctaaatatgaagctgcaaagaagtggaatttacctgccgttactatagcttggctgttggagactgctagaacgggaaagagagcagacgaaagccattttctgattgaaaattcaactaaagaagaacgaagtttggaaacagaaataacaaatggaatcaatctaaattcagatactgcagagcatcctggcacacgcctgcaaactcacagaaaaaccgtcgttacacctttagatatgaaccgctttcagagtaaagctttccgtgctgtggtctcacaacatgccagacaggtcgcagcctccccagcagtaggacaaccacttcagaaggagccctcgttacacctggatacaccatcaaaattcctgtccaaggacaaactcttcaagccttcctttgatgtgaaggatgcacttgcagccttggaaactccaggacgtcccagccaacagaaaaggaaaccgagtacgccactctcagaagttattgtcaaaaacttgcaacttgctttggcaaatagctctcgaaatgctgtcgctctttctgccagccctcaactgaaagaggcccagtcagagaaggaagaagccccaaagccacttcacaaagtagtggtatgtgttagtaaaaaactcagtaagaagcagagtgaactaaatgggatcgcagcctctctaggagcagattacaggtggagttttgatgaaacagtgactcatttcatctatcaagggcggccaaatgacactaatcgggagtataaatctgtaaaagaaagaggagtacacattgtttccgagcactggcttttagattgtgcccaagagtgtaaacatcttcctgaatctctttatccacatacttataatcccaaaatgagcttggatatcagcgcagtgcaagatggccggctctgtaatagtcgactactctcagctgtgtcttcaacaaaggatgatgagccagatcctttgattttagaagaaaatgatgtagacaatatggccaccaataataaagagtcagcaccatcaaatggaagtggaaagaatgactctaaaggagttctgacacagaccttagagatgagagagaactttcagaagcagttacaggagataatgtctgcaacatcaatagtgaaaccccaagggcagaggacttccctttcaagaagtggttgtaacagcgcatcttcaacccctgacagcactcgctctgctcgcagtggacgaagtagagtcctagaggcactgaggcagtctcgtcagacagtacctgatgtcaacacagagccttcccaaaatgaacagatcatttgggatgaccctacagcaagggaggagagagcaaggcttgccagcaatttgcagtggcctagttgtcccacacaatactctgagcttcaggttgacattcaaaacttggaggattctccttttcaaaagcctttacatgattcagaaattgctaaacagggtaacaagaaagaaatctttgcatttgtttgtattaagtacatgttgacctcttaaaaataaacagatgagcatgttgtagttctctgatctgaatgtgcaaacaaaaaaaacttcgtagatatttctggttttggtttaaacttgagccagaaaaataatttgtaaattgaggtacttcatcagtaaattgaaaaacattttcataaatttggaaatttagaattgggcgtttttttctagacatggtgtctaccattgttcttttattctagctaaccctttttgtgtttgtggagttaatgcttggtttttcttcctatcatcttattttcatttaagtcttttgaattctgcctagcacatacctacatttgttctttggattgtatgagtttctttctgaattctcctattttttttcttccttgagctttaccttaaaaacaaaattttcctatctctcatcttttttcttccttttcttctttttcacattgcatgatgacctcccattagatatatagatttatctctgcttctgcttttctccaagtgtagaattgctctcatgttacaaatttgggttacacttaacaatgaaaacttggtatttaaggaaaatgttgggagaagcccacagataacacacttgctctgtttaatgctaataaattgcattttttctttattgttattattgtcacatgcagatgggatgcatttatttataagttctggggataggatacttttttgcctgtactttttacattccagagtttgtgcttgacttcatcttgactaagacagatgagaatatttcctagaatttgtttttagtcttatttggatcctgtcacactgcagcattttattgtcctcagctgtctgtgatcctggaaacatacgtgtgactgaagctcccaaacacccaatctctgaagaactggaaactcccataaaagacagccacctgatccctacgcctcaagcccccagtattgcctttccactcgccaacccccctgtggctccgcaccctagagaaaagattataacgatagaggagactcatgaagaattaaaaaaacagtacatatttcagttatcatctctgaatcctcaagaacgtattgactattgtcatctgattgagaaactaggtggattggtgatagaaaagcagtgctttgatcccacctgtacacacattgttgtgggacatccacttcgaaacgagaagtatttagcctcagtggcagctgggaagtgggtgcttcatcgctcctaccttgaagcctgcaggactgctggacacttcgtgcaggaagaagactatgaatggggaagtagttccatacttgatgttttgactggaatcaatgtacagcaacgaagactagcacttgcagcaatgagatggagaaaaaaaatccagcaaagacaagaatctggcattgttgagggagcatttagtgggtggaaggttattttacatgtggatcagtctcgagaagcaggcttcaaacgccttcttcagtcaggaggagcaaaggtgctacctggtcattctgtacctttatttaaagaggccacacatcttttttctgacttgaataaactgaaaccagatgactcaggagttaatatagcagaagctgctgcccagaacgtgtactgcttgagaacagaatacattgctgattatctcatgcaggtaggaatcctcaacctgtgcctaggattcagcaacaaaccacctggaacacatggtcccttagcacttgaagaggttaaagcctaacctgctatgtgactgtagacagagcctttataaggggattaaatgaggtcataagaatgagtccctaacccaccaggactagtgtcctggtaagaagagggaggcacaccaggagtttgccggcacggaggaaaagccctgtgaggacacggggagggcagctatctgtttacacaccaggaagaaatgtctcaccagataccaaccctggccgtctcctggattttggatttccaatctccagaactgtgagaaaataaatttctgtttaagccac

SEQ ID NO: 23083 - DNA, 5824 bp, Homo sapiens
tggggtaggggcggcgccgagtcgggggagggggctgtgcgccgggctggcgcccgaccccagccaccgccctgcggccagcgcgtcccccgactcgccgcccggagaccccgaggctccaacgagttcagaaatgtccagaaatgacaaagaaccgttttttgtgaagtttttaaagtcttcagacaattccaaatgtttttttaaagctctcgagtccataaaagaattccaatcagaagaatatcttcagattattacagaagaagaggcattgaagataaaggagaatgatagatcactttatatctgtgacccttttagtggcgttgtctttgatcacctcaaaaagcttggctgcagaattgttggtcctcaagtagtcatattttgtatgcaccaccagcgatgtgtcccaagagccgaacatccagtttataatatggttatgtctgatgtaaccatatcttgtacaagtctggaaaaagaaaaaagggaagaagttcataaatatgtacaaatgatgggcggacgagtatacagagaccttaatgtatcagtaactcaccttattgcaggagaagttggtagcaaaaaatatttagttgctgcaaacctgaagaaacctattttgcttccctcttggataaaaacactttgggagaagtcacaagagaaaaaaataactagatatactgatataaacatggaagatttcaagtgtcctatttttcttggttgcataatctgtgtgactggcttatgtggcttagacaggaaagaagttcagcaactcacagttaagcatggaggtcaatacatgggacaattgaaaatgaatgaatgtacacacctcattgtgcaagaaccaaaaggtcagaagtatgagtgtgccaagagatggaatgtacactgtgtgaccacacagtggttttttgacagtattgagaaaggtttttgtcaggatgaatccatatacaagacagaacctagaccagaagcaaagactatgcccaattcttcaactcctaccagccagatcaacacaattgatagtcgtactctttcagatgtcagcaatatttccaacataaatgcaagttgcgtaagtgaatcaatatgtaattcacttaacagcaaactggagcctacacttgaaaatctagaaaatctggatgtcagtgcatttcaagcacctgaagatttattagatggttgtcggatatatctttgcggttttagtggcagaaagctagataaactgagaagacttattaacagtggaggtggagttcgttttaaccagctaaatgaagatgtaactcatgttattgtgggagattatgatgatgaattgaagcagttttggaataaatcagcccacaggcctcatgtagtgggagcaaagtggttgctagagtgtttcagtaaaggttatatgctttctgaagaaccatatatccatgctaattaccagccagtggaaattccagtttcacatcagcctgaaagtaaagcagctcttttaaaaaagaagaacagcagcttctctaagaaagactttgctcctagtgaaaagcatgagcaagctgatgaagatctgctctctcaatatgaaaatggtagctccacagtagttgaggctaagacgtctgaagccaggccctttaatgattctactcatgctgagcccttgaatgattctactcacatttctttgcaagaagaaaaccagtcttctgtcagtcattgtgtccctgatgtttctacaattactgaagaaggcttatttagccaaaagagtttccttgttttgggttttagtaatgaaaatgaatctaacatcgcaaacatcataaaagaaaatgctgggaaaatcatgtcccttctgagcagaactgttgcggattatgctgtggttcctctgctggggtgtgaagtggaagccactgtgggagaagttgttacaaatacatggctggttacttgcatagactatcagactttgtttgatccaaagtcgaatcctctcttcacaccagttccagtaatgacaggaatgactcctttagaggattgtgttatttcatttagccagtgtgctggagcagaaaaagagtctttaacattcctagcaaacctccttggagcaagtgttcaagaatactttgttcgcaaatccaatgcaaagaaaggcatgtttgccagtactcatcttatactgaaagaacgtggtggctctaaatatgaagctgcaaagaagtggaatttacctgccgttactatagcttggctgttggagactgctagaacgggaaagagagcagacgaaagccattttctgattgaaaattcaactaaagaagaacgaagtttggaaacagaaataacaaatggaatcaatctaaattcagatactgcagagcatcctggcacacgcctgcaaactcacagaaaaaccgtcgttacacctttagatatgaaccgctttcagagtaaagctttccgtgctgtggtctcacaacatgccagacaggtcgcagcctccccagcagtaggacaaccacttcagaaggagccctcgttacacctggatacaccatcaaaattcctgtccaaggacaaactcttcaagccttcctttgatgtgaaggatgcacttgcagccttggaaactccaggacgtcccagccaacagaaaaggaaaccgagtacgccactctcagaagttattgtcaaaaacttgcaacttgctttggcaaatagctctcgaaatgctgtcgctctttctgccagccctcaactgaaagaggcccagtcagagaaggaagaagccccaaagccacttcacaaagtagtggtatgtgttagtaaaaaactcagtaagaagcagagtgaactaaatgggatcgcagcctctctaggagcagattacaggtggagttttgatgaaacagtgactcatttcatctatcaagggcggccaaatgacactaatcgggagtataaatctgtaaaagaaagaggagtacacattgtttccgagcactggcttttagattgtgcccaagagtgtaaacatcttcctgaatctctttatccacatacttataatcccaaaatgagcttggatatcagcgcagtgcaagatggccggctctgtaatagtcgactactctcagctgtgtcttcaacaaaggatgatgagccagatcctttgattttagaagaaaatgatgtagacaatatggccaccaataataaagagtcagcaccatcaaatggaagtggaaagaatgactctaaaggagttctgacacagaccttagagatgagagagaactttcagaagcagttacaggagataatgtctgcaacatcaatagtgaaaccccaagggcagaggacttccctttcaagaagtggttgtaacagcgcatcttcaacccctgacagcactcgctctgctcgcagtggacgaagtagagtcctagaggcactgaggcagtctcgtcagacagtacctgatgtcaacacagagccttcccaaaatgaacagatcatttgggatgaccctacagcaagggaggagagagcaaggcttgccagcaatttgcagtggcctagttgtcccacacaatactctgagcttcaggttgacattcaaaacttggaggattctccttttcaaaagcctttacatgattcagaaattgctaaacagggtaacaagaaagaaatctttgcatttgtttgtattaagtacatgttgacctcttaaaaataaacagatgagcatgttgtagttctctgatctgaatgtgcaaacaaaaaaaacttcgtagatatttctggttttggtttaaacttgagccagaaaaataatttgtaaattgaggtacttcatcagtaaattgaaaaacattttcataaatttggaaatttagaattgggcgtttttttctagacatggtgtctaccattgttcttttattctagctaaccctttttgtgtttgtggagttaatgcttggtttttcttcctatcatcttattttcatttaagtcttttgaattctgcctagcacatacctacatttgttctttggattgtatgagtttctttctgaattctcctattttttttcttccttgagctttaccttaaaaacaaaattttcctatctctcatcttttttcttccttttcttctttttcacattgcatgatgacctcccattagatatatagatttatctctgcttctgcttttctccaagtgtagaattgctctcatgttacaaatttgggttacacttaacaatgaaaacttggtatttaaggaaaatgttgggagaagcccacagataacacacttgctctgtttaatgctaataaattgcattttttctttattgttattattgtcacatgcagatgggatgcatttatttataagttctggggataggatacttttttgcctgtactttttacattccagagtttgtgcttgacttcatcttgactaagacagatgagaatatttcctagaatttgtttttagtcttatttggatcctgtcacactgcagcattttattgtcctcagctgtctgtgatcctggaaacatacgtgtgactgaagctcccaaacacccaatctctgaagaactggaaactcccataaaagacagccacctgatccctacgcctcaagcccccagtattgcctttccactcgccaacccccctgtggctccgcaccctagagaaaagattataacgatagaggagactcatgaagaattaaaaaaacagtacatatttcagttatcatctctgaatcctcaagaacgtattgactattgtcatctgattgagaaactaggtggattggtgatagaaaagcagtgctttgatcccacctgtacacacattgttgtgggacatccacttcgaaacgagaagtatttagcctcagtggcagctgggaagtgggtgcttcatcgctcctaccttgaagcctgcaggactgctggacacttcgtgcaggaagaagactatgaatggggaagtagttccatacttgatgttttgactggaatcaatgtacagcaacgaagactagcacttgcagcaatgagatggagaaaaaaaatccagcaaagacaagaatctggcattgttgagggagcatttagtgggtggaaggttattttacatgtggatcagtctcgagaagcaggcttcaaacgccttcttcagtcaggaggagcaaaggtgctacctggtcattctgtacctttatttaaagaggccacacatcttttttctgacttgaataaactgaaaccagatgactcaggagttaatatagcagaagctgctgcccagaacgtgtactgcttgagaacagaatacattgctgattatctcatgcaggtttgtgagattctatccttgacctcctcattaccagagatacgtttatgtgcatagataagtaactgcacaacaaaaccttcagctcatgattagtagaagattagtctcctgttattctcttctattccagccctttcagttttattctatttgtgttttttattataatgaacatattatgtaaacatttagcttggaagttaaatatgagaagagtataaaaatctaggtacctctaaaggctttaaaaataccctttaaaatgttggaatataaagcagaaatcgattccaggagtccaaggagaaacatttatccaaaggtcctttagttttcttgactgtttgctttcatgtacattaaatacctatgttaga

SEQ ID NO: 23084 - DNA, 5384 bp, Homo sapiens
tggggtaggggcggcgccgagtcgggggagggggctgtgcgccgggctggcgcccgaccccagccaccgccctgcggccagcgcgtcccccgactcgccgcccggagaccccgaggctccaacgagttcagaaatgtccagaaatgacaaagaaccgttttttgtgaagtttttaaagtcttcagacaattccaaatgtttttttaaagctctcgagtccataaaagaattccaatcagaagaatatcttcagattattacagaagaagaggcattgaagataaaggagaatgatagatcactttatatctgtgacccttttagtggcgttgtctttgatcacctcaaaaagcttggctgcagaattgttggtcctcaagtagtcatattttgtatgcaccaccagcgatgtgtcccaagagccgaacatccagtttataatatggttatgtctgatgtaaccatatcttgtacaagtctggaaaaagaaaaaagggaagaagttcataaatatgtacaaatgatgggcggacgagtatacagagaccttaatgtatcagtaactcaccttattgcaggagaagttggtagcaaaaaatatttagttgctgcaaacctgaagaaacctattttgcttccctcttggataaaaacactttgggagaagtcacaagagaaaaaaataactagatatactgatataaacatggaagatttcaagtgtcctatttttcttggttgcataatctgtgtgactggcttatgtggcttagacaggaaagaagttcagcaactcacagttaagcatggaggtcaatacatgggacaattgaaaatgaatgaatgtacacacctcattgtgcaagaaccaaaaggtcagaagtatgagtgtgccaagagatggaatgtacactgtgtgaccacacagtggttttttgacagtattgagaaaggtttttgtcaggatgaatccatatacaagacagaacctagaccagaagcaaagactatgcccaattcttcaactcctaccagccagatcaacacaattgatagtcgtactctttcagatgtcagcaatatttccaacataaatgcaagttgcgtaagtgaatcaatatgtaattcacttaacagcaaactggagcctacacttgaaaatctagaaaatctggatgtcagtgcatttcaagcacctgaagatttattagatggttgtcggatatatctttgcggttttagtggcagaaagctagataaactgagaagacttattaacagtggaggtggagttcgttttaaccagctaaatgaagatgtaactcatgttattgtgggagattatgatgatgaattgaagcagttttggaataaatcagcccacaggcctcatgtagtgggagcaaagtggttgctagagtgtttcagtaaaggttatatgctttctgaagaaccatatatccatgctaattaccagccagtggaaattccagtttcacatcagcctgaaagtaaagcagctcttttaaaaaagaagaacagcagcttctctaagaaagactttgctcctagtgaaaagcatgagcaagctgatgaagatctgctctctcaatatgaaaatggtagctccacagtagttgaggctaagacgtctgaagccaggccctttaatgattctactcatgctgagcccttgaatgattctactcacatttctttgcaagaagaaaaccagtcttctgtcagtcattgtgtccctgatgtttctacaattactgaagaaggcttatttagccaaaagagtttccttgttttgggttttagtaatgaaaatgaatctaacatcgcaaacatcataaaagaaaatgctgggaaaatcatgtcccttctgagcagaactgttgcggattatgctgtggttcctctgctggggtgtgaagtggaagccactgtgggagaagttgttacaaatacatggctggttacttgcatagactatcagactttgtttgatccaaagtcgaatcctctcttcacaccagttccagtaatgacaggaatgactcctttagaggattgtgttatttcatttagccagtgtgctggagcagaaaaagagtctttaacattcctagcaaacctccttggagcaagtgttcaagaatactttgttcgcaaatccaatgcaaagaaaggcatgtttgccagtactcatcttatactgaaagaacgtggtggctctaaatatgaagctgcaaagaagtggaatttacctgccgttactatagcttggctgttggagactgctagaacgggaaagagagcagacgaaagccattttctgattgaaaattcaactaaagaagaacgaagtttggaaacagaaataacaaatggaatcaatctaaattcagatactgcagagcatcctggcacacgcctgcaaactcacagaaaaaccgtcgttacacctttagatatgaaccgctttcagagtaaagctttccgtgctgtggtctcacaacatgccagacaggtcgcagcctccccagcagtaggacaaccacttcagaaggagccctcgttacacctggatacaccatcaaaattcctgtccaaggacaaactcttcaagccttcctttgatgtgaaggatgcacttgcagccttggaaactccaggacgtcccagccaacagaaaaggaaaccgagtacgccactctcagaagttattgtcaaaaacttgcaacttgctttggcaaatagctctcgaaatgctgtcgctctttctgccagccctcaactgaaagaggcccagtcagagaaggaagaagccccaaagccacttcacaaagtagtggtatgtgttagtaaaaaactcagtaagaagcagagtgaactaaatgggatcgcagcctctctaggagcagattacaggtggagttttgatgaaacagtgactcatttcatctatcaagggcggccaaatgacactaatcgggagtataaatctgtaaaagaaagaggagtacacattgtttccgagcactggcttttagattgtgcccaagagtgtaaacatcttcctgaatctctttatccacatacttataatcccaaaatgagcttggatatcagcgcagtgcaagatggccggctctgtaatagtcgactactctcagctgtgtcttcaacaaaggatgatgagccagatcctttgattttagaagaaaatgatgtagacaatatggccaccaataataaagagtcagcaccatcaaatggaagtggaaagaatgactctaaaggagttctgacacagaccttagagatgagagagaactttcagaagcagttacaggagataatgtctgcaacatcaatagtgaaaccccaagggcagaggacttccctttcaagaagtggttgtaacagcgcatcttcaacccctgacagcactcgctctgctcgcagtggacgaagtagagtcctagaggcactgaggcagtctcgtcagacagtacctgatgtcaacacagagccttcccaaaatgaacagatcatttgggatgaccctacagcaagggaggagagagcaaggcttgccagcaatttgcagtggcctagttgtcccacacaatactctgagcttcaggttgacattcaaaacttggaggattctccttttcaaaagcctttacatgattcagaaattgctaaacagggtaacaagaaagaaatctttgcatttgtttgtattaagtacatgttgacctcttaaaaataaacagatgagcatgttgtagttctctgatctgaatgtgcaaacaaaaaaaacttcgtagatatttctggttttggtttaaacttgagccagaaaaataatttgtaaattgaggtacttcatcagtaaattgaaaaacattttcataaatttggaaatttagaattgggcgtttttttctagacatggtgtctaccattgttcttttattctagctaaccctttttgtgtttgtggagttaatgcttggtttttcttcctatcatcttattttcatttaagtcttttgaattctgcctagcacatacctacatttgttctttggattgtatgagtttctttctgaattctcctattttttttcttccttgagctttaccttaaaaacaaaattttcctatctctcatcttttttcttccttttcttctttttcacattgcatgatgacctcccattagatatatagatttatctctgcttctgcttttctccaagtgtagaattgctctcatgttacaaatttgggttacacttaacaatgaaaacttggtatttaaggaaaatgttgggagaagcccacagataacacacttgctctgtttaatgctaataaattgcattttttctttattgttattattgtcacatgcagatgggatgcatttatttataagttctggggataggatacttttttgcctgtactttttacattccagagtttgtgcttgacttcatcttgactaagacagatgagaatatttcctagaatttgtttttagtcttatttggatcctgtcacactgcagcattttattgtcctcagctgtctgtgatcctggaaacatacgtgtgactgaagctcccaaacacccaatctctgaagaactggaaactcccataaaagacagccacctgatccctacgcctcaagcccccagtattgcctttccactcgccaacccccctgtggctccgcaccctagagaaaagattataacgatagaggagactcatgaagaattaaaaaaacagtacatatttcagttatcatctctgaatcctcaagaacgtattgactattgtcatctgattgagaaactaggtggattggtgatagaaaagcagtgctttgatcccacctgtacacacattgttgtgggacatccacttcgaaacgagaagtatttagcctcagtggcagctgggaagtgggtgcttcatcgctcctaccttgaagcctgcaggactgctggacacttcgtgcaggtgtgtattcagatttgtggaagtttatttttctttaaaagcaagtgtccaccgggtgcagtggctcacacctgttatcctagcactttgggaggccgaggtgggtggatcacctgagatcaggagttcgagacatgcctggccaacatggtgaaaccctctctactaaaactacaaagattagccaggcatggtggtgagtgcctgtaatcccagttactcaggaggctgaggcaggagaatcacttgaacccagaaggcagaggttgcagtgagccgagatcatgccattgtactccagcctgggccacaagagtgagaccctatcta

SEQ ID NO: 23085 - DNA, 1873 bp, Homo sapiens
ctagttatgtgacattggttgttttcatttaaccttttttattttatctcaaaaatggggattaaaaacaccgatatgaaatgtttgtaagatctgagctagtcccactctacctgaaccatacacgtatttctttgataaaaggtgagactttgtcccacagggtccattttgtttaatttgctggaacctaggaatgaatatgcgttttcctttaagtttgtcagattcatccctgagaggtctgagatttaaagaaaaaatctattaccagatcacgtaaatgtttgaaatcattttaaaaaatcacttatttttccttttataggaatcacctcctcatgtagaaaattactgtctaccagaagctatttcatttattcagaataataaggaacttgggactggattatcacaaaagaggaaagctcctacagaaaaaaataaaatcaaacgacctagagtacactaatcgcatctaccctttagttaccaaacattaaatgtttttaaaaattgaaagcctgaatgtgactgtgatagatttgggtagtaatttaaagatgagtacctgaagaattctgcttcagagtataatgatgacccttcttgagttttgaacacctgaaattgtaatcactgaaatattaactgtttcttaataaaaagttacctgaaataacaacaaaatacaactcctcagctagcttgctgttaaaccacattgaagtctgttaaaagatatttatttttcttgtaaatatctgaagctgtagcttagtggaaattttagcaaggtaatggattttgctttaaaatgtctgccttacaaattcataacaacaagatttgtcagtcagcatttattcatgttttccctgatttttatcttctcaccattttacctcttttaacaggagcctgagcacaaggtttaatgaggaagctggggctataaatatgtgtgtatatatgtatatgtatgtttgtacaaatctccatgatgtttgccaagtttgaatgcgcaaaacttggaaaatgtgacaataaagaataaaagtagtaactcaaattagtattaagatgtgtttacatagataaattttttaaaagagcaccctggcatctgttcttctgttgaagcaacaaaacatttatgtaacgtaaaaaatgaattgcaggggcctgggtgcggtggctcgtgcctgtaatcccagcactttgggaggctgaggcaggcggatcgtctgaggtcgggagtttgagaccagcctgaccaacatggagaaacctcatctgtactaaaaatacaaaaaattagcccagtgtggtggcacatgcctgtaatcccagctactcaggaggctgaggcaggagaatcgcttgaacccgggaggcggaggttgcggtgagctgagatcgcgccattgcactccagcctgggcaacaagagcgaaactccatctcaaaaaaaaaaaaaaaaagaattgcaggccaggcacggtggctcatgcttgtaatcccaccactttgggaggccaaggtgggtggactgcttgaacccagaagttcaagaccagcctggacaacatggcgaaaccccatctctgcaaaaaatagcaaaaaattagccgggcatgctgtttgatgcttgtagtcccagctacttgggaggctgaggcatgagaattacttgaactcaggaggcagaggttgcagtgagctgaaatcatgccactgcaactccagcctgggtgacagaatgagaccctgtctcaaaaaaaataaatgaattgcttaacatttctgatatttgttatttagaatattgccctattagattaaaacatactgttattggaactctgtattg

SEQ ID NO: 23086 - DNA, 4631 bp, Homo sapiens
tggggtaggggcggcgccgagtcgggggagggggctgtgcgccgggctggcgcccgaccccagccaccgccctgcggccagcgcgtcccccgactcgccgcccggagaccccgaggctccaacgagttcagaaatgtccagaaatgacaaagaaccgttttttgtgaagtttttaaagtcttcagacaattccaaatgtttttttaaagctctcgagtccataaaagaattccaatcagaagaatatcttcagattattacagaagaagaggcattgaagataaaggagaatgatagatcactttatatctgtgacccttttagtggcgttgtctttgatcacctcaaaaagcttggctgcagaattgttggtcctcaagtagtcatattttgtatgcaccaccagcgatgtgtcccaagagccgaacatccagtttataatatggttatgtctgatgtaaccatatcttgtacaagtctggaaaaagaaaaaagggaagaagttcataaatatgtacaaatgatgggcggacgagtatacagagaccttaatgtatcagtaactcaccttattgcaggagaagttggtagcaaaaaatatttagttgctgcaaacctgaagaaacctattttgcttccctcttggataaaaacactttgggagaagtcacaagagaaaaaaataactagatatactgatataaacatggaagatttcaagtgtcctatttttcttggttgcataatctgtgtgactggcttatgtggcttagacaggaaagaagttcagcaactcacagttaagcatggaggtcaatacatgggacaattgaaaatgaatgaatgtacacacctcattgtgcaagaaccaaaaggtcagaagtatgagtgtgccaagagatggaatgtacactgtgtgaccacacagtggttttttgacagtattgagaaaggtttttgtcaggatgaatccatatacaagacagaacctagaccagaagcaaagactatgcccaattcttcaactcctaccagccagatcaacacaattgatagtcgtactctttcagatgtcagcaatatttccaacataaatgcaagttgcgtaagtgaatcaatatgtaattcacttaacagcaaactggagcctacacttgaaaatctagaaaatctggatgtcagtgcatttcaagcacctgaagatttattagatggttgtcggatatatctttgcggttttagtggcagaaagctagataaactgagaagacttattaacagtggaggtggagttcgttttaaccagctaaatgaagatgtaactcatgttattgtgggagattatgatgatgaattgaagcagttttggaataaatcagcccacaggcctcatgtagtgggagcaaagtggttgctagagtgtttcagtaaaggttatatgctttctgaagaaccatatatccatgctaattaccagccagtggaaattccagtttcacatcagcctgaaagtaaagcagctcttttaaaaaagaagaacagcagcttctctaagaaagactttgctcctagtgaaaagcatgagcaagctgatgaagatctgctctctcaatatgaaaatggtagctccacagtagttgaggctaagacgtctgaagccaggccctttaatgattctactcatgctgagcccttgaatgattctactcacatttctttgcaagaagaaaaccagtcttctgtcagtcattgtgtccctgatgtttctacaattactgaagaaggcttatttagccaaaagagtttccttgttttgggttttagtaatgaaaatgaatctaacatcgcaaacatcataaaagaaaatgctgggaaaatcatgtcccttctgagcagaactgttgcggattatgctgtggttcctctgctggggtgtgaagtggaagccactgtgggagaagttgttacaaatacatggctggttacttgcatagactatcagactttgtttgatccaaagtcgaatcctctcttcacaccagttccagtaatgacaggaatgactcctttagaggattgtgttatttcatttagccagtgtgctggagcagaaaaagagtctttaacattcctagcaaacctccttggagcaagtgttcaagaatactttgttcgcaaatccaatgcaaagaaaggcatgtttgccagtactcatcttatactgaaagaacgtggtggctctaaatatgaagctgcaaagaagtggaatttacctgccgttactatagcttggctgttggagactgctagaacgggaaagagagcagacgaaagccattttctgattgaaaattcaactaaagaagaacgaagtttggaaacagaaataacaaatggaatcaatctaaattcagatactgcagagcatcctggcacacgcctgcaaactcacagaaaaaccgtcgttacacctttagatatgaaccgctttcagagtaaagctttccgtgctgtggtctcacaacatgccagacaggtcgcagcctccccagcagtaggacaaccacttcagaaggagccctcgttacacctggatacaccatcaaaattcctgtccaaggacaaactcttcaagccttcctttgatgtgaaggatgcacttgcagccttggaaactccaggacgtcccagccaacagaaaaggaaaccgagtacgccactctcagaagttattgtcaaaaacttgcaacttgctttggcaaatagctctcgaaatgctgtcgctctttctgccagccctcaactgaaagaggcccagtcagagaaggaagaagccccaaagccacttcacaaagtagtggtatgtgttagtaaaaaactcagtaagaagcagagtgaactaaatgggatcgcagcctctctaggagcagattacaggtggagttttgatgaaacagtgactcatttcatctatcaagggcggccaaatgacactaatcgggagtataaatctgtaaaagaaagaggagtacacattgtttccgagcactggcttttagattgtgcccaagagtgtaaacatcttcctgaatctctttatccacatacttataatcccaaaatgagcttggatatcagcgcagtgcaagatggccggctctgtaatagtcgactactctcagctgtgtcttcaacaaaggatgatgagccagatcctttgattttagaagaaaatgatgtagacaatatggccaccaataataaagagtcagcaccatcaaatggaagtggaaagaatgactctaaaggagttctgacacagaccttagagatgagagagaactttcagaagcagttacaggagataatgtctgcaacatcaatagtgaaaccccaagggcagaggacttccctttcaagaagtggttgtaacagcgcatcttcaacccctgacagcactcgctctgctcgcagtggacgaagtagagtcctagaggcactgaggcagtctcgtcagacagtacctgatgtcaacacagagccttcccaaaatgaacagatcatttgggatgaccctacagcaagggaggagagagcaaggcttgccagcaatttgcagtggcctagttgtcccacacaatactctgagcttcaggttgacattcaaaacttggaggattctccttttcaaaagcctttacatgattcagaaattgctaaacagggtaacaagaaagaaatctttgcatttgtttgtattaagtacatgttgacctcttaaaaataaacagatgagcatgttgtagttctctgatctgaatgtgcaaacaaaaaaaacttcgtagatatttctggttttggtttaaacttgagccagaaaaataatttgtaaattgaggtacttcatcagtaaattgaaaaacattttcataaatttggaaatttagaattgggcgtttttttctagacatggtgtctaccattgttcttttattctagctaaccctttttgtgtttgtggagttaatgcttggtttttcttcctatcatcttattttcatttaagtcttttgaattctgcctagcacatacctacatttgttctttggattgtatgagtttctttctgaattctcctattttttttcttccttgagctttaccttaaaaacaaaattttcctatctctcatcttttttcttccttttcttctttttcacattgcatgatgacctcccattagatatatagatttatctctgcttctgcttttctccaagtgtagaattgctctcatgttacaaatttgggttacacttaacaatgaaaacttggtatttaaggaaaatgttgggagaagcccacagataacacacttgctctgtttaatgctaataaattgcattttttctttattgttattattgtcacatgcagatgggattacaggcaaatgccaccacgtgtggctaatttttgtatttttagtagagatgaggtttagccatgttgaccaggctggtctcgaattcctgacctcaagtgatctgccctcctcggcctcccaaagtgctgggattacacgaatgagccaccacgcctggcctagttaaaatatttttaaaattaaa

SEQ ID NO: 23087 - DNA, 1606 bp, Homo sapiens
ctgaaatattaactgtttcttaataaaaagttacctgaaataacaacaaaatacaactcctcagctagcttgctgttaaaccacatgaagtctgttaaaagctatttcatttattcagaataataaggaacttgggactggattatcacaaaagaggaaagctcctacagaaaaaaataaaatcaaacgacctagagtacactaatcgcatctaccctttagttaccaaacattaaatgtttttaaaaattgaaagcctgaatgtgactgtgatagatttgggtagtaatttaaagatgagtacctgaagaattctgcttcagagtataatgatgacccttcttgagttttgaacacctgaaattgtaatcactgaaatattaactgtttcttaataaaaagttacctgaaataacaacaaaatacaactcctcagctagcttgctgttaaaccacattgaagtctgttaaaagatatttatttttcttgtaaatatctgaagctgtagcttagtggaaattttagcaaggtaatggattttgctttaaaatgtctgccttacaaattcataacaacaagatttgtcagtcagcatttattcatgttttccctgatttttatcttctcaccattttacctcttttaacaggagcctgagcacaaggtttaatgaggaagctggggctataaatatgtgtgtatatatgtatatgtatgtttgtacaaatctccatgatgtttgccaagtttgaatgcgcaaaacttggaaaatgtgacaataaagaataaaagtagtaactcaaattagtattaagatgtgtttacatagataaattttttaaaagagcaccctggcatctgttcttctgttgaagcaacaaaacatttatgtaacgtaaaaaatgaattgcaggggcctgggtgcggtggctcgtgcctgtaatcccagcactttgggaggctgaggcaggcggatcgtctgaggtcgggagtttgagaccagcctgaccaacatggagaaacctcatctgtactaaaaatacaaaaaattagcccagtgtggtggcacatgcctgtaatcccagctactcaggaggctgaggcaggagaatcgcttgaacccgggaggcggaggttgcggtgagctgagatcgcgccattgcactccagcctgggcaacaagagcgaaactccatctcaaaaaaaaaaaaaaaaagaattgcaggccaggcacggtggctcatgcttgtaatcccaccactttgggaggccaaggtgggtggactgcttgaacccagaagttcaagaccagcctggacaacatggcgaaaccccatctctgcaaaaaatagcaaaaaattagccgggcatgctgtttgatgcttgtagtcccagctacttgggaggctgaggcatgagaattacttgaactcaggaggcagaggttgcagtgagctgaaatcatgccactgcaactccagcctgggtgacagaatgagaccctgtctcaaaaaaaataaatgaattgcttaacatttctgatatttgttatttagaatattgccctattagattaaaacatactgttattggaactctgtattg

SEQ ID NO: 23088 - DNA, 4186 bp, Homo sapiens
tggggtaggggcggcgccgagtcgggggagggggctgtgcgccgggctggcgcccgaccccagccaccgccctgcggccagcgcgtcccccgactcgccgcccggagaccccgaggctccaacgagttcagaaatgtccagaaatgacaaagaaccgttttttgtgaagtttttaaagtcttcagacaattccaaatgtttttttaaagctctcgagtccataaaagaattccaatcagaagaatatcttcagattattacagaagaagaggcattgaagataaaggagaatgatagatcactttatatctgtgacccttttagtggcgttgtctttgatcacctcaaaaagcttggctgcagaattgttggtcctcaagtagtcatattttgtatgcaccaccagcgatgtgtcccaagagccgaacatccagtttataatatggttatgtctgatgtaaccatatcttgtacaagtctggaaaaagaaaaaagggaagaagttcataaatatgtacaaatgatgggcggacgagtatacagagaccttaatgtatcagtaactcaccttattgcaggagaagttggtagcaaaaaatatttagttgctgcaaacctgaagaaacctattttgcttccctcttggataaaaacactttgggagaagtcacaagagaaaaaaataactagatatactgatataaacatggaagatttcaagtgtcctatttttcttggttgcataatctgtgtgactggcttatgtggcttagacaggaaagaagttcagcaactcacagttaagcatggaggtcaatacatgggacaattgaaaatgaatgaatgtacacacctcattgtgcaagaaccaaaaggtcagaagtatgagtgtgccaagagatggaatgtacactgtgtgaccacacagtggttttttgacagtattgagaaaggtttttgtcaggatgaatccatatacaagacagaacctagaccagaagcaaagactatgcccaattcttcaactcctaccagccagatcaacacaattgatagtcgtactctttcagatgtcagcaatatttccaacataaatgcaagttgcgtaagtgaatcaatatgtaattcacttaacagcaaactggagcctacacttgaaaatctagaaaatctggatgtcagtgcatttcaagcacctgaagatttattagatggttgtcggatatatctttgcggttttagtggcagaaagctagataaactgagaagacttattaacagtggaggtggagttcgttttaaccagctaaatgaagatgtaactcatgttattgtgggagattatgatgatgaattgaagcagttttggaataaatcagcccacaggcctcatgtagtgggagcaaagtggttgctagagtgtttcagtaaaggttatatgctttctgaagaaccatatatccatgctaattaccagccagtggaaattccagtttcacatcagcctgaaagtaaagcagctcttttaaaaaagaagaacagcagcttctctaagaaagactttgctcctagtgaaaagcatgagcaagctgatgaagatctgctctctcaatatgaaaatggtagctccacagtagttgaggctaagacgtctgaagccaggccctttaatgattctactcatgctgagcccttgaatgattctactcacatttctttgcaagaagaaaaccagtcttctgtcagtcattgtgtccctgatgtttctacaattactgaagaaggcttatttagccaaaagagtttccttgttttgggttttagtaatgaaaatgaatctaacatcgcaaacatcataaaagaaaatgctgggaaaatcatgtcccttctgagcagaactgttgcggattatgctgtggttcctctgctggggtgtgaagtggaagccactgtgggagaagttgttacaaatacatggctggttacttgcatagactatcagactttgtttgatccaaagtcgaatcctctcttcacaccagttccagtaatgacaggaatgactcctttagaggattgtgttatttcatttagccagtgtgctggagcagaaaaagagtctttaacattcctagcaaacctccttggagcaagtgttcaagaatactttgttcgcaaatccaatgcaaagaaaggcatgtttgccagtactcatcttatactgaaagaacgtggtggctctaaatatgaagctgcaaagaagtggaatttacctgccgttactatagcttggctgttggagactgctagaacgggaaagagagcagacgaaagccattttctgattgaaaattcaactaaagaagaacgaagtttggaaacagaaataacaaatggaatcaatctaaattcagatactgcagagcatcctggcacacgcctgcaaactcacagaaaaaccgtcgttacacctttagatatgaaccgctttcagagtaaagctttccgtgctgtggtctcacaacatgccagacaggtcgcagcctccccagcagtaggacaaccacttcagaaggagccctcgttacacctggatacaccatcaaaattcctgtccaaggacaaactcttcaagccttcctttgatgtgaaggatgcacttgcagccttggaaactccaggacgtcccagccaacagaaaaggaaaccgagtacgccactctcagaagttattgtcaaaaacttgcaacttgctttggcaaatagctctcgaaatgctgtcgctctttctgccagccctcaactgaaagaggcccagtcagagaaggaagaagccccaaagccacttcacaaagtagtggtatgtgttagtaaaaaactcagtaagaagcagagtgaactaaatgggatcgcagcctctctaggagcagattacaggtggagttttgatgaaacagtgactcatttcatctatcaagggcggccaaatgacactaatcgggagtataaatctgtaaaagaaagaggagtacacattgtttccgagcactggcttttagattgtgcccaagagtgtaaacatcttcctgaatctctttatccacatacttataatcccaaaatgagcttggatatcagcgcagtgcaagatggccggctctgtaatagtcgactactctcagctgtgtcttcaacaaaggatgatgagccagatcctttgattttagaagaaaatgatgtagacaatatggccaccaataataaagagtcagcaccatcaaatggaagtggaaagaatgactctaaaggagttctgacacagaccttagagatgagagagaactttcagaagcagttacaggagataatgtctgcaacatcaatagtgaaaccccaagggcagaggacttccctttcaagaagtggttgtaacagcgcatcttcaacccctgacagcactcgctctgctcgcagtggacgaagtagagtcctagaggcactgaggcagtctcgtcagacagtacctgatgtcaacacagagccttcccaaaatgaacagatcatttgggatgaccctacagcaagggaggagagagcaaggcttgccagcaatttgcagtggcctagttgtcccacacaatactctgagcttcaggttgacattcaaaacttggaggattctccttttcaaaagcctttacatgattcagaaattgctaaacagggtaacaagaaagaaatctttgcatttgtttgtattaagtacatgttgacctcttaaaaataaacagatgagcatgttgtagttctctgatctgaatgtgcaaacaaaaaaaaaaaaaaaaaaaaaaaaaaaaatttgtggggggtggggcggaaggaaggtttctcacaacacccattccgtgttggggccccgccgagcccagaggtggtagctgcaaaaactgtgccgacacacgcgtgggtccccataagaaaagaacccggggccaaggagactaaggcggctgggagttgcccccaataaaaaaaccgccgggggagcacaaaccaaggccgggtctgttgaacacaacccacagaagggaggtccaggcgggacatacacgagattgattcaaggaagcgggaggccccaagggacgaccaaattataaattagcggcgccacgtgagggagtgt

SEQ ID NO: 23089 - DNA, 3844 bp, Homo sapiens
  misc_feature (3836)..(3836): n is a, c, g, or t
tggggtaggggcggcgccgagtcgggggagggggctgtgcgccgggctggcgcccgaccccagccaccgccctgcggccagcgcgtcccccgactcgccgcccggagaccccgaggctccaacgagttcagaaatgtccagaaatgacaaagaaccgttttttgtgaagtttttaaagtcttcagacaattccaaatgtttttttaaagctctcgagtccataaaagaattccaatcagaagaatatcttcagattattacagaagaagaggcattgaagataaaggagaatgatagatcactttatatctgtgacccttttagtggcgttgtctttgatcacctcaaaaagcttggctgcagaattgttggtcctcaagtagtcatattttgtatgcaccaccagcgatgtgtcccaagagccgaacatccagtttataatatggttatgtctgatgtaaccatatcttgtacaagtctggaaaaagaaaaaagggaagaagttcataaatatgtacaaatgatgggcggacgagtatacagagaccttaatgtatcagtaactcaccttattgcaggagaagttggtagcaaaaaatatttagttgctgcaaacctgaagaaacctattttgcttccctcttggataaaaacactttgggagaagtcacaagagaaaaaaataactagatatactgatataaacatggaagatttcaagtgtcctatttttcttggttgcataatctgtgtgactggcttatgtggcttagacaggaaagaagttcagcaactcacagttaagcatggaggtcaatacatgggacaattgaaaatgaatgaatgtacacacctcattgtgcaagaaccaaaaggtcagaagtatgagtgtgccaagagatggaatgtacactgtgtgaccacacagtggttttttgacagtattgagaaaggtttttgtcaggatgaatccatatacaagacagaacctagaccagaagcaaagactatgcccaattcttcaactcctaccagccagatcaacacaattgatagtcgtactctttcagatgtcagcaatatttccaacataaatgcaagttgcgtaagtgaatcaatatgtaattcacttaacagcaaactggagcctacacttgaaaatctagaaaatctggatgtcagtgcatttcaagcacctgaagatttattagatggttgtcggatatatctttgcggttttagtggcagaaagctagataaactgagaagacttattaacagtggaggtggagttcgttttaaccagctaaatgaagatgtaactcatgttattgtgggagattatgatgatgaattgaagcagttttggaataaatcagcccacaggcctcatgtagtgggagcaaagtggttgctagagtgtttcagtaaaggttatatgctttctgaagaaccatatatccatgctaattaccagccagtggaaattccagtttcacatcagcctgaaagtaaagcagctcttttaaaaaagaagaacagcagcttctctaagaaagactttgctcctagtgaaaagcatgagcaagctgatgaagatctgctctctcaatatgaaaatggtagctccacagtagttgaggctaagacgtctgaagccaggccctttaatgattctactcatgctgagcccttgaatgattctactcacatttctttgcaagaagaaaaccagtcttctgtcagtcattgtgtccctgatgtttctacaattactgaagaaggcttatttagccaaaagagtttccttgttttgggttttagtaatgaaaatgaatctaacatcgcaaacatcataaaagaaaatgctgggaaaatcatgtcccttctgagcagaactgttgcggattatgctgtggttcctctgctggggtgtgaagtggaagccactgtgggagaagttgttacaaatacatggctggttacttgcatagactatcagactttgtttgatccaaagtcgaatcctctcttcacaccagttccagtaatgacaggaatgactcctttagaggattgtgttatttcatttagccagtgtgctggagcagaaaaagagtctttaacattcctagcaaacctccttggagcaagtgttcaagaatactttgttcgcaaatccaatgcaaagaaaggcatgtttgccagtactcatcttatactgaaagaacgtggtggctctaaatatgaagctgcaaagaagtggaatttacctgccgttactatagcttggctgttggagactgctagaacgggaaagagagcagacgaaagccattttctgattgaaaattcaactaaagaagaacgaagtttggaaacagaaataacaaatggaatcaatctaaattcagatactgcagagcatcctggcacacgcctgcaaactcacagaaaaaccgtcgttacacctttagatatgaaccgctttcagagtaaagctttccgtgctgtggtctcacaacatgccagacaggtcgcagcctccccagcagtaggacaaccacttcagaaggagccctcgttacacctggatacaccatcaaaattcctgtccaaggacaaactcttcaagccttcctttgatgtgaaggatgcacttgcagccttggaaactccaggacgtcccagccaacagaaaaggaaaccgagtacgccactctcagaagttattgtcaaaaacttgcaacttgctttggcaaatagctctcgaaatgctgtcgctctttctgccagccctcaactgaaagaggcccagtcagagaaggaagaagccccaaagccacttcacaaagtagtggtatgtgttagtaaaaaactcagtaagaagcagagtgaactaaatgggatcgcagcctctctaggagcagattacaggtggagttttgatgaaacagtgactcatttcatctatcaagggcggccaaatgacactaatcgggagtataaatctgtaaaagaaagaggagtacacattgtttccgagcactggcttttagattgtgcccaagagtgtaaacatcttcctgaatctctttatccacatacttataatcccaaaatgagcttggatatcagcgcagtgcaagatggccggctctgtaatagtcgactactctcagctgtgtcttcaacaaaggatgatgagccagatcctttgattttagaagaaaatgatgtagacaatatggccaccaataataaagagtcagcaccatcaaatggaagtggaaagaatgactctaaaggagttctgacacagaccttagagatgagagagaactttcagaagcagttacaggagataatgtctgcaacatcaatagtgaaaccccaagggcagaggacttccctttcaagaagtggttgtaacagcgcatcttcaacccctgacagcactcgctctgctcgcagtggacgaagtagagtcctagaggcactgaggcagtctcgtcagacagtacctgatgtcaacacagagccttcccaaaatgaacagatcatttgggatgaccctacagcaagggaggagagagcaaggcttgccagcaatttgcagtggcctagttgtcccacacaatactctgagcttcaggttgacattcaaaacttggaggattctccttttcaaaagcctttacatgattcagaaattgctaaacaggctgtctgtgatcctggaaacatacgtgtgactgaagctcccaaacacccaatctctgaagaactggaaactcccataaaagacagccacctgatcccttctttcaaaacanaaaaaaaa

SEQ ID NO: 23090 - DNA, 3192 bp, Homo sapiens
tggggtaggggcggcgccgagtcgggggagggggctgtgcgccgggctggcgcccgaccccagccaccgccctgcggccagcgcgtcccccgactcgccgcccggagaccccgaggctccaacgagttcagaaatgtccagaaatgacaaagaaccgttttttgtgaagtttttaaagtcttcagacaattccaaatgtttttttaaagctctcgagtccataaaagaattccaatcagaagaatatcttcagattattacagaagaagaggcattgaagataaaggagaatgatagatcactttatatctgtgacccttttagtggcgttgtctttgatcacctcaaaaagcttggctgcagaattgttggtcctcaagtagtcatattttgtatgcaccaccagcgatgtgtcccaagagccgaacatccagtttataatatggttatgtctgatgtaaccatatcttgtacaagtctggaaaaagaaaaaagggaagaagttcataaatatgtacaaatgatgggcggacgagtatacagagaccttaatgtatcagtaactcaccttattgcaggagaagttggtagcaaaaaatatttagttgctgcaaacctgaagaaacctattttgcttccctcttggataaaaacactttgggagaagtcacaagagaaaaaaataactagatatactgatataaacatggaagatttcaagtgtcctatttttcttggttgcataatctgtgtgactggcttatgtggcttagacaggaaagaagttcagcaactcacagttaagcatggaggtcaatacatgggacaattgaaaatgaatgaatgtacacacctcattgtgcaagaaccaaaaggtcagaagtatgagtgtgccaagagatggaatgtacactgtgtgaccacacagtggttttttgacagtattgagaaaggtttttgtcaggatgaatccatatacaagacagaacctagaccagaagcaaagactatgcccaattcttcaactcctaccagccagatcaacacaattgatagtcgtactctttcagatgtcagcaatatttccaacataaatgcaagttgcgtaagtgaatcaatatgtaattcacttaacagcaaactggagcctacacttgaaaatctagaaaatctggatgtcagtgcatttcaagcacctgaagatttattagatggttgtcggatatatctttgcggttttagtggcagaaagctagataaactgagaagacttattaacagtggaggtggagttcgttttaaccagctaaatgaagatgtaactcatgttattgtgggagattatgatgatgaattgaagcagttttggaataaatcagcccacaggcctcatgtagtgggagcaaagtggttgctagagtgtttcagtaaaggttatatgctttctgaagaaccatatatccatgctaattaccagccagtggaaattccagtttcacatcagcctgaaagtaaagcagctcttttaaaaaagaagaacagcagcttctctaagaaagactttgctcctagtgaaaagcatgagcaagctgatgaagatctgctctctcaatatgaaaatggtagctccacagtagttgaggctaagacgtctgaagccaggccctttaatgattctactcatgctgagcccttgaatgattctactcacatttctttgcaagaagaaaaccagtcttctgtcagtcattgtgtccctgatgtttctacaattactgaagaaggcttatttagccaaaagagtttccttgttttgggttttagtaatgaaaatgaatctaacatcgcaaacatcataaaagaaaatgctgggaaaatcatgtcccttctgagcagaactgttgcggattatgctgtggttcctctgctggggtgtgaagtggaagccactgtgggagaagttgttacaaatacatggctggttacttgcatagactatcagactttgtttgatccaaagtcgaatcctctcttcacaccagttccagtaatgacaggaatgactcctttagaggattgtgttatttcatttagccagtgtgctggagcagaaaaagagtctttaacattcctagcaaacctccttggagcaagtgttcaagaatactttgttcgcaaatccaatgcaaagaaaggcatgtttgccagtactcatcttatactgaaagaacgtggtggctctaaatatgaagctgcaaagaagtggaatttacctgccgttactatagcttggctgttggagactgctagaacgggaaagagagcagacgaaagccattttctgattgaaaattcaactaaagaagaacgaagtttggaaacagaaataacaaatggaatcaatctaaattcagatactgcagagcatcctggcacacgcctgcaaactcacagaaaaaccgtcgttacacctttagatatgaaccgctttcagagtaaagctttccgtgctgtggtctcacaacatgccagacaggtcgcagcctccccagcagtaggacaaccacttcagaaggagccctcgttacacctggatacaccatcaaaattcctgtccaaggacaaactcttcaagccttcctttgatgtgaaggatgcacttgcagccttggaaactccaggacgtcccagccaacagaaaaggaaaccgagtacgccactctcagaagttattgtcaaaaacttgcaacttgctttggcaaatagctctcgaaatgctgtcgctctttctgccagccctcaactgaaagaggcccagtcagagaaggaagaagccccaaagccacttcacaaagtagtggtatgtgttagtaaaaaactcagtaagaagcagagtgaactaaatgggatcgcagcctctctaggagcagattacaggtagttggcacatctttctgtttcatggtgatatgactgaaatttataaggaaacctaaagctattgtgagcatctacaagaatacatttattttgtttcatgcatctttatctacaaaatctctccagttgatttttaatttaccacatctgttgaaaatagcctctcacatatcaattcactcttatatgtatataatgtatattttttagggtatgcacaacaaatattggagagcctattttatgccacta

SEQ ID NO: 23091 - DNA, 2912 bp, Homo sapiens
tggggtaggggcggcgccgagtcgggggagggggctgtgcgccgggctggcgcccgaccccagccaccgccctgcggccagcgcgtcccccgactcgccgcccggagaccccgaggctccaacgagttcagaaatgtccagaaatgacaaagaaccgttttttgtgaagtttttaaagtcttcagacaattccaaatgtttttttaaagctctcgagtccataaaagaattccaatcagaagaatatcttcagattattacagaagaagaggcattgaagataaaggagaatgatagatcactttatatctgtgacccttttagtggcgttgtctttgatcacctcaaaaagcttggctgcagaattgttggtcctcaagtagtcatattttgtatgcaccaccagcgatgtgtcccaagagccgaacatccagtttataatatggttatgtctgatgtaaccatatcttgtacaagtctggaaaaagaaaaaagggaagaagttcataaatatgtacaaatgatgggcggacgagtatacagagaccttaatgtatcagtaactcaccttattgcaggagaagttggtagcaaaaaatatttagttgctgcaaacctgaagaaacctattttgcttccctcttggataaaaacactttgggagaagtcacaagagaaaaaaataactagatatactgatataaacatggaagatttcaagtgtcctatttttcttggttgcataatctgtgtgactggcttatgtggcttagacaggaaagaagttcagcaactcacagttaagcatggaggtcaatacatgggacaattgaaaatgaatgaatgtacacacctcattgtgcaagaaccaaaaggtcagaagtatgagtgtgccaagagatggaatgtacactgtgtgaccacacagtggttttttgacagtattgagaaaggtttttgtcaggatgaatccatatacaagacagaacctagaccagaagcaaagactatgcccaattcttcaactcctaccagccagatcaacacaattgatagtcgtactctttcagatgtcagcaatatttccaacataaatgcaagttgcgtaagtgaatcaatatgtaattcacttaacagcaaactggagcctacacttgaaaatctagaaaatctggatgtcagtgcatttcaagcacctgaagatttattagatggttgtcggatatatctttgcggttttagtggcagaaagctagataaactgagaagacttattaacagtggaggtggagttcgttttaaccagctaaatgaagatgtaactcatgttattgtgggagattatgatgatgaattgaagcagttttggaataaatcagcccacaggcctcatgtagtgggagcaaagtggttgctagagtgtttcagtaaaggttatatgctttctgaagaaccatatatccatgctaattaccagccagtggaaattccagtttcacatcagcctgaaagtaaagcagctcttttaaaaaagaagaacagcagcttctctaagaaagactttgctcctagtgaaaagcatgagcaagctgatgaagatctgctctctcaatatgaaaatggtagctccacagtagttgaggctaagacgtctgaagccaggccctttaatgattctactcatgctgagcccttgaatgattctactcacatttctttgcaagaagaaaaccagtcttctgtcagtcattgtgtccctgatgtttctacaattactgaagaaggcttatttagccaaaagagtttccttgttttgggttttagtaatgaaaatgaatctaacatcgcaaacatcataaaagaaaatgctgggaaaatcatgtcccttctgagcagaactgttgcggattatgctgtggttcctctgctggggtgtgaagtggaagccactgtgggagaagttgttacaaatacatggctggttacttgcatagactatcagactttgtttgatccaaagtcgaatcctctcttcacaccagttccagtaatgacaggaatgactcctttagaggattgtgttatttcatttagccagtgtgctggagcagaaaaagagtctttaacattcctagcaaacctccttggagcaagtgttcaagaatactttgttcgcaaatccaatgcaaagaaaggcatgtttgccagtactcatcttatactgaaagaacgtggtggctctaaatatgaagctgcaaagaagtggaatttacctgccgttactatagcttggctgttggagactgctagaacgggaaagagagcagacgaaagccattttctgattgaaaattcaactaaagaagaacgaagtttggaaacagaaataacaaatggaatcaatctaaattcagatactgcagagcatcctggcacacgcctgcaaactcacagaaaaaccgtcgttacacctttagatatgaaccgctttcagagtaaagctttccgtgctgtggtctcacaacatgccagacaggtcgcagcctccccagcagtaggacaaccacttcagaaggagccctcgttacacctggatacaccatcaaaattcctgtccaaggacaaactcttcaagccttcctttgatgtgaaggatgcacttgcagccttggaaactccaggacgtcccagccaacagaaaaggaaaccgagtacgccactctcagaagttattgtcaaaaacttgcaacttgctttggcaaatagctctcgaaatgctgtcgctctttctgccagccctcaactgaaagaggcccagtcagagaaggaagaagccccaaagccacttcacaaagtagtggtatgtgttagtaaaaaactcagtaccttttctaggggagagatggtaccga

SEQ ID NO: 23092 - DNA, 382 bp, Homo sapiens
atgacaggaatgactcctttagaggattgtgttatttcatttagccagtgtgctggagcagaaaaagagtctttaacattcctagcaaacctccttggagcaaggtatgtaatatttttaatgcacctgttgtattggtgtatctttttatttattttgacttcttggagagcattcaaattagaatttgggtgggtgtctttattatatttatgagtgttatgtggttccttctccactcccactgcttcacttgactagccttaaaaaaaaaaagtgcctctgttgtccaaagatgaaaacttaggtatcattagaggtaataactgcagtgggtccaaacacatgaaatagtgtttaagttgtgacttcataatgacac

SEQ ID NO: 23093 - DNA, 434 bp, Homo sapiens
gcatataaaggtgagccacaacttttatggtctaacttatggatttaatgagtttggatttgttattgctgtttatttaaactgtcacttctattccttaggcagtctcgtcagacagtacctgatgtcaacacagagccttcccaaaatgaacagatcatttgggatgaccctacagcaagggaggagagagcaaggcttgccagcaatttgcagtggcctagttgtcccacacaatactctgagcttcaggttgacattcaaaacttggaggattctccttttcaaaagcctttacatgattcagaaattgctaaacagggtaacaagaaagaaatctttgcatttgtttgtattaagtacatgttgacctcttaaaaataaacagatgagcatgttgtagttctctgatctgaatgtgcaaacaaaaaaaa

SEQ ID NO: 23094 - DNA, 358 bp, Homo sapiens
tgatctcatgcctaaagtcctaaaatcaaaattctaaaatccttttgtctctctctatctttatgtgaacatgtatatgttatatgttttatcacatatatgtatatgtcacacatttatatactgttgacacatagtttcaaattaatgtaaaaataaatgagtactcacaaattaagtgaataagccaaaatgcttttctatacatgtgattttaataacctttggtgaatatagatagttttaaaattgttgaaaaataaagtataaacgtcttcataatttaatttatacgtttttgcctaggtctgttggcaggcaggtttatattgtctttactagatgttttaaggtcatc

SEQ ID NO: 23095 - DNA, 674 bp, Homo sapiens
gatcacctgagatcagaagtttgagaccagcctagacaacatggcaaaaccccatctctacgaaaaatacagaagctagccaggcatggtggttcatgcctgtaatcccagctactcaggaggctgaggcaggagaattacttgaacctagagaagtggaggttgcagtgagccaagatcgcaccactgcactccagcctgggtgacagagtgagactctgtcacacacacacacacaaaaaatccttttttcatgattttctatttctatcaattttctgagtcacccaagctcaagtctgcatttggtttttcatctcatacttagtcactttctatcagttaccaattcctattgatggtttttaaagggtaaacctcacatctgttccttcttttttcattcattccactgttgaccatctaagaacatgaaccaatgtttctccttatgtctgtgatcattttgctccctggggcatagggaggtgcttccttcatgagatgaactgtctaaacattttagcctagcatgttcagcatgaccagaacagacaccacatgatcagatccagaattacctttccagccctaatctgtacaggtatgttacatatactttatttcctgattcctctggattagttgtccccctctccagactctgctgcttt

SEQ ID NO: 23096 - DNA, 433 bp, Homo sapiens
caatgggagctaacttcactgttttcttacaatacctggtttttcctatctttggtttccttttgattatctctcatccatctcagccactattctcctcccctcccttgtgtctacaacaccccattttaccaagtctcccatttaacctccccatccttttctttcccttaaagtctcatatgatactgcagtcctcatttgtcttcccaaaaaaaaaaaagaatttttttttttttaaggaatccttccttgactcctaaagactcctaaggatgctgaggcctcctcagcatgatttccatatacttactttctctgttggactgcagacaacttgaaagcaggaactttggcagtgtttccccagcaccagcatcatgcctggtccatagtagctaccaataaaaaagtaagcatcatgaacccaaaa

SEQ ID NO: 23097 - DNA, 355 bp, Homo sapiens
tttttgagacgtagtctcgctctgtcgcccaggctggagtgcagtggcgcgatctcggctcactgcaacctccgcctcccgggttcaagcgattccccggcctgagccccccgagtagctgcaactactagtagctggaactactagaggcgtgtggcaccacgcccggttaatttttgtgtttttagtagagacgggttttcaccatgttagtcaggctactctcaaactcctgacctagtgatccgttcgcctctgcctcccaaagtgctgggattacaggcataagttaccgcgcccggccagagactttccaaggccgctttggaacataggactttcactaaaacatttt

SEQ ID NO: 23098 - DNA, 775 bp, Homo sapiens
agacttgagcatctgtggattcgggtatctgtgggaggatcaaaccattgtccattgatactgaggggtgacttggcgtggctgtcacaaatcccagaattcactgtgtatttgttgtcttagtcttcatcttaatcagtattctaggatttttttctacatttttgcttttgatcttcactaaaagattttaacttctctgcgctatatcttattttgacatttttagtatttatcatgtataataatatctcattttgaaaacttaaaaaaaaaagatgtgatttgtatatgtagttctctgggtataaaagaacctttctctgttctgaatttttaagatattacctgccagtaagattatctgaatttttaatatcttaaaaatatctgaatttttaagatattacctgccagtgagattagtactgttataaggcaatcgttttataaactgtttttcaccaaatagtcattttattttgttttcttttttaatacagtttttatgtaacaactgttttcctcatcactattacaaatcagtttttaatatgtatgctagtgttttgaattttaatattgattataaattcacaacccgtagattagtaatttgtaaaaaaaaaatgttgtaaatttacataactcatttttcaggtactttggtactaatgttattttatcgttaccaattgttacaacaaatataccaaactatggatttaaatgttttggcattaaaaactatttgataataaaattaagaaatttt

SEQ ID NO: 23099 - DNA, 220 bp, Homo sapiens
aagcttccactaagtgttacttgttgtatttttagaacacaggctgtagtcaaaatcaaagcttaatattaaaacctatgtaactttagaaatgtgattgccctatctgatgcctgtttgtacatatataatatatatctattatgttaactttgaatcatttttgtgaagattgaatgatataatgcctggcatccaataaatgaaataaataatggtc

SEQ ID NO: 23100 - DNA, 412 bp, Homo sapiens
atgaaccttgaggatgttatgctaaattaaataaggccaaccacaaaaagataagtacagtgtgattccacttttaggagatacttagagcagtcagaatcacaaagacagagtggtggttggcaggggctgcaggaagggggaatgaggaatgattgtttcataggtatagagttttggttttacaagacaaaaggattatgggggtagttggtggcaatggctgcacaacattacaaatgtatttaataacatgaactgtacacttgaaaatggttaagatagcaaattttacagaatatgtattttacgacaattttaaaaatgaaataaaaaagaattatcttgcacgcgaaatggttgccaagaaatcatagccaatagtaaattaaaagttattcatagtgcaaaa

SEQ ID NO: 23101 - DNA, 476 bp, Homo sapiens
gttcctgccccaccctaactgatcaattgaccctgtgacattctttctcctggacaatgagccttagaagctccccaccgagcaccttgtaacccccacccctgcccacaagagaaaaaccccctttgactgtaattttccactatctacccaaatcctataaaactgccccaccccatctccctttgctgactcctttctcggactcagcccacttgtacccaagtgaataaacagccttgttgcttacacaaagcctgttggtagactcttttcacacaaatgcgtgtgacacacagcagggaagggatgaagtaaggattcaaatctagctcgaattgtcctggttccatcacccctcacttatcactggaacaggagtgaatggaattcacaaatgttccctgaatctaccataacagcataagaatccataccctgtgcttgctcggacttaacccttgtggcttgatgtc

SEQ ID NO: 23102 - DNA, 468 bp, Homo sapiens
ctcaccagggtatgtgccagcaagactccgtgtaatcatgtttcattacctggggctcgctcagagaacattttggttttgtttcttattgttgtttttatttttgtttgattttggcaggtatgaaaagccaattatatcagattctttcctgaaaggtcatttcttgtcattgaatgacgaccataaaaatttgcttctacaagaaattctatggtttcaggagtcaagggtcatcccagcaaagtcagattagggaaacactgaaacccatcttgtccagacacctggtttgcctgggtggtgcagaagaggagattggaccctcacgacaccagcatgaaccactcctatgtccacactgtctcaaggcactaacccagccagccccgtagagcatcctgactgctgcaagagggacgaggcaggcatgtggaaggatgtttaattaaactcactgccattagt

SEQ ID NO: 23103 - DNA, 408 bp, Homo sapiens
ccacacagtctctatcaaaactactgaactcctgcacgacctcatgaaagccacatgtaaaccaacgagctaaggatagcttttatatttttaaatggttgcaaaaaattaaagtagaggccgggcctggtggctcacgcttgtaatcccagcactttgggaggccaaggcgggtggatcacaaagtcatgagttcgagaccagcctggccaatatggtgaaaccctgtctctactaaaaatacaaaaaaaattagccaggtgtggtagcgtgcgcctgtagtcccagctactcaggaggctgaggcaggagaatcgcttgaacttgggaggtggaggttgcagtgagccgagatctcgccactgccctccagcctgggcaacagaatgagactctgtctcaaaaaaa

SEQ ID NO: 23104 - DNA, 427 bp, Homo sapiens
gatctctttataagttatatgttcgtcttatctttctttaaagatgaaattttttttttttagtataaaagtaacatgagcataatagaaagttacaaaatcaaatgtaatgaagaaagtattatttagggtcaggtgtggtggctcacgcctgtaatcccagcactttgggaggccgaggtgggcagatcacttgaggtcaggagttggagaccagcctgggcaacctggtgaaaccccatctctactaaaaatacaaaaaattagccaggcatggtggcaagtgcctgtaatccagctacttgggaggctgagacacttgaacccaggaggttcaagaatcacttgaacccaggaggcagagtttgcagtgagccaagattgcaccactgtgctccatcctgggcaacagagtgagactctgtct

SEQ ID NO: 23105 - DNA, 486 bp, Homo sapiens
cagtttgcccaggtctgaggggcagtcctgggcatgggaccttgatgggtacaaccaggtcgagatggtccccctatctctctgcatctctgtgctggcttccatcaggcaaattctccccagaaagccagaagtagctccaagtgtacttgcttttcacagtggttactcctgggggacaagaaatactttttcctgagagttccagcggcagcttaagggagacctcagattggccctgcttggtccaaattcccatccctggttgggcacggtggctcacaccggtagtcccagcactttttgaggcccaggcgggaggatcccttgagcccaagagtttgagaccagcctgggcaacaaagcaagaccctgtctctacaaaaaataaattattcaccaggcatggtggtgtgcgcctgtacttccagccactcaggagaccaaggcagaaggatcacttgacagagtcagaacttctctgaa

SEQ ID NO: 23106 - DNA, 518 bp, Homo sapiens
gattcccatccagctcctaattccagggcatgtccctaaactgctatataattcagcttgctaacagcctcagacttaaacaagtggaaaataaaagcagtaaggcacacaaaaacccctgagagtgcagctggaactgggatgggacacagactttgatgaagcctaggactttaggtcccagtctgaaaatccctgctccaggctgtgggaaattgcatgctcctagcttcagcagcacgctcatgctgcctggagtttgcagctatcggacaccaactccagccactttgcaggaagatggaaagccacagactcctctccattccaaggagagccaccaagccaccagagggatacagctggccccttcccttcatatggtggggggagatcagaggcatggcacagatgctggctgtgccctttgtccaccaaatctgattctggtcacttctccctttgccaccatgcgtgcccaggaaatgcaagcccctcccagtgtagtttaagcccag

SEQ ID NO: 23107 - DNA, 170 bp, Homo sapiens
gaaaaaacattcctccgtaacaggctggcaataactctttacgatttccacatacctcttaaaaattatgaaagacccattgtattaaaacctgggataaacaggatatttaaagcctgttagtgtgatcaagttcatctgtaaatttcactttgttttagagatctctg

SEQ ID NO: 23108 - DNA, 1062 bp, Homo sapiens
ggggacaggggaggagccaagatggccgaataggaacagctccggtctacagctcccagcgtgagcgacgcagaagacgggtgatttctgcatttccatctgagaccagtgaccttttctatttcatagtaaacaaacttcatgagtacttgccggagtctagggataagaatgcactacaaaatcaaagccaaagggttgatgagctggtggcatgcattgaaattatacagaccctagtattgatgttcagagaaacagaaaccgagtcatcacgcctgaacacattggcagctaagaagggagcactatttaatctcttggtaattttaattagtgagcctcagattccaaaatcttgtcctgtgtttgatatccagttggtggctgattcagctttagtcagaatgtcttttgacgctgagttacagaagcttattctggagtatacaaatactgctacagcacttttatatgagatacttcttgtctttcagcagggaaatctcggattgggatccacaaagtttgctattagctggataatgtcctttctacaaagctgtcctcccatcattacttttgtggccagtattgtgaaacaagtggtgaggggtctttcagcttcatttcagctgctaagtccctgccaagcagttctgttgtaccagcaattttacatcctcaagagctgtctgcggcacagcaggactctagctgagtatattaggaataactacagagaagaattcaggtactttattcacatgccagccttgcagaaaaggctcccattgtgttaccccatcactcaacctaccattcaactttttcatgaagttctgaaattggttgaatagaaacaaacaatgtacgcaatgttaataagagtataaaatgttaatcaagagtcaacttgatattcacgagaaacatttttttatttgtttaatatctggctatctctgagtcctataaacaaagattttaattgaatgttccatcaatacctctctatgagaagtttaaaattttaaaaaataaatttgatttattataaaa

SEQ ID NO: 23109 - DNA, 1083 bp, Homo sapiens
ggggacaggggaggagccaagatggccgaataggaacagctccggtctacagctcccagcgtgagcgacgcagaagacgggtgatttctgcatttccatctgagaccagtgaccttttctatttcatagtaaacaaacttcatgagtacttgccggagtctagggataagaatgcactacaaaatcaaagccaaagggttgatgagctggtggcatgcattgaaattatacagaccctagtattgatgttcagagaaacagaaaccgagtcatcacgcctgaacacattggcagctaagaattacagaagcttattctggagtatacaaatactgctacagcacttttatatgagatacttcttgtctttcagcagggaaatctcggattgggatccacaaagtttgctattagctggataatgtcctttctacaaagctgtcctcccatcattacttttgtggccagtattgtgaaacaagtggtgaggggtctttcagcttcatttcagctgctaagtccctgccaagcagttctgttgtaccagcaattttacatcctcaagagctgtctgcggcacagcaggactctagctgagtatattaggaataactacagagaagaattcaggcttttactgaggccgtgggggatgagttctactcttccctcttgacttggccctagtagtcaccacagcttgaccctttcatttcaacacctcactgcgcattgcctgataaaccaagaagcaggagcctctgctcatactgtggtactttattcacatgccagccttgcagaaaaggctcccattgtgttaccccatcactcaacctaccattcaactttttcatgaagttctgaaattggttgaatagaaacaaacaatgtacgcaatgttaataagagtataaaatgttaatcaagagtcaacttgatattcacgagaaacatttttttatttgtttaatatctggctatctctgagtcctataaacaaagattttaattgaatgttccatcaatacctctctatgagaagtttaaaattttaaaaaataaatttgatttattataaaa

SEQ ID NO: 23110 - DNA, 938 bp, Homo sapiens
ggggacaggggaggagccaagatggccgaataggaacagctccggtctacagctcccagcgtgagcgacgcagaagacgggtgatttctgcatttccatctgagaccagtgaccttttctatttcatagtaaacaaacttcatgagtacttgccggagtctagggataagaatgcactacaaaatcaaagccaaagggttgatgagctggtggcatgcattgaaattatacagaccctagtattgatgttcagagaaacagaaaccgagtcatcacgcctgaacacattggcagctaagaattacagaagcttattctggagtatacaaatactgctacagcacttttatatgagatacttcttgtctttcagcagggaaatctcggattgggatccacaaagtttgctattagctggataatgtcctttctacaaagctgtcctcccatcattacttttgtggccagtattgtgaaacaagtggtgaggggtctttcagcttcatttcagctgctaagtccctgccaagcagttctgttgtaccagcaattttacatcctcaagagctgtctgcggcacagcaggactctagctgagtatattaggaataactacagagaagaattcaggtactttattcacatgccagccttgcagaaaaggctcccattgtgttaccccatcactcaacctaccattcaactttttcatgaagttctgaaattggttgaatagaaacaaacaatgtacgcaatgttaataagagtataaaatgttaatcaagagtcaacttgatattcacgagaaacatttttttatttgtttaatatctggctatctctgagtcctataaacaaagattttaattgaatgttccatcaatacctctctatgagaagtttaaaattttaaaaaataaatttgatttattataaaa

SEQ ID NO: 23111 - DNA, 482 bp, Homo sapiens
tttttttttgagacggagtctcgctctgtcgcccaggctggagtgcagtggcgcaatctcagctcactgcaagctccgcctcctggcttcacgctattctcctgcctctgcctccccagtagctgagactacaggcgcctgcaaccatgcctggctaattttttgtactttttagtagagacggagtttcactgtgttagccaggagatttaatgaattctaaataaataatattggtggcatgtatctatggcaaaaatcatgaagaaagatgcaaatggctcttggctcttgactttcatttattggtttcactttttacaaagccctgacattttatctttaaaaaatgtatgatatggttcttctaaggaaacaactatgagtaaattatgagtcaccttcctgtttcactttggaagattgaccattgaaagtctatttccaaggaaattaatcccaatttcacttgaagttgttaa

SEQ ID NO: 23112 - DNA, 489 bp, Homo sapiens
ttttaggtttttgtatgcatttattaaaataattagcagaatatcatcaagctaaaaagagttgtaacatggaaacacagacaactttgccatttatcagagattctctaggtaattacagtcttctttcttaatttcaattctgttgtttccattttgaatgaaggaagctacctgatttaccaagttgtgtggttgcttcttgaacaagagggatgcagcctgcagggaaaaggggaatttactttttctggaatcatcctgggggcccagcaagtgctctccaatgtcatttcctggcctcatgcatgccagggctacattggccaaagcatgcaaggattcaaaggcccaaaatcttccctgtttgttgagttttacctctcttaactgggaggtccttcctcgtgtcttgtcttaagtttacagcaaccaaggtagaagattatggactatttgttttgcagagaactagagaagtaattggct

SEQ ID NO: 23113 - DNA, 605 bp, Homo sapiens
gcaaagcattgtgtatgctctagtaattctaactgcataagtactcatttcctcataggacagaaacaaccagcatgtttcttggtatgaaaactccattttcccaaatgcccacctaggtacatactcaccgagaaaaggatgattgaggaaggtcacacctctgaaatgaggcctgtgctgctgttgttgagtggctctttacagttttcttcatggcatttccaagtttattatttttttctgactcattgattaaaaaaaaattgtttaactttcaggtaaaatagacaaacagccgggcgcggtggctcacgcctgtaatcccagcactttgggaggccgaggggggtggattacttgaggtcaggagatcaagactggcctgcccaacatggtgaaaccccatctctactaaaaatacaaaaattagctgggcatggtggtgcacgcctgtaatcccagctactcaggaggctgaggcaggagaatcacttgaacccgggaggtggaggttgcagtgagccgagatcacgccactgcactccagcctggatgacaagagtgaaactctgtctcagaaaaaaaaaaagaaagaaagaaaa

SEQ ID NO: 23114 - DNA, 411 bp, Homo sapiens
ccctgatctgtcaaactctaaaaaccacatctttgtgttagatcaggctgtgtcaaggcagagttccagtggacattttaaagctgaaggtgctagaattgccctggggcattggctctttcaccagccctctccctgattgcggcttcccggagcttgcaccattgtttcatcccaccccggagttcaatggaacttttctgaacaataggaggaaagtattccctatcacagaaatagatctgtgttcctgcagctcctgggattgttatgcctcagggcatcatcaataaactaaaaatcataagtcaatcatttctatattgtgaaaccatatttgagtgcttttatcaggggataagaaaagtgctttttaaataaacattaattttgtacatgaaatctggctgt

SEQ ID NO: 23115 - DNA, 364 bp, Homo sapiens
gtgagaggtttgagcagacaattcacacacacaaggtgttgagctggccaaaggctcagggaaaaccctctgcttcactagcaagctaagacacaaaatgaaagtagctggctgggcgtggtggctcacacctgtaatcccagcactttgggagactgaggtgggcagatcacctgaggccaggagttcgggaccaacctggccaacatggtgaaaccccgtctctactaaaatacaaaaattagctgggtgtggtggcacatgcctgtaattccagctactcaggaggctgaggcatgagaattgcttgaacctgggaggccgaggttgcactgagccgagatcacaccactgcactccatcc

SEQ ID NO: 23116 - DNA, 351 bp, Homo sapiens
ggcactttagtgtagaaacaatcccaaggcagaagcagtagactacaattatgttaaattatttttaggtccataaatggatacatttgcgggttctattgttacaaagagtgataagataaaaccttgttttcaactgcagattccatgtctatgaagcaggagctatcagaacatgatagtagcatgttccttccttccttggtgctgggtgagggaatggtggtgttggtgaaagatgaagattaagaatagggaaatattaggaataacaataaaatcaatgttttttcaagtctgcactaaactgaaataatttgcttgtatactcaacttgtatggagattaaat

SEQ ID NO: 23117 - DNA, 360 bp, Homo sapiens
tgacagtcaatttttccatcactatttgttaaaaaagctatcctttctacactgaaattattttgcacatttgtcaaaaattaattgtctctgtatatgtgagtctgtttttagactcacttctatcctatggatctatttgttatctttataagctttgttcctcagtgcattatctttctcagtcttttactattaaccagtttgtgccttgatatttaaaacacgtttttattcacaaaatataatttggtcttggtttttcctgagaatctctgccacataattggtatgtttagatcacccatatttaacatgattatcgatatggtaagatatgattttgttatcttgctattt

SEQ ID NO: 23118 - DNA, 363 bp, Homo sapiens
atatgcccacctgtccaaacccaaagaatggacttagaggcatgaagaacagtgaaggtgagacttttaataacgttctggcaagatcagttgtctggaagacatgcacacctgggcaattacaacaggctccaacagcaggagaagaccattttgtatggctcgatccttccaaggttgggagccaaacaacctgctgaacatgccaatgtggcataactatgaactaaagaaacatcctccacccaaatctcccaggccaggaataaggagggctaaagacctctctacagtctgccacctcagtgtttcatgtttatattgtcaagtcgctcctcaataaaattcatcccatttccagaa

SEQ ID NO: 23119 - DNA, 469 bp, Homo sapiens
  misc_feature (389)..(389): n is a, c, g, or t
cgtgaattatatctcagttatagatatctgaattatatctcaataaaacatgacataatataaaatatataatatttacatatcatatataataatgctatatatataatatacactgacacctggatccttctcttagagagtctgaattaattggtctgtggtatggcctgggcattggacttctggaaaccttcccagataattctattaaaaagctgatgtggagaatctttgacatgggtcttggtacttacaagtgtggtttgtgtgccagtggcaccaaccgagacctgggaacttacaaggagggcaaaacctcagaccccacccaagatcccactgaatcaggaatcttgcatttttgatggggatcctcaaataacttngggtgggacattcaagtttgaggaaacattgtcagtaagggtagtttgaatagtaaggcaggcgaatgttatctctgaag

SEQ ID NO: 23120 - DNA, 1378 bp, Homo sapiens
tgatctatgtgtctatttagtcaacgaatatttatcaagggcttgccaccacgccatgccgggacttggtcttgttcacaggtctagaacagtgcctaacacatagctggggcacagtaaatgctgagagaatgcatgtgttgtcgggaggtcacttctgaggaggcaagtcttaaacgaggctagcaaggatggtcagccgcttccagagcttgggaagagtgttcttggtggacggaacagtgtagtcttgttggtaaccacttgcctctggctctctgtgcctggagaatagtgtttctgtgtcttttttgtttgtagtctgtgatcctgggagccctggggccagtttaaacagggccccatcagggtctctggaagtgaggtcactgcccaacagattcaccccactggctaactctggcttaactggctgggcctggccattcccctggaagcaactcctccccacaacagcatcagtcccacgacctctggctccttcccagggcagcatcctgcagtccggaaggaagttcttcgtcctgtctaaccacagaccccgctgaggcaaccccagccttttcctcttattctgccttgtgggcagaagggaggagatgggctgacccttcagcaacgggtcctggcctagacggagagcccagtaaagacctgacagagtgggggtgacaacaccctgcagcctcggggaagtgaacttcaaagggcagaaataatcactcatctcagaagcttctttggcatccattatctcatttaatcaattaacacctactttatagacagaaactcaagcaggcccagggagggaaaacagtggcagaactgggaccagaatccaggcctcttgataaaatagtaataattaatattattgcacatatactcactgccaggtactgtgctaaaactttgcatgcattttcttctttaagcctcatcacatccccatgaggtgggtaccctcattattcctgttgtcctcagatgagaaggcggaggctcagagctgtcaaatgacttgtccaaagacacccaggcagttcatggcaggacagaatttgagcccaggcagtctggcgtgctcagccatgctccctgtgccctgggattcgggaggattgtcacagatgtctactttccagggacttggggagacaggcttcaggctctatcacatgatgatcctggggccgacttgtgccaaggctgggctgggagggaagatggcctggacgcacagcgtaatcctgagtcccctctctgtggatgacgatgagttacctttgccctccctcctgagatctctgtggttctgcccttcattctccaaataaaatcgctgtggcctcaa

SEQ ID NO: 23121 - DNA, 1471 bp, Homo sapiens
ccggagggaagggacacttgccccaatcccgtcttcccgatttcccttccctccaggtggaagcaccggtggcagaatattaactactattttctgggcaaaaggaagcgacatctagttcccttgcgcccgtgagagccaccacgccatgccgggacttggtcttgttcacaggtctagaacagtgcctaacacatagctggggcacagtaaatgctgagagaatgcatgtgttgtcgggaggtcacttctgaggaggcaagtcttaaacgaggctagcaaggatggtcagccgcttccagagcttgggaagagtgttcttggtggacggaacagtgtagtcttgttggtaaccacttgcctctggctctctgtgcctggagaatagtgtttctgtgtcttttttgtttgtagtctgtgatcctgggagccctggggccagtttaaacagggccccatcagggtctctggaagtgaggtcactgcccaacagattcaccccactggctaactctggcttaactggctgggcctggccattcccctggaagcaactcctccccacaacagcatcagtcccacgacctctggctccttcccagggcagcatcctgcagtccggaaggaagttcttcgtcctgtctaaccacagaccccgctgaggcaaccccagccttttcctcttattctgccttgtgggcagaagggaggagatgggctgacccttcagcaacgggtcctggcctagacggagagcccagtaaagacctgacagagtgggggtgacaacaccctgcagcctcggggaagtgaacttcaaagggcagaaataatcactcatctcagaagcttctttggcatccattatctcatttaatcaattaacacctactttatagacagaaactcaagcaggcccagggagggaaaacagtggcagaactgggaccagaatccaggcctcttgataaaatagtaataattaatattattgcacatatactcactgccaggtactgtgctaaaactttgcatgcattttcttctttaagcctcatcacatccccatgaggtgggtaccctcattattcctgttgtcctcagatgagaaggcggaggctcagagctgtcaaatgacttgtccaaagacacccaggcagttcatggcaggacagaatttgagcccaggcagtctggcgtgctcagccatgctccctgtgccctgggattcgggaggattgtcacagatgtctactttccagggacttggggagacaggcttcaggctctatcacatgatgatcctggggccgacttgtgccaaggctgggctgggagggaagatggcctggacgcacagcgtaatcctgagtcccctctctgtggatgacgatgagttacctttgccctccctcctgagatctctgtggttctgcccttcattctccaaataaaatcgctgtggcctcaa

SEQ ID NO: 23122 - DNA, 1130 bp, Homo sapiens
  misc_feature (435)..(436): n is a, c, g, or t
  misc_feature (444)..(445): n is a, c, g, or t
  misc_feature (449)..(449): n is a, c, g, or t
  misc_feature (452)..(452): n is a, c, g, or t
  misc_feature (455)..(455): n is a, c, g, or t
  misc_feature (463)..(463): n is a, c, g, or t
ggatttgttgttttctcgtgagcttaggctgctggtttggtgatttttgtctgattgcaatgtctggacgtggtaagcaaggaggcaaagctcgcgccaaagcgaaatcccgctcttctcgcggacaacaagaagactcgcatcatcccgcgccacttgcagctggccatccgcaacgacgaggagctcaacaaactgctaggccgggtgaccattgctcagggcggcgtccttcctaacatccaggccgtgcttctgcctaagaagaccgagagtcaccacaaggccaagggcaagtgatttgacaggttgcaaaagcttctcatttcagagagatgccaggatcctaagtgcctgccaaacttaccaattctaaggataagtggatggatggcattactgattccttacattactgattgattctgcatccgnnaattgtcnnattnaanaanattctacntcatgtgtggggagcataaggaggataacctgaagagacaagagctatctcacttcgacggggaacgttcttgctgaagtaccataatcgtgttatcaattgtgtcacactccagtattacattcagcagggttcagaacctatttgaaggtcaaagaggttctcctattccgaaatcccttcccttcaatttaacccggtgggtccctttttcctttcccttcggggtatctgggccaggatttcattgcgtgcggggagtattccgggcactgggtggcatgggaacggggtgtctctttcgcctctgtttccattcccggcgcacggttggcgcaccggggtgtcaccctttgctgtcggtgtgccctttctaaagagacccatacccgggggacagcttctgcccctgtaggaaccattctgaaggcgctcctgggtgaccacttggaccgctcacggcgccatttggcaccaggcggttctgtacttacagtcttaaccccgcgccccagcaggtgttgcacccgcacactgagcatgggcgtctccgtcgaaacaacaagcgtggcggagtataacccagctactgtgacacgaaaacgtccgcgcccaccgcgaccacggggcgagcacgcatgacaccaccctgcggcccacacgccgc

SEQ ID NO: 23123 - DNA, 1204 bp, Homo sapiens
  misc_feature (704)..(705): n is a, c, g, or t
  misc_feature (713)..(714): n is a, c, g, or t
  misc_feature (718)..(718): n is a, c, g, or t
  misc_feature (721)..(721): n is a, c, g, or t
  misc_feature (724)..(724): n is a, c, g, or t
  misc_feature (732)..(732): n is a, c, g, or t
ggatttgttgttttctcgtgagcttaggctgctggtttggtgatttttgtctgattgcaatgtctggacgtggtaagcaaggaggcaaagctcgcgccaaagcgaaatcccgctcttctcgcgctggtctccagttcccggtgggccgagtgcaccgcctgctccgtaaaggcaactacgcagagcgggttggggcaggcgcgccggtgtacctggcggcggtgttagagtacctgaccgccgagatcctggagctggccggcaacgcggctcgcgacaacaagaagactcgcatcatcccgcgccacttgcagctggccatccgcaacgacgaggagctcaacaaactgctaggccgggtgaccattgctcagggcggcgtccttcctaacatccaggccgtgcttctgcctaagaagaccgagagtcaccacaaggccaagggcaagtgatttgacaggtatctgagctcccggaaacgctatcaaacccaaaggctcttttcagagcccccctaccgtttcaaaggaagagctaacctcactgcttgtaggtagaaggaacaaaaggcactaaggttgcaaaagcttctcatttcagagagatgccaggatcctaagtgcctgccaaacttaccaattctaaggataagtggatggatggcattactgattccttacattactgattgattctgcatccgnnaattgtcnnattnaanaanattctacntcatgtgtggggcacgcatccgcgaggatacacatgaagcagcaccgcacctacttattgagggcgacagctcccttctgacataccgaaatgtgctcccactcccgtctcaccatcacgtattaccatacacagggttcaaacctatccgaccgtaaacgagatccatcatataaccgaatccatgccctcaactttacccaggtggtcacttcacttaagcttgtgtattctgacccaggtattcaattccctgctgaatcatcagtcacataatgaaatgatacgctgatcactccggctgtagtagcattatcacttcacaatcttatcctgcacacacacctatcccctaatgagccacactacagaaccctctcctgcagagcagccgccatgttactgcattactgcccatgactcatctgcactgtaccctgtcccggactgctagccgaccggacctcgtacc

SEQ ID NO: 23124 - DNA, 1087 bp, Homo sapiens
  misc_feature (587)..(588): n is a, c, g, or t
  misc_feature (596)..(597): n is a, c, g, or t
  misc_feature (601)..(601): n is a, c, g, or t
  misc_feature (604)..(604): n is a, c, g, or t
  misc_feature (607)..(607): n is a, c, g, or t
  misc_feature (615)..(615): n is a, c, g, or t
ggatttgttgttttctcgtgagcttaggctgctggtttggtgatttttgtctgattgcaatgtctggacgtggtaagcaaggaggcaaagctcgcgccaaagcgaaatcccgctcttctcgcgctggtctccagttcccggtgggccgagtgcaccgcctgctccgtaaaggcaactacgcagagcgggttggggcaggcgcgccggtgtacctggcggcggtgttagagtacctgaccgccgagatcctggagctggccggcaacgcggctcgcgacaacaagaagactcgcatcatcccgcgccacttgcagctggccatccgcaacgacgaggagctcaacaaactgctaggccgggtgaccattgctcagggcggcgtccttcctaacatccaggccgtgcttctgcctaagaagaccgagagtcaccacaaggccaagggcaagtgatttgacaggttgcaaaagcttctcatttcagagagatgccaggatcctaagtgcctgccaaacttaccaattctaaggataagtggatggatggcattactgattccttacattactgattgattctgcatccgnnaattgtcnnattnaanaanattctacntcatgtgtggggcacgcatccgcgaggatacacatgaagcagcaccgcacctacttattgagggcgacagctcccttctgacataccgaaatgtgctcccactcccgtctcaccatcacgtattaccatacacagggttcaaacctatccgaccgtaaacgagatccatcatataaccgaatccatgccctcaactttacccaggtggtcacttcacttaagcttgtgtattctgacccaggtattcaattccctgctgaatcatcagtcacataatgaaatgatacgctgatcactccggctgtagtagcattatcacttcacaatcttatcctgcacacacacctatcccctaatgagccacactacagaaccctctcctgcagagcagccgccatgttactgcattactgcccatgactcatctgcactgtaccctgtcccggactgctagccgaccggacctcgtacc

SEQ ID NO: 23125 - DNA, 357 bp, Homo sapiens
tcacatttttcacagatctggtcttttttatcttttgtctcttcaatttaagtatctcttccccagagaggtgttacctggccatcctatctaagagaggtttccaggctggtcagtctctcagtcccttgttgagcacttgttataatagtaccacttgcagccattttattttacatcttatgtaggggttatttatttatttcactactgtttccccttccccatgaaacagagatttattgagagaagggattgtgtttttctcacacagcatggttcctcactgcctagtgctgtgtttggcacataggaggatctgtgtgaaagaaggaaagaaggaaggaaggaagacag

SEQ ID NO: 23126 - DNA, 405 bp, Homo sapiens
atgatctgtcttcttaacaagtacataagtgccattgaagtcagggatccagatgctttgtatagctacaaaatactacggtattttctcttaacctaacctaatctacataaacatgtaaaagctagattacagaaggcagggttccaacttattttgctcaatatctccttatagtattactaaacaatgttcaaatgtcagtagacatgggaaaaccacaagaatattcaaaactcagcagttaatattttgtcttagtgtgttacaaacttgccttctccttaaatatataatttcttcaaacttattttaactgcttccctgcagaaaagcactaggccaagttatctcccttgatggctaaatggcctcctgcctccttcattaagcatacatggcaaa

SEQ ID NO: 23127 - DNA, 457 bp, Homo sapiens
gaggaaactgaggctcagagaagttaaatcattcactccaggccatacatctgctaaatgtgtcatgctacatccactttgcacctagtttgaacaggtttacaaagcaagtcagtaacccctgcatgcctgggtgcctgaagttgaaaaggggtggctctaagatgtggtctactacctctcctggactgttgcagttgggtgtggctgatttgaaattgtgcttcaaaagaatgagttctagtccctgaatagaggagctcacaccacagtgcactgtagatctttgtgatccagaagtcctccagatgttcccaaaaggatctctaaggtgttgctggggatgttgtgtgtatagggagtgttcccttgggggcctctgagccctcctggcagagaagcctcatagataatggcatccccagaaaactctacacttggaatgggacccaaatta

SEQ ID NO: 23128 - DNA, 351 bp, Homo sapiens
tcgtcttcaaaaaaaaaaaaaattagctgggggtggtggtgtgtacctgtagggaatctgaggtgagaggatcgcttgagccctggagttccaggctgcaatgagccactgtactccagcttgggcaaaagagcaagaccctgtctcaaaacacaaaacaaaacaaacaaacaaacaacaacaacaaacaataaaaaaaaaccatgctaagtccagtggggaggaaggaaagtacagaatgagcctggaaagtcagaagagctcaaagaatgatgcggacacgtcagaagccagctggaaagagctctccccagccaaatctgggacaatctgagaacccaaactgtaatt

SEQ ID NO: 23129 - DNA, 465 bp, Homo sapiens
ggtaaaattcaatattctaagttattttcaatcacactgtacacaggtgacttcacagtttccaccagcatttgcgagcatccgaattctgtagtgcgtatttcatcctaagggcaatcccattcataagctttttaaaatttttttctcctcttttgtatctgtagttgtaatatgtctactgatttatttcctagaaaaaaatgttgccagatggtttctaattaaaaaataataaaaatatcaaagcaaattgatacttggagagcctcagatttttgaaacttatttctcatcaattccagttctattttagttttggcaatctagtaataaactcaaaacactgtagggtaaaaaaacaacagtccctgtaactccagcactttgggaggctgaggcgggctgatcacctgaggtcaggtgtttgagaccagcctggccaacatggtgaaactctttctc

SEQ ID NO: 23130 - DNA, 456 bp, Homo sapiens
ccacttgcaaagccagtaacaaaggtgagatgcagtgaaaggaaagtgactttcttccagagctagcagtgggtaaatagccaaggctagtgccttaaagaaaccattttcaactttggctggagagaggggcttaaaaagggaacttggaatgggaggcatgcgggagtgttgctgggcacaaggtctctgtgtcttgtttcagtggctatcttgagtcgtggtccacctggagcatggtggcctcatctcagtaatagctgggttgttgacaaacggccttgaggtaatctctggaattttgaaactggatctccaggcctggtttctctccacattagccctggaacttctaagaaagcacatagttagataagtgtgcctggtgtaagttgaataagtacataattaaataaatgtgcatggtgtaagggagtgtctggtgggaaaggaggg

SEQ ID NO: 23131 - DNA, 713 bp, Homo sapiens
gcagtggtatgatctcggctcactgcaacctccgcctcctgcattcaagtgattctcccacctcggcttcccgagtagctgggatcacaggtgtgcaccaccacgcccacctgtgtattgtatttttagtagagatggggttttgccatgtaggccaggctggtctcaaactgctgacctcatgtgatccgtcaacctcaacctcccaaagtgctgggattacaggcttgagccaccatgcccagccccagctcagggcctttctactggctgttctctctacttgggacgttcttgccccaaatcattgcatgaatgcttcctcctgtggttcaggtctcaagttcagcttcacgtgctcagagacgccctcactgatcttgtctatagaacttgtcttgctttgtctccatatcactattaaaaattatatgaggctgggcacagtggctcatgcctataatcccagctcgttaggagtccatggcaggaggattacttgagcccaggagtttgagaccagccgggacaacatagcaagaccctgtctctaaaaaataaaaataaaaaaattagcagggcatggtggcaagcacctgtggtcccagctactcaagaggctggggcgggaggatcacttgagcccaggagggcaagggtgcagtgagctctgattgcaccactgcacctcagccttggcaacacagcaagac

SEQ ID NO: 23132 - DNA, 900 bp, Homo sapiens
gaagcatctgtgtcctcccaccccaagagcatcaactcccagagggcagggatcccggccctgtgcaggactctgtggctcctggtagaagacaaccacccttacagatggaagatgctggaatacgggttctcgctgcaagtgtgtttgagccttggagccaggcagtgtttgcgtgtccccctgggaccctggaccaccatgaggagagcttgcagtcctcacaagtgcagcctctcaaaggtcaagggtcaggagggtcagggacaccgcctgcaaggacacacatggctcctgtagccaagtggccctgtgtggcctacaaagatctgctgagtggagaccagccaggagcagcttcgcccagggctgctgaggaggaagccattgtggggaacagggtcagaacatgaccctggaccgaggtcgagggggcacatccagacgcacacgaaactgaaacctgtgaaacccaggaaaatggcacctccttcatgctttccagaagaaggggtgcatggagcagggatcccggttaggtcttaaaaatctcgccacaaagcgtattttctcagatgaaatagtcatcctgtacgtccgcatagagctttacatcttccagagccgaccgcatccactaactcctgtgtgcctcccgtggctccctgcaggtgggccttttcctcaaggcagctgaaggtcccccagggtcccaggcgagtagtctgtccccctgagccattcccaaaacactggaaggggcctacagccacccctgcccagccaggcctcctggggaacgctgtggggagaaacccgtgagaggcaaaagccatgatggaggctggtcactggagacaagctgcttgccctgtgtcctgtgaacgtgggaactcaccc

SEQ ID NO: 23133 - DNA, 666 bp, Homo sapiens
ggctcaagtgatcctcccacctcagcctcctgagctgggactacaggcacacaccaccacccccggctacaaaattttctttataaagcatgaaaccattatgtcacttccctacttaaaactatgtaaaatgatttcagtggccctcattgcttacatgataaaatctaatgtccaggtactggtctgcatggcttcttaagaactggccaatacctgtctttggaggcccagtctccctcaagtccctcacctgtggctccagtcacaccagacctcttggggcttctggaacctgtggcctgctttcagttgtggatatttgctgaatggattcttccattcatccaaaccatccattcattctttcaacacacacacacacgtatatatacacatacacacattatacacgcacacacacacacacacacgcacacacatacatatatgtatatattattgggaagccccctgagccagaataggttcagagactccctcaacaaatattttttgagcacttgctatatgcaagacacttcaaggtgctagaaatatgcagtgaacaagacacaaaatctttacttccatggagcttatattcttataagcttacacaaacttatattctagtcttgtattgtgtctcctagggaagaccag

SEQ ID NO: 23134 - DNA, 189 bp, Homo sapiens
tatcatcttcctggccccacatttgatctcgttcctgttccactccctgtcttggtggatggtgccccggcccccatagcctgggatggaagcctgagtcattcctgcctcctccgttcccttcactccccatacctgactggtcatgaatccttttggttctgccccctaaacagcgaggatcctgca

SEQ ID NO: 23135 - DNA, 366 bp, Homo sapiens
tcactgagttgtgaaaagttaacggagcatgcatatgttttcaggatataatagaaccaagaaatctgtgcatcttattaagatgtttatagattatatatatatatattttaatcatatttaaaataaaaatttttacttgcagctactgaggaggattgattaagcccaggagtttgagtcaccatgggcaacatagcaacactccatctctaaaaaaagaaaatttggcctactagacaaaatagaagtgtagaaatataaatcagttttctcatattctttgcatggatttagtagttacccaacattttctaaaatgtgcctattgaataaaatgaaatatgaatagaagttacatttatt

SEQ ID NO: 23136 - DNA, 247 bp, Homo sapiens
tggattttgagagttgtttatttatctggatacaagttctgtgttggacaggtgatttgcaagtattttcacccagtctgtgggttgttcttctcttataaatgacttttgcacaacagaagctttttattttgatgaagtcaagtacatccatttttgcttttatgattatgctttaggtgttacatgttagaaatctaacccagggtcacaaaggctgattttcttttaggagttctgtaatttt

SEQ ID NO: 23137 - DNA, 337 bp, Homo sapiens
aaggaaatttaatcaataattcaaaacaggaatagattattcatagggagagctgtgctcacagttttgttaatttgcagtggtagcattctttatcactggctgaaactcaagtaaaggagtgaaagatcaagtatttgttgagaaactattttgtgcctagcatcatgctaaggattatggtgacaaccgcaaaaggttagtttcatggcacttgttggagatgcatgtatttaacttgcaaatagtatacacaactcgtgtgttattaagttatgaaatattgaaaaagcataacatgggagtttaataatggaacacagacagactgagcaga

SEQ ID NO: 23138 - DNA, 409 bp, Homo sapiens
tagtgtacatccttagaatttgattagaatgattctttgtaacaaaacaaaaatccttagcatcatattcttccatgactgacttaacatggccttcaaatgcttttaagctgtctcattcagctgttgaaagctttctatcacaggcactctgcctatctaagccaagaaaggcaaaaatgtgtcattttcccgggtaactctggaattactgggtgtgggctaaccgagtctaagggtaacgttcatcatccccgcttcctggggattcacacccttgtgtaatctccttcctttgagtgtgggggcagggatatgtggacttgcttcttaaccaacagagtacaggcaaagggtaatgggatgctcctgattacacaacattgtaatgtctgtcttgctagaatac

SEQ ID NO: 23139 - DNA, 770 bp, Homo sapiens
ccgagaagcccggactggagtatctgagaacatatttcttccctataggagttgagaagaggaggaagaataatgggaggagacaggacctttttcaacttgacaaatagagtcaacttttataacactgttactgggaatacttgacttactaagcttttactgaacactttaattttgggagtacaatttctaaactcacgaaataatcttcatgcaacaagatgttattttatcaaattttggtattacatgctcattctttgacaaattttaattaacagatttctgagagagcagacaccatcttatttctgttgaattgtatttagtaactcaaaaggcatataccaagctgtcagaagcagcttcatttaaaagaaataaaatttctagtcctgcctgaagtttaagctagcccatgactacacaagtgcaactgtatttcccaggtagatgccggtagattgggcccagtaagtttgggccgttgggatgtgaaaggaagagatgcgggcaactttttgggtcatcttcttaaagaaaaagccatttgtcctggatgccctcttttcttttttctctttggctgggaaatgacaagaattaaagcagcagccttggatccagagatggacgccaattgatgaagacagcagaactgactggctagtctgggttccctggagcagagctgtctctccaccctaggttatccacttacttttgtactgttatgtgagagagaaataaacttctatcttctttaa

SEQ ID NO: 23140 - DNA, 545 bp, Homo sapiens
gcggaccgcgccaggcggaagcccggctccgggccagcatccgagagcccggactggagatttctgagagagcagacaccatcttatttctgttgaattgtatttagtaactcaaaaggcatataccaagctgtcagaagcagcttcatttaaaagaaataaaatttctagtcctgcctgaagtttaagctagcccatgactacacaagtgcaactgtatttcccaggtagatgccggtagattgggcccagtaagtttgggccgttgggatgtgaaaggaagagatgcgggcaactttttgggtcatcttcttaaagaaaaagccatttgtcctggatgccctcttttcttttttctctttggctgggaaatgacaagaattaaagcagcagccttggatccagagatggacgccaattgatgaagacagcagaactgactggctagtctgggttccctggagcagagctgtctctccaccctaggttatccacttacttttgtactgttatgtgagagagaaataaacttctatcttctttaa

SEQ ID NO: 23141 - DNA, 593 bp, Homo sapiens
agcgctgagcatacagagagagtttcatggatttttgtggaaggatgcacaaactgaaacccactgataaaaatacacacgatcacttttgagtgtctcataaaagtacatggtattaagcaattcatggatgtttttagggaaaatagactcagtgagatggagactgacaagactcccaacacttaggggaactcagactctgtcaatctggggtgtagttgtgtatgctcagcgctagacgtgagcaatctggagagcagtggagggactgaaaacaaggcaggagggaaagtggagctgagcttgtcacagacggatgcaagtgtgaactcagaacatttcaatcagaatgaaccaaaagtcctatttaatcatttaatgggggaggctggttgtaggtcttgcccaaataattcacaaagttgtggcagaattgtgagagtgaagtgcaattctgtggactgtcaaatgccaaacatggaagccaatgtgcctgctgtattaacacactcggaactttctggtgaaagtttgttaataaaaacactataataaatgcagcattcaattcagaaaaagtgcctcaatta

SEQ ID NO: 23142 - DNA, 605 bp, Homo sapiens
gcggaccgcgccaggcggaagcccggctccgggccagcatccgagagcccggactggagatttctgagagagcagacaccatcttatttctgttgaattgtatttagtaactcaaaaggcatataccaagctgtcagaagcagcttcatttaaaagggattataatacctacctatgacagagactgccaaatatactccagtagccattctgcttttcttcttttcagaaataaaatttctagtcctgcctgaagtttaagctagcccatgactacacaagtgcaactgtatttcccaggtagatgccggtagattgggcccagtaagtttgggccgttgggatgtgaaaggaagagatgcgggcaactttttgggtcatcttcttaaagaaaaagccatttgtcctggatgccctcttttcttttttctctttggctgggaaatgacaagaattaaagcagcagccttggatccagagatggacgccaattgatgaagacagcagaactgactggctagtctgggttccctggagcagagctgtctctccaccgaggtaccaccatactcagatacatgcggagtggacagaagactactatc

SEQ ID NO: 23143 - DNA, 879 bp, Homo sapiens
ggcacgagggctctgtggagctgcgcctgccaactcattgctttctgctgtgctgtgatcctgcagtcagttgccgctgttgctactgcaatcatttgcaccaaactgagccagagaagttccctcttttaacataaagagtcaagaaattggagcatggctatgagcaatggaaacaatgattttgtggttctgagcaacagcagcatcgcaaccagtgctgctaacccgagtcccctcaccccctgtgatggagaccatgcagcccagcagctcacacccaaagaagcaacaagaacaaaagtgagtccaaatggatgcctgcaacttaatggcacggtcaaatcatcctttctgcctttagacaaccaaagaatgcctcagatgttaccccaatgctgccatccttgcccataccatcaccctttgactagccatagcagtcaccaagagtgccatcccgaggctggccctgcagcaccctctgctttggcctcgtgttgcatgcagccacactccgagtattctgcatctctttgtccaaatcattcacctgtgtatcagactacgtgctgtcttcagccctctccatccttctgcctgcatcatccgtggcctgaccattttcagcatcagcctgtgcaacagcacatagccaacataaggtaagtgatccgaaagttttgcttttagcattcaactaatgccacgtgaacatgacagcttgtgtttattttcctgaaaggagaggagaaaaatgaggcacagaaagaaaacatgaaaacgcatattctgtggattgtgtgaagccaacaaaaacgcaaataaaataatactgtatatcgattttatccactgacttgttagtcaaatcctccc

SEQ ID NO: 23144 - DNA, 4769 bp, Homo sapiens
ggcacgagggctctgtggagctgcgcctgccaactcattgctttctgctgtgctgtgatcctgcagtcagttgccgctgttgctactgcaatcatttgcaccaaactgagccagagaagttccctcttttaacataaagagtcaagaaattggagcatggctatgagcaatggaaacaatgattttgtggttctgagcaacagcagcatcgcaaccagtgctgctaacccgagtcccctcaccccctgtgatggagaccatgcagcccagcagctcacacccaaagaagcaacaagaacaaaagtgagtccaaatggatgcctgcaacttaatggcacggtcaaatcatcctttctgcctttagacaaccaaagaatgcctcagatgttaccccaatgctgccatccttgcccataccatcaccctttgactagccatagcagtcaccaagagtgccatcccgaggctggccctgcagcaccctctgctttggcctcgtgttgcatgcagccacactccgagtattctgcatctctttgtccaaatcattcacctgtgtatcagactacgtgctgtcttcagccctctccatccttctgcctgcatcatccgtggcctgaccattttcagcatcagcctgtgcaacagcacatagccaacataagaccatccagacctttcaagttgccaaaaagttatgcagccctgatagccgactggccggtggtggtcttgggcatgtgcaccatgttcatcgtagtctgtgccttggttggagtattagtgccagagctccctgacttctctgatccattgctgggttttgaaccaagaggaacagcaataggccagagattggtcacatggaataatatggtgaaaaatacaggatacaaagcaacattagcaaattatccctttaaatatgcagatgaacaagccaaaagccatcgggatgatagatggtcagatgatcattatgaaagagagaaaagagaagttgactggaacttccacaaggacagctttttctgcgacgttccaagtgaccgatattccagagtggtatttacttcatctggaggggagacattatggaatttacctgcaattaaatcaatgtgcaatgtagataattccaggatcagatctcatccccagtttggtgatctctgccagaggaccactgctgcctcctgctgccccagctggacactgggaaactacatcgccattctgaacaatagatcgtcctgtcagaaaatagttgagcgagacgtttctcataccttgaagctgcttcggacttgtgccaaacactaccaaaatggcactctggggccagactgctgggacatggcagccagaagaaaggaccagctcaagtgcaccaatgtgccacgcaaatgtaccaagtacaatgctgtgtaccagatcctccattacttggtggacaaagactttatgaccccaaagacggctgactatgccacgccagctttaaaatacagcatgctcttctctcccacagagaaaggggagagcatgatgaacatttacttggacaactttgaaaactggaactcttctgacggcgtgactaccatcaccgggattgagtttggtatcaaacacagtttgtttcaggattatcttctaatggatactgtgtatcctgccatagccattgtgattgtccttttagttatgtgtgtctacaccaagtccatgtttatcactctgatgacaatgtttgcaataatcagttctttgattgtttcctattttctctatcgtgtagtatttcacttcgaattttttccttttatgaacctcactgccctcattattttggttggaattggagcagatgatgcttttgtcctgtgtgatgtttggaactacacaaaatttgataagcctcatgccgaaacctcagaaacagtaagcatcaccttgcagcacgctgccctctccatgttcgtcaccagttttaccactgctgctgccttttatgctaactatgttagcaacattacagcaatccgatgctttggggtttatgcggggacagctatattggtgaattacgttttgatggtcacatggcttccagcagttgttgtgctgcatgagcggtatcttcttaatatattcacttgcttcaaaaagccccagcagcaaatatatgataacaaaagctgctggacagtggcttgccagaagtgccacaaagtactctttgccatttcagaagcatctcgaatttttttcgaaaaagtattgccatgcattgtcattaagtttcgctacctttggctgttttggttccttgccttaactgtaggtggggcctacattgtatgtataaatccaaagatgaaactgccctcactggagttatccgagttccaggtgttccggtcgtcccatccttttgagcgttatgatgctgaatacaaaaagcttttcatgtttgaacgtgttcaccatggcgaggagctccacatgcccatcacagtaatctggggcgtgtccccagaagacaatggcaacccactaaatcccaagagtaaagggaagttgacattagatagcagttttaacatcgccagcccagcttcccaggcctggattttgcacttctgtcaaaaactgagaaaccaaacattcttttaccagactgatgaacaggacttcaccagctgcttcattgagacattcaaacagtggatggaaaaccaggactgtgatgagcctgccctgtacccatgctgcagccactggagcttcccctacaagcaagagatttttgaactgtgcatcaagagagctatcatggagctggaaaggagtacagggtaccatttggatagcaaaaccccagggccgaggtttgatatcaatgatactatcagggcagtggtgttagagttccagagtacctacctcttcacactggcttatgaaaagatgcatcagttttataaagaggtggactcgtggatatccagtgagctgagttcggcccctgaaggcctcagcaatggttggtttgtcagcaatctggagttctatgacctccaggatagcctctccgatggcaccctcattgccatggggctgtcagttgctgttgcatttagcgtgatgctgctgacaacttggaacatcatcataagcctttatgccatcatttcaattgctggaacgatatttgtcactgttggttctcttgtcctgctgggctgggagctcaatgtgttggaatctgtcaccatttcggttgccgtcggcttgtctgtagactttgccgtccattatggggttgcctaccgcttggctccagatcccgaccgagaaggcaaagtgatcttctctctgagtcgcgtgggctctgcgatggccatggctgccctgaccaccttcgtggcaggggccatgatgatgccctccacagttctagcttacacccagctgggcaccttcatgatgctcatcatgtgtatcagttgggctttcgccaccttctttttccagtgcatgtgccggtgccttggaccacagggtacctgtggtcagattcctttacctaaaaaactacagtgcagtgccttttcccatgccttgtctacaagtcccagtgacaagggacaaagcaaaacacataccataaatgcttatcatttagatcccaggggcccaaaatctgaactggagcatgagttttatgaattagaacctctggcttcccacagctgcactgcccctgagaagaccacttatgaagagacccacatctgctctgaatttttcaacagccaagcaaagaatttagggatgcctgtgcatgcagcttacaacagtgaactcagcaaaagcactgaaagtgacgctggctctgccttgttacagccccctcttgaacagcataccgtgtgtcacttcttctctctgaatcagagatgtagctgccccgatgcctacaaacacttgaactatggcccacactcttgccagcagatgggggactgcttgtgccaccagtgctctcctaccactagcagctttgtccagatccaaaacggcgtggcacctctgaaggccacacaccaagctgtcgagggctttgtgcaccccatcacgcacatccaccactgtccctgcctgcagggcagagtaaagccagccggaatgcagaattctctgcctaggaattttttcctccacccagtgcagcacattcaggcccaagaaaaaattggcaagaccaatgtacacagtcttcagaggagcatagaagagcatcttccaaagatggcagagccatcgtcatttgtctgcagaagcactggatcgttactcaaaacgtgttgcgaccccgagaataaacaaagggaactctgtaaaaatagagacgtgagcaatctggagagcagtggagggactgaaaacaaggcaggagggaaagtggagctgagcttgtcacagacggatgcaagtgtgaactcagaacatttcaatcagaatgaaccaaaagtcctatttaatcatttaatgggggaggctggttgtaggtcttgcccaaataattcacaaagttgtggcagaattgtgagagtgaagtgcaattctgtggactgtcaaatgccaaacatggaagccaatgtgcctgctgtattaacacactcggaactttctggtgaaagtttgttaataaaaacactataataaatgcagcattcaattcagaaaaagtgcctcaatta

SEQ ID NO: 23145 - DNA, 4672 bp, Homo sapiens
atttggcgaggcagtctccctcccagagtgttgggattacagagtcaagaaattggagcatggctatgagcaatggaaacaatgattttgtggttctgagcaacagcagcatcgcaaccagtgctgctaacccgagtcccctcaccccctgtgatggagaccatgcagcccagcagctcacacccaaagaagcaacaagaacaaaagtgagtccaaatggatgcctgcaacttaatggcacggtcaaatcatcctttctgcctttagacaaccaaagaatgcctcagatgttaccccaatgctgccatccttgcccataccatcaccctttgactagccatagcagtcaccaagagtgccatcccgaggctggccctgcagcaccctctgctttggcctcgtgttgcatgcagccacactccgagtattctgcatctctttgtccaaatcattcacctgtgtatcagactacgtgctgtcttcagccctctccatccttctgcctgcatcatccgtggcctgaccattttcagcatcagcctgtgcaacagcacatagccaacataagaccatccagacctttcaagttgccaaaaagttatgcagccctgatagccgactggccggtggtggtcttgggcatgtgcaccatgttcatcgtagtctgtgccttggttggagtattagtgccagagctccctgacttctctgatccattgctgggttttgaaccaagaggaacagcaataggccagagattggtcacatggaataatatggtgaaaaatacaggatacaaagcaacattagcaaattatccctttaaatatgcagatgaacaagccaaaagccatcgggatgatagatggtcagatgatcattatgaaagagagaaaagagaagttgactggaacttccacaaggacagctttttctgcgacgttccaagtgaccgatattccagagtggtatttacttcatctggaggggagacattatggaatttacctgcaattaaatcaatgtgcaatgtagataattccaggatcagatctcatccccagtttggtgatctctgccagaggaccactgctgcctcctgctgccccagctggacactgggaaactacatcgccattctgaacaatagatcgtcctgtcagaaaatagttgagcgagacgtttctcataccttgaagctgcttcggacttgtgccaaacactaccaaaatggcactctggggccagactgctgggacatggcagccagaagaaaggaccagctcaagtgcaccaatgtgccacgcaaatgtaccaagtacaatgctgtgtaccagatcctccattacttggtggacaaagactttatgaccccaaagacggctgactatgccacgccagctttaaaatacagcatgctcttctctcccacagagaaaggggagagcatgatgaacatttacttggacaactttgaaaactggaactcttctgacggcgtgactaccatcaccgggattgagtttggtatcaaacacagtttgtttcaggattatcttctaatggatactgtgtatcctgccatagccattgtgattgtccttttagttatgtgtgtctacaccaagtccatgtttatcactctgatgacaatgtttgcaataatcagttctttgattgtttcctattttctctatcgtgtagtatttcacttcgaattttttccttttatgaacctcactgccctcattattttggttggaattggagcagatgatgcttttgtcctgtgtgatgtttggaactacacaaaatttgataagcctcatgccgaaacctcagaaacagtaagcatcaccttgcagcacgctgccctctccatgttcgtcaccagttttaccactgctgctgccttttatgctaactatgttagcaacattacagcaatccgatgctttggggtttatgcggggacagctatattggtgaattacgttttgatggtcacatggcttccagcagttgttgtgctgcatgagcggtatcttcttaatatattcacttgcttcaaaaagccccagcagcaaatatatgataacaaaagctgctggacagtggcttgccagaagtgccacaaagtactctttgccatttcagaagcatctcgaatttttttcgaaaaagtattgccatgcattgtcattaagtttcgctacctttggctgttttggttccttgccttaactgtaggtggggcctacattgtatgtataaatccaaagatgaaactgccctcactggagttatccgagttccaggtgttccggtcgtcccatccttttgagcgttatgatgctgaatacaaaaagcttttcatgtttgaacgtgttcaccatggcgaggagctccacatgcccatcacagtaatctggggcgtgtccccagaagacaatggcaacccactaaatcccaagagtaaagggaagttgacattagatagcagttttaacatcgccagcccagcttcccaggcctggattttgcacttctgtcaaaaactgagaaaccaaacattcttttaccagactgatgaacaggacttcaccagctgcttcattgagacattcaaacagtggatggaaaaccaggactgtgatgagcctgccctgtacccatgctgcagccactggagcttcccctacaagcaagagatttttgaactgtgcatcaagagagctatcatggagctggaaaggagtacagggtaccatttggatagcaaaaccccagggccgaggtttgatatcaatgatactatcagggcagtggtgttagagttccagagtacctacctcttcacactggcttatgaaaagatgcatcagttttataaagaggtggactcgtggatatccagtgagctgagttcggcccctgaaggcctcagcaatggttggtttgtcagcaatctggagttctatgacctccaggatagcctctccgatggcaccctcattgccatggggctgtcagttgctgttgcatttagcgtgatgctgctgacaacttggaacatcatcataagcctttatgccatcatttcaattgctggaacgatatttgtcactgttggttctcttgtcctgctgggctgggagctcaatgtgttggaatctgtcaccatttcggttgccgtcggcttgtctgtagactttgccgtccattatggggttgcctaccgcttggctccagatcccgaccgagaaggcaaagtgatcttctctctgagtcgcgtgggctctgcgatggccatggctgccctgaccaccttcgtggcaggggccatgatgatgccctccacagttctagcttacacccagctgggcaccttcatgatgctcatcatgtgtatcagttgggctttcgccaccttctttttccagtgcatgtgccggtgccttggaccacagggtacctgtggtcagattcctttacctaaaaaactacagtgcagtgccttttcccatgccttgtctacaagtcccagtgacaagggacaaagcaaaacacataccataaatgcttatcatttagatcccaggggcccaaaatctgaactggagcatgagttttatgaattagaacctctggcttcccacagctgcactgcccctgagaagaccacttatgaagagacccacatctgctctgaatttttcaacagccaagcaaagaatttagggatgcctgtgcatgcagcttacaacagtgaactcagcaaaagcactgaaagtgacgctggctctgccttgttacagccccctcttgaacagcataccgtgtgtcacttcttctctctgaatcagagatgtagctgccccgatgcctacaaacacttgaactatggcccacactcttgccagcagatgggggactgcttgtgccaccagtgctctcctaccactagcagctttgtccagatccaaaacggcgtggcacctctgaaggccacacaccaagctgtcgagggctttgtgcaccccatcacgcacatccaccactgtccctgcctgcagggcagagtaaagccagccggaatgcagaattctctgcctaggaattttttcctccacccagtgcagcacattcaggcccaagaaaaaattggcaagaccaatgtacacagtcttcagaggagcatagaagagcatcttccaaagatggcagagccatcgtcatttgtctgcagaagcactggatcgttactcaaaacgtgttgcgaccccgagaataaacaaagggaactctgtaaaaatagagacgtgagcaatctggagagcagtggagggactgaaaacaaggcaggagggaaagtggagctgagcttgtcacagacggatgcaagtgtgaactcagaacatttcaatcagaatgaaccaaaagtcctatttaatcatttaatgggggaggctggttgtaggtcttgcccaaataattcacaaagttgtggcagaattgtgagagtgaagtgcaattctgtggactgtcaaatgccaaacatggaagccaatgtgcctgctgtattaacacactcggaactttctggtgaaagtttgttaataaaaacactataataaatgcagcattcaattcagaaaaagtgcctcaatta

SEQ ID NO: 23146 - DNA, 719 bp, Homo sapiens
gcggaccgcgccaggcggaagcccggctccgggccagcatccgagagcccggactggagagtcaacttttataacactgttactgggaatacttgacttactaagcttttactgaacactttaattttgggagtacaatttctaaactcacgaaataatcttcatgcaacaagatgttattttatcaaattttggtattacatgctcattctttgacaaattttaattaacagatttctgagagagcagacaccatcttatttctgttgaattgtatttagtaactcaaaaggcatataccaagctgtcagaagcagcttcatttaaaagaaataaaatttctagtcctgcctgaagtttaagctagcccatgactacacaagtgcaactgtatttcccaggtagatgccggtagattgggcccagtaagtttgggccgttgggatgtgaaaggaagagatgcgggcaactttttgggtcatcttcttaaagaaaaagccatttgtcctggatgccctcttttcttttttctctttggctgggaaatgacaagaattaaagcagcagccttggatccagagatggacgccaattgatgaagacagcagaactgactggctagtctgggttccctggagcagagctgtctctccaccctaggttatccacttacttttgtactgttatgtgagagagaaataaacttctatcttctttaa

SEQ ID NO: 23147 - DNA, 527 bp, Homo sapiens
tcggcgcgccgccgcccggcgccgcgggactgggagaccggatttctgagagagcagacaccatcttatttctgttgaattgtatttagtaactcaaaaggcatataccaagctgtcagaagcagcttcatttaaaagaaataaaatttctagtcctgcctgaagtttaagctagcccatgactacacaagtgcaactgtatttcccaggtagatgccggtagattgggcccagtaagtttgggccgttgggatgtgaaaggaagagatgcgggcaactttttgggtcatcttcttaaagaaaaagccatttgtcctggatgccctcttttcttttttctctttggctgggaaatgacaagaattaaagcagcagccttggatccagagatggacgccaattgatgaagacagcagaactgactggctagtctgggttccctggagcagagctgtctctccaccctaggttatccacttacttttgtactgttatgtgagagagaaataaacttctatcttctttaa

SEQ ID NO: 23148 - DNA, 596 bp, Homo sapiens
ccgagaagcccggactggagtatctgagaacatatttcttccctataggagttgagaagaggaggaagaataatgggaggagacaggacctttttcaacttgacaaatagatttctgagagagcagacaccatcttatttctgttgaattgtatttagtaactcaaaaggcatataccaagctgtcagaagcagcttcatttaaaagaaataaaatttctagtcctgcctgaagtttaagctagcccatgactacacaagtgcaactgtatttcccaggtagatgccggtagattgggcccagtaagtttgggccgttgggatgtgaaaggaagagatgcgggcaactttttgggtcatcttcttaaagaaaaagccatttgtcctggatgccctcttttcttttttctctttggctgggaaatgacaagaattaaagcagcagccttggatccagagatggacgccaattgatgaagacagcagaactgactggctagtctgggttccctggagcagagctgtctctccaccctaggttatccacttacttttgtactgttatgtgagagagaaataaacttctatcttctttaa

SEQ ID NO: 23149 - DNA, 983 bp, Homo sapiens
gcggaccgcgccaggcggaagcccggctccgggccagcatccgagagcccggactggagagtcaacttttataacactgttactgggaatacttgacttactaagcttttactgaacactttaattttgggagtacaatttctaaactcacgaaataatcttcatgcaacaagatgttattttatcaaattttggtattacatgctcattctttgacaaattttaattaacagatttctgagagagcagacaccatcttatttctgttgaattgtatttagtaactcaaaaggcatataccaagctgtcagaagcagcttcatttaaaagaaataaaatttctagtcctgcctgaagtttaagctagcccatgactacacaagtgcaactgtatttcccaggtagatgccggtagattgggcccagtaagtttgggccgttgggatgtgaaaggaagagatgcgggcaactttttgggtcatcttcttaaagaaaaagccatttgtcctggatgccctcttttcttttttctctttggctgggaaatgacaagaattaaagcagcagccttggatccagagatggacgccaattgatgaagacagcagaactgactggctagtctgggttccctggagcagagctgtctctccaccctaggttatccacttacttttgtactgttatgtgagagagaaataaacttctatcttctttaaaaaaaaaaaaaaaaaaaaaaaaaaaaaaaaagggggggggggaaaaaattcccccgggggggcccaattaacggcagtacccaggtttcttgtggtacaagggggccccataatggaggagcccgatataataatagagcgaggacggggccggcggcttaacaacggcggggagcggggaaaacctggtgacgctgggcaccttcggggaaggagaccctatcttgcggggggggcgacataatgtggggcaaaattacccta

SEQ ID NO: 23150 - DNA, 843 bp, Homo sapiens
ccgagaagcccggactggagtatctgagaacatatttcttccctataggagttgagaagaggaggaagaataatgggaggagacaggacctttttcaacttgacaaatagagtcaacttttataacactgttactgggaatacttgacttactaagcttttactgaacactttaattttgggagtacaatttctaaactcacgaaataatcttcatgcaacaagatgttattttatcaaattttggtattacatgctcattctttgacaaattttaattaacagatttctgagagagcagacaccatcttatttctgttgaattgtatttagtaactcaaaaggcatataccaagctgtcagaagcagcttcatttaaaagggattataatacctacctatgacagagactgccaaatatactccagtagccattctgcttttcttcttttcagaaataaaatttctagtcctgcctgaagtttaagctagcccatgactacacaagtgcaactgtatttcccaggtagatgccggtagattgggcccagtaagtttgggccgttgggatgtgaaaggaagagatgcgggcaactttttgggtcatcttcttaaagaaaaagccatttgtcctggatgccctcttttcttttttctctttggctgggaaatgacaagaattaaagcagcagccttggatccagagatggacgccaattgatgaagacagcagaactgactggctagtctgggttccctggagcagagctgtctctccaccctaggttatccacttacttttgtactgttatgtgagagagaaataaacttctatcttctttaa

SEQ ID NO: 23151 - DNA, 666 bp, Homo sapiens
atttggcgaggcagtctccctcccagagtgttgggattacagagtcaagaaattggagcatggctatgagcaatggaaacaatgattttgtggttctgagcaacagcagcatcgcaaccagtgctgctaacccgagtcccctcaccccctgtgatggagaccatgcagcccagcagctcacacccaaagaagcaacaagaacaaaagtgagtccaaatggatgcctgcaacttaatggcacggtcaaatcatcctttctgcctttagacaaccaaagaatgcctcagatgttaccccaatgctgccatccttgcccataccatcaccctttgactagccatagcagtcaccaagagtgccatcccgaggctggccctgcagcaccctctgctttggcctcgtgttgcatgcagccacactccgagtattctgcatctctttgtccaaatcattcacctgtgtatcagactacgtgctgtcttcagccctctccatccttctgcctgcatcatccgtggcctgaccattttcagcatcagcctgtgcaacagcacatagccaacataagaccatccagacctttcaagttgccacaaagttatgcagcttccacaacaacatcaacacaatcttcacatctgcccttctatgtgtcggtaccgagcc

SEQ ID NO: 23152 - DNA, 567 bp, Homo sapiens
gcggaccgcgccaggcggaagcccggctccgggccagcatccgagagcccggactggagagtcaacttttataacactgttactgggaatacttgacttactaagcttttactgaacactttaattttgggagtacaatttctaaactcacgaaataatcttcatgcaacaagatgttattttatcaaattttggtattacatgctcattctttgacaaattttaattaacagatttctgagagagcagacaccatcttatttctgttgaattgtatttagtaactcaaaaggcatataccaagctgtcagaagcagcttcatttaaaagaaataaaatttctagtcctgcctgaagtttaagctagcccatgactacacaagtgcaactgtatttcccagaattaaagcagcagccttggatccagagatggacgccaattgatgaagacagcagaactgactggctagtctgggttccctggagcagagctgtctctccaccctaggttatccacttacttttgtactgttatgtgagagagaaataaacttctatcttctttaa

SEQ ID NO: 23153 - DNA, 596 bp, Homo sapiens
ccgagaagcccggactggagtatctgagaacatatttcttccctataggagttgagaagaggaggaagaataatgggaggagacaggacctttttcaacttgacaaatagggtctcactcttgcccgggctggccttgaactcctgggctcaagccatctacctgcctcgacctcccagagtgttgggattacagaccatccagacctttcaagttgccaaaaagttatgcagccctgatagccgactggccggtggtggtcttgggcatgtgcaccatgttcatcgtagtctgtgccttggttggagtattagtgccagagctccctgacttctctgatccattgctgggttttgaaccaagaggaacagcaataggccagagattggtcacatggaataatatggtgaaaaatacaggatacaaagcaacattagcaaattatccctttaaatatgcagatgaacaagccaaaagccatcgggatgatagatggtcagatgatcattatgaaagagagaaaagagaagttgactggaacttccacaaggacagctttttctgcgacgttccaagtgagtgacattgtagatgaa

SEQ ID NO: 23154 - DNA, 3037 bp, Homo sapiens
ggaggattgcttgagtccaggagatcaaggctgtagtgagctgtgattgccccaggcaacagagtgagaccctgtctcaaacaacaacgacaacaacaaaacccactcaggctatatttaaactagatgaggccagatgtggtggcacatgtctgtggtcccagctactgaagaggctgaggtgggatgattacttaagcccaggaattcggggctatagtgagctatactgatggggtatctatactgtttggcatcaatatggtggccactggggagcatggtaccaccaggttgcctaaggaggggtgaactggcccaggttggaaacagagtgggtcaaaacttctgtgctggtcagtagtgggatcatgcctgtgaattgccactgcactccagtctgggcaacatagcaagaccccatcttaaaaaaaaaaaaaaactaatgggaaatgcttcattttggaagtgctgaaattctgaacccactagtgcaccagtggtaaattatcatgttacctgttatgccagatgaccaagagctaaggacatccccctgctaaaagcagtttatttcttgtacaccaagggtcaggcctcatacagaaaacatgagcaaactgatgactatgaaaataggaactgttactttttaatgttttctgcaaaagcttttgaaataaatagttcactgttttgcagatcacgttactagaaggacacatttatagttgtgggcggatgtggaatcagagggaaatttacactggacaccaccaccaagcccaaattattataatttagtcttgaatcactttaatcaacactttaaaatattttggtattcttagccataatttattttgttctcttacaagtgctctttagcagttttctggatcatcaaataagagttcagtaaaatttacttttgggtcaattagttggaatgacacttttggaattatcaattactttatttctgatgaattttgaacaggactcaccaacctcatttcttagtttagccgttttgagttacataaagacaaaaacatggcaaggattttacagcaggaaaatgatttgtttttgtttttcaacattcctataatccagagagctgaagaaatctttgatctagaaagcttggaaattcaaagcccctcaaggcacttcttttttttttttcaaattaaagaagaattaaaaacagtatttgtaatggaaaattttggtgccattaagtacataatggcttttactttagtctgtaattcatcctgtggatttaagattttggccaagagtaagttttaggtgtgatataacataagtgcctccaaggtttgctagtgttactgacattctagagtggtggaaaaacaactggcattaatgcagaattggagtgactagtcccaggaatcaagtcagaaaaaaagaccaactgacaaatagagttaatacaaaatgaattttaaaatcccaccctaggccaggcgcggtggctcatgcctgtaatcccagcactttgggaggccgaggcgggcggatcacaaggtcaggagttcgagaccagcctggccaatatggtgaaaccccattgctactaaaaatacaaaaattagcagggcatggtggcaggcacctgtaatcccagctacttgagaggctaaggcaggagaattgcttgaacccgggaggcggaggttgcagtgagccgatatcccaccactgcactccagcctgggcaacagagcgagactctgtgtcaaaggaaaaaaaaaattcccaccctagttagattaggatgcagaggactcacagatttggaggatttggaggacccaaattaccaaaaccccttctattacacacttgtaaagttttattagcagtcaggtacgttttcaggtacgtttccacccccattaacttttcagagcatgtgaggactttcttcctggagcatggtgggccttcaaagcgctgttaaaactacagccgccatttgtccgaggtggtaacattatgtcctgttatagatatcctggatctatttccaggatccagatatctctatttgaaaatgaccgtttttcttccctggtcttaaaagacaagcctgcttccggtgcctctgctggacaccaggagctgcactctgacaaactgtccagggtaaaggaggaagaactggtcagcctagggcacagaaactccagacttgatttaaccgtgtctgcttgaagcatagcctctcttacaaagacttcagaactcctgaattggctccaagccttgtgtgaggtgctctctgcttgccactggccatccctgggtactcaatgtggggctcttttgggaagccatctccagatgcttccttactctgagctgtacctgcttatggccctggtgtctcccatctcctccctggactggaagctcctctctagggcaaggattagatctcattcataatctacccccagacagagtatttcacacctaattaatgttcagtaagtatgttcagaataaatgtatattagtcccttttcatgctgctgataaagacgtacccaagactgggcaatttacaaaagaaagatgtttaatggactcacagttccatgaggctggggaggcctcacaatcatggtggaaggttaaaggcacgtctcatatggtagcagacaagggaagagagctgatgcagggaaactctcccctacaaaatcatcagatctcctgagactcattcatcaccatgagaacagcatgggaaagacccaccccctacaattcaaccacctcccaccgggtccctcccacaacacgagggaactgtgggagccacaagtcaagatgagatttgggtggggacacagccaaaccctatcaaaatggccaaaaagaatatgctcaaatttagactatgaggtacttataatccctcaagcccctgaagattgtcaaacactgaacttgcctttcagctatttctactatttttcaaaagacttatctt

SEQ ID NO: 23155 - DNA, 477 bp, Homo sapiens
gaactaagaaatgacatgatctcactgatattttaaaaatagactgaagagtagaagggggaaggaaccagagcaaccagtcagaaggcatttcagagaactgaaccagggtgcagtgggaagacagaattgtatctgtgtgtgttttgaaggtaaagaagacattacctgctgatggattagatatggaagtgtgacaaagaagtgccaagaataaccccaagcattttgacacaagcagcccaaaaatcaaggctgccatttaccaagatggggaagggtaaaggaagaccaggttggcgggcagcgggtggggcaggattcaggagtttggatttggacatgttaggtttgacatacctatttcacagtcgttgaagtggagacctaccttagtctcactgagccgccactgccccctaggtagcctgtggatcactacataggctgagggctggtctgctggctctgtgttct

SEQ ID NO: 23156 - DNA, 474 bp, Homo sapiens
atagtaggaaaaggatgagcattgtagctagtcacactcaaagggtacaagtatgcattcattagctcctaaattccctgatgatataattcacgagcatctgccatttatgaattttcgatattcctctatgtctgaaatacatgcatatatttatatcatataccaagggtccaactactatacaaagatttaacaaagcatctcaccttccggccataataggaaaatcatgtcacatttacccaaatgtggatacatctatctatttccattaaaaattatgcatagatgtcaggaaaaatgacagcaaggaattccagggacatacctgtccttagaaaaacaggaaaaaaaaaaaacactgtcacattccattttattggaaatttgttttaaaaaaaaaagtttaccaaaccactgtttaaaacaagaaaatgcttaaattaaaaaagcaactgaaactcagctgga

SEQ ID NO: 23157 - DNA, 689 bp, Homo sapiens
ctcttcccatggttcctaggaccatttcagacaagtgccaccacgcgacctcagcctcatgcaatctacaccctacatgccccccagagctggtgtgcctgggtgggctcagagaactcctagcaatcctccaagacccaactcaaacatcacctctcccctggagccctgctgtggaaacaaacagcaggctcagcactaataaaagcctcaccccatcatcttgagaatgaatgcaacacaccgtgccattcttgttgaattgtatgcttgcttccctccctgtgagagttctcaagtgcccaaaccagagcctacacatatcctaaggccggatgtgtgcttttttatgtgtcacgctacagggatccaaacagcgccaagaagatgaagaaggacccactgctgaaagggttaacatgttctgagctgtcccagaggcaggtggagtgggttctttctctgactttagtgatgaagaaactaaggcttggtataggtcagcggcctatgcaagcaggtaagtgacctctgactcagatgcttctcccacctgcccggcgggtccaaatttctgcccaatgccagatgacaaaactgcacagcaaaacaagttgttgttttttgggtttttttttctgagacagagtctcactctgtcacccaggctggagagcagactctgtctc

SEQ ID NO: 23158 - DNA, 248 bp, Homo sapiens
ctctcaaacacagtatcacttaagagaacaatatttagagcgatttaaaaagtctaagcaaaaccttactctgtggtctttttttagtctatcagctgaattataacaatgcttttacaaatattttcttttcattctttaccacaagtgttattctaattataatgcagttttatagcaatttttatagatccccaatagtcacatgctagataataaacattcttggaagcagtaggtctaaaggg

SEQ ID NO: 23159 - DNA, 212 bp, Homo sapiens
agcccggaaatgggaaggctctgtggtttcctctctgggttccagttagattcctttcgggaaagtgaacttggatatggagttgagtgaccccgagtgcacccccgcagtaaatgatgctcaggactaaagtgactgaaggcttttggggaaacagatgcgaacaaaacagcagtattcattttctaattaaaagcttgtgaaaatcgatg

SEQ ID NO: 23160 - DNA, 358 bp, Homo sapiens
tatttattttgcagaaataaaatgtctccctttttcttgcactctgaagatttagtagaatgaaaattacaataagcagagagagaatgttaccaactgcagatgtcagactcacatgtaccctcaggcacacacacacacacacacacatttctgcacttgtgaggccgttaagaagagcattttataaccttgcactctctaagctaaacttagccttaaatgggcatcagagaaataccaaaagatctgtgggaacttaactttttggcactagctcagttgatacccttatcttgaatgccattaagaacagagggaaagaaaattagagaaggaaaagcagacagtgggaagt

SEQ ID NO: 23161 - DNA, 476 bp, Homo sapiens
aacctccaaatgagtacacaaggtaaatacatattttataggcctatagctcatataatcgccaagctgaaagagttctttaagatctaagtataagtcctctggtctatagaatgaatgagtgaggcttgggtttcagttctggcttcttaactagctatgtgactttgggcagttcatttgtaccctctaaggttgtcagttaattcatctgtaaaagggaagtaatgccatctatctcatggagttgttcattttgttcatttcaacaatatttattgagtgcttatctgtgtatgatgctgttctagacacaataaacaagaccccaagaaatgttcctcctcgtgagcacacatttcagtgagggagacagacaagaaataagataaattagtaggctgggcacggtggctcacgcctgtaatcccagcactttgggaggccgaggcgggtggatcacgaggtcaggagat

SEQ ID NO: 23162 - DNA, 374 bp, Homo sapiens
agttacccagaacaggagttatcatggcccttacagtcccccaggaagaagaatggagacttttttttaaccgagccaggccaagggataaaaccagctctagctaagcaatggccttgaatatgggcagaggataatcctccaggactggtggtcaaccaagcccctgtactcatagaagttaagcctggggcccaaccaattagacaaaagcagtatccagttcccagggaagctcttgaaggaatccaggctcaactcaggcacttgaaagcctatggaattatagttccttgccagtctccatggaactcggttgttggagacgtgagtcttgctaaagctcttgcctaaataaagcccttccttcttta

SEQ ID NO: 23163 - DNA, 477 bp, Homo sapiens
tgtcttgcaagaagacatgggtagtgaggatgaaagtgagaactcccactattgagtgaaattctcaaatggggggaataagggaggagaccaccccttatattgtcttatgcccaatttctgcctccaaagaaagaagaagtaaaaactaaaaggcagaaatgaaatctacaaacagacaacccggtgccacaccctgggcctggtagttaaagatcgacccctgacctaatcagttatttgcataaaaaaggcactgtgaagatccgtgtcctgttcagtttctttctaattaccgatgtatgcagcccccagtcatgtacccctgcttgctcaattgatcacgaccctctcaagcggacacccttagagttgtgagcccttaaaagggacaggaattgctcacttggggagctcggttgttggagacgtgagtcttgctaaagctcttgcctaaataaagcccttccttcttta

SEQ ID NO: 23164 - DNA, 466 bp, Homo sapiens
actgaaaagccccaggcccctcctcagcccacccctctggcccgggccctcctggaccctcaatcaattctggaagtcctggtttcgacacccccacccagtccgggggacacaccctacctgtcgctgcagtcaaagccaatgaaaccaacccctgcgaggggcccagcccctgttcctgggctagggcttctgacaaaggattgggctggcccctcttcagccatccatgaaccctatcaaggatgacaggggtggacacagttgttcatccgtggaagctgcttccattccccgggtggctcgcgagtaggcttctcatcttactgatggggagactgaggcttaggatgtagctaatgagccatggggaggagagagggggtgactctgcagccagggcttgggaccccagagggactggatctgaggccaatcagaggacctgattcagaggtccccaagg

SEQ ID NO: 23165 - DNA, 407 bp, Homo sapiens
ttttttttttttgagacagagtctcactgcattgcccaggttggagtgcagtggtgtgatctcgacttgctgcaacctccacctcccgggttcaagcgattctcgtgccttagcctcccgcgtagctgggattacaggtgcaggctaccacacctggctaaatttctgtatttttagtagagacagggtttcaccacgttggccaggctggtctcgaactcctgacctcaggtgatccacctgccttggcctcccaaactgctgggatcacaggcgtgagccaccgtacctggccaccattactttcaatggcaaaattgcaccaacctattaaaataaattagtaatgattaagtcacatgccccaccttttgatactaacactgatgggtaattgaatagctcat

SEQ ID NO: 23166 - DNA, 616 bp, Homo sapiens
tttttttttggacagttttaattttatagattaatttaggggaatttgacatcattatcatgttaaagctttttatctaaaccatggtgcactatctaaaaatcatgccccttcatctttttttgtttccttcagatgaattttacactttacagagatctcatacatttttaagagtttattttttttaatttttacattttattgcctttattaatgaaatcctgtttataattttgcctaattttagtgcatgtaaaggccaattatttatgttaattttctacctggctacctgattccatttttttgttgtttttaatagtatttcacttaattagtttgtgtttgccaactacacagtcctgtcatcagcaaacactgataatgtaaccattgttacagtttgcattcctctttgtatcttaattgcattgtctagtacttctaaaataatgttcaataactggctataatgaattgagttgagatagatttaatcatattaaggagtatcaactaatccctagtcttaaaactttttaaagactgcatgtttaattttatcacatgccttttcgacatctgtggagatgatcatatgattttttttcct

SEQ ID NO: 23167 - DNA, 392 bp, Homo sapiens
tgggggtgaaaagttgaggaagtttttgcttgtttgccttaattatctcaggtaagtacatagaaaatatctccatctagtgaataagaaaattgggactggccaggcgtggtggcttatgcatgtaatcccagcacttggggaggctgaggcaggtggattatgaggtcaggaaatcgagaccatcctggctaacacggtgaaaccccgtctctactaaaaatacaaaaaaaaaaaaaaaaattagtcgggcgtggtggcgggcgcctgtagtcccagctactcgggaggctgaggcaggagaatggcgtgaacctgggaggtggagcttgcagtgagccgagattgcgccactgcactccaacctgggcaacagagcgagactccgtctc

SEQ ID NO: 23168 - DNA, 379 bp, Homo sapiens
ttttttttgagatggagtttcactcttgtcacccaagctggagtgcaatggtgcgatcttggctcactgcaacctccgcctcccaggttcaagtgattcttgtgcctcagcctcccaagtatctgagattacaggcctgagcaaccatgcccagctaatttttgtatttttagtagagactgggttttgccatgtcaggcaggctggtctcaaactcctgaccttaggtgatccacccacctcggcctctcaaagtgctgggattacaggtgggagccaccatgcctggccctaactaaaaacatttttaaacactgtgcagactaaataaatctgtggagtccatagggtccagttttagacccctggctgagctctc

SEQ ID NO: 23169 - DNA, 1096 bp, Homo sapiens
aagtgaccctctcacctcagcttcctgagtagctgggactacaggcatgcaccaccacgcctggctaatttttaaattttttgcagagacagggtctagctatgttgcccaccctggtcttgaactcctgggctcaagcaatctgtctgccttggtctcccagctcgctgggattacaggcatgaatcaccatgcccggtcctccaaagttgaacttttgagactcagtttccttcttggtaaattcaggctcctaggtgctacctcctcagagacatcctccttgaccacatcacatgacctctcgcagaggccagattctttaatgtattcatttgtctattatcatgtttccccagtagaagttgcacaaacggcaggggcttcatctgttttgtttgccgttatgtccttagcacctaaaattgtgcctggcacatatagtactcagtatgtatttgctgggtcaatgagtgagtgaatttatactaataacagcagctaccatttctagagtgtttaccatatattgggcactgtgtcaatcttcccaacaacccacagacgaagatcaattattacacccattgtacagatcaggaaactgagtcaggttaagaaacttgccctaaatcctacagtctcacttagaacttctgactgcagtgctcatcagaatgcattgtcaacccaaaggtcatttccagctcaggtggcttctatcaaaagagctcatcctggcctttccaagagccagacctccgacatcggtggagccctgtgcatagctggcctctcctgggcgtcttgtcccaagtacagagacctggatcctttcccactcatgtgcaacagcccaaaattaaaaacaaaagccatattaaaaaacaaaaccaactttctgccttaaaatattgtgagccagggggcaattagcaattatgctgtattttattatgagaagatagaattctaattggactgatttgaattccacacacctccacagattgttttgggaattaaggtatcagttgtatcggtaattatggtttaccattcaattacccccccacagaaaactgttaaattgtct

SEQ ID NO: 23170 - DNA, 917 bp, Homo sapiens
ggaattgaacgcacaagaaaagaataagaccccatcaaatacctggtgaatttgagacaaaagctgtaggaatgaaaaatagagtgattaaaaatcaattgatgggatatagagcagatttttgagaggattactgaacaggattctgtttccttctgccccaagtagaatgtcctctccgttgagaagaggtgcgggcagcagggagattttagttctaaacccaagccagaggaaatagttgtcattttccttgctctcttttgcccttttctaacagccagctgctggggcagtgctggtcctgggagcaaacgtcaccatctccctccagtcgggctggccaagtctcccagggaaattgaagaccagtacacctgaagcatgtaagccccaggctgcctctcccattctccttcccgttcatcagcagcataaagaaagttggcctgggttttcgtgactcggcagggtccactcagtttaaaatgccagaggacatggtgtggcaagttgactgtatcgtgatgttagccgtcttgtggcagagactcagagacttgaagggtaaagctcagtaaggcccacatccagagcctggggggccaatgactacaaggaaaatgaccctgctttctagccagcaccccactctcccgaacgcctctctcttcttaatagtctgaggaggtttatctcctttctgcagatgaagcagggaatctttgagaatctgagacactagtctgagaccacatagctgagggcgtggaggaacgtgccgaccccaaacacatgctggtggctaccatgcgaggctggctttttggatttagggccagccagcatttccaaattctgttcatggaacactgtagccctgatggaggataactggtattatagccaaaaaaaaa

SEQ ID NO: 23171 - DNA, 460 bp, Homo sapiens
agggccggctctggttgaatttggttttctggctactatcctcccccatgcagggatgtgggtcccctcatcggccattacaaagaggcacactaggcggcgcccatggcacatccaagcagtcacctgttgctcccggggtctcactggagggtacctccagggctcatcagcctgcacatcccagggcccaaacgccaccgcgaccttttgtccctccctggggtggccgagcctccatggccatcagttgggtcctgggcatggtcgcacactgcctgcatgatgtccacaaagtagtttacccactcaacttagcttcagtttcccccatgaagccctggtgcaggattcccacgtggatgctgcgggcatgacaccaacttgggtgaagcaggcagaacattcttccacagaggcatccccaactatttctgtctctgtgggaagtttgtcttat

SEQ ID NO: 23172 - DNA, 232 bp, Homo sapiens
agctgaaagccaagtataagcatggagttgaaatgagcatggacttgtgttgagaccacagatgcatcaagatttcaagctgtgcattatttaggccattttattcatttggctcccatttgaccacctcagctgcactgccagaggccagctaattcctctgcatctagcatcatctatgcctggataattcacgtatctcaccacacatgtatatcatttctttcttttg

SEQ ID NO: 23173 - DNA, 367 bp, Homo sapiens
aaaaaagatggttataaaatgcctgctgatttcagaaacagctccacagctggagcaacatactgattcatgaaatatgatgagaaacccaccagcacctcatccatcgagatgattattacactagcatttattaagtggtagatttttttctaccttgtagaattgtcttatttttatctctgatgttgataccttgtcttacctgagacaatgaataccagttacataccaaaagcatatttgtaacactatataatgtgaattcccccttaaaagatgcaaaaataacactgcaatgtcatgtattggcagcattttttatgtgtgtgtgtgtatatgtagccagctacagttatcttatcag

SEQ ID NO: 23174 - DNA, 298 bp, Homo sapiens
tattatgtcatttaatcctcactgggaccccatgaggtagacattattattcttattttatatattattacatggaaatataacttaatgatatatataacttaaaaatataacaatattataacaacaatttaccactccatctcactccagcatttaggacatttcttggtacatataaatattcaaaagtacaaattgagtttacttactataagcaagtagcttaagagtagattataattttacaatgtagaagaggtccttttgataatcacattctcatatttataaaacg

SEQ ID NO: 23175 - DNA, 806 bp, Homo sapiens
aaagccaggacagaactaacggctaggtacgaggctgggtgttgatgccccgctggcagatgctgagagttcttgaagaggagctcggcagggactggcaggccaaggtggcctccttggaggaggtgccctttgccgctgcctcaattgggcaggtgcaccagggcctgctgagggacgggacggaggtggccgtgaagatccagtaccccggcatagcccagagcattcagagcgatgtccagaacctgctggcggtactcaagatgagcgcggccctgcccgcgggcctgtttgccgagcagagcctgcaggccttgcagcaggagctggcttgggagtgtgactaccgtcgtgaggcggcttgtgcccagaatttcaggcagctgctggcaaatgaccccttcttccgggtcccagccgtggttaaggagctgtgcacgacacgggtgctgggcatggagctggctggaggggtccccctggaccagtgccagggcctaagccaggacctgcggaaccagatttgcttccagctcctgacgctgtgtctgcgggagctgtttgagttccgattcatgcagactgaccccaactgggccaacttcctgtatgatgcctccagccaccaggtgaccctgctggactttggtgcaagccgggagtttgggacagagttcacagaccattacatcgaggtggtgaaggctgcagctgatggagacagagactgtgtcctgcagaagtccagggacctcaaattcctcacaggctttgaaaccaaggtggggagacactgggggaga

SEQ ID NO: 23176 - DNA, 268 bp, Homo sapiens
aactagcagaggtactatcttgccaattagagctggcgctgcatgtcgttatgcagatcagactcatcagggggagccctcacctctgcctcaagcctcccgtggaaggcgagatggtcctggaggcagtcctcacctctgcctccctcgctcctccaacagctgccttctcccgggttccagcctctcagtgtgttggagaggtaggggtgcggggtgggggggagctgaatcttcaatcggaataaaagcagccctccccttcccc

SEQ ID NO: 23177 - DNA, 2292 bp, Homo sapiens
  misc_feature (17)..(17): n is a, c, g, or t
ggtttgctctgagcatncgaagcgcggcagggcgggacggactttcaaagacttggagttcccacgggtgtgggttcgagaccttcctctgccagttcccagctccgctaccctgagcaaatgacttacgctccattggattttccgcaatgtggctgaaggtggggggcctacttcgggggaccggtggacagctgggccagactgttggttggccttgtggggccctggggcctgggccccaccgctggggaccatgtggaggttcttgggcccaaaagttttaccaggatgggcctgggagaggcctgggtgaggaggacattcgcagggcacgggaggcccgtcccaggaagacaccccggccccagctgagtgaccgctctcgagaacgcaaggtgcctgcctcccgcatcagccgcttggccaactttgggggactggctgtgggcttggggctaggagtactggccgagatggctaagaagtccatgccaggaggtcgtctgcagtcagagggtggttctgggctggactccagccccttcctgtcggaggccaatgccgagcggattgtgcagaccttatgtacagttcgaggggccgccctcaaggttggccagatgctcagcatccaggacaacagcttcatcagccctcagctgcagcacatctttgagcgggtccgccagagcgccgacttcatgccccgctggcagatgctgagagttcttgaagaggagctcggcagggactggcaggccaaggtggcctccttggaggaggtgccctttgccgctgcctcaattgggcaggtgcaccagggcctgctgagggacgggacggaggtggccgtgaagatccagtaccccggcatagcccagagcattcagagcgatgtccagaacctgctggcggtactcaagatgagcgcggccctgcccgcgggcctgtttgccgagcagagcctgcaggccttgcagcaggagctggcttgggagtgtgactaccgtcgtgaggcggcttgtgcccagaatttcaggcagctgctggcaaatgaccccttcttccgggtcccagccgtggttaaggagctgtgcacgacacgggtgctgggcatggagctggctggaggggtccccctggaccagtgccagggcctaagccaggacctgcggaaccagatttgcttccagctcctgacgctgtgtctgcgggagctgtttgagttccgattcatgcagactgaccccaactgggccaacttcctgtatgatgcctccagccaccaggtgaccctgctggactttggtgcaagccgggagtttgggacagagttcacagaccattacatcgaggtggtgaaggctgcagctgatggagacagagactgtgtcctgcagaagtccagggacctcaaattcctcacaggctttgaaaccaaggcattctccgacgcccacgtggaggcagtgatgatcctgggggagcctttcgccacccagggcccttatgactttgggtcgggggaaacggcccgccgcatacaggacctcatcccggtgctgctgcggcaccggctgtgtcccccacccgaggagacctatgccctgcaccgcaagctggcaggggctttcctggcctgtgcccacctccgagcccacatcgcctgcagggacctcttccaggacacctaccaccgctactgggccagtcgccagccagacgcagccactgccggcagcctccccaccaaaggggactcctgggtggatccctcatgacagcctccatgggggattcagtccccagagcaggccgtaccctgctgtagtgcctcttatcccttccccgtctgccctgggtcagaggagcccccttgggcttcccagtcttgcctggctctcctccttggcccaggagctcaggatccctggggctggggaactcccaacttcgtgccctagatcctgcacctccccactcgaaagtgggtatccgaaaactaagccagggaagcggttaacttatctttgccaacatttgagggagccttgggccgctgcatgtcgttatgcagatcagactcatcagggggagccctcacctctgcctcaagcctcccgtggaaggcgagatggtcctggaggcagtcctcacctctgcctccctcgctcctccaacagctgccttctcccgggttccagcctctcagtgtgttggagaggtaggggtgcggggtgggggggagctgaatcttcaatcggaataaaagcagccctccccttcccc

SEQ ID NO: 23178 - DNA, 2588 bp, Homo sapiens
tctgagcatccgaagcgcggccaggtatgcatctagggcaccggggtcctggtggcgcgccagtgggccccctccctccacccctgtgactaaaccaccctccctacacggttgaatgacaagttcaaccttccctaaaacccccggtgacgagtccagccgcgcgcccattcttcacgcaggggcgggacggactttcaaagacttggagttcccacgggtgtgggttcgagaccttcctctgccagttcccagctccgctaccctgagcaaatgacttacgctccattggattttccgcaatgtggctgaaggtggggggcctacttcgggggaccggtggacagctgggccagactgttggttggccttgtggggccctggggcctgggccccaccgctggggaccatgtggaggttcttgggcccaaaagttttaccaggatgggcctgggagaggcctgggtgaggaggacattcgcagggcacgggaggcccgtcccaggaagacaccccggccccagctgagtgaccgctctcgagaacgcaaggtgcctgcctcccgcatcagccgcttggccaactttgggggactggctgtgggcttggggctaggagtactggccgagatggctaagaagtccatgccaggaggtcgtctgcagtcagagggtggttctgggctggactccagccccttcctgtcggaggccaatgccgagcggattgtgcagaccttatgtacagttcgaggggccgccctcaaggttggccagatgctcagcatccagggtacagcatgaccctcgactcctgacccctgacctcccttctaccccagccctacccaccaacaggccccaacttcagatactcacacggggtccctcctcacctcttcgcttacttcccccctggttccactgtctcccaagacaacagcttcatcagccctcagctgcagcacatctttgagcgggtccgccagagcgccgacttcatgccccgctggcagatgctgagagttcttgaagaggagctcggcagggactggcaggccaaggtggcctccttggaggaggtgccctttgccgctgcctcaattgggcaggtgcaccagggcctgctgagggacgggacggaggtggccgtgaagatccagtaccccggcatagcccagagcattcagagcgatgtccagaacctgctggcggtactcaagatgagcgcggccctgcccgcgggcctgtttgccgagcagagcctgcaggccttgcagcaggagctggcttgggagtgtgactaccgtcgtgaggcggcttgtgcccagaatttcaggcagctgctggcaaatgaccccttcttccgggtcccagccgtggttaaggagctgtgcacgacacgggtgctgggcatggagctggctggaggggtccccctggaccagtgccagggcctaagccaggacctgcggaaccagatttgcttccagctcctgacgctgtgtctgcgggagctgtttgagttccgattcatgcagactgaccccaactgggccaacttcctgtatgatgcctccagccaccaggtgaccctgctggactttggtgcaagccgggagtttgggacagagttcacagaccattacatcgaggtggtgaaggctgcagctgatggagacagagactgtgtcctgcagaagtccagggacctcaaattcctcacaggctttgaaaccaaggcattctccgacgcccacgtggaggcagtgatgatcctgggggagcctttcgccacccagggcccttatgactttgggtcgggggaaacggcccgccgcatacaggacctcatcccggtgctgctgcggcaccggctgtgtcccccacccgaggagacctatgccctgcaccgcaagctggcaggggctttcctggcctgtgcccacctccgagcccacatcgcctgcagggacctcttccaggacacctaccaccgctactgggccagtcgccagccagacgcagccactgccggcagcctccccaccaaaggggactcctgggtggatccctcatgacagcctccatgggggattcagtccccagagcaggccgtaccctgctgtagtgcctcttatcccttccccgtctgccctgggtcagaggagcccccttgggcttcccagtcttgcctggctctcctccttggcccaggagctcaggatccctggggctggggaactcccaacttcgtgccctagatcctgcacctccccactcgaaagtgggtatccgaaaactaagccagggaagcggttaacttatctttgccaacatttgagggagccttgggccgctgcatgtcgttatgcagatcagactcatcagggggagccctcacctctgcctcaagcctcccgtggaaggcgagatggtcctggaggcagtcctcacctctgcctccctcgctcctccaacagctgccttctcccgggttccagcctctcagtgtgttggagaggtaggggtgcggggtgggggggagctgaatcttcaatcggaataaaagcagccctccccttcccc

SEQ ID NO: 23179 - DNA, 2071 bp, Homo sapiens
caggttgcggactcggaggctgagagcagtggaccatgtggaggttcttgggcccaaaagttttaccaggatgggcctgggagaggcctgggtgaggaggacattcgcagggcacgggaggcccgtcccaggaagacaccccggccccagctgagtgaccgctctcgagaacgcaaggtgcctgcctcccgcatcagccgcttggccaactttgggggactggctgtgggcttggggctaggagtactggccgagatggctaagaagtccatgccaggaggtcgtctgcagtcagagggtggttctgggctggactccagccccttcctgtcggaggccaatgccgagcggattgtgcagaccttatgtacagttcgaggggccgccctcaaggttggccagatgctcagcatccaggacaacagcttcatcagccctcagctgcagcacatctttgagcgggtccgccagagcgccgacttcatgccccgctggcagatgctgagagttcttgaagaggagctcggcagggactggcaggccaaggtggcctccttggaggaggtgccctttgccgctgcctcaattgggcaggtgcaccagggcctgctgagggacgggacggaggtggccgtgaagatccagtaccccggcatagcccagagcattcagagcgatgtccagaacctgctggcggtactcaagatgagcgcggccctgcccgcgggcctgtttgccgagcagagcctgcaggccttgcagcaggagctggcttgggagtgtgactaccgtcgtgaggcggcttgtgcccagaatttcaggcagctgctggcaaatgaccccttcttccgggtcccagccgtggttaaggagctgtgcacgacacgggtgctgggcatggagctggctggaggggtccccctggaccagtgccagggcctaagccaggacctgcggaaccagatttgcttccagctcctgacgctgtgtctgcgggagctgtttgagttccgattcatgcagactgaccccaactgggccaacttcctgtatgatgcctccagccaccaggtgaccctgctggactttggtgcaagccgggagtttgggacagagttcacagaccattacatcgaggtggtgaaggctgcagctgatggagacagagactgtgtcctgcagaagtccagggacctcaaattcctcacaggctttgaaaccaaggcattctccgacgcccacgtggaggcagtgatgatcctgggggagcctttcgccacccagggcccttatgactttgggtcgggggaaacggcccgccgcatacaggacctcatcccggtgctgctgcggcaccggctgtgtcccccacccgaggagacctatgccctgcaccgcaagctggcaggggctttcctggcctgtgcccacctccgagcccacatcgcctgcagggacctcttccaggacacctaccaccgctactgggccagtcgccagccagacgcagccactgccggcagcctccccaccaaaggggactcctgggtggatccctcatgacagcctccatgggggattcagtccccagagcaggccgtaccctgctgtagtgcctcttatcccttccccgtctgccctgggtcagaggagcccccttgggcttcccagtcttgcctggctctcctccttggcccaggagctcaggatccctggggctggggaactcccaacttcgtgccctagatcctgcacctccccactcgaaagtgggtatccgaaaactaagccagggaagcggttaacttatctttgccaacatttgagggagccttgggccgctgcatgtcgttatgcagatcagactcatcagggggagccctcacctctgcctcaagcctcccgtggaaggcgagatggtcctggaggcagtcctcacctctgcctccctcgctcctccaacagctgccttctcccgggttccagcctctcagtgtgttggagaggtaggggtgcggggtgggggggagctgaatcttcaatcggaataaaagcagccctccccttcccc

SEQ ID NO: 23180 - DNA, 2318 bp, Homo sapiens
ggggttgcggactcggaggctggagagcggcaatgtggctgaaggtggggggcctacttcgggggaccggtggacagctgggccagactgttggttggccttgtggggccctggggcctgggccccaccgctggggaccatgtggaggttcttgggcccaaaagttttaccaggatgggcctgggagaggcctgggtgaggaggacattcgcagggcacgggaggcccgtcccaggaagacaccccggccccagctgagtgaccgctctcgagaacgcaaggtgcctgcctcccgcatcagccgcttggccaactttgggggactggctgtgggcttggggctaggagtactggccgagatggctaagaagtccatgccaggaggtcgtctgcagtcagagggtggttctgggctggactccagccccttcctgtcggaggccaatgccgagcggattgtgcagaccttatgtacagttcgaggggccgccctcaaggttggccagatgctcagcatccagggtacagcatgaccctcgactcctgacccctgacctcccttctaccccagccctacccaccaacaggccccaacttcagatactcacacggggtccctcctcacctcttcgcttacttcccccctggttccactgtctcccaagacaacagcttcatcagccctcagctgcagcacatctttgagcgggtccgccagagcgccgacttcatgccccgctggcagatgctgagagttcttgaagaggagctcggcagggactggcaggccaaggtggcctccttggaggaggtgccctttgccgctgcctcaattgggcaggtgcaccagggcctgctgagggacgggacggaggtggccgtgaagatccagtaccccggcatagcccagagcattcagagcgatgtccagaacctgctggcggtactcaagatgagcgcggccctgcccgcgggcctgtttgccgagcagagcctgcaggccttgcagcaggagctggcttgggagtgtgactaccgtcgtgaggcggcttgtgcccagaatttcaggcagctgctggcaaatgaccccttcttccgggtcccagccgtggttaaggagctgtgcacgacacgggtgctgggcatggagctggctggaggggtccccctggaccagtgccagggcctaagccaggacctgcggaaccagatttgcttccagctcctgacgctgtgtctgcgggagctgtttgagttccgattcatgcagactgaccccaactgggccaacttcctgtatgatgcctccagccaccaggtgaccctgctggactttggtgcaagccgggagtttgggacagagttcacagaccattacatcgaggtggtgaaggctgcagctgatggagacagagactgtgtcctgcagaagtccagggacctcaaattcctcacaggctttgaaaccaaggcattctccgacgcccacgtggaggcagtgatgatcctgggggagcctttcgccacccagggcccttatgactttgggtcgggggaaacggcccgccgcatacaggacctcatcccggtgctgctgcggcaccggctgtgtcccccacccgaggagacctatgccctgcaccgcaagctggcaggggctttcctggcctgtgcccacctccgagcccacatcgcctgcagggacctcttccaggacacctaccaccgctactgggccagtcgccagccagacgcagccactgccggcagcctccccaccaaaggggactcctgggtggatccctcatgacagcctccatgggggattcagtccccagagcaggccgtaccctgctgtagtgcctcttatcccttccccgtctgccctgggtcagaggagcccccttgggcttcccagtcttgcctggctctcctccttggcccaggagctcaggatccctggggctggggaactcccaacttcgtgccctagatcctgcacctccccactcgaaagtgggtatccgaaaactaagccagggaagcggttaacttatctttgccaacatttgagggagccttgggccgctgcatgtcgttatgcagatcagactcatcagggggagccctcacctctgcctcaagcctcccgtggaaggcgagatggtcctggaggcagtcctcacctctgcctccctcgctcctccaacagctgccttctcccgggttccagcctctcagtgtgttggagaggtaggggtgcggggtgggggggagctgaatcttcaatcggaataaaagcagccctccccttcccc

SEQ ID NO: 23181 - DNA, 1632 bp, Homo sapiens
aaagccaggacagaactaacggctaggtacgaggctgggtgttgatgccccgctggcagatgctgagagttcttgaagaggagctcggcagggactggcaggccaaggtggcctccttggaggaggtgccctttgccgctgcctcaattgggcaggtgcaccagggcctgctgagggacgggacggaggtggccgtgaagatccagtaccccggcatagcccagagcattcagagcgatgtccagaacctgctggcggtactcaagatgagcgcggccctgcccgcgggcctgtttgccgagcagagcctgcaggccttgcagcaggagctggcttgggagtgtgactaccgtcgtgaggcggcttgtgcccagaatttcaggcagctgctggcaaatgaccccttcttccgggtcccagccgtggttaaggagctgtgcacgacacgggtgctgggcatggagctggctggaggggtccccctggaccagtgccagggcctaagccaggacctgcggaaccagatttgcttccagctcctgacgctgtgtctgcgggagctgtttgagttccgattcatgcagactgaccccaactgggccaacttcctgtatgatgcctccagccaccaggtgaccctgctggactttggtgcaagccgggagtttgggacagagttcacagaccattacatcgaggtggtgaaggctgcagctgatggagacagagactgtgtcctgcagaagtccagggacctcaaattcctcacaggctttgaaaccaaggcattctccgacgcccacgtggaggcagtgatgatcctgggggagcctttcgccacccagggcccttatgactttgggtcgggggaaacggcccgccgcatacaggacctcatcccggtgctgctgcggcaccggctgtgtcccccacccgaggagacctatgccctgcaccgcaagctggcaggggctttcctggcctgtgcccacctccgagcccacatcgcctgcagggacctcttccaggacacctaccaccgctactgggccagtcgccagccagacgcagccactgccggcagcctccccaccaaaggggactcctgggtggatccctcatgacagcctccatgggggattcagtccccagagcaggccgtaccctgctgtagtgcctcttatcccttccccgtctgccctgggtcagaggagcccccttgggcttcccagtcttgcctggctctcctccttggcccaggagctcaggatccctggggctggggaactcccaacttcgtgccctagatcctgcacctccccactcgaaagtgggtatccgaaaactaagccagggaagcggttaacttatctttgccaacatttgagggagccttgggccgctgcatgtcgttatgcagatcagactcatcagggggagccctcacctctgcctcaagcctcccgtggaaggcgagatggtcctggaggcagtcctcacctctgcctccctcgctcctccaacagctgccttctcccgggttccagcctctcagtgtgttggagaggtaggggtgcggggtgggggggagctgaatcttcaatcggaataaaagcagccctccccttcccc

SEQ ID NO: 23182 - DNA, 1639 bp, Homo sapiens
  misc_feature (26)..(26): n is a, c, g, or t
tgtgtccaagttaaaccccccccggngttatggtagcgaggctgggtggcgatgccccgctggcagatgctgagagttcttgaagaggagctcggcagggactggcaggccaaggtggcctccttggaggaggtgccctttgccgctgcctcaattgggcaggtgcaccagggcctgctgagggacgggacggaggtggccgtgaagatccagtaccccggcatagcccagagcattcagagcgatgtccagaacctgctggcggtactcaagatgagcgcggccctgcccgcgggcctgtttgccgagcagagcctgcaggccttgcagcaggagctggcttgggagtgtgactaccgtcgtgaggcggcttgtgcccagaatttcaggcagctgctggcaaatgaccccttcttccgggtcccagccgtggttaaggagctgtgcacgacacgggtgctgggcatggagctggctggaggggtccccctggaccagtgccagggcctaagccaggacctgcggaaccagatttgcttccagctcctgacgctgtgtctgcgggagctgtttgagttccgattcatgcagactgaccccaactgggccaacttcctgtatgatgcctccagccaccaggtgaccctgctggactttggtgcaagccgggagtttgggacagagttcacagaccattacatcgaggtggtgaaggctgcagctgatggagacagagactgtgtcctgcagaagtccagggacctcaaattcctcacaggctttgaaaccaaggcattctccgacgcccacgtggaggcagtgatgatcctgggggagcctttcgccacccagggcccttatgactttgggtcgggggaaacggcccgccgcatacaggacctcatcccggtgctgctgcggcaccggctgtgtcccccacccgaggagacctatgccctgcaccgcaagctggcaggggctttcctggcctgtgcccacctccgagcccacatcgcctgcagggacctcttccaggacacctaccaccgctactgggccagtcgccagccagacgcagccactgccggcagcctccccaccaaaggggactcctgggtggatccctcatgacagcctccatgggggattcagtccccagagcaggccgtaccctgctgtagtgcctcttatcccttccccgtctgccctgggtcagaggagcccccttgggcttcccagtcttgcctggctctcctccttggcccaggagctcaggatccctggggctggggaactcccaacttcgtgccctagatcctgcacctccccactcgaaagtgggtatccgaaaactaagccagggaagcggttaacttatctttgccaacatttgagggagccttgggccgctgcatgtcgttatgcagatcagactcatcagggggagccctcacctctgcctcaagcctcccgtggaaggcgagatggtcctggaggcagtcctcacctctgcctccctcgctcctccaacagctgccttctcccgggttccagcctctcagtgtgttggagaggtaggggtgcggggtgggggggagctgaatcttcaatcggaataaaagcagccctccccttcccc

SEQ ID NO: 23183 - DNA, 986 bp, Homo sapiens
tgctcactcttgggggagtcggggcttgtgttgatggtggagactggagggagtggaggctacacgttgtttctgggttatgcagagggctctatgtccacactggctgcctttgctctccccccacccccactcccaggcattctccgacgcccacgtggaggcagtgatgatcctgggggagcctttcgccacccagggcccttatgactttgggtcgggggaaacggcccgccgcatacaggacctcatcccggtgctgctgcggcaccggctgtgtcccccacccgaggagacctatgccctgcaccgcaagctggcaggggctttcctggcctgtgcccacctccgagcccacatcgcctgcagggacctcttccaggacacctaccaccgctactgggccagtcgccagccagacgcagccactgccggcagcctccccaccaaaggggactcctgggtggatccctcatgacagcctccatgggggattcagtccccagagcaggccgtaccctgctgtagtgcctcttatcccttccccgtctgccctgggtcagaggagcccccttgggcttcccagtcttgcctggctctcctccttggcccaggagctcaggatccctggggctggggaactcccaacttcgtgccctagatcctgcacctccccactcgaaagtgggtatccgaaaactaagccagggaagcggttaacttatctttgccaacatttgagggagccttgggccgctgcatgtcgttatgcagatcagactcatcagggggagccctcacctctgcctcaagcctcccgtggaaggcgagatggtcctggaggcagtcctcacctctgcctccctcgctcctccaacagctgccttctcccgggttccagcctctcagtgtgttggagaggtaggggtgcggggtgggggggagctgaatcttcaatcggaataaaagcagccctccccttcccc

SEQ ID NO: 23184 - DNA, 1953 bp, Homo sapiens
tctgagcatccgaagcgcggccaggtatgcatctagggcaccggggtcctggtggcgcgccagtgggccccctccctccacccctgtgactaaaccaccctccctacacggttgaatgacaagttcaaccttccctaaaacccccggtgacgagtccagccgcgcgcccattcttcacgcaggggcgggacggactttcaaagacttggagttcccacgggtgtgggttcgagaccttcctctgccagttcccagctccgctaccctgagcaaatgacttacgctccattggattttccgcaatgtggctgaaggtggggggcctacttcgggggaccggtggacagctgggccagactgttggttggccttgtggggccctggggcctgggccccaccgctggggaccatgtggaggttcttgggcccaaaagttttaccaggatgggcctgggagaggcctgggtgaggaggacattcgcagggcacgggaggcccgtcccaggaagacaccccggccccagctgagtgaccgctctcgagaacgcaaggtgcctgcctcccgcatcagccgcttggccaactttgggggactggctgtgggcttggggctaggagtactggccgagatggctaagaagtccatgccaggaggtcgtctgcagtcagagggtggttctgggctggactccagccccttcctgtcggaggccaatgccgagcggattgtgcagaccttatgtacagttcgaggggccgccctcaaggttggccagatgctcagcatccagggtacagcatgaccctcgactcctgacccctgacctcccttctaccccagccctacccaccaacaggccccaacttcagatactcacacggggtccctcctcacctcttcgcttacttcccccctggttccactgtctcccaagacaacagcttcatcagccctcagctgcagcacatctttgagcgggtccgccagagcgccgacttcatgccccgctggcagatgctgctggtgagtgcccagtgggggagggcggtgagggaggcaggctccatctcctctgacctgcctgaccttcctggcttcactgccccactccctgcctctgagcctcactttccccatctgtaaaatgggaatcaccagagtacacacctcctggcattgctgtggtgattaaaacagggaacagcagcctgacctctctgtgcttcagttcccttccctgggaaatggcgatagtgacagccacacccacatcatagggtcacataaatcagtttacactgagcactgagaacggcccctgattcactgtgagcaacatgcaggtgttagctgtgattattactgtttttttaattaaaggagatcgtgtctgtaataggttggcacggcgcctggcaccaagtaagtgcccaggacatgagctgttctaataactgggtaaggcatggaatccaggattccgccacccacctgctctcccatccctgttctgcttattcgccatgcggccccaggcaggtactgcctctctctgggccactctgaataggacctggcccacaggaagcccattgtaaattttagctcttcttgatcacagtaactgtgagttaataataacatataagagcataataaaggatggttggccacgtgtaatggctcatgcctgtaatcccagcactttgggaggctgcggtgggaggatcatttgagctcaggacttccagaccaccctgggcaacatagtgagaccttgtctctactaaacataataacagtaataattagctgggcacagtggcacatatctgtagtcccagctattcaggaggcaggaggatggcttgagctcgggaggttgatgctgcagtgagccgtgagagtgccactacactccagcctgggctacagaacaagaccctgtctca

SEQ ID NO: 23185 - DNA, 2445 bp, Homo sapiens
tctgagcatccgaagcgcggccaggtatgcatctagggcaccggggtcctggtggcgcgccagtgggccccctccctccacccctgtgactaaaccaccctccctacacggttgaatgacaagttcaaccttccctaaaacccccggtgacgagtccagccgcgcgcccattcttcacgcaggggcgggacggactttcaaagacttggagttcccacgggtgtgggttcgagaccttcctctgccagttcccagctccgctaccctgagcaaatgacttacgctccattggattttccgcaatgtggctgaaggtggggggcctacttcgggggaccggtggacagctgggccagactgttggttggccttgtggggccctggggcctgggccccaccgctggggaccatgtggaggttcttgggcccaaaagttttaccaggatgggcctgggagaggcctgggtgaggaggacattcgcagggcacgggaggcccgtcccaggaagacaccccggccccagctgagtgaccgctctcgagaacgcaaggtgcctgcctcccgcatcagccgcttggccaactttgggggactggctgtgggcttggggctaggagtactggccgagatggctaagaagtccatgccaggaggtcgtctgcagtcagagggtggttctgggctggactccagccccttcctgtcggaggccaatgccgagcggattgtgcagaccttatgtacagttcgaggggccgccctcaaggttggccagatgctcagcatccaggacaacagcttcatcagccctcagctgcagcacatctttgagcgggtccgccagagcgccgacttcatgccccgctggcagatgctgagagttcttgaagaggagctcggcagggactggcaggccaaggtggcctccttggaggaggtgccctttgccgctgcctcaattgggcaggtgcaccagggcctgctgagggacgggacggaggtggccgtgaagatccagtaccccggcatagcccagagcattcagagcgatgtccagaacctgctggcggtactcaagatgagcgcggccctgcccgcgggcctgtttgccgagcagagcctgcaggccttgcagcaggagctggcttgggagtgtgactaccgtcgtgaggcggcttgtgcccagaatttcaggcagctgctggcaaatgaccccttcttccgggtcccagccgtggttaaggagctgtgcacgacacgggtgctgggcatggagctggctggaggggtccccctggaccagtgccagggcctaagccaggacctgcggaaccagatttgcttccagctcctgacgctgtgtctgcgggagctgtttgagttccgattcatgcagactgaccccaactgggccaacttcctgtatgatgcctccagccaccaggtgaccctgctggactttggtgcaagccgggagtttgggacagagttcacagaccattacatcgaggtggtgaaggctgcagctgatggagacagagactgtgtcctgcagaagtccagggacctcaaattcctcacaggctttgaaaccaaggcattctccgacgcccacgtggaggcagtgatgatcctgggggagcctttcgccacccagggcccttatgactttgggtcgggggaaacggcccgccgcatacaggacctcatcccggtgctgctgcggcaccggctgtgtcccccacccgaggagacctatgccctgcaccgcaagctggcaggggctttcctggcctgtgcccacctccgagcccacatcgcctgcagggacctcttccaggacacctaccaccgctactgggccagtcgccagccagacgcagccactgccggcagcctccccaccaaaggggactcctgggtggatccctcatgacagcctccatgggggattcagtccccagagcaggccgtaccctgctgtagtgcctcttatcccttccccgtctgccctgggtcagaggagcccccttgggcttcccagtcttgcctggctctcctccttggcccaggagctcaggatccctggggctggggaactcccaacttcgtgccctagatcctgcacctccccactcgaaagtgggtatccgaaaactaagccagggaagcggttaacttatctttgccaacatttgagggagccttgggccgctgcatgtcgttatgcagatcagactcatcagggggagccctcacctctgcctcaagcctcccgtggaaggcgagatggtcctggaggcagtcctcacctctgcctccctcgctcctccaacagctgccttctcccgggttccagcctctcagtgtgttggagaggtaggggtgcggggtgggggggagctgaatcttcaatcggaataaaagcagccctccccttcccc

SEQ ID NO: 23186 - DNA, 2053 bp, Homo sapiens
caggttgcggactcggaggctgagagcagtgcaatgtggctgaaggtggggggcctacttcgggggaccggtggacagctgggccagactgttggttggccttgtggggccctggggcctgggccccaccgctggggaccatgtggaggttcttgggcccaaaagttttaccaggatgggcctgggagaggcctgggtgaggaggacattcgcagggcacgggaggcccgtcccaggaagacaccccggccccagctgagtgaccgctctcgagaacgcaaggtgcctgcctcccgcatcagccgcttggccaactttgggggactggctgtgggcttggggctaggagtactggccgagatggctaagaagtccatgccaggaggtcgtctgcagtcagacaacagcttcatcagccctcagctgcagcacatctttgagcgggtccgccagagcgccgacttcatgccccgctggcagatgctgagagttcttgaagaggagctcggcagggactggcaggccaaggtggcctccttggaggaggtgccctttgccgctgcctcaattgggcaggtgcaccagggcctgctgagggacgggacggaggtggccgtgaagatccagtaccccggcatagcccagagcattcagagcgatgtccagaacctgctggcggtactcaagatgagcgcggccctgcccgcgggcctgtttgccgagcagagcctgcaggccttgcagcaggagctggcttgggagtgtgactaccgtcgtgaggcggcttgtgcccagaatttcaggcagctgctggcaaatgaccccttcttccgggtcccagccgtggttaaggagctgtgcacgacacgggtgctgggcatggagctggctggaggggtccccctggaccagtgccagggcctaagccaggacctgcggaaccagatttgcttccagctcctgacgctgtgtctgcgggagctgtttgagttccgattcatgcagactgaccccaactgggccaacttcctgtatgatgcctccagccaccaggtgaccctgctggactttggtgcaagccgggagtttgggacagagttcacagaccattacatcgaggtggtgaaggctgcagctgatggagacagagactgtgtcctgcagaagtccagggacctcaaattcctcacaggctttgaaaccaaggcattctccgacgcccacgtggaggcagtgatgatcctgggggagcctttcgccacccagggcccttatgactttgggtcgggggaaacggcccgccgcatacaggacctcatcccggtgctgctgcggcaccggctgtgtcccccacccgaggagacctatgccctgcaccgcaagctggcaggggctttcctggcctgtgcccacctccgagcccacatcgcctgcagggacctcttccaggacacctaccaccgctactgggccagtcgccagccagacgcagccactgccggcagcctccccaccaaaggggactcctgggtggatccctcatgacagcctccatgggggattcagtccccagagcaggccgtaccctgctgtagtgcctcttatcccttccccgtctgccctgggtcagaggagcccccttgggcttcccagtcttgcctggctctcctccttggcccaggagctcaggatccctggggctggggaactcccaacttcgtgccctagatcctgcacctccccactcgaaagtgggtatccgaaaactaagccagggaagcggttaacttatctttgccaacatttgagggagccttgggccgctgcatgtcgttatgcagatcagactcatcagggggagccctcacctctgcctcaagcctcccgtggaaggcgagatggtcctggaggcagtcctcacctctgcctccctcgctcctccaacagctgccttctcccgggttccagcctctcagtgtgttggagaggtaggggtgcggggtgggggggagctgaatcttcaatcggaataaaagcagccctccccttcccc

SEQ ID NO: 23187 - DNA, 1985 bp, Homo sapiens
gggaaagatgccccaaccagatgcctctattccagactgtgagaagtgggcaatgtggctgaaggtggggggcctacttcgggggaccggtggacagctgggccagactgttggttggccttgtggggccctggggcctgggccccaccgctggggaccatgtggaggttcttgggcccaaaagttttaccaggatgggcctgggagaggcctgggtgaggaggacattcgcagggcacgggaggcccgtcccaggaagacaccccggccccagctgagtgaccgctctcgagaacgcaagacaacagcttcatcagccctcagctgcagcacatctttgagcgggtccgccagagcgccgacttcatgccccgctggcagatgctgtaccccggcatagcccagagcattcagagcgatgtccagaacctgctggcggtactcaagatgagcgcggccctgcccgcgggtgaggcgcccacccactcctctgctgacctcccaaaggggctatgcccagagagagaaagcaggagggggagcccagaggagagcacgggcagggtgtgctggcgttgtgagcgggagtgtcagagacagaaaggacaccaaggcggggagagcccagggagcatgagcaggcctgtttgccgagcagagcctgcaggccttgcagcaggagctggcttgggagtgtgactaccgtcgtgaggcggcttgtgcccagaatttcaggcagctgctggcaaatgaccccttcttccgggtcccagccgtggttaaggagctgtgcacgacacgggtgctgggcatggagctggctggaggggtccccctggaccagtgccagggcctaagccaggacctgcggaaccagatttgcttccagctcctgacgctgtgtctgcgggagctgtttgagttccgattcatgcagactgaccccaactgggccaacttcctgtatgatgcctccagccaccaggtgaccctgctggactttggtgcaagccgggagtttgggacagagttcacagaccattacatcgaggtggtgaaggctgcagctgatggagacagagactgtgtcctgcagaagtccagggacctcaaattcctcacaggctttgaaaccaaggcattctccgacgcccacgtggaggcagtgatgatcctgggggagcctttcgccacccagggcccttatgactttgggtcgggggaaacggcccgccgcatacaggacctcatcccggtgctgctgcggcaccggctgtgtcccccacccgaggagacctatgccctgcaccgcaagctggcaggggctttcctggcctgtgcccacctccgagcccacatcgcctgcagggacctcttccaggacacctaccaccgctactgggccagtcgccagccagacgcagccactgccggcagcctccccaccaaaggggactcctgggtggatccctcatgacagcctccatgggggattcagtccccagagcaggccgtaccctgctgtagtgcctcttatcccttccccgtctgccctgggtcagaggagcccccttgggcttcccagtcttgcctggctctcctccttggcccaggagctcaggatccctggggctggggaactcccaacttcgtgccctagatcctgcacctccccactcgaaagtgggtatccgaaaactaagccagggaagcggttaacttatctttgccaacatttgagggagccttgggccgctgcatgtcgttatgcagatcagactcatcagggggagccctcacctctgcctcaagcctcccgtggaaggcgagatggtcctggaggcagtcctcacctctgcctccctcgctcctccaacagctgccttctcccgggttccagcctctcagtgtgttggagaggtaggggtgcggggtgggggggagctgaatcttcaatcggaataaaagcagccctccccttcccc

SEQ ID NO: 23188 - DNA, 496 bp, Homo sapiens
  misc_feature (17)..(17): n is a, c, g, or t
ggtttgctctgagcatncgaagcgcggcagggcgggacggactttcaaagacttggagttcccacgggtgtgggttcgagaccttcctctgccagttcccagctccgctaccctgagcaaatgacttacgctccattggattttccgcaatgtggctgaaggtggggggcctacttcgggggaccggtggacagctgggccagactgttggttggccttgtggggccctggggcctgggccccaccgctggggaccatgtggaggttcttgggcccaaaagttttaccaggatgggcctgggagaggcctgggtgaggaggacattcgcagggcacgggaggcccgtcccaggaagacaccccggccccagctgagtgaccgctctcgagaacgcaaggtgcctgcctcccgcatcagccgcttggccaactttggggcggcccctcgaactgtacataaggtctgcacaatccgctcggcattggcctccgacag

SEQ ID NO: 23189 - DNA, 353 bp, Homo sapiens
gaagacgggcagacataagaacccatccaatggtggttacattgattatatccttcctgaggcatctgaaatagtataaaataataaggagagaacaccaaaaatgtatcaacttccatgtaactagtgtgtattagcccatttttgctttgttgtaaaagaatatctgaaatttagaaatttagtaatttagaaagaaaagaggtttatttagttcgtggttctgcaggctgtacaagcttggcaccagcatctggtgaagcctcaggaagctttcactcatggcagaaggcgaatagggagcaggtgtgtcacatagcaagagaggaagcaaaggagtggggaggatgtgc

SEQ ID NO: 23190 - DNA, 315 bp, Homo sapiens
gcagtggtgggatctcggtgtgagccaccatgcctggcctgttcatttctattatttttatctttgaaaaatgttttattaaaatgctatataatattctttaacattttaatgctgtggaaattgcttatgatgtatgataatctataaacaacccatttccttaggatttgacttgtaaaatttgggcttcctaatttaggtatttttccgtattatgcatacagttttgtacaatatacatttaaagatatgttgttaaatatttgaaaaatgagcacttatatttgaagaatgtaaatttctgggtttttt

SEQ ID NO: 23191 - DNA, 309 bp, Homo sapiens
tcatatgctgtgttctagagattaaggtggaacttgtcaaagagataatttacttaacaaatatgcaacttgttttcagtagattcatgatttaataactgtactaaataccatacccacatgattcttatttaatcctcacaacaattttgtgaggcaaaaatcagacagattaaattacttgcccaaggtcacaaagctagtgcctatgccatcagacttcaaacccaggcagtctcaaatctggtagtgctggacaccgctatctcaggtatcctctctgacttttgcctggcttgcatagcatta

SEQ ID NO: 23192 - DNA, 573 bp, Homo sapiens
ctactgcctgtccaagctcactacttttcaagaggccaatccctgggtaaatcttagtgaatagcagtcgactgtgttatttatctgtgccccatgctggaggtgcagactcggtgagaccagcagagcagctgaggttagactcagtggaaaatccagaagtgcagatgtggatccaaattgggctgaaaaaatctcatgagatcaggctttcttggacttcctgcttttagcctaagcactatgttcaacataaacgaactttcggtattttgaaacttccgtttctgatctcagaacctggaagtaaagagctgttgtgaacatttccacaaattttgtcatggttattctggaggcagagttgaaccctgtaattacggagctttgggactcactacacccacagtggcctgcctggattgcagtatgggagaggggaaggcattttggtggagagtccaggctttggagacaggcaggaccctgttcaaattctagctctgccatttccggccatgtgactggacctgtcagagtctcagtttcctcatcagttagattaaaaaaaaa

SEQ ID NO: 23193 - DNA, 189 bp, Homo sapiens
atgaattgtaatctattgtgatcgatttcttttgctcaaaataatgtttttatattgtagcatgtatattcattcttattgccaaataatattccattgtgtggatatacatgtgtacatcttactgattttttggttgatgaatatttgggttgttttcactttttggctactgtattatgaaaaatg

SEQ ID NO: 23194 - DNA, 504 bp, Homo sapiens
tttgaaattcactcaaagaaaagtaaccattttgaaaaatgcccagaacattctgttttccataacaaaggccttccatccaggaaaactactttatcagaaccttatctggccaagggaaaaggaaaacttgaaaaatgaagcctccagtagctttctggataacttaatggggtgggtgggtcagggcaggaagagagaaagaaaggagggaagaggaggcggagggagagggaagagaggcccggggggcgggaggaagacaggcaggcaggcaaagaaacttctgaagttcacagtccaggaactcagacttactaaaaaactgagactcacaggattacaggacattttccttccctaataccttaccaccacatcaacagggctgtagtataatcacagtgaattacaatggaggggcaagataaaaacttcacttgtaatggttaatttttggtgtcatcttgactgaataaagaaatacgtagaaacccaaaaaaa

SEQ ID NO: 23195 - DNA, 578 bp, Homo sapiens
tttggctagagtgacaatagggagagtggttccattagttagtttccaggggcagtggtaggggaggtaaccattgtgagagagagctgccaccagccatcatcctcatgaggaagtgaataaaagatgagcagacatgtttcctctggtgatttgccagcctctgccacagagaacctgagacccctcgggccttccccagggctgggggtgtgccaaggttgggcttttgtccattcaccaccagatcctgggcagctgtcagctctcaggataagaacgtttctgcacctgggcatgctggcccaaagcccagcaggcagggcattctgactgtttggagacacctggtttgttagagaaaacagtccttaatggtccagaacacagctgcttccactcagatccagttagaatagtttcacttggtagctagtttgcttctattaagacaccattcatgcgtcagacaagtactgcctctttttaaaatattaggtttgagtccatctaaaggcaaagtcattatgtgttttgagaggatggttttattaaatataaatgtaaatgacaagaga

SEQ ID NO: 23196 - DNA, 784 bp, Homo sapiens
gcccgagccgccgctttggtcacagtgaccgccaccgttgcccggggatgggtccctgagacttggcgaagtaggagccctgtgtgatcgtgcgtcagagtcggggctgagaccagccctggccaggcagttaccaggacggtctccggaggccgggattcgcggagggtccaccagcaggaagaaaccccaggaggaagaaacctcagacagatcgccggggaggcagcgcgggatcccagcctcaggcgtgcgcggacggtgtgcggagtctagctttgtaccaggctgcagtgcagtagtgccatctcagctcactgcaacctctgcctcccgggttcaagcgattgtcctgcctcagcctcccgagtagctgggattacagccacatgccaccacacccagctaatgtttgtatttttagtagatacggggtttcatcatgttgcccaggatggtcttaatttcctgacctcgtgatccgcccatctcggcctcccaaaatgctgggattacaggcatgagccaccagaaccggacatgctttgcttaaaagctaaatattttaggcttgtgtgccattaggctctgttacaactacttaattctgcttttgtaattctatagcacccattgataatacataaacaaatgagcatgaatgtgtctcagtaaaaatttgttcacataaacaggcagtccacccatgaagctatagcttgctgaccccttgtttaaacaatcaattgaattcaaacagaaataaaaggatcttatatattta

SEQ ID NO: 23197 - DNA, 886 bp, Homo sapiens
cgagccgcgctttggtcacagtgaccgccaccgttgcccgggtatgggtccctgagacttggcgaagtaggagccctgtgtgatcgtgcgtcagagtcggggctgagaccagccctggccagggcagttaccaggacggtctccggaggccgggattcgcggagggtccaccagcaggaagaaaccccaggaggaagaaacctcagacagatcgccggggaggcagcgcgggatcccagcctcaggcgtgcgcggacggtgtgcggctacccaaggtgcgaaaaagaaaaaaggccaaagggaagaaggtggtgctaacccttgcggtcttgaaaaagcaggagaccatgaaagtggtgaatcttccatttgagaaatttggcactggacaggacattttggcattggacagaacatccagcccaaaagggacctcacttgctttgtcaaatggccccattatactaggttgcagcagcagagagccatcctctataagcagctagaagtgccttctgtgattagtcagttcaccagggccttggaccaccaaacagctgctcaatggggtaagctggctggcaagtacagaccagagacaaagcaagagaagcagcagagactgttggcctgggctgagaaaaaagcaaaggagacatccccactaagagatcacctgtccttttaatgggggttaacgctgtcaccaccttagtggagaaaaagaaggatcagctggtgatgactgcacaggacagagatcccattgagttggttgtcttcctgcctgccctgtgttgtaaactgggggttccttactgcattatctaatggaaggcaagcttgagacatctaggattaaaaacaaacaaacaaacaacaactc

SEQ ID NO: 23198 - DNA, 1393 bp, Homo sapiens
  misc_feature (1393)..(1393): n is a, c, g, or t
gcccgagccgccgctttggtcacagtgaccgccaccgttgcccggggatgggtccctgagacttggcgaagtaggagccctgtgtgatcgtgcgtcagagtcggggctgagaccagccctggccaggcagttaccaggacggtctccggaggccgggattcgcggagggtccaccagcaggaagaaaccccaggaggaagaaacctcagacagatcgccggggaggcagcgcgggatcccagcctcaggcgtgcgcggacggtgtgcggagtctagctttgtaccaggctgcagtgcagtagtgccatctcagctcactgcaacctctgcctcccgggttcaagcgattgtcctgcctcagcctcccgagtagctgggattacagccacatgccaccacacccagctaatgtttgtatttttagtagatacggggtttcatcatgttgcccaggatggtcttaatttcctgacctcgtgatccgcccatctcggcctcccaaaatgctgggattacaggcatgagccaccagaaccggacatgctttgcttaaaagctaaatattttaggcttgtgtgccattaggctctgttacaactacttaattctgcttttgtaattctatagcacccattgataatacataaacaaatgagcatgaatgtgtctcagtaaaaatttgttcacataaacaggcagtccacccatgaagctatagcttgctgaccccttgtttaaacaatcaattgaattcaaacagaaataaaaggatcttatatatttaaccatgttgataccatttccagtgcttttcattcttctatgtagatccaaatttccttttgatattattttacttctgcctgaaacattttctttaacattttttatagtgttgttttactggtgatgatttctttcaggttctaagtgcctgaacaaaatctttatttcacctacatcttgaaagatagtttctctgagtctacaattcccagctgacaatgtttatcttccagtactttaaagatgttgcttcattatcttctaattttctttgtttccaataaaatgtttgctggcaaaaaaaaaaaaaaacaaaaaaaaaaaaaattgttgtgggcgcgccatcgggccgccaaggaaaaaagcgttttcctaagagaccatctcttttgttggggggccgccgggcgcccatgaggtggatagtgcaacaaccgggggcaatcaacggtgcgtcccacaagaagagacccggcgcaagacagacaggcgcgtggggtccccccccaaatataaaaaagccgcgggggagaccaggctcttcgtgagcaaatcccaacgggtgccaggggcccacgggctctatcacgggtccaaggagccaatn

SEQ ID NO: 23199 - DNA, 409 bp, Homo sapiens
ccatgttgataccatttccagtgcttttcattcttctatgtagatccaaatttccttttgatattattttacttctgcctgaaacattttctttaacattttttatagtgttgttttactggtgatgatttctttcaggttctaagtgcctgaacaaaatctttatttcacctacatcttgaaagatagtttctctgagtctacaattcccagctgacaatgtttatcttccagtactttaaagatgttgcttcattatcttctaattttctttgtttccaataaaatgtttgctggcattttttgttcctctgtgcaaactgtgtttttgtcattggccactttgagaatttttctttatcactagttttaagcaattttattttagtgtattttgtgcacaagacaa

SEQ ID NO: 23200 - DNA, 1062 bp, Homo sapiens
cgagccgcgctttggtcacagtgaccgccaccgttgcccgggtatgggtccctgagacttggcgaagtaggagccctgtgtgatcgtgcgtcagagtcggggctgagaccagccctggccagggcagttaccaggacggtctccggaggccgggattcgcggagggtccaccagcaggaagaaaccccaggaggaagaaacctcagacagatcgccggggaggcagcgcgggatcccagcctcaggcgtgcgcggacggtgtgcggaagtgggtttcaccatgttggccaggctggtctcgaactcctgacttcaagtgattggactcccaaagtgctggaattacagacataagccaccatgcctggcctcccctaattcgcttctttaaacctctctacatcatcacaagatgggtgttactatgatcactattttacagctacccaaggtgcgaaaaagaaaaaaggccaaagggaagaaggtggtgctaacccttgcggtcttgaaaaagcaggagaccatgaaagtggtgaatcttccatttgagaaatttggcactggacaggacattttggcattggacagaacatccagcccaaaagggacctcacttgctttgtcaaatggccccattatactaggttgcagcagcagagagccatcctctataagcagctagaagtgccttctgtgattagtcagttcaccagggccttggaccaccaaacagctgctcaatggggtaagctggctggcaagtacagaccagagacaaagcaagagaagcagcagagactgttggcctgggctgagaaaaaagcaaaggagacatccccactaagagatcacctgtccttttaatgggggttaacgctgtcaccaccttagtggagaaaaagaaggatcagctggtgatgactgcacaggacagagatcccattgagttggttgtcttcctgcctgccctgtgttgtaaactgggggttccttactgcattatctaatggaaggcaagcttgagacatctaggattaaaaacaaacaaacaaacaacaactc

SEQ ID NO: 23201 - DNA, 344 bp, Homo sapiens
aaaacccaatacagatcaatgaaatgaaaagttgtgcttttttaagaaagataaaattggcaaacctttagctagactaaggaaaaaaagtgacccaaataaataaaataaaaaatgaaaaaggagacataacaactgagaaatacaaagaataattagagactattgtgaacaactacatgctaacaaattggaaaacctagaagaaatggataagttcctggacacatacaaactaccaagatgaaccatggagaacgagaaaacctcaacaaatgagtaacaagtaatgagattgtcttagtccattttgcattgctgtaaaggaatacataaggctaggt

SEQ ID NO: 23202 - DNA, 617 bp, Homo sapiens
atatgttaaaattatttttaaatatgtaggtctgagtgcattaaaatgataacagattctattctctccaattaaatactaattttcctactcatgtcatcccacgcattcctataaaaatgtcctgagctaccattaaatttcactgacttatatattggccaggaaagctaaatttgtttttggtttctaggtcatattcccttgcacatttgagtgtgtgtagtagtttaaaacatttgtaatttgtaaactgaccaaaattgtagacacaaatgttttcatatacaaaggtgtcaaaaaactgttaaatgttatttttacttattttaaaatgttaagtttaaaagaattatagtttaatcttttcagaagactgacattgtcacaaggctttaagtttctctgggggttggaaagtgtatgtgttaataaaatatgcaaggtcattaggctggcatgatttaaagaaccttggtaagttattccctcccttcatcctcccccttcattccacacataactttctgctctactcatgacatttttcccacccatccatttattttctacaacaaaaagaatgatagtaactgcctctgataaatatctggaaa

SEQ ID NO: 23203 - DNA, 1547 bp, Homo sapiens
atttggacacattgctgatgaaattactgatttaattctaagactatcaaaactaattcgtcaaggtccccaccacctctttgcttaaaggaaaacaaaggcagattttaactgtgagcctcttctctagaatatgctgtagacatttgcccctccgtgaggtgataaagcaataaaaataaatttaattatgtgtggtctaaagaagttctacctctgtccattggcctccagagtcacacaaaattatttcttgattcctacatcagaggttttcaggcagagcctttgtaccaagaattccttttatattttggacaccaaagattatggcatgatatatcctgatgattaacaatttagcagtgggcacatttatttgagtcctgctcttggatttatttcccacctttgggtcttacgtacattttgtatttctgtcctgaggactttttgcctcaggcagtttttaaatcaaaaaaatatatatatatttattaggtttctaatttatagagtttccaatttctcccacaattttaaatgttttcactgccaaagttagcagtagatttgctaggttaatgccatggtcagtaatagtttgtaccttttatgttgtagcctgaaaatgtaactctaaccccgtaggcctgaaacctggtgggaagatgattgaaagtgttttagattcaacagattgactatgtatgacttatctattaaaatgaagaacttccatggtttaatagaatgaatgctgtattcaacaaggtcttccatccttcttataaatcttaagactgtgtttaagctttctttcacttttactctatcccttggaagttaattgggaataaaaagatttatcaatttagtcactataatttaaggccaggcatctgcttggaaatacaataaccacaattaatacttagagaaaattgtttcaacagattaactctgctattttaaaaactatagtagtgttctttgaggatgcatttacttttccccaaatttgatagatagttatttttatatattttttctggccacttggcttctaactgattaacatgaaaaacgcacgtgtgcctgtttcactcaaatcatattttacaactttttaaaagctgctacagttatagtttgtgaaagaggagaaaggtgaattgcaacagagggaaattactgttactgtgtcaaatatgtgactgatgcttttggtcagataatctgctgcctgtcaatatttgtaataacagaattttttgttaagagtactctcatctttattttgctgctcactgattttttacactaagatgttctcatctttgtcgactcactgtttttgcttcatatttgtctgtgtacttgtgctctaaataaaaatctagttttatgtctagtttattccattgtgtgtataatgtttgcctctgatgtagtgtaattttctattgtttttgatgtttgttggtacagcctaaaacttatggaaataagaaaagcaatccaataaagtcagctaatgagtgtca

SEQ ID NO: 23204 - DNA, 1493 bp, Homo sapiens
atttggacacattgctgatgaaattactgatttaattctaagactatcaaaactaattcgtcaaggtccccaccacctctttgcttaaaggaaaacaaaggcagattttaactgtgagcctcttctctagaatatgctgtagacatttgcccctccgtgaggtgataaagcaataaaaataaatttaattatgtgtggtctaaagaagttctacctctgtccattggcctccagagtcacacaaaattatttcttgattcctacatcagaggttttcaggcagagcctttgtaccaagaattccttttatattttggacaccaaagattatggcatgatatatcctgatgattaacaatttagcagtgggcacatttatttgagtcctgctcttggatttatttcccacctttgggtcttacgtacattttgtatttctgtcctgaggactttttgcctcaggcagtttttaaatcaaaaaaatatatatatatttattaggtttctaatttatagagtttccaatttctcccacaattttaaatgttttcactgccaaagttagcagtagatttgctaggttaatgccatggtcagtaatagtttgtaccttttatgttgtagcctgaaaatgtaactctaaccccgtaggcctgaaacctggtgggaagatgattgaaagtgttttagattcaacagattgactatgtatgacttatctatttccatccttcttataaatcttaagactgtgtttaagctttctttcacttttactctatcccttggaagttaattgggaataaaaagatttatcaatttagtcactataatttaaggccaggcatctgcttggaaatacaataaccacaattaatacttagagaaaattgtttcaacagattaactctgctattttaaaaactatagtagtgttctttgaggatgcatttacttttccccaaatttgatagatagttatttttatatattttttctggccacttggcttctaactgattaacatgaaaaacgcacgtgtgcctgtttcactcaaatcatattttacaactttttaaaagctgctacagttatagtttgtgaaagaggagaaaggtgaattgcaacagagggaaattactgttactgtgtcaaatatgtgactgatgcttttggtcagataatctgctgcctgtcaatatttgtaataacagaattttttgttaagagtactctcatctttattttgctgctcactgattttttacactaagatgttctcatctttgtcgactcactgtttttgcttcatatttgtctgtgtacttgtgctctaaataaaaatctagttttatgtctagtttattccattgtgtgtataatgtttgcctctgatgtagtgtaattttctattgtttttgatgtttgttggtacagcctaaaacttatggaaataagaaaagcaatccaataaagtcagctaatgagtgtca

SEQ ID NO: 23205 - DNA, 399 bp, Homo sapiens
gttatattttctttccctggagttgtccggtcaaatttagttctattttgtatttatatgtagaggcaaggctccatttaaaaaaaaaaaaaaaaaagaactacctttaaacaaaggtcatagagattctctgaacatttccatttctttatacaaaggagtccagggccacctttaattatcataaagcccatcctttatgttgagttactggctgcctagttacctgcatttcactccgagccatcgacttctgttctgaatgttaaaatgcaggtggctgtgagggagtcttctgagtcatgccagcgtttaaggcgcttgctcttctttgtgcacattcctgcttttctcaaagcctattgaaagcaagggccatgtttgctgttttctttgaca

SEQ ID NO: 23206 - DNA, 457 bp, Homo sapiens
agtgaagaaggcagtatacagccaggaagaggagtgagagagggcctgttcctatgctgttttaattatgaccttttccttgatttccttgattaggatattttgaacatgttcaagtatagacaggacaaaattcaagacataggaaagaaaacaggtaatgaataggtaaatttcctgaaaggcaggaggagatgggaaccagaaaagcagagttggctcctatgtgtcaagaaaagaagaacagaggatggatgtgtgtttgggtgggttcatatgtttcagttatcagaggtgaaggagcttggccacaaagttgagcacagactgagtatcccctatctccttatctgaaatgcttggaaccagtagtgtttcgggtttctgattttttttttttttgattttggaatatttgcattatacttactggtctaccatctctaatctgaaaatc

SEQ ID NO: 23207 - DNA, 278 bp, Homo sapiens
acattgataatagtttttttaattcatcatctctaaaactctaaaactttagtgagaaagataataaatagaaaattaccctggaaattaaaatttttagcaatattgaatacagtagtataattttttgtggctcttgatttcctaagaaaaatagtgatttttatttaatgaaaatttctcaatttggttaatattctaagaaaagattgatatatttaagcatggtgattagaaaaatatgcatatttcctgctcataataaattttaaaacaac

SEQ ID NO: 23208 - DNA, 440 bp, Homo sapiens
agcctccctagtagctgtgattacaggcgcccgccaccatgcctggctaatttttgtatttttagtagagatgggtttcaccatgttggccagggtggtcttgaactcctgaccttaggtgagcccgcctcggcctcccaaaatgctgggattacaggtgtgagccaccgtgcctggccctgtcttgtaatttagaagagcaagtttaaatacttgggatgatgtattaaaaagcctcatccatgctgacaagagcagggcctgtagtagcctttgttgtttatccccttcatcctgttctgtacttcattttctctcattactgaattagctggcagcattccttatttgccacagagctatttcttaaaagctgtacttacactcaggatacagttttccttggtatagaactcttccatggcattgctctttcactg

SEQ ID NO: 23209 - DNA, 337 bp, Homo sapiens
gacccccttcattcggtttaacgaatggaaatactcaagattcaggtcactatgggcccttttccctactcaaaaagagaccctccctattaataaccattagaatgctccacatttttaagtttgcaacatcatggcctcattgcaaattgggtatttagggaaaactacatttccttccaaggaaaatgttttaaaaatgcacaatttctctatcacgcattttttaaataagaagaagagaaaatctaactgttttgcaactaggctcaggcaactgcccaggcagcctatagaactgatatcaacagttttatgcctgtcagaaaatcattct

SEQ ID NO: 23210 - DNA, 386 bp, Homo sapiens
ctgtcgtggagactgagacttctttgggtcttatcttgtctttatatccccttaacagcaggtcctcttatttcttgctcgttcaagggaatagccacagaggccaattagagcatggttttgctgaatgttttggccacagcacaatctatgcaataataaaaaaaaaaggcctactttttttttttcttttgagacagagtctcgctctgccatttaggctggagtgcagtggcacaatctcggctcactgcaacttccgcctccttggttcaggcgattctcctgacccagctactcaggaggctgaaacaggagaaccgcttgaacctgcgaggcagggggcaggggtttcagtgagccgagagtgtgccactgtactagcc

SEQ ID NO: 23211 - DNA, 212 bp, Homo sapiens
tctcaaaagaacaaacaaacaaaagaaatcaatcattttgaaagatagtcaccaaaacttttaaaatttaattgaatctaacaaccaactaaattcaatgtatacagttgtctaaatatttaaaattggaaaatggacatatgtgcaatttcttattaattcattaagtagtaagttctaatggtagtaaagtaaaaaggagctctaacagt

SEQ ID NO: 23212 - DNA, 308 bp, Homo sapiens
ggaaattgtctacctgacttcctgtaccccaaacatcaattctctactgtaatattatggtagtttccatagaataatcatagctaaccaagaggtccaaggccctcataacacatttaatgcactgaaaccacacaacagcaggaaacaacagactactgccttgggccaggtgctgttcaaagcacttaacatatattaattaactaattaatcctcacaaccttatgagtaaatacaattattgttgctattttaccagtaagaaaactgagacacagctagtggagtgagccagagagtctagc

SEQ ID NO: 23213 - DNA, 395 bp, Homo sapiens
cttttttttgctaggttatttgttgtaggttaaatgtacctctcaagtttagctccagtttttgtgttccatgtaaaaatgtataatgaggcctagaaacagtaatacagattttgtgtttaaaactgatttcttatgctgaaaaccgtagaggaattacaaccatcatgtagattacttaggaaatagatcttccttttagaatgtaatttgttactctgaagcttgaaaaaaaagaaaaaggaaagttctggtagtgtgtcatttctgaatattcccttggaattgactatattttgagttttaaatttttctcttcttagtataataaaaacagcatgtaaaagtatttttgatcctgataacatttcctggtttcatttccgttagtactt

SEQ ID NO: 23214 - DNA, 441 bp, Homo sapiens
cctgccccatccctatgtgtattagggactatctgcttccttctcctgcttccttttcatcctcccaggggctcacgtacccaccatcccaaccctgttagcaactcaatcctcaggaaacttgagctgatataggagctggccacagcacgggtgtcaggtgttggggagcacagtgtcattgcctacttcagggaatggagggaaagaacagggaccagaggagaaaagttgaagaatatgagaggctggccttatcccaatgactcctctcctttagatcattccttccatggccctggcctgggacagacctaagttcctggccagctttgcctctgactagctttgtggatggacagtcatttgccctgtctggatctcactttcctcacctgtaacacacgaggagaggggataatgccatctgcccaattaacc

SEQ ID NO: 23215 - DNA, 318 bp, Homo sapiens
gcagtttgttgaaagcaggttcctgtgctgggtcctgggatgctgactcactgggttctatgtgggatggacttcagggttctgcaaagcttccctgaggaaatatggtgcacacctgaaactggaactgacttctctttcaagaaacttgatagagataaagagggaaggcatggagtggaatctggagaaatgcaagcatccccctcagtggccaaatcaatgggagagagggaagggatggagctgtagtgaggctccagaggaagtttctgggaagggtgttgggtcaaggtggagaggttgtccttgaacagg

SEQ ID NO: 23216 - DNA, 413 bp, Homo sapiens
gtctgtgaattacttagggactcttttgatgtcttcgttttggaaactctctgttgttggtttttgttattttagccttgtcgggttttcctcatactggtctaactgctagtatcttttattggcccctctttcttggatatcctttacatgtttatatttgttagtgtttcttccttgacttgtctcacttctcgtgtttccttgggtttgcctccattactaagtcttcatccagcccctatgtcattggttctcaaagtgtggtccccagaccagcagcagcagcatcacctgggaacttgctggaaatgcctgaactaaacttaagacactatataaaacaggaaaaggcattttacattttgatacacattgtcaaaaacattgtactggtttcatggtatgcatta

SEQ ID NO: 23217 - DNA, 569 bp, Homo sapiens
ggaaggagacctgggagaatccaaccttcgattagatcaggaagaggagaagaatccagtaaaaaactctgagaagtctctgggaaggaagtcttccttccttcccctgtaccaggagaggtgctatcccagaaattagtaaagaaacagtttttgatggggagaacaggatcacctttgtcaactgctgctgcgagacttggaaaaataaggactgggaagagagcaatagaaactttgaaagccattggttatcttgataagagttgtttctgtgggggtggtgagaactggagcctgactggatgggttcaagagagaatggggagttctagccaagaaggctgatgaggatgagtcaaattaaaaatgttttctttttatgagtcctctcatatttactgatacaactgatatattgggtctccattctgccacattactttatattgatcatgtattgtatctgctatgcaattgtattgcatgtatctgcatggcaattgtattgccatgcaatgtatttttttttactttaaaaattatatttataaaggtttgtaatttta

SEQ ID NO: 23218 - DNA, 2181 bp, Homo sapiens
cacatgacccgaggccccggtccaatatggcgacctccacgggtcgctggcttctcctccggcttgcactattcggcttcctctgggaagcgtccggcggcctcgactcgggggcctcccgcgacgacgacttgctactgccctatccacgcgcgcgcgcgcgcctcccccgggactgcacacgggtgcgcgccggcaaccgcgagcacgagagttggcctccgcctcccgcgactcccggcgccggcggtctggccgtgcgcaccttcgtgtcgcacttcagggaccgcgcggtggccggccacctgacgcgggccgttgagcccctgcgcaccttctcggtgctggagcccggtgggcccggcggctgcgcggcgagacgacgcgccaccgtggaggagacggcgcgggcggccgactgccgtgtcgcccagaacggcggcttcttccgcatgaactcgggcgagtgcctggggaacgtggtgagcgacgagcggcgggtgagcagctccggggggctgcagaacgcgcagttcgggatccgccgcgacgggaccctggtcaccgggtacctgtctgaggaggaggtgctggacactgagaacccatttgtgcagctgctgagtggggtcgtgtggctgattcgtaatggaagcatctacatcaacgagagccaagccacagagtgtgacgagacacaggagacaggttcctttagcaaatttgtgaatgtgatatcagccaggacggccattggccacgaccggaaagggcagctggtgctctttcatgcagacggccaaacggagcagcgtggcatcaacctgtgggaaatggcggagttcctgctgaaacaggacgtggtcaacgccatcaacctggatgggggtggctctgccacctttgtgctcaacgggaccttggccagttacccgtcagatcactgccaggacaacatgtggcgctgtccccgccaagtgtccaccgtggtgtgtgtgcacgaaccccgctgccagccgcctgactgccacggccacgggacctgcgtggacgggcactgccaatgcaccgggcacttctggcggggtcccggctgtgatgagctggactgtggcccctctaactgcagccagcacggactgtgcacggagaccggctgccgctgtgatgccggatggaccgggtccaactgcagtgaagagtgtccccttggctggcatgggccgggctgccagaggccttgtaagtgtgagcaccattgtccctgtgaccccaagactggcaactgcagcgtctccagagtaaagcagtgtctccagccacctgaagccaccctgagggcgggagaactctcctttttcaccaggaccgcctggctagccctcaccctggcgctggccttcctcctgctgatcagcactgcagcaaacctgtccttgctcctgtccagagcagagaggaaccggcgcctgcatggggactatgcataccacccgctgcaggagatgaacggggagcctctggccgcagagaaggagcagccagggggcgcccacaaccccttcaaggactgaagcctcaagctgcccggggtggcacgtcgcgaaagcttgtttccccacggtctggcttctgcaggggaaatttcaaggccactggcgtggaccatctgggtgtcctcagcccctgtggggcagccaagttcctgatagcacttgtgcctcagcccctcacctggccacctgccagggcacctgcaaccctagcaataccatgctcgctggagaggctcagctgcctgcttctcgcctgcctgtgtctgctgccgagaagcccgtgcccccgggagggctgccgcactgccaaagagtctccctcctcctggggaaggggctgccaacgaaccagactcagtgaccacgtcatgacagaacagcacatcctggccagcacccctggctggagtgggttaaagggacgagtctgccttcctggctgtgacacgggaccccttttctacagacctcatcactggatttgccaactagaattcgatttcctgtcataggaagctccttggaagaagggatggggggatgaaatcatgtttacagacctgttttgtcatcctgctgccaagaagttttttaatcacttgaataaattgatataataaaagga

SEQ ID NO: 23219 - DNA, 2283 bp, Homo sapiens
cacatgacccgaggccccggtccaatatggcgacctccacgggtcgctggcttctcctccggcttgcactattcggcttcctctgggaagcgtccggcggcctcgactcgggggcctcccgcgacgacgacttgctactgccctatccacgcgcgcgcgcgcgcctcccccgggactgcacacgggtgcgcgccggcaaccgcgagcacgagagttggcctccgcctcccgcgactcccggcgccggcggtctggccgtgcgcaccttcgtgtcgcacttcagggaccgcgcggtggccggccacctgacgcgggccgttgagcccctgcgcaccttctcggtgctggagcccggtgggcccggcggctgcgcggcgagacgacgcgccaccgtggaggagacggcgcgggcggccgactgccgtgtcgcccagaacggcggcttcttccgcatgaactcgggcgagtgcctggggaacgtggtgagcgacgagcggcgggtgagcagctccggggggctgcagaacgcgcagttcgggatccgccgcgacgggaccctggtcaccgggtacctgtctgaggaggaggtgctggacactgagaacccatttgtgcagctgctgagtggggtcgtgtggctgattcgtaatggaagcatctacatcaacgagagccaagccacagagtgtgacgagacacaggagacaggttcctttagcaaatttgtgaatgtgatatcagccaggacggccattggccacgaccggaaagggcagctggtgctctttcatgcagacggccaaacggagcagcgtggcatcaacctgtgggaaatggcggagttcctgctgaaacaggacgtggtcaacgccatcaacctggatgggggtggctctgccacctttgtgctcaacgggaccttggccagttacccgtcagatcactggcaggcgtgatggtgcacaccttacggttacagctgctcaggaggctcgggtggaaggatcgcaatacctcatctcaaaaatagatagacgccatcttgtagccaggacaacatgtggcgctgtccccgccaagtgtccaccgtggtgtgtgtgcacgaaccccgctgccagccgcctgactgccacggccacgggacctgcgtggacgggcactgccaatgcaccgggcacttctggcggggtcccggctgtgatgagctggactgtggcccctctaactgcagccagcacggactgtgcacggagaccggctgccgctgtgatgccggatggaccgggtccaactgcagtgaagagtgtccccttggctggcatgggccgggctgccagaggccttgtaagtgtgagcaccattgtccctgtgaccccaagactggcaactgcagcgtctccagagtaaagcagtgtctccagccacctgaagccaccctgagggcgggagaactctcctttttcaccaggaccgcctggctagccctcaccctggcgctggccttcctcctgctgatcagcactgcagcaaacctgtccttgctcctgtccagagcagagaggaaccggcgcctgcatggggactatgcataccacccgctgcaggagatgaacggggagcctctggccgcagagaaggagcagccagggggcgcccacaaccccttcaaggactgaagcctcaagctgcccggggtggcacgtcgcgaaagcttgtttccccacggtctggcttctgcaggggaaatttcaaggccactggcgtggaccatctgggtgtcctcagcccctgtggggcagccaagttcctgatagcacttgtgcctcagcccctcacctggccacctgccagggcacctgcaaccctagcaataccatgctcgctggagaggctcagctgcctgcttctcgcctgcctgtgtctgctgccgagaagcccgtgcccccgggagggctgccgcactgccaaagagtctccctcctcctggggaaggggctgccaacgaaccagactcagtgaccacgtcatgacagaacagcacatcctggccagcacccctggctggagtgggttaaagggacgagtctgccttcctggctgtgacacgggaccccttttctacagacctcatcactggatttgccaactagaattcgatttcctgtcataggaagctccttggaagaagggatggggggatgaaatcatgtttacagacctgttttgtcatcctgctgccaagaagttttttaatcacttgaataaattgatataataaaagga

SEQ ID NO: 23220 - DNA, 272 bp, Homo sapiens
cacctttagcccggctctgtacacatgggcaggggcaggtatcctgtcctgtcgagaaaggctctgacactggaggccccaacctttctcctccctcctccctttttctacagacctcatcactggatttgccaactagaattcgatttcctgtcataggaagctccttggaagaagggatggggggatgaaatcatgtttacagacctgttttgtcatcctgctgccaagaagttttttaatcacttgaataaattgatataataaaagga

SEQ ID NO: 23221 - DNA, 2079 bp, Homo sapiens
cacatgacccgaggccccggtccaatatggcgacctccacgggtcgctggcttctcctccggcttgcactattcggcttcctctgggaagcgtccggcggcctcgactcgggggcctcccgcgacgacgacttgctactgccctatccacgcgcgcgcgcgcgcctcccccgggactgcacacgggtgcgcgccggcaaccgcgagcacgagagttggcctccgcctcccgcgactcccggcgccggcggtctggccgtgcgcaccttcgtgtcgcacttcagggaccgcgcggtggccggccacctgacgcgggccgttgagcccctgcgcaccttctcggtgctggagcccggtgggcccggcggctgcgcggcgagacgacgcgccaccgtggaggagacggcgcgggcggccgactgccgtgtcgcccagaacggcggcttcttccgcatgaactcgggcgagtgcctggggaacgtggtgagcgacgagcggcgggtgagcagctccggggggctgcagaacgcgcagttcgggatccgccgcgacgggaccctggtcaccgggtacctgtctgaggaggaggtgctggacactgagaacccatttgtgcagctgctgagtggggtcgtgtggctgattcgtaatggaagcatctacatcaacgagagccaagccacagagtgtgacgagacacaggagacaggttcctttagcaaatttgtgaatgtgatatcagccaggacggccattggccacgaccggaaagggcagctggtgctctttcatgcagacggccaaacggagcagcgtggcatcaacctgtgggaaatggcggagttcctgctgaaacaggacgtggtcaacgccatcaacctggatgggggtggctctgccacctttgtgctcaacgggaccttggccagttacccgtcagatcactgccaggacaacatgtggcgctgtccccgccaagtgtccaccgtggtgtgtgtgcacgaaccccgctgccagccgcctgactgccacggccacgggacctgcgtggacgggcactgccaatgcaccgggcacttctggcggggtcccggctgtgatgagctggactgtggcccctctaactgcagccagcacggactgtgcacggagaccggctgccgctgtgatgccggatggaccgggtccaactgcagtgaagtaaagcagtgtctccagccacctgaagccaccctgagggcgggagaactctcctttttcaccaggaccgcctggctagccctcaccctggcgctggccttcctcctgctgatcagcactgcagcaaacctgtccttgctcctgtccagagcagagaggaaccggcgcctgcatggggactatgcataccacccgctgcaggagatgaacggggagcctctggccgcagagaaggagcagccagggggcgcccacaaccccttcaaggactgaagcctcaagctgcccggggtggcacgtcgcgaaagcttgtttccccacggtctggcttctgcaggggaaatttcaaggccactggcgtggaccatctgggtgtcctcagcccctgtggggcagccaagttcctgatagcacttgtgcctcagcccctcacctggccacctgccagggcacctgcaaccctagcaataccatgctcgctggagaggctcagctgcctgcttctcgcctgcctgtgtctgctgccgagaagcccgtgcccccgggagggctgccgcactgccaaagagtctccctcctcctggggaaggggctgccaacgaaccagactcagtgaccacgtcatgacagaacagcacatcctggccagcacccctggctggagtgggttaaagggacgagtctgccttcctggctgtgacacgggaccccttttctacagacctcatcactggatttgccaactagaattcgatttcctgtcataggaagctccttggaagaagggatggggggatgaaatcatgtttacagacctgttttgtcatcctgctgccaagaagttttttaatcacttgaataaattgatataataaaagga

SEQ ID NO: 23222 - DNA, 2638 bp, Homo sapiens
  misc_feature (2267)..(2267): n is a, c, g, or t
  misc_feature (2336)..(2338): n is a, c, g, or t
  misc_feature (2352)..(2352): n is a, c, g, or t
  misc_feature (2356)..(2356): n is a, c, g, or t
  misc_feature (2359)..(2360): n is a, c, g, or t
  misc_feature (2375)..(2375): n is a, c, g, or t
  misc_feature (2378)..(2378): n is a, c, g, or t
  misc_feature (2389)..(2389): n is a, c, g, or t
  misc_feature (2391)..(2391): n is a, c, g, or t
  misc_feature (2397)..(2397): n is a, c, g, or t
  misc_feature (2400)..(2400): n is a, c, g, or t
  misc_feature (2413)..(2413): n is a, c, g, or t
  misc_feature (2415)..(2415): n is a, c, g, or t
  misc_feature (2425)..(2425): n is a, c, g, or t
  misc_feature (2448)..(2450): n is a, c, g, or t
  misc_feature (2456)..(2456): n is a, c, g, or t
  misc_feature (2458)..(2458): n is a, c, g, or t
  misc_feature (2460)..(2460): n is a, c, g, or t
  misc_feature (2467)..(2467): n is a, c, g, or t
  misc_feature (2480)..(2481): n is a, c, g, or t
  misc_feature (2486)..(2486): n is a, c, g, or t
  misc_feature (2496)..(2496): n is a, c, g, or t
  misc_feature (2499)..(2499): n is a, c, g, or t
  misc_feature (2502)..(2502): n is a, c, g, or t
  misc_feature (2508)..(2508): n is a, c, g, or t
  misc_feature (2515)..(2516): n is a, c, g, or t
  misc_feature (2526)..(2526): n is a, c, g, or t
  misc_feature (2529)..(2529): n is a, c, g, or t
  misc_feature (2533)..(2533): n is a, c, g, or t
  misc_feature (2539)..(2540): n is a, c, g, or t
  misc_feature (2543)..(2543): n is a, c, g, or t
  misc_feature (2551)..(2551): n is a, c, g, or t
  misc_feature (2558)..(2558): n is a, c, g, or t
  misc_feature (2561)..(2562): n is a, c, g, or t
  misc_feature (2579)..(2579): n is a, c, g, or t
  misc_feature (2593)..(2594): n is a, c, g, or t
  misc_feature (2602)..(2602): n is a, c, g, or t
  misc_feature (2621)..(2621): n is a, c, g, or t
cacatgacccgaggccccggtccaatatggcgacctccacgggtcgctggcttctcctccggcttgcactattcggcttcctctgggaagcgtccggcggcctcgactcgggggcctcccgcgacgacgacttgctactgccctatccacgcgcgcgcgcgcgcctcccccgggactgcacacgggtgcgcgccggcaaccgcgagcacgagagttggcctccgcctcccgcgactcccggcgccggcggtctggccgtgcgcaccttcgtgtcgcacttcagggaccgcgcggtggccggccacctgacgcgggccgttgagcccctgcgcaccttctcggtgctggagcccggtgggcccggcggctgcgcggcgagacgacgcgccaccgtggaggagacggcgcgggcggccgactgccgtgtcgcccagaacggcggcttcttccgcatgaactcgggcgagtgcctggggaacgtggtgagcgacgagcggcgggtgagcagctccggggggctgcagaacgcgcagttcgggatccgccgcgacgggaccctggtcaccgggtacctgtctgaggaggaggtgctggacactgagaacccatttgtgcagctgctgagtggggtcgtgtggctgattcgtaatggaagcatctacatcaacgagagccaagccacagagtgtgacgagacacaggagacaggttcctttagcaaatttgtgaatgtgatatcagccaggacggccattggccacgaccggaaagggcagctggtgctctttcatgcagacggccaaacggagcagcgtggcatcaacctgtgggaaatggcggagttcctgctgaaacaggacgtggtcaacgccatcaacctggatgggggtggctctgccacctttgtgctcaacgggaccttggccagttacccgtcagatcactgccaggacaacatgtggcgctgtccccgccaagtgtccaccgtggtgtgtgtgcacgaaccccgctgccagccgcctgactgccacggccacgggacctgcgtggacgggcactgccaatgcaccgggcacttctggcggggtcccggctgtgatgagctggactgtggcccctctaactgcagccagcacggactgtgcacggagaccggctgccgctgtgatgccggatggaccgggtccaactgcagtgaagagtgtccccttggctggcatgggccgggctgccagaggccttgtaagtgtgagcaccattgtccctgtgaccccaagactggcaactgcagcgtctccagagtaaagcagtgtctccagccacctgaagccaccctgagggcgggagaactctcctttttcaccaggaccgcctggctagccctcaccctggcgctggccttcctcctgctgatcagcactgcagcaaacctgtccttgctcctgtccagagcagagaggaaccggcgcctgcatggggactatgcataccacccgctgcaggagatgaacggggagcctctggccgcagagaaggagcagccagggggcgcccacaaccccttcaaggactgaagcctcaagctgcccggggtggcacgtcgcgaaagcttgtttccccacggtctggcttctgcaggggaaatttcaaggccactggcgtggaccatctgggtgtcctcagcccctgtggggcagccaagttcctgatagcacttgtgcctcagcccctcacctggccacctgccagggcacctgcaaccctagcaataccatgctcgctggagaggctcagctgcctgcttctcgcctgcctgtgtctgctgccgagaagcccgtgcccccgggagggctgccgcactgccaaagagtctccctcctcctggggaaggggctgccaacgaaccagactcagtgaccacgtcatgacagaacagcacatcctggccagcacccctggctggagtgggttaaagggacgagtctgccttcctggctgtgacacgggaccccttttctacagacctcatcactggatttgccaactagaattcgatttcctgtcataggaagctccttggaagaagggatggggggatgaaatcatgtttacagacctgttttgtcatcctgctgccaagaagttttttaatcacttgaataaattgatataataaaaggaaaaaaaaaaaaaaaaaaaaaaaaaaaaaaaaaaaaaaaaaaaaaaaaaaaaaaaaaaaaaaaaaaaaaaaaaaaaaaaaaaaaaanaaaaaaaaaaaaaaaaaaaaaatttggggcccctttgccccaatggttttttaatttgggaaagttttnnnttggggccaaattngggntcnnttggccaattccccnttngggggggggtntnaaaatnccngggccggggtttnanaagggggggnggggaaaaccccgggggttcccnnnttaaancncnttggganaaatccccttttnnggggnggggaaaaanganaanggcccnccccgtnnccctttccanaanttgncaaccnntangggaaaangaaattnaannctttaatttttttaaantcgcgtaaattttnnaaacaacncatttttaaccaaagggcnaaatgggaaatcccttt

SEQ ID NO: 23223 - DNA, 1970 bp, Homo sapiens
cacatgacccgaggccccggtccaatatggcgacctccacgggtcgctggcttctcctccggcttgcactattcggcttcctctgggaagcgtccggcggcctcgactcgggggcctcccgcgacgacgacttgctactgccctatccacgcgcgcgcgcgcgcctcccccgggactgcacacgggtgcgcgccggcaaccgcgagcacgagagttggcctccgcctcccgcgactcccggcgccggcggtctggccgtgcgcaccttcgtgtcgcacttcagggaccgcgcggtggccggccacctgacgcgggccgttgagcccctgcgcaccttctcggtgctggagcccggtgggcccggcggctgcgcggcgagacgacgcgccaccgtggaggagacggcgcgggcggccgactgccgtgtcgcccagaacggcggcttcttccgcatgaactcgggcgagtgcctggggaacgtggtgagcgacgagcggcgggtgagcagctccggggggctgcagaacgcgcagttcgggatccgccgcgacgggaccctggtcaccgggtacctgtctgaggaggaggtgctggacactgagaacccatttgtgcagctgctgagtggggtcgtgtggctgattcgtaatggaagcatctacatcaacgagagccaagccacagagtgtgacgagacacaggagacagcatcaacctgtgggaaatggcggagttcctgctgaaacaggacgtggtcaacgccatcaacctggatgggggtggctctgccacctttgtgctcaacgggaccttggccagttacccgtcagatcactgccaggacaacatgtggcgctgtccccgccaagtgtccaccgtggtgtgtgtgcacgaaccccgctgccagccgcctgactgccacggccacgggacctgcgtggacgggcactgccaatgcaccgggcacttctggcggggtcccggctgtgatgagctggactgtggcccctctaactgcagccagcacggactgtgcacggagaccggctgccgctgtgatgccggatggaccgggtccaactgcagtgaagtaaagcagtgtctccagccacctgaagccaccctgagggcgggagaactctcctttttcaccaggaccgcctggctagccctcaccctggcgctggccttcctcctgctgatcagcactgcagcaaacctgtccttgctcctgtccagagcagagaggaaccggcgcctgcatggggactatgcataccacccgctgcaggagatgaacggggagcctctggccgcagagaaggagcagccagggggcgcccacaaccccttcaaggactgaagcctcaagctgcccggggtggcacgtcgcgaaagcttgtttccccacggtctggcttctgcaggggaaatttcaaggccactggcgtggaccatctgggtgtcctcagcccctgtggggcagccaagttcctgatagcacttgtgcctcagcccctcacctggccacctgccagggcacctgcaaccctagcaataccatgctcgctggagaggctcagctgcctgcttctcgcctgcctgtgtctgctgccgagaagcccgtgcccccgggagggctgccgcactgccaaagagtctccctcctcctggggaaggggctgccaacgaaccagactcagtgaccacgtcatgacagaacagcacatcctggccagcacccctggctggagtgggttaaagggacgagtctgccttcctggctgtgacacgggaccccttttctacagacctcatcactggatttgccaactagaattcgatttcctgtcataggaagctccttggaagaagggatggggggatgaaatcatgtttacagacctgttttgtcatcctgctgccaagaagttttttaatcacttgaataaattgatataataaaagga

SEQ ID NO: 23224 - DNA, 893 bp, Homo sapiens
cacatgacccgaggccccggtccaatatggcgacctccacgggtcgctggcttctcctccggcttgcactattcggcttcctctgggaagcgtccggcggcctcgactcgggggcctcccgcgacgacgacttgctactgccctatccacgcgcgcgcgcgcgcctcccccgggactgcacacgggtgcgcgccggcaaccgcgagcacgagagttggcctccgcctcccgcgactcccggcgccggcggtctggccgtgcgcaccttcgtgtcgcacttcagggaccgcgcggtggccggccacctgacgcgggccgttgagcccctgcgcaccttctcggtgctggagcccggtgggcccggcggctgcgcggcgagacgacgcgccaccgtggaggagacggcgcgggcggccgactgccgtgtcgcccagaacggcggcttcttccgcatgaactcgggcgagtgcctggggaacgtggtgagcgacgagcggcgggtgagcagctccggggggctgcagaacgcgcagttcgggatccgccgcgacgggaccctggtcaccgggtacctgtctgaggaggaggtgctggacactgagaacccatttgtgcagctgctgagtggggtcgtgtggctgattcgtaatggaagcatctacatcaacgagagccaagccacagagtggacgagtctgccttcctggctgtgacacgggaccccttttctacagacctcatcactggatttgccaactagaattcgatttcctgtcataggaagctccttggaagaagggatggggggatgaaatcatgtttacagacctgttttgtcatcctgctgccaagaagttttttaatcacttgaataaattgatataataaaagga

SEQ ID NO: 23225 - DNA, 2214 bp, Homo sapiens
cacatgacccgaggccccggtccaatatggcgacctccacgggtcgctggcttctcctccggcttgcactattcggcttcctctgggaagcgtccggcggcctcgactcgggggcctcccgcgacgacgacttgctactgccctatccacgcgcgcgcgcgcgcctcccccgggactgcacacgggtgcgcgccggcaaccgcgagcacgagagttggcctccgcctcccgcgactcccggcgccggcggtctggccgtgcgcaccttcgtgtcgcacttcagggaccgcgcggtggccggccacctgacgcgggccgttgagcccctgcgcaccttctcggtgctggagcccggtgggcccggcggctgcgcggcgagacgacgcgccaccgtggaggagacggcgcgggcggccgactgccgtgtcgcccagaacggcggcttcttccgcatgaactcgggcgagtgcctggggaacgtggtgagcgacgagcggcgggtgagcagctccggggggctgcagaacgcgcagttcgggatccgccgcgacgggaccctggtcaccgggtacctgtctgaggaggaggtgctggacactgagaacccatttgtgcagctgctgagtggggtcgtgtggctgattcgtaatggaagcatctacatcaacgagagccaagccacagagtgtgacgagacacaggagacaggttcctttagcaaatttgtgaatgtgatatcagccaggacggccattggccacgaccggaaagggcagctggtgctctttcatgcagacggccaaacggagcagcgtggcatcaacctgtgggaaatggcggagttcctgctgaaacaggacgtggtcaacgccatcaacctggatgggggtggctctgccacctttgtgctcaacgggaccttggccagttacccgtcagatcactgccaggacaacatgtggcgctgtccccgccaagtgtccaccgtggtgtgtgtgcacgaaccccgctgccagccgcctgactgccacggccacgggacctgcgtggacgggcactgccaatgcaccgggcacttctggcggggtcccggctgtgatgagctggactgtggcccctctaactgcagccagcacggactgtgcacggagaccggctgccgctgtgatgccggatggaccgggtccaactgcagtgaagagtgtccccttggctggcatgggccgggctgccagaggccttgtaagtgtgagcaccattgtccctgtgaccccaagactggcaactgcagcgtctccagagtaaagcagtgtctccagccacctgaagccaccctgagggcgggagaactctcctttttcaccaggaccgcctggctagccctcaccctggcgctggccttcctcctgctgatcagcactgcagcaaacctgtccttgctcctgtccagagcagagaggaaccggcgcctgcatggggactatgcataccacccgctgcaggagatgaacggggagcctctggccgcagagaaggagcagccagggggcgcccacaaccccttcaaggactgaagcctcaagctgcccggggtggcacgtcgcgaaagcttgtttccccacggtctggcttctgcaggggaaatttcaaggccactggcgtggaccatctgggtgtcctcagcccctgtggggcagccaagttcctgatagcacttgtgcctcagcccctcacctggccacctgccagggcacctgcaaccctagcaataccatgctcgctggagaggctcagctgcctgcttctcgcctgcctgtgtctgctgccgagaagcccgtgcccccgggagggctgccgcactgccaaagagtctccctcctcctggggaaggggctgccaacgaaccagactcagtgaccacgtcatgacagaacagcacatcctggccagcacccctggctggagtgggttaaagggacgagtctgccttcctggctgtgacacgggaccccttttctacagacctcatcactggatttgccaactagaattcgatttcctgtcataggaagctccttggaagaagggatggggggatgaaatcatgtttacagacctgttttgtcatcctgctgccaagaagttttttaatcacttgaataaattgatataataaaaggagccaccaggtggtgtgtggattctgaaaaaaaa

SEQ ID NO: 23226 - DNA, 2160 bp, Homo sapiens
cacatgacccgaggccccggtccaatatggcgacctccacgggtcgctggcttctcctccggcttgcactattcggcttcctctgggaagcgtccggcggcctcgactcgggggcctcccgcgacgacgacttgctactgccctatccacgcgcgcgcgcgcgcctcccccgggactgcacacgggtgcgcgccggcaaccgcgagcacgagagttggcctccgcctcccgcgactcccggcgccggcggtctggccgtgcgcaccttcgtgtcgcacttcagggaccgcgcggtggccggccacctgacgcgggccgttgagcccctgcgcaccttctcggtgctggagcccggtgggcccggcggctgcgcggcgagacgacgcgccaccgtggaggagacggcgcgggcggccgactgccgtgtcgcccagaacggcggcttcttccgcatgaactcgggcgagtgcctggggaacgtggtgagcgacgagcggcgggtgagcagctccggggggctgcagaacgcgcagttcgggatccgccgcgacgggaccctggtcaccgggtacctgtctgaggaggaggtgctggacactgagaacccatttgtgcagctgctgagtggggtcgtgtggctgattcgtaatggaagcatctacatcaacgagagccaagccacagagtgtgacgagacacaggagacaggttcctttagcaaatttgtgaatgtgatatcagccaggacggccattggccacgaccggaaagggcagctggtgctctttcatgcagacggccaaacggagcagcgtggcatcaacctgtgggaaatggcggagttcctgctgaaacaggacgtggtcaacgccatcaacctggatgggggtggctctgccacctttgtgctcaacgggaccttggccagttacccgtcagatcactggcaggcgtgatggtgcacaccttacggttacagctgctcaggaggctcgggtggaaggatcgcaatacctcatctcaaaaatagatagacgccatcttgtagcgggcacttctggcggggtcccggctgtgatgagctggactgtggcccctctaactgcagccagcacggactgtgcacggagaccggctgccgctgtgatgccggatggaccgggtccaactgcagtgaagagtgtccccttggctggcatgggccgggctgccagaggccttgtaagtgtgagcaccattgtccctgtgaccccaagactggcaactgcagcgtctccagagtaaagcagtgtctccagccacctgaagccaccctgagggcgggagaactctcctttttcaccaggaccgcctggctagccctcaccctggcgctggccttcctcctgctgatcagcactgcagcaaacctgtccttgctcctgtccagagcagagaggaaccggcgcctgcatggggactatgcataccacccgctgcaggagatgaacggggagcctctggccgcagagaaggagcagccagggggcgcccacaaccccttcaaggactgaagcctcaagctgcccggggtggcacgtcgcgaaagcttgtttccccacggtctggcttctgcaggggaaatttcaaggccactggcgtggaccatctgggtgtcctcagcccctgtggggcagccaagttcctgatagcacttgtgcctcagcccctcacctggccacctgccagggcacctgcaaccctagcaataccatgctcgctggagaggctcagctgcctgcttctcgcctgcctgtgtctgctgccgagaagcccgtgcccccgggagggctgccgcactgccaaagagtctccctcctcctggggaaggggctgccaacgaaccagactcagtgaccacgtcatgacagaacagcacatcctggccagcacccctggctggagtgggttaaagggacgagtctgccttcctggctgtgacacgggaccccttttctacagacctcatcactggatttgccaactagaattcgatttcctgtcataggaagctccttggaagaagggatggggggatgaaatcatgtttacagacctgttttgtcatcctgctgccaagaagttttttaatcacttgaataaattgatataataaaagga

SEQ ID NO: 23227 - DNA, 2585 bp, Homo sapiens
  misc_feature (2267)..(2267): n is a, c, g, or t
  misc_feature (2283)..(2285): n is a, c, g, or t
  misc_feature (2299)..(2299): n is a, c, g, or t
  misc_feature (2303)..(2303): n is a, c, g, or t
  misc_feature (2306)..(2307): n is a, c, g, or t
  misc_feature (2322)..(2322): n is a, c, g, or t
  misc_feature (2325)..(2325): n is a, c, g, or t
  misc_feature (2336)..(2336): n is a, c, g, or t
  misc_feature (2338)..(2338): n is a, c, g, or t
  misc_feature (2344)..(2344): n is a, c, g, or t
  misc_feature (2347)..(2347): n is a, c, g, or t
  misc_feature (2360)..(2360): n is a, c, g, or t
  misc_feature (2362)..(2362): n is a, c, g, or t
  misc_feature (2372)..(2372): n is a, c, g, or t
  misc_feature (2395)..(2397): n is a, c, g, or t
  misc_feature (2403)..(2403): n is a, c, g, or t
  misc_feature (2405)..(2405): n is a, c, g, or t
  misc_feature (2407)..(2407): n is a, c, g, or t
  misc_feature (2414)..(2414): n is a, c, g, or t
  misc_feature (2427)..(2428): n is a, c, g, or t
  misc_feature (2433)..(2433): n is a, c, g, or t
  misc_feature (2443)..(2443): n is a, c, g, or t
  misc_feature (2446)..(2446): n is a, c, g, or t
  misc_feature (2449)..(2449): n is a, c, g, or t
  misc_feature (2455)..(2455): n is a, c, g, or t
  misc_feature (2462)..(2463): n is a, c, g, or t
  misc_feature (2473)..(2473): n is a, c, g, or t
  misc_feature (2476)..(2476): n is a, c, g, or t
  misc_feature (2480)..(2480): n is a, c, g, or t
  misc_feature (2486)..(2487): n is a, c, g, or t
  misc_feature (2490)..(2490): n is a, c, g, or t
  misc_feature (2498)..(2498): n is a, c, g, or t
  misc_feature (2505)..(2505): n is a, c, g, or t
  misc_feature (2508)..(2509): n is a, c, g, or t
  misc_feature (2526)..(2526): n is a, c, g, or t
  misc_feature (2540)..(2541): n is a, c, g, or t
  misc_feature (2549)..(2549): n is a, c, g, or t
  misc_feature (2568)..(2568): n is a, c, g, or t
cacatgacccgaggccccggtccaatatggcgacctccacgggtcgctggcttctcctccggcttgcactattcggcttcctctgggaagcgtccggcggcctcgactcgggggcctcccgcgacgacgacttgctactgccctatccacgcgcgcgcgcgcgcctcccccgggactgcacacgggtgcgcgccggcaaccgcgagcacgagagttggcctccgcctcccgcgactcccggcgccggcggtctggccgtgcgcaccttcgtgtcgcacttcagggaccgcgcggtggccggccacctgacgcgggccgttgagcccctgcgcaccttctcggtgctggagcccggtgggcccggcggctgcgcggcgagacgacgcgccaccgtggaggagacggcgcgggcggccgactgccgtgtcgcccagaacggcggcttcttccgcatgaactcgggcgagtgcctggggaacgtggtgagcgacgagcggcgggtgagcagctccggggggctgcagaacgcgcagttcgggatccgccgcgacgggaccctggtcaccgggtacctgtctgaggaggaggtgctggacactgagaacccatttgtgcagctgctgagtggggtcgtgtggctgattcgtaatggaagcatctacatcaacgagagccaagccacagagtgtgacgagacacaggagacaggttcctttagcaaatttgtgaatgtgatatcagccaggacggccattggccacgaccggaaagggcagctggtgctctttcatgcagacggccaaacggagcagcgtggcatcaacctgtgggaaatggcggagttcctgctgaaacaggacgtggtcaacgccatcaacctggatgggggtggctctgccacctttgtgctcaacgggaccttggccagttacccgtcagatcactgccaggacaacatgtggcgctgtccccgccaagtgtccaccgtggtgtgtgtgcacgaaccccgctgccagccgcctgactgccacggccacgggacctgcgtggacgggcactgccaatgcaccgggcacttctggcggggtcccggctgtgatgagctggactgtggcccctctaactgcagccagcacggactgtgcacggagaccggctgccgctgtgatgccggatggaccgggtccaactgcagtgaagagtgtccccttggctggcatgggccgggctgccagaggccttgtaagtgtgagcaccattgtccctgtgaccccaagactggcaactgcagcgtctccagagtaaagcagtgtctccagccacctgaagccaccctgagggcgggagaactctcctttttcaccaggaccgcctggctagccctcaccctggcgctggccttcctcctgctgatcagcactgcagcaaacctgtccttgctcctgtccagagcagagaggaaccggcgcctgcatggggactatgcataccacccgctgcaggagatgaacggggagcctctggccgcagagaaggagcagccagggggcgcccacaaccccttcaaggactgaagcctcaagctgcccggggtggcacgtcgcgaaagcttgtttccccacggtctggcttctgcaggggaaatttcaaggccactggcgtggaccatctgggtgtcctcagcccctgtggggcagccaagttcctgatagcacttgtgcctcagcccctcacctggccacctgccagggcacctgcaaccctagcaataccatgctcgctggagaggctcagctgcctgcttctcgcctgcctgtgtctgctgccgagaagcccgtgcccccgggagggctgccgcactgccaaagagtctccctcctcctggggaaggggctgccaacgaaccagactcagtgaccacgtcatgacagaacagcacatcctggccagcacccctggctggagtgggttaaagggacgagtctgccttcctggctgtgacacgggaccccttttctacagacctcatcactggatttgccaactagaattcgatttcctgtcataggaagctccttggaagaagggatggggggatgaaatcatgtttacagacctgttttgtcatcctgctgccaagaagttttttaatcacttgaataaattgatataataaaaggaaaaaaaaaaaaaaaaaaaaaaaaaaaaaaaaaaaaaaaaaaaaaaaaaaaaaaaaaaaaaaaaaaaaaaaaaaaaaaaaaaaaaanaaaaaaaaaaattttnnnttggggccaaattngggntcnnttggccaattccccnttngggggggggtntnaaaatnccngggccggggtttnanaagggggggnggggaaaaccccgggggttcccnnnttaaancncnttggganaaatccccttttnnggggnggggaaaaanganaanggcccnccccgtnnccctttccanaanttgncaaccnntangggaaaangaaattnaannctttaatttttttaaantcgcgtaaattttnnaaacaacncatttttaaccaaagggcnaaatgggaaatcccttt

SEQ ID NO: 23228 - DNA, 2011 bp, Homo sapiens
cacatgacccgaggccccggtccaatatggcgacctccacgggtcgctggcttctcctccggcttgcactattcggcttcctctgggaagcgtccggcggcctcgactcgggggcctcccgcgacgacgacttgctactgccctatccacgcgcgcgcgcgcgcctcccccgggactgcacacgggtgcgcgccggcaaccgcgagcacgagagttggcctccgcctcccgcgactcccggcgccggcggtctggccgtgcgcaccttcgtgtcgcacttcagggaccgcgcggtggccggccacctgacgcgggccgttgagcccctgcgcaccttctcggtgctggagcccggtgggcccggcggctgcgcggcgagacgacgcgccaccgtggaggagacggcgcgggcggccgactgccgtgtcgcccagaacggcggcttcttccgcatgaactcgggcgagtgcctggggaacgtggtgagcgacgagcggcgggtacctgtctgaggaggaggtgctggacactgagaacccatttgtgcagctgctgagtggggtcgtgtggctgattcgtaatggaagcatctacatcaacgagagccaagccacagagtgtgacgagacacaggagacaggttcctttagcaaatttgtgaatgtgatatcagccaggacggccattggccacgaccggaaagggcagctggtgctctttcatgcagacggccaaacggagcagcgtggcatcaacctgtgggaaatggcggagttcctgctgaaacaggacgtggtcaacgccatcaacctggatgggggtggctctgccacctttgtgctcaacgggaccttggccagttacccgtcagatcactgccaggacaacatgtggcgctgtccccgccaagtgtccaccgtggtgtgtgtgcacgaaccccgctgccagccgcctgactgccacggccacgggacctgcgtggacgggcactgccaatgcaccgggcacttctggcggggtcccggctgtgatgagctggactgtggcccctctaactgcagccagcacggactgtgcacggagaccggctgccgctgtgatgccggatggaccgggtccaactgcagtgaagtaaagcagtgtctccagccacctgaagccaccctgagggcgggagaactctcctttttcaccaggaccgcctggctagccctcaccctggcgctggccttcctcctgctgatcagcactgcagcaaacctgtccttgctcctgtccagagcagagaggaaccggcgcctgcatggggactatgcataccacccgctgcaggagatgaacggggagcctctggccgcagagaaggagcagccagggggcgcccacaaccccttcaaggactgaagcctcaagctgcccggggtggcacgtcgcgaaagcttgtttccccacggtctggcttctgcaggggaaatttcaaggccactggcgtggaccatctgggtgtcctcagcccctgtggggcagccaagttcctgatagcacttgtgcctcagcccctcacctggccacctgccagggcacctgcaaccctagcaataccatgctcgctggagaggctcagctgcctgcttctcgcctgcctgtgtctgctgccgagaagcccgtgcccccgggagggctgccgcactgccaaagagtctccctcctcctggggaaggggctgccaacgaaccagactcagtgaccacgtcatgacagaacagcacatcctggccagcacccctggctggagtgggttaaagggacgagtctgccttcctggctgtgacacgggaccccttttctacagacctcatcactggatttgccaactagaattcgatttcctgtcataggaagctccttggaagaagggatggggggatgaaatcatgtttacagacctgttttgtcatcctgctgccaagaagttttttaatcacttgaataaattgatataataaaagga

SEQ ID NO: 23229 - DNA, 339 bp, Homo sapiens
ttttgcaaaagtatagctgtgcaatggattagaataataatattaaaactggtccttcactcagttttagaggcactggcctacaaagtaggaagtaaaatgaggtgatagctgcaaaaactgtaaaaatgacaaagctctgcatcttttgttataaaaggtagcaacaaaagaatacaactgtgtacaatctgggataaccatggtaacacccacgatgtatatggccctttatgcatgtcagtttggggccatgtatcttacatgtgttatttcacatggcacgtaagggactggcagagtgacgctcaggtcagcctgacagcagggtgattgaag

SEQ ID NO: 23230 - DNA, 464 bp, Homo sapiens
ggacgaagcacattgaccaacagacagttcaatcatgaccaaatccaataaagaagtcttccagaaagcaattgcaaatcaggaagatgttatcagaagaaagggatcctgggctggcaccataaaggatttgtgccttgcttttttcaggttaagacagcagggacttgccacggagactctaaagtctgttcctccaacctttcccattgcagtgagagcaataatttccctgaccctataaaaggcatgcaaagtgtatccaggtcaagagcttgggtaacatcaacactgtgaaatgtggggacagatatcttggtggaaaaagcactgagacttctgtttccatcagcaaagaagactaaacaccaagggaaacaactaaactatctgaataaaatatcccttaaaatgcattgcttagtaggcaattttttaaaattttttaaaatccacagaggccc

SEQ ID NO: 23231 - DNA, 410 bp, Homo sapiens
atatttatatcatagaatatctcttgagtataatatctcgagtgaggctgttgtgaggattagaggtaataactcgtacaaaagtgcctggcatacagtgggttctaagaaaatgtccaggccaggcgcagtggttcatgcctgtaatctcagcactctgggaggccaaggcaggcagattgcatgagcccaggaattcgagacaagcctgggcaacatggcaaaaccccatctctacaaaaaaaaataccaaaaaaaaattagccgggtgtggtgcacgtgcctgtactcccagctactcgggaaactaaagcggcaggatcacttgagcccaggagagagagacttcagggagctgtgattgtgccactgtactccagcctaagtgacgagagtgagaccctgtctcc

SEQ ID NO: 23232 - DNA, 2521 bp, Homo sapiens
  misc_feature (13)..(16): n is a, c, g, or t
aagggggggggcnnnnaaaaacttacggctaggtacgaggctgcggtgaaatcggcagaggtcctttcaagctcgaccgttgaggtccttgtcatgcccagcctcagaactcgccgtgaggaggcagagatggagctctcagttccaggaccatccccctggacccctgcagcccaggcccgtgtgagagatgctcctgctgtgacccaccctggatctgcagcctgtggtaccccctgctgtagtgatactgagctggaagccatctgccctcactatcagcagccagattgtgacaccaggactgaagacaaggagtttcttcacaaggaagacattcatgaagatttggaatcacaggcagaaatatcagaaaactatgctggtgatgtttcccaggtacccgagcttggagatctgtgtgatgatgtatcagaaagagactggggagtccccgaaggcaggaggctgccacagtccctctcccaggagggggacttcacaccagctgccatggggctccttaggggccccttaggggagaaagatctggactgtaatggttttgacagtcgcttcagtctgagcccaaacctgatggcatgtcaggaaatccctacagaagagaggccacatccatatgacatgggtggccagagtttccagcacagtgtggacctaactggtcatgagggggttcccacagctgaaagtccactcatatgtaatgagtgtgggaaaaccttccaaggaaatcctgaccttattcagcgtcaaatagtccacactggggaggcttcctttatgtgtgatgattgtgggaaaaccttcagccagaactcagttcttaaaaaccgtcatcgatctcatatgagtgagaaagcttaccagtgcagcgaatgtgggaaagccttccgagggcactcagacttttctaggcatcagagtcaccacagcagtgagaggccttatatgtgtaatgaatgtggaaaagccttcagccagaactcgagccttaaaaagcaccaaaagtctcacatgagtgagaagccctatgaatgcaatgaatgtgggaaggcttttaggcggagctcaaacctcatccaacatcaaagaatccattctggggagaaaccgtatgtgtgcagtgagtgtgggaaggccttcaggcgaagctcaaacctcatcaaacaccacaggactcacacaggagagaagccttttgagtgtggcgagtgtgggaaagccttcagccagagtgcacacctgaggaagcaccagagggtccacactggagagaagccttatgagtgtaatgattgtggcaagcccttcagtcgggtctccaacctcattaagcaccacagggttcacactggagagaagccctataagtgcagtgactgtgggaaagcatttagtcagagctccagccttattcagcatcggagaattcacactggagaaaagcctcacgtgtgtaatgtatgtggaaaagcctttagttatagctcagtgctccgaaagcaccagatcatccacacgggagagaagccgtacagatgcagtgtctgtgggaaggccttcagccacagctcagccctcattcagcaccagggcgtgcacacaggcgacaagccctacgcctgccacgagtgtgggaagacctttggtcgcagctccaacctcatccttcaccagcgagtccacactggagagaagccctatgaatgtactgaatgtggaaaaaccttcagccagagctcaaccctcattcagcatcagaggattcataatgggctgaagccccatgaatgtaaccagtgtggtaaagccttcaaccgaagctcaaatctcattcaccaccagaaagttcatactggggaaaaaccctacacctgtgttgaatgtggtaagggcttcagccagagctcacacctcattcagcatcagataatccacacgggcgagcgcccctacaaatgcagtgagtgtgggaaagccttcagtcagcgttcggtcctcatccagcaccagaggattcacactggggtgaagccctatgactgtgctgcttgtgggaaagccttcagccagcgatcaaagttgatcaaacaccagttgattcacaccagggaataggctgttgggctggcaggagtgaaaccgagcatagtttcctctccaactcctctttggccattgtctcagcctctgccacttcccagaccgaaagcctggactcagctcactgcctacatccagtggccacatagcctgggaccctcctttgaaacatcctttacaggctcccttctcactgccactgctcttgcctcttgtgatgtcttgggtttgggcttgtttttacagcttgtgaacggactgcacgtttgttacaagggagaagattatggaggctgcatattcatgaatagagtttattattataatgaaaagttaccaaaaaagtaaagtgacgtttggtttgagataaccatagtagtttgtttgattggta

SEQ ID NO: 23233 - DNA, 2517 bp, Homo sapiens
cccctttgcagatccccttgaccacaccctcattctcagctggtgctcatgaaggacagaagagtcaatgtcagtacaatgtccttgtcatgcccagcctcagaactcgccgtgaggaggcagagatggagctctcagttccaggaccatccccctggacccctgcagcccaggcccgtgtgagagatgctcctgctgtgacccaccctggatctgcagcctgtggtaccccctgctgtagtgatactgagctggaagccatctgccctcactatcagcagccagattgtgacaccaggactgaagacaaggagtttcttcacaaggaagacattcatgaagatttggaatcacaggcagaaatatcagaaaactatgctggtgatgtttcccaggtacccgagcttggagatctgtgtgatgatgtatcagaaagagactggggagtccccgaaggcaggaggctgccacagtccctctcccaggagggggacttcacaccagctgccatggggctccttaggggccccttaggggagaaagatctggactgtaatggttttgacagtcgcttcagtctgagcccaaacctgatggcatgtcaggaaatccctacagaagagaggccacatccatatgacatgggtggccagagtttccagcacagtgtggacctaactggtcatgagggggttcccacagctgaaagtccactcatatgtaatgagtgtgggaaaaccttccaaggaaatcctgaccttattcagcgtcaaatagtccacactggggaggcttcctttatgtgtgatgattgtgggaaaaccttcagccagaactcagttcttaaaaaccgtcatcgatctcatatgagtgagaaagcttaccagtgcagcgaatgtgggaaagccttccgagggcactcagacttttctaggcatcagagtcaccacagcagtgagaggccttatatgtgtaatgaatgtggaaaagccttcagccagaactcgagccttaaaaagcaccaaaagtctcacatgagtgagaagccctatgaatgcaatgaatgtgggaaggcttttaggcggagctcaaacctcatccaacatcaaagaatccattctggggagaaaccgtatgtgtgcagtgagtgtgggaaggccttcaggcgaagctcaaacctcatcaaacaccacaggactcacacaggagagaagccttttgagtgtggcgagtgtgggaaagccttcagccagagtgcacacctgaggaagcaccagagggtccacactggagagaagccttatgagtgtaatgattgtggcaagcccttcagtcgggtctccaacctcattaagcaccacagggttcacactggagagaagccctataagtgcagtgactgtgggaaagcatttagtcagagctccagccttattcagcatcggagaattcacactggagaaaagcctcacgtgtgtaatgtatgtggaaaagcctttagttatagctcagtgctccgaaagcaccagatcatccacacgggagagaagccgtacagatgcagtgtctgtgggaaggccttcagccacagctcagccctcattcagcaccagggcgtgcacacaggcgacaagccctacgcctgccacgagtgtgggaagacctttggtcgcagctccaacctcatccttcaccagcgagtccacactggagagaagccctatgaatgtactgaatgtggaaaaaccttcagccagagctcaaccctcattcagcatcagaggattcataatgggctgaagccccatgaatgtaaccagtgtggtaaagccttcaaccgaagctcaaatctcattcaccaccagaaagttcatactggggaaaaaccctacacctgtgttgaatgtggtaagggcttcagccagagctcacacctcattcagcatcagataatccacacgggcgagcgcccctacaaatgcagtgagtgtgggaaagccttcagtcagcgttcggtcctcatccagcaccagaggattcacactggggtgaagccctatgactgtgctgcttgtgggaaagccttcagccagcgatcaaagttgatcaaacaccagttgattcacaccagggaataggctgttgggctggcaggagtgaaaccgagcatagtttcctctccaactcctctttggccattgtctcagcctctgccacttcccagaccgaaagcctggactcagctcactgcctacatccagtggccacatagcctgggaccctcctttgaaacatcctttacaggctcccttctcactgccactgctcttgcctcttgtgatgtcttgggtttgggcttgtttttacagcttgtgaacggactgcacgtttgttacaagggagaagattatggaggctgcatattcatgaatagagtttattattataatgaaaagttaccaaaaaagtaaagtgacgtttggtttgagataaccatagtagtttgtttgattggta

SEQ ID NO: 23234 - DNA, 2522 bp, Homo sapiens
ggcgggacttccgggggtcagccggcgttggctgagacgtcttcgtgccacggtgctgcctcctttccaagcgcgacccgttgaggtccttgtcatgcccagcctcagaactcgccgtgaggaggcagagatggagctctcagttccaggaccatccccctggacccctgcagcccaggcccgtgtgagagatgctcctgctgtgacccaccctggatctgcagcctgtggtaccccctgctgtagtgatactgagctggaagccatctgccctcactatcagcagccagattgtgacaccaggactgaagacaaggagtttcttcacaaggaagacattcatgaagatttggaatcacaggcagaaatatcagaaaactatgctggtgatgtttcccaggtacccgagcttggagatctgtgtgatgatgtatcagaaagagactggggagtccccgaaggcaggaggctgccacagtccctctcccaggagggggacttcacaccagctgccatggggctccttaggggccccttaggggagaaagatctggactgtaatggttttgacagtcgcttcagtctgagcccaaacctgatggcatgtcaggaaatccctacagaagagaggccacatccatatgacatgggtggccagagtttccagcacagtgtggacctaactggtcatgagggggttcccacagctgaaagtccactcatatgtaatgagtgtgggaaaaccttccaaggaaatcctgaccttattcagcgtcaaatagtccacactggggaggcttcctttatgtgtgatgattgtgggaaaaccttcagccagaactcagttcttaaaaaccgtcatcgatctcatatgagtgagaaagcttaccagtgcagcgaatgtgggaaagccttccgagggcactcagacttttctaggcatcagagtcaccacagcagtgagaggccttatatgtgtaatgaatgtggaaaagccttcagccagaactcgagccttaaaaagcaccaaaagtctcacatgagtgagaagccctatgaatgcaatgaatgtgggaaggcttttaggcggagctcaaacctcatccaacatcaaagaatccattctggggagaaaccgtatgtgtgcagtgagtgtgggaaggccttcaggcgaagctcaaacctcatcaaacaccacaggactcacacaggagagaagccttttgagtgtggcgagtgtgggaaagccttcagccagagtgcacacctgaggaagcaccagagggtccacactggagagaagccttatgagtgtaatgattgtggcaagcccttcagtcgggtctccaacctcattaagcaccacagggttcacactggagagaagccctataagtgcagtgactgtgggaaagcatttagtcagagctccagccttattcagcatcggagaattcacactggagaaaagcctcacgtgtgtaatgtatgtggaaaagcctttagttatagctcagtgctccgaaagcaccagatcatccacacgggagagaagccgtacagatgcagtgtctgtgggaaggccttcagccacagctcagccctcattcagcaccagggcgtgcacacaggcgacaagccctacgcctgccacgagtgtgggaagacctttggtcgcagctccaacctcatccttcaccagcgagtccacactggagagaagccctatgaatgtactgaatgtggaaaaaccttcagccagagctcaaccctcattcagcatcagaggattcataatgggctgaagccccatgaatgtaaccagtgtggtaaagccttcaaccgaagctcaaatctcattcaccaccagaaagttcatactggggaaaaaccctacacctgtgttgaatgtggtaagggcttcagccagagctcacacctcattcagcatcagataatccacacgggcgagcgcccctacaaatgcagtgagtgtgggaaagccttcagtcagcgttcggtcctcatccagcaccagaggattcacactggggtgaagccctatgactgtgctgcttgtgggaaagccttcagccagcgatcaaagttgatcaaacaccagttgattcacaccagggaataggctgttgggctggcaggagtgaaaccgagcatagtttcctctccaactcctctttggccattgtctcagcctctgccacttcccagaccgaaagcctggactcagctcactgcctacatccagtggccacatagcctgggaccctcctttgaaacatcctttacaggctcccttctcactgccactgctcttgcctcttgtgatgtcttgggtttgggcttgtttttacagcttgtgaacggactgcacgtttgttacaagggagaagattatggaggctgcatattcatgaatagagtttattattataatgaaaagttaccaaaaaagtaaagtgacgtttggtttgagataaccatagtagtttgtttgattggta

SEQ ID NO: 23235 - DNA, 844 bp, Homo sapiens
ggaatgcagacatgtcagtgccaagtcaatgcagaggatggtgacagtcccagtggtagtgaatgtggaaaaaccttcagccagagctcaaccctcattcagcatcagaggattcataatgggctgaagccccatgaatgtaaccagtgtggtaaagccttcaaccgaagctcaaatctcattcaccaccagaaagttcatactggggaaaaaccctacacctgtgttgaatgtggtaagggcttcagccagagctcacacctcattcagcatcagataatccacacgggcgagcgcccctacaaatgcagtgagtgtgggaaagccttcagtcagcgttcggtcctcatccagcaccagaggattcacactggggtgaagccctatgactgtgctgcttgtgggaaagccttcagccagcgatcaaagttgatcaaacaccagttgattcacaccagggaataggctgttgggctggcaggagtgaaaccgagcatagtttcctctccaactcctctttggccattgtctcagcctctgccacttcccagaccgaaagcctggactcagctcactgcctacatccagtggccacatagcctgggaccctcctttgaaacatcctttacaggctcccttctcactgccactgctcttgcctcttgtgatgtcttgggtttgggcttgtttttacagcttgtgaacggactgcacgtttgttacaagggagaagattatggaggctgcatattcatgaatagagtttattattataatgaaaagttaccaaaaaagtaaagtgacgtttggtttgagataaccatagtagtttgtttgattggta

SEQ ID NO: 23236 - DNA, 475 bp, Homo sapiens
  misc_feature (399)..(399): n is a, c, g, or t
  misc_feature (407)..(407): n is a, c, g, or t
  misc_feature (455)..(455): n is a, c, g, or t
atctccacttaagagcctgacataataaacatttacactgcttaatgtgtaaatatagtctaatcttagaaagcacttcttacatagattaagaaaatttaaaaaaagtttttcttcatgacaaaaaaaattgctttcagctctagatgcaacaaatcatgatagaaattggtactaggctgggtgccgtgcctcatgcctgaaatcctagcactttgggaggccaaggtgggtgcactgcttggagtctaggagttcaagaccaggctgggcaacatggcaaaaacctgtttctacaaaaaatacacacacacacacacacacacacacacacacacacacacacacacaattaagttgctggcaaattccaaagctttagagagaataagcttcttnggtgggtngaaacttacaactctcacgtggtggctccagtttcctaaaattaaccnggtggcctgggtctctggaa

SEQ ID NO: 23237 - DNA, 485 bp, Homo sapiens
ggtcaccctgtgccctgttgcacacttgaggggcctggcattcggaatcttgccagctcaggctgggacaggccaccaacccccagggtccccctcctccaaaccccaggaccagagcctaagaggacaacacaaggcaggggcgggggttccactgctgtgccaagggcctggagaacacgggccttgctctccgctcagcagccaccagcgcccttctctcccggacagctcccgaggggctgctctcatggacaccatcaggtgctgggaagcaggaaccaccaggacctggacagagtccccagtgaccagcctggcagacagaggagccctcagctacagcatcacaaacaacgggtggggtaggtctgatgcaattctgtgggtgctgttgccaggcaggaggaggccatctccacagagacagccgcgagacacacgcgtccgcagtcagggagcgcaggagcaatgtggccccgagg

SEQ ID NO: 23238 - DNA, 914 bp, Homo sapiens
tctcactgccctggaggcccctctgtggcttagaacctggcatatggtgggagttctgagtttgccagtcctgccttccttccctccctctccttcggcccccttggtctctttcagcagtgttctcaagctttagcaagcatcagagtcacctggaaggcctgtcaaaacacacattgctgggccccacccccagggtttcctattcagtgcaggggaggagtagatgatttgcaattctaacaatttcccagatgataatgacccactctgagagccactgctttagagaagggtgtttcaatccaggcactatggacatgctgggctggataattccttgttgtgtgccctgtcctgtgcactgtaggatgttgggcagcatccctggcctctacccaccagatgccagtagtaaccctcctccacatgccacaaccagaaatgtctccaaacctggccagatatctcctatgggggcaaaatcaccccaacattgagaaccactgctctagaactctttgtcctgggggtggagtggactctgtggggacttggcaaggccaagttctaaattactgtcctcaagccaaatcaggccagccacctgtttttataaataagggctcactggaacacacagccccacccattcattgtcatcttctttctgctgctttcttgctacaagggtggaactgagtagttgcgacagaggccatctggtctgcaaagtctgagacattcactatctggctcttttcagaaaaagtctaccgacccctttcagaccctgaaggggtctggtagaatgtgatgtggtagaaggaccggggcaggtgggcccacccactctcttccatccaaaggaagggtagtcctccaggctgaagctaaataaagggcgtcttcta

SEQ ID NO: 23239 - DNA, 410 bp, Homo sapiens
aaatggaaaatatattgggctttatattctatacgaatttgtgtagactttagacatgtgagttaaaattccaggcagtttgcctcccaaagtgcagggattacagccgtgagccaccaagcccggcaggagttggttaatattaattcaccaaccatttcatttctattcactaaaaacttaaaaaatttaccccaggttccaagctgttggcaataaccaactgtagaatagagctttagctactattaagaataaagtttttagggctgagcttggtggctcatgcctgtaatcccagcactttgggaagccaaggcaggaagattgcttgagccccaggagttcaagaccagccttggcgacacagtgagaccctgtatcaaaaaaagaaaaaaatatatttttag

SEQ ID NO: 23240 - DNA, 360 bp, Homo sapiens
aaatggaaaatatattgggctttatattctatacgaatttgtgtagactttagacatgtgagttaaaattccaggcagtttggccgggtgcggtggtttggttcactcctgtaatcccagcactttgggaggccgaggcgggcggatcatgaggtcaggagatcgagaccatcctggctaacatggtgaaaccccgtctctactaaaaaaatacaaaaaattagcccggcgtggtggcgggtgcctttcacccaggctggagtgcagtggcgtgatcttggctcactgcaagctccgcctcccgggttcacgccattctcctgcctcagcctcccgagcagccaggactaaaggtcgacg

SEQ ID NO: 23241 - DNA, 282 bp, Homo sapiens
ggactagcatataattggaagattgaaggcagaagcccttatcttctcggcattctttagaattcttctgtatgtagatttcagaacacacagagccagagcaaaagaccttacttggcattaacaccaggatccacctgcccctcccttcctggcattaatgtccagtgctcccctaatgcactttaagctgtgaagttatcccaggtttatttacactgtaactaatttactcttggctggactgtcagcctggaaaataggatgtcactgcaccccccc

SEQ ID NO: 23242 - DNA, 4049 bp, Homo sapiens
acgcgccaatcggcatggctcttagagagagcagcttagtttttgaatcggttgtggcggccgccggcgaggaatggcggtatttgtgagaggagtcggcgtttgaagaggtggaactcctagggcttttttgagagtgctgatttagaagaatacaaatcatggctgaaaatagtgtattaacatccactactgggaggactagcttggcagactcttccatttttgattctaaagttactgagatttccaaggaaaacttacttattggatctacttcatatgtagaagaagagatgcctcagattgaaacaagagtgatattggttcaagaagctggaaaacaagaagaacttataaaagccttaaaggacattaaagtgggctttgtaaagatggagtcagtggaagaatttgaaggtttggattctccggaatttgaaaatgtatttgtagtcacggactttcaggattctgtctttaatgacctctacaaggctgattgtagagttattggaccaccagttgtattaaattgttcacaaaaaggagagcctttgccattttcatgtcgcccgttgtattgtacaagtatgatgaatctagtactatgctttactggatttaggaaaaaagaagaactagtcaggttggtgacattggtccatcacatgggtggagttattcgaaaagactttaattcaaaagttacacatttggtggcaaattgtacacaaggagaaaaattcagggttgctgtgagtctaggtactccaattatgaagccagaatggatttataaagcttgggaaaggcggaatgaacaggatttctatgcagcagttgatgactttagaaatgaatttaaagttcctccatttcaagattgtattttaagtttcctgggattttcagatgaagagaaaaccaatatggaagaaatgactgaaatgcaaggaggtaaatatttaccgcttggagatgaaagatgcactcaccttgtagttgaagagaatatagtaaaagatcttccctttgaaccttcaaagaaactttatgttgtcaagcaagagtggttctggggaagcattcaaatggatgcccgagctggagaaactatgtatttatatgaaaaggcaaatactcctgagctcaagaaatcagtgtcaatgctttctctaaatacccctaacagcaatcgcaaacgacgtcgtttaaaagaaacacttgctcagctttcaagagagacagacgtgtcaccatttccaccccgtaagcgcccatcagctgagcattccctttccatagggtcactcctagatatctccaacacaccagagtctagcattaactatggagacaccccaaagtcttgtactaagtcttctaaaagctccactccagttccttcaaagcagtcagcaaggtggcaagttgcaaaagagctttatcaaactgaaagtaattatgttaatatattggcaacaattattcagttatttcaagtaccattggaagaggaaggacaacgtggtggacctatccttgcaccagaggagattaagactatttttggtagcatcccagatatctttgatgtacacactaagataaaggatgatcttgaagaccttatagttaattgggatgagagcaaaagcattggtgacatttttctgaaatattcaaaagatttggtaaaaacctaccctccctttgtaaacttctttgaaatgagcaaggaaacaattattaaatgtgaaaaacagaaaccaagatttcatgcttttctcaagataaaccaagcaaaaccagaatgtggacggcagagccttgttgaacttcttatccgaccagtacagaggttacccagtgttgcattacttttaaatgatcttaagaagcatacagctgatgaaaatccagacaaaagcactttagaaaaagctattggatcactgaaggaagtaatgacgcatattaatgaggataagagaaaaacagaagctcaaaagcaaatttttgatgttgtttatgaagtagatggatgcccagctaatcttttatcttctcaccgaagcttagtacagcgggttgaaacaatttctctaggtgagcacccctgtgacagaggagaacaagtaactctcttcctcttcaatgattgcctagagatagcaagaaaacggcacaaggttattggcacttttaggagtcctcatggccaaacccgacccccagcttctcttaagcatattcacctaatgcctctttctcagattaagaaggtattggacataagagagacagaagattgccataatgcttttgccttgcttgtgaggccaccaacagagcaggcaaatgtgctactcagtttccagatgacatcagatgaacttccaaaagaaaactggctaaagatgctgtgtcgacatgtagctaacaccatttgtaaagcagatgctgagaatcttatttatactgctgatccagaatcctttgaagtaaatacaaaagatatggacagtacattgagtagagcatcaagagcaataaaaaagacttcaaaaaaggttacaagagcattctctttctccaaaactccaaaaagagctcttcgaagggctcttatgacatcccacggctcagtggagggaagaagtccttccagcaatgataagcatgtaatgagtcgtctttctagcacatcatcattagcaggtatcccttctccctcccttgtcagccttccttccttctttgaaaggagaagtcatacgttaagtagatctacaactcatttgatatgaagcgttaccaaaatcttaaattatagaaatgtatagacacctcatactcaaataagaaactgacttaaatggtacttgtaattagcacttggtgaaagctggaaggaagataaataacactaaactatgctatttgatttttcttcttgaaagagtaaggtttacctgttacattttcaagttaattcatgtaaaaaatgatagtgattttgatgtaatttatctcttgtttgaatctgtcattcaaaggccaataatttaagttgctatcagctgatattagtagctttgcaaccctgatagagtaaataaattttatgggcgggtgccaaatactgctgtgaatctatttgtatagtatccatgaatgaatttatggaaatagatatttgtgcagctcaatttatgcagagattaaatgacatcataatactggatgaaaacttgcatagaattctgattaaatagtgggtctgtttcacatgtgcagtttgaagtatttaaataaccactcctttcacagtttattttcttctcaagcgttttcaagatctagcatgtggattttaaaagatttgccctcattaacaagaataacatttaaaggagattgtttcaaaatatttttgcaaattgagataaggacagaaagattgagaaacattgtatattttgcaaaaacaagatgtttgtagctgtttcagagagagtacggtatatttatggtaattttatccactagcaaatcttgatttagtttgatagtgtgtggaattttattttgaaggataagaccatgggaaaattgtggtaaagactgtttgtacccttcatgaaataattctgaagttgccatcagttttactaatcttctgtgaaatgcatagatatgcgcatgttcaactttttattgtggtcttataattaaatgtaaaattgaaaattcatttgctgtttcaaagtgtgatatctttcacaatagcctttttatagtcagtaattcagaataatcaagttcatatggataaatgcatttttatttcctatttctttagggagtgctacaaacgtttgtcacttaaatttcaagtttctgttttaatagttaactgactatagattgttttctatgccatgtatgtgccacttctgagagtagtaaatgactctttgctacattttaaaagcaattgtattagtaagaactttgtaaataaatacctaaaacccaagtgt

SEQ ID NO: 23243 - DNA, 3952 bp, Homo sapiens
ctcggtacccggatcattttcttcttccggtccttaaagcagctgatttagaagaatacaaatcatggctgaaaatagtgtattaacatccactactgggaggactagcttggcagactcttccatttttgattctaaagttactgagatttccaaggaaaacttacttattggatctacttcatatgtagaagaagagatgcctcagattgaaacaagagtgatattggttcaagaagctggaaaacaagaagaacttataaaagccttaaaggacattaaagtgggctttgtaaagatggagtcagtggaagaatttgaaggtttggattctccggaatttgaaaatgtatttgtagtcacggactttcaggattctgtctttaatgacctctacaaggctgattgtagagttattggaccaccagttgtattaaattgttcacaaaaaggagagcctttgccattttcatgtcgcccgttgtattgtacaagtatgatgaatctagtactatgctttactggatttaggaaaaaagaagaactagtcaggttggtgacattggtccatcacatgggtggagttattcgaaaagactttaattcaaaagttacacatttggtggcaaattgtacacaaggagaaaaattcagggttgctgtgagtctaggtactccaattatgaagccagaatggatttataaagcttgggaaaggcggaatgaacaggatttctatgcagcagttgatgactttagaaatgaatttaaagttcctccatttcaagattgtattttaagtttcctgggattttcagatgaagagaaaaccaatatggaagaaatgactgaaatgcaaggaggtaaatatttaccgcttggagatgaaagatgcactcaccttgtagttgaagagaatatagtaaaagatcttccctttgaaccttcaaagaaactttatgttgtcaagcaagagtggttctggggaagcattcaaatggatgcccgagctggagaaactatgtatttatatgaaaaggcaaatactcctgagctcaagaaatcagtgtcaatgctttctctaaatacccctaacagcaatcgcaaacgacgtcgtttaaaagaaacacttgctcagctttcaagagagacagacgtgtcaccatttccaccccgtaagcgcccatcagctgagcattccctttccatagggtcactcctagatatctccaacacaccagagtctagcattaactatggagacaccccaaagtcttgtactaagtcttctaaaagctccactccagttccttcaaagcagtcagcaaggtggcaagttgcaaaagagctttatcaaactgaaagtaattatgttaatatattggcaacaattattcagttatttcaagtaccattggaagaggaaggacaacgtggtggacctatccttgcaccagaggagattaagactatttttggtagcatcccagatatctttgatgtacacactaagataaaggatgatcttgaagaccttatagttaattgggatgagagcaaaagcattggtgacatttttctgaaatattcaaaagatttggtaaaaacctaccctccctttgtaaacttctttgaaatgagcaaggaaacaattattaaatgtgaaaaacagaaaccaagatttcatgcttttctcaagataaaccaagcaaaaccagaatgtggacggcagagccttgttgaacttcttatccgaccagtacagaggttacccagtgttgcattacttttaaatgatcttaagaagcatacagctgatgaaaatccagacaaaagcactttagaaaaagctattggatcactgaaggaagtaatgacgcatattaatgaggataagagaaaaacagaagctcaaaagcaaatttttgatgttgtttatgaagtagatggatgcccagctaatcttttatcttctcaccgaagcttagtacagcgggttgaaacaatttctctaggtgagcacccctgtgacagaggagaacaagtaactctcttcctcttcaatgattgcctagagatagcaagaaaacggcacaaggttattggcacttttaggagtcctcatggccaaacccgacccccagcttctcttaagcatattcacctaatgcctctttctcagattaagaaggtattggacataagagagacagaagattgccataatgcttttgccttgcttgtgaggccaccaacagagcaggcaaatgtgctactcagtttccagatgacatcagatgaacttccaaaagaaaactggctaaagatgctgtgtcgacatgtagctaacaccatttgtaaagcagatgctgagaatcttatttatactgctgatccagaatcctttgaagtaaatacaaaagatatggacagtacattgagtagagcatcaagagcaataaaaaagacttcaaaaaaggttacaagagcattctctttctccaaaactccaaaaagagctcttcgaagggctcttatgacatcccacggctcagtggagggaagaagtccttccagcaatgataagcatgtaatgagtcgtctttctagcacatcatcattagcaggtatcccttctccctcccttgtcagccttccttccttctttgaaaggagaagtcatacgttaagtagatctacaactcatttgatatgaagcgttaccaaaatcttaaattatagaaatgtatagacacctcatactcaaataagaaactgacttaaatggtacttgtaattagcacttggtgaaagctggaaggaagataaataacactaaactatgctatttgatttttcttcttgaaagagtaaggtttacctgttacattttcaagttaattcatgtaaaaaatgatagtgattttgatgtaatttatctcttgtttgaatctgtcattcaaaggccaataatttaagttgctatcagctgatattagtagctttgcaaccctgatagagtaaataaattttatgggcgggtgccaaatactgctgtgaatctatttgtatagtatccatgaatgaatttatggaaatagatatttgtgcagctcaatttatgcagagattaaatgacatcataatactggatgaaaacttgcatagaattctgattaaatagtgggtctgtttcacatgtgcagtttgaagtatttaaataaccactcctttcacagtttattttcttctcaagcgttttcaagatctagcatgtggattttaaaagatttgccctcattaacaagaataacatttaaaggagattgtttcaaaatatttttgcaaattgagataaggacagaaagattgagaaacattgtatattttgcaaaaacaagatgtttgtagctgtttcagagagagtacggtatatttatggtaattttatccactagcaaatcttgatttagtttgatagtgtgtggaattttattttgaaggataagaccatgggaaaattgtggtaaagactgtttgtacccttcatgaaataattctgaagttgccatcagttttactaatcttctgtgaaatgcatagatatgcgcatgttcaactttttattgtggtcttataattaaatgtaaaattgaaaattcatttgctgtttcaaagtgtgatatctttcacaatagcctttttatagtcagtaattcagaataatcaagttcatatggataaatgcatttttatttcctatttctttagggagtgctacaaacgtttgtcacttaaatttcaagtttctgttttaatagttaactgactatagattgttttctatgccatgtatgtgccacttctgagagtagtaaatgactctttgctacattttaaaagcaattgtattagtaagaactttgtaaataaatacctaaaacccaagtgt

SEQ ID NO: 23244 - DNA, 3376 bp, Homo sapiens
ttaagaagcatacagctgatgaaaatccagacaaaagcactttagaaaaagctattggatcactgaaggaagtaatgacgttgctgtgagtctaggtactccaattatgaagccagaatggatttataaagcttgggaaaggcggaatgaacaggatttctatgcagcagttgatgactttagaaatgaatttaaagttcctccatttcaagattgtattttaagtttcctgggattttcagatgaagagaaaaccaatatggaagaaatgactgaaatgcaaggaggtaaatatttaccgcttggagatgaaagatgcactcaccttgtagttgaagagaatatagtaaaagatcttccctttgaaccttcaaagaaactttatgttgtcaagcaagagtggttctggggaagcattcaaatggatgcccgagctggagaaactatgtatttatatgaaaaggcaaatactcctgagctcaagaaatcagtgtcaatgctttctctaaatacccctaacagcaatcgcaaacgacgtcgtttaaaagaaacacttgctcagctttcaagagagacagacgtgtcaccatttccaccccgtaagcgcccatcagctgagcattccctttccatagggtcactcctagatatctccaacacaccagagtctagcattaactatggagacaccccaaagtcttgtactaagtcttctaaaagctccactccagttccttcaaagcagtcagcaaggtggcaagttgcaaaagagctttatcaaactgaaagtaattatgttaatatattggcaacaattattcagttatttcaagtaccattggaagaggaaggacaacgtggtggacctatccttgcaccagaggagattaagactatttttggtagcatcccagatatctttgatgtacacactaagataaaggatgatcttgaagaccttatagttaattgggatgagagcaaaagcattggtgacatttttctgaaatattcaaaagatttggtaaaaacctaccctccctttgtaaacttctttgaaatgagcaaggaaacaattattaaatgtgaaaaacagaaaccaagatttcatgcttttctcaagataaaccaagcaaaaccagaatgtggacggcagagccttgttgaacttcttatccgaccagtacagaggttacccagtgttgcattacttttaaatgatcttaagaagcatacagctgatgaaaatccagacaaaagcactttagaaaaagctattggatcactgaaggaagtaatgacgcatattaatgaggataagagaaaaacagaagctcaaaagcaaatttttgatgttgtttatgaagtagatggatgcccagctaatcttttatcttctcaccgaagcttagtacagcgggttgaaacaatttctctaggtgagcacccctgtgacagaggagaacaagtaactctcttcctcttcaatgattgcctagagatagcaagaaaacggcacaaggttattggcacttttaggagtcctcatggccaaacccgacccccagcttctcttaagcatattcacctaatgcctctttctcagattaagaaggtattggacataagagagacagaagattgccataatgcttttgccttgcttgtgaggccaccaacagagcaggcaaatgtgctactcagtttccagatgacatcagatgaacttccaaaagaaaactggctaaagatgctgtgtcgacatgtagctaacaccatttgtaaagcagatgctgagaatcttatttatactgctgatccagaatcctttgaagtaaatacaaaagatatggacagtacattgagtagagcatcaagagcaataaaaaagacttcaaaaaaggttacaagagcattctctttctccaaaactccaaaaagagctcttcgaagggctcttatgacatcccacggctcagtggagggaagaagtccttccagcaatgataagcatgtaatgagtcgtctttctagcacatcatcattagcaggtatcccttctccctcccttgtcagccttccttccttctttgaaaggagaagtcatacgttaagtagatctacaactcatttgatatgaagcgttaccaaaatcttaaattatagaaatgtatagacacctcatactcaaataagaaactgacttaaatggtacttgtaattagcacttggtgaaagctggaaggaagataaataacactaaactatgctatttgatttttcttcttgaaagagtaaggtttacctgttacattttcaagttaattcatgtaaaaaatgatagtgattttgatgtaatttatctcttgtttgaatctgtcattcaaaggccaataatttaagttgctatcagctgatattagtagctttgcaaccctgatagagtaaataaattttatgggcgggtgccaaatactgctgtgaatctatttgtatagtatccatgaatgaatttatggaaatagatatttgtgcagctcaatttatgcagagattaaatgacatcataatactggatgaaaacttgcatagaattctgattaaatagtgggtctgtttcacatgtgcagtttgaagtatttaaataaccactcctttcacagtttattttcttctcaagcgttttcaagatctagcatgtggattttaaaagatttgccctcattaacaagaataacatttaaaggagattgtttcaaaatatttttgcaaattgagataaggacagaaagattgagaaacattgtatattttgcaaaaacaagatgtttgtagctgtttcagagagagtacggtatatttatggtaattttatccactagcaaatcttgatttagtttgatagtgtgtggaattttattttgaaggataagaccatgggaaaattgtggtaaagactgtttgtacccttcatgaaataattctgaagttgccatcagttttactaatcttctgtgaaatgcatagatatgcgcatgttcaactttttattgtggtcttataattaaatgtaaaattgaaaattcatttgctgtttcaaagtgtgatatctttcacaatagcctttttatagtcagtaattcagaataatcaagttcatatggataaatgcatttttatttcctatttctttagggagtgctacaaacgtttgtcacttaaatttcaagtttctgttttaatagttaactgactatagattgttttctatgccatgtatgtgccacttctgagagtagtaaatgactctttgctacattttaaaagcaattgtattagtaagaactttgtaaataaatacctaaaacccaagtgt

SEQ ID NO: 23245 - DNA, 479 bp, Homo sapiens
gtaaggactctgtgtgagtgagagaggtgcaagtgggcgagcggctccagagccaagggctcttttgcctgcggtcgacgtccccgcccctagtgaccgcgaattccggagcgccccagctcaggcttcccggatccgggaactccctcgccgcaccccacccccagcagccgggccctgacgcggagtgggagaccgaagcccccagtattgctgggcatcttcgccctcacctgttggctcttttggacagaagagtgtgggtgaagggagggagttgggaaagggattttggcaagccgcgcagccctgtggctttgggggccggcacttgcagcctttgggggcttatctcagagtgcgccgtggttttattctaggattcatcctggcttctttgcgggaagtttaatttttcgtttttgcaagataaatccaggccatccgcccctcgtcctccccagccacccggcacagat

SEQ ID NO: 23246 - DNA, 273 bp, Homo sapiens
actattaaaataatggaagtccctgttataaagataaaagaaagttgtcctggaaaatcggatgaaaaattaataaaaagtgttattaatatggtaggtcaaagtaactcattgcatgtggcatgctgcacttcccttgattgtattattctactttctggtgattggaattaggcacaaggtgtattgtgtgcaatctgaagcttaatgaatagaaactgttttatactttttaactccttagcttcttttttctcattcattttatattta

SEQ ID NO: 23247 - DNA, 4142 bp, Homo sapiens
acgcgccaatcggcatggctcttagagagagcagcttagtttttgaatcggttgtggcggccgccggcgaggaatggcggtatttgtgagaggagtcggcgtttgaagaggtggaactcctagggcttttttgagagtgctgatttagaagaatacaaatcatggctgaaaatagtgtattaacatccactactgggaggactagcttggcagactcttccatttttgattctaaagttactgagatttccaaggaaaacttacttattggatctacttcatatgtagaagaagagatgcctcagattgaaacaagagtgatattggttcaagaagctggaaaacaagaagaacttataaaagccttaaagactattaaaataatggaagtccctgttataaagataaaagaaagttgtcctggaaaatcggatgaaaaattaataaaaagtgttattaatatggacattaaagtgggctttgtaaagatggagtcagtggaagaatttgaaggtttggattctccggaatttgaaaatgtatttgtagtcacggactttcaggattctgtctttaatgacctctacaaggctgattgtagagttattggaccaccagttgtattaaattgttcacaaaaaggagagcctttgccattttcatgtcgcccgttgtattgtacaagtatgatgaatctagtactatgctttactggatttaggaaaaaagaagaactagtcaggttggtgacattggtccatcacatgggtggagttattcgaaaagactttaattcaaaagttacacatttggtggcaaattgtacacaaggagaaaaattcagggttgctgtgagtctaggtactccaattatgaagccagaatggatttataaagcttgggaaaggcggaatgaacaggatttctatgcagcagttgatgactttagaaatgaatttaaagttcctccatttcaagattgtattttaagtttcctgggattttcagatgaagagaaaaccaatatggaagaaatgactgaaatgcaaggaggtaaatatttaccgcttggagatgaaagatgcactcaccttgtagttgaagagaatatagtaaaagatcttccctttgaaccttcaaagaaactttatgttgtcaagcaagagtggttctggggaagcattcaaatggatgcccgagctggagaaactatgtatttatatgaaaaggcaaatactcctgagctcaagaaatcagtgtcaatgctttctctaaatacccctaacagcaatcgcaaacgacgtcgtttaaaagaaacacttgctcagctttcaagagagacagacgtgtcaccatttccaccccgtaagcgcccatcagctgagcattccctttccatagggtcactcctagatatctccaacacaccagagtctagcattaactatggagacaccccaaagtcttgtactaagtcttctaaaagctccactccagttccttcaaagcagtcagcaaggtggcaagttgcaaaagagctttatcaaactgaaagtaattatgttaatatattggcaacaattattcagttatttcaagtaccattggaagaggaaggacaacgtggtggacctatccttgcaccagaggagattaagactatttttggtagcatcccagatatctttgatgtacacactaagataaaggatgatcttgaagaccttatagttaattgggatgagagcaaaagcattggtgacatttttctgaaatattcaaaagatttggtaaaaacctaccctccctttgtaaacttctttgaaatgagcaaggaaacaattattaaatgtgaaaaacagaaaccaagatttcatgcttttctcaagataaaccaagcaaaaccagaatgtggacggcagagccttgttgaacttcttatccgaccagtacagaggttacccagtgttgcattacttttaaatgatcttaagaagcatacagctgatgaaaatccagacaaaagcactttagaaaaagctattggatcactgaaggaagtaatgacgcatattaatgaggataagagaaaaacagaagctcaaaagcaaatttttgatgttgtttatgaagtagatggatgcccagctaatcttttatcttctcaccgaagcttagtacagcgggttgaaacaatttctctaggtgagcacccctgtgacagaggagaacaagtaactctcttcctcttcaatgattgcctagagatagcaagaaaacggcacaaggttattggcacttttaggagtcctcatggccaaacccgacccccagcttctcttaagcatattcacctaatgcctctttctcagattaagaaggtattggacataagagagacagaagattgccataatgcttttgccttgcttgtgaggccaccaacagagcaggcaaatgtgctactcagtttccagatgacatcagatgaacttccaaaagaaaactggctaaagatgctgtgtcgacatgtagctaacaccatttgtaaagcagatgctgagaatcttatttatactgctgatccagaatcctttgaagtaaatacaaaagatatggacagtacattgagtagagcatcaagagcaataaaaaagacttcaaaaaaggttacaagagcattctctttctccaaaactccaaaaagagctcttcgaagggctcttatgacatcccacggctcagtggagggaagaagtccttccagcaatgataagcatgtaatgagtcgtctttctagcacatcatcattagcaggtatcccttctccctcccttgtcagccttccttccttctttgaaaggagaagtcatacgttaagtagatctacaactcatttgatatgaagcgttaccaaaatcttaaattatagaaatgtatagacacctcatactcaaataagaaactgacttaaatggtacttgtaattagcacttggtgaaagctggaaggaagataaataacactaaactatgctatttgatttttcttcttgaaagagtaaggtttacctgttacattttcaagttaattcatgtaaaaaatgatagtgattttgatgtaatttatctcttgtttgaatctgtcattcaaaggccaataatttaagttgctatcagctgatattagtagctttgcaaccctgatagagtaaataaattttatgggcgggtgccaaatactgctgtgaatctatttgtatagtatccatgaatgaatttatggaaatagatatttgtgcagctcaatttatgcagagattaaatgacatcataatactggatgaaaacttgcatagaattctgattaaatagtgggtctgtttcacatgtgcagtttgaagtatttaaataaccactcctttcacagtttattttcttctcaagcgttttcaagatctagcatgtggattttaaaagatttgccctcattaacaagaataacatttaaaggagattgtttcaaaatatttttgcaaattgagataaggacagaaagattgagaaacattgtatattttgcaaaaacaagatgtttgtagctgtttcagagagagtacggtatatttatggtaattttatccactagcaaatcttgatttagtttgatagtgtgtggaattttattttgaaggataagaccatgggaaaattgtggtaaagactgtttgtacccttcatgaaataattctgaagttgccatcagttttactaatcttctgtgaaatgcatagatatgcgcatgttcaactttttattgtggtcttataattaaatgtaaaattgaaaattcatttgctgtttcaaagtgtgatatctttcacaatagcctttttatagtcagtaattcagaataatcaagttcatatggataaatgcatttttatttcctatttctttagggagtgctacaaacgtttgtcacttaaatttcaagtttctgttttaatagttaactgactatagattgttttctatgccatgtatgtgccacttctgagagtagtaaatgactctttgctacattttaaaagcaattgtattagtaagaactttgtaaataaatacctaaaacccaagtgt

SEQ ID NO: 23248 - DNA, 3641 bp, Homo sapiens
tccatagctcactcctgagggtaaaactagggccagagagacgtaaagactcggactttcaggattctgtctttaatgacctctacaaggctgattgtagagttattggaccaccagttgtattaaattgttcacaaaaaggagagcctttgccattttcatgtcgcccgttgtattgtacaagtatgatgaatctagtactatgctttactggatttaggaaaaaagaagaactagtcaggttggtgacattggtccatcacatgggtggagttattcgaaaagactttaattcaaaagttacacatttggtggcaaattgtacacaaggagaaaaattcagggttgctgtgagtctaggtactccaattatgaagccagaatggatttataaagcttgggaaaggcggaatgaacaggatttctatgcagcagttgatgactttagaaatgaatttaaagttcctccatttcaagattgtattttaagtttcctgggattttcagatgaagagaaaaccaatatggaagaaatgactgaaatgcaaggaggtaaatatttaccgcttggagatgaaagatgcactcaccttgtagttgaagagaatatagtaaaagatcttccctttgaaccttcaaagaaactttatgttgtcaagcaagagtggttctggggaagcattcaaatggatgcccgagctggagaaactatgtatttatatgaaaaggcaaatactcctgagctcaagaaatcagtgtcaatgctttctctaaatacccctaacagcaatcgcaaacgacgtcgtttaaaagaaacacttgctcagctttcaagagagacagacgtgtcaccatttccaccccgtaagcgcccatcagctgagcattccctttccatagggtcactcctagatatctccaacacaccagagtctagcattaactatggagacaccccaaagtcttgtactaagtcttctaaaagctccactccagttccttcaaagcagtcagcaaggtggcaagttgcaaaagagctttatcaaactgaaagtaattatgttaatatattggcaacaattattcagttatttcaagtaccattggaagaggaaggacaacgtggtggacctatccttgcaccagaggagattaagactatttttggtagcatcccagatatctttgatgtacacactaagataaaggatgatcttgaagaccttatagttaattgggatgagagcaaaagcattggtgacatttttctgaaatattcaaaagatttggtaaaaacctaccctccctttgtaaacttctttgaaatgagcaaggaaacaattattaaatgtgaaaaacagaaaccaagatttcatgcttttctcaagataaaccaagcaaaaccagaatgtggacggcagagccttgttgaacttcttatccgaccagtacagaggttacccagtgttgcattacttttaaatgatcttaagaagcatacagctgatgaaaatccagacaaaagcactttagaaaaagctattggatcactgaaggaagtaatgacgcatattaatgaggataagagaaaaacagaagctcaaaagcaaatttttgatgttgtttatgaagtagatggatgcccagctaatcttttatcttctcaccgaagcttagtacagcgggttgaaacaatttctctaggtgagcacccctgtgacagaggagaacaagtaactctcttcctcttcaatgattgcctagagatagcaagaaaacggcacaaggttattggcacttttaggagtcctcatggccaaacccgacccccagcttctcttaagcatattcacctaatgcctctttctcagattaagaaggtattggacataagagagacagaagattgccataatgcttttgccttgcttgtgaggccaccaacagagcaggcaaatgtgctactcagtttccagatgacatcagatgaacttccaaaagaaaactggctaaagatgctgtgtcgacatgtagctaacaccatttgtaaagcagatgctgagaatcttatttatactgctgatccagaatcctttgaagtaaatacaaaagatatggacagtacattgagtagagcatcaagagcaataaaaaagacttcaaaaaaggttacaagagcattctctttctccaaaactccaaaaagagctcttcgaagggctcttatgacatcccacggctcagtggagggaagaagtccttccagcaatgataagcatgtaatgagtcgtctttctagcacatcatcattagcaggtatcccttctccctcccttgtcagccttccttccttctttgaaaggagaagtcatacgttaagtagatctacaactcatttgatatgaagcgttaccaaaatcttaaattatagaaatgtatagacacctcatactcaaataagaaactgacttaaatggtacttgtaattagcacttggtgaaagctggaaggaagataaataacactaaactatgctatttgatttttcttcttgaaagagtaaggtttacctgttacattttcaagttaattcatgtaaaaaatgatagtgattttgatgtaatttatctcttgtttgaatctgtcattcaaaggccaataatttaagttgctatcagctgatattagtagctttgcaaccctgatagagtaaataaattttatgggcgggtgccaaatactgctgtgaatctatttgtatagtatccatgaatgaatttatggaaatagatatttgtgcagctcaatttatgcagagattaaatgacatcataatactggatgaaaacttgcatagaattctgattaaatagtgggtctgtttcacatgtgcagtttgaagtatttaaataaccactcctttcacagtttattttcttctcaagcgttttcaagatctagcatgtggattttaaaagatttgccctcattaacaagaataacatttaaaggagattgtttcaaaatatttttgcaaattgagataaggacagaaagattgagaaacattgtatattttgcaaaaacaagatgtttgtagctgtttcagagagagtacggtatatttatggtaattttatccactagcaaatcttgatttagtttgatagtgtgtggaattttattttgaaggataagaccatgggaaaattgtggtaaagactgtttgtacccttcatgaaataattctgaagttgccatcagttttactaatcttctgtgaaatgcatagatatgcgcatgttcaactttttattgtggtcttataattaaatgtaaaattgaaaattcatttgctgtttcaaagtgtgatatctttcacaatagcctttttatagtcagtaattcagaataatcaagttcatatggataaatgcatttttatttcctatttctttagggagtgctacaaacgtttgtcacttaaatttcaagtttctgttttaatagttaactgactatagattgttttctatgccatgtatgtgccacttctgagagtagtaaatgactctttgctacattttaaaagcaattgtattagtaagaactttgtaaataaatacctaaaacccaagtgt

SEQ ID NO: 23249 - DNA, 1507 bp, Homo sapiens
  misc_feature (1507)..(1507): n is a, c, g, or t
gttggcaagcggaccaccagcaacagacaacatcttcattcggctctccctgaagctgtactgcctcgctgagaggatgaaggtctccgaggctgccctgtctctccttgtcctcatccttatcattacttcggcttctcgcagccagccaaaagttcctgagtgggtgaacaccccatccacctgctgcctgaagtattatgagaaagtgttgccaaggagactagtggtgggatacagaaaggccctcaactgtcacctgccagcaatcatcttcgtcaccaagaggaaccgagaagtctgcaccaaccccaatgacgactgggtccaagagtacatcaaggatcccaacctacctttgctgcctaccaggaacttgtccacggttaaaattattacagcaaagaatggtcaaccccagctcctcaactcccagtgatgaccaggctttagtggaagcccttgtttacagaagagaggggtaaacctatgaaaacaggggaagccttattaggctgaaactagccagtcacattgagagaagcagaacaatgatcaaaataaaggagaagtatttcgaatattttctcaatcttaggaggaaataccaaagttaagggacgtgggcagaggtacgctcttttatttttatatttatatttttatttttttgagatagggtcttactctgtcacccaggctggagtgcagtggtgtgatcttggctcacttgatcttggctcactgtaacctccacctcccaggctcaagtgatcctcccaccccagcctcccgagtagctgggactacaggcttgcgccaccacacctggctaatttttgtatttttggtagagacgggattctaccatgttgcccaggctggtctcaaactcgtgtgcccaagcaatccacctgcctcagccttccaaaagtgctgggattacaggcgtgagccaccacatccggccagtgcactcttaatacacagaaaaatatatttcacatccttctcctgctctctttcaattcctcacttcacaccagtacacaagccattctaaatacttagccagtttccagccttccagatgatctttgccctctgggtcttgacccattaagagccccatagaactcttgatttttcctgtccatctttatggatttttctggatctatattttcttcaattattctttcattttataatgcaactttttcataggaagtccggatgggaatattcacattaatcatttttgcagagactttgctagatcctctcatattttgtcttcctcagggtggcaggggtacagagagtgcctgattggaaaaaaaaaaaaaagagagagagagagaagaagaagaagaagagacacaaatctctacctcccatgttaagctttgcaggacagggaaagaaagggtatgagacacggctaggggtaaactcttagtccaaaacccaagcatgcaataaataaaactcccttatttgacan

SEQ ID NO: 23250 - DNA, 1536 bp, Homo sapiens
ttaaataattagaatttcagatcggtcaaaatactttggcatctgaaagcaggagcttagaaccagaattccttctcagacataatcccagcatccccagcccagtgcttttgctctttcgcaccaggccagataactctgtgatcatggacgtatgcaggaatttgtaaatatttggtggatgatagtcagattgccaaatggcagaaaggtttctggttttgcagtttgaaaaggattatagagcggggaacaaggtaaatatctgaaggtctgcatgatagtacttcttttcctattgctttggagttattttttatacctctttacacaatgtgtgagactaccaaatttacattgcactgttccaggtgacttgtgcagttgacaaactatgacccagcatagcaacctaggcaagaggagcctatataattcattcttattcctattttgctatttcaacttgtttctgttttataactgcaaatggcctcccaggggtagcaactgttggcaacttaaagttaagccagtagttctcctcactccatatctatgctgcttgtctttgcatataagtgagtggatgctgggggcatggaaaaacaaaactatttaagtgtgggagaggcctgtgacttttgtagtcctttggggaatttttcacatgaccagggccaaatagttctgactgctcttgtgccatcctgggaatagagcagtgggatgtaaggagtgaaaggggccatggatcagtggttctcaaagtgtggtcctcagacctgcagcatcagcatcaccagggagcatgttagaaatgcagatcctcaggccctggccccaacctactgaattaaaaccttttcaggcgggcccacgagtctgttataacaaggtcttcggatgatgactgtgcatagtgaaatgtgagaagtaccgcttgattcatcatccagccagatctgtccagcccatttttgtgattgtggaaattgagggcaagagtgggcaggtcactttcccaccatgaaacagctagctcagggtaggtgctggccttctgattcccagtccagacctctgctagtcacagtgcccagccaggtatgctgtggggatgtcagtggcctcagaaagagtgacgacttgggactgatgtccccacatgctggggtcacaggacaaaggaaagggtttgtgactttgagctctcttcttaccctgggcaacctctctctctgtttaaaagcctggtgaccctgctgtgaacttcctcttttaaatgaacagctccctagagcatccttggctgagcttagcaacaaggggggagggagtgaggaggggtgggaggaaaatgggctcccccgttatcatgtcagtgcaatcactgggaattatggttgaggattaagagtcacttggggataattcagccaggctggagagggaaacacacacaaatacacacacactcacaacataaacagattgctaaagctcatggcagaaaacaaacagcataggaaagaa

SEQ ID NO: 23251 - DNA, 307 bp, Homo sapiens
gctgagattgtgccactgctctccatcctgggcaagacagaacaagactgtctcaaaaaaaaaaaaaaaaaaaaaaaccagtaaccttgttcaccttttgtggttttctgtctagtctgagtttttctctctagcctgtcccctaagctctcctctcttctacttttctgccttccccttcatttctgacaccctcctagctctactttaccacccaattgttccagccactaccctccctcccaacacactacacacacacacacacacacacacacacacacacacacacacacagaaaaaaaaa

SEQ ID NO: 23252 - DNA, 791 bp, Homo sapiens
tttttttttttagaaaaagaccatatggaaaacattcatcttagcaacttctgataaaaagaaaaaaaaaaaaaaaaccctgattttaacttaccactgatttttactaaacttttaatctttagtttatgcaacaggaccacaatttcttttcccagttattaacacccagattgtttcaaaccctgaaaggaaagtgcaaaacatcatgctgcagaatttctatgccttagcttctgcagtgtttctctgtaaagtggccaggatggccctgtcattcactttcggagctgtcttcactgtcttcactctcggagtgtcttcactcttggagctgtacaaattatgcttttcgatgtattcttggacaagatctagtaccaagtagtggatgctctggccccttctgagggctcttcagatttttgtggatgagatgtcattagtgatccattcattcaccacatgaatgttgctccagtctttccatagcacatcagattcatagatgaatttctgagcagcatttccagcttgagtaatgcatatgagcccatagtctgccatgatttgggtgatgtcttcactcttccagaaattgggaacaccaaaggactccagtaaatctgccccacacagcagcttgacttttggtgcaccttttgtttttggctctagggatctcttttgactagaagcttgtctttgttcagctcatggaattcctctttcgtccaggcctttctagtgtaggtgagttctgctgttgatcacagtcactagcctccagt

SEQ ID NO: 23253 - DNA, 158 bp, Homo sapiens
gggactggatatacacatcagcattagatgtaatattgatgtctagcatttctcaagcaaataacatgcgatgaaaataacaaagtttgtatactgacaattagattaatttagagattccaggttaactattagaggttttgaagaaatcataaaga

SEQ ID NO: 23254 - DNA, 472 bp, Homo sapiens
gatctatatttgtgcaactgcgtccttaacattgactaagaccatcactgaaaaataaggtgaggaatgacattttagataaaaattttgttggagagcaatgtcatgagtggaatgcatgcattttgtgagtaagatatgtgtctacagatgaagacacacacacacagaaacacacatacacacacacttgcaaagacaaatattggattttttggaacatttgaatgaaaacattattctcttgttttcattgcatacatcattgctgtattatggtggcttctttcgctctctagttgaccttagtttcctgagagacatcccatagcgtgggtatgaggctagtgacctgcaccccttcttgaggggaatgtaggtagctgctaagccctgcatgctctggcatatctaacaaatgcctgtgagaattgtgaataggttaaaggcatagatgatagaaaaaaaatac

SEQ ID NO: 23255 - DNA, 237 bp, Homo sapiens
ctgttcaggcctcccctacctcacctgtaaagagtccctggaaattagactctgtcttgggctagccagcaggttggcactggagcctcagatggaagctacgtgctaccagacacagagataccatcaggagccaggacccgagaggagaagagggctgtgagctgccctgggactctgggggtggaccttggaggcagagcagtgatggaggtgaagggaaagtttgcaaagtct

SEQ ID NO: 23256 - DNA, 368 bp, Homo sapiens
ctaaattttaaaatcctcttgttattcttctgaaagagttgctttatgtattttgggcattgcaaacttgtcttgtgaaagagcttttcttggaaaatattaaacagtaaaattaaattgtgtggcgccttcgttggcttgatgtgaaagaatggatagagggtgagctgggaggatgaaaatgaaatctgtggagctacaaaagaaattgatgtaaaatccttgtactggtcccctgaggctacttagttgggtcttaccaagaactataaccgttacttccaaaatttgtacagagtaaatgagcctgataggaggatgtgataaggttcaacattgggtcttgaaatctagcaattagttcagta

SEQ ID NO: 23257 - DNA, 368 bp, Homo sapiens
gtggattggatcaaggaggcagattggacacagtgtcccatggaatcttctgtgctttggcttacattcaaccacaattttgcgtttgaaattccagagcccttttttctacagcagtgaaaatctaaatagtttccactagtttgctgaacgcagtttaaaattttcatcattcaggaaatttatgagctaccatattgtaaaatagcaaagggcttgttatggagctaagagagtcctaaaaacaagaaaatgtgaatattctgattcctacaaactaaaatttgcaagaatgttttataatatttttataggacatttctcaatatcatacatatgagatctcccttgtaaaatcatttttgctt

SEQ ID NO: 23258 - DNA, 197 bp, Homo sapiens
ggagagaaagaagggggagagagagacagggagtctgggagggagaggggaaagtctcacaagattattttatttttaggtggtgatgttttaaattctaatcttaagaagaaatgctgttgttccttaggtcaaattgactatatagattatgtactttgatgtgatatatgaagataggaatttcagtgtcaaac

SEQ ID NO: 23259 - DNA, 571 bp, Homo sapiens
ctgtaatcccagcacttcgagaggctgaggcgagagtattgcttgagcccaggagttcaagaccagcctcagcaacatgtcaagacctcatccctggctaattttgtttttgtatttttggtagagacgggatttcaccatgttagtcaggatggtctcaatctcctgagaactctgaaataattaaatacttgcatacgtcatagtttattttagctttactttgcctgaaaccgtaaaatgtcatctcaaggaaagatatctgatcttcactctggaattttaataaatggttttcaaccaaaatatttgaactaatgttagttggtatcagcttaatattaaatacttagctgatatgatttgattaacctaattttacagtttgtaatttccattaagaacccagtaggaaagtgtagtatattcatattaaagaaagtttggaaaatgtagaaatattagaaaaaagaaaagaaacctcacaatgtactaccatgatccaaatgcaaacactgtgtgaatccatgtcattcacaaggactatatatagctcaagatttttggtatc

SEQ ID NO: 23260 - DNA, 640 bp, Homo sapiens
ctgtaatcccagcacttcgagaggctgaggcgagagtattgcttgagcccaggagttcaagaccagcctcagcaacatgtcaagacctcatccctacaaaattaaaaaattagccaggcatgcctcccgagtagctgggactaaaggtgcctgccaccatgcctggctaattttgtttttgtatttttggtagagacgggatttcaccatgttagtcaggatggtctcaatctcctgagaactctgaaataattaaatacttgcatacgtcatagtttattttagctttactttgcctgaaaccgtaaaatgtcatctcaaggaaagatatctgatcttcactctggaattttaataaatggttttcaaccaaaatatttgaactaatgttagttggtatcagcttaatattaaatacttagctgatatgatttgattaacctaattttacagtttgtaatttccattaagaacccagtaggaaagtgtagtatattcatattaaagaaagtttggaaaatgtagaaatattagaaaaaagaaaagaaacctcacaatgtactaccatgatccaaatgcaaacactgtgtgaatccatgtcattcacaaggactatatatagctcaagatttttggtatc

SEQ ID NO: 23261 - DNA, 248 bp, Homo sapiens
taactatcgggtaccaggcttagtacctgagtgacaagataatttgtaaaacaaacccccatgacatgagtttacctatataacaaatctgcacatatacgcagaacctaaaataaaagttaaagaaaagaaagatgtatttaaattcgtgaaatgtagcaaaagcaatccctagagaaaatgttatagcttttaatgtttagattaccaaagaggaatgatctcaacttggtagccaagattctgtt

SEQ ID NO: 23262 - DNA, 498 bp, Homo sapiens
gaaaaaatcaggagagctggaagtttttgaagctgtcaaattgtggagatttacagatgtagtagggatagcgtctagagtagacacagtatggcagctggtcctgtctctaggagtacactcagtatgaccatgcagggaagtcctttcctatggggcagataagcacccttccaggaatgaacttcatagacattttagagatgaggttaaagaaaaagatggaacagacagcaaatgttgaaattatattgggggaaaatggctaataaaggcattattaatttgatagcaatcttactaatatagatggctagagacctaaaatagacctgttatagacttacagattaatgattaaaaatttgttttttttctgaggcttttgtggtacttctaattcatgtttatgctgtaggactcacgttaatgtctgaaagtcatattctccttttctcttagagataatacagaacacctcttatgaaagagtctcct

SEQ ID NO: 23263 - DNA, 448 bp, Homo sapiens
ccgggggggtcctggccgcctgctctatgggcccctgctggtactggaactgcatcccaaggactgtgtgtgtctctgtccacgtggaagagctccccacaactcactttgccctattggctccctgtgccactacttgacccagtacaccagtgactggggaagttccctgcggatggcactgtccctggcccagggcctggcatttctccatgaggagcgctggcagaatggccaatataaaccaggtattgcccaccgagatctgagcagccagaatgtgctcattcgggaagatggatcgtgtgccattggagacctgggccttgccttggtgctccctggcctcactcagccccctgcctggacccctactcctgtgtaaatatgcagtttatgtgtcatcaatgtacatgccaacataaatatggcgattgtatagctgtct

SEQ ID NO: 23264 - DNA, 423 bp, Homo sapiens
gccttggcagtgcaggagaggaggcgtccctacatcccatccacctggcgctgctttgccacagaccctgatgggctgagggagctcctagaagactgttgggatgcagacccagaagcacggctgacagctgagtgtgtacagcagcgcctggctgccttggcccatcctcaagagagccacccctttccagagagctgtccacgtggctgcccacctctctgcccagaagactgtacttcaattcctgcccctaccatcctcccctgtaggcctcagcggagtgcctgccacttcagcgttcagcaaggcccttgttccaggaatcctcagcctgcctgtaccctttctcctgtgtaaatatgcagtttatgtgtcatcaatgtacatgccaacataaatatggcgattgtatagctgtct

SEQ ID NO: 23265 - DNA, 701 bp, Homo sapiens
attcttgccttgatgtccagccctgctacagcgaaagaactacagagtgcgagggctccctgtgccactacttgacccagtacaccagtgactggggaagttccctgcggatggcactgtccctggcccagggcctggcatttctccatgaggagcgctggcagaatggccaatataaaccaggtattgcccaccgagatctgagcagccagaatgtgctcattcgggaagatggatcgtgtgccattggagacctgggccttgccttggtgctccctggcctcactcagccccctgcctggacccctactcaaccacaaggcccagctgccatcatggaagaccctgatgggctgagggagctcctagaagactgttgggatgcagacccagaagcacggctgacagctgagtgtgtacagcagcgcctggctgccttggcccatcctcaagagagccacccctttccagagagctgtccacgtggctgcccacctctctgcccagaagactgtacttcaattcctgcccctaccatcctcccctgtaggcctcagcggagtgcctgccacttcagcgttcagcaaggcccttgttccaggaatcctcagcctgcctgtaccctttctcctgtgtaaatatgcagtttatgtgtcatcaatgtacatgccaacataaatatggcgattgtatagctgtct

SEQ ID NO: 23266 - DNA, 4715 bp, Homo sapiens
tgctgcgaggatgctgcctgggcggctgtgctgggtgccgctcctgctggcgctgggcgtggggagcggcagcggcggtggcggggacagccggcagcgccgcctcctcgcggctaaagtcaataagcacaagccatggatcgagacttcatatcatggagtcataactgagaacaatgacacagtcattttggacccaccactggtagccctggataaagatgcaccggttccttttgcaggggaaatctgtgcgttcaagatccatggccaggagctgccctttgaggctgtggtgctcaacaagacatcaggagagggccggctccgtgccaagagccccattgactgtgagttgcagaaggagtacacattcatcatccaggcctatgactgtggtgctgggccccacgagacagcctggaaaaagtcacacaaggccgtggtccatatacaggtgaaggatgtcaacgagtttgctcccaccttcaaagagccagcctacaaggctgttgtgacggagggcaagatctatgacagcattctgcaggtggaggccattgacgaggactgctccccacagtacagccagatctgcaactatgaaatcgtcaccacagatgtgccttttgccatcgacagaaatggcaacatcaggaacactgagaagctgagctatgacaaacaacaccagtatgagatcctggtgaccgcctacgactgtggacagaagcccgctgctcaggacaccctggtgcaggtggatgtgaagccagtttgcaagcctggctggcaagactggaccaagaggattgagtaccagcctggctccgggagcatgcccctgttccccagcatccacctggagacgtgcgatggagccgtgtcttccctccagatcgtcacagagctgcagactaattacattgggaagggttgtgaccgggagacctactctgagaaatcccttcagaagttatgtggagcctcctctggcatcattgacctcttgccatcccctagcgctgccaccaactggactgcaggactgctggtggacagcagtgagatgatcttcaagtttgacggcaggcagggtgccaaaatccccgatgggattgtgcccaagaacctgaccgatcagttcaccatcaccatgtggatgaaacacggccccagccctggtgtgagagccgagaaggaaaccatcctctgcaactcagacaaaaccgaaatgaaccggcatcactatgccctgtatgtgcacaactgccgcctcgtctttctcttgcggaaggacttcgaccaggctgacacctttcgccccgcggagttccactggaagctggatcagatttgtgacaaagagtggcactactatgtcatcaatgtggagtttcctgtggtaaccttatacatggatggagcaacatatgaaccatacctggtgaccaacgactggcccattcatccatctcacatagccatgcaactcacagtcggcgcttgttggcaaggaggagaagtcaccaaaccacagtttgctcagttctttcatggaagcctggccagtctcaccatccgccctggcaaaatggaaagccagaaggtgatctcctgcctgcaggcctgcaaggaagggctggacattaattccttggaaagccttggccaaggaataaagtatcacttcaacccctcgcagtccatcctggtgatggaaggtgacgacattgggaacattaaccgtgctctccagaaagtctcctacatcaactccaggcagttcccaacggcgggtgtgcggcgcctcaaagtatcctccaaagtccagtgctttggggaagacgtatgcatcagtatccctgaggtagatgcctatgtgatggtcctccaggccatcgagccccggatcaccctccggggcacagaccacttctggagacctgctgcccagtttgaaagtgccaggggagtgaccctcttccctgatatcaagattgtgagcaccttcgccaaaaccgaagcccccggggacgtgaaaaccacagaccccaaatcagaagtcttagaggaaatgcttcataacttagatttctgtgacattttggtgatcggaggggacttggacccaaggcaggagtgcttggagctcaaccacagtgagctccaccaacgacacctggatgccactaattctactgcaggctactccatctacggtgtgggctccatgagccgctatgagcaggtgctacatcacatccgctaccgcaactggcgtccggcttcccttgaggcccggcgtttccggattaagtgctcagaactcaatgggcgctacactagcaatgagttcaacttggaggtcagcatccttcatgaagaccaagtctcagataaggagcatgtcaatcatctgattgtgcagcctcccttcctccagtctgtccatcatcctgagtcccggagtagcatccagcacagttcagtggtcccaagcattgccacagtggtcatcatcatctccgtgtgcatgcttgtgtttgttgtggccatgggtgtgtaccgggtccggatcgcccaccagcacttcatccaggagactgaggctgccaaggaatctgagatggactgggacgattctgcgctgactatcacagtcaaccccatggagaaacatgaaggaccagggcatggggaagatgagactgagggagaagaggaggaagaagccgaggaagaaatgagctccagcagtggctctgacgacagcgaagaggaggaggaggaggaagggatgggcagaggcagacatgggcagaatggagccaggcaagcccagctggagtgggatgactccaccctcccctactagtgcccaggggtctgctgcccggcccacatgtcccttttgtaaaccctgacccagtgtatgcccatgtctatcatacctcacctctgatgtctgtgacatgtctgggaaggccttctccagcttcctggagcccaccctttaagccttgggcactccctgtgtttcatccatggggaagttccaagaagcccagcatggccatcagtgaggacttcagggtagactttgtcctgtagcctccacttctgccctaagttccccagcatcctgactacctgtctgcagagtttgcctttgttttttcctgcagggaagaaggcccacctttgtgtcactcacctccccaggctcagagtccccaaggccctggggttccaactcactgtgcgtctcctccacacagaccagtaggttctcctatgctgactccaggttgcttcatacaaggagggtggttgaacttcacacacgtaaggtcttagtgcttaacagtttaaaggaaagtccttgttgaggcagaactaagtttacagggaaaggtacacacattctctctctctctctctctctctctgtctatctagttccccagcttggagagcctttccccttgcttctttctgaggccatataagcttataagaaaagtcccaaaccaagaataggtccttggccacaagcagggtctgatcccccatcagagctatctgagcctgcctgtctgggcacctgctgcaaccatgcagctaccctgccaggggcactcagcaaacagaaccacagggcccaggaggcattccacacaggcactgccccaggacaacacaacaaggacagtcacaacaaggacaacaaggacacaacacaacacacaacaaggacagtcacaacaagcctagagccagaaagcagatggaaatgctaatgaggtcaaacgtaggcttcatggtgggtggagtgggggtggctgggctcccccaggacagaggggaccctgaggttggcaaggctctcaccactcagccttatggtcccttatctcctatcttccctcttgagaaaatacacgctttctgcatgtattagaaacgcacgagctccaccaagtctacaatgaaagtttgaaatttaactgcaaggaattagaagcatatttgcaatcattgcagcttcttctttcttctgctcataaaaggaggaacactttagatagagggcaaatatatctgaaaacctaatttctttctttttttgataaggaaatcttttccatctccatcctaacatgcacaacctgtgaagagaattgtttctatagtaactggtctgtgatcttttgtggccaagagaatagcaggcaagaattagggccttgacagaatttccacgaagctctgagaacatgtttgtttcgaatgtctgattcctctttgtcatcaatgtgtatgctctgtccccatccttcactcctcctcaagctcacaccaattggtttggcacaggcacagagctggtccctagttaagtggcatttatgttaaaaaaaaatagttcagaatctcagccttttctttgtgtcatcaaaacagcttaagaaggggactactgccaatgtcctctagtctgacctccacccagggaggacccatggcaggtcttttcaactttctgattcatgagaacaaccttgtgaagcttttcccacctcctaaagtgttttctgcatctgttccttcctttggacctcacaacaaatcctgtgaagtaactgagacatctgttgttagatacatttttgtgatgagtaaactgaggcttcgtgattcaaaaaaaagtt

SEQ ID NO: 23267 - DNA, 3408 bp, Homo sapiens
tgctgcgaggatgctgcctgggcggctgtgctgggtgccgctcctgctggcgctgggcgtggggagcggcagcggcggtggcggggacagccggcagcgccgcctcctcgcggctaaagtcaataagcacaagccatggatcgagacttcatatcatggagtcataactgagaacaatgacacagtcattttggacccaccactggtagccctggataaagatgcaccggttccttttgcaggggaaatctgtgcgttcaagatccatggccaggagctgccctttgaggctgtggtgctcaacaagacatcaggagagggccggctccgtgccaagagccccattgactgtgagttgcagaaggagtacacattcatcatccaggcctatgactgtggtgctgggccccacgagacagcctggaaaaagtcacacaaggccgtggtccatatacaggtgaaggatgtcaacgagtttgctcccaccttcaaagagccagcctacaaggctgttgtgacggagggcaagatctatgacagcattctgcaggtggaggccattgacgaggactgctccccacagtacagccagatctgcaactatgaaatcgtcaccacagatgtgccttttgccatcgacagaaatggcaacatcaggaacactgagaagctgagctatgacaaacaacaccagtatgagatcctggtgaccgcctacgactgtggacagaagcccgctgctcaggacaccctggtgcaggtggatgtgaagccagtttgcaagcctggctggcaagactggaccaagaggattgagtaccagcctggctccgggagcatgcccctgttccccagcatccacctggagacgtgcgatggagccgtgtcttccctccagatcgtcacagagctgcagactaattacattgggaagggttgtgaccgggagacctactctgagaaatcccttcagaagttatgtggagcctcctctggcatcattgacctcttgccatcccctagcgctgccaccaactggactgcaggactgctggtggacagcagtgagatgatcttcaagtttgacggcaggcagggtgccaaaatccccgatgggattgtgcccaagaacctgaccgatcagttcaccatcaccatgtggatgaaacacggccccagccctggtgtgagagccgagaaggaaaccatcctctgcaactcagacaaaaccgaaatgaaccggcatcactatgccctgtatgtgcacaactgccgcctcgtctttctcttgcggaaggacttcgaccaggctgacacctttcgccccgcggagttccactggaagctggatcagatttgtgacaaagagtggcactactatgtcatcaatgtggagtttcctgtggtaaccttatacatggatggagcaacatatgaaccatacctggtgaccaacgactggcccattcatccatctcacatagccatgcaactcacagtcggcgcttgttggcaaggaggagaagtcaccaaaccacagtttgctcagttctttcatggaagcctggccagtctcaccatccgccctggcaaaatggaaagccagaaggtgatctcctgcctgcaggcctgcaaggaagggctggacattaattccttggaaagccttggccaaggaataaagtatcacttcaacccctcgcagtccatcctggtgatggaaggtgacgacattgggaacattaaccgtgctctccagaaagtctcctacatcaactccaggcagttcccaacggcgggtgtgcggcgcctcaaagtatcctccaaagtccagtgctttggggaagacgtatgcatcagtatccctgaggtagatgcctatgtgatggtcctccaggccatcgagccccggatcaccctccggggcacagaccacttctggagacctgctgcccagtttgaaagtgccaggggagtgaccctcttccctgatatcaagattgtgagcaccttcgccaaaaccgaagcccccggggacgtgaaaaccacagaccccaaatcagaagtcttagaggaaatgcttcataacttagatttctgtgacattttggtgatcggaggggacttggacccaaggcaggagtgcttggagctcaaccacagtgagctccaccaacgacacctggatgccactaattctactgcaggctactccatctacggtgtgggctccatgagccgctatgagcaggtgctacatcacatccgctaccgcaactggcgtccggcttcccttgaggcccggcgtttccggattaagtgctcagaactcaatgggcgctacactagcaatgagttcaacttggaggtcagcatccttcatgaagaccaagtctcagataaggagcatgtcaatcatctgattgtgcagcctcccttcctccagtctgtccatcatcctgagtcccggagtagcatccagcacagttcagtggtcccaagcattgccacagtggtcatcatcatctccgtgtgcatgcttgtgtttgttgtggccatgggtgtgtaccgggtccggatcgcccaccagcacttcatccaggagactgaggctgccaaggaatctgagatggactgggacgattctgcgctgactatcacagtcaaccccatggagaaacatgaaggaccagggcatggggaagatgagactgagggagaagaggaggaagaagccgaggaagaaatgagctccagcagtggctctgacgacagcgaagaggaggaggaggaggaagggatgggcagaggcagacatgggcagaatggagccaggcaagcccagctggagtgggatgactccaccctcccctactagtgcccaggggtctgctgcccggcccacatgtcccttttgtaaaccctgacccagtgtatgcccatgtctatcatacctcacctctgatgtctgtgacatgtctgggaaggccttctccagcttcctggagcccaccctttaagccttgggcactccctgtgtttcatccatggggaagttccaagaagcccagcatggccatcagtgaggacttcagggtagactttgtcctgtagcctccacttctgccctaagttccccagcatcctgactacctgtctgcagagtttgcctttgttttttcctgcagggaagaaggcccacctttgtgtcactcacctccccaggctcagagtccccaaggccctggggttccaactcactgtgcgtctcctccacacagaccagtaggttctcctatgctgactccaggttgcttcatacaaggagggtggttgaacttcacacatctgttgttagatacatttttgtgatgagtaaactgaggcttcgtgattcaaaaaaaagtt

SEQ ID NO: 23268 - DNA, 357 bp, Homo sapiens
caacaaagttcagtgactgagagggctgagcggaggctgctgaaggggagaaaggagtgaggagctgctgggcagagagggactgtccggctcccagatgctgggcctcctggggagcacagccctcgtgggatggatcacaggtgctgctgtggcggtcctgctgctgctgctgctgctggccacctgccttttccacggacggcaggactgtgacgtggagaggaaccgtacagctgcagggggaaaccgagtccgccgggcccagccttggcccttccggcggcggggccacctgggaatctttcaccatcaccgtcatcctggccacgtatctcatgtgccgaatgtgggcct

SEQ ID NO: 23269 - DNA, 550 bp, Homo sapiens
caaatccgagactttagggtgagagccgtttgttaaacatcttccagaacaaaactgctattgccttcattcacagatgggtaaactggggcacagaaaaattgagtaatttgcccgtaatcatgcaactagtagttggtggagttgaaattttatcctaggcaacaccacctgggagcccaagctttcagtcatcatgttacactgcttatgatatgactaaaatgcattggctagatttacaaagcctgggtcccaatttgtacttgtctggtactcactgttaaagctgtctgtctcaagacatttcataagagaatgcttcacatttatctctgctatatcataaataaaatatattatgtgaaaatgcaaaataagccttgattcttttcattcctttctttccttttcctttcttcttctttctccttcccttcccttctcttttctttccctccctccctctctcctaccctccctcttttctttccttctttcctcttttctttccttttttctccttccttcgttccttccttcctccctc

SEQ ID NO: 23270 - DNA, 491 bp, Homo sapiens
ctctaaaacaaatcactgactagttttgattatttaaatgagtgaatggttttaatgatcataaaaggagacttgagctttgatgtatgctagttaaatttcagctgatttttttcaagtggagaagtgcatgctttacaggcatgcacatgcacatgcacactcatgattacggttatataatataagtgcttgaaatttattttactgtgttgttccatcatttgatttgtagtctagcatatagaattcaatatattaatcaacttgtaattttaattgctataatgctaccttatttatttaacgtagaataaaactcaactgttgtgacctctgatgcctttggtataatatatttaaaatatcagacttctaaatgctggtttgttggcatactacggctggcaagctaagtccagtctgtggcctgtttttatgtggttctgagctaagaaatctgaaaaatattcccaaagagttattaacaa

SEQ ID NO: 23271 - DNA, 5321 bp, Homo sapiens
gcctctctgggtgggtgaggggcgcgcggatccggagagggggctccgggagcggcgggaccacgcagccacctgtgagccttcggcagctgcgggcggcggcggcgtacccggcccgagacgggaggagacgctcggcggcccccgcccgccggcccgccgggcgcacacactcgcacccgcgcacgcaccgccagcaggcagcggccaccgccgcgatgctcgcccgcgggttggggaagtttcccgccggcctcggccgcgggcacccgtgctcccaggtgtagcgcccccgcgcggcgcgggcggccggcgcctccagcatgaccggccagagcctgtgggacgtgtcggaggctaacgtcgaggacggggagatccgcatcaatgtgggcggcttcaagaggaggctgcgctcgcacacgctgctgcgcttccccgagacgcgcctgggccgcttgctgctctgccactcgcgcgaggccattctggagctctgcgatgactacgacgacgtccagcgggagttctacttcgaccgcaaccctgagctcttcccctacgtgctgcatttctatcacaccggcaagcttcacgtcatggctgagctatgtgtcttctccttcagccaggagatcgagtactggggcatcaacgagttcttcattgactcctgctgcagctacagctaccatggccgcaaagtagagcccgagcaggagaagtgggacgagcagagtgaccaggagagcaccacgtcttccttcgatgagatccttgccttctacaacgacgcctccaagttcgatgggcagcccctcggcaacttccgcaggcagctgtggctggcgctggacaaccccggctactcagtgctgagcagggtcttcagcatcctgtccatcctggtggtgatggggtccatcatcaccatgtgcctcaatagcctgcccgatttccaaatccctgacagccagggcaaccctggcgaggaccctaggttcgaaatcgtggagcactttggcattgcctggttcacatttgagctggtggccaggtttgctgtggcccctgacttcctcaagttcttcaagaatgccctaaaccttattgacctcatgtccatcgtccccttttacatcactctggtggtgaacctggtggtggagagcacacctactttagccaacttgggcagggtggcccaggtcctgaggctgatgcggatcttccgcatcttaaagctggccaggcactccactggcctccgctccctgggggccactttgaaatacagctacaaagaagtagggctgctcttgctctacctctccgtggggatttccatcttctccgtggtggcctacaccattgaaaaggaggagaacgagggcctggccaccatccctgcctgctggtggtgggctaccgtcagtatgaccacagtggggtacggggatgtggtcccagggaccacggcaggaaagctgactgcctctgcctgcatcttggcaggcatcctcgtggtggtcctgcccatcaccttgatcttcaataagttctcccacttttaccggcgccaaaagcaacttgagagtgccatgcgcagctgtgactttggagatggaatgaaggaggtcccttcggtcaatttaagggactattatgcccataaagttaaatcccttatggcaagcctgacgaacatgagcaggagctcaccaagtgaactcagtttaaatgattccctacgttagccgggaggacttgtcaccctccaccccacattgctgagctgcctcttgtgcctctggcacagcccaggcaccttatggttatggtgtaaggagtatgcccagcccctgaggggagagatgcatgggatatgcacccaggtttcttttacagtttttagaatcgtttttagagggtggtgtgtctgacaccatgcctttgcacctttccatgaaatgacactcactggtctttgcatcgtgggcataaaatgttcaccttttttccagatgagtacacccagaatgctaatttttctgtccatcgtgtacgctattctagtgcttgtggcccagtactgtctatgagttgtcgtgctcctgtttctgaggttgtcgtgtgagttctgtacaaaaagcccccacaagtcgtccagtagaaatgcatctatgaggtcagcaaggatatgatgagattttgctcacagtcatgtgaaaacaaaatctcagctctttatccattgctttcacttagttttagtaccaaaacaaagagaatgcaaagttaagcagacttgaccaatgcaagtctctaagttgtttttataaatgatctgtagttccgtggcttgcatgggtgcaccaatcatctttagaacgatgtacactgatgttcatctcataaatgtcactctttagagaatgttacttagttaaacatgcagtgaagatcgaatttttttcccaagaacagatgtgttagggagaggggcttcagctaaatagtccaaaccctagggtgcttaaagccaagttagtgcaggctgagccccttggttcacagtcaagcctccttgtttcctagggtgactgtagagaaatgtatttccggatgaggtttctgatctaggccatttgaccaaactttgctgtgtctaagatattagcatgtttttgaaatatttattttttaagatgtttaggagtaaggtcgtgttgtcttcctcaactaaaaagaagtttactgttgtatcgtctccctgaggtgaacgttgttgggttgctagcaagggcagtagcttaaatacttttgttgcctactctgaaagctcatcaaatgagagccccttttatttccaagcagaatttagtcagataattttgcttctaggatatagtatgttgtatatgatgctgtgattgccctggagttcctgcccatgacatggaaacctggtggtatggaagcatgtactcaaaatatagacgtgcacgatggtggtgtggcttacccaggatggaaacactgcagttcttacttgcattcccactgcctttcatggggggtgactgggtagaggccaggagaaaggaaagagttgtaaaataaaaaactgctagttcataaaatgtcataaaaaattgtaaacttgaaaagcttaatgctattcaaaagaccttcaagcttccaaacttgtattgaagggagacgactgtttcctcctccaaaatgctcctgctcctcttgttcggttaaccagcacataacattgtgatggggaacctgggttcctctataagataattcttctccatcatctttaaggtaatctgatggttttccaggtggctttcattattgttccatctttgaaaaggcaatagaacccaggggtctgagcatggagctatccagggttttcatccaaaggttgggcctcttcttaagaggtccttttgtgtttcagttgattgaagatgatacttacctcattggaggtgtggcaaggatcttatcagaaggctttgtgttcttgtagttgtcatggctactacagtgtgggtgatttattgaatgaattcactagccacttgtgtcctggagcccccagttcaaatctttccattggactggaggcttgtgggaggctgggaggtggctgtctcctagtgtctacatccgtgtctctgaagcatcaggaaaagtgagatgacttagaggcaactgggcactgaatcagaggagcagagttatttttcagaatttgcacatggaacacttagatttggctggtgcttccagccctggaaggcataacatttacggactcatccccagctgcactgaaggcaggtggtggtacagacttatgaggacggatcagtttgccaaggctgatggtattgggtcactgagcctggtatccatggccgctgaccaggaagcttatgcaaagtggaagcaaggaacaaggcagaataactcagtcactttcatgaagatttttctaaacaagaaggcttaccaccaaaaaagaggtaccctagtggttaccctttgcagatgtgaaagctggaaaacttgacttttctttttggtaatgacttgcatttatctggtgcctttcgttggaggaatcccaacgtgctttagagactatctttttaacatctcttgtacatacatatatacttatataaaatattatcttgcccaactggacctttactcacttctgagcatgagaatgtcccaatagcattgagtttttcaagtggtggtttcagataagtgggagaaagaacaacccggctggcttaaaccctggagctaattcccacaaggaatgtagactgaatggtgacccagggagaaataatcttcctctcccctaaagtctcactaaggtttgaagtttacaggtgctctccactgggtctttgatcgaccttgctagataacatctaaccagcagtttcttttagtccctgaagctaaccagggagagtcaggttaattttctgtaaaaatatgaggtgacatctttggcaaccaggctgtcagactgacctgtaaacctcctttagggggacagagtagaaactggagatgacttgtttccagctgtgagcttgagagaagtgtcactcccagcatttgaaggttattgttttcaatgccagtgggccaaatatatgggccaggctttgatatctgtgatgtgcattttggaagtgctgggttgggaagtgacacgtctgttgcacaaatgcatattggttataggtttgtgttttctgccaaacccccacatttctcgggtttgtgagtgaggaagggcatgttgtaatgccaagctgatttgtagctcgtaaggtagtaattggtatttaacatttgcatttgttatttctacttatcttagcactcaaataattgaactacctgctaattcttgccgcatttcaaagaaaataagttgttatgcactttgggatagtggtgatctgtacaggctgtgtgttagctacttgaaggcgtaactggtatttcttgtgtgttttaacagcatgacttcttacagagctgtaatttttaaaattgaggatgccatatttgagatgtcagttttaacactcattaacacactactgtgcaagcattgacacaggctgcactgaaccattatgtctgattgctgcactttcatctctgtgcctcgattcgggaatgggcagtaatactgacacactcgggactccagcctcaaaaagtgtgcagattaaatagacaaaaattatttgcat

SEQ ID NO: 23272 - DNA, 3140 bp, Homo sapiens
gcctctctgggtgggtgaggggcgcgcggatccggagagggggctccgggagcggcgggaccacgcagccacctgtgagccttcggcagctgcgggcggcggcggcgtacccggcccgagacgggaggagacgctcggcggcccccgcccgccggcccgccgggcgcacacactcgcacccgcgcacgcaccgccagcaggcagcggccaccgccgcgatgctcgcccgcgggttggggaagtttcccgccggcctcggccgcgggcacccgtgctcccaggtgtagcgcccccgcgcggcgcgggcggccggcgcctccagcatgaccggccagagcctgtgggacgtgtcggaggctaacgtcgaggacggggagatccgcatcaatgtgggcggcttcaagaggaggctgcgctcgcacacgctgctgcgcttccccgagacgcgcctgggccgcttgctgctctgccactcgcgcgaggccattctggagctctgcgatgactacgacgacgtccagcgggagttctacttcgaccgcaaccctgagctcttcccctacgtgctgcatttctatcacaccggcaagcttcacgtcatggctgagctatgtgtcttctccttcagccaggagatcgagtactggggcatcaacgagttcttcattgactcctgctgcagctacagctaccatggccgcaaagtagagcccgagcaggagaagtgggacgagcagagtgaccaggagagcaccacgtcttccttcgatgagatccttgccttctacaacgacgcctccaagttcgatgggcagcccctcggcaacttccgcaggcagctgtggctggcgctggacaaccccggctactcagtgctgagcagggtcttcagcatcctgtccatcctggtggtgatggggtccatcatcaccatgtgcctcaatagcctgcccgatttccaaatccctgacagccagggcaaccctggcgaggaccctaggttcgaaatcgtggagcactttggcattgcctggttcacatttgagctggtggccaggtttgctgtggcccctgacttcctcaagttcttcaagaatgccctaaaccttattgacctcatgtccatcgtccccttttacatcactctggtggtgaacctggtggtggagagcacacctactttagccaacttgggcagggtggcccaggtcctgaggctgatgcggatcttccgcatcttaaagctggccaggcactccactggcctccgctccctgggggccactttgaaatacagctacaaagaagtagggctgctcttgctctacctctccgtggggatttccatcttctccgtggtggcctacaccattgaaaaggaggagaacgagggcctggccaccatccctgcctgctggtggtgggctaccgtcagtatgaccacagtggggtacggggatgtggtcccagggaccacggcaggaaagctgactgcctctgcctgcatcttggcaggcatcctcgtggtggtcctgcccatcaccttgatcttcaataagttctcccacttttaccggcgccaaaagcaacttgagagtgccatgcgcagctgtgactttggagatggaatgaaggaggtcccttcggtcaatttaagggactattatgcccataaagttaaatcccttatggcaagcctgacgaacatgagcaggagctcaccaagtgaactcagtttaaatgattccctacgttagccgggaggacttgtcaccctccaccccacattgctgagctgcctcttgtgcctctggcacagcccaggcaccttatggttatggtgtaaggagtatgcccagcccctgaggggagagatgcatgggatatgcacccaggtttcttttacagtttttagaatcgtttttagagggtggtgtgtctgacaccatgcctttgcacctttccatgaaatgacactcactggtctttgcatcgtgggcataaaatgttcaccttttttccagatgagtacacccagaatgctaatttttctgtccatcgtgtacgctattctagtgcttgtggcccagtactgtctatgagttgtcgtgctcctgtttctgaggttgtcgtgtgagttctgtacaaaaagcccccacaagtcgtccagtagaaatgcatctatgaggtcagcaaggatatgatgagattttgctcacagtcatgtgaaaacaaaatctcagctctttatccattgctttcacttagttttagtaccaaaacaaagagaatgcaaagttaagcagacttgaccaatgcaagtctctaagttgtttttataaatgatctgtagttccgtggcttgcatgggtgcaccaatcatctttagaacgatgtacactgatgttcatctcataaatgtcactctttagagaatgttacttagttaaacatgcagtgaagatcgaatttttttcccaagaacagatgtgttagggagaggggcttcagctaaatagtccaaaccctagggtgcttaaagccaagttagtgcaggctgagccccttggttcacagtcaagcctccttgtttcctagggtgactgtagagaaatgtatttccggatgaggtttctgatctaggccatttgaccaaactttgctgtgtctaagatattagcatgtttttgaaatatttattttttaagatgtttaggagtaaggtcgtgttgtcttcctcaactaaaaagaagtttactgttgtatcgtctccctgaggtgaacgttgttgggttgctagcaagggcagtagcttaaatacttttgttgcctactctgaaagctcatcaaatgagagccccttttatttccaagcagaatttagtcagataattttgcttctaggatatagtatgttgtatatgatgctgtgattgccctggagttcctgcccatgacatggaaacctggtggtatggaagcatgtactcaaaatatagacgtgcacgatggtggtgtggcttacccaggatggaaacactgcagttcttacttgcattcccactgcctttcatggggggtgactgggtagaggccaggagaaaggaaagagttgtaaaataaaaaactgctagttcata

SEQ ID NO: 23273 - DNA, 1739 bp, Homo sapiens
  misc_feature (581)..(581): n is a, c, g, or t
attttataacccattattttaaaacagtaaacactttttaaacatctaagaattattgttataaaacaatatttaattttttaaaatataaaataattgaattattgtctttctctaagctatttagagaacactactttctttgttttgttttggtttggttttttgagacggagtgtccgtctgtcgcccaggctggagtgccagtggcgcgatctcggctcactgcaagctccacctcttgggttcacaccattctcctgcgtcaacctcgcgagtagctgggactagaggcgcccgccaccacgcctggctaattttttgtatttttagcagagacggggtttcaccgtgttagccactttctttgttaatttaactgttattttaagttcagggatacatgtgcgggtttgttatacaggtaatcttgtgtcatgagagttttttttgcacggattatttcatcacccaggtattaaacctagcaccagttatttttcctgattctctccctcctcctacccagcaccctctgataggccccaatgtgtgttgtttccctctatgtgttcatgtgntctcatcatttagctcccacttataagtgagaacatgtggtatttggttttctcttcctgcattagtttgctaaggataatagcctccagctccatccatgtccctgcaaatgacatgatctcattctttcatatggctggatagtacttcatggtgtatacatacattttctttatccagtctacagttgatgggcatttaggtttattccatgtctttgctactgtgaataatgctgcattgaacatacgtgtgcatgtatctttataataaaacaatttatatttcttgggtatatacccattaatgggattgctggatccagtggtatttctgtttttaggtctttgaggaattgccacactctcacatggctgaactaatttacactcccagtatcagtgtatatgcgttccaattgctccataacttcgccagcatctgctttttttttttgctttttaataatagccattctgactagtgtgagatggtatctcattatggttttgatttgcgtttctctaatgatcagtgatattgaggctttttttcatatcattgttggctgcatgtatgttttcttttgaaaagtgtctgttcatatcctttgcccactttttaatgggatttttttttcttgtaaatttgtttaagtttcttatagatgctggaatattagacttttgtagatgtatagtttgcaaatattttcccccaatctgtaggttgtctgttcactctgttgataggttcctttgctctgacaaagctctagagtttaattagatcccatttgccaatttttgctttcgttgcaaccaccttttgtgtcttcatcatgaaatctttgcctgttagaaaacactactttcagacatttaaatgcatataggcaatgcttaagtacctaaaaaagcaattttaagaaattactgaggtatctctattaagagtgacatattcatattttattttatgtatatattatttctataacatacaagaaattgttgcatttatcattttaatgcaaagtagtatcaagtataatggattagatgcaaaaataactgaggtaggaatctcagttctgtgttttaatgtggaattcttatgcttattaaaatattttgattagctgttgcaaaaaaaaa

SEQ ID NO: 23274 - DNA, 374 bp, Homo sapiens
caggaagccttccatgacttgcccctccctctgccttgccaccaattctttggactcccacagaccctgtatttccttttgtcacagcattgaccctctgtgttacttggaggcacacaagttcgtttgtttttgtctgctgctttttgactgtaagctccttgaggagacccactgtctcttgttacatctatgcccagcatcatgcctgacacacatgaagggctgtggcattgatggaaggggcctatagggactgcaggtctcaaggttatactgtggcaaccagttaatcctcaaatcctgttgtgacttaatacaacaaagatttgtttctccttaacatgatgtcttctgtggagccagcagctctc

SEQ ID NO: 23275 - DNA, 122 bp, Homo sapiens
tggggcaacaggaacactaaagttaaccctttaggtggtcattcaacatgaaggtcttcacacaaactgtaaaaagaggataatggccccagacctgtgcctggctcctaattttttctttt

SEQ ID NO: 23276 - DNA, 183 bp, Homo sapiens
cttatccatcttcatacccaggacagactgacttacccttgcaaaacactttactctggtatctgttaatgatccctcaggccattgctacttgtttattccaagagtatcacggacaatttcctgatttaactcttctaaacttttctcacttacaaaaaacgctgcaagtctggactttgg

SEQ ID NO: 23277 - DNA, 275 bp, Homo sapiens
ttttgaacccttcctttcctacctttagacctgtttcatcacttcctctgtatctgtaatgtagcagtccctccacagggcttgttttccaaagaaaagtaagccctccacagggcttgttttccaaagaaaagtatcatttggaggagcaaagttataagcctacctaagcatgtcgtaaagctgttcaaaaataactcagagctagtcttgtggatggaaatgtagtgcctgagtcacattctgcttaaagttgtaacaaatacagatgagtt

SEQ ID NO: 23278 - DNA, 337 bp, Homo sapiens
gctatgtggcttgctcaaccaacacttgagcaagtttaaatattccagaggctggaagtctgaaatcagagtgtcagcattattgggttctggtgagggccctcctcctgatttcttcatgggggagagtgagagtagggtggaggatggtgtagagaaaaaggaaaagggagagaaagagagagagagaatgcttcagtgcacgttctctcatgcctcttcttataaggacatgaatctcctcatgagggctccaccttcatgacctaagtacttcccaaagcccctatctcttaataccaacccattgggagttagaactacagcatatgaattt

SEQ ID NO: 23279 - DNA, 581 bp, Homo sapiens
cgtctgcctggcttttatcagtgattaatgagagcagtttgctgcttttaaggagaagtggagttttgggaaacagctaaaaattctttggagcaagttctagtgaatgaatgctttaataacgtacttttagtacatttaagtattttttgtttttaaaaacagtgggaataaactaatggctctagtttgtaaacaaagatctctaaaaggaagtggacactctaagtgatatcatcttcttaaggtggctcttgtgtaggctcttttaaaacatcccagtggttgtgtgagtgtgttggttgaaaaaccagtctcctactttgtaggaggctggtctgtcagggcccttctcttgcctggggttcagaatttctgcttttgcattgatggtaaaagttggccttggtcctgctgtttctgccagggtagcatttgtcagagcagagtccaggcagccccaccatgtcccctggagcctgtgggcagcatttctcctggcagcagttctgagattggtggtggtactgttggcagcctgacggttaccagaaaagaggtatagaattttctctctttcc

SEQ ID NO: 23280 - DNA, 433 bp, Homo sapiens
aatttagcagggagtataatgcaggccctgaccaactgaaattcatgctaacatccacctactaagattggaccaatacctaccaagtaaatatcaactgtactcagagggcttcacatcgtcctgtcacctcgggatatttccatctaaacactttcctctgtttggaatgcttttgctccaagcaagagtctcatcttccttaagtctttactaagaaattatcttctcagaaagctttcccctgactactcaacttaaaattgcaggtcttcctgaccccaaatcctggccttccttaggaacactgatcaccaaatgtcatactacacattttacataaatatcttgtttattgtctctcttccccactataatgaatccccacaagaatagactttttttttttactcctatacccatcacttagaac

SEQ ID NO: 23281 - DNA, 464 bp, Homo sapiens
gaccctctttggtggtcaaattagaattcaaccccagttaaatcctgactctcaatccagtattcttcctcctatttcatgaaatccctgcatatatacacacatatacatacatacatacatatgtacataacccacctctctctctagaattgaggctgtagtctccaaacagaatttccaaaaatttgattccagtgtgcccctattagaattccaaaacagcaatcttcccagcacaatcaagggacacaattcctgctatctgggatgatatttttggcagctttgcagtgcagtcccctgtatggcactgctgctgaagaagcgggcaggcagctactctgtattgtcataggcttttgctgtgttggtgaatggcttttttcaggtgctataatttccttcacttgctatatgggccacctgcctctaccttctcattcctccaatccatccaccac

SEQ ID NO: 23282 - DNA, 2501 bp, Homo sapiens
  misc_feature (712)..(712): n is a, c, g, or t
  misc_feature (760)..(760): n is a, c, g, or t
tttatgatgaacgctggaaggaaaagcaggaacagggcttcacttggtggttaaattttatattaacccctgatgacttcactgtaaaaacaaatatttctgaagtaaatgctgctactcttcttttgggaatagagaatcaacataaaataagtgttcctagagcacctacaaaagaggaaatgtctctcagagcttatactgctcggtgtaggttaaacagactacgtcgtgcagcatgccgtttgtttacttctgaaaaaatggttaaagctattaaaaagcttgaaattgaaattgaagctaggcggttaattgttcgaaaagatagacacctatggaaagatgtgggagaacgtcagaaagtcctgaattggctgttgtcctacaatcctttgtggcttcgaattggtctagagacaacttatggagaactcatatctttggaagataacagtgatgtcacagggttggctatgtttattctgaatcgcctactttggaatcctgatatagcagctgagtatagacaccccactgttcctcacctgtatagagatggtcatgaagaagctttgtccaagtttacattgaaaaagttattgttgttggtctgttttcttgattatgctaaaatttccagactcattgatcatgatccttgtctcttctgtaaagatgccgaattcaaggctagtaaagaaatcctttnggctttttcacgagatttcctaagtggtgaaggtgacctttcccgtcnccttggcttattgggattacctgttaaccatgttcagacaccatttgatgaatttgattttgccgttacaaatcttgccgtagacttgcaatgtggagtgcgccttgtgcgaaccatggaacttctcacacagaactgggacctctcaaagaaactcaggattccggcaataagtcgtcttcaaaagatgcacaatgttgacattgttcttcaagttcttaaatcacgaggaattgaattaagtgatgagcatggaaatacaattctatctaaggatattgtggataggcacagagaaaaaactctcaggttgctttggaaaatagcgtttgcttttcaggtggatatttcccttaacttagatcaattaaaggaagaaattgcctttctaaaacacacaaagagtataaagaaaacaatatctctactatcatgccattctgatgatcttattaataagaaaaaaggcaaaagggatagtggttcctttgaacaatatagtgaaaacataaagttattgatggattgggtaaatgctgtttgtgccttctataataaaaaggtggagaattttacagtgtctttctcagacggccgtgtgttatgttacctgatccaccattaccatccttgctatgtgccatttgacgctatatgtcagcgtactactcaaactgtggaatgtacgcaaactggttcagtggtattaaattcatcatctgaatctgatgacagttctctggatatgtcacttaaagcatttgatcatgaaaatacttcagagctatacaaagagctcctagaaaatgaaaagaaaaattttcacttggttaggtctgcagttagagaccttggtggaatacctgctatgattaatcattcagatatgtcaaatacaattccagatgaaaaggtggttattacctatttgtcatttctttgtgcaaggcttttggatcttcgtaaagaaataagagctgctcgactcatacaaacaacatggagaaaatataaactaaaaacagatctcaaacgccatcaggtactcctagaatatgaaactactatagtgtgaattatactttagaaggagagagagaaagctgcaagaattattcaattggctgtaatcaattttctagcaaaacaaagattgagaaaaagagttaatgcagcactcgtcattcagaaatattggcgaagagtcttagcacagagaaaattattaatgttaaaaaaggaaaagctggaaaaagttcaaaataaagcagcatcacttattcagggatattggagaagatattccactagacaaagatttctgaaattgaaatattattcaatcatcctgcaatctaggataagaatgataattgctgttacatcttataaacgatatctttgggctacagttacaattcagaggcattggcgtgcttatttaagaagaaaacaagatcaacaaagatatgaaatgctaaaatcatcaactcttataatccaatctatgttcagaaaatggaagcaacgtaaaatgcaatcacaagtaaaagctacagtaatattgcaaagagcttttagagaatggcatttaagaaaacaagctaaagaagaaaattctgctattatcatacaatcatggtatagaatgcataaagaattacggaaatatatttatattagatcttgtgttgttatcattcagaaaagatttcggtgctttcaagcccaaaagttatat

SEQ ID NO: 23283 - DNA, 2453 bp, Homo sapiens
  misc_feature (712)..(712): n is a, c, g, or t
  misc_feature (760)..(760): n is a, c, g, or t
tttatgatgaacgctggaaggaaaagcaggaacagggcttcacttggtggttaaattttatattaacccctgatgacttcactgtaaaaacaaatatttctgaagtaaatgctgctactcttcttttgggaatagagaatcaacataaaataagtgttcctagagcacctacaaaagaggaaatgtctctcagagcttatactgctcggtgtaggttaaacagactacgtcgtgcagcatgccgtttgtttacttctgaaaaaatggttaaagctattaaaaagcttgaaattgaaattgaagctaggcggttaattgttcgaaaagatagacacctatggaaagatgtgggagaacgtcagaaagtcctgaattggctgttgtcctacaatcctttgtggcttcgaattggtctagagacaacttatggagaactcatatctttggaagataacagtgatgtcacagggttggctatgtttattctgaatcgcctactttggaatcctgatatagcagctgagtatagacaccccactgttcctcacctgtatagagatggtcatgaagaagctttgtccaagtttacattgaaaaagttattgttgttggtctgttttcttgattatgctaaaatttccagactcattgatcatgatccttgtctcttctgtaaagatgccgaattcaaggctagtaaagaaatcctttnggctttttcacgagatttcctaagtggtgaaggtgacctttcccgtcnccttggcttattgggattacctgttaaccatgttcagacaccatttgatgaatttgattttgccgttacaaatcttgccgtagacttgcaatgtggagtgcgccttgtgcgaaccatggaacttctcacacagaactgggacctctcaaagaaactcaggattccggcaataagtcgtcttcaaaagatgcacaatgttgacattgttcttcaagttcttaaatcacgaggaattgaattaagtgatgagcatggaaatacaattctatctaaggatattgtggataggcacagagaaaaaactctcaggttgctttggaaaatagcgtttgcttttcaggtggatatttcccttaacttagatcaattaaaggaagaaattgcctttctaaaacacacaaagagtataaagaaaacaatatctctactatcatgccattctgatgatcttattaataagaaaaaaggcaaaagggatagtggttcctttgaacaatatagtgaaaacataaagttattgatggattgggtaaatgctgtttgtgccttctataataaaaaggtggagaattttacagtgtctttctcagacggccgtgtgttatgttacctgatccaccattaccatccttgctatgtgccatttgacgctatatgtcagcgtactactcaaactgtggaatgtacgcaaactggttcagtggtattaaattcatcatctgaatctgatgacagttctctggatatgtcacttaaagcatttgatcatgaaaatacttcagagctatacaaagagctcctagaaaatgaaaagaaaaattttcacttggttaggtctgcagttagagaccttggtggaatacctgctatgattaatcattcagatatgtcaaatacaattccagatgaaaaggtggttattacctatttgtcatttctttgtgcaaggcttttggatcttcgtaaagaaataagagctgctcgactcatacaaacaacatggagaaaatataaactaaaaacagatctcaaacgccatcaggagagagagaaagctgcaagaattattcaattggctgtaatcaattttctagcaaaacaaagattgagaaaaagagttaatgcagcactcgtcattcagaaatattggcgaagagtcttagcacagagaaaattattaatgttaaaaaaggaaaagctggaaaaagttcaaaataaagcagcatcacttattcagggatattggagaagatattccactagacaaagatttctgaaattgaaatattattcaatcatcctgcaatctaggataagaatgataattgctgttacatcttataaacgatatctttgggctacagttacaattcagaggcattggcgtgcttatttaagaagaaaacaagatcaacaaagatatgaaatgctaaaatcatcaactcttataatccaatctatgttcagaaaatggaagcaacgtaaaatgcaatcacaagtaaaagctacagtaatattgcaaagagcttttagagaatggcatttaagaaaacaagctaaagaagaaaattctgctattatcatacaatcatggtatagaatgcataaagaattacggaaatatatttatattagatcttgtgttgttatcattcagaaaagatttcggtgctttcaagcccaaaagttatat

SEQ ID NO: 23284 - DNA, 225 bp, Homo sapiens
ggcgctttcccgcttctgtgtcgtattaaccacttaacactggtcagggccacccggcggcatctctccaactgcattgcaaatgatgacggctggaaccacagctgcctccccctcccccggcgtctcagcacccagcacgggtgaacgaggtgggaagaccctgttaagccacaagccgtctccctctgatcacaaggcctgctcccgggaacaccaggccac

SEQ ID NO: 23285 - DNA, 301 bp, Homo sapiens
ctgggttcttgtcccagttctgtcatgaaccagctgtgtaactttaggtaaggaacttgacctctctgggccttggcttcctccatgcaaatctggatgctgggtatgacctccaatgacctctagttctaaaaggctacagttctaaatcttaaaattagccattcttgccagtgtcactttgaactttagccattagtctccacagagatagacacattttagcgtagtagcctctagaatgaaatctattaaaaggttcaatatgctaatgcaagcagtggaaagatacaagcctcaa

SEQ ID NO: 23286 - DNA, 404 bp, Homo sapiens
agcctggcaaatcccaactcatccttcacgaattgactcaggtggcagccactgtccctccacatgtcccttgccctctgcacgccagtcctccacacatgataccatcttctggtcagtacaccatcagatggtgggctccagagggtagtgggaaccactgagcgtttctgtctgcagccccagcaccaggtggtgctagtcgaaggatggagaatgcttagcagctgaggtgcacagcatcgtcccgatggcctctcaggctggagctatgggatctggaacccccagcagtaattccccatcagttgagatggggcacaaggcaatgccccctccccggaggccaacctccaggcagcttcttttcctctgaccactgtggctttggcctctttagagga

SEQ ID NO: 23287 - DNA, 2107 bp, Homo sapiens
gctgagacagcaccacccaacttcgttcaacgactgcagagcatgaccgtgagacaaggaagccaagtgagactccaagtgagagtgactggaatccctacacctgtggtgaagttctaccgggatggagccgaaatccagagctcccttgatttccaaatttcacaagaaggcgacctctacagcttactgattgcagaagcataccctgaggactcagggacctattcagtaaatgccaccaatagcgttggaagagctacttcgactgctgaattactggttcaaggtgaagaagaagtacctgctaaaaagacaaagacaattgtttcgactgctcagatctcagaatcaagacaaacccgaattgaaaagaagattgaagcccactttgatgccagatcaattgcaacagttgagatggtcatagatggtgccgctggggaacagctgccacataaaacacctcccaggattcctccgaagccaaagtcaagatccccaacaccaccgtctattgctgccaaagcacagctggctcggcagcagtccccatcgcccataagacactccccttccccggtcagacacgtgcgggcaccgaccccatctccggtcaggtccgtgtctccagcagcaagaatctccacatcccccatcaggtctgttaggtctccattgctcatgcgtaagactcaggcatccaccgtggccacaggtcctgaagtgcctcccccttggaagcaagagggctacgtggcctcctcatctgaggctgagatgagagagacaacgctgacaacctctactcagatcaggacagaagagagatgggaagggagatacggtgtccaggagcaagtgaccatcagtggtgctgcgggtctgccgccagtgtgtcggccagtgcttagctacgcagcagaggctgttgccactggtgctaaagaggtgaaacaagatgctgacaaaagtgcagctgttgcgactgttgttgctgccgttgatatggccagagtgagagaaccagtgatcagcgctgtagagcagactgctcagaggacaaccacgactgctgtgcacatccaacctgctcaagaacaggtaagaaaggaagcggagaagactgctgtaactaaggtagtagtggccgccgataaagccaaggaacaagaattaaaatcaagaaccaaagaagtaattaccacaaagcaagagcagatgcacgtaactcatgagcagataagaaaagaaactgaaaaaacatttgtaccaaaggtagtaatttccgcagctaaagccaaagaacaagaaactagaatttctgaagaaattactaagaaacagaaacaagtaactcaagaagcaatgagaaaggaagccgagaaaactgccttgtctacaatagcagttgctactgctaaagccaaagaacaagaaacaatactgagaactagagaaactatggctactagacaagaacaaatccaagttacccatggaaaggtggacgttggaaaaaaggctgaagctgtagcaacagttgttgctgcagtagaccaggcccgagtcagagagcccagagagcctgggcatcttgaagaatcctatgctcagcagaccactttggagtacggatataaggaacgcatttccgccgcaaaggtagctgagcctccccaacgtccagcctcagaaccccacgttgtccctaaagcagtcaagcctagagtaatccaggctccttctgagactcatatcaaaactactgatcaaaagggaatgcacatatcatcacagatcaagaaaactacagatctaacaacggaaagattagtccatgtggataaacgcccccgcacagctagccctcactttactgtttcaaaaatttctgttcctaagacagaacatggatatgaggcatcaatagccggtagtgctattgccacattacaaaaagagttgtcagccacatcttctgctcagaagatcaccaaatcggtgaaggctcctactgtgaagcccagtgagactagagtaagggcagagcccacacccttgccacagttccccttcgctgacacaccagatacttacaagagtg

SEQ ID NO: 23288 - DNA, 368 bp, Homo sapiens
agcccattcctcaggaaagcagtctatgtattaagcacaagtgtaggcccctgaaatggaaatctgacattttatcgttcaccactaagcatcctgtattttcctgagtgtttcaaggatgtcttcccattgcttttgtatcttttgaaactcaaatctttattttactctaaacatcagataagacaggaaactgagataactgctgcatccatggtggtagttgccactgcaaagtccacaaaactagaaacagtcccgggagctcaagaagaaactaccacacaacaagatcaaatgcacctaagttatgaaaaggtgatgacttcctgccaatgtgaaagtcactcttgcaccatttcatttgc

SEQ ID NO: 23289 - DNA, 2383 bp, Homo sapiens
gctgagacagcaccacccaacttcgttcaacgactgcagagcatgaccgtgagacaaggaagccaagtgagactccaagtgagagtgactggaatccctacacctgtggtgaagttctaccgggatggagccgaaatccagagctcccttgatttccaaatttcacaagaaggcgacctctacagcttactgattgcagaagcataccctgaggactcagggacctattcagtaaatgccaccaatagcgttggaagagctacttcgactgctgaattactggttcaaggtgaagaagaagtacctgctaaaaagacaaagacaattgtttcgactgctcagatctcagaatcaagacaaacccgaattgaaaagaagattgaagcccactttgatgccagatcaattgcaacagttgagatggtcatagatggtgccgctggggaacagctgccacataaaacacctcccaggattcctccgaagccaaagtcaagatccccaacaccaccgtctattgctgccaaagcacagctggctcggcagcagtccccatcgcccataagacactccccttccccggtcagacacgtgcgggcaccgaccccatctccggtcaggtccgtgtctccagcagcaagaatctccacatcccccatcaggtctgttaggtctccattgctcatgcgtaagactcaggcatccaccgtggccacaggtcctgaagtgcctcccccttggaagcaagagggctacgtggcctcctcatctgaggctgagatgagagagacaacgctgacaacctctactcagatcaggacagaagagagatgggaagggagatacggtgtccaggagcaagtgaccatcagtggtgctgcgggtctgccgccagtgtgtcggccagtgcttagctacgcagcagaggctgttgccactggtgctaaagaggtgaaacaagatgctgacaaaagtgcagctgttgcgactgttgttgctgccgttgatatggccagagtgagagaaccagtgatcagcgctgtagagcagactgctcagaggacaaccacgactgctgtgcacatccaacctgctcaagaacaggtaagaaaggaagcggagaagactgctgtaactaaggtagtagtggccgccgataaagccaaggaacaagaattaaaatcaagaaccaaagaagtaattaccacaaagcaagagcagatgcacgtaactcatgagcagataagaaaagaaactgaaaaaacatttgtaccaaaggtagtaatttccgcagctaaagccaaagaacaagaaactagaatttctgaagaaattactaagaaacagaaacaagtaactcaagaagcaataagacaggaaactgagataactgctgcatccatggtggtagttgccactgcaaagtccacaaaactagaaacagtcccgggagctcaagaagaaactaccacacaacaagatcaaatgcacctaagttatgaaaagataatgaaggaaactaggaaaacagttgtacctaaagtcatagttgccacacccaaagtcaaagaacaagatttagtatcaagaggtagagaaggcattactaccaaaagagaacaagtgcaaataactcaggagaagatgagaaaggaagccgagaaaactgccttgtctacaatagcagttgctactgctaaagccaaagaacaagaaacaatactgagaactagagaaactatggctactagacaagaacaaatccaagttacccatggaaaggtggacgttggaaaaaaggctgaagctgtagcaacagttgttgctgcagtagaccaggcccgagtcagagagcccagagagcctgggcatcttgaagaatcctatgctcagcagaccactttggagtacggatataaggaacgcatttccgccgcaaaggtagctgagcctccccaacgtccagcctcagaaccccacgttgtccctaaagcagtcaagcctagagtaatccaggctccttctgagactcatatcaaaactactgatcaaaagggaatgcacatatcatcacagatcaagaaaactacagatctaacaacggaaagattagtccatgtggataaacgcccccgcacagctagccctcactttactgtttcaaaaatttctgttcctaagacagaacatggatatgaggcatcaatagccggtagtgctattgccacattacaaaaagagttgtcagccacatcttctgctcagaagatcaccaaatcggtgaaggctcctactgtgaagcccagtgagactagagtaagggcagagcccacacccttgccacagttccccttcgctgacacaccagatacttacaagagtg

SEQ ID NO: 23290 - DNA, 1969 bp, Homo sapiens
gctgagacagcaccacccaacttcgttcaacgactgcagagcatgaccgtgagacaaggaagccaagtgagactccaagtgagagtgactggaatccctacacctgtggtgaagttctaccgggatggagccgaaatccagagctcccttgatttccaaatttcacaagaaggcgacctctacagcttactgattgcagaagcataccctgaggactcagggacctattcagtaaatgccaccaatagcgttggaagagctacttcgactgctgaattactggttcaaggtgaagaagaagtacctgctaaaaagacaaagacaattgtttcgactgctcagatctcagaatcaagacaaacccgaattgaaaagaagattgaagcccactttgatgccagatcaattgcaacagttgagatggtcatagatggtgccgctggggaacagctgccacataaaacacctcccaggattcctccgaagccaaagtcaagatccccaacaccaccgtctattgctgccaaagcacagctggctcggcagcagtccccatcgcccataagacactccccttccccggtcagacacgtgcgggcaccgaccccatctccggtcaggtccgtgtctccagcagcaagaatctccacatcccccatcaggtctgttaggtctccattgctcatgcgtaagactcaggcatccaccgtggccacaggtcctgaagtgcctcccccttggaagcaagagggctacgtggcctcctcatctgaggctgagatgagagagacaacgctgacaacctctactcagatcaggacagaagagagatgggaagggagatacggtgtccaggagcaagtgaccatcagtggtgctgcgggtctgccgccagtgtgtcggccagtgcttagctacgcagcagaggctgttgccactggtgctaaagaggtgaaacaagatgctgacaaaagtgcagctgttgcgactgttgttgctgccgttgatatggccagagtgagagaaccagtgatcagcgctgtagagcagactgctcagaggacaaccacgactgctgtgcacatccaacctgctcaagaacaggtaagaaaggaagcggagaagactgctgtaactaaggtagtagtggccgccgataaagccaaggaacaagaattaaaatcaagaaccaaagaagtaattaccacaaagcaagagcagatgcacgtaactcatgagcagataagaaaagaaactgaaaaaacatttgtaccaaaggtagtaatttccgcagctaaagccaaagaacaagaaactagaatttctgaagaaattactaagaaacagaaacaagtaactcaagaagcagtggacgttggaaaaaaggctgaagctgtagcaacagttgttgctgcagtagaccaggcccgagtcagagagcccagagagcctgggcatcttgaagaatcctatgctcagcagaccactttggagtacggatataaggaacgcatttccgccgcaaaggtagctgagcctccccaacgtccagcctcagaaccccacgttgtccctaaagcagtcaagcctagagtaatccaggctccttctgagactcatatcaaaactactgatcaaaagggaatgcacatatcatcacagatcaagaaaactacagatctaacaacggaaagattagtccatgtggataaacgcccccgcacagctagccctcactttactgtttcaaaaatttctgttcctaagacagaacatggatatgaggcatcaatagccggtagtgctattgccacattacaaaaagagttgtcagccacatcttctgctcagaagatcaccaaatcggtgaaggctcctactgtgaagcccagtgagactagagtaagggcagagcccacacccttgccacagttccccttcgctgacacaccagatacttacaagagtg

SEQ ID NO: 23291 - DNA, 457 bp, Homo sapiens
atgacaccagtatctaaagttaggccttcccacagaccatccaagcatacatgctgggtgcacgcctgtcggggagggtagactccacagcgtggtcctttgggtaagagcgcccctttctacctgggctaccctctgccttttctggggcagacccttatttccatatccttgaaaatgtccaccagtagaataatttatgcttaattgggtgtcttacaagacatcttgattattttttaacatgtggcaatgcagcacttttcctttggaaggggaaaacaattttttctctgttattgtccaatatttcagaccattttaaaaaaccaagtttgcagtaagaacaacccccacccttccaccacccaccttaaggcatgtcctaaaaaaagacttaaattcatagtaatctggtggaggagatgactcacagcttcccttggagcttgatggc

SEQ ID NO: 23292 - DNA, 311 bp, Homo sapiens
gatcatagtcttcatcagattgaaacacaactggtgaataagttagagcaatatactaacattgatacaagttctgaggatccagggaatactgaatcgggcatcctggagcttaaacttaaagccctaattcttgacattatccataatattgatgtggtaaagcagttaaaccaaattcaggttcatacaactgaagactgggcttggaaaaaacaacttagattctatatgaaaagtgatcatacatgttgtgttcaaatggtggattctgaatttcagtatacttatgaatatcaggtatgagttgt

SEQ ID NO: 23293 - DNA, 491 bp, Homo sapiens
aacaaaatctacaaagttacaacccaaattatacaagacatcaaaacactcagtaaacaaatatatatatttcacctacttaaatcttattcatattaattataggccttttgtttagtacactggttattttttaaggaaccaatttaaactttcaattttaaatacatctatgctgacgatagacttttgggtatatacaaccttcttcttctcttttaaaagttaaatacattccactattaactgaacttccatgaagcaacattaattttagagcatggtagtccataatcagtggttcattgtgatgtgctttatccaacatgtatcttagtgcatggttgaggatgtactatgtgatattttagttaacagtgtggcatttgtgggactatattaaaagcatatccaaactaccaagctataccaagctgaggtaggtaacacctgcatgtgaaaaactgtgatatgaatcttatttataaaaa

SEQ ID NO: 23294 - DNA, 387 bp, Homo sapiens
tacaacaaagaaaatgaacaaatttgagctacatagataataatactcacaaatgtgagaggaattatcaagatggaaaaatacattcagtataatctcatttacataaagttcaagaaaaatatttttaatatattgtaatttgttacattggtgataaaactctacagtgaaacatatgagtgatcatcataacaattgggataatcaggagggaggagataaacgggaaatatcagcaagaagacatatattgggagtgtctggattactggcaaattctattttctgaccaaggtgtggtaacatcgatgttaatgttataattttttctcttactgtttattaggttttattatgctccatatgtaagttatgctccccaat

SEQ ID NO: 23295 - DNA, 2256 bp, Homo sapiens
tctccccgcccgccggcccctccagcctcctccaaggcggcggaccaggccgggccggagttttcggggttcagcccgcgagcgggaggaccggggaggcgagggaggaggaaggcgagaagggccagatcgcgggagagcccaatcacggggcgagctggacctggctgtgatcatttataatccttgactcctccgctccgccacttgtcaagatgacaggggtcatccgtgaataacacttcacgctgatgaatggctcttgccggctttcggctctgatgaggggtctgcccgccgccgattgaaaacactaatgaacttactgcgccatttgaaattcacacgcaccaacaaaatggggggtgggcatttcaggtcagctgagtcacccgaggaggtggcagtgcaagacactgccgggaagacggattccgaggcagaagggtgtaattaaggatttccacccccggtaggcggcccgtcctttgcagagcctctgaaaatgacccgcgccttcctttccacagtgttctttcgtccgagaccgaaaagcgcaaatgacctttggacagggaagggaggcagtaaacactcagacttccttaccagcccctggtgggcactgcagcagaacaattgtctgccccccaggttcaagcacctaggcctccgccccgcatcacctggccaggggcggacccgggagtcctccgaaggctccactccccacttttactactcttctttcctctccattctcccctcagattagcggccggacactgtccctgcctcgattttgtttgctgtgggagggaaaaaaaaagtttgctgctcctcccaagacactggccactttctactcactgaagttcccaccgcagcgctggctcccggctccctagctcccgccccctgtctgcaggaaagccctcccccggagcttccgaaactgctggaggttccagagttttgtagctccgaatgggcgacctgagccgaaccgctctctggctgggtggtcggcgggatccttcaggctcctttcgggtccgggacggggcggcggcagaggtggggcgtgcgtgcttggggctgccgagtgagtgcggctccctggtgcgcgcccgagcatctccccgccctctcctgggaccagcagtctgcccgtggagggctaggagcccgcgaccaggcctgccccggccgtcgccaacctgtccttggaagcgtggcggagactggtgcgctctcagcctcgtcgcgccagccgcctcgcgccaccctccactttcagcttcagagcagaggattccgccgacctccacctgtacctgtactcggccgttaggaaatccacttgcatttttaactaccgtgcagaaccagaaacagatcgagcactgggagaacaaggacgacgcctcctaggaaagcctgaacctttatgttagtttatccaaagtttgggctagaagtgaggagaatccctaaactcgaggtggtgtgcccagacccacagcccgtgttcccgaagttgctaagtgcccgagcgcagcgcgttaagtagagaagtcttggtagtaagcgaacccgacccggctctcggggcgctagtgacggaaagcagcacgcatatctttgcgggaagaatctagagtcgccctgggatagatccatctccttctgccactgaatttcacacttgaaaaagataaggtcatgggggcggatgaatgatatccctcactcatttagccattcttattattatataaaaaaaaggcttgtcaattatgaaggtgtgtcccagatattacatgaagatcatgcaaactacttgaaatttgaatccggacatgatcgtaaggaaactctttcataaagcacttttgtggcctagttcccacacacacacaaaagtattaggtctttaaaacttttccaagtagtaagtgagactccctcttactgtctacgaatacacaataaagagatgagacactgccccaatcctaaagaggccagaactgaagtgctacattgtgggagttaggggatgcttcttttttccagctcttttttctagaatcctcattacagctaacgctggtaataaaggtaggaaaacaatagaactcataaaacttagaaatggtaataaatcttggctcctgtctctagcccagttccttcttacatgagattcaaagtttttcagtatgcaatgctgaacgttcacactatggttgc

SEQ ID NO: 23296 - DNA, 1958 bp, Homo sapiens
tctccccgcccgccggcccctccagcctcctccaaggcggcggaccaggccgggccggagttttcggggttcagcccgcgagcgggaggaccggggaggcgagggaggaggaaggcgagaagggccagatcgcgggagagcccaatcacggggcgagctggacctggctgtgatcatttataatccttgactcctccgctccgccacttgtcaagatgacaggggtcatccgtgaataacacttcacgctgatgaatggctcttgccggctttcggctctgatgaggggtctgcccgccgccgattgaaaacactaatgaacttactgcgccatttgaaattcacacgcaccaacaaaatggggggtgggcatttcaggtcagctgagtcacccgaggaggtggcagtgcaagacactgccgggaagacggattccgaggcagaagggtgtaattaaggatttccacccccgattagcggccggacactgtccctgcctcgattttgtttgctgtgggagggaaaaaaaaagtttgctgctcctcccaagacactggccactttctactcactgaagttcccaccgcagcgctggctcccggctccctagctcccgccccctgtctgcaggaaagccctcccccggagcttccgaaactgctggaggttccagagttttgtagctccgaatgggcgacctgagccgaaccgctctctggctgggtggtcggcgggatccttcaggctcctttcgggtccgggacggggcggcggcagaggtggggcgtgcgtgcttggggctgccgagtgagtgcggctccctggtgcgcgcccgagcatctccccgccctctcctgggaccagcagtctgcccgtggagggctaggagcccgcgaccaggcctgccccggccgtcgccaacctgtccttggaagcgtggcggagactggtgcgctctcagcctcgtcgcgccagccgcctcgcgccaccctccactttcagcttcagagcagaggattccgccgacctccacctgtacctgtactcggccgttaggaaatccacttgcatttttaactaccgtgcagaaccagaaacagatcgagcactgggagaacaaggacgacgcctcctaggaaagcctgaacctttatgttagtttatccaaagtttgggctagaagtgaggagaatccctaaactcgaggtggtgtgcccagacccacagcccgtgttcccgaagttgctaagtgcccgagcgcagcgcgttaagtagagaagtcttggtagtaagcgaacccgacccggctctcggggcgctagtgacggaaagcagcacgcatatctttgcgggaagaatctagagtcgccctgggatagatccatctccttctgccactgaatttcacacttgaaaaagataaggtcatgggggcggatgaatgatatccctcactcatttagccattcttattattatataaaaaaaaggcttgtcaattatgaaggtgtgtcccagatattacatgaagatcatgcaaactacttgaaatttgaatccggacatgatcgtaaggaaactctttcataaagcacttttgtggcctagttcccacacacacacaaaagtattaggtctttaaaacttttccaagtagtaagtgagactccctcttactgtctacgaatacacaataaagagatgagacactgccccaatcctaaagaggccagaactgaagtgctacattgtgggagttaggggatgcttcttttttccagctcttttttctagaatcctcattacagctaacgctggtaataaaggtaggaaaacaatagaactcataaaacttagaaatggtaataaatcttggctcctgtctctagcccagttccttcttacatgagattcaaagtttttcagtatgcaatgctgaacgttcacactatggttgc

SEQ ID NO: 23297 - DNA, 409 bp, Homo sapiens
tgaggcaggagaatggcgtgaacccgggaggcagagcttgcagtgagccgagatcaggccgctgctctccagcctgggcaacagaatgagactccatctcgaaaataataataataataatattaataataataatttataggcatgaggcctggagctttttgttactaaaaaagttctaaaagggacccagaggtaaccagtgacttgtgaagtttccatattgcatgcctgtcagatgtgacaggttcagaacactgtaagacttattgccttttatggccaggtgtggtagctcatatctgtaaccctagcactttggcaggccgaggtgggaggatcacttgaagccaagagttcgagaccagcctgggcaacttagttagacctcatctcttcccccttcaaa

SEQ ID NO: 23298 - DNA, 677 bp, Homo sapiens
agtggagtcttgaaatctaattctaaatgccagtcagtgatgatcgcatcacagttgagtgaaatggccttcctgttcagctgttagagactgaagattgttagggcaccttagaatgtctcatcttttctaggttgtcaacaggtactatttgtcacataactaactttcgaggcactggaacatacctgaactaagaattaaatcttttactttatactcacttaaaatcaagaatcccatctaaaacacataggtaccttatctgaaactcttgcacttccccaaccagggcagaaatgaggtgggagaagtttgactaaaatgagggatgggggaaagtaaaagatgttttttttttttttgagactcgctttgtcacccaggctggagtgcaatgggcacaatctcaacttcaccgcaacctccgcctcccgggttcaagcgattctcctgcctcagccttcccgagtagttgggattacagggcgcctgcctccatgcctggctaattttgtatttttagtagaggcagggtttcttcatgttggtcaggctggtctcaaactcctaacctcgtgatcctcctgcctcgacctcccaaagtgctgggattacaggcatgagccaccatgcccagccaaagatcatttttttatatagacttcagccctttg

SEQ ID NO: 23299 - DNA, 1732 bp, Homo sapiens
aagtgatttgattttgtttttttcccaaagagaaaacctacctgccctgtttctgatcccacccctctgctggcttgaagcaggtaaccctttcccagccctgcagctgcccacctggcctccatgccatcctgcccccacctggctggcagccctggctctccatgtgtgccctccggctctgtgtgaagcctcaagtcagtcccagcattgtttccatagggaagtgtggggtgcccagcaggtaaagcacagggagagagggcagtgggaatgccacctttaggctgcagcaggagccccacactgcccagttttcctccccactgttctacaccaaccaggggagactaacactgtgactctgggattggcaggtgcaacttggagccacttaatttcctggggacgtaagttcttcccaagcttagagcaagctgccctgccaaaggagaccaaaccatgccaaccacgctggcaactgctgctgtccagtccctgtgttttctgaccaccgtcactgtgcaactcatcgcctctgccacttaggaccaggaaagaggctggttttgctcccactcttagttgctgataaagtggggagaaggaaaatggacactctacagagtttggggaagggagagtagggagcccatcttgtccagaaagattcatctgtggtctgtctgttaaacacagctgatttcagtgggctttcccctggccctgggggagcagacactgactgggttgtgggcagaggagccatcctggcggagccctgctgcaggggagctccttcaggagccccatccggacctcttgcactgggctgcctttgcctccatttgccttcctgtatctgcaacaaaccttttaaaagtgttcactcttgctttttccagtatttcggtaatcagccatcttgctgtagtacaggatgacattgtcgaatgctctttgtatgtgtgcacacccccttactcccttactgcttcatacactccacaagtggtacagtattttgtgtcattgtaaaaatcaaaattggctttggatctttgtaatacacctgtacctgaaaaagtaaacaacattcttcaattactagccttcagcttgaaaagacatgctggagaagaaggaagggggaacccataggtgtggcgtggagccaagatgtactattcaactatgtgtttctgtttataaaaaacacataccatggaaccatggtgcttttgttcttagtttttgccgttagatcccttcaaactggaagttccttacaatatctttctcaggaaatattttgggaaatggggtaagagatggcaagtgtgagacgggctgtgtcagaggttgctacgtcatggatacagtgcagttccaagtgccataagtgtatgtacatatagttaataatgacactgttcatcaccattctaaaatactgttcttccaaccctatcttcaatgaccagtccagaaggggttaagctggattcatttgctctggcatgtgcattcccagcagggtgaagaaaggtttaaattaaagaatttattttctctctcccccttcctctttctcccagtctttgcataggagaatgttagacattcagaaattactgtttctgttttaaattgagtattgatttttttatattgactttgtattgagttctttttgaaagaataacaaaataaaatgcaggatctttgtaaa

SEQ ID NO: 23300 - DNA, 3508 bp, Homo sapiens
aagtgatttgattttgtttttttcccaaagagaaaacctacctgccctgtttctgatcccacccctctgctggcttgaagcaggtaaccctttcccagccctgcagctgcccacctggcctccatgccatcctgcccccacctggctggcagccctggctctccatgtgtgccctccggctctgtgtgaagcctcaagtcagtcccagcattgtttccatagggaagtgtggggtgcccagcaggtaaagcacagggagagagggcagtgggaatgccacctttaggctgcagcaggagccccacactgcccagttttcctccccactgttctacaccaaccaggggagactaacactgtgactctgggattggcaggtgcaacttggagccacttaatttcctggggacgtaagttcttcccaagcttagagcaagctgccctgccaaaggagaccaaaccatgccaaccacgctggcaactgctgctgtccagtccctgtgttttctgaccaccgtcactgtgcaactcatcgcctctgccacttaggaccaggaaagaggctggttttgctcccactcttagttgctgataaagtggggagaaggaaaatggacactctacagagtttggggaagggagagtagggagcccatcttgtccagaaagattcatctgtggtctgtctgttaaacacagctgatttcagtgggctttcccctggccctgggggagcagacactgactgggttgtgggcagaggagccatcctggcggagccctgctgcaggggagctccttcaggagccccatccggacctcttgcactgggctgcctttgcctccatttgccttcctgtatctgcaacaaaccttttaaaagtgttcactcttgctttttccagtatttcggtaatcagccatcttgctgtagtacaggatgacattgtcgaatgctctttgtatgtgtgcacacccccttactcccttactgcttcatacactccacaagtggtacagtattttgtgtcattgtaaaaatcaaaattggctttggatctttgtaatacacctgtacctgaaaaagtaaacaacattcttcaattactagccttcagcttgaaaagacatgctggagaagaaggaagggggaacccataggtgtggcgtggagccaagatgtactattcaactatgtgtttctgtttataaaaaacacataccatggaaccatggtgcttttgttcttagtttttgccgttagatcccttcaaactggaagttccttacaatatctttctcaggaaatattttgggaaatggggtaagagatggcaagtgtgagacgggctgtgtcagaggttgctacgtcatggatacagtgcagttccaagtgccataagtgtatgtacatatagttaataatgacactgttcatcaccattctaaaatactgttcttccaaccctatcttcaatgaccagtccagaaggggttaagctggattcatttgctctggcatgtgcattcccagcagggtgaagaaaggtttaaattaaagaatttattttctctctcccccttcctctttctcccagtctttgcataggagaatgttagacattcagaaattactgtttctgttttaaattgagtattgatttttttatattgactttgtattgagttctttttgaaagaataacaaaataaaatgcaggatctttgtaaagcctttgcactttcaacctctttatagcttgagttacttttgcagtgggaacaatgtaaatgacatttaaaagatttaaggtttcagaaagctgcatcccacaattgaacacaatgcatttttatttcaattcttggaactggtaggctattctttttaaaagggggtaaacttcgccctaaggctggtagaatgtatgttcacattatagtagacaggatttcatttgccttatatgtttatagattttttataattttcatcctacgttattaaaattagagcattgagtgttaaagaacttaatgaggagtctatatctgagattgctctcttccctggtgatgttttaactggtagataatttgttcttaaatatgtacttttgaagataggacagtttttatagtccatgaactgaatgttaaaaagttctgtatgcattctcagagaggattttaaagctatatagttcatccatcctttgcattatcaaaatgttaagtcaaatctgtaatactttggctaaaattcataaagtaagccctagagaaaatacttgaccaccaaatttttgcccaactatcatcacctcccttcccccgcctctgttcttgccttttgacatctacatggaagacaagttctttacagcaaatggtaagaggcaggtgacctggtgtgtttgctgtgttgtagttcattgcctggggcttgggactccttttttaatggagagactagctgtgcaggtgtgtgttggatagggataaagtgctcacccctgccctctctacagtagttggtggtagatttctctctcattttgcctcataatcactttcgagtgcatgtatttacctaagggctgtagctctgtgggatgctaccagcatattggactgacagaaattgattaccttgccactccaacctacgtactgagtgagtgctccagccactcagtgaaaccaacaaaagtgagtccttggtttaccttccaatctgggtcctgctgtgtaagtatccctaagtggggatgcatatttgtttgtgcgtttttatttccatatatgtgagcatttctctgagtgtattaccagacggatagcacatttatatgtcagacatcttaacatctgtgttatctgtagcaggtgtgtagctcagcagatacgtgtcattgtgtatatagctgagtgtgtgagggtgtctgtgtttctgcagtcccctgtgtttgagagatgacttaataaccctgtgttttgagaggtcgctctaaaccagtgacttttccctcccctgctttattcctttccctcactgacactggcttctcccgctagagtaaatggctttagcacagcactgtcttctggggagcctgctgtcctgcaggcaagtccattaaactctttcttgctttaggactctgaaaacagcaagaaacaaacaaacaaaggtcaagctctaagaaaattactgctcaaacttcactaccctggaagccttactagatatttcttaaggtaacttaaaaattgggctttatttttaaaaagtgataggttacttacagtagcacagaaatgttagcatatttatttaaatagtcctgcagcagagaccctgcgattgtaaagtgatttaagtatttctgggtagtgtttgtgatttacggatttgttactgaaaaacaaaaaaatcactactgtgaatttactactatgtaaccttgtggtcgtatttcattataaataaaataagaattgctct

SEQ ID NO: 23301 - DNA, 3449 bp, Homo sapiens
aagtgatttgattttgtttttttcccaaagagaaaacctacctgccctgtttctgatcccacccctctgctggcttgaagcaggtaaccctttcccagccctgcagctgcccacctggcctccatgccatcctgcccccacctggctggcagccctggctctccatgtgtgccctccggctctgtgtgaagcctcaagtcagtcccagcattgtttccatagggaagtgtggggtgcccagcaggtaaagcacagggagagagggcagtgggaatgccacctttaggctgcagcaggagccccacactgcccagttttcctccccactgttctacaccaaccaggggagactaacactgtgactctgggattggcaggtgcaacttggagccacttaatttcctggggacgtaagttcttcccaagcttagagcaagctgccctgccaaaggagaccaaaccatgccaaccacgctggcaactgctgctgtccagtccctgtgttttctgaccaccgtcactgtgcaactcatcgcctctgccacttaggaccaggaaagaggctggttttgctcccactcttagttgctgataaagtggggagaaggaaaatggacactctacagagtttggggaagggagagtagggagcccatcttgtccagaaagattcatctgtggtctgtctgttaaacacagctgatttcagtgggctttcccctggccctgggggagcagacactgactgggttgtgggcagaggagccatcctggcggagccctgctgcaggggagctccttcaggagccccatccggacctcttgcactgggctgcctttgcctccatttgccttcctgtatctgcaacaaaccttttaaaagtgttcactcttgctttttccagtatttcggtaatcagccatcttgctgtagtacaggatgacattgtcgaatgctctttgtatgtgtgcacacccccttactcccttactgcttcatacactccacaagtggtacagtattttgtgtcattgtaaaaatcaaaattggctttggatctttgtaatacacctgtacctgaaaaagtaaacaacattcttcaattactagccttcagcttgaaaagacatgctggagaagaaggaagggggaacccataggtgtggcgtggagccaagatgtactattcaactatgtgtttctgtttataaaaaacacataccatggaaccatggtgcttttgttcttagtttttgccgttagatcccttcaaactggaagttccttacaatatctttctcaggaaatattttgggaaatggggtaagagatggcaagtgtgagacgggctgtgtcagaggttgctacgtcatggatacagtgcagttccaagtgccataagtgtatgtacatatagttaataatgacactgttcatcaccattctaaaatactgttcttccaaccctatcttcaatgaccagtccagaaggggttaagctggattcatttgctctggcatgtgcattcccagcagggtgaagaaaggtttaaattaaagaatttattttctctctcccccttcctctttctcccagtctttgcataggagaatgttagacattcagaaattactgtttctgttttaaattgagtattgatttttttatattgactttgtattgagttctttttgaaagaataacaaaataaaatgcaggatctttgtaaagcctttgcactttcaacctctttatagcttgagttacttttgcagtgggaacaatgtaaatgacatttaaaagatttaaggtttcagaaagctgcatcccacaattgaacacaatgcatttttatttcaattcttggaactggtaggctattctttttaaaagggggtaaacttcgccctaaggctggtagaatgtatgttcacattatagtagacaggatttcatttgccttatatgtttatagattttttataattttcatcctacgttattaaaattagagcattgagtgttaaagaacttaatgaggagtctatatctgagattgctctcttccctggtgatgttttaactggtagataatttgttcttaaatatgtacttttgaagataggacagtttttatagtccatgaactgaatgttaaaaagttctgtatgcattctcagagaggattttaaagctatatagttcatccatcctttgcattatcaaaatgttaagtcaaatctgtaatactttggctaaaattcataaagtaagccctagagaaaatacttgaccaccaaatttttgcccaactatcatcacctcccttcccccgcctctgttcttgccttttgacatctacatggaagacaagttctttacagcaaatggtaagaggcaggtgacctggtgtgtttgctgtgttgtagttcattgcctggggcttgggactccttttttaatggagagactagctgtgcaggtgtgtgttggatagggataaagtgctcacccctgccctctctacagtagttggtggtagatttctctctcattttgcctcataatcactttcgagtgcatgtatttacctaagggctgtagctctgtgggatgctaccagcatattggactgacagaaattgattaccttgccactccaacctacgtactgagtgagtgctccagccactcagtgaaaccaacaaaagtgagtccttggtttaccttccaatctgggtcctgctgtgtaagtatccctaagtggggatgcatatttgtttgtgcgtttttatttccatatatgtgagcatttctctgagtgtattaccagacggatagcacatttatatgtcagacatcttaacatctgtgttatctgtagcaggtgtgtagctcagcagatacgtgtcattgtgtatatagctgagtgtgtgagggtgtctgtgtttctgcagtcccctgtgtttgagagatgacttaataaccctgtgttttgagaggtcgctctaaaccagtgacttttccctcccctgctttattcctttccctcactgacactggcttctcccgctagagtaaatggctttagcacagcactgtcttctggggagcctgctgtcctgcaggcaagtccattaaactctttcttgctttaggactctgaaaacagcaagaaacaaacaaacaaaggtcaagctctaagaaaattactgctcaaacttcactaccctggaagcgttacttacagtagcacagaaatgttagcatatttatttaaatagtcctgcagcagagaccctgcgattgtaaagtgatttaagtatttctgggtagtgtttgtgatttacggatttgttactgaaaaacaaaaaaatcactactgtgaatttactactatgtaaccttgtggtcgtatttcattataaataaaataagaattgctct

SEQ ID NO: 23302 - DNA, 4307 bp, Homo sapiens
  misc_feature (4307)..(4307): n is a, c, g, or t
aagtgatttgattttgtttttttcccaaagagaaaacctacctgccctgtttctgatcccacccctctgctggcttgaagcaggtaaccctttcccagccctgcagctgcccacctggcctccatgccatcctgcccccacctggctggcagccctggctctccatgtgtgccctccggctctgtgtgaagcctcaagtcagtcccagcattgtttccatagggaagtgtggggtgcccagcaggtaaagcacagggagagagggcagtgggaatgccacctttaggctgcagcaggagccccacactgcccagttttcctccccactgttctacaccaaccaggggagactaacactgtgactctgggattggcaggtgcaacttggagccacttaatttcctggggacgtaagttcttcccaagcttagagcaagctgccctgccaaaggagaccaaaccatgccaaccacgctggcaactgctgctgtccagtccctgtgttttctgaccaccgtcactgtgcaactcatcgcctctgccacttaggaccaggaaagaggctggttttgctcccactcttagttgctgataaagtggggagaaggaaaatggacactctacagagtttggggaagggagagtagggagcccatcttgtccagaaagattcatctgtggtctgtctgttaaacacagctgatttcagtgggctttcccctggccctgggggagcagacactgactgggttgtgggcagaggagccatcctggcggagccctgctgcaggggagctccttcaggagccccatccggacctcttgcactgggctgcctttgcctccatttgccttcctgtatctgcaacaaaccttttaaaagtgttcactcttgctttttccagtatttcggtaatcagccatcttgctgtagtacaggatgacattgtcgaatgctctttgtatgtgtgcacacccccttactcccttactgcttcatacactccacaagtggtacagtattttgtgtcattgtaaaaatcaaaattggctttggatctttgtaatacacctgtacctgaaaaagtaaacaacattcttcaattactagccttcagcttgaaaagacatgctggagaagaaggaagggggaacccataggtgtggcgtggagccaagatgtactattcaactatgtgtttctgtttataaaaaacacataccatggaaccatggtgcttttgttcttagtttttgccgttagatcccttcaaactggaagttccttacaatatctttctcaggaaatattttgggaaatggggtaagagatggcaagtgtgagacgggctgtgtcagaggttgctacgtcatggatacagtgcagttccaagtgccataagtgtatgtacatatagttaataatgacactgttcatcaccattctaaaatactgttcttccaaccctatcttcaatgaccagtccagaaggggttaagctggattcatttgctctggcatgtgcattcccagcagggtgaagaaaggtttaaattaaagaatttattttctctctcccccttcctctttctcccagtctttgcataggagaatgttagacattcagaaattactgtttctgttttaaattgagtattgatttttttatattgactttgtattgagttctttttgaaagaataacaaaataaaatgcaggatctttgtaaagcctttgcactttcaacctctttatagcttgagttacttttgcagtgggaacaatgtaaatgacatttaaaagatttaaggtttcagaaagctgcatcccacaattgaacacaatgcatttttatttcaattcttggaactggtaggctattctttttaaaagggggtaaacttcgccctaaggctggtagaatgtatgttcacattatagtagacaggatttcatttgccttatatgtttatagattttttataattttcatcctacgttattaaaattagagcattgagtgttaaagaacttaatgaggagtctatatctgagattgctctcttccctggtgatgttttaactggtagataatttgttcttaaatatgtacttttgaagataggacagtttttatagtccatgaactgaatgttaaaaagttctgtatgcattctcagagaggattttaaagctatatagttcatccatcctttgcattatcaaaatgttaagtcaaatctgtaatactttggctaaaattcataaagtaagccctagagaaaatacttgaccaccaaatttttgcccaactatcatcacctcccttcccccgcctctgttcttgccttttgacatctacatggaagacaagttctttacagcaaatggtaagaggcaggtgacctggtgtgtttgctgtgttgtagttcattgcctggggcttgggactccttttttaatggagagactagctgtgcaggtgtgtgttggatagggataaagtgctcacccctgccctctctacagtagttggtggtagatttctctctcattttgcctcataatcactttcgagtgcatgtatttacctaagggctgtagctctgtgggatgctaccagcatattggactgacagaaattgattaccttgccactccaacctacgtactgagtgagtgctccagccactcagtgaaaccaacaaaagtgagtccttggtttaccttccaatctgggtcctgctgtgtaagtatccctaagtggggatgcatatttgtttgtgcgtttttatttccatatatgtgagcatttctctgagtgtattaccagacggatagcacatttatatgtcagacatcttaacatctgtgttatctgtagcaggtgtgtagctcagcagatacgtgtcattgtgtatatagctgagtgtgtgagggtgtctgtgtttctgcagtcccctgtgtttgagagatgacttaataaccctgtgttttgagaggtcgctctaaaccagtgacttttccctcccctgctttattcctttccctcactgacactggcttctcccgctagagtaaatggctttagcacagcactgtcttctggggagcctgctgtcctgcaggcaagtccattaaactctttcttgctttaggactctgaaaacagcaagaaacaaacaaacaaaggtcaagctctaagaaaattactgctcaaacttcactaccctggaagccttactagatatttcttaaggtaacttaaaaattgggctttatttttaaaaagtgataggttacttacagtagcacagaaatgttagcatatttatttaaatagtcctgcagcagagaccctgcgattgtaaagtgatttaagtatttctgggtagtgtttgtgatttacggatttgttactgaaaaacaaaaaaatcactactgtgaatttactactatgtaaccttgtggtcgtatttcattataaataaaataagaattgctctctgaaaaaaaaaacaacaaaaaaaaaaaaaaacaaaaaaaaaaaaaaacaaaacacaaacaaaaaacaacaaaaacaaaaaaaaaaaaaaaaaaagaaaaaaagaaaaaaaccaaaaagaaaacaacaaacgtaacgaggagaagaggcgccacacaaaagacgagtcccaccatgaaacgcacacatgcacagcacacgcacacacatcagaaccggcccgcacaccaaaaacagatagacacaaacacagggaaaggaaaaacataaaacaggagaaacaaaaaataagaaaaacaatacacaagaaaaaaaagaaacagaaacacaaacgacgaaaaaaagaaaaggagcacaaacaaacagaatcaaacccgccagcaaacaagaacactaagacacgacaatatacccacagaaatcacatcaagcaagagacagcagcgacactccgacaacgcactacgacaatcaaaacagaaaaacacagcgagacgcgaaagcgcacagcaacacagagctatacagatagagaacgaagacaacacagcgataccgaagacaggacaggaacatcagagtagaggagtgacggcacggccagcaagccggcgaccgccagcacgaggacgacaggccgcagccgggaacgggagccagccagcagcacgccagccacgcagccacggctagcgaccgatcaacgccagggcagaggcgctcctgagccgagaggcgcgggggcaggagcagacgcggaaaaatcacgctcgcgcgcacgcgcggacggcaagaagtgn

SEQ ID NO: 23303 - DNA, 222 bp, Homo sapiens
agagagaaatggacactacatcactcataccccttattttactgtatttatgtttggaagactgttatgggaacatagaagacagactaaccaagcccggaaaactggagaagagttcaaagagaaggcaaatttagcctgatatgcaccaagaactcactgattcttacaggagaaggattttaccaacagataaaggaaatgacaaagccattctagaat

SEQ ID NO: 23304 - DNA, 242 bp, Homo sapiens
actcttccacttttgtttgaggacttctgggtagacagggttggcttatttagcttccttttctcttaggtcagttccccaggaaacaggttttgggatggaggtttgcatgaaggaagtttcaggggtgctctgatttataagtgagtgaaataagctggatcgggaagagagagaataattaactctgatgcaattcacaattgcagctgagttcttagccagccccatggggagctctg

SEQ ID NO: 23305 - DNA, 266 bp, Homo sapiens
ggaaggagggaggaaggaaggaaggaaagaagagagagagaaggaaggaaggagagagagagagagaaaggaatgggaacgtgggcatctttagatccaaagatatgtagaatttaatcaaatgatagcttgggtacaggttgcaggcccctcccagtgaacagagaataaaagcaaagtgagattagaatccaagtgaccatgggcttctttaagtaatgataaaaggtggctctggacaatcatgatcacaggtaagggtgaca

SEQ ID NO: 23306 - DNA, 657 bp, Homo sapiens
gcaatcataatgagcaccaaacccctgcacttaaaaagttctcctgcctcaggctcctgagtagctgggactacaggcgcttgccaccacacctggctgtttttaaacttgtttgtagggacaaggcctcactatgtcacccaggctggtttagagatcctggtctcaagtgctcctcccactttggccttccagaatattgggattactggtgtgagccaccatgcctggcccttttgcaggttttttttaaaaaaattttatttatttattttttgagacagagtctcactctgtcacccaggctggagtacagtggcacaatttcagctcactgcaactccacctcccaggctcaagcaattctcatgcctcagcctcccgagtagctgggattacaggtgcctaccaccatgcctggctaatttagtagagacgggatttcactatgttggccaagctggtctcgaactcctagcctcaagtgatccacccgcctcagcctcccagagtgttgggattacaggcgtgagccatcacgctaggtctgcttttgcagatttctaaaaggtcaagagttcctaaagattcaactcctaggttggccatggaaatgacccatgtgagcttatcatcattcttttctcttgagcctca

SEQ ID NO: 23307 - DNA, 486 bp, Homo sapiens
aggaatgtggaaagacctttagacttagtttttaccttactgaacacagaagaactcatgcaggtaagaaaccttatgaatgtaaggagtgtgggaaatcatttaatgtgcgtggacagcttaatcggcataaaacaatccatactggtataaaaccttttgcatgtaaggtgtgtgagaaggcttttagttatagtggtgacctcagagtacattctagaattcatactggagagaaaccatatgaatgtaaggaatgcgggaaagcctttatgcttcgttcagtccttactgaacatcagagacttcatactggtgtgaagccctacgaatgtaaggaatgtgggaagacctttcgagttcgttctcaaattagtctacataagaaaattcatactgatgtgaagccctacaaatgtgtacgatgtgggaagacctttagatttggtttctaccttactgaacaccagagaattcacactggtg

SEQ ID NO: 23308 - DNA, 425 bp, Homo sapiens
gggcttccagactccagaactgtgagacaataaattcctgttatttaaggctcaccagtctgcggggctttgccatggcatcctaagaaagtgagcgtgaaacttaattcatcagtacggaaaacatcttggcagtttaaccactattgtaatactcatgtattgatacgtgtttcagaatttttctgctctcttcctcagtatgtatgtacagcaaaagcttcagagagaaactccaggccatgcaaactcatgaactaaactctgggagaggtgctggtgatgacctggaagggaaagatgagtgtttggcacaggacgggaccgaccgaaagtggttgtgtgggagggtttgatggggtggctgctggttgttgttgggagaggaggggcaggtgggttctctcctctggcaaggccacggg

SEQ ID NO: 23309 - DNA, 395 bp, Homo sapiens
ctcccatttgacccttttgcaaaccgagatggtttggagcaaagggaagtgagactgcttggccagccctatggcatgtcttcccaggaggcccaggacctacttgctcaagtggcaaagagacaggctgcagaatgtgtttgccagccctctgaaaagggctgcctcaaaccctctatcagctggggctgttccaagagcctgctgctttaggactggctttgggctcatggtttttatttgagagcattacttctgacctaaggcagaaacacttagaaaacaaatctgtgaaatggctcagagaatgtgtaaggtttggcaacccctccagaggtcactgggttatcaccttcccttcaaactgggctgggagggcatccttgcttctcctc

SEQ ID NO: 23310 - DNA, 395 bp, Homo sapiens
tgtagttccatctacttgagaggctgaggtgggaggatcgcttgagcctgggaggtcaagctgcagggagctatgatcataccactgcaccctcagtgacagagtgagaccctgtctctcaaataaaaataaaaaacttgaagtggatgaaaagatctaatatgaaaggtgaaaatataaagctaatgatgtgtaagtatgagaatagatttgggactttaagctggggaaggacttcttaaatatgattcacaaagcactaaccataggggagaatggatagatttgtctacatcaaaatagaggatttctgttccacgaagctccccacagataaagtaacagacagatgggactgactgaagagagttgccacacaaaaccgaaacaggagt

SEQ ID NO: 23311 - DNA, 384 bp, Homo sapiens
gccataatggataggtgtaagaatcataagtcattttgataacgatctgctatccagtatgcattgctgaatttttagtcatagaaagataatgctaggtattatttcagctttctaatatggacataattcatattatttctaaagtaattgttgatgtgaaatgaaactgctttaatatcaaaggagagttgtatacaattatataacttgatattttaggaatattatcaggctattagtaatattaataaaagtcagaattagaaagcttaagcaactagcttaaagttaatgaaagaaagttaatgactgaacaatatataatataaacaatttatatccgattctttaaattcttgaaaaatgacgttaaaaaattct

SEQ ID NO: 23312 - DNA, 316 bp, Homo sapiens
attcgcacctgcagtgtatgatcaattgctttttagagtaaagaggaaaaaataatcttttatatttaaaaatatatacttagctttgatggtgctctttattccttcttgtagatctgagtttctatctatacaatttcgcttcagcctgaacatcttattatctgaatctgctagcaataaattctggttttatccaaaaatatctttttcttttcttttcttttctttctttcttttcttttcttttcttttctttctttctttctttctttctttctttctttctttctttctttctttctttcttccttct

SEQ ID NO: 23313 - DNA, 402 bp, Homo sapiens
gacatccttagatgcccttcctgatgggcagctggtgagtcttcttccagctattttagtgaggtgggtagcagtgcatggggttgctgaggcacgcaccctcggaacatattggtgtctctccctaatggggcagcctactctgtacatgtcagaaaaggtgcctgtgaagctggcaatgtgagcttatatgatcctggccatgttggccacaggtaggattagccattggcaaaaagccaggttggccaagtttatttctggtgccttctcacttccacacccttttgtcattgcctcctgtgcagtcttcagggtcctggaatttctatttatcttctacacatctatggggattttctaacacatccaggacacatcccggcctctgtgtccatgcca

SEQ ID NO: 23314 - DNA, 947 bp, Homo sapiens
taaattttttattgtttgtgcatacatatattttcttggttcaaattcaaaaagcacaaaagatttaaaaaaaacatatatatctgcctttatacctcaactacctggttccctccctcacagtattattgatgtcttagtacttttctcatgaatgcagaacccttccctaacctgatttttatatttcttataagatcctaaataatcgtgttatagtttatgaatttctgaggttagtgggtccctaaatataatgcttcagtttaattgggaaccatttgtaaattgagtacttgatttatttttatcagctgagatttctttagctgccacactgctgggggaatacagataatggacaactctttaagaaataatgtataaataaattataatgcgacgctttgtttcatagtagaagcataaggtcgagaaggaatatttaatgctcttctctgggaggaccgacttgctggtaggaatggaagctgaattttgaaaaatgaatggtagcttactaggcagatggggttagaggtggcattccagacaaaggaggaagaggaatggaagaagttgtggtatgttgaatgaacaataaggaattgaatattgctgaaattactgggaagtagagtggtaggagctggggctagacaggcagtgtgatcagattatgaaagcttttagcgtagtgctgttgagatggacttaattcactaggactacgtgaaacaactttaaacttttaaattaataaggaattagagtttaaaaggccactctgttggtactataggaaataaatgagaacaggacgggattaggaaactgggagagtagtgagtaatccattagaataacctgtgaaagaaatgggttagcaaggctggaatggaggagggaaggcattcaagataccgtgagaaatgatgaattattag

SEQ ID NO: 23315 - DNA, 394 bp, Homo sapiens
ccaggccaggaaaagattagtgcattaaagattatcaaaataaggtgatgagtattgctacttaagaaaaatccaaacctctaaggctccttttgcagtacaatgtaatatagaaatattatgctgagaaaatgtgaaatttcatctattttatcattcacctggaagtgcttgagaaacaaatgacattaaactttaacttttattatagccatcagagattacaaaaggtaggagggtgggagagcggggtgaaggttgaaagattacctattggttacaatgttcagtctttggttgatgggtactctaaaagcccagacagactttatctctacataatgcatacatgtaagaaatctgcacttgtaatccttatgcctataaaaataaa

SEQ ID NO: 23316 - DNA, 315 bp, Homo sapiens
cgattccaaaacatattctttgtaagttttaatatatttatgtattatttatacttacattgtaacccataatgtacagatattatttttccttcaactcttaagaatattcttaaataataaaaaattaatgatttataatttttgttggttgggaatcattttatctcatcatttcatctcatcattttatctcatcatttcatctcatctcatctcatcccatcatttcatatcatctcatttcatcaaatctcatctcatctcatttccatttcattttcattatttcatttcatcatttcatttcactat

SEQ ID NO: 23317 - DNA, 533 bp, Homo sapiens
gcctttcaccttctgccatgattgtgaggcctccccagccacgtggaactgaagtcacggggtgactccaagcagggccccctttgcattcagcctgcccttctctcagcccagtcatgctggcaccagatgagctgctgcagactcatgaggaaagagtcaagacaggctctttgaaacctccctctccaggcatgccacgtgaacagaagttccaggagacagaagagaggggtgacaagaaattgccctgatcaaactgccacagtgacacaccatgaaaaacacacagagattggctctgtggcaatggcttcatacccaggtcacaggtgcaaatttggtgcagcaaagcagcattaaatattttgcattaaattgatgttaatttgcttttgctggttttatggcttatttttatatctggaatgatgtttttgtttcccattatatataaactataagcaaaggaagtttattcctacctttggtttgtaaaaatttaagtagtgttcaaatacaatctttaagtc

SEQ ID NO: 23318 - DNA, 301 bp, Homo sapiens
aaaaaaaaaaagggataatgtgatagtgacttgggatgcccaggcaagggatgctaggcaaattctgtttaacctgagggctatgctccacctttctctaccttgtcctctgccccagaagaccatcatgaatattctacatcaaggaccagtaaatgatggcctgctgcctgtttttgtaaataaagttttattggaacacagccacactcatttatttatgtatggtctacgctacgatggcagaattgagtagttatgacagagactgcatgacttgaaaagctgaaaatacttacta

SEQ ID NO: 23319 - DNA, 544 bp, Homo sapiens
actaaaaccaaaaaaacctgtccagtgtgcaagcaaaaagttgttccttctcaaggcgattcagactctgacacagacagtagtcaagaagaaaatgaagtgacagaacatacccctttactgagacctttagcttctgtcagtgcccagtcatttggggctttatcggaatcccgctcacatcagaacatgacagaatcttcagactatgaggaagacgacaatgaagatactgacagtagtgatgcagaaaatgaaattaatgaacatgatgtcgtggtccagttgcagcctaatggtgaacgggattacaacatagcaaatactgtttgactttcagaagatgattggtttatttccctttaaaatgattaggtatatactgtaatttgattttttgctcccttcaaagatttctgtagaaataccttattttttagtattctacagtttaatcaaattactgaaatgggatttttgatctggtatttatctgcaagagtatacttcattcactaataatagactggtgctgtaactcaaa

SEQ ID NO: 23320 - DNA, 370 bp, Homo sapiens
tctttttatttgtgaaaaaggttgaacacttacattcttctgtgaattatctgctaatagttgttgctcttttttgtcttgtatattaagaatgtgtatttgcaaatatttttgtcatttatcttttttatgtgattttctctgtatagaagcttttattatgttagtgcaaaggtaattgtggattttgccattacttttaacaaaaactgcaattacttttgcgccaacctaataaaagacatcagattggccgggtgcagtggctcacgcctgtaatcccaacaatttgggaggccaaggcaggcggattgcttgagcccaggaatttgagaccagcttgggcaacatggcaaagccccatctttac

SEQ ID NO: 23321 - DNA, 422 bp, Homo sapiens
gcgccattgcacgccagcctgggcaacagggtgagactctgtctcaaaaaacaaaacaaaacaaaacaaaatactttagataactgatttttaatgttatttggcctttttaatgcataaggcaaaataataagttacacctcaaagctgctttgtattttggcccaggacgcagccgtaggaaatgacaggacggccagtgatgctccaggagcacccccatgggaaaaggagcatcgccagggcctggtttggctgcaggcacttcaggcactcctcctgcatggaacaagcacagtatggacaaaacctattgcctgaagtgccatggagagagtctacaagttcagccaggtggtccaaaatcctcagggcagggtggcctgtgtcaactggcctggccaattaaaactaaattgttt

SEQ ID NO: 23322 - DNA, 409 bp, Homo sapiens
aaaaatcacctaaaaagcagacagttcatggacaccagtttggctacatcaagccatgagtctgtggctcctggaatcaatgaaagaacatcctgtggggttcatttccatctgaaaccaatagtgatagttgttagtgctgtctgccaaatatttctggttctccctatttccaggcacaggacaggattgccttttctggcccccttatggttgtgtggaaccacatgactagttacagccagtgacttgtgagccaaagggaaataaactccttcttatttacttgataattcaagacttttaagagctctctccttcctccagcacagtgaccagaagtaagcttttgtttgtttgtttgtttgtttgagacagggtcttgctctgttacccaagctggagtgca

SEQ ID NO: 23323 - DNA, 366 bp, Homo sapiens
cttgctttctttcttacctctgaaggagaaaagaaagttgctacttacatgtttgaaaaacctctcaaatctactcagtcaaaagattttatgcttcaatttggtcatatgttaagagtttagcttctaaactgatacctcagtagcccatagtttaaaggagtaaagagtacatggatgcttttggtactactcagaagctctgagtttctggccactgaaaccctgaaaagtagctaaatacgttcacttgctattttaatccatcactgtagatatgactcagtccctttgttattttcccccaatttgaaacaaatttaatgtgctgaaaagataactttctcctttttctttctttttctc

SEQ ID NO: 23324 - DNA, 319 bp, Homo sapiens
agtttccgctgttagcatcttccattagtgtactacatttgtgacagttgacaagccaatattgatacattattttggactaaagtccatagtttagggtttattctttgtgttgtacagtactcagggtttagacaaatgcataatttccccaaattggaagcaaccaagatgtccttctacagatgagtcaaactgtggtacattcataaagtggaattttattcagcaataagaagaaaagagctgttaagccaggaaaagacatggaagaaccttaaatgcctatagctaaaggaaggaagccagtctgaagagg

SEQ ID NO: 23325 - DNA, 275 bp, Homo sapiens
gcaagggaaagaaaggagctaaggaagaccaattctcttcccaaccggaggagggcagctcctggtgccattaacaaagagaagaaagggagttggttttagagacgctaagtgtgacagtccagcagtgttcaagtgcgactgcccagtgggcagttagaaatgtgggtctagaggccgggtgtggtggctcacacctgtaatcccagcattttgagaggccgaggcggatggatcaccaggtcaggagatcgagaccatcctggctaacatgg

SEQ ID NO: 23326 - DNA, 825 bp, Homo sapiens
ccctaggcgtatgtgtatacacgcacagatatttattcctttcgcttttagtggttgttatttctgtagcagccaagtcctgcggctccctggggctgagatctccctttgtggaactccgagagccgccctgacagtcccagccgccacccaaggagccccatccgcccacccaccctgggacccacgcggccactccagggatcattgttgtccttttgtgaggggctgaggcgactgtcccatggaggcatccaaggctttctgtgccaagaatcccaagtgactggggctggggaccacttctccaggcctctctccccgaccatgagagcccctggccctggcccctgcacaccagtgggcccagaataaccgccacccttgccatcctgcaacagctggactcaagtttccaggaagtggagatgtgtttctagaagtttcctgtggaacctggaggctcctgacgcctttgactccaggctgggcgattccgatgctgacccgtcctcctgggctccccacccccgctccccaagtgtcacacaggcactttgtacacatcctggttttctaagaagggaacttgccatcaagattcctgtaccaggcccacggccgtctcgggcagagccacctgggccccgggtgcagccggagaccccgccgagcccctcctcccagtattcccatccccgcatgcttctagggagcgcctcttttccgttcttgaggaatttctgttctggggcttgtccttcctttgcagctgttttgaatgtagttttccttttctatttatttgcacattaaagttaataa

SEQ ID NO: 23327 - DNA, 665 bp, Homo sapiens
ccctaggcgtatgtgtatacacgcacagatatttattcctttcgcttttagtggttgttatttctgtagcagccaagtcctgcggctccctggggctgagatctccctttgtggaactccgagagccgccctgacagtcccagccgccacccaaggagccccatccgcccacccaccctgggacccacgcggccactccagggatcattgttgtccttttgtgaggggctgaggcgactgtcccatggaggcatccaaggctttctgtgccaagaatcccaagtgactggggctggggaccacttctccaggcctctctccccgaccatgagagcccctggccctggcccctgcacaccagtgggcccagaataaccgccacccttgccatcctgcaacagctggactcaagtttccaggaagtggagatgtgtttctagaagtttcctgtggaacctggaggctcctgacgcctttgactccagggcctataatcccagcactttgagaggccaaggcatgaggactgcttgagcccaagagttcaagaacagcctgaacaacatggcaggaccttgtctctactaaaaatcaaaaacactagcttgtcatggtcattaggagtcagtgctgcatgatcacaccacgacactcagcctggactt

SEQ ID NO: 23328 - DNA, 1847 bp, Homo sapiens
gagaaaagacaggcttgagaatattggaggtagcttttaggacctggtgatagttttattttggttttgttttaaagaaagctttgttgagactctttttagtctcctacatggcttggatttgtatctgtaaagcctcttcctttttgattttctgtggcctgcatatgtgtaaaatctgactcctaaactggaagttgggttgtgaattaaacacacaagagagcaggtcacaggagcaggcaccaggtggtgaggcagaatatatttctggacaggtagccagcatgttgccgttagtttgaggagaggctgggggcaggcagtgcgaagtgattatctaccaccatgcagctgttaagcagggacgtagagtatgcagtgttaggagagaaggcagcagagataagctttgggccagcagatcagagagcttccattacagacaggcagggcagagtctgcacagctctttgaaaaggatgctgtattgtcaaactcagtggtcacacagacccaagtataactggatggctttgccccttgggagaacagcatttgacttagaaatgtctcactcatatctgtatctaactcagagatgtgtctaccaagaggacaaagggtatataataactgatgaaaaatttaggcatttggagaaaaagacagagagcctaagcttgtgccttataggaagggctctcttcctgtttattctcagatggtttgcattctataactggatttggacagggtttctattggatcaggacacatgtcttcccagaactaatgtactactatttagggatgtggggaggaagccagcagacaatgtagtggaacctgtgttcagatgccactcactagtcctattatccttggcaagtcacttaaatctactgagtcttactgggcgtagtggtgtgtgcctgtaattccagctactcaggaggctgaggtgggaggattgcttgagcctggaaagttgaggctgcagtgagctgtgatcataccagtgcacctgagcctaggtgacagagcaagaccctgtctcctaaaaaaaaaaaatttcctgagtcttggttcctttatctttaaaatgggaatgataataatagccaacatgtacaacactgtgtgccgtacactcacttactcttcacagctaccctattattatcatcctcattttcctggaaaggaaactgaggaatagaatgatagagtaacctgcccaagattccacaactccttggcagtgagcaaggttctaaacataggcagacagggtttctatgctgtcaacttttcccctctcctgcctctctaaacgtggcacagagaggcattcagtaaatggtagttctgggagaggaatggggaggcagcatcaagacatctcatcttttaagtgcactgagtaaggaaagaatcaagttgacttagaattggctctatttatagaactaactagaggtgtggaaataggtagtttctcttccatttctaacttaagtccatagatacacaattccagaatgacttttaaaaggttttagtgctttttggcttcttaaacttaaatctgaaaccaaataatcaaatcagtgctttgaaaagtaaatatacacagtgtatatgtgctagtgtgtgtgcacgtactattcaatatcttgtagcattactctacttaagagctattgttttcatacctattttcatcaggctggtacttcacagataagctgcaataagggtgtttttaggaaattctatgattacttttcagcatatgaaatcatgtttggctttgttgaaatgtctgagtacattgacctagg

SEQ ID NO: 23329 - DNA, 347 bp, Homo sapiens
tgaagataaagctttctcttccgtctcttcactggtacagaattccttaaataaattaatgtcaggctggacgcagtggctcatgcctgtaatcccagcactttgggaggccgaggcaggtgaatcgcctcagctcaagagttcgagaccaccctgggcaacatggtgaaaccccatctctactaaaatacaataaagtagccaggtgtggtagcactcacctgtagtcccagctactcaggaggctgaggcatgagagtcgcttgagcccaggaggaagaggttgcaatgagctgagatcacgccactgcactccagcttgggctacagagtgagactctgtctca

SEQ ID NO: 23330 - DNA, 451 bp, Homo sapiens
ttttgaaatggtttatgacctcttccccacttccccgcttgctttgctcattagtgttcctaggtggctgctgggtgacgggcttttcatcatctctgatgtgggccagtgcgaaagagcagctgcaacatctgtttctaattgggtcgtgcctttataaatacttcttgcctatttgtcacattgcttccctcccaccctgtcttccttggagtactgcagaatctgtaagcgtccctggaatgcacacgtggaccttgtcattcccaaacagactttctgctggtcagcactttgtaatgttcggctgttacaggcattagtcacttgtgctcagagagagactgtggtctttggaaactgaagaaaatgtcttttttgttgttgttaattcttggcatccagttagatttaacttctcaagagtttacacagacttttagaaaaacat

SEQ ID NO: 23331 - DNA, 1630 bp, Homo sapiens
taaagaaggatgagttgtcagattttgataactgcggatgaggggcgtggacacacggttgggaactcgcagccgctcattggtggctggtgcgggggaagttgtttcatttgccccaggtgttgcccagtgacctcctgcgcgtgcgccgcgtctgtccagctgcgcgggaagctcaggggagggaaggccaggttccatccattcagtcactccagacctggcacccagccaagcgcgcggttcctttacagactttcctgcgggtccacagaaatgcaaggatccgcctctgtgctggaattagagtctgggagggggaatgcacagtgcgccctgggtggtattttagttgtcgccttcagggctagctccgagcctcgtgccccggcctcctcagcgcttaaggaatctctggagcgcatgtcttggcgaggggaagtggggccccgttgaagctgtcgaggcgtctctgagaggggtgggctggggcctggagaggcctccgtgaggacgccgtttgctctgggctctgcctggcaggggactttggaacctggcctgaagtgttcaagaagcgggcgcgggggcaacacgcgcgcggggacgcagtaagatcacaggctgcaaagaaaacagcactaagcgtcctggaggacgctggagcttcaggatagtgtccttccaggtcgtgggaccgccccctcctccccgcactccaccttcccgcaactggatcactcggcggaagcctcaggtgggccccggggtccaagtccgccgccgggagggcgggggcgggccccgaaccgccgactgcagggcgcgtcacggcagccgctcctgattggcggccacggcggtcacgggcaaggtgccccgggattgacgccgcctgtggccagagccggagtaacgggactcccagctgcgcgtcgcagtcccgacgcgagaagggctggagtcggcgtccagcctagagcccccggtgggagccaggccgggacgcgtgcaccatgccctacctgctcatcagcacccagatccgcatggaggtgggccccactatggtgggcgatgaacagtcggatccagagctgatgcagcatctgggggcttcaaagagaagagccttgggaaacaacttttatgaatactacgtcgatgaccctccccgcatagtcctggacaagctggaacgcaggggcttccgtgtgctgagcatgacgggggtgggccagacgctggtgtggtgtctgcacaaggagtgaccttctcatgctgatttgcagacggggcacccctgtggaggggctgctgtgggccctgacctccaagctcctgcctcaccgtctgccttgctcctctcttcccaaatcatcaccgccatgggcccagccccaaagggcagtgaatggccttctctgaaaccctgcgtcaagcagtgggagagggcagtgcccggtgccctggtgctcccagctgccctcctgcttcgggcctgggccgagggccttgtgtaggccatgttcctcgggcagctgccccgggccggagctgggcactccagcggccctggcgcgtggctcctgcatagctagcccaagccaataaagggctgtgatgagtg

SEQ ID NO: 23332 - DNA, 1690 bp, Homo sapiens
taaagaaggatgagttgtcagattttgataactgcggatgaggggcgtggacacacggttgggaactcgcagccgctcattggtggctggtgcgggggaagttgtttcatttgccccaggtgttgcccagtgacctcctgcgcgtgcgccgcgtctgtccagctgcgcgggaagctcaggggagggaaggccaggttccatccattcagtcactccagacctggcacccagccaagcgcgcggttcctttacagactttcctgcgggtccacagaaatgcaaggatccgcctctgtgctggaattagagtctgggagggggaatgcacagtgcgccctgggtggtattttagttgtcgccttcagggctagctccgagcctcgtgccccggcctcctcagcgcttaaggaatctctggagcgcatgtcttggcgaggggaagtggggccccgttgaagctgtcgaggcgtctctgagaggggtgggctggggcctggagaggcctccgtgaggacgccgtttgctctgggctctgcctggcaggggactttggaacctggcctgaagtgttcaagaagcgggcgcgggggcaacacgcgcgcggggacgcagtaagatcacaggctgcaaagaaaacagcactaagcgtcctggaggacgctggagcttcaggatagtgtccttccaggtcgtgggaccgccccctcctccccgcactccaccttcccgcaactggatcactcggcggaagcctcaggtgggccccggggtccaagtccgccgccgggagggcgggggcgggccccgaaccgccgactgcagggcgcgtcacggcagccgctcctgattggcggccacggcggtcacgggcaaggtgccccgggattgacgccgcctgtggccagagccggagtaacgggactcccagctgcgcgtcgcagtcccgacgcgagaagggctggagtcggcgtccagcctagagcccccggtgggagccaggccgggacgcgtgcaccatgccctacctgctcatcagcacccagatccgcatggaggtgggccccactatggtgggcgatgaacagtcggatccagagctgatgcagcatctgggggcttcaaagagaagagccttgggaaacaacttttatgaatactacgtcgatgaccctccccgcatagtcctggacaagctggaacgcaggggcttccgtgtgctgagcatgacgggggtgggccagacgctggtgtggtgtctgcacaaggagtgaccttctcatgctgatttgcagacggggcacccctgtggaggggctgctgtgggccctgacctccaagctcctgcctcaccgtctgccttgctcctctcttcccaaatcatcaccgccatgggcccagccccaaagggcagtgaatggccttctctgaaaccctgcgtcaagcagtgggagagggcagtgcccggtgccctggtgctcccagctgccctcctgcttcgggcctgggccgagggccttgtgtaggccatgttcctcgggcagctgccccgggccggagctgggcactccagcggccctggcgcgtggctcctgcatagctagcccaagccaataaagggctgtgatgagtgaaaaaaatataaaacaaaaaaactcggggtttttgggggggaaaaggttaagggagtcaa

SEQ ID NO: 23333 - DNA, 1311 bp, Homo sapiens
attcttatttcttaaaagatatggctttattgatatgtaatgtgcataccataaattctttgatttaaagtgtacaattcagtgttgttgtttctttagtgtactcagagttgtgcaaccatcaccataatcagttttagaacatttctaataccccaaaaggaaaccctgtacccactggcagacactcttgatttcccccaagtccctcagccctagataaccactaattacctttctgtggtaatgtgatctgagtctggcttctttcatttacatgtttattttgttttgtttttttgaaatggagtctcactctgtcacccaggctggagtgcagtggtgcaatcatggctcactgcagcctcaaactcctcccacctcaagcgatcctcccacctcagcctcagtagctggaactataggctcgtgatactttgcctggctaaagctgagctttaaggcactagggagggcgcctacattgctcctcctgatcattgatgggctccaccccttcacagcttgtgctcagcccctaagaatccttgctactctctgtagcctttacctgaaccttactcagggctagcaggcaggggaggaaggacaggcaagaccttccacctcctcctggcagccagccaagcagccactgtggcttaccttgcaggaggtgggccccactatggtgggcgatgaacagtcggatccagagctgatgcagcatctgggggcttcaaagagaagagccttgggaaacaacttttatgaatactacgtcgatgaccctccccgcatagtcctggacaagctggaacgcaggggcttccgtgtgctgagcatgacgggggtgggccagacgctggtgtggtgtctgcacaaggagtgaccttctcatgctgatttgcagacggggcacccctgtggaggggctgctgtgggccctgacctccaagctcctgcctcaccgtctgccttgctcctctcttcccaaatcatcaccgccatgggcccagccccaaagggcagtgaatggccttctctgaaaccctgcgtcaagcagtgggagagggcagtgcccggtgccctggtgctcccagctgccctcctgcttcgggcctgggccgagggccttgtgtaggccatgttcctcgggcagctgccccgggccggagctgggcactccagcggccctggcgcgtggctcctgcatagctagcccaagccaataaagggctgtgatgagtgaaaaaaatataaaacaaaaaaactcggggtttttgggggggaaaaggttaagggagtcaa

SEQ ID NO: 23334 - DNA, 1553 bp, Homo sapiens
taaagaaggatgagttgtcagattttgataactgcggatgaggggcgtggacacacggttgggaactcgcagccgctcattggtggctggtgcgggggaagttgtttcatttgccccaggtgttgcccagtgacctcctgcgcgtgcgccgcgtctgtccagctgcgcgggaagctcaggggagggaaggccaggttccatccattcagtcactccagacctggcacccagccaagcgcgcggttcctttacagactttcctgcgggtccacagaaatgcaaggatccgcctctgtgctggaattagagtctgggagggggaatgcacagtgcgccctgggtggtattttagttgtcgccttcagggctagctccgagcctcgtgccccggcctcctcagcgcttaaggaatctctggagcgcatgtcttggcgaggggaagtggggccccgttgaagctgtcgaggcgtctctgagaggggtgggctggggcctggagaggcctccgtgaggacgccgtttgctctgggctctgcctggcaggggactttggaacctggcctgaagtgttcaagaagcgggcgcgggggcaacacgcgcgcggggacgcagtaagatcacaggctgcaaagaaaacagcactaagcgtcctggaggacgctggagcttcaggatagtgtccttccaggtcgtgggaccgccccctcctccccgcactccaccttcccgcaactggatcactcggcggaagcctcaggtgggccccggggtccaagtccgccgccgggagggcgggggcgggccccgaaccgccgactgcagggcgcgtcacggcagccgctcctgattggcggccacggcggtcacgggcaaggtgccccgggattgacgccgcctgtggccagagccggagtaacgggactcccagctgcgcgtcgcagtcccgacgcgagaagggctggagtcggcgtccagcctagagcccccggtgggagccaggccgggacgcgtgcaccatgccctacctgctcatcagcacccagatccgcatggaggtgggccccactatggtgggcgatgaacagtcggatccagagctgatgcagcatctgggggcttcaaagagaagagccttgggaaacaacttttatgaatactacgtcgatgaccctccccgcatagtcctggacaagctggaacgcaggggcttccgtgtgctgagcatgacgggggtgggccagacgctggtgtggtgtctgcacaaggagtgaccttctcatgctgatttgcagacggggcacccctgtggaggggctgctgtgggccctgacctccaagctcctgcctcaccgtctgccttgctcctctcttcccaaatcatcaccgccatgggcccagccccaaagggcagtgaatggccttctctgaaaccctgcgtcaagcagtgggagagggcagtgcccgctgccccgggccggagctgggcactccagcggccctggcgcgtggctcctgcatagctagcccaagccaataaagggctgtgatgagtg

SEQ ID NO: 23335 - DNA, 826 bp, Homo sapiens
cctttattgccgcgaaggggcccgggtacgtgcgtcccggcaacagggcgacctccgggcgcttccggctcctgtcctacctgtcggcgggagagacccagggagccctggcctcacgcgcagcacctagtgccctgcacagagccgctccgcaggggaaaaaagggcgaataacctgagagaaagaggaggtgggccccactatggtgggcgatgaacagtcggatccagagctgatgcagcatctgggggcttcaaagagaagagccttgggaaacaacttttatgaatactacgtcgatgaccctccccgcatagtcctggacaagctggaacgcaggggcttccgtgtgctgagcatgacgggggtgggccagacgctggtgtggtgtctgcacaaggagtgaccttctcatgctgatttgcagacggggcacccctgtggaggggctgctgtgggccctgacctccaagctcctgcctcaccgtctgccttgctcctctcttcccaaatcatcaccgccatgggcccagccccaaagggcagtgaatggccttctctgaaaccctgcgtcaagcagtgggagagggcagtgcccggtgccctggtgctcccagctgccctcctgcttcgggcctgggccgagggccttgtgtaggccatgttcctcgggcagctgccccgggccggagctgggcactccagcggccctggcgcgtggctcctgcatagctagcccaagccaataaagggctgtgatgagtgaaaaaaatataaaacaaaaaaactcggggtttttgggggggaaaaggttaagggagtcaa

SEQ ID NO: 23336 - DNA, 1170 bp, Homo sapiens
attcttatttcttaaaagatatggctttattgatatgtaatgtgcataccataaattctttgatttaaagtgtacaattcagtgttgttgtttctttagtgtactcagagttgtgcaaccatcaccataatcagttttagaacatttctaataccccaaaaggaaaccctgtacccactggcagacactcttgatttcccccaagtccctcagccctagataaccactaattacctttctgtggtaatgtgatctgagtctggcttctttcatttacatgtttattttgttttgtttttttgaaatggagtctcactctgtcacccaggctggagtgcagtggtgcaatcatggctcactgcagcctcaaactcctctgttttctcatctatcaatggccacaacagtggcaccttcactagcttgttgggaagaataaatgagatagctcgtgaagtacctagaaggggaggaggcagggggcgtgcacttaccccagcgcccagcaagcagccagcaagtgtgagtcactacaagagtggccaggctgcctgctgcagacactagctttgtaccaggagcttgctgtgtgcccctcctcaccccccccatcctgtctctttgcagttatgaatactacgtcgatgaccctccccgcatagtcctggacaagctggaacgcaggggcttccgtgtgctgagcatgacgggggtgggccagacgctggtgtggtgtctgcacaaggagtgaccttctcatgctgatttgcagacggggcacccctgtggaggggctgctgtgggccctgacctccaagctcctgcctcaccgtctgccttgctcctctcttcccaaatcatcaccgccatgggcccagccccaaagggcagtgaatggccttctctgaaaccctgcgtcaagcagtgggagagggcagtgcccggtgccctggtgctcccagctgccctcctgcttcgggcctgggccgagggccttgtgtaggccatgttcctcgggcagctgccccgggccggagctgggcactccagcggccctggcgcgtggctcctgcatagctagcccaagccaataaagggctgtgatgagtgaaaaaaatataaaacaaaaaaactcggggtttttgggggggaaaaggttaagggagtcaa

SEQ ID NO: 23337 - DNA, 358 bp, Homo sapiens
gtgggcgatgaacagtcggatccagagctgatgcagcatctgggggcttcaaagagaagagccttgggaaacaacttgtaagtagcagcctccctcagtatcctctccctgccagcccctagacctgcctctgctccctttatacaacctccaagcccagggacagggcccagcatcagagccccctgcctgcatcctggggctctgttctccggaggagttggtcccatctgtagcctctccaacatcccccctctcccccacgaggcttgctctgaaagctttccacatccttactggaaccgcagaaacagagtccgttccctgggtctaggactccactagcagactgttcctt

SEQ ID NO: 23338 - DNA, 640 bp, Homo sapiens
caaaaaggcctgaattgggggtccaagctaaaagcccccgtggggagccaggccgggaagccgtcgccaatggcataccttggtcatcaagcacccaaatccgccatggaggttgggcccgggggcttcaaaaaaaagaagccttgggaacaactttttatgaatactacgtcgatgaccctccccgcatagtcctggacaagctggaacgcaggggcttccgtgtgctgagcatgacgggggtgggccagacgctggtgtggtgtctgcacaaggagtgaccttctcatgctgatttgcagacggggcacccctgtggaggggctgctgtgggccctgacctccaagctcctgcctcaccgtctgccttgctcctctcttcccaaatcatcaccgccatgggcccagccccaaagggcagtgaatggccttctctgaaaccctgcgtcaagcagtgggagagggcagtgcccggtgccctggtgctcccagctgccctcctgcttcgggcctgggccgagggccttgtgtaggccatgttcctcgggcagctgccccgggccggagctgggcactccagcggccctggcgcgtggctcctgcatagctagcccaagccaataaagggctgtgatgagtg

SEQ ID NO: 23339 - DNA, 1458 bp, Homo sapiens
taaagaaggatgagttgtcagattttgataactgcggatgaggggcgtggacacacggttgggaactcgcagccgctcattggtggctggtgcgggggaagttgtttcatttgccccaggtgttgcccagtgacctcctgcgcgtgcgccgcgtctgtccagctgcgcgggaagctcaggggagggaaggccaggttccatccattcagtcactccagacctggcacccagccaagcgcgcggttcctttacagactttcctgcgggtccacagaaatgcaaggatccgcctctgtgctggaattagagtctgggagggggaatgcacagtgcgccctgggtggtattttagttgtcgccttcagggctagctccgagcctcgtgccccggcctcctcagcgcttaaggaatctctggagcgcatgtcttggcgaggggaagtggggccccgttgaagctgtcgaggcgtctctgagaggggtgggctggggcctggagaggcctccgtgaggacgccgtttgctctgggctctgcctggcaggggactttggaacctggcctgaagtgttcaagaagcgggcgcgggggcaacacgcgcgcggggacgcagtaagatcacaggctgcaaagaaaacagcactaagcgtcctggaggacgctggagcttcaggatagtgtccttccaggtcgtgggaccgccccctcctccccgcactccaccttcccgcaactggatcactcggcggaagcctcaggtgggccccggggtccaagtccgccgccgggagggcgggggcgggccccgaaccgccgactgcagggcgcgtcacggcagccgctcctgattggcggccacggcggtcacgggcaaggtgccccgggattgacgccgcctgtggccagagccggagtaacgggactcccagctgcgcgtcgcagtcccgacgcgagaagggctggagtcggcgtccagcctagagcccccggtgggagccaggccgggacgcgtgcaccatgccctacctgctcatcagcacccagatccgcatgttatgaatactacgtcgatgaccctccccgcatagtcctggacaagctggaacgcaggggcttccgtgtgctgagcatgacgggggtgggccagacgctggtgtggtgtctgcacaaggagtgaccttctcatgctgatttgcagacggggcacccctgtggaggggctgctgtgggccctgacctccaagctcctgcctcaccgtctgccttgctcctctcttcccaaatcatcaccgccatgggcccagccccaaagggcagtgaatggccttctctgaaaccctgcgtcaagcagtgggagagggcagtgcccgctgccccgggccggagctgggcactccagcggccctggcgcgtggctcctgcatagctagcccaagccaataaagggctgtgatgagtg

SEQ ID NO: 23340 - DNA, 390 bp, Homo sapiens
actttcttccaacctttctgtcagataaccaaaataaccccttataatttaaaattaattaaacctcatggctacctaatttaaagtactaagtaagatcatgttgcctccaataaagaaatcattcacattataaaaatatgattctttcctttagataaatttatctttaaggtattctaaaatgtgattaccatcctaggcaatacgacaggaccctgtctctacaaaaaaaaatttttaagttagccaggcatagtagtatgcacttgtgtcccagctattcaggaggctgaggtgggaggatggcttgagtccaggagttagaggctgcagggagctgtgatcaccactgcactccagcctgagtgacagtcgaggctctgtttc

SEQ ID NO: 23341 - DNA, 297 bp, Homo sapiens
actgagaggacacaggacctgcctgacccctctaaagccccccaaccctcctgtcccaaaccaagtcactcaggctcctatggcccatgccttttttcctgcccttagctttgggctgagagaacatagccctatgtgttgtttctacccatgggcctctgggataaaaagctgtgatttcaggctgggcatggtggctcacgcctgtaatcccagcactttgggagggcgaggcgggtggatcacgaggtcaggagatcgagaccatcctggctaacactatgaaaccctgtctct

SEQ ID NO: 23342 - DNA, 510 bp, Homo sapiens
  misc_feature (510)..(510): n is a, c, g, or t
tgttattggatgttccatcatacttgtgggccaggacttagttaaatggctacaccttgctacaaggaagtctgggaaatacagtctttcagctggatacatccccctggcctgaataaaagctgggttctcttacaaagcacaaaaaggggattgaatattggttaggcacctgtcaatctttcatatcagcccacgtgagatagccagggtttggtgaaataaaatgctgtttctcctcaaaacacttctctcttcctgattggggagggaccctgttctctgcagagaaattctttctcatgacagggccaacatgtctgccaaaagacagcaataggacttcccaatcattctatatatttaagggagactttttaaaaactacaatacggttgaactcatgtgatttttttttttgccatgaagtttcttgttaagcattgaacatttaaaagtaaattttgactaatgtgaaataaaagaatgttacttgaagcaaaaaaaaan

SEQ ID NO: 23343 - DNA, 1200 bp, Homo sapiens
aattctaatatattcatttaatatgtaaatctatagatatctcttgatgtagatatttagaatcctttaaagttatttgtacaacagatgtttttattataacagtaatttacatttaactttaaagttagtgaagcatactaccataaatgcacaattatgaaaaattagaagctaaattacagattcattgatggagtcaattatgcaaagtggtcagtggttgttgaagcatgcattgcttcaacaggatttgcgtgcatttcccatgatcctgcattcttgtgttcttgatagcatacagacttactcagaatcaacagttgctgcttaatttgtctattttgtaagcttaggctactattttattaaaactggacatagatacttggctgaatacaaatagttttgcagattgcaatataataaaggaaacagtaaaaactagtgggctatgcttaggtttttcttgaaacctaacattgctttaggctgggtgccgtggctcgtgcctgtaatcccaaagtgctgggagccaccgcgcccagcctggtttgaacattattaagctgttgaatataaacttgaaaataattttctatgatacagctttcaggtagaaaaatgaattttcgttgtgtttaacaatgttgtgtttaacagcttatacaaataacacagtataaatggtaattgccactgtcattttaaaaatcagaaaatagtaaataaaaggatgtggaagagtctcatgtgatacagtggagatttcataccgaataaaagcattataaatatggttaaattgaacataagcataaatttaacggaactcattagaaaaaaataagccttttttctcaggttgtttcattactgtatggtgagacaactgattcaccacgatttagtctagagctacttttctattctgaatagttttggtaaaactattggtgaattattaggctgttatagtaatctgcctccgtcaagtgtatttcttgggttaaggaacacaaacatttttttttaactattcacggaagctggatgttcttcctggtcatttgaatcaaggccgtctaacaggaattgaataattcagggactagcatttaacccatatcaggtctaggcaagaaaagacatacattaggaagccttaggatatcattaaactgcctagggtagtcaaaa

SEQ ID NO: 23344 - DNA, 1111 bp, Homo sapiens
ctgtctcttaaaaaaaagggctggcctgtaatcccagcacttttgaaggccaaggcaggcagatcatttgagcccaggagttcaggacgagcctgggcaacatggcaaaaccctgtctctaccaaaaaattaaaaaataaaaaatagctgggtgtagtggcacatgcctgtagtcccaactactcaggagtctgaggtaggaggatcagttgagcccgggaagtcgagtgcagtggtgtgatctcagttcactgcaacctctgcctcccgggttcaagcagttctctgtcgcagcgtcccaggtagctgggattacaggcgcccaccaccacgcccagctaatttttgtacttttggtagagacagggtttcaccatcttggccagactggtcttgaactcctaacctcaggatccacccgcctcggcctcccaaagtgctgggagccaccgcgcccagcctggtttgaacattattaagctgttgaatataaacttgaaaataattttctatgatacagctttcaggtagaaaaatgaattttcgttgtgtttaacaatgttgtgtttaacagcttatacaaataacacagtataaatggtaattgccactgtcattttaaaaatcagaaaatagtaaataaaaggatgtggaagagtctcatgtgatacagtggagatttcataccgaataaaagcattataaatatggttaaattgaacataagcataaatttaacggaactcattagaaaaaaataagccttttttctcaggttgtttcattactgtatggtgagacaactgattcaccacgatttagtctagagctacttttctattctgaatagttttggtaaaactattggtgaattattaggctgttatagtaatctgcctccgtcaagtgtatttcttgggttaaggaacacaaacatttttttttaactattcacggaagctggatgttcttcctggtcatttgaatcaaggccgtctaacaggaattgaataattcagggactagcatttaacccatatcaggtctaggcaagaaaagacatacattaggaagccttaggatatcattaaactgcctagggtagtcaaaa

SEQ ID NO: 23345 - DNA, 1364 bp, Homo sapiens
gaatgctttagtgttctgaagttagaagagtgagcttgagtgttttgttaatcggtcatacgaacacagcggttccattaaaaaaaaatgtggtcgagcacgggggctcacgcctgtaatcctagcactttgggaggccaaggcgggtggatcacgaggtcaggagatcaagatcatgctggctatcgtggtgataccccgtctctactaaaaatacaaaaaattagccaggcatggtggtggccacctgtagtcctagctactcgggaggctgaggcaggagaatggcatgaactcgggaggcagacttgcagtgagtcgaggtcgtgccattgtactccagcctgagccattgtactccagcctgagcaagagagtgagactctctttcaaaaaaaaaaaaaaaaggtcctattctatggattaatagacatgcctaaacatgtttactaaattgaactctttatcaaatgaagatggtgcaagtgatcctagatagcttattttaaatttgttcacatgttgatcatatatgttgatatgttgttcacatatattgataaaacgatgttacttagcctttatttgcaattttgattcagaagatatatctagaaccaaagttatacattttcgcattcttcctaggtgtatactactttttgtcttctttgtttctaaaatagttttggcaattaaacactaacattaatactgactttgtggcagccatttctgtagctgccatgagaattagttttaagatccacaaagatcacaatgaaaggaaaaaggaaaagaatttttctcagtaagatattctgtaaacatatcatgttaactatgtcatgctagaattttacattgctcttaggaacatcaaacctgcctggaaaatggaaataaaattcattccctattatcatcccaaattccccctttaatttatgattcatcaaggtgaagatgagggggaattacctctctgggaacatgtttattttgttgctgtaactgagatctccctttgtgcctatgcgagcaagtcagtgcttagatggataacagtagaaaaaaattattatacactctcctcatttcattatgcaaatttatcaggatgtatctcccataaattcactataccttgcactgtcttttaaaacaaaagattcagatgttctttttcatggatatcattcattgcattaaaaaaatggcaccgagacacactcaattttttctttcataaacatcttttatataaggaggttgtaaaaaataacttattttaaataaaaaaactatcactttgctataataaagaactatcactttggttttagttccattactgttaaaaa

SEQ ID NO: 23346 - DNA, 311 bp, Homo sapiens
atcttagggaaatgataattaaaggaattcgggagtcagtgccccacactcagaatctttcccgagcatttgacgtacaacaggaaaaagatgaaggccccatgaaatttctaaaaagaccaagggaacaaacaaaaaaatatgcagatttagatccagaagactctctcgggcaagaaatgttaaagctacatgttgtcacaaacagctggtcagacataacaaagcagttgcaaaaactagaaaactggaaaaacctgtccatagagaaactcctaggagaagcccaaaaattctatgtgaggagagat

SEQ ID NO: 23347 - DNA, 2610 bp, Homo sapiens
cactgagttgtttattaggcacaagatttaacttggacacttcctccaaacaccccaggttcttgcccagcctcctcgaatacagcctctctgggagtttccctctccccgactcagccgcgctggtccctgccttttcagcgctacctgccctccgtctgggacctggctcctttcctctcgccggtgtttcctcgccacccgcggaggggagggcggaccccagcctccttgccgcctgccccgcctccccgcctccccgccggcccggctcgggccgcgcaggcgcaccaggcgcggtccggaggccgagggcgaccacagcagcctccgcctcctgctgctccggactattctgcgctgggctagtcggcggtgacccggactgcgcccggcagtggcttcgcgggcgacgcgtcgccatgggctctcgctggagcagcgaagaggagaggcagccgctgctggggcccgggctcgggcctgggctgggggcctcctggagaagccgggaggcggcggcggcggcgctgcccgcggcggtcccgggtcccgggcgggtatacgggcgccgctggctggtgctgctgctcttctcgctgctggcgttcgttcagggcctggtctggaacacctggggtcccatccagaactcggcgcgccaggcctacggcttctccagctgggacatcgcgctgctcgtgctgtgggggcccatcggcttcctgccctgcttcgcgttcatgtggctcctggacaagagaggtctccggataactgtgctcctgacatccttccttatggttttgggaactggtctaagatgcatacctatatcagacttaatccttaaaagaagattaattcatggaggacagatgttaaatggattggcaggtccaactgtaatgaatgcagcaccatttctctctacgacgtggttttctgcagatgaaagggccacagccacagctattgcatcaatgctcagttatcttgggggagcatgtgcatttttagttggaccacttgttgttccagctcccaatgggacatcacctcttcttgctgcagagagcagcagggcgcatattaaagatcgcatagaggctgtgttatatgcagaatttggagttgtctgcttaatattttctgcaacactagcttatttcccaccccgacctcctcttcctcccagtgttgctgcagctagccagcggctgagttatcggagaagcgtttgtagattattaagcaattttcgatttttgatgattgctttagcatatgccataccacttggtgtatttgctggctggtctggagttctggacttaattttaacaccagcgcatgtcagccaagtagatgctggctggattggattttggtccatagttggaggctgtgttgttggaatagctatggcaaggtttgcagattttatcaggggtatgctgaaactaattcttctcctcctgttttcgggagctacactgtcatccacgtggttcaccctgacctgtttgaacagcatcacacacctacctttaaccacagtgacattgtatgcctcctgtattctcctgggagtgttcttgaatagcagcgtgcctatattttttgagctttttgtggaaactgtctacccagttccagaaggaattacttgtggagttgtcacttttttaagtaatatgtttatgggagtacttttattttttctcacattttatcatacagagttgtcttggttcaactggtgccttcccgggtcgtgtttgctcagtctcctcctcattctgtgcttcagggaatcctatgacagactctatcttgatgtggttgtctccgtttaatagcacagacttgaaggagtttaaaaggaggctggaaatcaatactgcacactgcacatttgctcagaattgcacatctaacaggaaaagagggagaagaaagaaacttcattcagaggttttgttaggttacagattatcacattaatttaattactactaggtaataataatgggagacttgagtgataataggggattttaaaactctacagatggcatacctgtgcctgcttctggggttggaagtgtgacttcttacacataaagcactacctaagtaattctctctctgttttgtgccagtgctaaactactgattacttgtaattatgaaaagaaataaagggtgtctatcatatgaagataacgccttccctaagtcacatatcagaataggaagatatgccactaacttctaaagaagttcaaaccctgtatccaattttaatgataaaatagccaagaggtatatcgatgatggaaattagccacatgtacactacattttttctaataaagccatttcttatatgactccttattttaatcaggtcagaagcccttggccatctttactatggtgatcaggtgctttccagtgacttctgagcataggcactgtgtctccatctcaacttatccttgtttctgtgaaatacaatttcatctactaggcccttaaataattatgtgagggtgtctaaatgtttaatatgattacattaaatattgtatgaaaaaatgtaat

SEQ ID NO: 23348 - DNA, 1290 bp, Homo sapiens
gttatttcaaaattcagatgattttcgtatttgtctttttaatccatcagatatttataaacagggacaagagtgatgatgatagagggtacttaaaaaataattatcaaactaacatttaaaggtgattgattttttttctttgaagtaatttattttgtaaccaaagtcaaggtggattaaattgatgaaaagttatgaacaatattgattaaaaatattccacatggaagccccgtcatatattacacacatcacttagtctccagattgtcactatttattgaaagccagtttctaggccttccagggtacatttattataagtactttttaatgcagagcagattccttccggcatacaggtggtggtctgctggtgatacatgaatgtttaaaactgcatgtttttttgtcttacagagttgtcttggttcaactggtgccttcccgggtcgtgtttgctcagtctcctcctcattctgtgcttcagggaatcctatgacagactctatcttgatgtggttgtctccgtttaatagcacagacttgaaggagtttaaaaggaggctggaaatcaatactgcacactgcacatttgctcagaattgcacatctaacaggaaaagagggagaagaaagaaacttcattcagaggttttgttaggttacagattatcacattaatttaattactactaggtaataataatgggagacttgagtgataataggggattttaaaactctacagatggcatacctgtgcctgcttctggggttggaagtgtgacttcttacacataaagcactacctaagtaattctctctctgttttgtgccagtgctaaactactgattacttgtaattatgaaaagaaataaagggtgtctatcatatgaagataacgccttccctaagtcacatatcagaataggaagatatgccactaacttctaaagaagttcaaaccctgtatccaattttaatgataaaatagccaagaggtatatcgatgatggaaattagccacatgtacactacattttttctaataaagccatttcttatatgactccttattttaatcaggtcagaagcccttggccatctttactatggtgatcaggtgctttccagtgacttctgagcataggcactgtgtctccatctcaacttatccttgtttctgtgaaatacaatttcatctactaggcccttaaataattatgtgagggtgtctaaatgtttaatatgattacattaaatattgtatgaaaaaatgtaat

SEQ ID NO: 23349 - DNA, 1442 bp, Homo sapiens
  misc_feature (1326)..(1326): n is a, c, g, or t
  misc_feature (1330)..(1330): n is a, c, g, or t
  misc_feature (1333)..(1333): n is a, c, g, or t
  misc_feature (1348)..(1348): n is a, c, g, or t
  misc_feature (1378)..(1378): n is a, c, g, or t
  misc_feature (1400)..(1400): n is a, c, g, or t
cactgagttgtttattaggcacaagatttaacttggacacttcctccaaacaccccaggttcttgcccagcctcctcgaatacagcctctctgggagtttccctctccccgactcagccgcgctggtccctgccttttcagcgctacctgccctccgtctgggacctggctcctttcctctcgccggtgtttcctcgccacccgcggaggggagggcggaccccagcctccttgccgcctgccccgcctccccgcctccccgccggcccggctcgggccgcgcaggcgcaccaggcgcggtccggaggccgagggcgaccacagcagcctccgcctcctgctgctccggactattctgcgctgggctagtcggcggtgacccggactgcgcccggcagtggcttcgcgggcgacgcgtcgccatgggctctcgctggagcagcgaagaggagaggcagccgctgctggggcccgggctcgggcctgggctgggggcctcctggagaagccgggaggcggcggcggcggcgctgcccgcggcggtcccgggtcccgggcgggtatacgggcgccgctggctggtgctgctgctcttctcgctgctggcgttcgttcagggcctggtctggaacacctggggtcccatccagaactcggcgcgccaggcctacggcttctccagctgggacatcgcgctgctcgtgctgtgggggcccatcggcttcctgccctgcttcgcgttcatgtggctcctggacaagagaggtctccggataactgtgctcctgacatccttccttatggttttgggaactggtctaagatgcatacctatatcagacttaatccttaaaagaagattaattcatggaggacagatgttaaatggattggcaggtccaactgtaatgaatgcagcaccatttctctctacgacgtggttttctgcagatgaaagggccacagccacagctattgcatcaatgctcagttatcttgggggagcatgtgcatttttagttggaccacttgttgttccagctcccaatgggacatcacctcttcttgctgcagagagcagcagggcgcatattaaagatcgcatagaggctgtgttatatgcagaatttggagttgtctgcttaatattttctgcaacactagcttatttcccaccccgacctcctcttcctcccagtgttgctgcagctagccagcggctgagttatcggagaagcgtttgtagattattaagatttcattttatatgttacatatgcatacacttgtgtattctgctgtctgagtctgactaatttaaacacncatntancaaaaaatcaagtgnatgatttgtctaatgagaaatgtgaaacangaagtatatagttaatccatgnaacgtctactaacacatacaattcattaatacacattatgat

SEQ ID NO: 23350 - DNA, 423 bp, Homo sapiens
  misc_feature (16)..(16): n is a, c, g, or t
  misc_feature (28)..(28): n is a, c, g, or t
gggtgacctagaggancccaagctcccnacaagagaggtctccggataactgtgctcctgacatccttccttatggttttgggaactggtctaagatgcatacctatatcagacttaatccttaaaagaagattaattcatggaggacagatgttaaatggattggcaggtccaactgtaatgaatgcagcaccatttctctctacgacgtggttttctgcagatgaaagggccacagccacagctattgcatcaatgctcagttatcttgggggagcttaagcgtccacaacaagaacgggaagaaacggttggagctgaaggtttggtcgactcgcattcggcgtccagtttggagttcagatgtggactcctttccaagatcatcctgggattctttggcttttacttcctatgacttgt

SEQ ID NO: 23351 - DNA, 2516 bp, Homo sapiens
cactgagttgtttattaggcacaagatttaacttggacacttcctccaaacaccccaggttcttgcccagcctcctcgaatacagcctctctgggagtttccctctccccgactcagccgcgctggtccctgccttttcagcgctacctgccctccgtctgggacctggctcctttcctctcgccggtgtttcctcgccacccgcggaggggagggcggaccccagcctccttgccgcctgccccgcctccccgcctccccgccggcccggctcgggccgcgcaggcgcaccaggcgcggtccggaggccgagggcgaccacagcagcctccgcctcctgctgctccggactattctgcgctgggctagtcggcggtgacccggactgcgcccggcagtggcttcgcgggcgacgcgtcgccatgggctctcgctggagcagcgaagaggagaggcagccgctgctggggcccgggctcgggcctgggctgggggcctcctggagaagccgggaggcggcggcggcggcgctgcccgcggcggtcccgggtcccgggcgggtatacgggcgccgctggctggtgctgctgctcttctcgctgctggcgttcgttcagggcctggtctggaacacctggggtcccatccagaactcggcgcgccaggcctacggcttctccagctgggacatcgcgctgctcgtgctgtgggggcccatcggcttcctgccctgcttcgcgttcatgtggctcctggacaagagagattaattcatggaggacagatgttaaatggattggcaggtccaactgtaatgaatgcagcaccatttctctctacgacgtggttttctgcagatgaaagggccacagccacagctattgcatcaatgctcagttatcttgggggagcatgtgcatttttagttggaccacttgttgttccagctcccaatgggacatcacctcttcttgctgcagagagcagcagggcgcatattaaagatcgcatagaggctgtgttatatgcagaatttggagttgtctgcttaatattttctgcaacactagcttatttcccaccccgacctcctcttcctcccagtgttgctgcagctagccagcggctgagttatcggagaagcgtttgtagattattaagcaattttcgatttttgatgattgctttagcatatgccataccacttggtgtatttgctggctggtctggagttctggacttaattttaacaccagcgcatgtcagccaagtagatgctggctggattggattttggtccatagttggaggctgtgttgttggaatagctatggcaaggtttgcagattttatcaggggtatgctgaaactaattcttctcctcctgttttcgggagctacactgtcatccacgtggttcaccctgacctgtttgaacagcatcacacacctacctttaaccacagtgacattgtatgcctcctgtattctcctgggagtgttcttgaatagcagcgtgcctatattttttgagctttttgtggaaactgtctacccagttccagaaggaattacttgtggagttgtcacttttttaagtaatatgtttatgggagtacttttattttttctcacattttatcatacagagttgtcttggttcaactggtgccttcccgggtcgtgtttgctcagtctcctcctcattctgtgcttcagggaatcctatgacagactctatcttgatgtggttgtctccgtttaatagcacagacttgaaggagtttaaaaggaggctggaaatcaatactgcacactgcacatttgctcagaattgcacatctaacaggaaaagagggagaagaaagaaacttcattcagaggttttgttaggttacagattatcacattaatttaattactactaggtaataataatgggagacttgagtgataataggggattttaaaactctacagatggcatacctgtgcctgcttctggggttggaagtgtgacttcttacacataaagcactacctaagtaattctctctctgttttgtgccagtgctaaactactgattacttgtaattatgaaaagaaataaagggtgtctatcatatgaagataacgccttccctaagtcacatatcagaataggaagatatgccactaacttctaaagaagttcaaaccctgtatccaattttaatgataaaatagccaagaggtatatcgatgatggaaattagccacatgtacactacattttttctaataaagccatttcttatatgactccttattttaatcaggtcagaagcccttggccatctttactatggtgatcaggtgctttccagtgacttctgagcataggcactgtgtctccatctcaacttatccttgtttctgtgaaatacaatttcatctactaggcccttaaataattatgtgagggtgtctaaatgtttaatatgattacattaaatattgtatgaaaaaatgtaat

SEQ ID NO: 23352 - DNA, 1206 bp, Homo sapiens
ctggcagatgtgtgatgctttgtcaaactttatcaactacctttgaaaagaagaaatttttgagtcaatacttaggaaagagaacaccccgaagatctatctgatatgactcactgccgctagtgtgaaactaaaatgtttgtgtttttattttagtgacattgtatgcctcctgtattctcctgggagtgttcttgaatagcagcgtgcctatattttttgagctttttgtggaaactgtctacccagttccagaaggaattacttgtggagttgtcacttttttaagtaatatgtttatgggagtacttttattttttctcacattttatcatacagagttgtcttggttcaactggtgccttcccgggtcgtgtttgctcagtctcctcctcattctgtgcttcagggaatcctatgacagactctatcttgatgtggttgtctccgtttaatagcacagacttgaaggagtttaaaaggaggctggaaatcaatactgcacactgcacatttgctcagaattgcacatctaacaggaaaagagggagaagaaagaaacttcattcagaggttttgttaggttacagattatcacattaatttaattactactaggtaataataatgggagacttgagtgataataggggattttaaaactctacagatggcatacctgtgcctgcttctggggttggaagtgtgacttcttacacataaagcactacctaagtaattctctctctgttttgtgccagtgctaaactactgattacttgtaattatgaaaagaaataaagggtgtctatcatatgaagataacgccttccctaagtcacatatcagaataggaagatatgccactaacttctaaagaagttcaaaccctgtatccaattttaatgataaaatagccaagaggtatatcgatgatggaaattagccacatgtacactacattttttctaataaagccatttcttatatgactccttattttaatcaggtcagaagcccttggccatctttactatggtgatcaggtgctttccagtgacttctgagcataggcactgtgtctccatctcaacttatccttgtttctgtgaaatacaatttcatctactaggcccttaaataattatgtgagggtgtctaaatgtttaatatgattacattaaatattgtatgaaaaaatgtaat

SEQ ID NO: 23353 - DNA, 1720 bp, Homo sapiens
cactgagttgtttattaggcacaagatttaacttggacacttcctccaaacaccccaggttcttgcccagcctcctcgaatacagcctctctgggagtttccctctccccgactcagccgcgctggtccctgccttttcagcgctacctgccctccgtctgggacctggctcctttcctctcgccggtgtttcctcgccacccgcggaggggagggcggaccccagcctccttgccgcctgccccgcctccccgcctccccgccggcccggctcgggccgcgcaggcgcaccaggcgcggtccggaggccgagggcgaccacagcagcctccgcctcctgctgctccggactattctgcgctgggctagtcggcggtgacccggactgcgcccggcagtggcttcgcgggcgacgcgtcgccatgggctctcgctggagcagcgaagaggagaggcagccgctgctggggcccgggctcgggcctgggctgggggcctcctggagaagccgggaggcggcggcggcggcgctgcccgcggcggtcccgggtcccgggcgggtatacgggcgccgctggctggtgctgctgctcttctcgctgctggcgttcgttcagggcctggtctggaacacctggggtcccatccagaactcggcgcgccaggcctacggcttctccagctgggacatcgcgctgctcgtgctgtgggggcccatcggcttcctgccctgcttcgcgttcatgtggctcctggacaagagaggtctccggataactgtgctcctgacatccttccttatggttttgggaactggtctaagatgcatacctatatcagacttaatccttaaaagaagattaattcatggaggacagatgttaaatggattggcaggtccaactgtaatgaatgcagcaccatttctctctacgacgtggttttctgcagatgaaagggccacagccacagctattgcatcaatgctcagttatcttgggggagcatgtgcatttttagttggaccacttgttgttccagctcccaatgggacatcacctcttcttgctgcagagagcagcagggcgcatattaaagatcgcatagaggctgtgttatatgcagaatttggagttgtctgcttaatattttctgcaacactagcttatttcccaccccgacctcctcttcctcccagtgttgctgcagctagccagcggctgagttatcggagaagcgtttgtagattattaagcaattttcgatttttgatgattgctttagcatatgccataccacttggtgtatttgctggctggtctggagttctggacttaattttaacaccagcgcatgtcagccaagtagatgctggctggattggattttggtccatagttggaggctgtgttgttggaatagctatggcaaggtttgcagattttatcaggggtatgctgaaactaattcttctcctcctgttttcgggagctacactgtcatccacgtggttcaccctgacctgtttgaacagcatcacacacctacctttaaccacaggtgagcataggctatttttgaacttttaataaatattttcattcacagaagtgtacataactctgacagtaggacttcttcttgctttctgtaagtaattgttaaatatacaaaaaagtttctcttgtccagtcatcaaaccatcatcttatctaaagag

SEQ ID NO: 23354 - DNA, 302 bp, Homo sapiens
cctatcaacagcagctgataaaatattaaaagatttgccttgtgtaatgtctctggagagctgtcttactgatgtacgaggccatgattgacaactttgagactttgctggaagcgacaaaagtatatctataatattatgctgaattgcataggtctttcttcttaaatgaggctagaaataacataccaccaagtgtttggcttttaggaaattgagcattttctttagttctagctgcagtttaatttcctcagaattagacattatgcggtatctggaacgttaaaaaaaaaaaaaag

SEQ ID NO: 23355 - DNA, 1306 bp, Homo sapiens
gctttttaacaattttacattttaattcttagtttggtagattggattgaaagaaaggagaaagaacattagcagaaggcactttcccattttcttccaggaatgacttattcctggggtggtgagaattggtgggtggtaaccatccatagtataaaattgttagaaagaatataaactgccaaacaagcatgttatcttcaggcttttccaagcaagaatgaagtcttttgatgtttatgttcattttaagaagacaaacaaactaaaattttaagaccagacacaacccaagttgaattgtgatctcaggaggtgaactctcattcaccatgtggcatattactacctgtatttatatcatggaatttcagggtatatgtgaacatgtctagtatgactcaggtaaacctttaaagaatgtatgttacttaccatttttgtaaagaagcaaacaggagctgaattgttaaccaaaactgttccattaccttgggtcactgtgcaaactaattcagggtacagatataaagtttagaagccttgggattaaatgccagcctctttgctcaggcaaaatgaccctgggctttcttgggaagtccagcatgtatgtaaggggtgaggccctgctgacctcagggcttttcgctttaaggagattaaccctagtcacagtgattttcatttaggagctaactaggagtttactctttatgacgtgaaacttcaaagagtatagaaaacttttgtaccacaatcaaagaagaagaaatggtgtatggaaagaaaacaaaacaaaacaagaaatctcttgtaaaatattccaggtcaaagttgtctcctctccaaaccttgcagaagcacctttcttctcttcagcgcactgttttgggactgtttatgcagcagatgtaagtagacaacatggactccatgtgacatgcctctaatagtaaagataaagtattactgaggttaaaaataaaaattgagtagtattaatttaaagtgcaccatcaggacaacaaaccatttaagctgaaaaaacgctattttatttcttgagtttgccagttgcttccaccttgagttaaggacgtgtctcatcttcacctactgcgcattctcccttctctaactgtgtaatatgtcaggtcaaggacattgaatgttatgaattgagaacctaattgatgcgcatagttttcatctatgcaattttacttgcttctgtcactttacgatctgttcatatttggcatcaattaaagatactttttaaggatcttatcaaggaatatct

SEQ ID NO: 23356 - DNA, 581 bp, Homo sapiens
cggccgccgcggctcccgccagggcactgcaaagacgacctgccgcattcccactcgggctctccgctgactcagcaccgcccctgcgccaagccagccggccaggtcaaagttgtctcctctccaaaccttgcagaagcacctttcttctcttcagcgcactgttttgggactgtttatgcagcagatgtaagtagacaacatggactccatgtgacatgcctctaatagtaaagataaagtattactgaggttaaaaataaaaattgagtagtattaatttaaagtgcaccatcaggacaacaaaccatttaagctgaaaaaacgctattttatttcttgagtttgccagttgcttccaccttgagttaaggacgtgtctcatcttcacctactgcgcattctcccttctctaactgtgtaatatgtcaggtcaaggacattgaatgttatgaattgagaacctaattgatgcgcatagttttcatctatgcaattttacttgcttctgtcactttacgatctgttcatatttggcatcaattaaagatactttttaaggatcttatcaaggaatatct

SEQ ID NO: 23357 - DNA, 481 bp, Homo sapiens
cggccgccgcggctcccgccagggcactgcaaagacgacctgccgcattcccactcgggctctccgctgactcagcaccgcccctgcgccaagccagccggccagtaggtgttcagtgagtcctgaatgaagaaagaatattttgctatgttggatgctgtggggaagacccaaggaaatttttgcaagcagggagagggagacatttctggaagaccggaagacctttctggaagagataatgaaacaagcccagaaaaggaagagagccttcaaaaatgacgttaaattcatggcagacctgatactagaaaccagaagtcccagcagggtagaaatattctcacttagacaccaggctatgactgttcagagtgcagcagagactgcttttcgtccttctgttctcactcaggtccaggaattatgtggggttttccatttaggccttctgcttttcaaggctcataaaagcagatta

SEQ ID NO: 23358 - DNA, 150 bp, Homo sapiens
aaaatggcacactgattatctttaacatgattgaggagcaagcactcctaagatgagaaaaccaggagaatgaataaagtgagttttagaccataaaatcggctttctagaaggggcacacttgttcttagtgctcaggaagatggatgg

SEQ ID NO: 23359 - DNA, 283 bp, Homo sapiens
gacacctgctcttagactgaatcaagtaattgagtcatcatttcagttcaggagcagacatgtgatggcagtagactgcttaacccaagatcaacaaaacaagaataactagttacctcagactaaatggactaaataaatacactgatttaattatggtcaatggtctgttcttcatggatatttaaaaagtggctcacgcctgtaatcccagcactttgggaggccaaggtgggtcaggagttcgagaccagctttgtcaacacggtgaaatcctgtttct

SEQ ID NO: 23360 - DNA, 565 bp, Homo sapiens
gcgggaggaagaggctgggggctgaggtgtgctggggtgggtaggagaccggctgagcccagcacggagccgcttcctggtagccctggcggcatcacccttgggtcgggttccagagcccgggggtcctttcagctttccgttccttttccttatacttcgtccctctctccagctagagaggggcaggctctggggtctgggtacttttgttttggagccatttaacttgagttataataacatgcttttctgattataaaattaatgcatggctaccataaacaatttggaaaagacagaaaacaagttaacacgttaaaatctcaatcctgtctggtgaggactgcagtgaagcccagctggccaccccttccggggcctctgttctccccagggccttgcagcctctctgggcttggcattgctatggctaaagtgtgaaagggtcatgcaaggctgtcagccctgcgtcccccacgtgtgactgcatggggtcccacccaaatcggagtaatatacccactcagcctcacccctgctctgctggccccagggaggaaat

SEQ ID NO: 23361 - DNA, 177 bp, Homo sapiens
tcgctaaacctaaatatagattaggaagacagaaagttttctagatatgaaatgaagaaagatacaacatgatccaaatagagctacccttcagattttaatgaaaggtttagagagaaaaaaatagtgttcttcaagcttaatgtgaaaacaaatattaccttcaagtggtgtctt

SEQ ID NO: 23362 - DNA, 990 bp, Homo sapiens
cgagactgtgtctaaaaaaaaaaaaacaaaaatggcatttttagtttttaataacggggacaaagcacaggaagcagaaagaggagcaagaaggacctcccacaaggtgcagctcttggctgcagccttaagctcacctcctacatagagtttctttcctggctcttggagtgaagaagggaagctgaaatgtgagaagcccagagctggtacgctcctagacggcgtgttttgggcatgaatcagtgtgcacactgtaaggaaactggtcattggaagagggattgcccagtcttcctccaaagggagctgttaggtccagggccgtgactatgacaaatgtcatgctcagggttagggtgcagcccatgatgaggtctgagaggagtggatggatagatgaatagctgaaagaacattcggggcggtgtagacaggtgaaatgtagttttattcagcagctctctcatcagcagttctctcacactagctcttttatactgttcgcctttatcttggctgtctgctctgactctggaccctctcagcagctagctcccactcacagctgcacaactggtctgcaaggccagctctaagatcagtagcttaacctttctctctgggcacaagctgagccatgtcctggctcccctctatccacctgtcagacagtcattctcccttacaggggtcagtagcttcactctctttctgagcaccagtgcctgcacaagagcgatgctgagccatgttgagtccccgtgcacagtgtcagcagggcagttattccttttacagacagtagtggtgtagagccaagtatgagcttacacaaacaggttatataacaagtggaggtgagtgcctgtgcagcagtctcactgagtcatgcaggcctggatatctgcctcggctattccttgaccaaagcacatccatgtaccttacagcagccatcccgtctaggagcgtaatcggtaccgagcc

SEQ ID NO: 23363 - DNA, 878 bp, Homo sapiens
cgtgactatgacaaatgtcatgctcagggttagggtgcagcccatgatgaggtctgagaggagtggatggatagatgaatagctgaaagaacattcggggcggtgtagacaggtgaaatgtagttttattcagcagctctctcatcagcagttctctcacactagctcttttatactgttcgcctttatcttggctgtctgctctgactctggaccctctcagcagctagctcccactcacagctgcacaactggtctgcaaggccagctctaagatcagtagcttaacctttctctctgggcacaagctgagccatgtcctggctcccctctatccacctgtcagacagtcattctcccttacaggggtcagtagcttcactctctttctgagcaccagtgcctgcacaagagcgatgctgagccatgttgagtccccgtgcacagtgtcagcagggcagttattccttttacagacagtagtggtgtagagccaagtatgagcttacacaaacaggttatataacaagtggaggtgagtgcctgtgcagcagtctcactgagtcatgcaggcctggatatctgcctcggctattccttgaccaaagcacatccatgtaccttacagcagccatctgcacccaagccagatgccaaaataaccagggaagcccaagagtgacggggcgcaagaccttccgctacacctcccgtcggacaactagccatatcttctgagaagcctcagataacccttgacatgacaggtaataatattaacttccttctagaatgcttactctgttttgacccattataatgggcctctgtcatcccaaaactctatggtcaaggggatagacaggcccatagatgcc

SEQ ID NO: 23364 - DNA, 2401 bp, Homo sapiens
  misc_feature (2211)..(2211): n is a, c, g, or t
  misc_feature (2220)..(2220): n is a, c, g, or t
  misc_feature (2222)..(2222): n is a, c, g, or t
  misc_feature (2227)..(2227): n is a, c, g, or t
  misc_feature (2234)..(2234): n is a, c, g, or t
  misc_feature (2236)..(2236): n is a, c, g, or t
  misc_feature (2247)..(2247): n is a, c, g, or t
  misc_feature (2253)..(2253): n is a, c, g, or t
  misc_feature (2259)..(2260): n is a, c, g, or t
  misc_feature (2263)..(2263): n is a, c, g, or t
  misc_feature (2271)..(2271): n is a, c, g, or t
  misc_feature (2283)..(2283): n is a, c, g, or t
  misc_feature (2288)..(2288): n is a, c, g, or t
  misc_feature (2295)..(2295): n is a, c, g, or t
  misc_feature (2301)..(2301): n is a, c, g, or t
  misc_feature (2309)..(2309): n is a, c, g, or t
  misc_feature (2315)..(2316): n is a, c, g, or t
  misc_feature (2322)..(2323): n is a, c, g, or t
  misc_feature (2331)..(2331): n is a, c, g, or t
  misc_feature (2345)..(2345): n is a, c, g, or t
  misc_feature (2347)..(2347): n is a, c, g, or t
  misc_feature (2353)..(2353): n is a, c, g, or t
  misc_feature (2369)..(2369): n is a, c, g, or t
ttttttccaaccactttttatctataccccaatgtcttacattccataaaacatcatgttttgaattccagtataactttatcgttaaacatgtttctttgcagaagcatgtataagttagggtccacaagattatttgcataagctaatttacaaaaaaaattatataatcactgacatgaaagcatgtctgggcagccatgggagctcatatgaggcgtccagttcagtcgccttttaaaaatgatatttgcattagctgggcatggtagcatgtgtctgtagtcccagctactcaggggactgaagtgagaggatgcaccagagccccagaagtcaaggctgcagtgagccatgatcacatcactgcaccagcctgggcaacaggagtgaggccttgtctcagtcagtcaatcaatcaatcaataatggtatttggtcttctgaaagaaagtgacattttagctgggccttaaaggggatggtaagattctagtaaagtagagatgaaagcggaggagctttccagctacaaagagtaatctggagatcaggaagagtaagaccctgtctgtccctgaatctaaggaaaaagaaaaaaaaattttgagaaaaatctgaggaacagcaagtagtcctctttaaccagaacaatagaagatcgtaaaagagcagtagagaaaaacatgataggccttttatgtaggtggaggtcaatgacagagtaaggtagtaacatgtgcattgtctttagagatcttctggcctaggttcaaatgctggatcaaataaatatgtactagctgtttcaccataagctcattaccagagttcaaccacccatttctttatattcccacaggccaattttactaaagaattgcaatgaagagttaagcaatttatctgataaatatttttagatttatatttcattcataactagcagcagtattttgaaacagaatacaaaatttatatgaatttttaaagtaatacagtcatcaaagaaattttctatttctagaagactgcttaggcatactcttttgtgatgtgttcattctcctttggcctggaaaagtttgagaactgttgctcattgggatgttgtaaggactaaataagataaactatgtaaacacttaaccatgcttgacccaagatcatcttaaataattgttcttcccttccctgtcaataaatatttattttctccctttccaaggagacacaaagtatggtcttgtgaccaacagcatctgtatcttatgtggactgctgcactggagtattttgagcagtcagaagactgtaaaaggagtgtgtttatgtttgtgtggtgtatgcttgcaaggagtttgatggaaggatgctgaagaggaattttgccatgagccctggtgctggcaaatactaccagaaaacatctccccttcaacagcttggatctcatcactccttaatgtaactaataccatgaattgctcatataaattcagtaacatgcacctactacaggtaaagcagtattcttaaccctgcaagggcaggagcagtgggtgtagtatgagtcaggagccctgcactcaaaggtattatggtctgttagggtataggaaatgggcctgagataagtatactaataaccccaataaattttaagcaccataagaggggtacagagctttgtgagatttaaagatgggacatttcatttaaagatgagtaaggtttcagcatgctgagatggtaagacttaaggaatagcatgagcagaggcactgaggttgtgaatgtggcaacacagccaaggaacagtcagtagtctagtgtgactaaaacaggactttaaagaagtgatggaaaatcaggctggaactgtaggttaaagagcctttaaagccaaggtaaagagttagtactcacgtaggtgatagggaacattggagatttttgagtggggaataatatggctggagctgtatttaaaaagataatacagcctggggtgatttgaagtcagcatagacaagtagtagggaaactaaggagaaagaagtgatctagagaggaagttataatgacttggaggcagggtggctgtgctgagaggagaaagtgggcatctcctgtgagatggtctaggaataccggaaccttttgaaaggtagattctgtagacacagtcatctacacagctgctcatgntgaaacccntntctantaaaaananaaaaattagcngggcanggtggnncangcctgtantcccagctactngggangctgagncagganaatcgctngaaccnnggaggnngaggttgnagtgagccgagatngnaccatngcactccagcctgggngacagagtgagactccgtctcaaaaaaaaaaa

SEQ ID NO: 23365 - DNA, 1148 bp, Homo sapiens
aattcttgtgcctcagcctcccgaatagctgggactacaggcacacgccactacgcccagctagttttttgtattttagtagaaacagggtttcaccgtgttgcccagggtggtctcgaattcctgaactcaggagatcctcccgtctcagcctcccaaagtgctgggattacaggcgtgagccactgcgcccagcctattcataattctttatagggcttattaccaaagaacagaaggctttttaaaagtcatctattgtttagtgattattaaaaataagtcttctgatgaggattacatgtatctaactactgtaaaatagatttcatgtcagtgctacataatcagtatctaggttcagtacctgaaagttcatttgaccatgcctttttatgattttaatcctaccatagtcatttttgtcctatttgccgttcacggaaaactttatcagaatataagtaaatgatcttgaaaacattaatatttatcttttttgtacatactatacattttcttaccatacatattatatgttctctgacctctggaacattaactcacaaattgtttccgttttcctttacctagattgcatgtagatgtcaaaactgtgcaagcaccaaggaatgctaaatgttgaggaatggtcatagacttattaacccacatatactgagattgtttatgagagccatttggtctgagtaacatgtatagggtatgactaaagtaggtggtaaggccaaaaagagtaagtgaggtaaggtgggggtgggttagtggatttaaaaaagtaatttgtagctctaccttcaggaaatgtcagtgattcaacattcaaatctacctaatcaactgtatctttactacctatataagttttgtatgtgagagaatgattctcattttgtatatgtgcatattcagtcttctgattcataggtcctaaatgcttttgtatttatttaggcttattttgaagcccagaatatggtcttttgtggtaaatgttccatttgagctcttgaaaagaatgtatattctggtggttttggacagattgtgctgtaactatcaataaagtcaagttaattaataaattgtgctgtaactatcaataaagtcaagttaattaataatgt

SEQ ID NO: 23366 - DNA, 551 bp, Homo sapiens
  misc_feature (543)..(543): n is a, c, g, or t
gcctcgccaatacagtgaaaccccgtctctactaaaaatacaaaaattagccaggtgtggtggcacgggcccataatcccagctactcaggaggctgaggctggaggattgcttggcgccgggagtttgagactgtagtatgctttgattgcacctgtgaatagccactgtactccagcctgggcaatatagtgagaccctgtcctttaaaacaaaaaagtatagcgcacataataagtgtgtagtaaagtcgtgctgaaaagggtcctcgcagaaccacagttcacttgttgacagacgtcaggactggcagtcttttttttttgagttggcgtctcgctctgtcccccaggctagagtgcagtggcgtgatctcagctcactgcccgctccacctcccgtattcacgccattctcctgcctcagcctctttagtagctgggacttcaggcacctgccaccacgcctggctaattttttgtatttttagtagagacagggtttcaccatgttagccagggtggtttcgatctcctgacatcngtgatcca

SEQ ID NO: 23367 - DNA, 413 bp, Homo sapiens
aaaagtggtatctcaaaaatcactcggacaaaaatgctctgtttactatacagtgtggggactagtggatagctgtttggaaaaagataaaggtagatccatttctttcatcacacccaagaataaactccaaatggatcagagatctaaatataaaaagtaaaactatgcaagtaccaaaaagaaaaaaaacaccccatgagtgaattcttctgaaaccagtgtataaggaaaagctttctaagtgtgactacggtcccatacacaataaaagactgataaatttgactacataataaaaattttacatggcctgaaaaataccactaagtcaaagacagctgacaaactgggagaaaatagtcacaacatatatcagataaaaggttaactcctttatttgagaactttct

SEQ ID NO: 23368 - DNA, 445 bp, Homo sapiens
tgagacgagtctcattctgtcacccacgctggagtgcagtggtgcgatctcagctcactgcaacctctgcctcccaggttcaagcaattcttgtgcctcagcctcccgagtagcttggattacaggtatgcaccaccacgcccagctaatttttgtatttttagtagagatgggagttcaccatgttggcctcgctggccttgaactcctgacttcaggcgatccgcctgcctcagcctcccaaagtgctgggattacaggcgtgagccaccgcatctggcctcatattcttttttgtactgcatggtgtcccattttgcagaataccaaactatgcaaccacatattaacaggtatttaggttttttcagtcttttgctgttacaaactgctgcagtgaacaagcttgtttgtaggtcatttcttaggagtgctaggatacagg

SEQ ID NO: 23369 - DNA, 288 bp, Homo sapiens
tgctaagacccaattccattccctgtgtctcctctttcctaatcctaaaatgcagggtgcatttgccaagttacatttggggtcccttcatgttcccaagtcttttgaagcataagactacttttggggtacactgcgtattgttctgggccattgcctccccccgtttttcctgccactgtgtgctgggtgagtacatacactatacaccccataccaacccacacatgtccccctgttaagcttgatttgcgtacttggcaatttatacttcctgcctttcaaccc

SEQ ID NO: 23370 - DNA, 784 bp, Homo sapiens
aggttccaatttgtccacatccttgccaacacttattttcctttttatagtagccatcctggtgggtgtgaagtggtatctcattgtggttttgatgtacttctctaatgactgatgttgagcatcttctcatgtatttgttggccaatcatataacttctttggagaaatgcctattcaagtcctttgcccctctttgattcagttgtttgtctttttgttgttgagttagaagagttctttataaattctaggtactagacctttgtcagatatgatttgcaaatatattttcttccattcagtaggggtaaatagaatattgagagactttttatatagtaatataaaaaagcatgaagggatgtgttttgcaaaaagtaagattacacagtattatacaactatgttatacactttggctcttggttttctctctaaggaataactcatgaagaacattccatgtgttaaggtatacctctaattctttctaatgcctacataatatcctattgcatgggtgtgctattcaccccctacttatggttattcattctgtttctagtttttggccactgccaacaatgctgcagttaacatccttgtacaatatatgtttatgtattttaaatttcagtttaaaaggatttattctgaggagtagtatttctggtttaaagagtatatgtgtttttaattttaatagatattgctcaattgttttacattaataacttacatttttactagcaatatatgaaaacattctttctgcactgca

SEQ ID NO: 23371 - DNA, 5363 bp, Homo sapiens
gtcaaagaaacccaccttccaaaggtggtacttgtggatctggtgcccggtgatagtgattatgaagtaatttcagatgatattccccttcagttagtgactgacccacctcagttgactgtcaaagatatcagctgtataaatacagaatgtattgatatagaagataagagctgtgacttttttggttctgaagtcagatgtaattgtaaagcctctactccctcaatgacaaaccaatgcaaagagactttcaaaataataaaccggaagaaggactatattattctgggagagccaagttgtcaatcttgtggttctgaaatgaattttaatgttgatgcctctgatcagtccatgacttacgagtcacaaggacctgatgagaaaatggtgaaatatattgattcagaagataagagctgtggatataatggttctaaaggaaaatttaatttggaagacacttctcatcgaacgactcaccgactgcagaaagctcacaaagaagccagtcttcggaaggatccaagaaatgctggcctaaaaggtaagagctgtcagtctagtgcttctgcagtggattttggtgcctcttccaagtcagcgctccatcgaagggctgataaaaaaaaacgttcgaagctaaaacatagagatctagaagtgagctgtgaaccggatggttttgagatgaattttcagtgtgctccccctcttccatctgatactgatcagcctcaagaaactgttaagaaaagacacccttgtaagaaggtatcttctgacttgaaagaaaagaaccatgattcccagtcaagctctgttctcaaggttgattctgtaaggaacctgaaaaaagcaaaggatgtcatagaggataatcctgatgaaccagttcttgaagccttgcctcatgtacctccttcatttgtggggaaaacatggtctcagataatgagagaagatgacataaaaattaatgctctggtgaaggagtttagggaaggtcgtttccactgttactttgatgatgactgtgagaccaaaaaagtttcttcgaaggggaaaaaaaaggttacctgggctgacttgcaaggtaaggaggacactgcaccaactcaagctgtgtcagagagtgatgatattgtctgtggtatttcagatattgatgacttgtcagtggccttagataaaccatgccatcgtcatcctccagcagagaggcctcctaagcaaaaggggcgtgtggcttctcaatgccagacagcgaaaatcagccatagtactcagaccagttgtaagaattacccagtgatgaaaagaaaaataattagacaagaggaagacccaccaaaaagtaagtgttcacgtttacaggatgacagaaaaaccaaaaagaaagtcaaaattgggacagttgaatttcctgcatcatgtactaaagttttgaagcctatgcaacccaaagccttagtctgtgttctttcttctttaaatattaaactgaaagagggtgaaggccttcctttccctaaaatgaggcaccatagttgggataatgatattcggtttatatgcaaatataaacggaatatctttgattattatgagcccttgattaagcaaattgtaattagtcctcccctgagtgtaatagtaccagagtttgagaggcgtaactgggttaaaattcattttaataggagcaaccaaaactccagtgcaggagataatgatgctgatggacaaggctctgcttcagcgcctttaatggcagtgccggcaagatatggatttaattcacatcagggaaccagtgactcttctctgtttctggaagaatcaaaggttctgcatgctcgtgagcttccaaagaaaagaaatttccagctaacatttttaaatcatgatgttgtcaaaatctctccaaaatcagttagaaataagcttttggaaagtcaaagtaaaaagaaaattcatggaaagagggtgacaactagtagtaataagctaggttttcccaaaaaggtttataaaccaattattctccagcaaaaacccagaaaagcttcagagaaacagtcaatttggattcggaccaaaccaagtgatatcattagaaagtatatttcgaaatactctgtctttttacgtcatagatatcagtccaggagcgcttttcttggaaggtatctgaagaagaaaaaatctgttgtcagtaggctaaagaaggcgaagagaacagctaaagtgcttttgaactcttcagttccaccagctggtgccgaagagctgtcaagcgctatggcaaatcctcctccaaagcgacctgtgcgggcttcttgccgcgttgcaagaaggaggaagaagactgatgaaagctaccatggccgacagaaaggtccttctacacctgtgagagcatatgatctgagaagctcatcttgtttacaacaacgtgagagaatgatgactcggctagcaaacaaactgagaggtaatgaggtaaaatagaagttggttttgtgttcaggctagttgaggattcagtacttcagttgaaatatatttggtactttgtgcacacagctttcccagctttggtgagaaaactaatcttgaactattttgctataaatattatttttcagaatttttatattcatttaaaattagtgtttagagtcctttcattttaagattcagaaacagcctttgtccaacattttctgtagaagaacttcatcttaatttatgtcacaaaataatttagcaccgtatatagaattttgttcctcaaatcatatccctcttattttttatgattatctctctcatgccagcaaatttaacattgtgagaatgaatatagcaaacttattaaaaagaaggaattataatgaattatgtcaacttttgaatggggttgacttaaatgaatacaaacaaaatataagttttctttctttttaaagcattccagaaaatgagattccataatctttaatacagtttttaaaaactggtgattttttttatgcatagcacaaactcctcctgcttcatttaaattggatctgcaagtctctaacttttatcatttggacacatgcacacatacagtctctaggttttttgggttagccttattagatcttaaaggggaaaataattttgcccatgtgtttaggcattcccccccttttttttaaccacctttactctcttctacatgaagagttggtggcttaatatgaaaatccaggttattttgtggccttatcccctaaaaatattttaggcattaccatatcagtttttatttttatgtttatttattattattattttttgagacagagtctcactgtcttgcccaggctggagtgcagtggcctgaacttagctcaccgcaacctccacctcccgggttcaagcaattctcctgcctaagcctctcgagtagctgggactacaggcgtgcgccaccatgcccggctaatttttgtatttttagtagagttgggggtttcactatgttggccaggctggtctcaaactcctgaccttgtggtccacccgcctcagcctcccaaagtgctgggattacagtcatgagccaccatgcccagcctaccatatcagtttttaataacttgaactgaaattattggcttggtaatatttgggcaggccattaattctcattagaaaattacttaatatttcaaaaaattgaataaaactggtaatctttgtggaggcccattttgcaagtggaaacctgtatttatacattagtttgtctttaactatttgttaacagattttaacagttcaaatgaaagatgttaacgagatgcagtttgagtctgggatactcagaatagatccagaacctttattcagggacactggttgagttggtacagatgcattcagttgtcattcattcgtgttaagccaagatcctggatcttctatcattaatgttaagaggaaacatgaattacaactatattgtatgactgccatattttattgaaactaaggtcaatgttgaaccatatcttgatttcagaatttaaaatgtgttaccttagaaataatgaaatatagtgtaacagttggtttctaaatgtggttttatttcaggggccattatttaacctgtgtgtatgctatgatggagttcttttgtgatttctttacttctaaatttaaatagtaattatgtttaaaaacaaatgtttttgtctttagttgcaaagcagcatatatctcatttccttcaaccttgcctcctcatacacaaatatattttcatttcttaaaagatcactgggccagtagttcaaaataatcctccaattttaatttaggaacaaagctttgtcctactgactaggaagtaaacaaacagctgatatataagatatttgtgggtattggtgtcttttttccctatggaatagacacatagttcccttaaatattattaatagacattctacagtctttcagtgtaagtttaaaagcaagagatcaaatgaaaatgtgtactatgtacctatgatgtgtcatatcgtgattacatcatgcagagagaacagttcctgtaattcaagtaattaaaatttcaagttgtaaaaatgttaccattttcacattggaagcccttctaagtaccattttcattgggggcagggagaaggtttatatttaaattttatattaccagacataaaagtacagtgcagtactgatgattttgtttaaagtttttgaaatgttttgtttactaagttcttgtaatcattattttagacaagcttgaaaacttgaaattgttgaaacttataatttaaattaaattggaaattactttcagaatttggtagtatacaagatgtgcccctttgtctaaataaatgttggcttaatttgcagaatagataaaacaattgatgtttttgtgtgttcaagaatgcattaaattcttttaatagtaaaaagtcaaattacgaccataatgagtattttaatcttgttcttgttcagtattttgcgtagatttttattgtaattgtcctgagttctacagtatgtgaacaatatcgtgtgaagtgtgtttttgcatttgtgcatttaaattatttatgtaactagggctgtgagtaacactttttttttttttttttggttaaagaaaagctatatttaaatattcaaataattatatatttccatgtaaaactaatgtgaagactaatgtattttttatattgcagtgtaaaagctaaacttgtttttgatgttatcaagataaaatttattaaaccttgaaatttgtctgttct

SEQ ID NO: 23372 - DNA, 141 bp, Homo sapiens
aattcaagcttctaacgatgtacggggacatgtaaaactaatgtgaagactaatgtattttttatattgcagtgtaaaagctaaacttgtttttgatgttatcaagataaaatttattaaaccttgaaatttgtctgttct

SEQ ID NO: 23373 - DNA, 5311 bp, Homo sapiens
gtcaaagaaacccaccttccaaaggtggtacttgtggatctggtgcccggtgatagtgattatgaagtaatttcagatgatattccccttcagttagtgactgacccacctcagttgactgtcaaagatatcagctgtataaatacagaatgtattgatatagaagataagagctgtgacttttttggttctgaagtcagatgtaattgtaaagcctctactccctcaatgacaaaccaatgcaaagagactttcaaaataataaaccggaagaaggactatattattctgggagagccaagttgtcaatcttgtggttctgaaatgaattttaatgttgatgcctctgatcagtccatgacttacgagtcacaaggacctgatgagaaaatggtgaaatatattgattcagaagataagagctgtggatataatggttctaaaggaaaatttaatttggaagacacttctcatcgaacgactcaccgactgcagaaagctcacaaagaagccagtcttcggaaggatccaagaaatgctggcctaaaaggtaagagctgtcagtctagtgcttctgcagtggattttggtgcctcttccaagtcagcgctccatcgaagggctgataaaaaaaaacgttcgaagctaaaacatagagatctagaagtgagctgtgaaccggatggttttgagatgaattttcagtgtgctccccctcttccatctgatactgatcagcctcaagaaactgttaagaaaagacacccttgtaagaaggtatcttctgacttgaaagaaaagaaccatgattcccagtcaagctctgttctcaaggttgattctgtaaggaacctgaaaaaagcaaaggatgtcatagaggataatcctgatgaaccagttcttgaagccttgcctcatgtacctccttcatttgtggggaaaacatggtctcagataatgagagaagatgacataaaaattaatgctctggtgaaggagtttagggaaggtcgtttccactgttactttgatgatgactgtgagaccaaaaaagtttcttcgaaggggaaaaaaaaggttacctgggctgacttgcaaggtaaggaggacactgcaccaactcaagctgtgtcagagagtgatgatattgtctgtggtatttcagatattgatgacttgtcagtggccttagataaaccatgccatcgtcatcctccagcagagaggcctcctaagcaaaaggggcgtgtggcttctcaatgccagacagcgaaaatcagccatagtactcagaccagttgtaagaattacccagtgatgaaaagaaaaataattagacaagaggaagacccaccaaaaagtaagtgttcacgtttacaggatgacagaaaaaccaaaaagaaagtcaaaattgggacagttgaatttcctgcatcatgtactaaagttttgaagcctatgcaacccaaagccttagtctgtgttctttcttctttaaatattaaactgaaagagggtgaaggccttcctttccctaaaatgaggcaccatagttgggataatgatattcggtttatatgcaaatataaacggaatatctttgattattatgagcccttgattaagcaaattgtaattagtcctcccctgagtgtaatagtaccagagtttgagaggcgtaactgggttaaaattcattttaataggagcaaccaaaactccagtgcaggagataatgatgctgatggacaaggctctgcttcagcgcctttaatggcagtgccggcaagatatggatttaattcacatcagggaaccagtgactcttctctgtttctggaagaatcaaaggttctgcatgctcgtgagcttccaaagaaaagaaatttccagctaacatttttaaatcatgatgttgtcaaaatctctccaaaatcagttagaaataagcttttggaaagtcaaagtaaaaagaaaattcatggaaagagggtgacaactagtagtaataagctaggttttcccaaaaaggtttataaaccaattattctccagcaaaaacccagaaaagcttcagagaaacagtcaatttggattcggaccaaaccaagtgatatcattagaaagtatatttcgaaatactctgtctttttacgtcatagatatcagtccaggagcgcttttcttggaaggtatctgaagaagaaaaaatctgttgtcagtaggctaaagaaggcgaagagaacagctaaagtgcttttgaactcttcagttccaccagctggtgccgaagagctgtcaagcgctatggcaaatcctcctccaaagcgacctgtgcgggcttcttgccgcgttgcaagaaggaggaagaagactgatgaaagctaccatggccgacagaaaggtccttctacacctgtgagagcatatgatctgagaagctcatcttgtttacaacaacgtgagagaatgatgactcggctagcaaacaaactgagaggtaatgaggtaaaatagaagttggttttgtgttcaggctagttgaggattcagtacttcagttgaaatatatttggtactttgtgcacacagctttcccagctttggtgagaaaactaatcttgaactattttgctataaatattatttttcagaatttttatattcatttaaaattagtgtttagagtcctttcattttaagattcagaaacagcctttgtccaacattttctgtagaagaacttcatcttaatttatgtcacaaaataatttagcaccgtatatagaattttgttcctcaaatcatatccctcttattttttatgattatctctctcatgccagcaaatttaacattgtgagaatgaatatagcaaacttattaaaaagaaggaattataatgaattatgtcaacttttgaatggggttgacttaaatgaatacaaacaaaatataagttttctttctttttaaagcattccagaaaatgagattccataatctttaatacagtttttaaaaactggtgattttttttatgcatagcacaaactcctcctgcttcatttaaattggatctgcaagtctctaacttttatcatttggacacatgcacacatacagtctctaggttttttgggttagccttattagatcttaaaggggaaaataattttgcccatgtgtttaggcattcccccccttttttttaaccacctttactctcttctacatgaagagttggtggcttaatatgaaaatccaggttattttgtggccttatcccctaaaaatattttaggcattaccatatcagtttttatttttatgtttatttattattattattttttgagacagagtctcactgtcttgcccaggctggagtgcagtggcctgaacttagctcaccgcaacctccacctcccgggttcaagcaattctcctgcctaagcctctcgagtagctgggactacaggcgtgcgccaccatgcccggctaatttttgtatttttagtagagttgggggtttcactatgttggccaggctggtctcaaactcctgaccttgtggtccacccgcctcagcctcccaaagtgctgggattacagtcatgagccaccatgcccagcctaccatatcagtttttaataacttgaactgaaattattggcttggtaatatttgggcaggccattaattctcattagaaaattacttaatatttcaaaaaattgaataaaactggtaatctttgtggaggcccattttgcaagtggaaacctgtatttatacattagtttgtctttaactatttgttaacagattttaacagttcaaatgaaagatgttaacgagatgcagtttgagtctgggatactcagaatagatccagaacctttattcagggacactggttgagttggtacagatgcattcagttgtcattcattcgtgttaagccaagatcctggatcttctatcattaatgttaagaggaaacatgaattacaactatattgtatgactgccatattttattgaaactaaggtcaatgttgaaccatatcttgatttcagaatttaaaatgtgttaccttagaaataatgaaatatagtgtaacagttggtttctaaatgtggttttatttcaggggccattatttaacctgtgtgtatgctatgatggagttcttttgtgatttctttacttctaaatttaaatagtaattatgtttaaaaacaaatgtttttgtctttagttgcaaagcagcatatatctcatttccttcaaccttgcctcctcatacacaaatatattttcatttcttaaaagatcactgggccagtagttcgaagtaaacaaacagctgatatataagatatttgtgggtattggtgtcttttttccctatggaatagacacatagttcccttaaatattattaatagacattctacagtctttcagtgtaagtttaaaagcaagagatcaaatgaaaatgtgtactatgtacctatgatgtgtcatatcgtgattacatcatgcagagagaacagttcctgtaattcaagtaattaaaatttcaagttgtaaaaatgttaccattttcacattggaagcccttctaagtaccattttcattgggggcagggagaaggtttatatttaaattttatattaccagacataaaagtacagtgcagtactgatgattttgtttaaagtttttgaaatgttttgtttactaagttcttgtaatcattattttagacaagcttgaaaacttgaaattgttgaaacttataatttaaattaaattggaaattactttcagaatttggtagtatacaagatgtgcccctttgtctaaataaatgttggcttaatttgcagaatagataaaacaattgatgtttttgtgtgttcaagaatgcattaaattcttttaatagtaaaaagtcaaattacgaccataatgagtattttaatcttgttcttgttcagtattttgcgtagatttttattgtaattgtcctgagttctacagtatgtgaacaatatcgtgtgaagtgtgtttttgcatttgtgcatttaaattatttatgtaactagggctgtgagtaacactttttttttttttttttggttaaagaaaagctatatttaaatattcaaataattatatatttccatgtaaaactaatgtgaagactaatgtattttttatattgcagtgtaaaagctaaacttgtttttgatgttatcaagataaaatttattaaaccttgaaatttgtctgttct

SEQ ID NO: 23374 - DNA, 619 bp, Homo sapiens
tggggatctgcttccaagttcacttatgttattggcaggccttgcttccttgccacatgtgtctctcaacatggctgccttccagcatgacatttggcttatcccaggttgtgagtgatccaggagagagcaagagaggagggtgcatgccaagatggaagccatagtctttttataacctaatctcagaagtgacatcttattacttctgtctcattaagtttgtaagaaacaagtcacccagtctaggggaggcagttacacaagtgtgtgactaccatgaggtagtgatcattgccaccttagaggctacctactataagcaaactaatataatatttgtggtattttacattcttcaatttacattgccatgtacttagcagttggttcctatttattatgccttaagagctgcttgttatctccctttctcactattcaacaagatacttgaatcaattttatctttgcttctttcccctctgcccccatctaaatgttcagtgctttggaatgctgaggtgggaagatcacttgagcccaggagtttgaggctgcggtgagctacaattgcaccactgctctctagctagggtgacggcaaggccccatcatt

SEQ ID NO: 23375 - DNA, 285 bp, Homo sapiens
agggggctgaggtgggaggattgcttgagctcaggagttcaaggctgcagtgagttatgattgtgccgttgcattctagcctgagcaacctgtctcaaaaaaatttttttaatttaaaaaataaattagtcgagcatgatgtcacatgcctgtagtcctagctacccaggagtctgaggtgggaggatctcttgagtccaggagtttgaggctgcagtgaactatgatcatgccacggcactgaacttgggtgacagagtgagaccctgtcccaaaaaaaaaaaa

SEQ ID NO: 23376 - DNA, 339 bp, Homo sapiens
gtcttctcttaggaactcctagtcttgggaaaaaggaatggggaagggctgtaatgtgaagttaaaaaaaagtgctgaggccgaacacatctgggccctcactgcagccctattgcacacacactgcatcacctcgaacaagttattcaccctctctgaattcatctatttgcccataaaaatagagatgatccttttatatgttggctaccacttattatgtgcagcatgcttgttattgtactaagttactcattttttagtttttcatataactcatatttttgttgatttttattttaaaattccaaacgaattaattaaactattttccaaaat

SEQ ID NO: 23377 - DNA, 432 bp, Homo sapiens
tctcactctgtcacccaggctgagtgcagtggcacgatcacagctcactgtagccttgaactcctgagcttaagcagtgccccaccttagtctccaagtagctgggataaaggcacacgctgctattcctggctcatttttaaatttttaaagtagagactcccgcttcagcctcccaaagtgctaggatttgtaattttcaatcttttgagatatgagaaaatgaaaaatagttttctactagggcacataactcttcatgtaagagtttaggtgtctgttacacattgtggatattacttagtcctttctggttctgttaaaactaatttccttcagaaaacacagtagtggccaggcacagtggctcatacctgtaattccagcactttgggaggctaaggcgagtggattgcttgagcccaggggttc

SEQ ID NO: 23378 - DNA, 328 bp, Homo sapiens
ctgggagacagagcgagactccgtctcaaaaaaaaaaaaaaaaattatagagttggggtcttgctacattgccaagactggtcttgaactcctggggtcaagcatcctcctgtcttggcctcccaaagtgttgggattagaagcatgagccgctgtgcccagcctgacggggccttttagtgggaggagttgccattacactacgtccagtaagctccagactttcggaaaagattggtggacgggaatgctgtcatggatgggatcttgccaagaaccatcacgtgttaatttagttgcttaaacaaaaggtgttctgtttcttaac

SEQ ID NO: 23379 - DNA, 233 bp, Homo sapiens
tcaattcctcctggctcagacccctccaggactctggcactgatctctcttggtctcggatttgaggaaataaaaatagaagaggaaaaacacagaactctccaaagctttggagtggctgcagccatctggatggaggcagcatgcgcctgggctggaagagccacggtcccttgactgagtctcggtgcttctccccgtccctctcagacacggttctcatggtggacgag

SEQ ID NO: 23380 - DNA, 415 bp, Homo sapiens
taaaaataattttgtcttttttactcgcattcacccaagagtgtacgttgttgttttccagaggctatatgatactgcacatatgatattgcagcagagtacatacagaagcatataaaagaattcatttgtagggccgggcgtggtggcttatgcctgtaatctcagcactttgggaggccgaggcaggtggatcccttgaggtcaggagtatgagactagactggccaacatggtgaaaccccatctctactaaaaatacaaaaattagccaggcgtggtggtgcacccctgtaatcctagctactttggaggctgaggcccgagaatctctggaacccgggagatggaggttgcagtgagccaagattgtgccactgcactccagcctgggtgacagagtaagactctgtct

SEQ ID NO: 23381 - DNA, 152 bp, Homo sapiens
gccacacagccacccccagcgccgcccccaccagtccccgcgccgcccgaagcagcagccacagagaggctggcggctgcggccgagaggctggcggcggccactacggcggcctcctgcaaggagtcgtcgtcgtcgtcgaagcgcggccg

SEQ ID NO: 23382 - DNA, 395 bp, Homo sapiens
tagaagccatattctaggtcctgcttcaggaggatttctttatctcagattatgtgtgaatgatggagttgttttaacaagacccttctagagctgcttgaggtgatcagggggcctgagttgacaacgtcgccccccttgattgctttggaatctctaggagcagccttgggtggtattctagggcaagtacaggcaacaacccttcttctagaaacctggttgtgcccctgggcaattccaggacccctctccaccccaccaaagttaccacaccagaagtcaggaatagctccctttgcccgtgtcttgtctgcctgtgttaaagcctttgctgtgttgtatgtggctggtttccattcatcaggggcttcttgatcaattgtgatgtgtat

SEQ ID NO: 23383 - DNA, 242 bp, Homo sapiens
gtgcgtgacttgaagaacaagtgcctgatttttagtatagtcacagaattgtgtaactgtcaccataatcaatcttcagaacatattcatcaccccagcaagaaaccccatacccattagtaattgctcctttttttcaccccacccttcagcctcctctctccagcccctgggaaccctaatctacttctttgtttctgtgaacttgcctattctcaatatttcatatgaatggaataata

SEQ ID NO: 23384 - DNA, 1006 bp, Homo sapiens
gccaagtcttatgtccagaatggtatttcttaggttatttttcagagtttttatagtttaatgttttatatttaagtctttaatccttcttaagttgatttttgtatgcagagtaagctgggggcccagtttcaatcttctgcatatggctagccagtaatcccagcaccatttattaaatggggacttctttccccattgcttgtttttgtcagctttgtccaagatcagatgattgtaggtgtacagcattatttctggactctctgttatgttccatttatctgtgtgtctgtttttctactaataccatgctgttttggttactgtagctctgtagtatggtttgaggtttggtaacttgatgcctccccttttgttctttatgtttaggattgccttggctaggctcttttttggttccatatgaattttaaagtagtttctaattctgtgaagaatgtcattggtagtttgatagggatagcattgaactatttgctcaactcaacattttaggaatttatttctgctgtctagtgctcaaaacttgcagctagaattgagggaagagagagaccttcttatattgttttatattgtttgatactcagtacctgttttaagaaaaaacaacaaggaagtaaaaccaaagacaggcagcccagcgccaggcccaaaaccaggcctgggcctgcctggcctaaacccagtagttaaaaatcaactcattgcctgtaatcccagcactttgggaggccgagacgggtggatcacgaggtcaggagatcgagaccatcctggctaacacggtgaaaccccgtctctactaaaaatacaaaaattagccgggcatggtggcacgcgcctgtagtcccagctacacgggaggctgaggcaggagaatggcgtgaacccaggaggcggagcttgcagtgagtcgagatcgcgccactgcactccagcctgggcgacagagcgaaactccgtctcaaaaaaaaaaaaa

SEQ ID NO: 23385 - DNA, 644 bp, Homo sapiens
cagcctattattaatgcacatttaggttgattccttatctttgctattgtgaacagtgctgcaatggacatacacgtgcatgtgcctttatggtacaatgatttatatttccttgggatatgcattcctttgggaataatgggattgctgagttgaatggtaattctgagttctttgaggaatcaccaacctgctttccacagtggctaaactaatttacactcccaccaacagtgtatgtgttccattttctccacaaccttgccagcatctgttatttattgactttctagtaacagccattctgactggtgtgagatggtatgcacttctgtagtgattagtgatgatgagtgatttttatatgctttttaaatgcatatatgtcttcttttgaaatgtgttcatgttctttgcccactttctttttaatggggttgcttgtttttcgcttgtaaattttttgaagcttcttatagattctggatattagatctttgttggatgcatagttggcaaatattttctaccattctgtaggttgtctgttactttgttaattgtttcattttgttttgtttttgttttttgaaacaggtccagcctgggcgacagagcgaaactccgtctcaaaaaaaaaaaaa

SEQ ID NO: 23386 - DNA, 2451 bp, Homo sapiens
tgtcctttcaatttcggttctcacagactcttacttggatgtctgtaaatccggctggactttcagcttctaagaacagtccgtttctcgaggatccaggcgcaggaggacagagcaatgggtgagagaactcttcacgctgcagtgcccacaccaggttatccagaatctgaatccatcatgatggcccccatttgtctagtggaaaaccaggaagagcagctgacagtgaattcaaaggcattagagattcttgacaagatttctcagcccgtggtggtggtggccattgtagggctataccgcacaggaaaatcctatctcatgaatcgtcttgcaggaaagcgcaatggcttccctctgggctccacggtgcagtctgaaactaagggcatctggatgtggtgtgtgccccacctctctaagccaaaccacaccctggtccttctggacaccgagggcctgggcgatgtagaaaagagtaaccctaagaatgactcgtggatctttgccctggctgtgcttctaagcagcagctttgtctataacagcgtgagcaccatcaaccaccaggccctggagcagctgcactatgtgactgagctagcagagctaatcagggcaaaatcctgccccagacctgatgaagctgaggactccagcgagtttgcgagtttctttccagactttatttggactgttcgggattttaccctggagctaaagttagatggaaaccccatcacagaagatgagtacctggagaatgccttgaagctgattccaggcaagaatcccaaaattcaaaattcaaacatgcctagagagtgtatcaggcatttcttccgaaaacggaagtgctttgtctttgaccggcctacaaatgacaagcaatatttaaatcatatggacgaagtgccagaagaaaatctggaaaggcatttccttatgcaatcagacaacttctgttcttatatcttcacccatgcaaagaccaagaccctgagagagggaatcattgtcactggaaagcggctggggactctggtggtgacttatgtagatgccatcaacagtggagcagtaccttgtctggagaatgcagtgacagcactggcccagcttgagaacccagcggctgtgcagagggcagccgaccactatagccagcagatggcccagcaactgaggctccccacagacacgctccaggagctgctggacgtgcatgcagcctgtgagagggaagccattgcagtcttcatggagcactccttcaaggatgaaaaccatgaattccagaagaagcttgtggacaccatagagaaaaagaagggagactttgtgctgcagaatgaagaggcatctgccaaatattgccaggctgagcttaagcggctttcagagcacctgacagaaagcattttgagaggaattttctctgttcctggaggacacaatctctacttagaagaaaagaaacaggttgagtgggactataagctagtgcccagaaaaggagttaaggcaaacgaggtcctccagaacttcctgcagtcacaggtggttgtagaggaatccatcctgcagtcagacaaagccctcactgctggagagaaggccatagcagcggagcgggccatgaaggaagcagctgagaaggaacaggagctgctaagagaaaaacagaaggagcagcagcaaatgatggaggctcaagagagaagcttccaggaaaacatagctcaactcaagaagaagatggagagggaaagggaaaaccttctcagagagcatgaaaggctgctaaaacacaagctgaaggtacaagaagaaatgcttaaggaagaatttcaaaagaaatctgagcagttaaataaagagattaatcaactgaaagaaaaaattgaaagcactaaaaatgaacagttaaggctcttaaagatccttgacatggctagcaacataatgattgtcactctacctggggcttccaagctacttggagtagggacaaaatatcttggctcacgtatttaagagcctgaatattccaggtaagaaaatataaaatgaggtttattttattttaataacataacactgttgctcattttgtaagtataagtgttatagcagtttcattcaagaaaagtttaaaattaaaaagtgattatcaaagaatatcagggcctgacatccacaaaaaacaaacttaattttgattgaactaataatttataaacatgggaaacaagtcagaagtagtgacattattcctagaaaagatttaaggaaagcaaaaagacaactggtaagattaagaagccattaaccatttgcaatttatattatagtcacagaaataatttcagttatgactagctcttgccgattaatgagaagagagcagctccacaatttttaatttttttaacttttattttagat

SEQ ID NO: 23387 - DNA, 2253 bp, Homo sapiens
tgtcctttcaatttcggttctcacagactcttacttggatgtctgtaaatccggctggactttcagcttctaagaacagtccgtttctcgaggatccaggcgcaggaggacagagcaatgggtgagagaactcttcacgctgcagtgcccacaccaggttatccagaatctgaatccatcatgatggcccccatttgtctagtggaaaaccaggaagagcagctgacagtgaattcaaaggcattagagattcttgacaagatttctcagcccgtggtggtggtggccattgtagggctataccgcacaggaaaatcctatctcatgaatcgtcttgcaggaaagcgcaatggcttccctctgggctccacggtgcagtctgaaactaagggcatctggatgtggtgtgtgccccacctctctaagccaaaccacaccctggtccttctggacaccgagggcctgggcgatgtagaaaagagtaaccctaagaatgactcgtggatctttgccctggctgtgcttctaagcagcagctttgtctataacagcgtgagcaccatcaaccaccaggccctggagcagctgcactatgtgactgagctagcagagctaatcagggcaaaatcctgccccagacctgatgaagctgaggactccagcgagtttgcgagtttctttccagactttatttggactgttcgggattttaccctggagctaaagttagatggaaaccccatcacagaagatgagtacctggagaatgccttgaagctgattccaggcaagaatcccaaaattcaaaattcaaacatgcctagagagtgtatcaggcatttcttccgaaaacggaagtgctttgtctttgaccggcctacaaatgacaagcaatatttaaatcatatggacgaagtgccagaagaaaatctggaaaggcatttccttatgcaatcagacaacttctgttcttatatcttcacccatgcaaagaccaagaccctgagagagggaatcattgtcactggaaagcggctggggactctggtggtgacttatgtagatgccatcaacagtggagcagtaccttgtctggagaatgcagtgacagcactggcccagcttgagaacccagcggctgtgcagagggcagccgaccactatagccagcagatggcccagcaactgaggctccccacagacacgctccaggagctgctggacgtgcatgcagcctgtgagagggaagccattgcagtcttcatggagcactccttcaaggatgaaaaccatgaattccagaagaagcttgtggacaccatagagaaaaagaagggagactttgtgctgcagaatgaagaggcatctgccaaatattgccaggctgagcttaagcggctttcagagcacctgacagaaagcattttgagaggaattttctctgttcctggaggacacaatctctacttagaagaaaagaaacaggttgagtgggactataagctagtgcccagaaaaggagttaaggcaaacgaggtcctccagaacttcctgcagtcacaggtggttgtagaggaatccatcctgcagtcagacaaagccctcactgctggagagaaggccatagcagcggagcgggccatgaaggaagcagctgagaaggaacaggagctgctaagagaaaaacagaaggagcagcagcaaatgatggaggctcaagagagaagcttccaggaaaacatagctcaactcaagaagaagatggagagggaaagggaaaaccttctcagagagcatgaaaggctgctaaaacacaagctgaaggtacaagaagaaatgcttaaggaagaatttcaaaagaaatctgagcagttaaataaagagattaatcaactgaaagaaaaaattgaaagcactaaaaatgaacagttaaggctcttaaagatccttgacatggctagcaacataatgattgtcactctacctggggcttccaagctacttggagtagggacaaaatatcttggctcacgtatttaagagcctgaatattccagggtctcactttgacacccaggctggagtgcagtagcacaaacatgggtcattgtagcctcaacctcccagctacacgggaggctgaggcaggagaatggcgtgaacccaggaggcggagcttgcagtgagtcgagatcgcgccactgcactccagcctgggcgacagagcgaaactccgtctcaaaaaaaaaaaaa

SEQ ID NO: 23388 - DNA, 1846 bp, Homo sapiens
acctctgctcggtacccaggaaagatgtcccagacctgatgaagctgaggactccagcgagtttgcgagtttctttccagactttatttggactgttcgggattttaccctggagctaaagttagatggaaaccccatcacagaagatgagtacctggagaatgccttgaagctgattccaggcaagaatcccaaaattcaaaattcaaacatgcctagagagtgtatcaggcatttcttccgaaaacggaagtgctttgtctttgaccggcctacaaatgacaagcaatatttaaatcatatggacgaagtgccagaagaaaatctggaaaggcatttccttatgcaatcagacaacttctgttcttatatcttcacccatgcaaagaccaagaccctgagagagggaatcattgtcactggaaagcggctggggactctggtggtgacttatgtagatgccatcaacagtggagcagtaccttgtctggagaatgcagtgacagcactggcccagcttgagaacccagcggctgtgcagagggcagccgaccactatagccagcagatggcccagcaactgaggctccccacagacacgctccaggagctgctggacgtgcatgcagcctgtgagagggaagccattgcagtcttcatggagcactccttcaaggatgaaaaccatgaattccagaagaagcttgtggacaccatagagaaaaagaagggagactttgtgctgcagaatgaagaggcatctgccaaatattgccaggctgagcttaagcggctttcagagcacctgacagaaagcattttgagaggaattttctctgttcctggaggacacaatctctacttagaagaaaagaaacaggttgagtgggactataagctagtgcccagaaaaggagttaaggcaaacgaggtcctccagaacttcctgcagtcacaggtggttgtagaggaatccatcctgcagtcagacaaagccctcactgctggagagaaggccatagcagcggagcgggccatgaaggaagcagctgagaaggaacaggagctgctaagagaaaaacagaaggagcagcagcaaatgatggaggctcaagagagaagcttccaggaaaacatagctcaactcaagaagaagatggagagggaaagggaaaaccttctcagagagcatgaaaggctgctaaaacacaagctgaaggtacaagaagaaatgcttaaggaagaatttcaaaagaaatctgagcagttaaataaagagattaatcaactgaaagaaaaaattgaaagcactaaaaatgaacagttaaggctcttaaagatccttgacatggctagcaacataatgattgtcactctacctggggcttccaagctacttggagtagggacaaaatatcttggctcacgtatttaagagcctgaatattccaggtaagaaaatataaaatgaggtttattttattttaataacataacactgttgctcattttgtaagtataagtgttatagcagtttcattcaagaaaagtttaaaattaaaaagtgattatcaaagaatatcagggcctgacatccacaaaaaacaaacttaattttgattgaactaataatttataaacatgggaaacaagtcagaagtagtgacattattcctagaaaagatttaaggaaagcaaaaagacaactggtaagattaagaagccattaaccatttgcaatttatattatagtcacagaaataatttcagttatgactagctcttgccgattaatgagaagagagcagctccacaatttttaatttttttaacttttattttagat

SEQ ID NO: 23389 - DNA, 387 bp, Homo sapiens
aggagtctggtgtggaggaaccagcactttcaagctcctttagtttcctgtcttgataaacaggaaaatccccaacagtcaactccccacaaagtgcatgtcctttcaatttcggttctcacagactcttacttggatgtctgtaaatccggctggactttcagcttctaagaacagtccgtttctcgaggatccaggcgcaggaggacagagcaatgggtgagagaactcttcacgctgcagtgcccacaccaggtaagtttgctcttaagctttacctttcaagtatatttgggttataacaaacaacaacaaattcccaagcgcagactgcacacggggagggttggagacttcacactggcgggtgacaaaggcagtggagga

SEQ ID NO: 23390 - DNA, 475 bp, Homo sapiens
atattccttgtcccaacctgaagcttgacaaccaatgttttatacagggtcagcagtcccccgttatttgctagatgagcatggccttgctacaccagtggaaattagaattaattagaattaaacctgcattccctctcgaagggcattctttgtgctggaacaaaatttctttctacctccagtgagatgttgcttagggaatgtcacaaaaggtaaaccatgtatactcccatgattcaggtccaatcatctggaaatgttacacaaattcatcaaagcgttttctaagataatagagaaatagacacatatgcttaaacgttgaattagttaaatacaaaactctgactcctgaagaaaattggagattttcaaaagtggactatttcccttttataggtacaagaagaaatgcttaaggaagaatttcaaaagaaatctgagcagttaaataaagagattaatcaactga

SEQ ID NO: 23391 - DNA, 260 bp, Homo sapiens
agatttgtgactttattgaacaataatttcgccatcataagatgagacctttgctgcctgacaggtctttgctctttcttggttcctcaggcaaacgaggtcctccagaacttcctgcagtcacaggtggttgtagaggaatccatcctgcagtcagacaaagccctcactgctggagagaaggccatagcaggtacaggggcagggctcagctatcagagggattgggagtttcctgcaatgccttcttgctgatcaca

SEQ ID NO: 23392 - DNA, 2103 bp, Homo sapiens
tgtcctttcaatttcggttctcacagactcttacttggatgtctgtaaatccggctggactttcagcttctaagaacagtccgtttctcgaggatccaggcgcaggaggacagagcaatgggtgagagaactcttcacgctgcagtgcccacaccaggttatccagaatctgaatccatcatgatggcccccatttgtctagtggaaaaccaggaagagcagctgacagtgaattcaaaggcattagagattcttgacaagatttctcagcccgtggtggtggtggccattgtagggctataccgcacaggaaaatcctatctcatgaatcgtcttgcaggaaagcgcaatggcttccctctgggctccacggtgcagtctgaaactaagggcatctggatgtggtgtgtgccccacctctctaagccaaaccacaccctggtccttctggacaccgagggcctgggcgatgtagaaaagagtaaccctaagaatgactcgtggatctttgccctggctgtgcttctaagcagcagctttgtctataacagcgtgagcaccatcaaccaccaggccctggagcagctgcactatgtgactgagctagcagagctaatcagggcaaaatcctgccccagacctgatgaagctgaggactccagcgagtttgcgagtttctttccagactttatttggactgttcgggattttaccctggagctaaagttagatggaaaccccatcacagaagatgagtacctggagaatgccttgaagctgattccaggcaagaatcccaaaattcaaaattcaaacatgcctagagagtgtatcaggcatttcttccgaaaacggaagtgctttgtctttgaccggcctacaaatgacaagcaatatttaaatcatatggacgaagtgccagaagaaaatctggaaaggcatttccttatgcaatcagacaacttctgttcttatatcttcacccatgcaaagaccaagaccctgagagagggaatcattgtcactggaaagcggctggggactctggtggtgacttatgtagatgccatcaacagtggagcagtaccttgtctggagaatgcagtgacagcactggcccagcttgagaacccagcggctgtgcagagggcagccgaccactatagccagcagatggcccagcaactgaggctccccacagacacgctccaggagctgctggacgtgcatgcagcctgtgagagggaagccattgcagtcttcatggagcactccttcaaggatgaaaaccatgaattccagaagaagcttgtggacaccatagagaaaaagaagggagactttgtgctgcagaatgaagaggcatctgccaaatattgccaggctgagcttaagcggctttcagagcacctgacagaaagcattttgagaggaattttctctgttcctggaggacacaatctctacttagaagaaaagaaacaggttgagtgggactataagctagtgcccagaaaaggagttaaggcaaacgaggtcctccagaacttcctgcagtcacaggtggttgtagaggaatccatcctgcagtcagacaaagccctcactgctggagagaaggccatagcagcggagcgggccatgaaggaagcagctgagaaggaacaggagctgctaagagaaaaacagaaggagcagcagcaaatgatggaggctcaagagagaagcttccaggaaaacatagctcaactcaagaagaagatggagagggaaagggaaaaccttctcagagagcatgaaaggctgctaaaacacaagctgaaggtacaagaagaaatgcttaaggaagaatttcaaaagaaatctgagcagttaaataaagagattaatcaactgaaagaaaaaattgaaagcactaaaaatgaacagttaaggctcttaaagatccttgacatggctagcaacataatgattgtcactctacctggggcttccaagctacttggagtagggacaaaatatcttggctcacgtatttaagagcctgaatattccagtccagcctgggcgacagagcgaaactccgtctcaaaaaaaaaaaaa

SEQ ID NO: 23393 - DNA, 1649 bp, Homo sapiens
tgtcctttcaatttcggttctcacagactcttacttggatgtctgtaaatccggctggactttcagcttctaagaacagtccgtttctcgaggatccaggcgcaggaggacagagcaatgggtgagagaactcttcacgctgcagtgcccacaccaggttatccagaatctgaatccatcatgatggcccccatttgtctagtggaaaaccaggaagagcagctgacagtgaattcaaaggcattagagattcttgacaagatttctcagcccgtggtggtggtggccattgtagggctataccgcacaggaaaatcctatctcatgaatcgtcttgcaggaaagcgcaatggcttccctctgggctccacggtgcagtctgaaactaagggcatctggatgtggtgtgtgccccacctctctaagccaaaccacaccctggtccttctggacaccgagggcctgggcgatgtagaaaagagtaaccctaagaatgactcgtggatctttgccctggctgtgcttctaagcagcagctttgtctataacagcgtgagcaccatcaaccaccaggccctggagcagctgcactatgtgactgagctagcagagctaatcagggcaaaatcctgccccagacctgatgaagctgaggactccagcgagtttgcgagtttctttccagactttatttggactgttcgggattttaccctggagctaaagttagatggaaaccccatcacagaagatgagtacctggagaatgccttgaagctgattccaggcaagaatcccaaaattcaaaattcaaacatgcctagagagtgtatcaggcatttcttccgaaaacggaagtgctttgtctttgaccggcctacaaatgacaagcaatatttaaatcatatggacgaagtgccagaagaaaatctggaaaggcatttccttatgcaatcagacaacttctgttcttatatcttcacccatgcaaagaccaagaccctgagagagggaatcattgtcactggaaagcggctggggactctggtggtgacttatgtagatgccatcaacagtggagcagtaccttgtctggagaatgcagtgacagcactggcccagcttgagaacccagcggctgtgcagagggcagccgaccactatagccagcagatggcccagcaactgaggctccccacagacacgctccaggagctgctggacgtgcatgcagcctgtgagagggaagccattgcagtcttcatggagcactccttcaaggatgaaaaccatgaattccagaagaagcttgtggacaccatagagaaaaagaagggagactttgtgctgcagaatgaagaggcatctgccaaatattgccaggctgagcttaagcggctttcagagcacctgacagaaagcattttgagaggaattttctctgttcctggaggacacaatctctacttagaagaaaagaaacaggttgagtgggactataagctagtgcccagaaaaggagttaaggcaaacgaggtcctccagaacttcctgcagtcacaggtggttgtagaggaatccatcctgcagtcagacaaagccctcactgctggagagaaggccatagcaggtacaggggcagggctcag

SEQ ID NO: 23394 - DNA, 476 bp, Homo sapiens
cttctgatggaggtgatctgagatgagcagcctctaaaagcagcctctgcgagcctctaagagcagccgggacctgctggagaacagaacatggcctaggagcgcaacagccaagtgttcagcaccacggacagcttcgctggcctattgctggggaggccagaggtggggaggctggttgtccagcaagacagagtgccatgggagagagaaaaaaacatgggaaagatctcagagaccatctagtccagcctcctcgatttggatgggaggagacccaggacaagagagaagtgacttgtccaaggtcacacaacaagtcagtagagagccagagatgggagctgacagcctacttcctcacacctcttcaaggccctcagatacctggtgtccatgacttattagtggcacagccagaccttgattaagggctccaaaattaaaattacctgtccttggaaatgacaagaaaa

SEQ ID NO: 23395 - DNA, 233 bp, Homo sapiens
gttgaggctgcagtgggccatgatcacactactgcacttccgcctggacaacagagcgagactcgtctctttaaaaaagcaaaagaaaggcctggcgcggtggctcacgcctgtaatcccagcactttgggaggccgagacagggtttcaccatgttagccaggatggtctcaatctcctgacctcatgatccgcccgcctcggtcgacgcggccgcgaatttagtagtagta

SEQ ID NO: 23396 - DNA, 946 bp, Homo sapiens
ttagactcttgcgagagcctgcaccccatatcaggtggggtcaatagataaatacccctgcctccttgccccttagttctggtgtggtgggcaagtcagaggaactgttcttctcacactttcacgtgctctcggtggagatctggttcaaaggcagaggtctgggctggggtctgtgattgtgcatctccaaccagctcctgggggattggctcttgccgatggtccacgggccacactgaggagcgaggcgtcatagctgcccagaggttcccggtggaactgagccctggttgccggccatagaaaccttctcgctaacctgaaccagctccttctcaagttcccggtctcaacctcccttcctgggactgcattccgaataaaccacttccacttggatcctgtttggggatccaacctcaggtgacgctcccgcactccacctatcagccgatggcctcgagcaagtcacttggcctctctgagcctcagtttccttaaatcttcaaatggagatggtaaccaggatgtgcagaagatggcatgaatgaacacgcgcaaggaaccggaaatgctagcaccagcgccgatgtttgcccagctgtgctgtagaaaagcaaggctgatccgcgttgccacagggttgctgcagtgttgggctctcagtgaaccggacgcttcatcaaaggctggggttgctctgtaggtgggggtgggtgcctctttggagcaaatccagagtgaggatttatgttgaacccaaaacgtcactcccctattcttattttttgtctgttcttctttaagtacgtcctgggggaatggttcctaatgtctgcagtttacttttcatttatttttaatgccaaagccaagcatactgattaaaaccaacaataaaaaagcttcgtgaatggctcccccaaagtgtgtgttgggggaa

SEQ ID NO: 23397 - DNA, 447 bp, Homo sapiens
aaatgtcttctcttaccagacaaggaaacaaaaaccacaggactttgatgcattttacggagctaaaagatgattgtggcatattggatctttacagatcagcttcgagacaccagagagtgacctattcttagagaaggagagatgcataatatatagtgtgaacatttaaaaacaggcttccttctcacttggcctaaagcctgtcacccgcttgggggaaggaatttttttttcttctgtgtgttccatccccacctggatagaacaaaatccagctttagcatattgaacaatcttatatttcagaaattttaagaaagtaaactatttttcgaataccattttttaagattaaggtagtttatataaacgagaatttaagagaatactgataactggaagactcagtcatttaagagagaatcttcaacttctagcatactc

SEQ ID NO: 23398 - DNA, 379 bp, Homo sapiens
gcaaaaaaagacttcgaaaatgtgattaagtgaaatatcttgagataggaagattatcctggattatccaatgggcccattgtggtcacaagggtccctctcttaaggagacaggagaatcaaagaagatgtgaggataaaagcaaaggtcagggagtcagttttgaagatgctactctgccagctttgaagatgaaagaagaggccaccagcctaggaatacaggcagcctctagaatttggaaaaggtaagaacagattctccacttgaatttccagaaggaatcagcctgttgactgacaactttaccttaattcataagactgattttggacttttgacctacagaatgtaagataataaatttatgtcatttta

SEQ ID NO: 23399 - DNA, 693 bp, Homo sapiens
gaagaatttaaagcagggactcagatatttgtacaccagtgttcacagcaacattattcacaatagtaaaagggtgaaaacaacccacatatccaacaatgggtgaatgaataaacagaacatggcatataaaaacaatggaatattattcagcctcaaaaaataaacaagttctgacacatgctacaatgtagatgaaccttgaaaactttatgttaaatgaagtaaattacttacaaattgaacaaatactatatgattccacttatatgaggtacctataacagtcaaattcatagaaaatagaatggtgacagttgccaggagatggggaaagggggagacagaaatcattgtttaatggatgcaaagcttgagttcagaaagatgaaaaagttctggaaatggatggtggtgacggttgcacaacagtagaatgtacttaacaccactgaactatacaccaaaataatagttaaaatgaaaatttcatgttgtatgtatttcaccacaattttaaaaagtattcaaaaacaacaataggctgagcacgggggctcatgcctgtaatcccaacactttaagaagctgaggcaggaggagcacttgagcccaagagctcaaggctggagtgaactattatcactgccactgcactccagccagggcaacaaagcaagaacctgtctcaaa

SEQ ID NO: 23400 - DNA, 884 bp, Homo sapiens
  misc_feature (16)..(16): n is a, c, g, or t
taactacctgagttcnagcctggcatggtgatgccccatatgtagtctcagctgtttgggaggctgaggcaggtggatcaagggctgcagtgagctaggatcaagccactgcattccaacccgggtgacccaggactgaaccttgaagaaagccagcactttaaggatgttttcaaagtataactacctgaggtcagctgggcatggtgatgcccatatgtagtctcagctgtttgggaggctgaggcaggtggatcaagggctgcagtgagctaggatcaagccactgcattccaacctgggtgacacagtactgggcctttaaaaaaaaaagaaggaaagaaaaataaagtataacctgaggactaccagcatgtgaatcctgtggatgagctataaaattcagattcagattcctgagtcccacgaggaccttgatgtattcacatccctctgagagaccatcagtagtgtttttaagaaacatttcgaccaggcatggtggctcacgcttgtaatcccagcactttgggaggccaaggcaggcgatcacctgaggttgggagttcaagaccagcctgaccaacatggagaaaccctgtctctactaaagagagacgggtgtggtggtacatgcctataatcccagatactcgggaggctaaggcgggaaaactgcttgaactcgggaggcggaggttgtggtgagccaagattgcgccattgcactccagtctgggcaacaagagtgaaactctgtctcaaaaaaaaaaaaaaaaaagatttcaggaattttttgcagactacagttggagatataagagatgggtgaaggaagtgagtactacaaaagaagcttcaggagtgaccagagagtgaaatga

SEQ ID NO: 23401 - DNA, 388 bp, Homo sapiens
agataggttgagctttggctatggaagcaagtacaaatgtctactaaatcagttggttttatagatctggagttaagagagatttgggctgtataaaaatttggcatttagcaatatgtagttcataatcggaagctttgtgaatgacaagtcacataggaatgtatagattgaaagactgattggaagatagctgaggacccaggactgaaccttgaagaaagccagcactttaaggatgttttcaaagtataactacctgaggtcagctgggcatggtgatgcccatatgtagtctcagctgtttgggaggctgaggcaggtggatcaagggctgcagtgagctaggatcaagccactgcattccaacctgggtgacacagtactg

SEQ ID NO: 23402 - DNA, 154 bp, Homo sapiens
attctataattagttttccaaatgaggaaactggttcagaaagggaaatgattggccaaaaatatcattgctcaactaatgattgcatgaaattcagagcccaggaaaatttctgtactttttattcagaaaaaaagatgagacaggcctatag

SEQ ID NO: 23403 - DNA, 729 bp, Homo sapiens
tggagaaacggcacaaggagagcccttaaattactcatagcgaaatctataatggcttaggggccagtgaccccaagttccagacccacaacttctactgaaatgaaatagaactttagtcattttattttcttacctctgtcctgagctttccccatttgtaaatgacagccgtaactatatctgccctgcttctcttgcagggagtcattcacggctggtgtgctagcttttcgtctgagcataccctctgcatgtgttagcggagagaccccgggcgggcagtatgtgtgcttgatttctgctccccgtctgctggcctggctgatctaggcagtgactctctggcacattttctctgtctgtccagtggggacagtaatgaacaggattgccgcctgcagcgttcagagctccttgagcatacatcagttatttctgcagatcaggttttaaagcagccagaacctccatgggaaagagcaggacacgcagtacttaacaagagaacttagctaatttgatctgccatttggttgattaaccagcacttgacaccagaagcagcctgttcctgcaacaagtgatggggagcagtctcatcaatattttatgcaaacgctggctcagtggaaagaggagaaaacttttccctccccatctgttttttttttttttaaacagcagaaaagtaatttctggtgaactgatgagaattccctgttgcaa

SEQ ID NO: 23404 - DNA, 437 bp, Homo sapiens
gtcttgcttttggctaaatttgccacctcttatttcttaaaaccacgtctcactcccttggtgtctctctgtaactgaggcttagaagctccttgttcattctttggactctttctcagtccctttgtctacaagggaaacagagccatcagcagaggccagtctgggggttataaggggcgtcgggattcaggccacaggtccccccatgaatggacagaatagaggctgtgactatgcttgatgtgaggggaagaatggccaaatgcctgaggtgatcattgtttcttaatttagaattcgtatatttattttaaaaaggacttgactgggtgtggtggctcccagcactttgagacaccaaggtgggaggatcgcttgaggccgggagttcaagaccagcctgggcaacaaagtgagatgcccatgtctaattt

SEQ ID NO: 23405 - DNA, 254 bp, Homo sapiens
cccccacatttgctcagcatacttcctataatttgaccaatgtgcctgtgaaagattgtaaaaatggccacaatgctcttataccactcttcatatttatgacctgtgcaatgtggctttacagatgtgttcaataagagacagttctgtttccccatcccttggatctgagctgacattgtgattttctttggccagcagagtgtggcagaagtgaaaaaggaaggtgtgtcagttcttttcctttctgagaa

SEQ ID NO: 23406 - DNA, 163 bp, Homo sapiens
acctcggcctcccaaagtgctgggattgtaggcatgagccactgcagctggacccataatatattttaaaaatcaacatatatttaaaaatatatttaggattgagttgcattatatgcatattgaacctatgcaaacatgactctgtgggtttagcaaaaca

SEQ ID NO: 23407 - DNA, 552 bp, Homo sapiens
ctgtaagttagcatgctctgtgtatagcagatatcactagtaatagcatttagtaagtgatgttcacacatgctgctgtcatgaacactatctcatgttgtgtaacactttcatttttccaagaactttataatcagccgacttgaaactcacagtcgtcccctcagaaaggcagggcaaatgttgttatttccaatttgtcagaagctcagaaagcttattctgttgctgacagtccttgcaagggtcagaatcaggaccggagccccagatgcgctggtgtcactgatgtccccgtgccgggcatgagcccttctgtgcaaggagctccaatgtctcccggccagtgatgatgtgaaaacatttagaaccgacctacacaataaggcagattttcattctgtacccaaaacaggaacacagatttaatgcagagcaaaagggctttaatcaacagatatgttcatttttcacgtagacctattttacaagctaacttgtaagccagaaaatgacattcgagattttcaagtgagaacaaatgatttggtc

SEQ ID NO: 23408 - DNA, 361 bp, Homo sapiens
attttttgtgtttttagtagagacggggtttcaccatgttagccaggatggtctcgatctcctgacctcgtgatccgcccgccttggcctgccaaagtgctgggattacaggcgtgagccaccacgcctggcccaatttgggcattttaaaggaaacactgtttctaagagtaaaataaagcaatcaagcccagtggggacctggtgagagcatcgtctgtgtcttcggtgggagggtcttggccagggctgcaggaggccagcctctgctctcaagtgcttgagatcctgagtgagaggcaggtgagcactgggtcctccgtaatgcaggtggcagggagagtgacagggggtgtcagca

SEQ ID NO: 23409 - DNA, 759 bp, Homo sapiens
agtgacagtaaataaattatgcctgtggatgcatgtcacaaatataaagttgagtgaaaagtacaaattgaatttttctcccctgggcacgtctttgctgcgaaggccctggtggccgagaccaaggctggctgtttacgtgaggccagccttgcaggtggggcagagaggaggaaattttgttgtaagaactgggacaaagttggcttctggaactcccaaagaaaatatttttctggcaaggggaatgcaaggcaaggcttctctgatgtgtaactgatagcctcagaaggtgtaaggttaaataatgatctcatcagtataacaggagctggacagtattaatcagtggtccaattcaaaataaagccacactgctataagcaaagtaatgaaggcttattgtgacctggggctccttaatgacacagatttgattcccacttaatgggcaactgaataatgcagctgatagcacagaccagtggggaaggcagaccagaggggtacaggaggctgcctggggtgaggcatctaaaggctgttatcacatgtcacatcatcagaccttgaatttgctattaaacagcaaataagcaaatatgccacttacagaagacctttccaaacttcaaggcatctactaaaattatatttatctctctttgatataccaatcacgcaactctaaactatttatgcagaaactaatctacatattaaattgtgccaataaatgttgtcttctctgtttacata

SEQ ID NO: 23410 - DNA, 408 bp, Homo sapiens
tccatataaaaatgagccatttgtcctagaacctcctaagctagttgaagagaccaagatggaaacaagttaacagggcatgatgatgttacagcagaggcatgtgcaaagcttggtggggccacaaaacagataatgttcctccaggtttgaagaggctagtatgtttttctaatatgtttctactatgtttttctaatagtaaaaacacgttatttgtggtcagagaatgttcttccttaaggccttttaatgctgttaagaaaaattagctcatgtaaccctccaggatctggctctcccacttcaactcccatgctctgcttcctacactctagctatattggtcttcattcagtgcactaataattcactgcttttacactgcatgttgatttacattgcctg

SEQ ID NO: 23411 - DNA, 495 bp, Homo sapiens
acacgtgcaccaagctaactgagccagatagtttatgactcctttagtggaggggttggcaaactatggtctgcgggccaaatttggcccaacacctatttctggaaatgaggctttattggagcatacgcgcacccatttgtttacatattgtctttggctccatatgtgctacagtggctgatctgcataatggccagagaaatcttaaggctgaaaagctggaaatacttactatctgcaaagctgaaaatatttactatctgacctccctgttcctttgttcctttcctttccctttccctttctttttgacagggtctcactctgtcactcaggctgtagtgcagtggtgcaatcatggctcactgcaccctcgaccccctgggctcaagcgatcctcccacctcagcatgttgggaggctgacataggtgggttgcttgagcccaggagttcaagaccagcctgggcgacatgatgaaaccctgtctct

SEQ ID NO: 23412 - DNA, 604 bp, Homo sapiens
gtgtgaagatggctatctgcaaaccagggagtaggtcctcaccaagaacaccaccatgctggcaccttgatcttggacttctagcttccgaactgtgggaaataaatgttgccttaagccacctaatctatatttttgttgtagcagcccaaatggattaagacactttcatcagtagcttattcagagtagcactgattctcaacattgctatcattctgtatcagaaatataaaacatggcccacacctgtaatcccagcactttggtaggccaaggcggattgcttcagcccaggagttcgaaaccagcctaggtaacatagtgagaccacatctctacaaaaaataaaattagctgggcatggtggtgcctgtctgtggtcccagctacatgggaggctgaggtgggaggattgcttgaaccttggaggtcaaggctgcagtgagccatgattgctccactgcactccagcctggacaatagagggagactgtgtcaaaaaaaaaagaaaagaaagaaatataaaacatgaggacaaatagctcccttggccaccaaagtatttctgtaccccgtgaaagttttgatgtagaagtagatg

SEQ ID NO: 23413 - DNA, 458 bp, Homo sapiens
attctccccagccccctcagaacatattgcattctcacgactctttcaggcaaatccaaagggaaactgggactttgggatatcagaggacgagagatgagaaggtgtcatcatttaggaatacttctgacagtccctctgggtcacctattttacagtctcctccacggcttgttaaaaatgaggattactgtacccgtcctcaaatccagaatgagaaatgtacgtggtggaggatggggggagaatggggcctagtttctgcatttttcacaagtccccaggagttctggcacgcattagcatatgagaaacacggagagggtacaggagggagatggatgggggtggacagaatatgttgagtctaagtccacttgagaggtgagtggctcacatcacagaggaatggccagtcaggcagggcactgggctcatgtggcccagtgatgagtacc

SEQ ID NO: 23414 - DNA, 230 bp, Homo sapiens
tctccataccaattaaaaataaaaacatcaaaatacactggaaataaaaaaggaaaaaagctgttgaacccacagtacgtgggaacagcaattaattgtcatgcagggataagctaacattaatattcttcaaagaaagcaacttaaggcagaatcattgaaaagacaaaaggattttcaacccctatttatggttaatacagcgtatttagtggaaaagcatgtaagac

SEQ ID NO: 23415 - DNA, 1752 bp, Homo sapiens
gccaggcccagcctcggtgagcacacacgccctccctgtctctcgccttcgcttccctgcatctgcgctgattgtgctggagaagaaatacatccacccaccctcctttgatgatgtccactgagcaaatgcagccactggaagtctcagaagacagactggacaagctagaccctcgttgcagccacttagatgatctttcagaccagttcattaaggactgtgatctcaaaaagaagcctagaaagggaaaaaatgtacaggccaccctgaatgttgagtcagaccaaaaaaaaccaaggaggaaagatacaccggcgctgcacatcccacctttcataccaggtgtgttttcagaacatttaattaaaagatacgatgttcaagagagacatccaaagggcaaaatgatccctgttcttcataacactgacctggaacagaaaaagccaaggagaaaagacacacctgccctgcacatgtccccctttgcagcaggtgtgacattgctcagggatgagagacccaaagcaatcgtggaagatgacgaaaaggatggtgacaagatagctatttaaagatagtttccctgagaccacttgtaaataggttagattggttccctgtggtgacctagagaaaaaatagacttgtttctgctctcatttttgtcatcgtctgacttgaagattcagacaccttctccccaggagatgtatgccatcaaattgccagtcacctctttgtctctctcttctttctgagtatggtttctattctgtgttttgaatttttattttctaatgcagtggaaaagaaacagatcatcctaaatgaggaggtaacagggaaagcactggggttcggtttctgcatcttctggatcaattcacggaacagagatcgtggattacatgggctccttcttggtttttgctgctgggcaggacttgacttagcattatccaagcaccagtccaagtggggttccctgttgccagttagagaggtgagaatgtttggactctaactcaccgattgctttgcagacaaaggtcttttatttctcctgtcctatcttaagagtccaaatgtctctggtgatgttcctaagacccttgtcccagatactctaaatgtgaatgtatgagctgggggagtcaacccagcccaccatgccttggctgatgataccagaggcagagagtgctggtctgtctgggaagcttagcaatgtatcttcaaatttatttttgtttttaaaaatatttcttaaacatgctgtcccaacatttgtgagttgtgtcacaagtgagtcattatcaatggtagataaaatatcaatgtttgtgatgaatttactgtaaaaaaattaaggtcaatgaaagccattctgttatttttagcattctcacttatttagactctattacactttcttggatgagaggggagagtgtggtgttagctagtgagcagaggtctgtatattgtccttgccccagcctgcaatctgtggatgcccaggggaaggcatacaggcctcatccaccaggcaatagacaggagagaggtgagaactatttttagaaggaggaaaagtagatacgcaaattgtcacaactaagagtgataatttggtagctctgtatgtatgctggttccaactgtttaatcccttctgtctttctgttctcacaaagatggaaaagatgcaagagcttgccggaaataaagctacatctatccaca

SEQ ID NO: 23416 - DNA, 1016 bp, Homo sapiens
agacgctggggagagagcagggatcgcgagcccggcggatgcggcagcggcggaaggcggctggggagacgctactccaactgttgaattgaattttcacctttcctttcatccgctgctttgcttgcggagatggatttatttgctttgaaatccgcatatctttctcagactgtggggtgatcccggcagacaccagactgaaagagaccacccgtgacagaaaaggaggaattaaaaaaaaaaaaaacctccacaacagactgcacaattaactgtacacatcgatgttggactttgtgaatagaaaaaattgagaggaaaatcttgaactatgatgcgaggctaagctgggaacaattactggaaacctgattttgtttttccttttccaagactctgaaaaatttcggggtacctctcgcctaaccaagaggaaaggtttaaaaaaaataaacaaaataaataaaccaatacacctagcaaagcagacgccttgttttccagaacctcggactccggcagaaagaggtagagtaaaagtgctgctagattcagcttcaccttcttccctccatccttttctcttgcattttctttttccccaaaaacatgaatctggtttttctttctatagactgagtcagagaaagcgttaggaagaagccgcaactaatgtctgtgaagggaggaccatgaggcgagagtgaatacgattcgttccgctgcttctgactcatccggcagatcggaacacctgcatttctggatgtgtcattcccgtatgtcgaggcgcctccagaacccgaaataatgtgtagacagacctgtgtctaacatcccctcggagggagctccccggggtaggagcccctggctggaccgccgcggccgcagctctgcaccccctgccctccctgagtcgcccagaaaaactgaaagagagactgcagaatgcatcacgccaaaccttgatgtgttgctttcatccagcccactcctcctactataagaga

SEQ ID NO: 23417 - DNA, 101 bp, Homo sapiens
ccacctctttgtatttgtttcacggttgtatttcctccttagtgaacttcctatacacatgttgtaacagtgggaaaagactcagtaattccataagtgtt

SEQ ID NO: 23418 - DNA, 463 bp, Homo sapiens
taagagacagggtcttcttccatcgcccgggcaggagtgcagtggtgccatcatggcttgtggtagccttgagctcttgggctcaagcagtcctttcacctcagcctcccgagtagctgggactacagacgtgcaccaccatacctggttaactttttaatttaaatttttgtagagatggggtctcgttctgttgtccgggctggtctagaattcctggcctcaagcaatcctcccgccttggcctctcaaagcagtaggaatacaagcatgggccaccgtgctgaatggatttagattcatagaggggcaaaaagatcatgaggaagtttgtttctctgatttgaagttgctgtacattgcaggctttctagtttagaggggatgctcctgtcacttgtgaggaagaggtgatgcctggaaacaggtggagggacccaatgtgttggcgcagggactggcc

SEQ ID NO: 23419 - DNA, 259 bp, Homo sapiens
tgagtggaagtgctttaatgatgtgataccagagggtggtgattaatgaggaagctagggaagcgctcctgtggctgatgataggcattagtgaaagaaactgaagtaaacacgacaatgcctctaatattatccttccttctgacacattgtttaaaaataggaagggtggaaacattagttaagagggaatcgcgaccctgtacggagaaaaggtagtaagagagaatccagttactttgaaagtttaagcctttag

SEQ ID NO: 23420 - DNA, 300 bp, Homo sapiens
aaagtcacaatgtgtctggttcctgatctcctgccatgttctcaagaaagtgtgtgtgtgtgtgtgtgtgtgagagagagagagacagagagaaggagagagggaggaaatggggaggagagaagaggagacaggcagggtaaagaggagaatagaaggagagagaaaagaaagacagacatggaaatgaaatagagcaggagagagaagtggtaagagaagggagaagaaaaaagtgaagaatgagaacagacagacaggagacaaggaacaaaaaattagcaaaatggccagagaaaa

SEQ ID NO: 23421 - DNA, 356 bp, Homo sapiens
tgagacagcgtctcactctattgcccaggctggagtgcagtagtgcgatctcagctcactgcaacctctgcctcccaggttcaagcgattctcctgcctcagccactttgagtagcagggattacagggacatgccaccatgccccgctaatttttgtatttttactagagacagggttttaccatgtttgccaaactggtctcgaactcctgattctctcgcctcagcctcccaaagtactgggatgcaggcgtgagccacagcacttgaccaacaagtggtaatttcttaaaggttagttgtactgtataatctgaaaacactgatgaacttctcatactggtacattaaaaac

SEQ ID NO: 23422 - DNA, 496 bp, Homo sapiens
acaaaactgaattgtaagaaatgaaaacacagtaattgaacaatttaaaacttagtaagtcacatgtagcacagaaatacaatgacaggaaataagttagacaggtgaagaaatgtggaggatagtgtgtgaagttttagttgtgtatatgtaactggagttccaggagaagaggaaggatagaacagaggaaatatttgaagagttactagctgaaaattttccagaactgatgaaaaactaattcatagattcatgaattctgacatatccaaagtagagtaaattttaaaagaggacacatcctagtgaaactgccaaaaaaaaaaagaaaaggacttaaaatcagccacaggtaaaagattaccttcaaaagactgacacacacactaacagctagcttctcagcagcaacaagtggaaaacaagacagtggaataacattttcaatgcaataaaagaaaataacttccttgggaggccgaggtgggcagat

SEQ ID NO: 23423 - DNA, 210 bp, Homo sapiens
tataatagccccaaactggaaaagaaaccaaatgtccaaatatagaataaacaaaccgtagtatattcatacaatgaaatactacacaacaatgaaaataaatgaattgcagctacatgcagtaacatggatcaatctaacaatatgctgagtgaagaattacatgcagaattcattcataatgaaaaactattattaaattcactcatg

SEQ ID NO: 23424 - DNA, 452 bp, Homo sapiens
aaaaaattccaggtgcagcggcacatgcctgtagtcatagttactcaggagactgatgtgggaggatcatttgggcccagaaggttgaggctgcaatgagccaagatcgagccactgcactccagcccaggcaatggagagagcctgtctcatggaaaaacaaaaaatcattgcagagttaaatattctgaatgacatagcatataaacacttcctagagactttcaaagaagggggaagtcatttattgacagcaaactgtgtgaaagaggtaaggttgatacagaatctgacaaagagatcatataacagatgatagaaattggtaagaacctgattaaggaagaacaagagatagtaagattatttcgtaattgaggttttgaaattctgttatggatcattgtggaaatatatatgtattaaagagctatattgttgttattaagaaa

SEQ ID NO: 23425 - DNA, 468 bp, Homo sapiens
gtcgaaaagacagtaagcatgccccaaggtaagcagctagcccacctggttcactgctgtaactctgtatgtagatagcgtggggccagacatatagtctgtgccatgtactcaacgttcatgtccctgaaattcacacactgaaatcctcacccgcaaggtgacggtatgaagtggtggggctctgggccaggcacagtggctcatgcctgtaatcccagcactttgagaggccaaggtgggtggatcacttgaggtctagagttcaagaccagcctggcaacatagtgaaaccccatctctactaaaaatataaaaattagccaggtgtggtggcgggcacctgtaaccccagctactcaggaggctgaggcccaagaatcacttgaacccgggaggtggaggttgctgtgagccaagattgtgccactgcactccagcctggacaatggagagagattgtgtctc

SEQ ID NO: 23426 - DNA, 710 bp, Homo sapiens
tccctggttcaaatgattctcctgcctcagcctccggagtagctgggattacaggcacgcatcaccacgcccagctaatttttgtatttttagttgagacagagtttcaccatgttggccaggatggtctcgatctcctgaccttgtgatctgcctgcttcagcctcccaaagtactggaattacaggcgtgagccactgcgccggcctacaaatttttatcttaataaatgttcctgattacaaaatttcaaacaagccaaaaaggtgtatgtgtaaattaaatttatcctttcatctgcctgactctcactccctgacccaaagattttcactgaaaataggtgcatgttctccagatgtgtttatgtacacgtaatttactactgtatagctacatataaagaaaaatatttcacataaaatatacaaaatacacatattcttcaaaactgtagtcataacatattcttctgcaattttcctatttcacttaatatatctctgactttcattgatatttcattagcaatgtttactgacataaatattgctctttcagtgaattttcttttgacatcattgacccactgttggtcagtaagtctgcctaacatatcacaaatataagccccattagtttgcaaatattctctctacttttcacataacttttacctttttttctgcaatacacagtgttttaaattt

SEQ ID NO: 23427 - DNA, 921 bp, Homo sapiens
gagcggaggctgtgagcctagtgcgccccggcccggcccggcccgccgctcgccccctcccctcccttcccctcgccgcgcctcctcccctcgcctcttctcgcctcctctcctctcctccgcccggcgctgctcccgcctgcgcccgggccgccgaacccagcccggccggggcccccggcttcgcgcgctctcggctgggcccggcggggaccgggtccccgcggctgacatcgcccctcctcggggacccggtggattccggacctttcggaacgtgaactgagccgtgggagcggtctcgcccagggccgaccgcggggctgggctgagcagaccctcgcggccgctccggacgccgcgggtgccggggcacggacgttctgggtccgggctgagcgcgtcctgggcgcccggcggtgccagctcactccgggcggggtagggcagggcagaccccagcggagcacggacccggccgatctggactggacagagcgaatcccggacggtgcagagcccggggaatgccgggcgtgggctgaggggatcccggcgccctcccagccctccgactttggctcacgcgctgggacctgcccggcgtctcctcggcctccccgcgccccggtcacctgtggcctcggagccccaaatctgccggaccctcgctcattcccgaccccgagcctggagaggcttgagaaagatttttcctgcccccttccctggagcgcggaggccccgccccctcccaccgcccagatgtctccggtcacggctcggaggacctccctgaggcccggggccgaagggtccagagagagaagcccgccctagggagccttgggggccccccaactccgtcttggggcttggcccccgacgctgcttggagggaaggccggtgcccccaccctc

SEQ ID NO: 23428 - DNA, 1323 bp, Homo sapiens
tcagctctgcacacccacaggcacttcaagacctggaggccactcctgggacccaaggtcttccccctcctctcctgtgtcctcaccttgaccccctctgctagactctgtctccctctgggtgtcccactctccacccagaggcagaggaggctgggtggcagggggcaggggctggttgagggccgcccagggccagggtgggctggggggccgttaaaatgtggagctctgcccagccgaggggggctccgtggaggcagacgcagtgtgtgcccagctggggggagtatgggcaggcctgcgcaacgtggtaaacgatgaacattcggggcgccccggacctcgggcagcccagttgacgaccccagcagtggtggtgagcgggagcggattcgacagcgcatgaagatggtcatcgggcagcttgagggcatccttcgcgagctcaaggaggtggccaaggagctgagggaggtggtgagccagatcgataagctaacctcggacttcgactttgaactggagccggacgactggaccacggccactgtgagcagcacctctagcactgacaaggcgggcatgggtggcccctttgacctgggccacctggacttcatgacagccgatatcctctcagacagctgggagttctgctccttcctggacgtctctaccccctcggactccgtggatggtcccgagtcgactcggccaggggctggccctgactaccgcctcatgaatggtggcacgcccatccccaatgggccacgagtggagaccccagactcctccagtgaggaggcctttggtgctggccccacggtgaagagccagctgccccagcggaccccagggacacgggagagggtgcggttcagtgacaaagtgctctaccatgctctgtgctgtgacgatgaggagggggacggtgagcaggaggtggaggaggaagaagtgggcttgccccctgagcctgcccatacagaggcccatgcaggcccccacaagccctccccagccccctacaagtcacggcgctctccactgaccagccgccactcaggctctaccttggcccctgaacagactcgaagggtcacgaggaacagcagcacccagacagtgtcagacaagagcacgcagacggttctgccctacacagccactagacagaaagccagggggaaaaactaggggccggggagggggccgggggcggtgggcacatagagctataaataaatatatatatatatatatatatatatatatttaaacaaatgaagtcataataaaatttaaaaatgctaagga

SEQ ID NO: 23429 - DNA, 847 bp, Homo sapiens
gagcggaggctgtgagcctagtgcgccccggcccggcccggcccgccgctcgccccctcccctcccttcccctcgccgcgcctcctcccctcgcctcttctcgcctcctctcctctcctccgcccggcgctgctcccgcctgcgcccgggccgccgaacccagcccggccggggcccccggcttcgcgcgctctcggctgggcccggcggggaccgggtccccgcggctgacatcgcccctcctcggggacccggtggattccggacctttcggaacgtgaactgagccgtgggagcggtctcgcccagggccgaccgcggggctgggctgagcagaccctcgcggccgctccggacgccgcgggtgccggggcacggacgttctgggtccgggctgagcgcgtcctgggcgcccggcggtgccagctcactccgggcggggtagggcagggcagaccccagcggagcacggacccggccgatctggactggacagagcgaatcccggacggtgcagagcccggggaatgccgggcgtgggctgaggggatcccggcgccctcccagccctccgactttggctcacgcgctgggacctgcccggcgtctcctcggcctccccgcgccccggtcacctgtggcctcggagccccaaatctgccggaccctcgctcattcccgaccccgagcctggagaggcttgagaaagatttttcctgcccccttccctggagcgcggaggccgggggcggtgggcacatagagctataaataaatatatatatatatatatatatatatatatttaaacaaatgaagtcataataaaatttaaaaatgctaagga

SEQ ID NO: 23430 - DNA, 991 bp, Homo sapiens
tgggtatctagaggatcctccgggagccttacctccgggagccttaaccctccgggagcggattcgacagcgcatgaagatggtcatcgggcagcttgagggcatccttcgcgagctcaaggaggtggccaaggagctgagggaggtggtgagccagatcgataagctaacctcggacttcgactttgaactggagccggacgactggaccacggccactgtgagcagcacctctagcactgacaaggcgggcatgggtggcccctttgacctgggccacctggacttcatgacagccgatatcctctcagacagctgggagttctgctccttcctggacgtctctaccccctcggactccgtggatggtcccgagtcgactcggccaggggctggccctgactaccgcctcatgaatggtggcacgcccatccccaatgggccacgagtggagaccccagactcctccagtgaggaggcctttggtgctggccccacggtgaagagccagctgccccagcggaccccagggacacgggagagggtgcggttcagtgacaaagtgctctaccatgctctgtgctgtgacgatgaggagggggacggtgagcaggaggtggaggaggaagaagtgggcttgccccctgagcctgcccatacagaggcccatgcaggcccccacaagccctccccagccccctacaagtcacggcgctctccactgaccagccgccactcaggctctaccttggcccctgaacagactcgaagggtcacgaggaacagcagcacccagacagtgtcagacaagagcacgcagacggttctgccctacacagccactagacagaaagccagggggaaaaactaggggccggggagggggccgggggcggtgggcacatagagctataaataaatatatatatatatatatatatatatatatttaaacaaatgaagtcataataaaatttaaaaatgctaagga

SEQ ID NO: 23431 - DNA, 2513 bp, Homo sapiens
cgttctgaggtcacaggggcgcgcagtcatcgatataattattccttcaagttttatagaatatcacttgggagattccaaagccatagctattacgcggcaaacctaggataagaaaggtagtatgagtgctggtagaccagctgcaactttcctatacagtgaaaaaggctggtgaaacaagtacagtccagattttttaaaatcatactttctcagggatctccacaaactggtgggtgtcctggctgtctgtgtgatagcctctttctataggtgaggcctcaaatgaattgcagctatcctggtgttcctatgagggcactttgtatgaaaaagggcatgtactccaaaacatttttgtaggttctttggccagttgccaaagagtgtgaaagaatccaatagaggatttttcttactgatagcagtcattcattgcagtaaaataaaatatgatcccattagggaatcttgaattctgacctcccatactccgttttgaaataaccactttatatttcattttttaaaaatctgatgatctctttgaggcaggtttcagatttggcagtacaacatgaaagattaggaaaagcattaataacgtgtgggtggaaagcttgttaaaaatctgagagtgaagtttgagttaaaagttgtttgaacatggcattgactgggaggccaaagatttaaagaagcggaagattcttctcttaagacatgaggagtaagttgtgtgataatggtatgtgttttgtgtgcatgaatggacattgtaaatgttgaattctaggctccgacaatcattgtcaacagaagatcaagctgcaaatatttatgttttaaaacttaaattataaagctagttaagtctttctaatgactagttttaatgttcatgggtacattttacctaagttaccgtttacattgtatagaaaaagatacatcttaagcacagattggttattaggaattagtttggggaagaggtttttttgtggattctttcatactgcaaagaaaaaccatttgccttttggggaattgagctaacttctaatctagtcttaagactagaatgctaaaaacaaaaacatgaaggaaattaaaaccccttattattaaattgatttgtaaaaacattgttactggaaatttattggacttgaggccttcctccagaaaataaggacttgattgtcaggcctatattaggttctgaaccttaatgccatgtatttgtacttactaaaaattgtttcaatgaaaagtacattagcagtatgaacttctggtccagttggaagtttttccatttgaaaaatgtgatgtttgcatggaactgtttgaaacttttttattttctagtccccctcccccacactggatagaatttagcctagaattttccctttggataaaagaacaaaaattgaacatgttatttgtaaattgatgtttagtaattagtgataaacttgaaatactagcatatattataagccttaatcttaggtagtcttatgaaaatgaatctcttaactatcttttgaacctgtattcacattggttttcaagatattttaagttatattttttcctcttttcagagctgcttcttattctggggctacttttttttttagttgtgtaattcacaaagggctgcattttttttttttttaataaggcttataactatggctggatcttttgctctagtcttctaagaagggccattttattttttagagtcacttctaaagtcatgtggtaattaactttggagactgttttgcgtatgagtgctgatacaaattaaaacccaagtagacctcattgcatgtcaccctatgaatgttgacaatggaaggaataccttgcctgtagtatactgtcacttctggattgataagctgaggaagaaagttaagtttcttttttacataagtcagaaaaacttacagctggtgttcctagtttcctggttgacctcagcagatgaagtgaacagatagtgttaattcagattgaagaaattatctgaatcttggtttgtgtagatttacaatctacatgcaatattaactaaatcagatagcttttacagtttcacatgtgtacataggttccctcccggtcccttccatatccattagttattgaactttctaaactggcattgaaacattacaacaatgttttgttgcaccaattttataaacttaagcagtgcaatacgtgttacttttctgaggcaaaccaaaggtaaatttctcaaggttcttgctgccttctttagcagcatttgatggaagatcttttatacatttgtaatagataaaaataaaccagattgcaaatccttttttaaaatcctaaaccatgtaccaagtttttggtccaaattatgtaggataagttaaacttaaattgcattctattaaccaatatgagtgtatttctgtaagcatagttatgttgaaataaagttttaaaaacca

SEQ ID NO: 23432 - DNA, 2755 bp, Homo sapiens
cgttctgaggtcacaggggcgcgcagtcatcgatataattattccttcaagttttatagaatatcacttgggagattccaaagccatagctattacgcggcaaacctaggataagaaaggtagtatgagtgctggtagaccagctgcaactttcctatacagtgaaaaaggctggtgaaacaagtacagtccagattttttaaaatcatactttctcagggatctccacaaactggtgggtgtcctggctgtctgtgtgatagcctctttctataggtgaggcctcaaatgaattgcagctatcctggtgttcctatgagggcactttgtatgaaaaagggcatgtactccaaaacatttttgtaggttctttggccagttgccaaagagtgtgaaagaatccaatagaggatttttcttactgatagcagtcattcattgcagtaaaataaaatatgatcccattagggaatcttgaattctgacctcccatactccgttttgaaataaccactttatatttcattttttaaaaatctgatgatctctttgaggcaggtttcagatttggcagtacaacatgaaagattaggaaaagcattaataacgtgtgggtggaaagcttgttaaaaatctgagagtgaagtttgagttaaaagttgtttgaacatggcattgactgggaggccaaagatttaaagaagcggaagattcttctcttaagacatgaggagtaagttgtgtgataatggtatgtgttttgtgtgcatgaatggacattgtaaatgttgaattctaggctccgacaatcattgtcaacagaagatcaagctgcaaatatttatgttttaaaacttaaattataaagctagttaagtctttctaatgactagttttaatgttcatgggtacattttacctaagttaccgtttacattgtatagaaaaagatacatcttaagcacagattggttattaggaattagtttggggaagaggtttttttgtggattctttcatactgcaaagaaaaaccatttgccttttggggaattgagctaacttctaatctagtcttaagactagaatgctaaaaacaaaaacatgaaggaaattaaaaccccttattattaaattgatttgtaaaaacattgttactggaaatttattggacttgaggccttcctccagaaaataaggacttgattgtcaggcctatattaggttctgaaccttaatgccatgtatttgtacttactaaaaattgtttcaatgaaaagtacattagcagtatgaacttctggtccagttggaagtttttccatttgaaaaatgtgatgtttgcatggaactgtttgaaacttttttattttctagtccccctcccccacactggatagaatttagcctagaattttccctttggataaaagaacaaaaattgaacatgttatttgtaaattgatgtttagtaattagtgataaacttgaaatactagcatatattataagccttaatcttaggtagtcttatgaaaatgaatctcttaactatcttttgaacctgtattcacattggttttcaagatattttaagttatattttttcctcttttcagagctgcttcttattctggggctacttttttttttagttgtgtaattcacaaagggctgcattttttttttttttaataaggcttataactatggctggatcttttgctctagtcttctaagaagggccattttattttttagagtcacttctaaagtcatgtggtaattaactttggagactgttttgcgtatgagtgctgatacaaattaaaacccaagtagacctcattgcatgtcaccctatgaatgttgacaatggaaggaataccttgcctgtagtatactgtcacttctggattgataagctgaggaagaaagttaagtttcttttttacataagtcagaaaaacttacagctggtgttcctagtttcctggttgacctcagcagatgaagtgaacagatagtgttaattcagattgaagaaattatctgaatcttggtttgtgtagatttacaatctacatgcaatattaactaaatcagatagcttttacagtttcacatgtgtacataggttccctcccggtcccttccatatccattagttattgaactttctaaactggcattgaaacattacaacaatgttttgttgcaccaattttataaacttaagcagtgcaatacgtgttacttttctgaggcaaaccaaaggtaaatttctcaaggttcttgctgccttctttagcagcatttgatggaagatcttttatacatttgtaatagataaaaataaaccagattgcaaatccttttttaaaatcctaaaccatgtaccaagtttttggtccaaattatgtaggataagttaaacttaaattgcattctattaaccaatatgagtgtatttctgtaagcatagttatgttgaaataaagttttaaaaaccaaaaaaaaaaatcaaaaaacaaaaaaaaaccatgtcggccgcttgggccaagtcgattttagactcgagcaggctaatgcatgcggccgcatttggagctaatttggccaattcgccttatagggagccgtattacaatttaactgccccgcggtttacaacggcgggactgggaaaacccctgcggtacccaacttaatccctttgagcaaaacccccttttcgccaatgggcgtaaaaaca

SEQ ID NO: 23433 - DNA, 808 bp, Homo sapiens
cgttctgaggtcacaggggcgcgcagtcatcgatataattattccttcaagttttatagaatatcacttgggagattccaaagccatagctattacgcggcaaacctaggataagaaaggtagtatgagtgctggtagaccagctgcaactttcctatacagtgaaaaaggctggtgaaacaagtacagtccagattttttaaaatcatactttctcagggatctccacaaactggtgggtgtcctggctgtctgtgtgatagcctctttctataggtgaggcctcaaatgaattgcagctatcctggtgttcctatgagggcactttgtatgaaaaagggcatgtactccaaaacatttttgtaggttctttggccagttgccaaagagtgtgaaagaatccaatagaggatttttcttactgatagcagtcattcattgcagtaaaataaaatatgatcccattagggaatcttgaattctgacctcccatactccgttttgaaataaccactttatatttcattttttaaaaatctgatgatctctttgaggcaggtttcagatttggcagtacaacatgaaagattaggaaaagcattaataacgtgtgggtggaaagcttgttaaaaatctgagagtgaagtttgagttaaaagttgtttgaacatggcattgactgggaggctgaggcaagagaatcgcttgaacacaggaggtggaggttgcagtgagccgagatcgtgccattgcacttcagcccaggcgagagtgtgagactctgtctttaaaaaaaaaaaaaaaaaaa

SEQ ID NO: 23434 - DNA, 510 bp, Homo sapiens
tggtacagctaattcctaattgtagagtgttaaatgtttgaggagaaccttttctcatagatggttggtgttcatatggctactttacaataaagagaactgtaagtgatatttggaaactacaaacctggaattaggagatataattattccttcaagttttatagaatatcacttgggagattccaaagccatagctattacgcggcaaacctaggataagaaaggtagtatgagtgctggtagaccagctgcaactttcctatacagtgaaaaaggctggtgaaacaagtacagtccagattttttaaaatcatactttctcagggatctccacaaactggtgggtgtcctggctgtctgtgtgatagcctctttctataggtgaggcctcaaatgaattgcagctatcctggtgttcctatgagggcactttgtatgaaaaagggcatgtactccaaaacatttttgtaggttctttggccagttgccaaagagtgtgaaagaatc

SEQ ID NO: 23435 - DNA, 362 bp, Homo sapiens
ctacaaaaattagctgggcatggtgacacgtgcggctgcttggtaggctgaggtgggaggatcgcttgagcccaggaggtgaaggttgcagtgagccctgattgtgccactgcattccagcctgggcgacagagtgagaccatgtctccaaaacatacatatatataaaatatatttaaagacctcttggagttcaggcagaagtgaagatagcactatgaagtagtttccacattaacaatagcaatgacttgaacgatgtgttccccctttcttctgatattaatatctgttcattttgcaaacattgaaagattatgaaagctatgacccagaatcacaattatataatttggatacat

SEQ ID NO: 23436 - DNA, 388 bp, Homo sapiens
tgcagataattataatttattactctcttgaaaagtagctagtattaatactttgtttgcttaaaggtatgcctaatgttaatattgtagagcctaactcaggatttatctatatctcttgatttcacaggagtattgtcatcctgtggatgtggatagaccaaatgttacccaggtttttagagggtaggaggtgattaatatatcatgttttattccatatagattatggttagtaaaatgatttgattattaatatttattttggctagaaataaataataactactttctcaatttgattttagagaatgcttgaagaggtctttaatatttaagagaaataattatttttgaaaatcccaacctctttataattgtttgattt

SEQ ID NO: 23437 - DNA, 572 bp, Homo sapiens
ctgagattgtagaagtagcaagcagtaggtagtatgaaagatacatggattgaagattgtgtgtgaacatgaactggaaggagaaaagagttgacttaaatcaggccatgttccctaagaaagagatcagttgatccagaggatgagaagtgacagattgggccagagttgaatatttatggcaggttggtagctaagtgtgcgagtacatccggggcagtattggatcatgtgaaggtctggctatgatactccacagtctatgtgaagagctgttaagaagactgggactgttggcagggcatggtggctcacacctgtaatcccagcactttgggaggccgaggcaggcagatcacgggaggtcaggagttcgagaccagcctgaccaacatggagaaaccctgtctctactaaaaatacaaaattagctgggcctgttgtggcatatgcctgtaatcccagctacttgggaggcagaggcaggggaatcgcttgaacctgggaggcggaggttgcagtgatcacgccattgaactccagcctgggcaacaagagcaaaactccatttc

SEQ ID NO: 23438 - DNA, 562 bp, Homo sapiens
cctttatttgatcattcatttttagacagtattgattgatacgttgttacttcagaagcataaattagcactaacacctaatcctatcataccttctatgctttttcagttttattacattcttaggtgttgtttgtattaaaacataaataaattaagcaaccacattctgtctgactcagttcagcctgctttgacaaaataccatagactgagtggcttaaatgacacacatttgtttcttacagtaccagaggccaaaaatctgacgtcaggatgtaggcatgtttgagttctcgataaataaccttgttttggtttacagatggttgtcttctcattatatctttaaataccagagaggagagaggcatcgagctagttttcacctgtctcatcttataagggcactaattcaattaaagagggcttcaccctcatcatctaattgacacaggattttctcagccactttgttaaccagggatctccacagccagcagtatgcccctaccacctaggcctcgcttagccctgggtctgccactggagacgccgtacc

SEQ ID NO: 23439 - DNA, 367 bp, Homo sapiens
ctttcagagaattgagtagatactggccaggaggggacatcctaggcacaggggtcttgcctgagggggtctttgggcccagccacccaggactggtcaacattttggttatacgtgcactggcatgtgctgaaatgaggtgtgaccctaatgtgataaggcttttgtttttcatttttcaacaaccataccacaaggaatgaacccaaatatatcttgtccttccaagtgagcaccgtgggtgacagagtaaatgctcaataaatatttgttgaatgaataaacaacaaaatcatccccactccaaatatcttgagaccttccctcagaattgctttcagagtctgagtcaaagcacatgagaaaa

SEQ ID NO: 23440 - DNA, 6574 bp, Homo sapiens
aatctctctgtgcccggttcgacctgtcgcagcttgccaaactgagaagtgtgctcttctacacagcttgtctcgatcccaattttccagccacgctattcaaagacaagatgaaatgcactgtgaataaccagcaatcaaagaaaatcatggtggcagcagatattgtgacgatattcaacctgatccaaatgaatggcggggctgccaaggagaagctgcccacgggccgccagaaggtacgcaagaaggaggcatcctttgaatcatgtaggtcggacacagagatctgcaatgcagctgagtgtgagcccctgaactgtgagctgagtgagaggtctttcagccggggctaccccatcaggcagtcgtccaagtgccggaagatggactgcaaggactgcccacagtttgtccctgcctctgagcctaacttcctgttgggagttagcaaagaggtgaaaaaccgcgccgcttccctggacaggttgcaggccctggctccgtactctgtgaccagccctcagccctgtgagatgcagaggacctacttccccatgaacatcgaaaacgagtccatttcagaccaggactccctgcccatcaatcagagcatcaaggagaccttcatttccaatgaggagccatttgtggtccagtcctgtgtccagaaaaggaatatcttcaaagaggattttcacaatttgatggcagtgtcccccagtttggttggccccatcagcaaagcagagaatgagcacagggaaccccagagtcgaaaggaaccccacaagccacccttcttcaaccacagctttgaaatgccctataacagccagtacctgaatccagtgtattccccggttcctgacaaaaggcgagcaaagcacgaaagcttagatgaccttcaagcctctacatattttgggcccactcccgtgatgggaacccaagaagccaggcgctgtctagggaagcccaacaagcagactccctggccagccaaaagctggagcctaaacacagaggaagttcctgactttgaacggtcctttttcaatagaaatccctccgaggagaagctacactatccaaatgccagtagccagacccccaatttcccagccccagaaaggcgcccaacttaccttgtgccaaaggatcaacagccaattctccccattgcttatgcggcaaaacaaaatgggctcaaatctaaagagatctcatcccctgttgacctggagaagcatgaaccagtcaaaaagtttaaagacaagagcattaactgcaccagtgggcagctcagctcagacaccagtagcgtgggcacccagactgagcacgtgctggagcccaagaaatgcagagacctgtgcacctctggtcagggcaagtacagtgacaggcacaccatgaagcactcagacgatgactcagaaattgtcagcgacgacatcagtgacattttccgatttcttgatgacatgagcatcagtggctccacgggagtgatacagtcgtcctgctacaacagcacaggatccttgtctcagctccataagtcagactgcgacagttcccctgagcacaacttaaccaaaattgccaatggggtccccaacagcaagggagacaagggcaaccggcctgaaaacacccaccactcggaagaagagctgaagaccagtgtgtgcaaactggtgctcaggattggcgaaatcgaacggaagctggaatccctgtcgggtgtccgtgatgaaatctcccaggtcttgggcaaactaaataaattggaccagaaaatgcaacagcctgagaaggtgagtgtgcagatagatctgaactccttgacaagcgagggtccgtctgatgacagtgcctctccccggatgttccacgcacacagtggctcccacggacccaaactagagaacaaccctgactggtgctgctctgatgctagcgggagcaacagtgaaagcctgcgggtcaaggccttaaaaaaaagcctcttcaccaggccatcctctaggtccctaacagaggagaacagtgccacagagtccaaaattgccagcatctccaactcgcccagagactggcgcaccatcacttataccaaccgtgtgggcctcaatgaggaggagataaaagacacaggcccaggagataataaagactggcatcggaaatctaaagaggcagacaggcagtacgacattcccccacagcaccgactgcccaagcagcccaaagatggcttcctggtggagcaggtgttcagccctcacccctaccctgcctccctcaaggcccacatgaagagcaaccccctgtacacagacatgcggctgaccgagttggccgaggtgaagcggggccaaccttcttggaccattgaggagtatgcacggaatgcgggcgacaagggcaagctgacagccctggacctgcagacgcaagaatctttaaacccaaataatttagagtactggatggaagacatttatactccaggatacgattcattactaaaacgtaaagaagccgaattcagacgagccaaggtctgcaagatagctgctctgatcgctgctgcggcatgcaccgtcatcctcgttattgtcgtgcccatctgcacaatgaaatcatgagctaagaatgcaaccttacgtacagcttatgactaccaatgtcgtcgtctgtatcttagaatcttgcagcagtgaggcaacaatttgttgaaatggagatgaaatcatggaggcatttctacaaatgttgaatgaaggtggttttcagaaagtatacattctagtgagaaatctacctacctattagctttgactcaattacactctgacgcatttttagaagtgcaatatcttttcctaccaaaagaacatcatggactatcaataaatacaaattgaatattccaagccaaaaaaggaagattaattgggttctttccattttgatgatgtttcatggtggggaataagttatacagaagatatttaatacacgcctctttagaagaaactaagggaaatagcaacataagaagaaaagaggtggcttctcttttccataatgttcttagaccattgctggtgaagtaacagggtgtgtgtccctaaagggtattacttctctgtcgacttttatcaagggctactgacgtttcattcttgcccttttgtcatcaacacgacagagtgtctgcatcactgcagatcttcatggaaacattctggaccttcttccttgcacttggagtgagaaggagctggactaccaagtcaggcgtggaatgaagtatgctcagactgcatgatgggccaaggtattcaggccaggagacctcgtcctcaatccaaagtgtaggggagctgcctgctaacgatgtaaggtcagtatttgaaaatcatggccactccaaaggatctcctgttcttgctttggtgtgtggctccattccttgattttctatctcctggtggtaccagatgctctgcctctcatacatgagttgaagagtttggaacttgtccttgtgccttgaagagtagagacaatggctaaacgttgacattctatctgtaaaccatggttttcacgcaccactaatatctgccattttcaatggctttaaaaagattttgaaagcttgctcaataatgttcaataatataataataataaaggcactgaggtcttctcagttaccccaacacctactccagagttttgaatacttgtcagcagtgcaaaaaatattatctgtttaaccacttatctatatgtctatctatctatctatatgtctatctatctatctaaatacttgatttttatttattgtcttctctgttaaataacttgagagcaaggtttctttcgtgtaaaagaagctgttgtaatttcatccaaatttgatctgtttccacctgctgaatggtgctctgacaataatggaacagaaagaatccttatcagcatctgattccaatgtcttgttacaggtcaaagaaaaaaggattgacagaaactagctaccttatatatattttttgataataaggtgggatataaatagattttggtagcaagtgtaatcactccgtatgatataataaatttctaaaagatttgagagcatctcaatttttaaagcaataggagtctagcatccattctgaaaaatcgcaaataatgcttagcttgctgtgtctgattctgttgttcaccattaaggggtagacagttaattttattatgttaacaagtgagggatgaatgttttcatctgtggtgaacctttatttttagaagtcttcatgttatctatttgtattatcatgtttatgtatggattttcaatttcagtaaccgaaaacttaagccttagtatgaaaaactgaggatttataattgaaaatgaaaaaaatatgttactctctatcatcagaattatagtctttggtgctctgttttcaatggggcatattacataaggttgtttctttcaccccaaagagactactaggttaccactctgggcattgcctttccacctaacccctcaaccagtaagactctacaccatattgtagccccactattctcctctttatcacagatgaagtgccagagcatcagagataggtagctcccaacctcttgctctggatttgcagaagagggggagatgtacttacccaggataagaaaaatctagtcaaatccaccccaaatcttccatttaacaggtaggaccatcgaggctggaccaaaccactttttccactgcccttggtgaatctattcctagtggaccccatttgggcatgtgcctagctaccttgggaaggcatgactataagtcacacctcaggcttggaaatgaaaggattctatagaatattctatactttccatagctggagaggtagtcagaaattcagtcttgctctgagtccacagtagctttaaaattcaactcaacattgttgtcacgtaacggaaacatctagacctggtaataatccaggaaattgcaaaatggaggccaaaagtaaggtgggtttctctggaaaggggtcatcctcagtctgataataccaagtctgacgctgaggttatgaatcattaccatggcttggagctattggatgcttggggtcttgggatagatagaaggtgaggttcacagttggagcttttcttgccattgaccccaagctcaccccagccttccttccctgaccctgagactcaccctatctatctcccctattccctcagtttgcagaatgagcaagatagagtctggctaggagggaaacatctatccatctctctaatctttgcccatcacctcctgttgcaatgagttcccgcaggtgacatacggactggcctctctactgtactgggtgccatctcccaccatactctggcatttttatgtaaaggataatttcttgtacctgagtctaaaattacaacgttatcaaaattcacttcgtttttcctgcattttaaaagtaataaaatattatttgagattattttgaaattaaatatccttaaccaatgattaaattcataatcatttcatcttctttcataatcatttcatcttctaatctgaatttgttttgaacacagccttgcagaaaagcaaaaaatatttccccgctcaaattttgccgacattttataccagtatccccttcattacagtaaactaaatcataacttacatcatccattactagctgatcataaattgttagtattttaaggtatgcaactatgtgattgacatctgtaaggctagtttaatagacgtgctaaatatcactgttctgaatatctgtgccatagttctgatacccttattggaatcaaggcagtgctgtttctgtttacaagttatcaagataagagcagtggcatcacatttgttgttgttgtttttttttttgaaatagaaaaaaacagaagaagctctgccaacaataaaagattttgttaagtggtataaaaatttgtgaatgttgaaattcaacatgcttcatattataaccaacctgcaagaatattgtggtcaattgtgtgaataccaaatcagtatatactgtatactgtactatgaaaatttgtatttaaaggcaaagatacaagtaattgttggtataattggggaaaagggtattcaatatttattaagtaacaatgagaaatgcaacaaacttccttatttatgccttatgaataaaagagtgtggaatgtaaggtgaaattttatgtgcaagatcctgaaggaatgggtattcttgaaggcagggactgtcttttctatgtttgttctgtacagctctcagcacactcttggtgcttgataaatgttatgttatataataccaataactaagcacatttttagatcttttttcaaatggcttgtgtaaaatttggttaatgtacaatggttggtttgaagctatcatgtaaaattggcctctccaaatataatcagaaataaaccgaaaaaaatata

SEQ ID NO: 23441 - DNA, 355 bp, Homo sapiens
accatatcagacagtgtcatagtttttgcttcaactgccaaactaatttaggaaactcaagagaaggaaaatgttttgtatttatccatatatttagtctttccatgattattttttcctttatgatgttgcaaaattccttctaattatcttttctgtcctgggaacagtttctagttattcttttagaataagtttactggtgagaaatctttttagtttcactttatctgatattgccttcatttccccttcattcttaaatgatatttagctggatatagaattttgtgttgacacttcatttctttcagcacttccacatatagtgtcacttcctctggcctccatagtt

SEQ ID NO: 23442 - DNA, 942 bp, Homo sapiens
ttccctctgtctgtctcgcctctgaatactaatgacgataccctctaaaaacgagagagacgagagaagagtgactaacctctattaggaagctggaaccaagcgttcatggaaggcaactcatcagaaagcaaagttcttttacagttcggtagattatgtacgagatctccatggtagtaaggggggtgagggtcggggagtgaaaaataagattctcttaaaactctttgaaatacaacgacatataagcaaaatatgtaaatgtgtataatgattataaaatgtgatgtaagcaatataaaggaacataaaggagatgactaaagatggcctgctctataagcaagccatgggaatggtgcaaaagtattaaattaagagagcaaacagaaatctaactgtggttctgtcattaattagctatctgaactggaacaagtcactggaacttcctggttctcagattttttcagttctaaagacataaggtagactagtagaaatgtaacatcatttccaggtctgaaattctaagtttacagctcatcaaaagtgtcatcagctggtggtgagtgtcctgtttgtcttacttctgataggacttcaatgacagcctgaaacctggaggtacataatgagtgcaaaaaagcctttttctgcggggtgcggtggctcacgcctgtaatcccagcactttgggaggctgaggtgggcggatcatgaggtcaggagatccagatcatcctggccaacatggtgaaaccctgtctctactaaaaatacaaaaaaattagctgggcatggtggcaggcgcctatagtcccagctactcgggaggctgaggcagaattgcttgaacccaggaggcagaggttgcagtgagccaagattgcgccactgcactccagcctgggtgacagaatgagactccatctcaaa

SEQ ID NO: 23443 - DNA, 446 bp, Homo sapiens
agtagctagctaaagactctgaaaagtaaatcctggttggtagattagggaactcaaaagtgtcatcagctggtggtgagtgtcctgtttgtcttacttctgataggacttcaatgacagcctgaaacctggaggtacataatgagtgcaaaaaagcctttttctgcggggtgcggtggctcacgcctgtaatcccagcactttgggaggctgaggtgggcggatcatgaggtcaggagatccagatcatcctggccaacatggtgaaaccctgtctctactaaaaatacaaaaaaattagctgggcatggtggcaggcgcctatagtcccagctactcgggaggctgaggcagaattgcttgaacccaggaggcagaggttgcagtgagccaagattgcgccactgcactccagcctgggtgacagaatgagactccatctcaaa

SEQ ID NO: 23444 - DNA, 457 bp, Homo sapiens
caggtgccaagatttctgtactgcctctaatttctgctaccacttaaactcaggcaggtggagcctacacactgatatttccttgtggatatcacacttcagaacgtgtccgctagataaagctctcaaacttaccaaggaaagtgatgacagcttgactcggccttacacagaaccctatgtaggtctcacacaatagaacaatgtacaaataagcatttttctttcccaaagaagcatgtaaagatttcccattcctgccactcaacttctctttgttgtgacagggtggaagaattactgtatatagaaaagatgtccgcagcgttcagtaaacacagacactaatgagactcagaggctcatctgtggtcaggtattataacagcttaaaactaaaaaaaaacaaaatattttgctccatggaaaggaagcatagtgaggagccaatggatta

SEQ ID NO: 23445 - DNA, 448 bp, Homo sapiens
ccctgctcaggggagggtggtgctcgtggctgggttttctttttaaccatttttacaaaaaccagcctgtggcccagcttcagcagggtagagtgtgggggggccagctcagcctcttgcgttgccttcgttcctgacgcccaccctggactctagggaacagcactgtgagcaggggctgtccagccccacccctaagccgtctttcccaggaatcctgggtggagtccaacacaatcacacggagaccaccatctgagcctatgtcatttgtcctcattctcattccagcatgagcgtttctgagtctcttcaagacgaatctagttttcaccttcacaggatataaagggatcaacctagaggtgggtgggagggtcctagagggcaggggaacaaccattttccaaccttggctttaataataaaaaccagctgcactgagact

SEQ ID NO: 23446 - DNA, 843 bp, Homo sapiens
caaagctacagtaatcagaacagtgtggtcctggcataagtaatgttggacaagtgagccccaaagtgagacttagcccatgaggttcttggctttgccaggaaagaattcaaggccaagccaatggtagaagaaaacagctttattgaaggggcagtgttatagctccagccctgttacaactctgattactcctgcacagcaggctctggcagagactagcagctcagggcagttttgcagtcatttatatctactttaaacacatgcagattaaggggtgatttgtgcaaaaatttctagggaatgggtaataacttttgggtcatcgagtcaatgccatggaagagaggggggataaccccctggtgttgcgatggcaacggtaaactgacatggcaactgatgagcgtgtcttacggaaagctcattccaccccagccctgtttcagctagtcctcaatttggtccagtgtccgagccctgcctctggagtcaagtcccacctcctacctcataaggagagacataaatcaatggaatagaatcgagagtccagaaataaactcatacctcgatgatcaattgattttcaacaacggtgccaagaccattcagtgggggaaagaatcatattttcaacaaatggtgccagataacgacatccaaaggagtgcaactgggcccctatctcacaccatctacagaaattaagtcaaagtgcctcaaacactaagagctaagactataacattcttagaagaatacagggatacctctttatgatcttgatttggtaattgatttttagataacactaaaagcacaagcaacaataggaaa

SEQ ID NO: 23447 - DNA, 1045 bp, Homo sapiens
atttaggttgatttcatgtctttgctattgtgaatagtgctgcagtgaacatacgcgtgcatgtatctttatgacagaatgatttatattcctttggatctatgggatcgctgggtcaaattcctatacgttttagttcaggtctagaaaagtaaaatcattaattaagggaagttagcagagttattttggccctgagaggctgtgatttaaaatattcagaaaatgtagttgaagtagttgatttggcttcaacttgaattccctatgtaattgcagggaattcaagggactctgaattcaattcagggaattcaaacagacctctttgcctttgagctagttttccccctaggcttttcttagcctgcaaaaatcctggttatctttgaggacccagttgagttggtcttgctcctaaatcattgacaagcccctaccctcaggcagagcagtttgtcctttgtgctccaaatactttttgttgtcactgtagttagggtttgcggtttaatcatctattgctgctgccagaaagcagaatcttggagggtagggagctttatatctttgcgagcctcaaccaacacaaagcttggcgtcagattgaattcaaattcaccttacgttgctagtatgaaaccaattgtgttgttgctttcatacaaatccagcagttttctgctaatgagacctgcaatgtaaaatttaaaaagaaaaaagaaaaaatatccaacaggtttctaccgtccaagtcactgatagaatctacaacagatcgacagagttacagctgtttcctgccccagttttaggcaccataaagattttctagaaggcttgccaatcatcatcatcctgtaagttcttacactgctacgcactaaactaattgcctttccccctcttaaaggtaacaggtttattgaggtataatttacatagggtgaaatttatgacatataatttacataccataaaactcacccacttttgtgtacaatgtaatgatttttagtgcctttacagttatgcaaccatgatc

SEQ ID NO: 23448 - DNA, 280 bp, Homo sapiens
tgtgaaattcaaaacaatttttaaaagaatattataagcttgttagtaaaactcatttgtatatgtgacaattctcttttagccctgaaagactatttgcgcagatgccagttacttaacaaatttgaagtattaggataaggcacattataaatgtagtgtttttccaaattgagttgtgattctaataggcaatgtaatagctcttgaaattcgaattattttataatattaactgtatgcataaattcggattaaatattttgtggtattaactgta

SEQ ID NO: 23449 - DNA, 552 bp, Homo sapiens
attaaacaacacgttctttttttttttcttttgaacagtgtcttgctctgtcacccaggctggagtgcggtagcataaccatagctcactgcaccctgaactcctgggatcaagtgatcctcccacctcagcctcccgagtagctaggaccacaggctcaagccaccacagccagctaactttttatttttattttttggtagaggtgaagttttgctttgttgcctgaaatgatctcaaactcctgacctcaagcaatccccccaccgcagcctcccaaaatgctgggattacactgtaaaccattacaagcatgagccactacacctggataaacaatacgttcctaaaacaatcaatgagtcaaagaactcataaaagaaggtataaaacactttgagatgaataaaaacaaaaccacaacacttcaaaactcatgggacgctgttaaaaatgtgccaagagaaattatagctgtaaacacttactttattaaaagatgtcgacgcggcccgcgatttagtagtagtagtccgacccgggaatccggga

SEQ ID NO: 23450 - DNA, 668 bp, Homo sapiens
attaaacaacacgttctttttttttttcttttgaacagtgtcttgctctgtcacccaggctggagtgcggtagcataaccatagctcactgcaccctgaactcctgggatcaagtgatcctcccacctcagcctcccgagtagctaggaccacaggctcaagccaccacagccagctaactttttatttttattttttggtagaggtgaagttttgctttgttgcctgaaatgatctcaaactcctgacctcaagcaatccccccaccgcagcctcccaaaatgctgggattacactgtaaaccattacaagcatgagccactacacctggataaacaatacgttcctaaaacaatcaatgagtcaaagaactcataaaagaaggtataaaacactttgagatgaataaaaacaaaaccacaacacttcaaaactcatgggacgctgttaaaaatgtgccaagagaaattatagctgtaaacacttactttattaaaagatttccaatctgaccaggtgcagtgactcacgcctgtaatcccagcactttgggaggccaaggcgggcggatccacctgagggcaggagttcgagaccagcctggtcaacatggtaaaaccccatctctactaaaaatacaaaaattagccaggcgtggtggcacatgc

SEQ ID NO: 23451 - DNA, 277 bp, Homo sapiens
atcataaacagacactcggttcacttgttgcctacacattgtagctcttcaatgtgtacaatgtgactgtcatcaccacaatcaactaatgattacatgaagcccttatgtggtaggtcacctgaacatccagtccctgtgcaaaatcataactaaaggaaaaacctgaaccaaagttgtgttctttgatcttgctttatttagctagtgatgggcaaagaggtcaatgacattgatattttctgagcatgcccttgtaccaggtactgtgatatgt

SEQ ID NO: 23452 - DNA, 5358 bp, Homo sapiens
gccagcctggccaagtgaacctacaacttttggaccaacaggtgtccctgctccaattcccgttttgtcagtgacacagactttgaccactggacctgattcagctgtatcccaagctcatttaacaccctctccagttcctgtgtcaatacaggcagttaaccagcccttgatgcctttgcctcagacattgagcctttatcaagacccactctatcctgggtttccttgtaatgaaaagggagatcgagccattgtaccaccttattcactgtgtcagactggggaggacctacctaaagataagaatattcttcgattcttcttcaatcttggtgtgaaggcatacagttgtcctatgtgggccccacattcttacctgtaccctctgcaccaggcctacctggcagcctgcaggatgtacccaaaggtccctgtccctgtttatcctcataatccctggttccaagaggctcctgctgctcagaatgaaagtgattgtacctgtactgatgcccactttcctatgcagactgaggccagtgttaatggtcaaatgccacagccagagattggaccgccgacattttcttcacctctggttatccctccatctcaggtgtctgaaagtcatggacaattgtcttaccaggctgatcttgaatctgagacccctgggcagcttctgcatgctgattatgaagagtcactaagtggcaagaatatgttcccccagccatcttttggacccaatccattcttaggcccagttcctattgcacctcctttctttcctcatgtttggtatgggtacccttttcagggattcatagaaaatccagtaatgaggcagaatattgtcctgccctctgatgaaaaaggagaattggatctgtctctggaaaatctggatctgtctaaagattgtggttcagtttcaacagtagatgagtttccagaagccaggggtgaacatgtacattctctccctgaagcaagtgtgagcagtaagccggacgaaggccggacagagcaatcttcccagacacgaaaggcagatacggcattggcttccatccctcctgtagcagagggaaaggctcatcctcccactcagattctaaacagagagagagaaactgtgcctgttgaacttgaacctaaaaggaccattcaaagcctgaaagaaaaaacagaaaaagtaaaagatcctaagactgctgctgatgtggtcagccctggggccaactctgttgatagcagagtgcaaagaccaaaagaagagagttcagaagatgaaaatgaagtgtctaatattttgagaagtggtagatccaagcagttctataatcaaacttatggaagcaggaagtacaaaagtgattggggctattctggtaggggtggatatcaacatgtgagaagtgaggagtcctggaaaggacagccaagcagaagtcgggatgaaggttatcagtaccatcgaaatgtcagagggcgaccatttaggggagataggaggagatcagggatgggagatggccataggggacagcacacttgatggttgttgccgaagtattttctaacagaaactcttaggtggaatgtttctgaaggctttaaaaaaaatacaataaagtaaaaaccgcagttggaactctttcctctccccagccccccttaccttcactcccatactggacaagacattttggacatgagttcaagggggcaggttaattcctggcattgccagttttcttcattcagaatctgtttgttgatcaagtgactgtccccgtaaaaagtagaagataagtttgttaaagtattttttataaacagcttaatataaaacattatagatttagtgtttggcttttttccttataagtttataagtttgatttcagatgttggaaatgtgtgctttatagtgtttactaaagtgacaagaaaatataccatttgacacactatagattccaaacataacgttgcaccaaatagaaatgtatattttattatgcaatgccttagtcataaactgggctcaaacaattctcagcctaaaacactgttgtcttttaaaatgcttccaacccaaaggcctttcatctcaatatctgtcaaacttgaataatgtcttctctttaatattcacataaggcagcctattaactgtgtcttagcaatgttgtatatagttcttttaatattcataaggtatatttttgaattttggtatttgttgagattgcatagaagaatagtaggaaatccaatgaaatggctgtttccaccaagaattcttagcactggtgtaaatatcatggtgcctactcgaaagaaatgtagatgctatgcattttgaaaataatctgcatcagttagaactgcagaagtttttttaatgccactttaacactaatgcactgacagattctaaatattttgtgagaagaaatgttaaaaatttttagcttgacaggtttctagagttgttttcttcctcccccccccccccccccccccccccccgcaccattggttgtgtatcactttcactttacacttgcatgttctacttgtcagggctggaactattgtatagaagataatatgattgtgacttctagttcttttctagaggatgctgctagaaaatggttttgctttgtattttatagcttgttacccttaggtaggtaacatcttacattctgttttcttccagtctttgcagtattcactagaggttccctttgcatgttgcactctgttctcatttggagattgaactctgaattaacacagtattcattcatctgtgttattttgtaaaaataactgtagcttatattctttatttgtgcataccaatgtgaaaatccactcttttattatgttgagattatcttctgatcaggaagtttgagtgctatgcaaataacatagtagtaatttctctttgcatgccatgtgtaatatacctagccaaaaccagatgcggtgactttctttttttgtaaagcaaattacttaagaaaatacaattcacttgaatttgacaaactgaaacagatgggttttctgggttctctgataacctatgggaatgtttggatgccagttgggctagtgaatcgccactgtactgtaataatggttatttacctctgtgctgttttaattacctaacgtctgtgtaactgctgatttgagtagtgattagcatttagataatgtaacaggattttagagagcactttgaaagataacattttattatgatggtgctaggtaaaaaattgtaaagactgggatggttgtgtggaaaacttttcttgagagaacctattgaaaggaatttgttgtcaccttcttaactagaatagttgttgaaggtaccgcttaagccatttttttcttaacatcggtggctcagttaaggaatgagaagatagagggtcctccactttcagctcatgcttttttatgtaggactagcttacctgattttaatgaaaatcacattttgatacaaacaccagatttgaaagttcaatgtgtttgatctcaggagtccaaaataagttgttgcttctagtgtcctgcattttattgactggggtttgatctcagcttctgaaaatgtttaaaaattggaaggaaatactactcatatcttcattgtcactttgtcttacctcaattgagtaacagaatatagctcctgaaggaaacactgatttgctttctgtttcccatatctcacctctaggatatgatggaagaagtgcttgaaagagaattttagcagatggtacttttcttagtgacctctggaataaaagaactgacttttgatagttttaaaattaatctttgcatgaaggttggtttcgctttttttcctttaagtttgtttttaaatgtattagtccaggggattttgccttatgctgaggtcaaactaaggataagcaagcttttgtccttcattttaactgttatgtcatactgttatgttgacatatttctttataagagaatagaggcaaaagtatagaactgaggatcatttgtatttttgagttggaaattatgaaacttcaccatattatgatcatacatattttgaagaacagactgaccaaagctcacctgttttttgtgttaggtgctttggctgaacttgattccagcccccttttccctttggtgttgtgtatgtctcttcatttcctctcaaatcttcaactcttgccccatgtctccttggcagcaggatgctggcatctgtgtagtcctcatactgtttactgataacccacaaattcattttcatggcagacctaagctcagaccctgccttgtcctggcaagcataggttttcccagaccacaatgctgatatatcttatttaatgcagactgtattcttgcagcgtgttgtttcctttgtgactcaaggttgaattaaaatgcctgtgaactgcaaacttgcttatgattgacttggtgcaataaagttcctttctaaccatttctggtttagaaaacattcagccatcctagaaactagcaatatttatttttgcctctttcgttttaccttcatttttagatgaggtaaatgttttgtcttttacttaagggtactaagcaaggtccactctagtgtagctgaagagaatgcatatttggctacactatttctgtttactgtattttgcttcctactttatgtctaaatgctattgtttgtttaaaatcctaataatgtctcatttccaatatgttattttcagataactaaggttttgctactaatgtcagccatttactctcccactaattgggattattttttaaaagaggtctttctccccgaaatacaagttttagaaaatcttagaagaggggtgggtgcatgtcttaatgctgggaagcggcaactttggggttgaacttacttgaatggattaaaaattgcattgtgttacagagctagaaaattttatgtatgaaaaacgataatagccttacactgagtacaaataatactttaagagcatgtgaagatgtgatcatttgtgatgttacttgtaaaaaaaagtatatatacatatcttttgaagtgttaaaaggaaactagtactttatattctttatcatatcactttttgtaagtgttgaatatattcctgtttatttttctatgttctgttttgtagccttaagaagtgtttcaaacatatctgaatgtataaaataagagtaaatgccctacatggtgtgatgctgcattatatataaaactgtgtgcatatattaaattttgtctcttga

SEQ ID NO: 23453 - DNA, 5272 bp, Homo sapiens
ggatgctttgcctcaaggctggttaactgctgtattgacaacaggaactggagagggtgttaaatgagcttgggatacagcccttgatgcctttgcctcagacattgagcctttatcaagacccactctatcctgggtttccttgtaatgaaaagggagatcgagccattgtaccaccttattcactgtgtcagactggggaggacctacctaaagataagaatattcttcgattcttcttcaatcttggtgtgaaggcatacagttgtcctatgtgggccccacattcttacctgtaccctctgcaccaggcctacctggcagcctgcaggatgtacccaaaggtccctgtccctgtttatcctcataatccctggttccaagaggctcctgctgctcagaatgaaagtgattgtacctgtactgatgcccactttcctatgcagactgaggccagtgttaatggtcaaatgccacagccagagattggaccgccgacattttcttcacctctggttatccctccatctcaggtgtctgaaagtcatggacaattgtcttaccaggctgatcttgaatctgagacccctgggcagcttctgcatgctgattatgaagagtcactaagtggcaagaatatgttcccccagccatcttttggacccaatccattcttaggcccagttcctattgcacctcctttctttcctcatgtttggtatgggtacccttttcagggattcatagaaaatccagtaatgaggcagaatattgtcctgccctctgatgaaaaaggagaattggatctgtctctggaaaatctggatctgtctaaagattgtggttcagtttcaacagtagatgagtttccagaagccaggggtgaacatgtacattctctccctgaagcaagtgtgagcagtaagccggacgaaggccggacagagcaatcttcccagacacgaaaggcagatacggcattggcttccatccctcctgtagcagagggaaaggctcatcctcccactcagattctaaacagagagagagaaactgtgcctgttgaacttgaacctaaaaggaccattcaaagcctgaaagaaaaaacagaaaaagtaaaagatcctaagactgctgctgatgtggtcagccctggggccaactctgttgatagcagagtgcaaagaccaaaagaagagagttcagaagatgaaaatgaagtgtctaatattttgagaagtggtagatccaagcagttctataatcaaacttatggaagcaggaagtacaaaagtgattggggctattctggtaggggtggatatcaacatgtgagaagtgaggagtcctggaaaggacagccaagcagaagtcgggatgaaggttatcagtaccatcgaaatgtcagagggcgaccatttaggggagataggaggagatcagggatgggagatggccataggggacagcacacttgatggttgttgccgaagtattttctaacagaaactcttaggtggaatgtttctgaaggctttaaaaaaaatacaataaagtaaaaaccgcagttggaactctttcctctccccagccccccttaccttcactcccatactggacaagacattttggacatgagttcaagggggcaggttaattcctggcattgccagttttcttcattcagaatctgtttgttgatcaagtgactgtccccgtaaaaagtagaagataagtttgttaaagtattttttataaacagcttaatataaaacattatagatttagtgtttggcttttttccttataagtttataagtttgatttcagatgttggaaatgtgtgctttatagtgtttactaaagtgacaagaaaatataccatttgacacactatagattccaaacataacgttgcaccaaatagaaatgtatattttattatgcaatgccttagtcataaactgggctcaaacaattctcagcctaaaacactgttgtcttttaaaatgcttccaacccaaaggcctttcatctcaatatctgtcaaacttgaataatgtcttctctttaatattcacataaggcagcctattaactgtgtcttagcaatgttgtatatagttcttttaatattcataaggtatatttttgaattttggtatttgttgagattgcatagaagaatagtaggaaatccaatgaaatggctgtttccaccaagaattcttagcactggtgtaaatatcatggtgcctactcgaaagaaatgtagatgctatgcattttgaaaataatctgcatcagttagaactgcagaagtttttttaatgccactttaacactaatgcactgacagattctaaatattttgtgagaagaaatgttaaaaatttttagcttgacaggtttctagagttgttttcttcctcccccccccccccccccccccccccccgcaccattggttgtgtatcactttcactttacacttgcatgttctacttgtcagggctggaactattgtatagaagataatatgattgtgacttctagttcttttctagaggatgctgctagaaaatggttttgctttgtattttatagcttgttacccttaggtaggtaacatcttacattctgttttcttccagtctttgcagtattcactagaggttccctttgcatgttgcactctgttctcatttggagattgaactctgaattaacacagtattcattcatctgtgttattttgtaaaaataactgtagcttatattctttatttgtgcataccaatgtgaaaatccactcttttattatgttgagattatcttctgatcaggaagtttgagtgctatgcaaataacatagtagtaatttctctttgcatgccatgtgtaatatacctagccaaaaccagatgcggtgactttctttttttgtaaagcaaattacttaagaaaatacaattcacttgaatttgacaaactgaaacagatgggttttctgggttctctgataacctatgggaatgtttggatgccagttgggctagtgaatcgccactgtactgtaataatggttatttacctctgtgctgttttaattacctaacgtctgtgtaactgctgatttgagtagtgattagcatttagataatgtaacaggattttagagagcactttgaaagataacattttattatgatggtgctaggtaaaaaattgtaaagactgggatggttgtgtggaaaacttttcttgagagaacctattgaaaggaatttgttgtcaccttcttaactagaatagttgttgaaggtaccgcttaagccatttttttcttaacatcggtggctcagttaaggaatgagaagatagagggtcctccactttcagctcatgcttttttatgtaggactagcttacctgattttaatgaaaatcacattttgatacaaacaccagatttgaaagttcaatgtgtttgatctcaggagtccaaaataagttgttgcttctagtgtcctgcattttattgactggggtttgatctcagcttctgaaaatgtttaaaaattggaaggaaatactactcatatcttcattgtcactttgtcttacctcaattgagtaacagaatatagctcctgaaggaaacactgatttgctttctgtttcccatatctcacctctaggatatgatggaagaagtgcttgaaagagaattttagcagatggtacttttcttagtgacctctggaataaaagaactgacttttgatagttttaaaattaatctttgcatgaaggttggtttcgctttttttcctttaagtttgtttttaaatgtattagtccaggggattttgccttatgctgaggtcaaactaaggataagcaagcttttgtccttcattttaactgttatgtcatactgttatgttgacatatttctttataagagaatagaggcaaaagtatagaactgaggatcatttgtatttttgagttggaaattatgaaacttcaccatattatgatcatacatattttgaagaacagactgaccaaagctcacctgttttttgtgttaggtgctttggctgaacttgattccagcccccttttccctttggtgttgtgtatgtctcttcatttcctctcaaatcttcaactcttgccccatgtctccttggcagcaggatgctggcatctgtgtagtcctcatactgtttactgataacccacaaattcattttcatggcagacctaagctcagaccctgccttgtcctggcaagcataggttttcccagaccacaatgctgatatatcttatttaatgcagactgtattcttgcagcgtgttgtttcctttgtgactcaaggttgaattaaaatgcctgtgaactgcaaacttgcttatgattgacttggtgcaataaagttcctttctaaccatttctggtttagaaaacattcagccatcctagaaactagcaatatttatttttgcctctttcgttttaccttcatttttagatgaggtaaatgttttgtcttttacttaagggtactaagcaaggtccactctagtgtagctgaagagaatgcatatttggctacactatttctgtttactgtattttgcttcctactttatgtctaaatgctattgtttgtttaaaatcctaataatgtctcatttccaatatgttattttcagataactaaggttttgctactaatgtcagccatttactctcccactaattgggattattttttaaaagaggtctttctccccgaaatacaagttttagaaaatcttagaagaggggtgggtgcatgtcttaatgctgggaagcggcaactttggggttgaacttacttgaatggattaaaaattgcattgtgttacagagctagaaaattttatgtatgaaaaacgataatagccttacactgagtacaaataatactttaagagcatgtgaagatgtgatcatttgtgatgttacttgtaaaaaaaagtatatatacatatcttttgaagtgttaaaaggaaactagtactttatattctttatcatatcactttttgtaagtgttgaatatattcctgtttatttttctatgttctgttttgtagccttaagaagtgtttcaaacatatctgaatgtataaaataagagtaaatgccctacatggtgtgatgctgcattatatataaaactgtgtgcatatattaaattttgtctcttga

SEQ ID NO: 23454 - DNA, 5085 bp, Homo sapiens
gccagcctggccaagtgaacctacaacttttggaccaacaggtgtccctgctccaattcccgttttgtcagtgacacagactttgaccactggacctgattcagctgtatcccaagctcatttaacaccctctccagttcctgtgtcaatacaggcagttaaccagcccttgatgcctttgcctcagacattgagcctttatcaagacccactctatcctgggtttccttgtaatgaaaagggagatcgagccattgtaccaccttattcactgtgtcagactggggaggacctacctaaagataagaatattcttcgattcttcttcaatcttggtgtgaaggcatacagttgtcctatgtgggccccacattcttacctgtaccctctgcaccaggcctacctggcagcctgcaggatgtacccaaaggtccctgtccctgtttatcctcataatccctggttccaagaggctcctgctgctcagaatgaaagtgattgtacctgtactgatgcccactttcctatgcagactgaggccagtgttaatggtcaaatgccacagccagagattggaccgccgacattttcttcacctctggttatccctccatctcaggtgtctgaaagtcatggacaattgtctaaagattgtggttcagtttcaacagtagatgagtttccagaagccaggggtgaacatgtacattctctccctgaagcaagtgtgagcagtaagccggacgaaggccggacagagcaatcttcccagacacgaaaggcagatacggcattggcttccatccctcctgtagcagagggaaaggctcatcctcccactcagattctaaacagagagagagaaactgtgcctgttgaacttgaacctaaaaggaccattcaaagcctgaaagaaaaaacagaaaaagtaaaagatcctaagactgctgctgatgtggtcagccctggggccaactctgttgatagcagagtgcaaagaccaaaagaagagagttcagaagatgaaaatgaagtgtctaatattttgagaagtggtagatccaagcagttctataatcaaacttatggaagcaggaagtacaaaagtgattggggctattctggtaggggtggatatcaacatgtgagaagtgaggagtcctggaaaggacagccaagcagaagtcgggatgaaggttatcagtaccatcgaaatgtcagagggcgaccatttaggggagataggaggagatcagggatgggagatggccataggggacagcacacttgatggttgttgccgaagtattttctaacagaaactcttaggtggaatgtttctgaaggctttaaaaaaaatacaataaagtaaaaaccgcagttggaactctttcctctccccagccccccttaccttcactcccatactggacaagacattttggacatgagttcaagggggcaggttaattcctggcattgccagttttcttcattcagaatctgtttgttgatcaagtgactgtccccgtaaaaagtagaagataagtttgttaaagtattttttataaacagcttaatataaaacattatagatttagtgtttggcttttttccttataagtttataagtttgatttcagatgttggaaatgtgtgctttatagtgtttactaaagtgacaagaaaatataccatttgacacactatagattccaaacataacgttgcaccaaatagaaatgtatattttattatgcaatgccttagtcataaactgggctcaaacaattctcagcctaaaacactgttgtcttttaaaatgcttccaacccaaaggcctttcatctcaatatctgtcaaacttgaataatgtcttctctttaatattcacataaggcagcctattaactgtgtcttagcaatgttgtatatagttcttttaatattcataaggtatatttttgaattttggtatttgttgagattgcatagaagaatagtaggaaatccaatgaaatggctgtttccaccaagaattcttagcactggtgtaaatatcatggtgcctactcgaaagaaatgtagatgctatgcattttgaaaataatctgcatcagttagaactgcagaagtttttttaatgccactttaacactaatgcactgacagattctaaatattttgtgagaagaaatgttaaaaatttttagcttgacaggtttctagagttgttttcttcctcccccccccccccccccccccccccccgcaccattggttgtgtatcactttcactttacacttgcatgttctacttgtcagggctggaactattgtatagaagataatatgattgtgacttctagttcttttctagaggatgctgctagaaaatggttttgctttgtattttatagcttgttacccttaggtaggtaacatcttacattctgttttcttccagtctttgcagtattcactagaggttccctttgcatgttgcactctgttctcatttggagattgaactctgaattaacacagtattcattcatctgtgttattttgtaaaaataactgtagcttatattctttatttgtgcataccaatgtgaaaatccactcttttattatgttgagattatcttctgatcaggaagtttgagtgctatgcaaataacatagtagtaatttctctttgcatgccatgtgtaatatacctagccaaaaccagatgcggtgactttctttttttgtaaagcaaattacttaagaaaatacaattcacttgaatttgacaaactgaaacagatgggttttctgggttctctgataacctatgggaatgtttggatgccagttgggctagtgaatcgccactgtactgtaataatggttatttacctctgtgctgttttaattacctaacgtctgtgtaactgctgatttgagtagtgattagcatttagataatgtaacaggattttagagagcactttgaaagataacattttattatgatggtgctaggtaaaaaattgtaaagactgggatggttgtgtggaaaacttttcttgagagaacctattgaaaggaatttgttgtcaccttcttaactagaatagttgttgaaggtaccgcttaagccatttttttcttaacatcggtggctcagttaaggaatgagaagatagagggtcctccactttcagctcatgcttttttatgtaggactagcttacctgattttaatgaaaatcacattttgatacaaacaccagatttgaaagttcaatgtgtttgatctcaggagtccaaaataagttgttgcttctagtgtcctgcattttattgactggggtttgatctcagcttctgaaaatgtttaaaaattggaaggaaatactactcatatcttcattgtcactttgtcttacctcaattgagtaacagaatatagctcctgaaggaaacactgatttgctttctgtttcccatatctcacctctaggatatgatggaagaagtgcttgaaagagaattttagcagatggtacttttcttagtgacctctggaataaaagaactgacttttgatagttttaaaattaatctttgcatgaaggttggtttcgctttttttcctttaagtttgtttttaaatgtattagtccaggggattttgccttatgctgaggtcaaactaaggataagcaagcttttgtccttcattttaactgttatgtcatactgttatgttgacatatttctttataagagaatagaggcaaaagtatagaactgaggatcatttgtatttttgagttggaaattatgaaacttcaccatattatgatcatacatattttgaagaacagactgaccaaagctcacctgttttttgtgttaggtgctttggctgaacttgattccagcccccttttccctttggtgttgtgtatgtctcttcatttcctctcaaatcttcaactcttgccccatgtctccttggcagcaggatgctggcatctgtgtagtcctcatactgtttactgataacccacaaattcattttcatggcagacctaagctcagaccctgccttgtcctggcaagcataggttttcccagaccacaatgctgatatatcttatttaatgcagactgtattcttgcagcgtgttgtttcctttgtgactcaaggttgaattaaaatgcctgtgaactgcaaacttgcttatgattgacttggtgcaataaagttcctttctaaccatttctggtttagaaaacattcagccatcctagaaactagcaatatttatttttgcctctttcgttttaccttcatttttagatgaggtaaatgttttgtcttttacttaagggtactaagcaaggtccactctagtgtagctgaagagaatgcatatttggctacactatttctgtttactgtattttgcttcctactttatgtctaaatgctattgtttgtttaaaatcctaataatgtctcatttccaatatgttattttcagataactaaggttttgctactaatgtcagccatttactctcccactaattgggattattttttaaaagaggtctttctccccgaaatacaagttttagaaaatcttagaagaggggtgggtgcatgtcttaatgctgggaagcggcaactttggggttgaacttacttgaatggattaaaaattgcattgtgttacagagctagaaaattttatgtatgaaaaacgataatagccttacactgagtacaaataatactttaagagcatgtgaagatgtgatcatttgtgatgttacttgtaaaaaaaagtatatatacatatcttttgaagtgttaaaaggaaactagtactttatattctttatcatatcactttttgtaagtgttgaatatattcctgtttatttttctatgttctgttttgtagccttaagaagtgtttcaaacatatctgaatgtataaaataagagtaaatgccctacatggtgtgatgctgcattatatataaaactgtgtgcatatattaaattttgtctcttga

SEQ ID NO: 23455 - DNA, 326 bp, Homo sapiens
gccagcctggccaagtgaacctacaacttttggaccaacaggtgtccctgctccaattcccgttttgtcagtgacacagactttgaccactggacctgattcagctgtatcccaagctcatttaacaccctctccagttcctgtgtcaatacaggcagttaaccagcccttgatgcctttgcctcagacattgagcctttatcaagacccactctatcctgggtttccttgtaatgaaaagggagatcgagccattgtaccaccttattcactgacaacgcctcactgacaacgcctcactgacaacgccctcactgacaacgcct

SEQ ID NO: 23456 - DNA, 5577 bp, Homo sapiens
ccaattagctggttatactttcttcatattttggtttttagctgaactcttgcagaggaaggatttggaatatttcattttcaacattatccctccctgattagaggtctaacttaatccttacattcggagtactcttgggggctcctagaattgcagagtcctgacattggagatcatctactcttatactgacattcccagtaaaacaaattcagatgttaactggcctgcatggggtcacacagtgagttagtggtagagcccgaatgtgaatgcaggtctggctaaacagtcagtgatggagatactatctcctatcaacctatgaggacttcagattggttttaggacaggagcaagcaatggagtcttaaagcagtgaattttgtaattcattttcacgttggttatcacagtgatttagtatttggactatagattatatggtctttgtaggcatgagaaacttattttgaccctagtacttgtagattgatatccacccaaacctctcttttttctcctcttttgtttatttaactgttttttgtctcttcaggcatacagttgtcctatgtgggccccacattcttacctgtaccctctgcaccaggcctacctggcagcctgcaggatgtacccaaaggtccctgtccctgtttatcctcataatccctggttccaagaggctcctgctgctcagaatgaaagtgattgtacctgtactgatgcccactttcctatgcagactgaggccagtgttaatggtcaaatgccacagccagagattggaccgccgacattttcttcacctctggttatccctccatctcaggtgtctgaaagtcatggacaattgtcttaccaggctgatcttgaatctgagacccctgggcagcttctgcatgctgattatgaagagtcactaagtggcaagaatatgttcccccagccatcttttggacccaatccattcttaggcccagttcctattgcacctcctttctttcctcatgtttggtatgggtacccttttcagggattcatagaaaatccagtaatgaggcagaatattgtcctgccctctgatgaaaaaggagaattggatctgtctctggaaaatctggatctgtctaaagattgtggttcagtttcaacagtagatgagtttccagaagccaggggtgaacatgtacattctctccctgaagcaagtgtgagcagtaagccggacgaaggccggacagagcaatcttcccagacacgaaaggcagatacggcattggcttccatccctcctgtagcagagggaaaggctcatcctcccactcagattctaaacagagagagagaaactgtgcctgttgaacttgaacctaaaaggaccattcaaagcctgaaagaaaaaacagaaaaagtaaaagatcctaagactgctgctgatgtggtcagccctggggccaactctgttgatagcagagtgcaaagaccaaaagaagagagttcagaagatgaaaatgaagtgtctaatattttgagaagtggtagatccaagcagttctataatcaaacttatggaagcaggaagtacaaaagtgattggggctattctggtaggggtggatatcaacatgtgagaagtgaggagtcctggaaaggacagccaagcagaagtcgggatgaaggttatcagtaccatcgaaatgtcagagggcgaccatttaggggagataggaggagatcagggatgggagatggccataggggacagcacacttgatggttgttgccgaagtattttctaacagaaactcttaggtggaatgtttctgaaggctttaaaaaaaatacaataaagtaaaaaccgcagttggaactctttcctctccccagccccccttaccttcactcccatactggacaagacattttggacatgagttcaagggggcaggttaattcctggcattgccagttttcttcattcagaatctgtttgttgatcaagtgactgtccccgtaaaaagtagaagataagtttgttaaagtattttttataaacagcttaatataaaacattatagatttagtgtttggcttttttccttataagtttataagtttgatttcagatgttggaaatgtgtgctttatagtgtttactaaagtgacaagaaaatataccatttgacacactatagattccaaacataacgttgcaccaaatagaaatgtatattttattatgcaatgccttagtcataaactgggctcaaacaattctcagcctaaaacactgttgtcttttaaaatgcttccaacccaaaggcctttcatctcaatatctgtcaaacttgaataatgtcttctctttaatattcacataaggcagcctattaactgtgtcttagcaatgttgtatatagttcttttaatattcataaggtatatttttgaattttggtatttgttgagattgcatagaagaatagtaggaaatccaatgaaatggctgtttccaccaagaattcttagcactggtgtaaatatcatggtgcctactcgaaagaaatgtagatgctatgcattttgaaaataatctgcatcagttagaactgcagaagtttttttaatgccactttaacactaatgcactgacagattctaaatattttgtgagaagaaatgttaaaaatttttagcttgacaggtttctagagttgttttcttcctcccccccccccccccccccccccccccgcaccattggttgtgtatcactttcactttacacttgcatgttctacttgtcagggctggaactattgtatagaagataatatgattgtgacttctagttcttttctagaggatgctgctagaaaatggttttgctttgtattttatagcttgttacccttaggtaggtaacatcttacattctgttttcttccagtctttgcagtattcactagaggttccctttgcatgttgcactctgttctcatttggagattgaactctgaattaacacagtattcattcatctgtgttattttgtaaaaataactgtagcttatattctttatttgtgcataccaatgtgaaaatccactcttttattatgttgagattatcttctgatcaggaagtttgagtgctatgcaaataacatagtagtaatttctctttgcatgccatgtgtaatatacctagccaaaaccagatgcggtgactttctttttttgtaaagcaaattacttaagaaaatacaattcacttgaatttgacaaactgaaacagatgggttttctgggttctctgataacctatgggaatgtttggatgccagttgggctagtgaatcgccactgtactgtaataatggttatttacctctgtgctgttttaattacctaacgtctgtgtaactgctgatttgagtagtgattagcatttagataatgtaacaggattttagagagcactttgaaagataacattttattatgatggtgctaggtaaaaaattgtaaagactgggatggttgtgtggaaaacttttcttgagagaacctattgaaaggaatttgttgtcaccttcttaactagaatagttgttgaaggtaccgcttaagccatttttttcttaacatcggtggctcagttaaggaatgagaagatagagggtcctccactttcagctcatgcttttttatgtaggactagcttacctgattttaatgaaaatcacattttgatacaaacaccagatttgaaagttcaatgtgtttgatctcaggagtccaaaataagttgttgcttctagtgtcctgcattttattgactggggtttgatctcagcttctgaaaatgtttaaaaattggaaggaaatactactcatatcttcattgtcactttgtcttacctcaattgagtaacagaatatagctcctgaaggaaacactgatttgctttctgtttcccatatctcacctctaggatatgatggaagaagtgcttgaaagagaattttagcagatggtacttttcttagtgacctctggaataaaagaactgacttttgatagttttaaaattaatctttgcatgaaggttggtttcgctttttttcctttaagtttgtttttaaatgtattagtccaggggattttgccttatgctgaggtcaaactaaggataagcaagcttttgtccttcattttaactgttatgtcatactgttatgttgacatatttctttataagagaatagaggcaaaagtatagaactgaggatcatttgtatttttgagttggaaattatgaaacttcaccatattatgatcatacatattttgaagaacagactgaccaaagctcacctgttttttgtgttaggtgctttggctgaacttgattccagcccccttttccctttggtgttgtgtatgtctcttcatttcctctcaaatcttcaactcttgccccatgtctccttggcagcaggatgctggcatctgtgtagtcctcatactgtttactgataacccacaaattcattttcatggcagacctaagctcagaccctgccttgtcctggcaagcataggttttcccagaccacaatgctgatatatcttatttaatgcagactgtattcttgcagcgtgttgtttcctttgtgactcaaggttgaattaaaatgcctgtgaactgcaaacttgcttatgattgacttggtgcaataaagttcctttctaaccatttctggtttagaaaacattcagccatcctagaaactagcaatatttatttttgcctctttcgttttaccttcatttttagatgaggtaaatgttttgtcttttacttaagggtactaagcaaggtccactctagtgtagctgaagagaatgcatatttggctacactatttctgtttactgtattttgcttcctactttatgtctaaatgctattgtttgtttaaaatcctaataatgtctcatttccaatatgttattttcagataactaaggttttgctactaatgtcagccatttactctcccactaattgggattattttttaaaagaggtctttctccccgaaatacaagttttagaaaatcttagaagaggggtgggtgcatgtcttaatgctgggaagcggcaactttggggttgaacttacttgaatggattaaaaattgcattgtgttacagagctagaaaattttatgtatgaaaaacgataatagccttacactgagtacaaataatactttaagagcatgtgaagatgtgatcatttgtgatgttacttgtaaaaaaaagtatatatacatatcttttgaagtgttaaaaggaaactagtactttatattctttatcatatcactttttgtaagtgttgaatatattcctgtttatttttctatgttctgttttgtagccttaagaagtgtttcaaacatatctgaatgtataaaataagagtaaatgccctacatggtgtgatgctgcattatatataaaactgtgtgcatatattaaattttgtctcttga

SEQ ID NO: 23457 - DNA, 4648 bp, Homo sapiens
gccagcctggccaagtgaacctacaacttttggaccaacaggtgtccctgctccaattcccgttttgtcagtgacacagactttgaccactggacctgattcagctgtatcccaagctcatttaacaccctctccagttcctgtgtcaatacaggcagttaaccagcccttgatgcctttgcctcagacattgagcctttatcaagacccactctatcctgggtttccttgtaatgaaaagggagatcgagccattgtaccaccttattcactgtgtcagactggggaggacctacctaaagataagaatattcttcgattcttcttcaatcttggtgtgaaggcatacagttgtcctatgtgggccccacattcttacctgtaccctctgcaccaggcctacctggcagcctgcaggatgtacccaaaggtccctgtccctgtttatcctcataatccctggttccaagaggctcctgctgctcagaatgaaagtgattgtacctgtactgatgcccactttcctatgcagactgaggccagtgttaatggtcaaatgccacagccagagattggaccgccgacattttcttcacctctggttatccctccatctcaggtgtctgaaagtcatggacaattgtcttaccaggctgatcttgaatctgagacccctgggcagcttctgcatgctgattatgaagagtcactaagtggcaagaatatgttcccgacagccaagcagaagtcgggatgaaggttatcagtaccatcgaaatgtcagagggcgaccatttaggggagataggaggagatcagggatgggagatggccataggggacagcacacttgatggttgttgccgaagtattttctaacagaaactcttaggtggaatgtttctgaaggctttaaaaaaaatacaataaagtaaaaaccgcagttggaactctttcctctccccagccccccttaccttcactcccatactggacaagacattttggacatgagttcaagggggcaggttaattcctggcattgccagttttcttcattcagaatctgtttgttgatcaagtgactgtccccgtaaaaagtagaagataagtttgttaaagtattttttataaacagcttaatataaaacattatagatttagtgtttggcttttttccttataagtttataagtttgatttcagatgttggaaatgtgtgctttatagtgtttactaaagtgacaagaaaatataccatttgacacactatagattccaaacataacgttgcaccaaatagaaatgtatattttattatgcaatgccttagtcataaactgggctcaaacaattctcagcctaaaacactgttgtcttttaaaatgcttccaacccaaaggcctttcatctcaatatctgtcaaacttgaataatgtcttctctttaatattcacataaggcagcctattaactgtgtcttagcaatgttgtatatagttcttttaatattcataaggtatatttttgaattttggtatttgttgagattgcatagaagaatagtaggaaatccaatgaaatggctgtttccaccaagaattcttagcactggtgtaaatatcatggtgcctactcgaaagaaatgtagatgctatgcattttgaaaataatctgcatcagttagaactgcagaagtttttttaatgccactttaacactaatgcactgacagattctaaatattttgtgagaagaaatgttaaaaatttttagcttgacaggtttctagagttgttttcttcctcccccccccccccccccccccccccccgcaccattggttgtgtatcactttcactttacacttgcatgttctacttgtcagggctggaactattgtatagaagataatatgattgtgacttctagttcttttctagaggatgctgctagaaaatggttttgctttgtattttatagcttgttacccttaggtaggtaacatcttacattctgttttcttccagtctttgcagtattcactagaggttccctttgcatgttgcactctgttctcatttggagattgaactctgaattaacacagtattcattcatctgtgttattttgtaaaaataactgtagcttatattctttatttgtgcataccaatgtgaaaatccactcttttattatgttgagattatcttctgatcaggaagtttgagtgctatgcaaataacatagtagtaatttctctttgcatgccatgtgtaatatacctagccaaaaccagatgcggtgactttctttttttgtaaagcaaattacttaagaaaatacaattcacttgaatttgacaaactgaaacagatgggttttctgggttctctgataacctatgggaatgtttggatgccagttgggctagtgaatcgccactgtactgtaataatggttatttacctctgtgctgttttaattacctaacgtctgtgtaactgctgatttgagtagtgattagcatttagataatgtaacaggattttagagagcactttgaaagataacattttattatgatggtgctaggtaaaaaattgtaaagactgggatggttgtgtggaaaacttttcttgagagaacctattgaaaggaatttgttgtcaccttcttaactagaatagttgttgaaggtaccgcttaagccatttttttcttaacatcggtggctcagttaaggaatgagaagatagagggtcctccactttcagctcatgcttttttatgtaggactagcttacctgattttaatgaaaatcacattttgatacaaacaccagatttgaaagttcaatgtgtttgatctcaggagtccaaaataagttgttgcttctagtgtcctgcattttattgactggggtttgatctcagcttctgaaaatgtttaaaaattggaaggaaatactactcatatcttcattgtcactttgtcttacctcaattgagtaacagaatatagctcctgaaggaaacactgatttgctttctgtttcccatatctcacctctaggatatgatggaagaagtgcttgaaagagaattttagcagatggtacttttcttagtgacctctggaataaaagaactgacttttgatagttttaaaattaatctttgcatgaaggttggtttcgctttttttcctttaagtttgtttttaaatgtattagtccaggggattttgccttatgctgaggtcaaactaaggataagcaagcttttgtccttcattttaactgttatgtcatactgttatgttgacatatttctttataagagaatagaggcaaaagtatagaactgaggatcatttgtatttttgagttggaaattatgaaacttcaccatattatgatcatacatattttgaagaacagactgaccaaagctcacctgttttttgtgttaggtgctttggctgaacttgattccagcccccttttccctttggtgttgtgtatgtctcttcatttcctctcaaatcttcaactcttgccccatgtctccttggcagcaggatgctggcatctgtgtagtcctcatactgtttactgataacccacaaattcattttcatggcagacctaagctcagaccctgccttgtcctggcaagcataggttttcccagaccacaatgctgatatatcttatttaatgcagactgtattcttgcagcgtgttgtttcctttgtgactcaaggttgaattaaaatgcctgtgaactgcaaacttgcttatgattgacttggtgcaataaagttcctttctaaccatttctggtttagaaaacattcagccatcctagaaactagcaatatttatttttgcctctttcgttttaccttcatttttagatgaggtaaatgttttgtcttttacttaagggtactaagcaaggtccactctagtgtagctgaagagaatgcatatttggctacactatttctgtttactgtattttgcttcctactttatgtctaaatgctattgtttgtttaaaatcctaataatgtctcatttccaatatgttattttcagataactaaggttttgctactaatgtcagccatttactctcccactaattgggattattttttaaaagaggtctttctccccgaaatacaagttttagaaaatcttagaagaggggtgggtgcatgtcttaatgctgggaagcggcaactttggggttgaacttacttgaatggattaaaaattgcattgtgttacagagctagaaaattttatgtatgaaaaacgataatagccttacactgagtacaaataatactttaagagcatgtgaagatgtgatcatttgtgatgttacttgtaaaaaaaagtatatatacatatcttttgaagtgttaaaaggaaactagtactttatattctttatcatatcactttttgtaagtgttgaatatattcctgtttatttttctatgttctgttttgtagccttaagaagtgtttcaaacatatctgaatgtataaaataagagtaaatgccctacatggtgtgatgctgcattatatataaaactgtgtgcatatattaaattttgtctcttga

SEQ ID NO: 23458 - DNA, 1652 bp, Homo sapiens
gccagcctggccaagtgaacctacaacttttggaccaacaggtgtccctgctccaattcccgttttgtcagtgacacagactttgaccactggacctgattcagctgtatcccaagctcatttaacaccctctccagttcctgtgtcaatacaggcagttaaccagcccttgatgcctttgcctcagacattgagcctttatcaagacccactctatcctgggtttccttgtaatgaaaagggagatcgagccattgtaccaccttattcactgtgtcagactggggaggacctacctaaagataagaatattcttcgattcttcttcaatcttggtgtgaaggcatacagttgtcctatgtgggccccacattcttacctgtaccctctgcaccaggcctacctggcagcctgcaggatgtacccaaaggtccctgtccctgtttatcctcataatccctggttccaagaggctcctgctgctcagaatgaaagtgattgtacctgtactgatgcccactttcctatgcagactgaggccagtgttaatggtcaaatgccacagccagagattggaccgccgacattttcttcacctctggttatccctccatctcaggtgtctgaaagtcatggacaattgtcttaccaggctgatcttgaatctgagacccctgggcagcttctgcatgctgattatgaagagtcactaagtggcaagaatatgttcccccagccatcttttggacccaatccattcttaggcccagttcctattgcacctcctttctttcctcatgtttggtatgggtacccttttcagggattcatagaaaatccagtaatgaggcagaatattgtcctgccctctgatgaaaaaggagaattggatctgtctctggaaaatctggatctgtctaaagattgtggttcagtttcaacagtagatgagtttccagaagccaggggtgaacatgtacattctctccctgaagcaagtgtgagcagtaagccggacgaaggccggacagagcaatcttcccagacacgaaaggcagatacggcattggcttccatccctcctgtagcagagggaaaggctcatcctcccactcagattctaaacagagagagagaaactgtgcctgttgaacttgaacctaaaaggaccattcaaagcctgaaagaaaaaacagaaaaagtaaaagatcctaagactgctgctgatgtggtcagccctggggccaactctgttgatagcagagtgcaaagaccaaaagaagagagttcagaagatgaaaatgaagtgtctaatattttgagaagtggtagatccaagcagttctataatcaaacttatggaagcaggaagtacaaaagtgattggggctattctggtaggggtggatatcaacatgtgagaagtgaggagtcctggaaaggacagccaagcagaagtcgggatgaaggttatcagtaccatcgaaatgtcagagggcgaccatttaggggagataggaggagatcagggatgggagatggccataggggacagcacacttgatggttgttgccgaagtattttctaacagaaactcttaggtggaatgtttctgaaggctttaaaaaaaatacaataaagtaaaaaccgc

SEQ ID NO: 23459 - DNA, 592 bp, Homo sapiens
tttgattccttaccggggaccttttgtgggaggtgctgggagggcaccgggacctcagagtgagcgctgcgtcagggctccctgggctttcaaacctcctcagcttctgggatgggatgtgtgcgtttggcgctgtcctgaagagatgcaaggcccttcctgccagccctcgtgaattgctgggattacaataggtgtgagccactgcgcccggccgacatgattcttaagcacatgaaatgcagggttatctcctttgtcctcactcagccattcattacaggagtcagcaaactgtttccaggggacaggtagcaaactgtttccaggggacaggtagcaaacgtcagcgcctttgtgggccacactgttcctgtcccagctggtcatgctgttgtcacattgaagcagatgcagacagtatgtagacagtgggcatgggtgtgcaccaataaagctttatttataaacaggtgccatgtccgatttatgatattaataaccatgggttactgagatgaaatgaggaaaagaatctagtgagaaagtacatgtagtcacccttgggtatatgcagagattggctccagga

SEQ ID NO: 23460 - DNA, 229 bp, Homo sapiens
agtcgatgagctcggtactttttaactgagcacatggcaaaatcatagactttcgagttgaaatgaaacttagacattctcttagatgactacagcacagacatcccggtgaggaagtataccgcgacgccgctctctaatctcagtgtcctgttccgcatttcccattcccgactgtcttttagggcaaaggacaaataaaatctggttctagagcttcgagcaccta

SEQ ID NO: 23461 - DNA, 965 bp, Homo sapiens
tttgattccttaccggggaccttttgtgggaggtgctgggagggcaccgggacctcagagtgagcgctgcgtcagggctccctgggctttcaaacctcctcagcttctgggatgggatgtgtgcgtttggcgctgtcctgaagagatgcaaggcccttcctgccagccctcgtgaatgctgggaggtcagccggccctcgtgaatgctgctgctgctggcaaggcttcacttggggatgatcacctggccacaggtgtctgtctttttctggactttaaaaatactttttattggccaggcacggtggctcacgcctgtaatcccagcactttgggaggccaaggcgggtggatcacgagatcaggagatcgagaccatcctggctaacacggtgaaaccccgtctatactaaaaataaaaaaattagccgggcatggtggcgggcgcctgtagtcccagcttcttgggaggctgaggcaggagaatggcgtgaacccgggaggcggaggttgctgtgagccaacatcatgccactgcaccccagcctgggcgacagagcaagactccatctcaaaaaaaaaaaaattttttttaatttaagtattttcagacctccagcaaagttgcaaaattctacgaataagtcctgtgtaccctttattcatttcaccacatggcacaatctcgcccccggcccccccatgtattacttttttttctgagacatgaatgtaagttgtaaacattgtgcccttttatccctgaaaactaatgttatttcctaaaattactgtccctcaacataaagacattctcttagatgactacagcacagacatcccggtgaggaagtataccgcgacgccgctctctaatctcagtgtcctgttccgcatttcccattcccgactgtcttttagggcaaaggacaaataaaatctggttctagagcttcgagcaccta

SEQ ID NO: 23462 - DNA, 760 bp, Homo sapiens
tactactactactactaaattcgcggccgcgtcgaccacctggccacaggtgtctgtctttttctggactttaaaaatactttttattggccaggcacggtggctcacgcctgtaatcccagcactttgggaggccaaggcgggtggatcacgagatcaggagatcgagaccatcctggctaacacggtgaaaccccgtctatactaaaaataaaaaaattagccgggcatggtggcgggcgcctgtagtcccagcttcttgggaggctgaggcaggagaatggcgtgaacccgggaggcggaggttgctgtgagccaacatcatgccactgcaccccagcctgggcgacagagcaagactccatctcaaaaaaaaaaaaattttttttaatttaagtattttcagacctccagcaaagttgcaaaattctacgaataagtcctgtgtaccctttattcatttcaccacatggcacaatctcgcccccggcccccccatgtattacttttttttctgagacatgaatgtaagttgtaaacattgtgcccttttatccctgaaaactaatgttatttcctaaaattactgtccctcaacataaagacattctcttagatgactacagcacagacatcccggtgaggaagtataccgcgacgccgctctctaatctcagtgtcctgttccgcatttcccattcccgactgtcttttagggcaaaggacaaataaaatctggttctagagcttcgagcaccta

SEQ ID NO: 23463 - DNA, 2698 bp, Homo sapiens
  misc_feature (2666)..(2666): n is a, c, g, or t
tttattttatgaagtaatgttaattttactaagaataaaacatccaaattttaagtattatgaaatactaaaactacatgttttaaaacagaggtccagtttattctaacatcttgctgacttctgtagaatttctgattgcatgactattatttatcttcttttagtgtagaaaataattttttacaaaaagtcacttttgggctgggcgcagtggctcacgcctgtaatcccagcactttgggaggctgaggcaggtggatcacaatgtcaggagtttgagactagcctggccaatatggtgaaaccctgtctctactaaaaatacaaaaattagccgggtgtggtggtgggcacctgtagtcccagctactcgggaggctgaggcaggagaattgcttgaacctaggaggctgagattgcagtgagccgaaatcacgccactacactccagcctgggcaacagagggagactccatctcaaaaaaaaaaaaagtcacttttggctaatcatgcagtcttctgaaaaggtttaatagagaaatgctgtttaggctgggcttggtggctcacatctgtaataccagcgctttgggaggctgaggcaggaggattgcttgaggccaggagtttaagttacagaactatgatcacactgccgcactgaagcctggatgacagagtgagaccttatctcaaaaaaaaaaaaaaaaagagagagagagagaaaaagaaatgctgtgtttaatcttcttaaaatgtatcttgtcctacatagttctcagaatacatatggggtatagttaggagataacaataacaagacctaaacaaattgcttatgggagatagcactgtaattagagaatttatttcatataaaataataatataaagtttgaactgattagaatgttccttaaatcatggtttcgtttgttgcagctgtcagctaacatttggttgagctcatataatccaaacctaattgtccaactattgtattgccactattgttaatttgttccttccttactttcttattgttggatcttatatgactgtatgactgtagataatagacagctagctaaatgtagagcaccatttttctcaatgagtttgttttcaaaggctttgcactggagaagatatgtgtagaatttttgttttatttttaaaatgtgtaaaacatcttttgttttatatgcttttaagaatgtagattgtaatttaggaaatggcatatattctgcaaagtggtataatgttgtatatatgaaaaacaggtatatttggtttagttctgtgtttcagtgactgataaacaaaaatgaagctaaaatgaatcaacggctcattcatagttactaaagccatgtcatgactgtcattctattatgaagaaaacagttttatttgagtgctttaatataatgcaacatttaagtcatcttaaggtgaaaagttattgaagtgttcttctctcaagttaacaaaattttacaaatgttcctgaagtgtatcgattgagggaattattttattctagcctgtcatgagtctgtctgagcatgatacttaacatgaacttgatgtagtaggtgcacatttgcctaacaggataaattcagtgatagcccaagctggtcaggagagacagaagtgctggctaggaggtctcagcctcgggcactacaatgtttatctttttctttttgaacaatattgtgaaaatgattgcattctcattgagcatgaaagtcaaaactggaattttctaaagctttggagaaaaggagagaattagtagggcaagatcaaagcatacattggaaataaacagtagaaataagcaaacaatataaagagacacgggaaatgcttctcgtgaagggcaaatgtaacaccataacagtagggaataaactgtgtcccacctgtttacttgtgtttatttgttgttatgatgagtatgcacctaccattttcctttattgtgatcactaaaatgaggccaaggtttaggaggtgagaaaaagtatcccttttacggattcagttcctgctaggatgttgtatcagaatcatgtgagaactcaggaagagatagagcagaaataaaaaggaagaaaatgtagattagaaaataagacttctgagaaaaagttcaaggaataaagattgtttgactctggagaggagaaagctgttgagatagtttgctaagtttgctaataaagctttattgagtcttttattgaagggttcaaagtaagaaatactatgccatagtgttctccatctctagtgaagacagaaccagagggaataaggatcttttttttaaagacagcatggaaagtttaagatttaggaacttcttgagaaatcttcataatatcttctattcaaaatcttttttttatttttaagggaataaaaattttaaaaattaagagatatacagatgactttttaagggtccttctttccagcacattattcccggtcgcctaaggctcaggcccaggtcatgggttatccattgaaatagccaacactggtgagaacgagcagcggaatcggcggcataaccgcaacgataacgtctaagatgtctagagcacttgcgcccggaagagatatccttggttatctttccngctgctagagcctatgaccagtacaccacgcc

SEQ ID NO: 23464 - DNA, 316 bp, Homo sapiens
agatagtttgctaagtttgctaataaagctttattgagtcttttattgaagggttcaaagtaagaaatactatgccatagtgttctccatctctagtgaagacagaaccagagggaataaggatcttttttttaaagacagcatggaaagtttaagatttaggaacttcttgagaaatcttcataatatcttctattcaaaatcttttttttatttttaagggaataaaaattttaaaaattaagagatatacagatgactttttaagggtccttctttccagcacattttttttaaaaactcaggttagaacaaa

SEQ ID NO: 23465 - DNA, 874 bp, Homo sapiens
  misc_feature (627)..(627): n is a, c, g, or t
  misc_feature (655)..(655): n is a, c, g, or t
  misc_feature (669)..(669): n is a, c, g, or t
aatcgcgggcctgtctgcaagacttgagttcaggactcccaatccttcgccatccgaacctggagggcatccagtcgacacctacaggggtcggacatgtccaaggctaactgagaggccttccagacgcttcatttttgttgtttgggtttgcggcagggcacaaagaggatggcgggtgaaaaagttgagaagccagatactaaagagaagaaacccgaagccaagaaggttgatgctggtggcaaggtgaaaaagggtaacctcaaagctaaaaagcccaagaaggggaagccccattgcagccgcaaccctgtccttgtcagaggaattggcaggtattcccgatctgccatgtattccagaaaggccatgtacaagaggaagtactcagccgctaaatccaaggttgaaaagaaaaagaaggagaaggttctcgcaactgttacaaaaccagttggtggtgacaagaacggcggtacccgggtggttaaacttcgcaaaatgcctagatattatcctactgaagatgtgcctcgaaagctgttgagccacggcaaaaaacccttcagtcagcacgtgagaaaactgcgagccagcattacccccccccgggggggggggggnaaacccccaaatttttccttgggcaaantttttcccaaaaanttttttcccccccccctttttttctccccaggctgagggggaaaccgggccccccccccaaaacgaggacaggggcaagagggtggttttcctgaagcagctggctagtggcttattacttgtgactggacctctggtcctcaatcgagttcctctacgaagaacacaccagaaatttgtcattgccacttcaaccaaaatcgat

SEQ ID NO: 23466 - DNA, 777 bp, Homo sapiens
aatcgcgggcctgtctgcaagacttgagttcaggactcccaatccttcgccatccgaacctggagggcatccagtcgacacctacaggggtcggacatgtccaaggctaactgagaggccttccagacgcttcatttttgttgtttgggtttgcggcagggcacaaagaggatggcgggtgaaaaagttgagaagccagatactaaagagaagaaacccgaagccaagaaggttgatgctggtggcaaggtgaaaaagggtaacctcaaagctaaaaagcccaagaaggggaagccccattgcagccgcaaccctgtccttgtcagaggaattggcaggtattcccgatctgccatgtattccagaaaggccatgtacaagaggaagtactcagccgctaaatccaaggttgaaaagaaaaagaaggagaaggttctcgcaactgttacaaaaccagttggtggtgacaagaacggcggtacccgggtggttaaacttcgcaaaatgcctagatattatcctactgaagatgtgcctcgaaagctgttgagccacggcaaaaaacccttcagtcagcacgtgagaaaactgcgagccagcattacccccgggaccattctgatcatcctcactggacgccacaggggcaagagggtggttttcctgaagcagctggctagtggcttattacttgtgactggacctctggtcctcaatcgagttcctctacgaagaacacaccagaaatttgtcattgccacttcaaccaaaatcgat

SEQ ID NO: 23467 - DNA, 720 bp, Homo sapiens
aatcgcgggcctgtctgcaagacttgagttcaggactcccaatccttcgccatccgaacctggagggcatccagtcgacacctacaggggtcggacatgtccaaggctaactgagaggccttccagacgcttcatttttgttgtttgggtttgcggcagggcacaaagaggatggcgggtgaaaaagttgagaagccagatactaaagagaagaaacccgaagccaagaaggttgatgctggtggcaaggtgaaaaagggtaacctcaaagctaaaaagcccaagaaggggaagccccattgcagccgcaaccctgtccttgtcagaggaattggcaggtattcccgatctgccatgtattccagaaaggccatgtacaagaggaagtactcagccgctaaatccaaggttgaaaagaaaaagaaggagaaggttctcgcaactgttacaaaaccagttggtggtgacaagaacggcggtacccgggtggttaaacttcgcaaaatgcctagatattatcctactgaagatgtgcctcgaaagctgttgagccacggcaaaaaacccttcagtcagcacgtgaacaggggcaagagggtggttttcctgaagcagctggctagtggcttattacttgtgactggacctctggtcctcaatcgagttcctctacgaagaacacaccagaaatttgtcattgccacttcaaccaaaatcgat

SEQ ID NO: 23468 - DNA, 371 bp, Homo sapiens
cttttccacggtgggcctcaaagcgctccaaatatacacttcctgattctacaaaaggagtgtttcaaaaccgctcaatcataagataggttcaaccctgtgagatgaatgcacacatcacaaagaagtttctcagtatgtttctgtttagtttttatttgaagatatttctttttccaccaaaggccacaaatggctccaaatatctacttgcagtttctgccaaaagagagattcaaaactgctcaatcaaaagataggttcaactctgggagttgaatgtacacatcccaaagaagtttctcagaatgcttctgtgtagtttttatatgaagatatttgcttttcctcagtaggcctcaaagggcagc

SEQ ID NO: 23469 - DNA, 463 bp, Homo sapiens
aacatttctcgttaaagtataatgttcagcaatggggaccaatctatactcctcatctgtagtctgtcaataaataggttgctccgactttaaattctcagcttgaattgtttcttttttgtgtgtggaatttatgaccctctgtgatgttgaccctacctaaagcaagtagaatagctacaccagcaaaatgaaataccataacaacaacgtatgcttatgtttatatagtgcttactgtgtgcctggcatggcattgaataaatatatatatttaataaatagagttggggtctcgctttgttgcctaccttgtgttgaactcctggcctcaagtgatccttctgcctccgccccgtcaaagtgctaggattacaggcatgagccactgctcccagccagcattgaatatatttttttttttatttcatcctgagaacaaccttatgaggtactttcaggt

SEQ ID NO: 23470 - DNA, 465 bp, Homo sapiens
agggagaaccaggcagttaatgctccagctctgagctggtctgggttcacatcctgacttcccgatcacctagctgtgactcacctgctcgaggcctcagtttcctcatctgtaaaaacagtagaggggattataaaaccaacagactcaagagactgtaatgagggtgacaggaccatgcatggttgggacctcagcacaatctgacaatcccaaggcctaagacctgtgaccttgaaggtggaaacaggaaaaaggagcagctaaacacatggaccctggagggttcacatccagctctgctctgtgtggccttgggcaagttacctaaccttactggcctcagttgctctgtctgtaaagtggggctattaatgacagttctcaccttatcaggttgtgctggggcttaaattagataactcaggttctgtacttagaacagcacctggcaccagtaacact

SEQ ID NO: 23471 - DNA, 400 bp, Homo sapiens
atgttgccccacactattgggaggtgtagatgttgctactgcatctggaaagcattgtgacaaacatgtgaccagagtattaaacaatgttctcacatttattcttgaaattccacacagagaaaggtgtttcggggaagtagaatattagcagagctatttgtaaaaataatgcacaggcatttgctgctgtatcctatgagcgaaaaattgggaagtgtgatatctgtgtctgcctccatactgtacagaaatcactgaatataggccagtgcggtggctcatgcctgtaatcccagcactttgggaggccgaggcaggtggatcacttgaggtcagcagtctagacccacctggccggcatgacgaagccccgtctctactaaaaatacaaaaaaaa

SEQ ID NO: 23472 - DNA, 510 bp, Homo sapiens
tcgtctgcatcaatgctcttgcatcttgagcttttaaaaaattgccattcaaaccagcaatttgctgacaaggttcacgcgctatgaccatgactgcagttgatcctggggagtggcttgcttgtctgcctggggatggcagccgcgtgcgttccctgtgctgtcctgtagggttgtggtggctttctgatattcaggttggtcccttttccttctttttggatgggctttcgaggttgggagaggaagctcagggatggaactgactaaacatatgtgagatgtttccttgtttgctgctcatggaggtttcatttctgaagtcttttcttgggagggaaaaggatgtgtggatatatgaggtgactctagaaccctcattttatggatgaagaaactgtgattcacagagggagagtgatttgtccagtgtcacgtggggagctggccggggagccagacctcctgtaccttttattgcagggtttattttatatatatttgctggca

SEQ ID NO: 23473 - DNA, 409 bp, Homo sapiens
caattcatttattctttttgttacctgtgttttacgtgtcatatccaataaatcactgtcaaatccaatattgtgaagcttttcccctatgttgtcttctaagagttttatatttttgctcttatatttaggtctttgatccattttgaattaatttttgtgtataatgtaaagacccagtttgattattttgccaacactattgttgaaaaaactgttctttctccattgaatggtcttaagcatcttgttgtaaatcatttgaccatatatgttgactttggttttatagtaataccattgttacaatatggtttgatacatgtaatttttatttgatgtttctgaactttgtttaaaatattggacttgttccatggctgaatgattgataataaaataataaata

SEQ ID NO: 23474 - DNA, 959 bp, Homo sapiens
gattttttacatttttttttttaatttcatgagaggctttgcagtgttccaaatgacaatttactatttctgtttcctttgtgtataaacggattggactcttctgaccatttgaccatttattccttggaatatggttattgaccttatatatttcatatttgtaatagatttatatacatatatataagcttgtaaacgtttatcagctattttcctcctctattactgtcccttttttacatttcattgggcaaaactattttatttttatatattcatacctattcaatttgtctctgatgatatcctttatttcacaatagtcagaagtttatcttccttccacagctggaataaatatgctattccaattttttttttaacatggaactctgcgacccatctgaatgggattgcagctgtgtgggaggaagcagttctaattttctgaactgatagccaggtggatacccagctaccccaactacatgtcttcagcagcacatcctctcaccattgtcatgttgcttctggtttgtaatattaaagtctttaagagtttaagtaatttccaaaactttttcttgttcccttgaatcacttctcattttctaacctaaaattgtatgtagataattaaaaaaaaaaaatactgttctggcaagtgaaataagaaatggagtattaatatttgaaaaaagagataaaattatgtttacttggtgataatgaaattcttttaaaaatctaaattcaagcagccaggtgcagtggctcacccctgtcatgccagcactttggggaggctgaggtgggcggatcacctgagcccaggagtttgagaccagcctgagcaacatgtcaaaactccgtctctaccaaaaatacaaaaattaaccagtctcataacccggtctatagatagatagatagataaaaaaatattttttaatcta

SEQ ID NO: 23475 - DNA, 448 bp, Homo sapiens
ggggacagacaaaccataaccaaaccagagtagctcccttaagaacatttaggactaccacttctgagcaacttctgactgtctagttgtagcagctttaatttctttccctatgtacccagaaggagtggccttgcctggctctacctcttctcattccctaaccagcagatcgatttcagagggcttttcctgtgaggttcatactctgtactttttttgacaaagtaggagatgaggtggtaatgatgtgtagagagggttggggagatggggattagtaaagagaagatagaggacatggaaattgcaggagctgagtggtaaacaggaagccttatggcaagagtgtcagggatggtggcctgtggaaaaaacggggaaggagaagagaaggggggattgcagagagagcgaggaaaaccaaggaggccaatgaccttgtctg

SEQ ID NO: 23476 - DNA, 371 bp, Homo sapiens
gctcgacctgcctcccaagtagctgggattaccgggatgcacccccatgcctggctaattttgtatttttgggaggcagaggcaggagaatcgcttgaacccgggaggtggaggttgcggtgagccaagatcatgccattgcactctagcctgggtgacagagcaagactccatctcaaaaaaaagaaaaccaaaaccaagctatacactgtctacaagagactcactttgtgtatacacagataggtctagaataaatagaaggaaaagaccagtttggctgggtgtggcggctcacatctgtaatctcagcactttcggaggtcaatgcaggtgggtcacttgaggcaaggagatcgagatcagcctgg

SEQ ID NO: 23477 - DNA, 289 bp, Homo sapiens
taagtcactgaagtgtaccctttaagccagggagggacagggccacactttcagtgctaacaattggtttctctctgagaatgaagtctgcaatctgtcacatcagaacaggaagagaggatttgagggagaaccccttctcagatctccagagtgtggaagggacgttttggtgctggctatggctttgtgacactgcagttgaaacgggcaaagtgggctcctcacttgaagaactttgatgcctctaaatgctctgatgagaaaaaacttgtcctcaaaatcgatg

SEQ ID NO: 23478 - DNA, 205 bp, Homo sapiens
ctatcagactgctaaacagcaatcatttgttcacataagatttagtaaacttctcttatgcaccatgtagtgcgctaggtgctggagatgtagaagtgaatataacaaaatccttatcatgaaaaattagatggcaatccagtgggaaaaaactgacacgtaaacatataatgaaatctggaagtgatatgatgaagtttgttca

SEQ ID NO: 23479 - DNA, 171 bp, Homo sapiens
gtaatgtctaatctgctaataaacctacctagcatatttttatctcaagtataatttgtgtccctagaagttttatctggattcttttgtttcgttttttgttggtttgttgctgttgttgttgttgttgagacgggatctctctatgtagcccaggctggtcttgaactc

SEQ ID NO: 23480 - DNA, 818 bp, Homo sapiens
gccccagacacatcctgcagctccccaagtgtgttcacagggagagagtcactgtgaggggttcctggcctggttttcctgtaaacctaccagaggaacccacatgtcatgcacagcaattagcatgccctgctaagacatctgcaggtagtggtagtgggtttaggactgtctccccagctttccacatgtgtcagagaactgtgaggaatgacagagctcttactcaaaaagcttatttgagattaggtaaagtccagtgagggtaaaattgcacaccttttaccacattcacctggggtcagtgtagacgccaaggttgtcaagcagctcttgcataaggactatgctggcagagaaaaaggcagtttccctgaggtcaaaggaggtgtttcaggcactcctggctccagacagtccctttctggcagagagggccagaaggagagctcagcagcgcagggccacctttctgcagccatcatcacaagtaagggcgagtgcttttgaaacctcaaatgcatccagctccaggaaggggataagtggctagctaaaagaaaaagtctttcaggtttcagtcacattgctggttacctcagcaaaatgttcccagaacacccactcaggtccctgtgtgtcatagtaatgatgcatctagtgactggtggtggcagaattctaagtagacccagctcttaagaaagcagtgttattccccttacctgtagtttgtctttattacttttaaatttttcttccagagaaaagtagtaacaggtcaggaaaatcccaggcgaaggagtaagccttctata

SEQ ID NO: 23481 - DNA, 418 bp, Homo sapiens
cctgaagattctggattttgaagacttagaaaaagcattattttgtctgctactctggttagattatttgcctttgcttggaatgggcaagacaaaactggacattaaattatgaattgctgttcatatatatcgaagcccattttaaaaagtagctgtaggttgggcatggtggttcacacctataatcccagcactttgggagtacgaggcaggcagatcattgacgccaggagtttgagaccagcctggccaacatggcaaaaccccatctctactaaaaatacaaaaacttcgccaggtgtaatgacatgtgcctgtagtcccagctacttggggcagggggcgggtgaaatgggagaatcacctgagcctggggaggttgaagttgcagtgagctgtgattgcgccgttgcac

SEQ ID NO: 23482 - DNA, 334 bp, Homo sapiens
aactactgggtactaggctcagtacctgggtgattaaataatctatacaacaaacccccatgacacaagtttacctgtataacaaacctgcacaggcacccctaaacctaaaataaaattttgaaaaaatcacattgctaacatggggcacctcctgggttcactgttctctgttcctctgtgtgtctcccactgcccgtgctgcaccacagctgtccgatgtcccgaaatcaggcatgcagttccttctagtcatcgtatttcagcgctgttttagctatccttgttactttgcttttccatatacgttttagaataatcttgtctttaccta

SEQ ID NO: 23483 - DNA, 1392 bp, Homo sapiens
tcaaaaagatgtttttccagtgttcttgaagtcatgaaaaaatgaacttttatatttttgttaggagtacaaattaaaacagttctttgtgaggtgaatttggctctatctcatcaaagttataaataagcaaatcctttcgctaaatagttcctcttggaatatatccttcagaggtacttaactaatgctctaatatttgtatacactgatgtgcattgcagtatttttgtaataatgaaatattgggaacaacctaaatgttcagagactggttatagtacataacattatagaatgtgttatgaatattaaaaagaagaggtaggtatgtactgacatggaaagatgcctatgagaagtgagcaaagcaaggtgcagagcagtatggatctcacctttgtcaaaacaaattaaataaatgcatgctatatattcacatacctatgtgtataatatacacattgagtctttaaagttacattttatgtgaatgtacatgaaaagatttgaaggcatacatgctcactcaggatactcctaggattggggtgggagagggggaggtgataagggaagaatgttcacatctttatataatttgttatctatagttataaaaaggaaatataaatggtaccacaagatctaattacttgaggtgaacgaagattgtcagttcatgacttgcaaactactagatggattaaggagttataaaagaaatctatcaaagtatttgttcttaatttttaaacttaaaaatgaaaggaaaaaaaattttttaaatgatccccagtactggtcagagcatgaggcatagtaaatatttttacacactgcttgtgggattagaaattggcacaacttgtgcagagggagtaatttggcagtgtattgagagtgttctatctcttgactcactaagcccgcttctgagagtcttaaaggaacaaaaggaagcgagagcaaaaaaatgtttacacaaaatgttttcattgattattaaagaatatattggtgggaggtgtgcactggatatttccagggaaggagtggctaagtaaattaaggtatgctcatttgacagaatatctattatatgactcaaaatggatgcatataataaccttaacatgggaagattattggttatcatagtaaattttttaaaaggaaaaatctaagatttgatagcccttatgagctcacctctgtttaaatgtattatttatacagagattaaactggtgtaaaattaaagatagaaaactaagacaaacataagtacaaatgtgttttctgaatttctggcttaccctagagctgacctgtagggaacaggtggcaaaatagttggtgactgttgtccctaatttgtgccctcatttt

SEQ ID NO: 23484 - DNA, 379 bp, Homo sapiens
ctgctgaattgggcctcagaacaatagacccctagcttagtggaagaactgcatcccctcataccttaaagagtacatatgtgcctcaagtcacaggtgctatagtaattttcaagacactgagcctaggaacccactccacagctgctttgagcacctgtgcctgggatcccagtgccattatggctgcctataggctgtgtcagatccaataccaagaaagaccccctcagctaagactccacactgttaggacgataagaacagaagtatccctaaagcccctgaccttataacctatccagccactgccactgccacaaactcctgaagcctaggtcactgaagcacttgtgtgcattgttaacattgatcctaa

SEQ ID NO: 23485 - DNA, 494 bp, Homo sapiens
cccccccttgttttctatgcaagaagactgaggccagtgagaggaaatgatgtgctcaggcatgcacagtgagacagcgattggagccaagactagacttcagtgccctcatttccaccctagacctgctccaagactctatggagccttcattgaggagcgtgggagtaggggttagtctaaaattgaaaaaagaatttgggtcgagtgcagtggctcacagctgtaatccccacactttgggaggctgaggtgggcagatcacatgaggccaggattttgagaccagcctggtcaacatggcgaaaccccatctctactgaaaaaaataaataaataaaaaaattagacagacatggtggtgcacatctgtaatacagctcctcgggaggctgaggcacgagaatctcttgaacccaggaggcagaggttgcagtgagctgagatcatgccattgtgctccagcctgggtgacagagcaagactctgtctca

SEQ ID NO: 23486 - DNA, 509 bp, Homo sapiens
taatctagcttttaaatctcataacttattaatatagatcctgtttggatgggagattccaatatttcatcactgttaattctctttcttattttggggtatgtctttgttagacatggcagagggcgctttctaaacagagctctttccaccaagtattatatttagaagctcatagggactctgaatggaacaaaagcttatgctaagataaaaaatacaggctgggcttggtggctcacacctgtaatcccagcactttgggaggccgaggcaggcagatcacttgaggtcaggagtttgagaccagcctggccaaaatggtgaaacccctcctgcctactaaaaatacaaaaattagccaggcgtcatggcacacacctgtaatcccagctacttgggaggctgaggcaggagaattgcttgaacccgggaggtggaggttgcagtgagccgagagcacgccattgcactccagcctgggcaacaagagcgagacgctgtctcaa

SEQ ID NO: 23487 - DNA, 434 bp, Homo sapiens
tgaggtcaggagtttgagaccagcctggccaacatggtgaaacctatctctgctaaaaatataaaaattagccagccatggtggcaggcacctgtaatctcagctactcaggagactgaagcaggagaatcacttgaacctgggaggcagaggttgcactgagccaagattgcaccactgcactccagcctaggcaacaaagcgagaatccgtctcaaaaaaaaaaacaactaaaaaaataaaaataaagggatgttctttgatgagcagcgggacaaatcatctaagttttgtttcacattgtagggagattaacctgtggggggatgctcagactggcatggggcgacccaggatgaatgagggtcttcaggtggtgagattaggcaagtgggatcttgctgtgttgcccaggctgatctccaattcctggg

SEQ ID NO: 23488 - DNA, 1414 bp, Homo sapiens
  misc_feature (1365)..(1365): n is a, c, g, or t
  misc_feature (1404)..(1404): n is a, c, g, or t
accccacaggtatatgatctgtaaaacaggctgcgcccagtctttttatttttaaaaataataataaaaaatagtaaactttatttttagagcaattttatgttcacagtaaaattgagaggcagctctttttttgtttttacagtagaatttcagttaataaatagaaggagtgatggaaatagaaaatcatcattaggcgatctccatggcaggttcttgttgcaggcaagaatcaaccaatggatgctaaaattagtgggtgaaagtgtggtaagaaacacggtatttaaataggctctaagtatctgccctacaaaatacttattcattacaaaggggaacctttgtaatgtaacactggagaaatctggatataccactctaacctggtgacacattgacatctgtcagaagacaaaaattttgacaaaccaagtttaaagattaattggcttttattagcaattcatgaatcaggcagcatcccatctaaagatttacaaaggcactccaatgagctgagcagtggaggcaggctttattggtagaaaaaagctgaagaaggcagaaacaaggaaaaagagtgattgctcattacaaaattactttccttgtagggttaaaacagaggaacttcattatcttgctagcacaaataaactggccccttctgattggttgctgtgaatggcctgtttgttggaaaactggcccattttattgttcagtttgattatgtggtgcctagcaggagtgactccattcaggttttgtgtgctctgttggagtctagtgtagaaactcagcccaaaacagtggctttctatacgtttatttaacacgtcagatgcttcctgatgcagtgcactgagaaggacatagcatcgcctctgtggtattttttgccaggaaaggtaatttttgtctaatcatgagaaaacagagataaacccaaattgaggaacattctacaagataacttcccagtactttaaaaaagtctcaaagtcataaacaagaaagaactgagggactattgcatattggagcgatctaaagaagtattacaatttgtggaattcttgattaaatcctggaccagcaaaaggacattagtgggaaaattgatgaaattcaaatgagatcttatattgaagttaattgtgtcagtgtacatttcctggttttcataattgcaagtgattatgtaaggtttgttaatattaggagcacctgagcctggaaagttgaggctgcagtgagctgagatcatgccactgcactccagcctgggtgacagagcaagctctgtctcaaaaataaataaaaataaaaaagaagagaaaaaaagtctattataancacaccacaacacaaacatgttttaaatggcaaggtagntgatgtggtg

SEQ ID NO: 23489 - DNA, 465 bp, Homo sapiens
catggctggtgctgctgttcctgatggtgctgctcctatgctgagcaccgggcatctgctcaaccaggacagcaaagaatcctccaggtaaaatatcgcttagtgtggaggttgggaactcctgatctttgtccaccgtggggatggaaggaagccagggtgaaggggataaggaactgtctgtgtgagctacccccctaagaaatggcagtgaaggccctctcctgaagtcagcatctccagacggtggtgttcccaccagtgatggctaaacccaggaaggcagacgaacccctggcccacatgatggacacatttccacgtttcctgggaaagactagatgatgacagagttggacagggatatatcagtcccttatcagttgcttttataagggaagaatatgaacctacatgtatgatttttgcattataaaatttataaactcagaaataatttagtaa

SEQ ID NO: 23490 - DNA, 464 bp, Homo sapiens
ggtgctgctcctaggtaggcaccggggatgctgctcaacctcccgcaaggcacaagacagccccccgacagcaaagaatcctccaggtaaaatatcgcttagtgtggaggttgggaactcctgatctttgtccaccgtggggatggaaggaagccagggtgaaggggataaggaactgtctgtgtgagctacccccctaagaaatggcagtgaaggccctctcctgaagtcagcatctccagacggtggtgttcccaccagtgatggctaaacccaggaaggcagacgaacccctggcccacatgatggacacatttccacgtttcctgggaaagactagatgatgacagagttggacagggatatatcagtcccttatcagttgcttttataagggaagaatatgaacctacatgtatgatttttgcattataaaatttataaactcagaaataatttagtaa

SEQ ID NO: 23491 - DNA, 303 bp, Homo sapiens
tccaggctggtctcaaactcctggcctcaactgatcctcccaccctggcctcccaaagtgctaggattataggcatgagccattgcacccagccagattgttttgtaatgaaaactacttccttctagagttaagataacactttctgaacagtatctaaggaagaaggtacacaaaataaaaataaattggtgttcatatattaaaaaaatgcatatatgcataatatgctcactgatataagaaaataggtatttttccatatggcccagcaattccattgctaggtatatacccaaaaga

SEQ ID NO: 23492 - DNA, 2247 bp, Homo sapiens
  misc_feature (1)..(1): n is a, c, g, or t
ncggcacctggaaatggaaagccagtgaaggctgctttgggccggggcagcgggtgggaccgggcgggagggattccaaagagaccgccgggaaggctagagcttggaattccggctcctcggagtcctggccctcccccaccgccgcctcggagctcagcacaccttggatgggggaggcgggcagctcctagccccgcaccccaggaggcgcgctcggagggaagccgccaccgcgccgcctctgcctcggcgcggaacaaacggttaaagattttgggcagcgcctcgcggggggaggagccaggggcccaatccgcaattaaagatgaactttgggtgaactaattgtctgaccaagcggaggaagttcctgcagatgaagcgcaggaaatacggcttcatctacaagacgcatctgttcgggcggcccaccgtacgggtgatgggcgcggacaatgtgcggcgcatcttgctcggagagcaccggctggtgtcggtccactggccagcgtcggtgcgcaccattctgggatctggctgcctctctaacctgcacgactcctcgcacaagcagcgcaagaaggtgattatgcgggccttcagccgcgaggcactcgaatgctacgtgccggtgatcaccgaggaagtgggcagcagcctggagcagtggctgagctgcggcgagcgcggcctcctggtctaccccgaggtgaagcgcctcatgttccgaatcgccatgcgcatcctactgggctgcgaaccccaactggcgggcgacggggactccgagcagcagcttgtggaggccttcgaggaaatgacccgcaatctcttctcgctgcccatcgacgtgcccttcagcgggctgtaccggggcatgaaggcgcggaacctcattcacgcgcgcatcgagcagaacattcgcgccaagatctgcgggctgcgggcatccgaggcgggccagggctgcaaagacgcgctgcagctgttgatcgagcactcgtgggagaggggagagcggctggacatgcaggcactaaagcaatcttcaaccgaactcctctttggaggacacgaaaccacggccagtgcagccacatctctgatcacttacctggggctctacccacatgttctccagaaagtgcgagaagagctgaagagtaagggtttactttgcaagagcaatcaagacaacaagttggacatggaaattttggaacaacttaaatacatcgggtgtgttattaaggagacccttcgactgaatcccccagttccaggagggtttcgggttgctctgaagacttttgaattaaatggataccagattcccaagggctggaatgttatctacagtatctgtgatactcatgatgtggcagagatcttcaccaacaaggaagaatttaatcctgaccgattcatgctgcctcacccagaggatgcatccaggttcagcttcattccatttggaggaggccttaggagctgtgtaggcaaagaatttgcaaaaattcttctcaaaatatttacagtggagctggccaggcattgtgactggcagcttctaaatggacctcctacaatgaaaaccagtcccaccgtgtatcctgtggacaatctccctgcaagattcacccatttccatggggaaatctgatgagcttgaatgttcaaacctgagacttattggaagtgtacatatgagtttttaaggagtgttgtgttgactttatatttaatttctaaatgtatattataatatttatgtgttttgactatactaccacaatctttaaatattaaaataatgaatttgtatcatttccaaataaagtaaaatttgaaggtacttttctggtattttaagattcctgttgggtaaaactcaccagtttagtattttcttagtgtatttaaccagattttacaatgcctacctggacttatttgtcatctttgcatctgttttctgtgagaagaaatcttagctgttttttatgttaacagttattagaaaatatatgtctgtgtgtgttattccagacgtatctctgtaaattcttctatagtcacttagattccctatttggaaaattgatccaagttaatttaatttttttttggtttgctgtactttagggaaagatgaacctgaaaaggtaacactgagaactgtcactctaacctctccagcttatctaacatgtcataaacataataaatctgtgttgtccaata

SEQ ID NO: 23493 - DNA, 2093 bp, Homo sapiens
gaattcggcacgagtggcgcgggaggtcgcggcgcgccatggggctcccggcgctgctggccagtgcgctctgcaccttcgtgctgccgctgctgctcttcctggctgcgatcaagctctgggacctgtactgcgtgagcggccgcgaccgcagttgtgccctcccattgccccccgggactatgggcttccccttctttggggaaaccttgcagatggtactgcagcggaggaagttcctgcagatgaagcgcaggaaatacggcttcatctacaagacgcatctgttcgggcggcccaccgtacgggtgatgggcgcggacaatgtgcggcgcatcttgctcggagagcaccggctggtgtcggtccactggccagcgtcggtgcgcaccattctgggatctggctgcctctctaacctgcacgactcctcgcacaagcagcgcaagaagccgcgaggcactcgaatgctacgtgccggtgatcaccgaggaagtgggcagcagcctggagcagtggctgagctgcggcgagcgcggcctcctggtctaccccgaggtgaagcgcctcatgttccgaatcgccatgcgcatcctactgggctgcgaaccccaactggcgggcgacggggactccgagcagcagcttgtggaggccttcgaggaaatgacccgcaatctcttctcgctgcccatcgacgtgcccttcagcgggctgtaccggggcatgaaggcgcggaacctcattcacgcgcgcatcgagcagaacattcgcgccaagatctgcgggctgcgggcatccgaggcgggccagggctgcaaagacgcgctgcagctgttgatcgagcactcgtgggagaggggagagcggctggacatgcaggcactaaagcaatcttcaaccgaactcctctttggaggacacgaaaccacggccagtgcagccacatctctgatcacttacctggggctctacccacatgttctccagaaagtgcgagaagagctgaagagtaagggtttactttgcaagagcaatcaagacaacaagttggacatggaaattttggaacaacttaaatacatcgggtgtgttattaaggagacccttcgactgaatcccccagttccaggagggtttcgggttgctctgaagacttttgaattaaatggataccagattcccaagggctggaatgttatctacagtatctgtgatactcatgatgtggcagagatcttcaccaacaaggaagaatttaatcctgaccgattcatgctgcctcacccagaggatgcatccaggttcagcttcattccatttggaggaggccttaggagctgtgtaggcaaagaatttgcaaaaattcttctcaaaatatttacagtggagctggccaggcattgtgactggcagcttctaaatggacctcctacaatgaaaaccagtcccaccgtgtatcctgtggacaatctccctgcaagattcacccatttccatggggaaatctgatgagcttgaatgttcaaacctgagacttattggaagtgtacatatgagtttttaaggagtgttgtgttgactttatatttaatttctaaatgtatattataatatttatgtgttttgactatactaccacaatctttaaatattaaaataatgaatttgtatcatttccaaataaagtaaaatttgaaggtacttttctggtattttaagattcctgttgggtaaaactcaccagtttagtattttcttagtgtatttaaccagattttacaatgcctacctggacttatttgtcatctttgcatctgttttctgtgagaagaaatcttagctgttttttatgttaacagttattagaaaatatatgtctgtgtgtgttattccagacgtatctctgtaaattcttctatagtcacttagattccctatttggaaaattgatccaagttaatttaatttttttttggtttgctgtactttagggaaagatgaacctgaaaaggtaacactgagaactgtcactctaacctctccagcttatctaacatgtcataaacataataaatctgtgttgtccaata

SEQ ID NO: 23494 - DNA, 376 bp, Homo sapiens
aaatacggcttcatctacaagacgcatctgttcgggcggcccaccgtacgggtgatgggcgcggacaatgtgcggcgcatcttgctcggagagcaccggctggtgtcggtccactggccagcgtcggtgcgcaccattctgggatctggctgcctctctaacctgcacgactcctcgcacaagcagcgcaagaaggtgggggcaggaggcgacggctggacagggagggggaccccatttatgagcggaattccggctgatggatgctaggcgcgggctagcagcttgaggtgggctaggaccctctgccagctccaggttagctttcccagctcggagagtgccatgtgtctggcaggactgggggtgtctggaa

SEQ ID NO: 23495 - DNA, 1723 bp, Homo sapiens
gaattcggcacgagtggcgcgggaggtcgcggcgcgccatggggctcccggcgctgctggccagtgcgctctgcaccttcgtgctgccgctgctgctcttcctggctgcgatcaagctctgggacctgtactgcgtgagcggccgcgaccgcagttgtgccctcccattgccccccgggactatgggcttccccttctttggggaaaccttgcagatggtactgcagcggaggaagttcctgcagatgaagcgcaggaaatacggcttcatctacaagacgcatctgttcgggcggcccaccgtacgggtgatgggcgcggacaatgtgcggcgcatcttgctcggagagcaccggctggtgtcggtccactggccagcgtcggtgcgcaccattctgggatctggctgcctctctaacctgcacgactcctcgcacaagcagcgcaagaaggtgattatgcgggccttcagccgcgaggcactcgaatgctacgtgccggtgatcaccgaggaagtgggcagcagcctggagcagtggctgagctgcggcgagcgcggcctcctggtctaccccgaggtgaagcgcctcatgttccgaatcgccatgcgcatcctactgggctgcgaaccccaactggcgggcgacggggactccgagcagcagcttgtggaggccttcgaggaaatgacccgcaatctcttctcgctgcccatcgacgtgcccttcagcgggctgtaccggggcatgaaggcgcggaacctcattcacgcgcgcatcgagcagaacattcgcgccaagatctgcgggctgcgggcatccgaggcgggccagggctgcaaagacgcgctgcagctgttgatcgagcactcgtgggagaggggagagcggctggacatgcaggcactaaagcaatcttcaaccgaactcctctttggaggacacgaaaccacggccagtgcagccacatctctgatcacttacctggggctctacccacatgttctccagaaagtgcgagaagagctgaagagtaagggtttactttgcaagagcaatcaagacaacaagttggacatggaaattttggaacaacttaaatacatcgggtgtgttattaaggagacccttcgactgaatcccccagttccaggagggtttcgggttgctctgaagacttttgaattaaatggataccagattcccaagggctggaatgttatctacagtatctgtgatactcatgatgtggcagagatcttcaccaacaaggaagaatttaatcctgaccgattcatgctgcctcacccagaggatgcatccaggttcagcttcattccatttggaggaggccttaggagctgtgtaggcaaagaatttgcaaaaattcttctcaaaatatttacagtggagctggccaggcattgtgactggcagcttctaaatggacctcctacaatgaaaaccagtcccaccgtgtatcctgtggacaatctccctgcaagattcacccatttccatggggaaatctgatgagcttgaatgttcaaacctgagacttattggaagtgtacatatgagtttttaaggagtgttgtgttgactttatatttaatttctaaatgtatattataatatttatgtgttttgactatactaccacaatctttaaatattaaaataatgaatttgtatcatttccaaataaagtaaaatttgaaggt

SEQ ID NO: 23496 - DNA, 332 bp, Homo sapiens
gggaaaccttgcagatggtactgcaggtaagggagggtggggcgggacaggctgcttccccggagcccggcgcggctctgggcttctgctgaagtcggggtaggcgcccccgggaggcatgctattgcggctaggagcagggctggcgggagcgcggcgctccccggcgccccctcatgcccacttctctcctccgccttcctcccacagcggaggaagttcctgcagatgaagcgcaggaaatacggcttcatctacaagacgcatctgttcgggcggcccaccgtacgggtgatgggcgcggacaatgtgcggcgcatcttgctcggaga

SEQ ID NO: 23497 - DNA, 206 bp, Homo sapiens
agattccacaaaaagagtgtttcaaacctgctctgtgaaagggaatgttcaactctgtgacttgaatgcaaacatcccaaagatgtttctgagaatgcttctgtctagattttatatgaagatattcccgtttccagcgaaatcctcaaagctgtccaaatatccacatgcaaattctacaaaaagagtgtttcaaaactgctcta

SEQ ID NO: 23498 - DNA, 349 bp, Homo sapiens
taggaacttgaaaaatgaatgctttttttttgtcttgttacattaggaatatttacattaggttgatcttcaataatgaattttttttaaaagcctgatttaatggatcaagaataattttagttagagagcaagccgggcatggtggctcatgcctgtaatcccagcactttgggaggccgaggcgggtggatcatgaggtcaggagatcgagaccatcctggctaacatagtgaaacccccgtctctactaaacataaaaaaaattagccaggtatggtggcgggcacctgtagtcccagctactcaggaggctgaggcaggagaatgacgtgaatccaggaggcag

SEQ ID NO: 23499 - DNA, 468 bp, Homo sapiens
ttgggaggctgaggcaggagaattgcttgaacctgggaggtggaggttgcagtgagctgagattgcgccacagcactccaacctcggggacgaagcaaaactctgtctcgaaaaaaaaaagaaaagaaaagaaggaaagcgaaaaaaaaaagaaaagaaaagaaggaaaggagagggaggaggagggggagaaaagaaaggagagggtggagaagaaaaatgaaagaaaaaagaaaaaaggaaaagaaagatgacttctatagttgttgtgggttagaaacaatcttcagtgtaggaaggcaagtttaacactgaaacaggtttcagatttggttttcttcataaaataaacaacaaaccaaatatggaaatgttcaaacagaaagaagaggtgcaaaaggagttttcaagttttgctaatgtgcaccaagaaacactatactaattaataaaaacatctatatataa

SEQ ID NO: 23500 - DNA, 496 bp, Homo sapiens
attaaagtctttacttaaaggaaatcaatatgtattaataggatttttaataaataaaaaactagggccgggtgcggtggctcacgcctgtaatcccagcactttgggaggccaaggcaggcagatcgcttgaggccaggagtttgagaccagccgcctgggcaacgtggtgaaaccccatctctactgaaagtgcaaaaaattatctgggcatggtggcacatgcctgtggtccaagctactcaggaggctgaggtgggaaaatcacctgagctgcggaagtccaagctgcagtgagttgtgatcaggccactgcactccggcctgggtgatgggagcaagaccctgtctaaataagtaaataagaaactaggactacaatatttattcttataagctattatatctatcttccctgggcagaaccccctaaagaaagtgacaacaaaagagaacacggaaaagcagtagataaaaaggcaagttgggggaagaa

SEQ ID NO: 23501 - DNA, 440 bp, Homo sapiens
ttttgagatggagtcttgatctgtcgcccaggctggaatgtagtggcgcgacctcagctcactgcaacctccaccttctgggttcaagcaattctcctgcctcagcctcctgagtggctgggactacaggtgcacgccatcacacccggctaatttttgtattttagtagagacggggtttcaccatgttggccaggacggtctcgatatcctgacctcatgatccatcaactcagccttccaaagtgcagggattacaggcgtgagcccaccgcgcccggccaagaaactgatttttttttaaggcacccccactggggatatactggcccaggtgattaacttcagcaccaggtggtaacacctggaatggttcccagtgctccagtttccagttagggtccttatgatttgaggataaaatgtgaaatgggttcact

SEQ ID NO: 23502 - DNA, 234 bp, Homo sapiens
gtagaagatggcaccaagccatttcaggaaatgttattgtttatgagggtctttagtgtgatatcctaagaaaaaggtaaaatggtgtccatcagtcatgcagccctatccctatttttgtatttcacaacatctttaaagtctgaatgaggaatgttggctacttttgcctaaactggcccttttctttccattgctgaatattaattaaaagaaagtataggccaggtgagg

SEQ ID NO: 23503 - DNA, 375 bp, Homo sapiens
aagactctcagaaaaaaaaaaaaaaaaaaaaaaaaaaagattgtaatgaagctggaaaattcctattgacgtcatagccatcataatgtcatagagcaatgcattactcacatgggtgtggtgatcctggtgtaaactaacctactgcattgccagtcatgcgaaagtatagcacatgccatcacgtatagtacgtaatacttgataatgataataattttcatttttattttctgtacttgctgtactgtacagatattattttctgtacttgctgtactgtactctttatcataactttacagtgtactccttctatttgtttaaaaacaagttaactgtaaaacaagcaggtccttccaaggtattccagag

SEQ ID NO: 23504 - DNA, 585 bp, Homo sapiens
aacagaggccctgaagttattcgtgagcaagtctgggaaatggaaatggaggttccaattcctgtttttactaatttaatgtgtataaaatgttatctatatcttttcttcattcctttgttccttcctttcttttgagggactttcataggttcattcaagagttttaacccctaactcatttttctcacaaggccttaaattccacaacctcatcatctaccacctttggtgctttcagaatcatgactctcaatgttgaagaatgggctactgcatggaaggtgggtgcaaacccctaaaatttccacccctggttctggaaagtgagaaattggggatttcaatactgcaagccatccttcacattctaaactcattgtctttacttagttccgtcagcatttctttcttccagtcagtggggtattggcatggacttgtactggctcataagagctgattggtaagttttcaggaatttgcaagctggttgttaagcacagtcattattgaaagcaaattatgtaaacttacaattaaataaattatatcaaaaccaaaaataataaatactcagaactt

SEQ ID NO: 23505 - DNA, 1042 bp, Homo sapiens
aggctctgttgtccctcagacggcgctgctgcagtgcgtcttcgcacttacgcggagcggtaatgtgaggaagcctcccgccaaacagatgagggaggaggaggaggggagaggccagagagagaagcggctttcgggaaggaaagtgtgatctaggaggtggaatagtcctctccaaactttgacctgaggtgagaatgaccctctatttggatttggattacacaaagtttaacgttttttggaaaaatcctacctaggtaatgtgtagttctcaatgcatcatgtcaggcagcttatgatgccaatttgtcccatggaaagaaaaatgtactgtatttcactgtgctgaatgcaactgccaatcaagatagtctgcagcctacctgtggaccttaatgatttcacatgttctgcggaagaatttctcccccacctccaatgactatggcattccttgggaaagttagcttggtatttacttttccccagcaggtcccaagctgaccaaaaaaataaataaaaataaaaaataaaatcaacaacaacaacaacaacaacaaaaacacaaaacaacaatcagttagccaggctgtttcaatggcccaataagttccatgatagcaagaattctatgaataataatgggacatggaatcccatgcagcctcgcgagagctcagccaaatcacccggaaattctgcttcatcacagccctttctcttgccataaaactgcttgggctctgtctttgcttccacatcatttaagcctttctgccgaccctccagcaattccatccctggggcctccgcccgtcactatgctggggctccccagggcttctcaagaggctccgtcagctccatcctagaggcctcttcacagcaccagatgaagtccacacctccttttgtaggacgttcaagcaacacaggccagagtaaggatcaaagtaaaagtcatcctaaattcaccactgagagataccactgccggtaaacaggagactgctttttcggatgtctacgcatttataca

SEQ ID NO: 23506 - DNA, 477 bp, Homo sapiens
  misc_feature (125)..(125): n is a, c, g, or t
ggaaggatttcaggcatggcttgatccagctactcaaaaaaggttgtcagaaatgtctgtccgttcttcatttattctttctcatttgtgggctttgttcccagataagatcactccttctgggnacaagatggtcactagtagatccaggtttactttctatcagctgagcaacctctcaagaaaaaataaataaataaataaacctctcttggattacaggcatgagccactgcactcggctgtaccgtgattattagttcaaggttctctttcactggggtaaagaccttaagagagcagtttttgggctttatattctcaatttcccgcacagtgcctagcacatagcaaggactcaacaaatttcattgaatgaatgaaaaaacatagtttaccaaatgtcagtgtactcaaactcttttaactgctagctatagaaatccaattaagactcacttgggtaaaaaaaaataa

SEQ ID NO: 23507 - DNA, 1064 bp, Homo sapiens
aggctctgttgtccctcagacggcgctgctgcagtgcgtcttcgcacttacgcggagcggtaatgtgaggaagcctcccgccaaacagatgagggaggaggaggaggggagaggccagagagagaagcggctttcgggaaggaaagtgtgatctaggaggtggaatagtcctctccaaactttgacctgaggtgagaatgaccctctatttggatttggattacacaaagtttaacgttttttggaaaaatcctacctaggtaatgtgtagttctcaatgcatcatgtcaggcagcttatgatgccaatttgtcccatggccttaaattccacaacctcatcatctaccacctttggtgctttcagaatcatgactctcaatgttgaagaatgggctactgcatggaaggtgctgatccttttagaggcagccgtggaagaggaaaagagatcagaagaggtgagcaacttcccgacagtaaggccctggctagacctcaggatggtccctgcctcctggacattaggaagcccaaaggccagaacaaaaacacatgcctagtgggggaaggctcactaagagggcaccaagtggggcaaatacccctggtaacccatttatggaggctgccacagaaatgctagttggaaattttcctccttcagtctatcatgaatttcttttttctcttttgagatgaagtcgcccgggctgcagttcagtggtgcaatctcagctcactgcaagctctgcctcccaggttccaacgattgtcttgtctcagcctcctgagtagctgggattacaggcatgagccactgcactcggctgtaccgtgattattagttcaaggttctctttcactggggtaaagaccttaagagagcagtttttgggctttatattctcaatttcccgcacagtgcctagcacatagcaaggactcaacaaatttcattgaatgaatgaaaaaacatagtttaccaaatgtcagtgtactcaaactcttttaactgctagctatagaaatccaattaagactcacttgggtaaaaaaaaataa

SEQ ID NO: 23508 - DNA, 1200 bp, Homo sapiens
aggctctgttgtccctcagacggcgctgctgcagtgcgtcttcgcacttacgcggagcggtaatgtgaggaagcctcccgccaaacagatgagggaggaggaggaggggagaggccagagagagaagcggctttcgggaaggaaagtgtgatctaggaggtggaatagtcctctccaaactttgacctgaggtgagaatgaccctctatttggatttggattacacaaagtttaacgttttttggaaaaatcctacctaggtaatgtgtagttctcaatgcatcatgtcaggcagcttatgatgccaatttgtcccatggccttaaattccacaacctcatcatctaccacctttggtgctttcagaatcatgactctcaatgttgaagaatgggctactgcatggaaggtgctgatccttttagaggcagccgtggaagaggaaaagagatcagaagaggtgagcaacttcccgacagtaaggccctggctagacctcaggatggtccctgcctcctggacattaggaagcccaaaggccagaacaaaaacacatgcctagtgggggaaggctcactaagagggcaccaagtggggcaaatacccctggtaacccatttatggaggctgccacagaaatgctagttggaaattttcctccttcagtctatcatgaatttcttttttctcttttgagatgaagtcgcccgggctgcagttcagtggtgcaatctcagctcactgcaagctctgcctcccaggttccaacgattgtcttgtctcagcctcctgagtagctgggattataggcacgcaccatcatacccgactaatttttgtatttatagtagagatggggttttgccatgttggccaggctggtcttgaactcctgaccttagggtgatccacccatcttggcctccaaaagtgctgggattacaggcatgagccactgcactcggctgtaccgtgattattagttcaaggttctctttcactggggtaaagaccttaagagagcagtttttgggctttatattctcaatttcccgcacagtgcctagcacatagcaaggactcaacaaatttcattgaatgaatgaaaaaacatagtttaccaaatgtcagtgtactcaaactcttttaactgctagctatagaaatccaattaagactcacttgggtaaaaaaaaataa

SEQ ID NO: 23509 - DNA, 1076 bp, Homo sapiens
aggctctgttgtccctcagacggcgctgctgcagtgcgtcttcgcacttacgcggagcggtaatgtgaggaagcctcccgccaaacagatgagggaggaggaggaggggagaggccagagagagaagcggctttcgggaaggaaagtgtgatctaggaggtggaatagtcctctccaaactttgacctgaggtgaggccttaaattccacaacctcatcatctaccacctttggtgctttcagaatcatgactctcaatgttgaagaatgggctactgcatggaaggtgctgatccttttagaggcagccgtggaagaggaaaagagatcagaagagaaaaggatattggtttgcggaacatgtgggacaagaagttcccagaagaatttgtgagcaacttcccgacagtaaggccctggctagacctcaggatggtccctgcctcctggacattaggaagcccaaaggccagaacatacccctggtaacccatttatggaggctgccacagaaatgctagttggaaattttcctccttcagtctatcatgaatttcttttttctcttttgagatgaagtcgcccgggctgcagttcagtggtgcaatctcagctcactgcaagctctgcctcccaggttccaacgattgtcttgtctcagcctcctgagtagctgggattataggcacgcaccatcatacccgactaatttttgtatttatagtagagatggggttttgccatgttggccaggctggtcttgaactcctgaccttagggtgatccacccatcttggcctccaaaagtgctgggattacaggcatgagccactgcactcggctgtaccgtgattattagttcaaggttctctttcactggggtaaagaccttaagagagcagtttttgggctttatattctcaatttcccgcacagtgcctagcacatagcaaggactcaacaaatttcattgaatgaatgaaaaaacatagtttaccaaatgtcagtgtactcaaactcttttaactgctagctatagaaatccaattaagactcacttgggtaaaaaaaaataa

SEQ ID NO: 23510 - DNA, 863 bp, Homo sapiens
aggctctgttgtccctcagacggcgctgctgcagtgcgtcttcgcacttacgcggagcggtaatgtgaggaagcctcccgccaaacagatgagggaggaggaggaggggagaggccagagagagaagcggctttcgggaaggaaagtgtgatctagtgctgatccttttagaggcagccgtggaagaggaaaagagatcagaagagaaaaggatattggtttgcggaacatgtgggacaagaagttcccagaagaatttgtgagcaacttcccgacagtaaggccctggctagacctcaggatggtccctgcctcctggacattaggaagcccaaaggccagaacaaaaacacatgcctagtgggggaaggctcactaagagggcaccaagtggggcaaatacccctggtaacccatttatggaggctgccacagaaatgctagttggaaattttcctccttcagtctatcatgaatttcttttttctcttttgagatgaagtcgcccgggctgcagttcagtggtgcaatctcagctcactgcaagctctgcctcccaggttccaacgattgtcttgtctcagcctcctgagtagctgggattacaggcatgagccactgcactcggctgtaccgtgattattagttcaaggttctctttcactggggtaaagaccttaagagagcagtttttgggctttatattctcaatttcccgcacagtgcctagcacatagcaaggactcaacaaatttcattgaatgaatgaaaaaacatagtttaccaaatgtcagtgtactcaaactcttttaactgctagctatagaaatccaattaagactcacttgggtaaaaaaaaataa

SEQ ID NO: 23511 - DNA, 579 bp, Homo sapiens
ctattaattcatttaattctcatagcaaccccataggtactgtaatccccgttttagggattggggaaccaaggcgtagagaaatcatatcatttccccagtaatcccagctgataaatggcacagaagaatttgggccaaggcagcatgagctccagacttccatttagagcattttattgcctactcaccttgactgtcagtctggttcagattctgccacttcccgctgcacgtccctggcattcagtttctttccctgtcaagttgttgtcataataccctccttggaggctttttgggagagttcagtgagagagactgtgtcacgctccacacggagtacctgaacataacaagtgtagctactggaccttctttttggttaacgtgaattaagaattagctctctacaaaaaaatataaaaattagctgggcgtggtggcacacacctgtaggtccagctacttaggaggctgaggtgggaggatcgcttgagcctgggaggtagagattgcagtgatccaagatcacaccactgcactccagcctgggtgacagtaagaccctgtctcaaa

SEQ ID NO: 23512 - DNA, 535 bp, Homo sapiens
cctcccagtagtgaattgctcatgacattgtcacacagaccttaatgaatgatatggaaagatactgaatatttttcctcccggaatgccaaccaagcttcagtgtcccagcgccttcattccagctgatcatggcaaaggcttggtactgagatccagtgagacctttgtcctacaaaaaccacattctcactggatgcctacaagtcctctctatgggactgttacccaagcctgtttacagaattttcaacaattacatctgcccatttgctgagtctcacttctctgcactaattgttgacttcaatttatatttttaatgtacaaatgctatcaccaacttcagtgcatgaagacctctctttcttctcttcaaacccatgactttgcttggaataacagggatggctttatggcatggctttctcattatttcatgtgtcttcattttgctttcccaagccagattgtaaattccttgaaagaggagaccctgaaaactagaaatacctatacagacagatagacagta

SEQ ID NO: 23513 - DNA, 245 bp, Homo sapiens
cttagtggtacttttttacggcagccctgggaaactaatacaatggccttttgtggctgacttcacttagcataatgttttcaacactcatccatgttgcagatgtatccgaacctcattcctttctagtgccttgagtatcagtttaaaaaaaacattgccagaccagacacagtggttcatgcctgtaatcctagcacgttgggaggccaacaccagaggattgcttgatcccaggagttcaa

SEQ ID NO: 23514 - DNA, 1854 bp, Homo sapiens
tctggcggggagcgacagacctaaatcaaattagggatggccagggtggccaccttcttggacatttacgaagatggaatcttggacattgtagtgctaagtaaaggatatacaaagaatgattttgccattcatacactaaaaaataactttgaagcagatgcttattttgttaaagttattgttcttagtggtctgtgttctaatgactgtcctcgtaagataacaccctttggagtgaatcaacctggaccttatatcatgtatacaactgtagatgcaaatgggtatctgaaaaatggatcagctggccaactcagccaatccgcacatttagctctccaactaccatacaacgtgcttggtttaggtcggagcgcaaattttcttgaccatctctacgttggtattccccgtccatctggagaaaaatctatacgaaaacaagagtggactgcaatcattccaaattcccagctaattgtcattccataccctcacaatgtccctcgaagttggagtgccaaactgtatcttacaccaagtaatattgttctgcttactgctatagctctcatcggtgtctgtgttttcatcttggcaataattggcattttacattggcaggaaaagaaagcagatgatagagaaaaacgacaagaagcccaccggtttcattttgatgctatgtgacttgcctttaatattacataatggaatggctgttcacttgattagttgaaacacaaattctggcttgaaaaaataggggagattaaatattatttataaatgatgtatcccatggtaattattggaaagtattcaaataaatatggtttgaatatgtcacaaggtctttttttttaaagcactttgtatataaaaatttgggttctctattctgtagtgctgtacatttttgttcctttgtggaatgtgttgcatgtactccagtgtttgtgtatttataatcttatttgcatcatgatgatggaaaaagttgtgtaaataaaaataattaaatgagcaggaatttttgtgtccacttgacttggtcttgcttcttattctaatgatgcaaattatacttttgtgaatatatcacggagtcattaggcattcagcttcatcacagcaggtcaggggtctcactgatggcatacaatatagtgatcgggtactctgacttggtagcacagtaagacagacttgccttaaactcctaattcaaccacttacaaagtcattgtttgaacttggctcttgtttaacctctgtaaacctcagttttcttgtttattcagtggggctaatacttgagttactgtaaacattaaatgggatgatgtatgtgaagtgcttagcttggtgcctagcacagagtaagtggtcaatatgtggtagttgtcattattaatattttagatgatcttattagacttatacatctaattatagaaatacatagacttgatagaattttattttcaggcatgaagaaatattctttggaaaagctaaatttttggtgattgacataaagatttacttgctcatattaactaaaaattatagtactctccaagaattaatgtgccctaaaaattttcctccaaaaacttatccttatcatgtgataatgaagaacatttgatttcttgaaaggaaactgctgtaggcagcatctgggaatgcaaatcttcaatcacatttctattctcaaacacttggagaagtctataatttacattcagacttcaatgcaaattttgtattgtgaacttcacatttccaaaaagttactttaaaaagactttaagactgaaaaaaaaaagtttatcaatgctaata

SEQ ID NO: 23515 - DNA, 780 bp, Homo sapiens
caccacaattactgaaggaataccttaaagacccacacaaccacagctttttgaaagaccagggctgcatttacaatgacaggagaaacagacacagcttccgtgttgcctgaactggcataaacaacagaagaaatgaacagtgtcagattggcacacatctgcctggccagggcctcattcccacactccgtccgttctcccaaaaggattccccacccaccaccccccagatggctagtatccaaccatcagggctcaatcctaagcaaaatattgaactagctgttttcttctcactggcctggtatctgcaaagctaaccatccggctgccctaccttcaactttccttccaaacatagtactcctcagtctctccttcctcctagcctatacaaagtcaaagtttatgttaattttattaaagctatgccaacaacaacaaaaagtctcaaatcatatctaagacataccaggtgacaaaaattcatttataaacaaaaaagtttggataaagtagacatttttttagtttactatgaactgatgatatactggcaaacttactagatggagggctttgagccagctacttacacatcatgtcctaatctatgaaatagcccacgctgcagttgtagggatgaggggtaaagttcataagccacccagtgcacagccaaccacagtgggtgctcataattggtagctattcctaggatgatgagaaacaaggatatattagaaaacattcagaattcatctgtagaacaggtgg

SEQ ID NO: 23516 - DNA, 394 bp, Homo sapiens
atagctttatattgctgagtttaaacataaatggagaggattattttgattatttacatgcaagcacacaagcttaactgcacacacatgtcacactccagtagtctcctcacctttgctgagggccttttatgtgacaggaactgtattttacagacactctctcctgtaatccacagagccaccctgtcagacagttatcattaggttcactttagagatgctatcatctcaacttgggtatttcaaaagcaattcaaactctagcacgaacaaatagatctctttatgctcttgccctatcattactcccatttccaccccagtctaggctttcccattgttttccactttgatcaatggcctcactctttgttcagccacagaagccaaa

SEQ ID NO: 23517 - DNA, 509 bp, Homo sapiens
tttcctgcactgtaaaaggggaatcataatatccatcaatctccttataagattggaaagataaagaaactatatgtaaaattcttagcacaatgttcgatccatgtgcatgctcaataagtggttattcctcaaattagtttcatttgtattgggataaatcattgttccctcccataggtacattttctatttaaccagttgccagttctcagaatcttctcctgccccccacaccacacaggctgcagattgtagggatagatgacagaggatgggaggctcatctcactctctatttcaatacgttctacttcaacagcagggcttgtttttattaccttattgagttcacatgggtagcttttggcagcagcaattattctccttattactctacagatgaagaaatagatttggctctgatatgttggattttctcaagcaagtcccatatcgaaaataaaagcgtttaattctaatcagagacagccgggaaaaaaaaaaaa

SEQ ID NO: 23518 - DNA, 349 bp, Homo sapiens
ctttttttaacttgggaaaatacgttctaagcatactttttggagtaaaacctgttcgaaagttggagactgcctgtacccaggttgatagtcaattgtttttaatgctagtaaatcttaacactaatacaagtaaaaatatttgtgtggaaaactaatcctttctttattcgtgcatttttaactttataggtattaaaactttctttgtatgatcataattttttgatctttttgttttgcaagaaagtgaatggtagcctttcatttgtatgtttgattttcttaaaaatttcatatttattatgttattttacaaatgaaaaattatttgtgagaaatgttttgt

SEQ ID NO: 23519 - DNA, 503 bp, Homo sapiens
cctacttaactctaatcttgcttctgacaatatccatttagaacttcttagcttcaactttctgagaccactttttgtttcatatcatattatcagttcagtgccttgctcacaggacttcttctgcctggaatgtcttccttccctactctctagactttcctttcttaactcaatccaagtcctacctgctccaggaagccagctctcattctggtcctcagggtggccttgtctctccaaagtcctatgggtctcactatctttgctcatggaaccagcccatggcatgcctcctcaggctgcctggaagactctacacagatatggagaatccttgactcaggctgaggggcagtctagtaccaggctcttaatcttcagagatggaagaccaagaagggaattttagtccaagtctgggaaaagaagaaggtatattgagatttcagagggtaggatttagggaaggggctaagaagagggaaagcaaaaaaaaaaaa

SEQ ID NO: 23520 - DNA, 254 bp, Homo sapiens
gagatgagagtttcactcttgttgcccaggctggagttcaatgacgccatctgggctgaccgcaacctccgcctcccaggttcaagcctcaggttcaagattatcctgcctcagcctccggagtagctgggattacaggcgcctgccaccacagccagctaattttgtatttattatttttctgacaatgggaaagaggcagcagttgtaatatggatggctgttattcctattaccttctattaagaggcgct

SEQ ID NO: 23521 - DNA, 340 bp, Homo sapiens
ccggcccttccacctcaacgtgagaagtgtctctctcctagtaaacctcagtggccttaggctagggttggacatgtgagggtggtgtctattcctggagaaataacatcgcatttgattttgccacaggagctttctatacaaggttaacagcaatcctgttgtgaattccttggcgcctcatgtctcctaaacccagctaaactgacggaggccatggaaaccactaattttaacagtgccggtgacatcccttatcttttagctttcccaggcaggaaccgttgccccagcagacatgatgaagtagaggcaggagccagatcgtgaggtgcttaaa

SEQ ID NO: 23522 - DNA, 1499 bp, Homo sapiens
tgaaagcatctggaacaacaggtggttacggaccatttctatcatcttgtacttgaacaaacaagatatgctggcagaaaaagtcttggcagggaaatcaaaaattgaagactatttcccagaatatgcaaattatactgttcctgaagacgcaacaccagatgcaggagaagatcccaaagttacaagagccaagttctttatccgggacctgtttttgaggatcagcacggccaccggtgacggcaaacattactgctacccgcacttcacctgcgccgtggacacagagaacatccgcagggtgttcaacgactgccgcgacatcatccagcggatgcacctcaagcagtatgagctcttgtgaggatgctgccgccaccctgcgacggagcggcgccccggactgcctgactgccagccccatgccatggtaggaggcagagtctctagttccatctcgctgccgtctgtcccgttctgtgtcgaccaccaagcctctggctacctctgtcccctcaggtttggttgtgtagcttctgttgtcattgaatacggcctcccgcagcatcccacccccaaaccaccgactctcattgccgacactgcagcagaatctctccgggtgggagccccattattcattctccctttattgattcatcgaggagaacttggtagatggggagaaaacacagttggtttttttttccacgttatcaaccgtgactgcaagagcgttcgtgcagtgccctgagccacggccgtctctgattctccctttatgaagctgcaggctgacgagagatggtcccttcccattggccttagcccaagacttggagtcgaccccaagcgacagagtgaccagaaacccttttacagtcacattcagagtcgctgctggcctcaggcatttgaattagagctactttgagcctcttaggcagaaaacctaccacattcactactgcaaaatgtgtcctgtctaaaaatgattctctaaactttccctatacttaggcatagtcttctttcttagattctctttgttgttgtccctattgctggtttattacactgtacagaccacaaaatgtaatattcttttgtataactactaaagaaaaatccttgtagatctttgtgccttcaccatggctatctatacctgtacatgaaatgtgtttgtattgtgctgaagagcttaatgtcaacattacctgctgcttactctgaaaaaaggaatgaatggtagctgtagaatttaggatattttatcaggttggcactttataaaatactccctgatttaaaaaattgtaagttatacacgttaatcatccacattctatcgacaatgtaccaacatcacaagctgttgcaaccacctgctgttacttctctgagctgtaaaaacctgaactcaattcaggggtacaaattgcaatctaatcttttcagggaaccagggatttttttctctctctctagacaat

SEQ ID NO: 23523 - DNA, 513 bp, Homo sapiens
gacgccctttctacctttctctgtaccctgggtcactccaaaaggaggaagtggactaaggtatgccttttctcccctctctttccagatacttaacaacccatcttcaagcctgcactttcctcgagtgcagcctggatctcttttaatcgtcagaccctgaagtttgctttaggaaagtcccaacttcactcacatatagagtatttaaactctgctggaaggatgttaggttactcttaaatcaaaccctaactgctgctgagaaacagttggccctgtaggcagcaaagaaatttggagatgaactttgtgtctcatacagtgccagggaaggggaagagccttatccaattgggagagtaatagtgcccttaaaggaccctaaatgtgaccataataatagcattggtgagtggagaagaaaactctttcaaatgcgtatattggagaagccacaaaggactatagccaaacctattaactactacaagctttccataatagataata

SEQ ID NO: 23524 - DNA, 815 bp, Homo sapiens
aaactatacgggctaaggtagcgaggccctggcgggtttatgcgtctctgtgcctgacatgacccaaacggccagcaattttctccttctccagttaaacctgtccaacattgaggaacctatctacatgagaactggcaactctaatttaccccgaagcctttctgcaggagattcaaatatttgctaatgcttactgataccttcactggttagatcgaggcattccccaccccatctgaaaaatgtttaccagaagaaataactcctcagtttgggtaatctaaaagcctgcaaagtgacaatggcccatctttcacagcaggcgtaacccaacacctatctcagctttaagaatccaatattaccttcactctgtgtggagactgcagtcctctggaaaggtgaaagggctaatcctactctacagaagactccagctaaatcagacgcctgactatctccaacacccatagcttactgcgggtttgaactgctccaaagtaaaacgtataattaagtcctgttgagttaacatgtggaaggcctttcctaacgacagatctcctaatagatgaaaagactcatcaattacaaaaatatgtcatcaatctgggacaggtgcaaaggcactccgtgcatatggaaacaagagtcttcccctcccacatgggaggaaaattcagtttcagctcagctagggatttagtcttactaaagacgtgggaggaagttctccagctgagcagctttccccaacgtggaagggaccacgcaaggacacctgagttctccaacagacgttcaacgccaag

SEQ ID NO: 23525 - DNA, 795 bp, Homo sapiens
aaaacaggtgactcagccctgtgagctctgtgcctgacatgacccaaacggccagcaattttctccttctccagttaaacctgtccaacattgaggaacctatctacatgagaactggcaactctaatttaccccgaagcctttctgcaggagattcaaatatttgctaatgcttactgataccttcactggttagatcgaggcattccccaccccatctgaaaaatgtttaccagaagaaataactcctcagtttgggtaatctaaaagcctgcaaagtgacaatggcccatctttcacagcaggcgtaacccaacacctatctcagctttaagaatccaatattaccttcactctgtgtggagactgcagtcctctggaaaggtgaaagggctaatcctactctacagaagactccagctaaatcagacgcctgactatctccaacacccatagcttactgcgggtttgaactgctccaaagtaaaacgtataattaagtcctgttgagttaacatgtggaaggcctttcctaacgacagatctcctaatagatgaaaagactcatcaattacaaaaatatgtcatcaatctgggacaggtgcaaaggcactccgtgcatatggaaacaagagtcttcccctcccacatgggaggaaaattcagtttcagctcagctagggatttagtcttactaaagacgtgggaggaagttctccagctgagcagctttccccaacgtggaagggaccacgcaaggacacctgagttctccaacagacgttcaacgccaag

SEQ ID NO: 23526 - DNA, 381 bp, Homo sapiens
aaccttgacaatccataaatagttgaatcttatattcatatgactatgagtggtacacaggtgagtgaaaatagtgtgcaattttataatagttttaccatatcataacctaaatcaagtcactcccaggatgcaatacagaaggctaagttggatggtctcaagtaaaatttggctgctgttagggaattctattggtacccccaaggcttgctggaacctggagaaattagtacagcagtgacctaagcatggagaagtgatccctgcttgttgctggaaacccaggagaagtgctctgaaatgctttcagtaatgtgctttaaaaactggcaagcatgcatgcaaaacatcttctaaagctattaatcagaaagggat

SEQ ID NO: 23527 - DNA, 561 bp, Homo sapiens
gtgacacactcggttggggaaggagaggctggcacactccactagctgcttatctctgccacctccgcctccatttgtccctggcttcctggggcccagagccatctctgccagagcagggaggccgattaagtgacccgcgggctccttctgcctgactcagctcagctccagccctctctggggagaatgagtcattttttcaaccctgaaatgtttctcttcatgtgggaaaggggcgggggtggggagagcccctcctggtcctctccaaacttgttcctcagctctgagggacacttcagccacagacaaagggattctagggcagctctggagagggcagtcagacctgaagtcagtaaaccacagctgtggcagccgttggagtctccctggacagaagcacactgggctgagtgggtggagtgtccctgtcagtcccgcactgatggatggtttctcccttggggatgggcctctgccccctgcttcctctgcccacccagttaagaagctatatgagcccgggtgtggtggtgcacatctgtagtcccagct

SEQ ID NO: 23528 - DNA, 877 bp, Homo sapiens
aaaatatgctaatcaaaaattgatagaattaaagggagaaatagtcaattccatgaaaacacgagactgcaacatgcctctcttagcaattaatagaacaactagacaaagaaatcaataaagtcattgctgtggtttgaatatttgtcccctccaaaattcatgttgaaaattaatccctaatgtgatgattttgggaagcggagcttactgggaggtgtttggattatgggggcaggtacctcacaaattgcttgatgttgctttcgaggtagtgggttcttgctcgtgggagactgggttagttcttatgggaatggattggttttctcaagactggaagttgttataaagccaggacacccctcagattttgtctgtgaatgtgtccacccccgatctgttacgttgtgatgcagcacgaaagccctcaccagaagcccgggaccatgaccctgaacttctcagcttgcagaactatgaactaaataaacctttctataaaaacaataaatgacccagtctcaggtattcccttacagtaacacaaaatgaactaaaacaaacatagaataccagaacaatgctatcaaccaccttgacttgattgatgtttatagaatgttttaaccaacaaatgcagattacatattctcagctgtcaatggtatgttcaccaatataacatgaaggttagctgtgcagtaaaaatttcaataaatttaaaaggattgaaatcacacagagtatgttctctaattataataaaattacatcaaaaatagaaaacaataaaatctataaaaaccctaaaacctataaaaaccctaaatgttgggaaattaatcagctgttttctaagcaatctaaaggtcaa

SEQ ID NO: 23529 - DNA, 437 bp, Homo sapiens
ggcaacagagtgagactctgtattaaaaaaaaaaaaaaaaaaaagggctgggtgcagtggctcacacctgttatcccagcactttgggaggctgaggcgggcaaatcacgaggtcaggagttcaagaccagcttggccaacacagtgataccccatctctactaaaaatacaaaaattatctgggcatggtgacgtgcacctgtaatcccacctccccagcctcagtgctgggattataggcatgagccactgtagctgacctattgctgctttatacctagagaaattaagacagcacacagctaggtaagaggtggtgtcaaagtgacagaggtattgtcaagatgaaatatatgtgaaatacttggccttggtgccctggcagatggaagcactcgctaaagatatctaagacgtgttttcattcattgtggca

SEQ ID NO: 23530 - DNA, 236 bp, Homo sapiens
ggtgaggtaggaattaaaatccctcaggaaagaacacctcacttggaagactgactgtttttaccctttggcccaattacgagccagatttgaatttctgtttgattgtgggtgataatctctttgaccaggcacatttccacattgcctttccccttgtttaactagaatgtctctagggaatgctaacaaattgttaaaaatcaaatcaaaattaaaatgaaagaaatatcaaa

SEQ ID NO: 23531 - DNA, 527 bp, Homo sapiens
  misc_feature (352)..(352): n is a, c, g, or t
  misc_feature (393)..(393): n is a, c, g, or t
  misc_feature (425)..(425): n is a, c, g, or t
  misc_feature (439)..(439): n is a, c, g, or t
  misc_feature (473)..(473): n is a, c, g, or t
  misc_feature (493)..(493): n is a, c, g, or t
  misc_feature (512)..(512): n is a, c, g, or t
  misc_feature (522)..(522): n is a, c, g, or t
caatttgctaaggaaattcagtgatattagagctaggttattaaagattatattaaataatttaactgtattttgaaaatgattatgctgtgcatttccttctctgtataaaaagtgctgggattgcaggcatgagcactgcacccaacccctggaaaactaaatttttaagtgcttatttttatagaagtttgaaaatttaatgcaggcaggtgtgtaataaattatttttgaattgaacattaaaattctgcttcttaaagtcagcactcaacttggacatgttgaaattagaatctattcttgtatttgatagacaaaatatgtgggaaagattttttgcatgactttnctctcattttattcttccataatgtatttctactataaaanagaatccaacttggggttatatttgtccattnactttgttctgttnaggatttcgtccagttgtttttgggaaaaattcnaggaaatcagggatggacanatgcagcctttcccggggntgccgggacnggggg

SEQ ID NO: 23532 - DNA, 318 bp, Homo sapiens
tcccaaaataggaggcggttattttatatggacattagggaaagacccacaggctgataaggtcatatttgagctaatagaattgagggaatgagttctgtagttatctagagtaagagaattcctagaaaagaaatcaaagaaagccttttgagccattctaaggctttggtttttatttagagtgagatgggacaccattttggggttctgaacagagtgatggcctagatgccgagtgctttaagaaagagggagtgctaactcattttatgaggccagcatcatcctgataccaaagcctggcagacatacaac

SEQ ID NO: 23533 - DNA, 284 bp, Homo sapiens
atcgcgccactgcactccagcctgggcgacagagcaagactccgtctcggaggggcgggggtcggaaagagctctctctgtcaagggagagaacagctcagctcaaacatcacggtgctgaagggcaacctggtaaacacagaaatactcaaccaccagcatttactgaatacttgacgcaacaaaggtgtagtatgttgagtaagatgttgcaggctagactgtaaacaccactaagagccttcttttgctgggaaaatctgttctgaatccaaacaacttac

SEQ ID NO: 23534 - DNA, 335 bp, Homo sapiens
aattataatccaagtatttttagaatcatatactgtcttaaaatacatcagtgataatgttaacacttcttcctacctgcataaactgatgatcacaatgaaaaaatagattaatgtctttttttaatgctgaactcaagttctctttgttaagtatacttgcacatttttatcttggtatattgaactctcttggtcttatacagaccattccaagtggtctgacatacatacgcctgataaaatagggacattgccaaggattatttctactttctttccaaccaaaggaatgtgaccgccccacacatacacaccatggaatactatgcagg

SEQ ID NO: 23535 - DNA, 494 bp, Homo sapiens
aaattatgatgataaagacttaccatattggtattaagagtctctgcttctagaactggttatttgcaggaaaatacatgttattcaattagatgaagtgttttatataaactcttcatggacaactcataaatcacataaaaatccctttgcaatacaaatcttgagaacataaatttaaatttctacatttccacaatttatatttttaaatcagatacaatgttgcccaggctgttctcaaactcctgtgttcaagcaatcttactgtctcaaactcccaagtagcagggactacaggtgtacaccaccaaactcagctatttttctacaatttttaatacttttttagtctcactacagaaccaataatataagtagagaaacaatctctcctaaaaactatatgacacccaaatgataagtctttatcatcataattttgtcattgtagtttatttaaaatatttacttggccaggagtcgacgcggcc

SEQ ID NO: 23536 - DNA, 226 bp, Homo sapiens
tgaaactcttttagggaatagtgtttttaaatataaattttactaagtggaagtatttttaaggaagaccccaattgtggaaaaactgagatgaatcatctttcatcactgattaatatacaatagaagtgcagatgtgacttttgttttaaaatatctgtcttattaaagttatgtaaataatttttatgtgtttctatttcacttattctttaatgattggtat

SEQ ID NO: 23537 - DNA, 576 bp, Homo sapiens
tttggtactgatggaagcaattttggagggtggtggaagctacaatgattctggcaattacaacaatcagtcttcaaattttgaacccatgatgaaaggaaactttggaggcagaagctctggcagctatggtggtggaagccagtactttcccaaaccacaaaaccgaggtggctatggcagttccagtagcagcagtagctacagcagtggcagaagattttaattactgccagcaaacaaagcttaacaggagaggagagccagagaagtgacagcgaagctacaggttacaacagatttgtgaactcagccaagcacagtggtggcaaggcctagctgctacaaagaagacatgttttagacaaatactcatgtgtatgggcaaaaaactcgaggactgtatttgtgactaattgtataacaggttgttttagtttttcttctgtggaaaatgtaaagcattccaacaaaggattttaatgtagatttcttttttgtacccatgctgttgattgctaaatgtaacagtctgatcatgacgctgaataaatgtgtcttaaaaaaaaaaaaaaa

SEQ ID NO: 23538 - DNA, 370 bp, Homo sapiens
agtctctctactccaccaaaactgctcttgcagaagcccccagagtccatgttctcactcccaccctcatcctgcttgacctcactggggcatctggccaagtggtctctcctcccagacatgcccacccctagcttcccagttctcctacctttctgacaactcagcagcctccttcccaggactcccacaatcacctacacgcttatgcctcccaatttagaaaactctgaaccccactccactcataagctccagccccaatctaacccccaaatggatggccagcctgcatgggccagaggtacccaaactcactatctcatctttcatcatctagtggtggcctcccactttccactctcctttc

SEQ ID NO: 23539 - DNA, 346 bp, Homo sapiens
cttcatggaagtggtggggagcctgaacgtgcgctgcggatagggttttacttcctgctacccatcaaccatgggataatgcctgacaaagatgcgaatgaccccggaaatgtgagtgaaggccatgtaattatgtaggctttcactccttctttctcagccgattcagctcttagccagattctcttgttccatcaccaggttttatccctgctaactttctttccccaggaatgattttcattgagatcgtagtgtgtttcctcaaaagaagactagattgtaattgggtgtccttagatgtagaacaactctcctgtttagatttcaacatatatatctttag

SEQ ID NO: 23540 - DNA, 368 bp, Homo sapiens
ccatttttatatcccattaaaataccataaaaggaataagcaagaaaataataaggatacaaggataaataaaactggagaggaaaacagtagtaggtgaagcatggcctcagttggaagagtgatgactgacatagcagaggaagctgaaacctaagagcatacaggatcaataataaggagaggttgatacctcttgctccatcctggaaaatgtcagaaattgaagaagcctgggcaacatagggagactaccatctcttaaaaaaaatttaactgggtgtgggtgtggtggtacctgcctatagttccagctacttgttggggctgggagggagtcatgccattgcagtccagcctctagtctc

SEQ ID NO: 23541 - DNA, 286 bp, Homo sapiens
gagtcttattataaaagttgatcgcaaataaaaacactgtcattgttttaattcactttacaaaaagatgcacccctgcccccaacccaagtaagtctagcttcaccatgattttaggaaagctgatataaaacagcaaggcgtggtggctcatgcctgtaatcccagcactttgggaggccggcgtgggcagatcacaaggtcaggagtttgagaccagcctggcctacatggtgaaaccctgtccctattaaaaaaaaataaatatatacaaaaattagccagc

SEQ ID NO: 23542 - DNA, 423 bp, Homo sapiens
cttccccttctctgcctcaagagtttcctgtgacttctctgttggactttaatgttctcttcctagataccctattcaaggtatgattacctatttgcaattttggctcactctggagagggtgggtgtctgatatctctatagtctgccatcttgtttaattctttatgataagttaaaaaattaattcatcatcataagaggatgatagagagccagtttgtcatcttaaaaaataggccaatagctaggcataatgatgcatacctgatgtcttagttacttagaaggctgaggtgggaagatcccttgaggccagcctgggcaacatagaaagatcatgcctgttaacaaaaacaaaaattgaataggaagaaaaatcatttatcttgccttcgttatatgaactctgtcactggataa

SEQ ID NO: 23543 - DNA, 859 bp, Homo sapiens
tcctgtttctgatatagtaactaattcttaactcagagacattggtccattttaatactgaaaaccaattttcattggtacacattacaaaattgctaagaacactgtttgggagctttcattctcatattttggacattgttttaattgagtgaaataatcataactccttgctcccagagaagctatcacctccatttctaaaaccatttcaggtttgtttggtagtctttcttaatgtatttattatcgctttttgtgagtagggtcctgttttatccaggaaccaatttctgccctagcctatcatgccctgcttttgagagtaccaggtatctttgggattgggaagctggctgtttcagaagtatatgtctcatagtgtgcagaacttggtgaccaagtgagaagcgggaccaatgggagactcacaatggactgagtcttgggattatcttttccaaattcttccatgttagaatcacttcagaaaataagactttgatgctttgtctctgagcatcatttttctcctcataaaaacacttccttattgtatgtagcctgcctcctacagaggcctggtaggtgttactgcattctaaaagaaaaatgtcatctctgtaggagcgactatcaggcctagtgtgaaatattagggatcctaggcagaagagctattagtcctggccttcatatcttcaccaaatgaaaatactgtatataaaatttcaccaccaaacttaactaaattctttttctcaagtcaagcctcccaaagaaaaaagaaattaacttcctacagtgtcagcaagcaattttccatttagttttggtacaaataaaagtcatttgaaac

SEQ ID NO: 23544 - DNA, 2666 bp, Homo sapiens
ggcacgagggtgaggagggctgtgtttgcttccccttctgcgatgattctaagttttctgaggcctccccagccatgctgaactagcattggctgtgatgactacttaggctccgacaaagtcgtggacaaatgtggggtgtgtggaggagacaacacgggctgtcaggttgtgtcgggcgtgtttaagcatgccctcaccagcctgggctaccaccgcgtcgtggagattcccgagggagccacgaaaatcaacatcacggagatgtacaagagcaacaactatttggccctgagaagtcgttctggacgctccatcatcaatgggaactgggcaattgatcgaccaggaaaatacgagggcggagggaccatgttcacctacaagcgtccaaatgagatttcgagcactgccggagagtcctttttggcggaaggtcccaccaacgagatcttggatgtctacatgatacaccagcagccaaacccaggcgtgcactacgagtacgtgatcatggggaccaacgccatcagcccccaggtgccaccccacaggagaccaggggaacccttcaatggccagatggtgacagaaggcaggagccaggaggagggagaacagaaagggaggaacgaggagaaggaagacttgcgtggggaggcccctgagatgttcacctcagaatcggcacagaccttcccagtcaggcatccagacagattttctccccatcgaccggacaacttggtgccaccagcaccgcagcccccacggcgcagccgggatcacaactggaagcagcttgggacaacagaatgttccacgacctgtgggaaaggatcgcagtaccctattttccgctgtgtgcacagaagcactcatgaagaggctcctgagagttactgtgactccagcatgaagccgacccccgaggaggagccctgcaacatcttcccttgcccagccttctgggacatcggggagtggtctgagtgcagcaagacctgtggcctgggcatgcagcaccgccaggttctgtgccgccaggtgtacgccaaccgcagcctgacggtgcagccctaccgctgccagcacctggagaaacctgagaccaccagcacctgccaactcaagatctgcagcgagtggcagatccggaccgactggacctcgtgctcggtgccctgcggcgtgggacagaggacccgtgatgtgaagtgtgtgagcaacattggggatgtggttgacgatgaggaatgcaacatgaagctccggccgaatgacattgagaactgcgacatgggaccctgtgccaagagctggttcctcaccgagtggagcgaaaggtgctcagcggagtgtggggccggagtgcggacacgctcggtggtgtgcatgaccaaccatgtcagcagcctgcccctggagggctgtgggaacaaccggccggcagaggccaccccatgtgacaacggaccctgcacgggcaaggtggagtggtttgccgggagctggagtcagtgttccatcgagtgtgggagcgggacgcaacagagggaggtgatttgtgttagaaagaatgcagacacctttgaagtgttggacccctctgaatgttctttcctggagaaaccccccagccagcaatcctgccacctcaagccttgcggagccaaatggtttagcaccgaatggagcatgagtctacaaagagccatgctcaccaggccaagttgaaggagacaaacttcaaaaacaccccaaatgtccgtcagcaggtgaacggacaaaccatggtgcatccacacagcggaacaaaaaactcagccacaaaaatatggatgaacttccggtgcgttttgctaagtaaaaaaaaaagccaggttcaaaaaactacgtgttgtatgagtccatctatataatattctgtaaaaggagcagctacaaacgccaaatcagtgcctgctggaggatggggtgaccacatctgtgcaatctgaccgtagaggggcagcatgggaattttttgtctgcaatgaaaatatttcgtgtcttgtttgcggtaggagatacacaactgtatgaatttgtcaaaactgatagatgtgtataccacaaaaagggacatttttagatgcaaatttagaaaatatgaagtaaatggttactataatagcaaagactgatggaagctagacttctttgaatgtaccttgttttacaaatttgagtttggaactaagtaaatattttagataatcataaaagaaaattaagttttaaaaaagcaatcccccagaactgaaaatacaatgaaacaaattaatgtaaatatgtttctagttggtggcatcagcactattgcaagtgacttgaatacatagtaatttgacattctatccctaaaaaaaattactgcagaagaatgttcacactgtttgcaattatcctatttttggtgatagtgttgtgctggatatgatgattgggcatataatgtgtgagaaggtaaatgagtaattagatgatagtataattctgttagccccaatatccttgagaagtaggatgttcaaacttaggagaaagtagatacagatacaagatagatattgtatggcttaagtccgcaataaaaagcctgttgtcctgaatttgaattggaa

SEQ ID NO: 23545 - DNA, 4133 bp, Homo sapiens
ggcacgagggtgaggagggctgtgtttgcttccccttctgcgatgattctaagttttctgaggcctccccagccatgctgaactagcattggctgtgatgactacttaggctccgacaaagtcgtggacaaatgtggggtgtgtggaggagacaacacgggctgtcaggttgtgtcgggcgtgtttaagcatgccctcaccagcctgggctaccaccgcgtcgtggagattcccgagggagccacgaaaatcaacatcacggagatgtacaagagcaacaactatttggccctgagaagtcgttctggacgctccatcatcaatgggaactgggcaattgatcgaccaggaaaatacgagggcggagggaccatgttcacctacaagcgtccaaatgagatttcgagcactgccggagagtcctttttggcggaaggtcccaccaacgagatcttggatgtctacatgatacaccagcagccaaacccaggcgtgcactacgagtacgtgatcatggggaccaacgccatcagcccccaggtgccaccccacaggagaccaggggaacccttcaatggccagatggtgacagaaggcaggagccaggaggagggagaacagaaagggaggaacgaggagaaggaagacttgcgtggggaggcccctgagatgttcacctcagaatcggcacagaccttcccagtcaggcatccagacagattttctccccatcgaccggacaacttggtgccaccagcaccgcagcccccacggcgcagccgggatcacaactggaagcagcttgggacaacagaatgttccacgacctgtgggaaaggatcgcagtaccctattttccgctgtgtgcacagaagcactcatgaagaggctcctgagagttactgtgactccagcatgaagccgacccccgaggaggagccctgcaacatcttcccttgcccagccttctgggacatcggggagtggtctgagtgcagcaagacctgtggcctgggcatgcagcaccgccaggttctgtgccgccaggtgtacgccaaccgcagcctgacggtgcagccctaccgctgccagcacctggagaaacctgagaccaccagcacctgccaactcaagatctgcagcgagtggcagatccggaccgactggacctcgtgctcggtgccctgcggcgtgggacagaggacccgtgatgtgaagtgtgtgagcaacattggggatgtggttgacgatgaggaatgcaacatgaagctccggccgaatgacattgagaactgcgacatgggaccctgtgccaagagctggttcctcaccgagtggagcgaaaggtgctcagcggagtgtggggccggagtgcggacacgctcggtggtgtgcatgaccaaccatgtcagcagcctgcccctggagggctgtgggaacaaccggccggcagaggccaccccatgtgacaacggaccctgcacgggcaaggtggagtggtttgccgggagctggagtcagtgttccatcgagtgtgggagcgggacgcaacagagggaggtgatttgtgttagaaagaatgcagacacctttgaagtgttggacccctctgaatgttctttcctggagaaaccccccagccagcaatcctgccacctcaagccttgcggagccaaatggtttagcaccgaatggagcatgtgttccaagagctgccagggtggctttcgggtccgggaagtgcggtgtctgtctgatgacatgactctaagtaacctctgtgaccctcagttgaaaccagaagagagagaatcttgtaaccctcaggactgtgtccctgaagttgatgaaaactgcaaggacaagtactacaactgcaacgtggtggtccaggcaagactctgtgtctacaactactacaagaccgcctgctgtgcctcctgcacccgtgtggccaacaggcagacgggcttcctggggagcagataacactcctgcacccccatcagtagggcagcatcactgccttcccgggggcttcagcagtgcgcctggctggctgctgctccaccacgggccccctggcccaggcgctgccaaccaacttagtcaccacccctgcctccggtgaatgcaccccgtggtacccaggggctttttacacaagatgtttgaaagccacagtcagtcctttaagcatcaccatgtactgatgatcccctccttggacctggcatctgctaatggtgccctttgaaagtcaagcagtgggaagtacatggagctctcagccctgctcccatctggcaccttcaagtcagcagatgggccactgactgagcactgccccgtccctggtgctactggtctttctaaacttagcaccctggagagtccaaggaggcagcgcccccaacccagcgccccactaagccttgctgacacgcgtgcatccctctgtgacctcagcccagatgtgcctgttttcattctcaaagacattagactgttttcctgccctatgacacagatagctcacatgaatattgtgctttatttagcaggtgtactcacagatactagctccttagcagctcacaacatcccagaatgggaggcagggggtgactcattatccccattttactgacagggaaactgaggctcaacttaagtaattgacctgccaggtatattcacccatccagtggaagagctgagtccccgccccagtcatctaccagtatccagcctggggcctgtacttagatgtgaaaggtgctgcttcatttctgaccaagagactgagaagtttcccagaatgcaaacaaagcccaggcccctgaaatctttccggtcaagcctttatcccagcactcagttgttttggatgtctgttcctacttgcccttacccccaaagttacagatcctagttacaggactctgccagctttgttaaactgtccgtgagacaagaaagccattggggaaaccaggtgattgcctgaaattcttactccgttccaagtgctgttcctcccaggaaatcaaaggccagggtccttatggccgtggagccttcccgaccacagagccaacttgtgaagcacacagctctgcagcctgggctctgccctgcctcagccgcctcccccacgctcttcaccacgttcctggagagtccggccaacctgtcccagccaaaacactgctgtattagaaaaagtctctttctggtctttctggttttgtttatgaatttccctctgtggccacaaattcctcccctcccccatgactcacagtccatatggcccacccccagacttgagcaccaagctctgcattaatgcagttggcctgcgacaaggagctgtggacccttccccatctcttccaattcactttccccaactatccagttccagaggccgcaggcctggaaggatgcagtgcatattgaaaggtggaccctctgaaaacagttaagaggaatatatgtatgttttgcccattaagaaaaaatggcaagctaaacaaatgttaaacttacagaaaatttgtcttatggtcctgagcatatttcccttttagagcaagcctggattcttagcaaagtgtttcccccatttgctcttttagctgacaaatctgccactgtgatgatggtttgcagcttttggaagcagtatggcaacctggcctgacatgctctttaggcttccactaacctggggctttcagaaattctatttggcctttctgtgggtagctttccagcttctcttctagggagccccaggcatcatttcccaaaagcatccccatctcctgattctcttggaactcctacagataagcatcctggcagaggcccaggctcccaaaccgacaaagtgaaaagagaccagagaggccaagcatattgactggtgctgttcagggcctgctcttttccactcaccacttgttttgctgcttgtcacgaggagagttgttcctgtatgtggctgctctcagatctttccaagcaagccagtcatttgaagaggttttcttttcatgctggagggcaggctaagatcaatgagtggaagagagaaagacaatgcaatcggaatcctctggatc

SEQ ID NO: 23546 - DNA, 4688 bp, Homo sapiens
  misc_feature (12)..(12): n is a, c, g, or t
agttgggacccngcatgtgccgctcccaaaggcatgtgccgcttcccaaacggcatgtgccgctccccgagaagaagccctgcaacatctttcccttgcccagcctttctgggacatcggggagtggtctgagtgcagcaagacctgtggcctgggcatgcagcaccgccaggttctgtgccgccaggtgtacgccaaccgcagcctgacggtgcagccctaccgctgccagcacctggagaaacctgagaccaccagcacctgccaactcaagatctgcagcgagtggcagatccggaccgactggacctcgtgctcggtgccctgcggcgtgggacagaggacccgtgatgtgaagtgtgtgagcaacattggggatgtggttgacgatgaggaatgcaacatgaagctccggccgaatgacattgagaactgcgacatgggaccctgtgccaagagctggttcctcaccgagtggagcgaaaggtgctcagcggagtgtggggccggagtgcggacacgctcggtggtgtgcatgaccaaccatgtcagcagcctgcccctggagggctgtgggaacaaccggccggcagaggccaccccatgtgacaacggaccctgcacgggcaaggtggagtggtttgccgggagctggagtcagtgttccatcgagtgtgggagcgggacgcaacagagggaggtgatttgtgttagaaagaatgcagacacctttgaagtgttggacccctctgaatgttctttcctggagaaaccccccagccagcaatcctgccacctcaagccttgcggagccaaatggtttagcaccgaatggagcatgtgttccaagagctgccagggtggctttcgggtccgggaagtgcggtgtctgtctgatgacatgactctaagtaacctctgtgaccctcagttgaaaccagaagagagagaatcttgtaaccctcaggactgtgtccctgaagttgatgaaaactgcaaggacaagtactacaactgcaacgtggtggtccaggcaagactctgtgtctacaactactacaagaccgcctgctgtgcctcctgcacccgtgtggccaacaggcagacgggcttcctggggagcagataacactcctgcacccccatcagtagggcagcatcactgccttcccgggggcttcagcagtgcgcctggctggctgctgctccaccacgggccccctggcccaggcgctgccaaccaacttagtcaccacccctgcctccggtgaatgcaccccgtggtacccaggggctttttacacaagatgtttgaaagccacagtcagtcctttaagcatcaccatgtactgatgatcccctccttggacctggcatctgctaatggtgccctttgaaagtcaagcagtgggaagtacatggagctctcagccctgctcccatctggcaccttcaagtcagcagatgggccactgactgagcactgccccgtccctggtgctactggtctttctaaacttagcaccctggagagtccaaggaggcagcgcccccaacccagcgccccactaagccttgctgacacgcgtgcatccctctgtgacctcagcccagatgtgcctgttttcattctcaaagacattagactgttttcctgccctatgacacagatagctcacatgaatattgtgctttatttagcaggtgtactcacagatactagctccttagcagctcacaacatcccagaatgggaggcagggggtgactcattatccccattttactgacagggaaactgaggctcaacttaagtaattgacctgccaggtatattcacccatccagtggaagagctgagtccccgccccagtcatctaccagtatccagcctggggcctgtacttagatgtgaaaggtgctgcttcatttctgaccaagagactgagaagtttcccagaatgcaaacaaagcccaggcccctgaaatctttccggtcaagcctttatcccagcactcagttgttttggatgtctgttcctacttgcccttacccccaaagttacagatcctagttacaggactctgccagctttgttaaactgtccgtgagacaagaaagccattggggaaaccaggtgattgcctgaaattcttactccgttccaagtgctgttcctcccaggaaatcaaaggccagggtccttatggccgtggagccttcccgaccacagagccaacttgtgaagcacacagctctgcagcctgggctctgccctgcctcagccgcctcccccacgctcttcaccacgttcctggagagtccggccaacctgtcccagccaaaacactgctgtattagaaaaagtctctttctggtctttctggttttgtttatgaatttccctctgtggccacaaattcctcccctcccccatgactcacagtccatatggcccacccccagacttgagcaccaagctctgcattaatgcagttggcctgcgacaaggagctgtggacccttccccatctcttccaattcactttccccaactatccagttccagaggccgcaggcctggaaggatgcagtgcatattgaaaggtggaccctctgaaaacagttaagaggaatatatgtatgttttgcccattaagaaaaaatggcaagctaaacaaatgttaaacttacagaaaatttgtcttatggtcctgagcatatttcccttttagagcaagcctggattcttagcaaagtgtttcccccatttgctcttttagctgacaaatctgccactgtgatgatggtttgcagcttttggaagcagtatggcaacctggcctgacatgctctttaggcttccactaacctggggctttcagaaattctatttggcctttctgtgggtagctttccagcttctcttctagggagccccaggcatcatttcccaaaagcatccccatctcctgattctcttggaactcctacagataagcatcctggcagaggcccaggctcccaaaccgacaaagtgaaaagagaccagagaggccaagcatattgactggtgctgttcagggcctgctcttttccactcaccacttgttttgctgcttgtcacgaggagagttgttcctgtatgtggctgctctcagatctttccaagcaagccagtcatttgaagaggttttcttttcatgctggagggcaggctaagatcaatgagtggaagagagaaaggctgttttagctcaagttaaaggaacaccttctagccatcaaagccgcccaacagaggcaagggccaccacacatgagagagcgctctgtccttaaagggaattctctgttgagtgggaggtgaacaccctggttcttccaactcaggaattctcgtggctgggctgggtcagtgatggctttgtctctttatgtctaaagtgccctatggctgctgaaggttacctaaccattctttaaaaggagaatgaccctccatgggaatggccagcctgccaactgtgcaattgaagaagacccgatggatcaaccccatgtctcccttggggagaaagtgcataaaccagggtctctttttttttttttcaacaaaccattgagctgttctgggagttcatctctggagaggttatacattattagaagtttgattattattatagtttgatcaatttatttgtcttagagatccaatttttactaattccctagttttttatttcagcatctgaatgtctttctccctagcacagtgcatacaatcagggccttgggtatttccagtgataactttccttggagaggatctaagaaaagcccagatttcggtagccatctccctccaaatatgtctctttctgctttcttagtgcccattatttccccttctcctttcttctgtcactgccatctccttcttggtcttcccattgttctttaactggctgtaatgtggaattgatatttacattttgatacggtttttttcttggcctgtgtacgggattgcctcatttcctgctctgaattttaaaattagatattaaagctgtcatatggtttcctcacaaaagtcaacaaagtccaaacaaaaatagtttgccgttttactttcatccattgaaaaaggaaattgtgcctcttgcagcctaggcaaaggacatttagtactatcgattctttccaccctcacgatgacttgcggttctctctgtagaaaagggatggcctaagaaatacaactaaaaaaacaaacaaaaacaccaaaagaaaaaaaaaagccatttaaagccagccactagagggagtcagttcagttccgtaaaggtatgctcagtgcccgctgcctgcaagctgttggggaccccagggagggcaaggcagcctgtccccgcccccagggaactagaacatgacaagaattctccgcactgtgcctacctgtccctttaccttacctctctggcccagagttcttggagggttttttctttattttcttatgtactcatctacttattctcaaagtatttagcattcaacactctttttgctttaaaaagaatggccttacaaagggacagaaaagagaagacacgagcttggtgtattttcatcaagttatgtggcagagaaatccagatattaccaggacctgtct

SEQ ID NO: 23547 - DNA, 1950 bp, Homo sapiens
ggcacgagggtgaggagggctgtgtttgcttccccttctgcgatgattctaagttttctgaggcctccccagccatgctgaactagcattggctgtgatgactacttaggctccgacaaagtcgtggacaaatgtggggtgtgtggaggagacaacacgggctgtcaggttgtgtcgggcgtgtttaagcatgccctcaccagcctgggctaccaccgcgtcgtggagattcccgagggagccacgaaaatcaacatcacggagatgtacaagagcaacaactatttggccctgagaagtcgttctggacgctccatcatcaatgggaactgggcaattgatcgaccaggaaaatacgagggcggagggaccatgttcacctacaagcgtccaaatgagatttcgagcactgccggagagtcctttttggcggaaggtcccaccaacgagatcttggatgtctacatgatacaccagcagccaaacccaggcgtgcactacgagtacgtgatcatggggaccaacgccatcagcccccaggtgccaccccacaggagaccaggggaacccttcaatggccagatggtgacagaaggcaggagccaggaggagggagaacagaaagggaggaacgaggagaaggaagacttgcgtggggaggcccctgagatgttcacctcagaatcggcacagaccttcccagtcaggcatccagacagattttctccccatcgaccggacaacttggtgccaccagcaccgcagcccccacggcgcagccgggatcacaactggaagcagcttgggacaacagaatgttccacgacctgtgggaaaggatcgcagtaccctattttccgctgtgtgcacagaagcactcatgaagaggctcctgagagttactgtgactccagcatgaagccgacccccgaggaggagccctgcaacatcttcccttgcccagccttctgggacatcggggagtggtctgagtgcagcaagacctgtggcctgggcatgcagcaccgccaggttctgtgccgccaggtgtacgccaaccgcagcctgacggtgcagccctaccgctgccagcacctggagaaacctgagaccaccagcacctgccaactcaagatctgcagcgagtggcagatccggaccgactggacctcgtgctcggtgccctgcggcgtgggacagaggacccgtgatgtgaagtgtgtgagcaacattggggatgtggttgacgatgaggaatgcaacatgaagctccggccgaatgacattgagaactgcgacatgggaccctgtgccaagagctggttcctcaccgagtggagcgaaaggtgctcagcggagtgtggggccggagtgcggacacgctcggtggtgtgcatgaccaaccatgtcagcagcctgcccctggagggctgtgggaacaaccggccggcagaggccaccccatgtgacaacggaccctgcacgggcaaggtggagtggtttgccgggagctggagtcagtgttccatcgagtgtgggagcgggacgcaacagagggaggtgatttgtgttagaaagaatgcagacacctttgaagtgttggacccctctgaatgttctttcctggagaaaccccccagccagcaatcctgccacctcaagccttgcggagccaaatggtttagcaccgaatggagcatggtaagtcatggtgctcttgatggaggttgcattggcacaacgtcccccacctgaactcctatagacccctctgggccaggcactgggttcagccctgaaagagattccctacagcaatctaccttaggtggtagctgctggagtaccccgtgactcagcctgcttcgtggggaaggcctgagacctagatgatcttgctttctaaactgtagaaacagtgactctcacacttcagtgtgcataggaatc

SEQ ID NO: 23548 - DNA, 5548 bp, Homo sapiens
ggcacgagggtgaggagggctgtgtttgcttccccttctgcgatgattctaagttttctgaggcctccccagccatgctgaactagcattggctgtgatgactacttaggctccgacaaagtcgtggacaaatgtggggtgtgtggaggagacaacacgggctgtcaggttgtgtcgggcgtgtttaagcatgccctcaccagcctgggctaccaccgcgtcgtggagattcccgagggagccacgaaaatcaacatcacggagatgtacaagagcaacaactatttggccctgagaagtcgttctggacgctccatcatcaatgggaactgggcaattgatcgaccaggaaaatacgagggcggagggaccatgttcacctacaagcgtccaaatgagatttcgagcactgccggagagtcctttttggcggaaggtcccaccaacgagatcttggatgtctacatgatacaccagcagccaaacccaggcgtgcactacgagtacgtgatcatggggaccaacgccatcagcccccaggtgccaccccacaggagaccaggggaacccttcaatggccagatggtgacagaaggcaggagccaggaggagggagaacagaaagggaggaacgaggagaaggaagacttgcgtggggaggcccctgagatgttcacctcagaatcggcacagaccttcccagtcaggcatccagacagattttctccccatcgaccggacaacttggtgccaccagcaccgcagcccccacggcgcagccgggatcacaactggaagcagcttgggacaacagaatgttccacgacctgtgggaaaggatcgcagtaccctattttccgctgtgtgcacagaagcactcatgaagaggctcctgagagttactgtgactccagcatgaagccgacccccgaggaggagccctgcaacatcttcccttgcccagccttctgggacatcggggagtggtctgagtgcagcaagacctgtggcctgggcatgcagcaccgccaggttctgtgccgccaggtgtacgccaaccgcagcctgacggtgcagccctaccgctgccagcacctggagaaacctgagaccaccagcacctgccaactcaagatctgcagcgagtggcagatccggaccgactggacctcgtgctcggtgccctgcggcgtgggacagaggacccgtgatgtgaagtgtgtgagcaacattggggatgtggttgacgatgaggaatgcaacatgaagctccggccgaatgacattgagaactgcgacatgggaccctgtgccaagagctggttcctcaccgagtggagcgaaaggtgctcagcggagtgtggggccggagtgcggacacgctcggtggtgtgcatgaccaaccatgtcagcagcctgcccctggagggctgtgggaacaaccggccggcagaggccaccccatgtgacaacggaccctgcacgggcaaggtggagtggtttgccgggagctggagtcagtgttccatcgagtgtgggagcgggacgcaacagagggaggtgatttgtgttagaaagaatgcagacacctttgaagtgttggacccctctgaatgttctttcctggagaaaccccccagccagcaatcctgccacctcaagccttgcggagccaaatggtttagcaccgaatggagcatgtgttccaagagctgccagggtggctttcgggtccgggaagtgcggtgtctgtctgatgacatgactctaagtaacctctgtgaccctcagttgaaaccagaagagagagaatcttgtaaccctcaggactgtgtccctgaagttgatgaaaactgcaaggacaagtactacaactgcaacgtggtggtccaggcaagactctgtgtctacaactactacaagaccgcctgctgtgcctcctgcacccgtgtggccaacaggcagacgggcttcctggggagcagataacactcctgcacccccatcagtagggcagcatcactgccttcccgggggcttcagcagtgcgcctggctggctgctgctccaccacgggccccctggcccaggcgctgccaaccaacttagtcaccacccctgcctccggtgaatgcaccccgtggtacccaggggctttttacacaagatgtttgaaagccacagtcagtcctttaagcatcaccatgtactgatgatcccctccttggacctggcatctgctaatggtgccctttgaaagtcaagcagtgggaagtacatggagctctcagccctgctcccatctggcaccttcaagtcagcagatgggccactgactgagcactgccccgtccctggtgctactggtctttctaaacttagcaccctggagagtccaaggaggcagcgcccccaacccagcgccccactaagccttgctgacacgcgtgcatccctctgtgacctcagcccagatgtgcctgttttcattctcaaagacattagactgttttcctgccctatgacacagatagctcacatgaatattgtgctttatttagcaggtgtactcacagatactagctccttagcagctcacaacatcccagaatgggaggcagggggtgactcattatccccattttactgacagggaaactgaggctcaacttaagtaattgacctgccaggtatattcacccatccagtggaagagctgagtccccgccccagtcatctaccagtatccagcctggggcctgtacttagatgtgaaaggtgctgcttcatttctgaccaagagactgagaagtttcccagaatgcaaacaaagcccaggcccctgaaatctttccggtcaagcctttatcccagcactcagttgttttggatgtctgttcctacttgcccttacccccaaagttacagatcctagttacaggactctgccagctttgttaaactgtccgtgagacaagaaagccattggggaaaccaggtgattgcctgaaattcttactccgttccaagtgctgttcctcccaggaaatcaaaggccagggtccttatggccgtggagccttcccgaccacagagccaacttgtgaagcacacagctctgcagcctgggctctgccctgcctcagccgcctcccccacgctcttcaccacgttcctggagagtccggccaacctgtcccagccaaaacactgctgtattagaaaaagtctctttctggtctttctggttttgtttatgaatttccctctgtggccacaaattcctcccctcccccatgactcacagtccatatggcccacccccagacttgagcaccaagctctgcattaatgcagttggcctgcgacaaggagctgtggacccttccccatctcttccaattcactttccccaactatccagttccagaggccgcaggcctggaaggatgcagtgcatattgaaaggtggaccctctgaaaacagttaagaggaatatatgtatgttttgcccattaagaaaaaatggcaagctaaacaaatgttaaacttacagaaaatttgtcttatggtcctgagcatatttcccttttagagcaagcctggattcttagcaaagtgtttcccccatttgctcttttagctgacaaatctgccactgtgatgatggtttgcagcttttggaagcagtatggcaacctggcctgacatgctctttaggcttccactaacctggggctttcagaaattctatttggcctttctgtgggtagctttccagcttctcttctagggagccccaggcatcatttcccaaaagcatccccatctcctgattctcttggaactcctacagataagcatcctggcagaggcccaggctcccaaaccgacaaagtgaaaagagaccagagaggccaagcatattgactggtgctgttcagggcctgctcttttccactcaccacttgttttgctgcttgtcacgaggagagttgttcctgtatgtggctgctctcagatctttccaagcaagccagtcatttgaagaggttttcttttcatgctggagggcaggctaagatcaatgagtggaagagagaaaggctgttttagctcaagttaaaggaacaccttctagccatcaaagccgcccaacagaggcaagggccaccacacatgagagagcgctctgtccttaaagggaattctctgttgagtgggaggtgaacaccctggttcttccaactcaggaattctcgtggctgggctgggtcagtgatggctttgtctctttatgtctaaagtgccctatggctgctgaaggttacctaaccattctttaaaaggagaatgaccctccatgggaatggccagcctgccaactgtgcaattgaagaagacccgatggatcaaccccatgtctcccttggggagaaagtgcataaaccagggtctctttttttttttttcaacaaaccattgagctgttctgggagttcatctctggagaggttatacattattagaagtttgattattattatagtttgatcaatttatttgtcttagagatccaatttttactaattccctagttttttatttcagcatctgaatgtctttctccctagcacagtgcatacaatcagggccttgggtatttccagtgataactttccttggagaggatctaagaaaagcccagatttcggtagccatctccctccaaatatgtctctttctgctttcttagtgcccattatttccccttctcctttcttctgtcactgccatctccttcttggtcttcccattgttctttaactggctgtaatgtggaattgatatttacattttgatacggtttttttcttggcctgtgtacgggattgcctcatttcctgctctgaattttaaaattagatattaaagctgtcatatggtttcctcacaaaagtcaacaaagtccaaacaaaaatagtttgccgttttactttcatccattgaaaaaggaaattgtgcctcttgcagcctaggcaaaggacatttagtactatcgattctttccaccctcacgatgacttgcggttctctctgtagaaaagggatggcctaagaaatacaactaaaaaaacaaacaaaaacaccaaaagaaaaaaaaaagccatttaaagccagccactagagggagtcagttcagttccgtaaaggtatgctcagtgcccgctgcctgcaagctgttggggaccccagggagggcaaggcagcctgtccccgcccccagggaactagaacatgacaagaattctccgcactgtgcctacctgtccctttaccttacctctctggcccagagttcttggagggttttttctttattttcttatgtactcatctacttattctcaaagtatttagcattcaacactctttttgctttaaaaagaatggccttacaaagggacagaaaagagaagacacgagcttggtgtattttcatcaagttatgtggcagagaaatccagatattaccaggacctgtct

SEQ ID NO: 23549 - DNA, 5724 bp, Homo sapiens
acgctcctagacgaaccgtatgttcagtaaagcagtagaatatccgggaggtactgtgtgcatctacaatcagcagccattcatgggccggtttttatgaggtgggaaccatttgcagaattaaaaggcaatctcaaatgtgagtataactgccaggctatgggctaccgcttctatttactgccggctgagacagtcgtctgtattgcaccctctgtgacctgaacgagcctgctctctgtttgtctggactgtgccagagcattggctgtgatgactacttaggctccgacaaagtcgtggacaaatgtggggtgtgtggaggagacaacacgggctgtcaggttgtgtcgggcgtgtttaagcatgccctcaccagcctgggctaccaccgcgtcgtggagattcccgagggagccacgaaaatcaacatcacggagatgtacaagagcaacaactatttggccctgagaagtcgttctggacgctccatcatcaatgggaactgggcaattgatcgaccaggaaaatacgagggcggagggaccatgttcacctacaagcgtccaaatgagatttcgagcactgccggagagtcctttttggcggaaggtcccaccaacgagatcttggatgtctacatgatacaccagcagccaaacccaggcgtgcactacgagtacgtgatcatggggaccaacgccatcagcccccaggtgccaccccacaggagaccaggggaacccttcaatggccagatggtgacagaaggcaggagccaggaggagggagaacagaaagggaggaacgaggagaaggaagacttgcgtggggaggcccctgagatgttcacctcagaatcggcacagaccttcccagtcaggcatccagacagattttctccccatcgaccggacaacttggtgccaccagcaccgcagcccccacggcgcagccgggatcacaactggaagcagcttgggacaacagaatgttccacgacctgtgggaaaggatcgcagtaccctattttccgctgtgtgcacagaagcactcatgaagaggctcctgagagttactgtgactccagcatgaagccgacccccgaggaggagccctgcaacatcttcccttgcccagccttctgggacatcggggagtggtctgagtgcagcaagacctgtggcctgggcatgcagcaccgccaggttctgtgccgccaggtgtacgccaaccgcagcctgacggtgcagccctaccgctgccagcacctggagaaacctgagaccaccagcacctgccaactcaagatctgcagcgagtggcagatccggaccgactggacctcgtgctcggtgccctgcggcgtgggacagaggacccgtgatgtgaagtgtgtgagcaacattggggatgtggttgacgatgaggaatgcaacatgaagctccggccgaatgacattgagaactgcgacatgggaccctgtgccaagagctggttcctcaccgagtggagcgaaaggtgctcagcggagtgtggggccggagtgcggacacgctcggtggtgtgcatgaccaaccatgtcagcagcctgcccctggagggctgtgggaacaaccggccggcagaggccaccccatgtgacaacggaccctgcacgggcaaggtggagtggtttgccgggagctggagtcagtgttccatcgagtgtgggagcgggacgcaacagagggaggtgatttgtgttagaaagaatgcagacacctttgaagtgttggacccctctgaatgttctttcctggagaaaccccccagccagcaatcctgccacctcaagccttgcggagccaaatggtttagcaccgaatggagcatgtgttccaagagctgccagggtggctttcgggtccgggaagtgcggtgtctgtctgatgacatgactctaagtaacctctgtgaccctcagttgaaaccagaagagagagaatcttgtaaccctcaggactgtgtccctgaagttgatgaaaactgcaaggacaagtactacaactgcaacgtggtggtccaggcaagactctgtgtctacaactactacaagaccgcctgctgtgcctcctgcacccgtgtggccaacaggcagacgggcttcctggggagcagataacactcctgcacccccatcagtagggcagcatcactgccttcccgggggcttcagcagtgcgcctggctggctgctgctccaccacgggccccctggcccaggcgctgccaaccaacttagtcaccacccctgcctccggtgaatgcaccccgtggtacccaggggctttttacacaagatgtttgaaagccacagtcagtcctttaagcatcaccatgtactgatgatcccctccttggacctggcatctgctaatggtgccctttgaaagtcaagcagtgggaagtacatggagctctcagccctgctcccatctggcaccttcaagtcagcagatgggccactgactgagcactgccccgtccctggtgctactggtctttctaaacttagcaccctggagagtccaaggaggcagcgcccccaacccagcgccccactaagccttgctgacacgcgtgcatccctctgtgacctcagcccagatgtgcctgttttcattctcaaagacattagactgttttcctgccctatgacacagatagctcacatgaatattgtgctttatttagcaggtgtactcacagatactagctccttagcagctcacaacatcccagaatgggaggcagggggtgactcattatccccattttactgacagggaaactgaggctcaacttaagtaattgacctgccaggtatattcacccatccagtggaagagctgagtccccgccccagtcatctaccagtatccagcctggggcctgtacttagatgtgaaaggtgctgcttcatttctgaccaagagactgagaagtttcccagaatgcaaacaaagcccaggcccctgaaatctttccggtcaagcctttatcccagcactcagttgttttggatgtctgttcctacttgcccttacccccaaagttacagatcctagttacaggactctgccagctttgttaaactgtccgtgagacaagaaagccattggggaaaccaggtgattgcctgaaattcttactccgttccaagtgctgttcctcccaggaaatcaaaggccagggtccttatggccgtggagccttcccgaccacagagccaacttgtgaagcacacagctctgcagcctgggctctgccctgcctcagccgcctcccccacgctcttcaccacgttcctggagagtccggccaacctgtcccagccaaaacactgctgtattagaaaaagtctctttctggtctttctggttttgtttatgaatttccctctgtggccacaaattcctcccctcccccatgactcacagtccatatggcccacccccagacttgagcaccaagctctgcattaatgcagttggcctgcgacaaggagctgtggacccttccccatctcttccaattcactttccccaactatccagttccagaggccgcaggcctggaaggatgcagtgcatattgaaaggtggaccctctgaaaacagttaagaggaatatatgtatgttttgcccattaagaaaaaatggcaagctaaacaaatgttaaacttacagaaaatttgtcttatggtcctgagcatatttcccttttagagcaagcctggattcttagcaaagtgtttcccccatttgctcttttagctgacaaatctgccactgtgatgatggtttgcagcttttggaagcagtatggcaacctggcctgacatgctctttaggcttccactaacctggggctttcagaaattctatttggcctttctgtgggtagctttccagcttctcttctagggagccccaggcatcatttcccaaaagcatccccatctcctgattctcttggaactcctacagataagcatcctggcagaggcccaggctcccaaaccgacaaagtgaaaagagaccagagaggccaagcatattgactggtgctgttcagggcctgctcttttccactcaccacttgttttgctgcttgtcacgaggagagttgttcctgtatgtggctgctctcagatctttccaagcaagccagtcatttgaagaggttttcttttcatgctggagggcaggctaagatcaatgagtggaagagagaaaggctgttttagctcaagttaaaggaacaccttctagccatcaaagccgcccaacagaggcaagggccaccacacatgagagagcgctctgtccttaaagggaattctctgttgagtgggaggtgaacaccctggttcttccaactcaggaattctcgtggctgggctgggtcagtgatggctttgtctctttatgtctaaagtgccctatggctgctgaaggttacctaaccattctttaaaaggagaatgaccctccatgggaatggccagcctgccaactgtgcaattgaagaagacccgatggatcaaccccatgtctcccttggggagaaagtgcataaaccagggtctctttttttttttttcaacaaaccattgagctgttctgggagttcatctctggagaggttatacattattagaagtttgattattattatagtttgatcaatttatttgtcttagagatccaatttttactaattccctagttttttatttcagcatctgaatgtctttctccctagcacagtgcatacaatcagggccttgggtatttccagtgataactttccttggagaggatctaagaaaagcccagatttcggtagccatctccctccaaatatgtctctttctgctttcttagtgcccattatttccccttctcctttcttctgtcactgccatctccttcttggtcttcccattgttctttaactggctgtaatgtggaattgatatttacattttgatacggtttttttcttggcctgtgtacgggattgcctcatttcctgctctgaattttaaaattagatattaaagctgtcatatggtttcctcacaaaagtcaacaaagtccaaacaaaaatagtttgccgttttactttcatccattgaaaaaggaaattgtgcctcttgcagcctaggcaaaggacatttagtactatcgattctttccaccctcacgatgacttgcggttctctctgtagaaaagggatggcctaagaaatacaactaaaaaaacaaacaaaaacaccaaaagaaaaaaaaaagccatttaaagccagccactagagggagtcagttcagttccgtaaaggtatgctcagtgcccgctgcctgcaagctgttggggaccccagggagggcaaggcagcctgtccccgcccccagggaactagaacatgacaagaattctccgcactgtgcctacctgtccctttaccttacctctctggcccagagttcttggagggttttttctttattttcttatgtactcatctacttattctcaaagtatttagcattcaacactctttttgctttaaaaagaatggccttacaaagggacagaaaagagaagacacgagcttggtgtattttcatcaagttatgtggcagagaaatccagatattaccaggacctgtct

SEQ ID NO: 23550 - DNA, 4283 bp, Homo sapiens
  misc_feature (2)..(3): n is a, c, g, or t
  misc_feature (5)..(7): n is a, c, g, or t
  misc_feature (11)..(11): n is a, c, g, or t
  misc_feature (13)..(13): n is a, c, g, or t
  misc_feature (51)..(51): n is a, c, g, or t
  misc_feature (78)..(78): n is a, c, g, or t
cnntnnncctntncatcatttgaaagtggcttcagcagctgccagggcctnctgactaatgtgcccttcccctgtctnacagtgctcagcggagtgtggggccggagtgcggacacgctcggtggtgtgcatgaccaaccatgtcagcagcctgcccctggagggctgtgggaacaaccggccggcagaggccaccccatgtgacaacggaccctgcacgggcaaggtggagtggtttgccgggagctggagtcagtgttccatcgagtgtgggagcgggacgcaacagagggaggtgatttgtgttagaaagaatgcagacacctttgaagtgttggacccctctgaatgttctttcctggagaaaccccccagccagcaatcctgccacctcaagccttgcggagccaaatggtttagcaccgaatggagcatgtgttccaagagctgccagggtggctttcgggtccgggaagtgcggtgtctgtctgatgacatgactctaagtaacctctgtgaccctcagttgaaaccagaagagagagaatcttgtaaccctcaggactgtgtccctgaagttgatgaaaactgcaaggacaagtactacaactgcaacgtggtggtccaggcaagactctgtgtctacaactactacaagaccgcctgctgtgcctcctgcacccgtgtggccaacaggcagacgggcttcctggggagcagataacactcctgcacccccatcagtagggcagcatcactgccttcccgggggcttcagcagtgcgcctggctggctgctgctccaccacgggccccctggcccaggcgctgccaaccaacttagtcaccacccctgcctccggtgaatgcaccccgtggtacccaggggctttttacacaagatgtttgaaagccacagtcagtcctttaagcatcaccatgtactgatgatcccctccttggacctggcatctgctaatggtgccctttgaaagtcaagcagtgggaagtacatggagctctcagccctgctcccatctggcaccttcaagtcagcagatgggccactgactgagcactgccccgtccctggtgctactggtctttctaaacttagcaccctggagagtccaaggaggcagcgcccccaacccagcgccccactaagccttgctgacacgcgtgcatccctctgtgacctcagcccagatgtgcctgttttcattctcaaagacattagactgttttcctgccctatgacacagatagctcacatgaatattgtgctttatttagcaggtgtactcacagatactagctccttagcagctcacaacatcccagaatgggaggcagggggtgactcattatccccattttactgacagggaaactgaggctcaacttaagtaattgacctgccaggtatattcacccatccagtggaagagctgagtccccgccccagtcatctaccagtatccagcctggggcctgtacttagatgtgaaaggtgctgcttcatttctgaccaagagactgagaagtttcccagaatgcaaacaaagcccaggcccctgaaatctttccggtcaagcctttatcccagcactcagttgttttggatgtctgttcctacttgcccttacccccaaagttacagatcctagttacaggactctgccagctttgttaaactgtccgtgagacaagaaagccattggggaaaccaggtgattgcctgaaattcttactccgttccaagtgctgttcctcccaggaaatcaaaggccagggtccttatggccgtggagccttcccgaccacagagccaacttgtgaagcacacagctctgcagcctgggctctgccctgcctcagccgcctcccccacgctcttcaccacgttcctggagagtccggccaacctgtcccagccaaaacactgctgtattagaaaaagtctctttctggtctttctggttttgtttatgaatttccctctgtggccacaaattcctcccctcccccatgactcacagtccatatggcccacccccagacttgagcaccaagctctgcattaatgcagttggcctgcgacaaggagctgtggacccttccccatctcttccaattcactttccccaactatccagttccagaggccgcaggcctggaaggatgcagtgcatattgaaaggtggaccctctgaaaacagttaagaggaatatatgtatgttttgcccattaagaaaaaatggcaagctaaacaaatgttaaacttacagaaaatttgtcttatggtcctgagcatatttcccttttagagcaagcctggattcttagcaaagtgtttcccccatttgctcttttagctgacaaatctgccactgtgatgatggtttgcagcttttggaagcagtatggcaacctggcctgacatgctctttaggcttccactaacctggggctttcagaaattctatttggcctttctgtgggtagctttccagcttctcttctagggagccccaggcatcatttcccaaaagcatccccatctcctgattctcttggaactcctacagataagcatcctggcagaggcccaggctcccaaaccgacaaagtgaaaagagaccagagaggccaagcatattgactggtgctgttcagggcctgctcttttccactcaccacttgttttgctgcttgtcacgaggagagttgttcctgtatgtggctgctctcagatctttccaagcaagccagtcatttgaagaggttttcttttcatgctggagggcaggctaagatcaatgagtggaagagagaaaggctgttttagctcaagttaaaggaacaccttctagccatcaaagccgcccaacagaggcaagggccaccacacatgagagagcgctctgtccttaaagggaattctctgttgagtgggaggtgaacaccctggttcttccaactcaggaattctcgtggctgggctgggtcagtgatggctttgtctctttatgtctaaagtgccctatggctgctgaaggttacctaaccattctttaaaaggagaatgaccctccatgggaatggccagcctgccaactgtgcaattgaagaagacccgatggatcaaccccatgtctcccttggggagaaagtgcataaaccagggtctctttttttttttttcaacaaaccattgagctgttctgggagttcatctctggagaggttatacattattagaagtttgattattattatagtttgatcaatttatttgtcttagagatccaatttttactaattccctagttttttatttcagcatctgaatgtctttctccctagcacagtgcatacaatcagggccttgggtatttccagtgataactttccttggagaggatctaagaaaagcccagatttcggtagccatctccctccaaatatgtctctttctgctttcttagtgcccattatttccccttctcctttcttctgtcactgccatctccttcttggtcttcccattgttctttaactggctgtaatgtggaattgatatttacattttgatacggtttttttcttggcctgtgtacgggattgcctcatttcctgctctgaattttaaaattagatattaaagctgtcatatggtttcctcacaaaagtcaacaaagtccaaacaaaaatagtttgccgttttactttcatccattgaaaaaggaaattgtgcctcttgcagcctaggcaaaggacatttagtactatcgattctttccaccctcacgatgacttgcggttctctctgtagaaaagggatggcctaagaaatacaactaaaaaaacaaacaaaaacaccaaaagaaaaaaaaaagccatttaaagccagccactagagggagtcagttcagttccgtaaaggtatgctcagtgcccgctgcctgcaagctgttggggaccccagggagggcaaggcagcctgtccccgcccccagggaactagaacatgacaagaattctccgcactgtgcctacctgtccctttaccttacctctctggcccagagttcttggagggttttttctttattttcttatgtactcatctacttattctcaaagtatttagcattcaacactctttttgctttaaaaagaatggccttacaaagggacagaaaagagaagacacgagcttggtgtattttcatcaagttatgtggcagagaaatccagatattaccaggacctgtct

SEQ ID NO: 23551 - DNA, 337 bp, Homo sapiens
cacaaagctgtgaatatactaaaagccactgaattattcagtgggtgaattttgtgatatgaacattgcatctctggcctggtgcagtggctcacttctgtaatcctagcacagtgggaggccgaggtgggtggatcacctgaggtcaggagtttgagactggcctggccagcgtgatgaaaccccgtctctactaaaaatacaaaaattagccaggtgtggtggtgcatgcctgtagtctcagttactcgggaggctgatgcaggagaatcacttgaacccaggaggcataggttgcagtgagccgagattgtgccactgcacgccctctcgagcc

SEQ ID NO: 23552 - DNA, 1869 bp, Homo sapiens
agcggaagcgcgcttgtgtcttgtgagaagagccgcgcttgcagcgtctgggagaatctttcggtctccgcgagaggtgcttcattccacgaaaaaagtataattcaagctcagatttgtgttgaaaccagcctcaagtttcacctatcctcactgatccgtggacttctgtatgatcagggtgctgtcctgagagcgctgcgggataaaggaggagcgtcctgcttcccggctgccctgttgctgtcggagtcacaggatggcggctgtcgtcctgcccccaactgccgctctgtcttccctgttcccagcctctcagcgagaaggacacacagagggcggagagctggttaatgagctcctgaaaagctggctaaagggcttggtgacctttgaggatgtggccgtggagttcacccaggaggagtgggcattgctggaccctgcccaaaggacactgtacagggacgtgatgctggagaactgcaggaacctggcctcactggggaaccaagttgataaacctaggctgatctcccagctggagcaagaagataaagtgatgacagaagagagaggaattctctcaggtacctgtccagatgtggagaatccatttaaagccaaagggttaactcctaagctgcatgtttttcgaaaagaacaatctagaaatatgaaaatggagaggaatcatcttggagcaacactcaacgaatgtaatcagtgttttaaagtcttcagcacaaaatcttcccttacacggcacaggaagattcatactggagaaagaccctatggctgcagtgaatgtgggaaatcctacagcagtagatcttaccttgctgttcataagagaatccacaatggggagaaaccctatgaatgcaatgactgtgggaaaaccttcagcagcagatcttaccttactgttcataagagaatccacaatggggagaaaccctacgaatgcagtgactgtgggaaaaccttcagcaattcctcatacctcagaccgcacttgagaattcacactggagaaaaaccgtacaaatgtaaccagtgttttcgtgagttccgcactcagtcaatcttcacaaggcacaagagagttcatacgggggagggtcattatgtatgtaatcagtgtggaaaggctttcggcacgaggtcatctctttcttcgcactatagcattcatacaggggagtacccttacgaatgccacgattgtgggagaaccttcaggaggaggtcgaatctgacacagcacataagaactcatactggagaaaaaccctacacatgtaatgagtgtgggaaatcctttaccaatagcttttctcttacaattcacaggagaatacataatggagagaaatcctatgagtgcagtgattgtggaaaatcctttaatgttctctcatccgttaagaaacacatgagaactcacactggaaaaaaaccctatgaatgtaattattgcgggaaatccttcacaagtaactcctacctttctgtgcatacgagaatgcataataggcaaatgtgaattcaataactgtgggaaaagcattcattgatctttcatgcctcagataacatgagcaaactctaacaagatgtatgaatcacctgctactgtgtaacaaattaccccccaaaattttgtggcttcaaacaaaaacacttgttatctcaaaatttttgtaggtcaggaattcagaaacaacatagctctatagttcttcaggatatctcaagaggttacagtccagatgtcagcagaactgtaatcatccagaattgttactggtgaagggaccacttccaaatggcttacaagcccgacaagtgcatgctagctgt

SEQ ID NO: 23553 - DNA, 1075 bp, Homo sapiens
agcggaagcgcgcttgtgtcttgtgagaagagccgcgcttgcagcgtctgggagaatctttcggtctccgcgagaggtgcttcattccacgaaaaaagtataattcaagctcagatttgtgttgaaaccagcctcaagtttcacctatcctcactgatccgtggacttctgtatgatcagggtgctgtcctgagagcgctgcgggataaaggaggagcgtcctgcttcccggctgccctgttgctgtcggagtcacaggatggcggctgtcgtcctgcccccaactgccgctctgtcttccctgttcccagcctctcagcgagaaggacacacagagggcggagagctggttaatgagctcctgaaaagctggctaaagggcttggtgacctttgaggatgtggccgtggagttcacccaggaggagtgggcattgctggaccctgcccaaaggacactgtacagggacgtgatgctggagaactgcaggaacctggcctcactggggaaccaagttgataaacctaggctgatctcccagctggagcaagaagataaagtgatgacagaagagagaggaattctctcaggtacctgtccagatgtggagaatccatttaaagccaaagggttaactcctaagctgcatgtttttcgaaaagaacaatctagaaatatgaaaatggagaggaatcatcttggagcaacactcaacgaatgtaatcagtgttttaaagtcttcagcacaaaatcttcccttacacggcacaggaagattcatactggagaaagaccctatggctgcagtgaatgtgggaaatcctacagcagtagatcttaccttgctgttcataagagaatccacaatggggagaaaccctatgaatgcaatgactgtgggaaaaccttcagcagcagatcttaccttactgttcataagagaatccacaatggggagaaaccctacgaatgcagtgactgtgggaaaaccttcagcaattcctcatacctcagaccgcacttgagaattcacactggttacatttgtacggtttttctccagtgtgaattctca

SEQ ID NO: 23554 - DNA, 372 bp, Homo sapiens
aacattgcctaaaattttcacacccatatctctttcaccgaatgccttctcaaaaaccctcacctctcagattctgccttcactcacgtatgcattttactatttcaccatcaacttaaaatttgcctcttttctatcaacttaaatttctttttaacttgtttcagatgtggagaatccatttaaagccaaagggttaactcctaagctgcatgtttttcgaaaagaacaatctagaaatatgaaaatggtaagactaacatgggtgattcctggtttttttcatggtagaatgccctacatgagaaaagccacaaggactggccttgttggccaggcacagtggctcatgcctttaatcccagcaccttg

SEQ ID NO: 23555 - DNA, 1385 bp, Homo sapiens
agcggaagcgcgcttgtgtcttgtgagaagagccgcgcttgcagcgtctgggagaatctttcggtctccgcgagaggtgcttcattccacgaaaaaagtataattcaagctcagatttgtgttgaaaccagcctcaagtttcacctatcctcactgatccgtggacttctgtatgatcagggtgctgtcctgagagcgctgcgggataaaggaggagcgtcctgcttcccggctgccctgttgctgtcggagtcacaggatggcggctgtcgtcctgcccccaactgccgctctgtcttccctgttcccagcctctcagcgagaaggacacacagagggcggagagctggttaatgagctcctgaaaagctggctaaagggcttggtgacctttgaggatgtggccgtggagttcacccaggaggagtgggcattgctggaccctgcccaaaggacactgtacagggacgtgatgctggagaactgcaggaacctggcctcactggggaaccaagttgataaacctaggctgatctcccagctggagcaagaagataaagtgatgacagaagagagaggaattctctcaggtacctgtccagatgtggagaatccatttaaagccaaagggttaactcctaagctgcatgtttttcgaaaagaacaatctagaaatatgaaaatggagaggaatcatcttggagcaacactcaacgaatgtaatcagtgttttaaagtcttcagcacaaaatcttcccttacacggcacaggaagattcatactggagaaagaccctatggctgcagtgaatgtgggaaatcctacagcagtagatcttaccttgctgttcataagagaatccacaatggggagaaaccctatgaatgcaatgactgtgggaaaaccttcagcagcagatcttaccttactgttcataagagaatccacaatggggagaaaccctacgaatgcagtgactgtgggaaaaccttcagcaattcctcatacctcagaccgcacttgagaattcacactggagaaaaaccgtacaaatgtaaccagtgttttcgtgagttccgcactcagtcaatcttcacaaggcacaagagagttcatacgggggagggtcattatgtatgtaatcagtgtggaaaggctttcggcacgaggtcatctctttcttcgcactatagcattcatacaggggagtacccttacgaatgccacgattgtgggagaaccttcaggaggaggtcgaatctgacacagcacataagaactcatactggagaaaaaccctacacatgtaatgagtgtgggaaatcctttaccaatagcttttctcttacaattcacaggagaatacataatggagagaaatcct

SEQ ID NO: 23556 - DNA, 1848 bp, Homo sapiens
agcggaagcgcgcttgtgtcttgtgagaagagccgcgcttgcagcgtctgggagaatctttcggtctccgcgagaggtgcttcattccacgaaaaaagtataattcaagctcagatttgtgttgaaaccagcctcaagtttcacctatcctcactgatccgtggacttctgtatgatcagggtgctgtcctgagagcgctgcgggataaaggaggagcgtcctgcttcccggctgccctgttgctgtcggagtcacaggatggcggctgtcgtcctgcccccaactgccgcctctcagcgagaaggacacacagagggcggagagctggttaatgagctcctgaaaagctggctaaagggcttggtgacctttgaggatgtggccgtggagttcacccaggaggagtgggcattgctggaccctgcccaaaggacactgtacagggacgtgatgctggagaactgcaggaacctggcctcactggggaaccaagttgataaacctaggctgatctcccagctggagcaagaagataaagtgatgacagaagagagaggaattctctcaggtacctgtccagatgtggagaatccatttaaagccaaagggttaactcctaagctgcatgtttttcgaaaagaacaatctagaaatatgaaaatggagaggaatcatcttggagcaacactcaacgaatgtaatcagtgttttaaagtcttcagcacaaaatcttcccttacacggcacaggaagattcatactggagaaagaccctatggctgcagtgaatgtgggaaatcctacagcagtagatcttaccttgctgttcataagagaatccacaatggggagaaaccctatgaatgcaatgactgtgggaaaaccttcagcagcagatcttaccttactgttcataagagaatccacaatggggagaaaccctacgaatgcagtgactgtgggaaaaccttcagcaattcctcatacctcagaccgcacttgagaattcacactggagaaaaaccgtacaaatgtaaccagtgttttcgtgagttccgcactcagtcaatcttcacaaggcacaagagagttcatacgggggagggtcattatgtatgtaatcagtgtggaaaggctttcggcacgaggtcatctctttcttcgcactatagcattcatacaggggagtacccttacgaatgccacgattgtgggagaaccttcaggaggaggtcgaatctgacacagcacataagaactcatactggagaaaaaccctacacatgtaatgagtgtgggaaatcctttaccaatagcttttctcttacaattcacaggagaatacataatggagagaaatcctatgagtgcagtgattgtggaaaatcctttaatgttctctcatccgttaagaaacacatgagaactcacactggaaaaaaaccctatgaatgtaattattgcgggaaatccttcacaagtaactcctacctttctgtgcatacgagaatgcataataggcaaatgtgaattcaataactgtgggaaaagcattcattgatctttcatgcctcagataacatgagcaaactctaacaagatgtatgaatcacctgctactgtgtaacaaattaccccccaaaattttgtggcttcaaacaaaaacacttgttatctcaaaatttttgtaggtcaggaattcagaaacaacatagctctatagttcttcaggatatctcaagaggttacagtccagatgtcagcagaactgtaatcatccagaattgttactggtgaagggaccacttccaaatggcttacaagcccgacaagtgcatgctagctgt

SEQ ID NO: 23557 - DNA, 456 bp, Homo sapiens
aataattattttaaaattggtttcatagttcaatgtcatggcattatttcctaaactatttataatatttatatattattctacctggaaaaatagcgttcacattgtgactagagagtggttagcagcatattttagaaattgagaccttgtatgaagaaggaagcaacagttttatgatcacttatatttacatggagcttatatgaggaggtatgtaaatgtcctattgatcttttttgtcctacttttcctccatcagattgtgttcagctaagtaaggattagtagctatgcattggcaagttacaagctttcaagcaaactcatgggaatgcttgaccatatcactgaaaaggcttcatttccctcaaggataatggattgcatagatttatttaatgtaacaacatatttcattgaaagaaactaatttagtgactttaaaataaaata

SEQ ID NO: 23558 - DNA, 500 bp, Homo sapiens
gtctaccttaggtagaacatgaaacattatatgtttagatattttcagctatgcaaaggatcctattccaaaagaagaatacaacaattagaaagtcatatcccctttcttggaactaaaagcactttgaataatgtttgaaatttgtaattttcagtcatacctgaattttatttatattttttcatagttgcattctatttttgcctgtcacatccaaaataaagaaatgtttactacttctgtttgtcttattactctaagatatgtagtgttttattgactcacattcttttacatttagatttaacatctttaaatgtggatgcaaattaaaactgctggcaggctgggtgccatggctcacacccgcaatttcagcaccatgggaggccgagatggaggattgcttgagcccaagaggttaaggatgcagtgaactgtgattgtgccactgcattccagcctgggcaacaaagtgtcccccgtctaaaaaaagt

SEQ ID NO: 23559 - DNA, 1051 bp, Homo sapiens
gaacgcttcaacaagcttgtggtccggatgacgaagtctctggctgaacttcaaagggccttggctggagaagttggaatgagcaatgagttagatgatgtggccaggtctctttttatcgggcatatccctaatatctggagaaggcttgctcctgacaccttaaagtcccttggaaactggatggtctacttcctgcggcggttcagccagtacatgttgtggctcttgttggatggttcttggaaaggctgaaaccacagtctatgagagtgcttctttcctcactccgctgcaatgctgcgttcttaacattttggatcactgtctccctgataggtgaccgagagcgagcccagcgtgatgtggctctcggggctgcacatccctgagtcctacctcacggcgctggtgcaggccacctgccggaagaacggctggccactggaccgctccaccttgttcacacaagtgaccaagttccaggatgcagatgaagtgaatgagcgggcgggacaaggatgctttgtctcaggactgtacctggaaggtgctgactgggatatagaaaaaggatgtcttatcaagagcaaacccaaggtgctggttgtggacctgccgatcctgaagatcatccccattgaagcccatcgcctcaagctgcagaatactttccggacccccgtctacaccacctccatgagaaggaacgccatgggagtcggcttggtttttgaagctgatctctttaccacgaggcacatttctcactgggtgctgcaaggagtatgcctcaccctgaattctgattaacctttgggtgaagaaaactgcttaatgaattcggagcctggggttgtcagagtgatcgggtctgctgtcatttcttggggcctctcaagaggcaggagggggactgacactgatttttcatttgaaatcagccacttaaatctctttccatacaaattaacctgaatggttttgtttttaatactactttttaaaaggaatttatataatcaaaaagtaaatattggagagtatttta

SEQ ID NO: 23560 - DNA, 1469 bp, Homo sapiens
gaacgcttcaacaagcttgtggtccggatgacgaagtctctggctgaacttcaaagggccttggctggagaagttggaatgagcaatgagttagatgatgtggccaggtctctttttatcgggcatatccctaatatctggagaaggcttgctcctgacaccttaaagtcccttggaaactggatggtctacttcctgcggcggttcagccagtacatgttgtggctcttgttggatggttcttggaaaggctgaaaccacagtctatgagagtgcttctttcctcactccgctgcaatgctgcgttcttaacattttggatcactgtctccctgataggtgaccgagagcgagcccagcgtgatgtggctctcggggctgcacatccctgagtcctacctcacggcgctggtgcaggccacctgccggaagaacggctggccactggaccgctccaccttgttcacacaagtgaccaagttccaggatgcagatgaagtgaatgagcgggcgggacaaggatgctttgtctcaggactgtacctggaaggtgctgactgggatatagaaaaaggatgtcttatcaagagcaaacccaaggtgctggttgtggacctgccgatcctgaagatcatccccattgaagcccatcgcctcaagctgcagaatactttccggacccccgtctacaccacctccatgagaaggaacgccatgggagtcggcttggtttttgaagctgatctctttaccacgaggcacatttctcactgggtgctgcaaggagtatgcctcaccctgaattctgattaacctttgggtgaagaaaactgcttaatgaattcggagcctggggttgtcagagtgatcgggtctgctgtcatttcttggggcctctcaagaggcaggagggggactgacactgatttttcatttgaaatcagccacttaaatctctttccatacaaattaacctgaatggttttgtttttaatactactttttaaaaggaatttatataatcaaaaagtaaatattggagagtattttaagatgtgtggagttttcttttccttctcagagaaaacacttgattaggcaaaagtgcctggcatacatagcattggcacaagtgagaatcctaatgtaatttccaaaggtgtgttttcgatgatccaggtctgtttcagcagatgctcctttttggcaagaagggctgatgatgtcgggcacagagcagaagtgaccagtcacctggagccacttctcccccttccagaactctctggccctagcttctttggctctgacctgctacggcgactgtgaagttgttgagcttagtgtttagttcctgcatgagcttctacccccagcctgcctgggtctgtgtggggtcaggtaaggacacagaacctccaggaccagtggtcactgggcaccccttccctctgtgcaccatgaggctg

SEQ ID NO: 23561 - DNA, 400 bp, Homo sapiens
gtgggcccctaaaatgggcccaggcccatgtttgaaaagcccagcctgcctgcaaaatatttccctgtgtcctctgcactgccccatgtcttaacacctctgagggtggatacggaagtttctcttcccactttctccgttgaagacctggggtctatggcaggggagacctgaaccatgttcactctgctagctcatggcaagtgggctcctaggtcagaattagctcttgcaaaaaccatcaggtggctttcttgtaaactgacggggccaggggcatgggagccacagagcagcatggactaacttggttggaactctttgattatgccagaacttgaggtcccttagacattggttactgactgtgcaaatgagagctggaaactgctgtttcccc

SEQ ID NO: 23562 - DNA, 407 bp, Homo sapiens
ttttttttgctaatacaaataacattctggtgcacatgtatatgaatatgcataggggtatattccatgggtaaattctgacagtggaagagttggatcaaagagcttgtgcattttaaattttgatagctcttgttggatggttcttggaaaggctgaaaccacagtctatgagagtgcttctttcctcactccgctgcaatgctgcgttcttaacattttggatcactgtctccctgataggtgaaaataatatctcattgttttgcatgtctttaattatggtgagtctgagcgtattttgcatgctttacagacattttgtgtttgtttttctgtgaattgtccttttgtatctggatttcatttttagtgaggtctccatctttctcattgatgtttaagag

SEQ ID NO: 23563 - DNA, 476 bp, Homo sapiens
cgtggatgccttgctttctctgaaaagtgtcctggttttaggggaatccagcagtggtatcagccgcgatgattatattggccaagtggccaaagaaatagaaaacaagatgcccaaagtctttgacttggaccaggtgaggaagcgcctcggaacaggactctcccccacttcggtggtgctcctgcaggaactggaacgcttcaacaagcttgtggtccggatgacgaagtctctggctgaacttcaaagggtgagcctgtctctcatgtgcagattactgcctagatacgtggcacctggggttctgatagagtcctgcccgattgctcttgattctaaataggccttggctggagaagttggaatgagcaatgagttagatgatgtggccaggtctctttttatcgggcatatccctaatatctggagaaggcttgctcctgacaccttaaagtcccttggaaactggatgg

SEQ ID NO: 23564 - DNA, 937 bp, Homo sapiens
gaacgcttcaacaagcttgtggtccggatgacgaagtctctggctgaacttcaaagggccttggctggagaagttggaatgagcaatgagttagatgatgtggccaggtctctttttatcgggcatatccctaatatctggagaaggcttgctcctgacaccttaaagtcccttggaaactggatggtctacttcctgcggcggttcagccagtacatgttgtgggtgaccgagagcgagcccagcgtgatgtggctctcggggctgcacatccctgagtcctacctcacggcgctggtgcaggccacctgccggaagaacggctggccactggaccgctccaccttgttcacacaagtgaccaagttccaggatgcagatgaagtgaatgagcgggcgggacaaggatgctttgtctcaggactgtacctggaaggtgctgactgggatatagaaaaaggatgtcttatcaagagcaaacccaaggtgctggttgtggacctgccgatcctgaagatcatccccattgaagcccatcgcctcaagctgcagaatactttccggacccccgtctacaccacctccatgagaaggaacgccatgggagtcggcttggtttttgaagctgatctctttaccacgaggcacatttctcactgggtgctgcaaggagtatgcctcaccctgaattctgattaacctttgggtgaagaaaactgcttaatgaattcggagcctggggttgtcagagtgatcgggtctgctgtcatttcttggggcctctcaagaggcaggagggggactgacactgatttttcatttgaaatcagccacttaaatctctttccatacaaattaacctgaatggttttgtttttaatactactttttaaaaggaatttatataatcaaaaagtaaatattggagagtatttta

SEQ ID NO: 23565 - DNA, 1006 bp, Homo sapiens
gaacgcttcaacaagcttgtggtccggatgacgaagtctctggctgaacttcaaagggccttggctggagaagttggaatgagcaatgagttagatgatgtggccaggtctctttttatcgggcatatccctaatatctggagaaggcttgctcctgacaccttaaagtcccttggaaactggatggtctacttcctgcggcggttcagccagtacatgttgtggctcttgttggatggttcttggaaaggctgaaaccacagtctatgagagtgcttctttcctcactccgctgcaatgctgcgttcttaacattttggatcactgtctccctgataggtgaccgagagcgagcccagcgtgatgtggctctcggggctgcacatccctgagtcctacctcacggcgctggtgcaggccacctgccggaagaacggctggccactggaccgctccaccttgttcacacaagtgaccaagttccaggatgcagatgaagtgaatgagcgggcgggacaaggtaccgtcagctcgttagggatccacagcctctcacttaggatttctctccctgaaccacctccaactcaaagggacaggcatagcgtgggcccctaaaatgggcccaggcccatgtttgaaaagcccagcctgcctgcaaaatatttccctgtgtcctctgcactgccccatgtcttaacacctctgagggtggatacggaagtttctcttcccactttctccgttgaagacctggggtctatggcaggggagacctgaaccatgttcactctgctagctcatggcaagtgggctcctaggtcagaattagctcttgcaaaaaccatcaggtggctttcttgtaaactgacggggccaggggcatgggagccacagagcagcatggactaacttggttggaactctttgattatgccagaacttgaggtcccttagacattggttactgactgtgcaaatgagagctggaaactgctgtttcccc

SEQ ID NO: 23566 - DNA, 1316 bp, Homo sapiens
acggctttagaaattgatgctgtcttgctctgaacacgaacacctaaaatatcacacgtgggctttgagctcactgccttcacccactgcagtgtgagaacgctggcaacagggcttcggttccccagatgtcagcagccaggactgggtacatttctttaaatggcgcccgcaaacgaagtccagatcgcttggatgcagccccctacattggaaagcgtccttcccaggaaaggtctggcttacagccctctctggctggttggctggattccgagagcgcggcctgccccggcccggttaccagagagcggaccccgcggggcgcgtctcccgggcccggcgtcccctccctggcgggtggggagggccccacaaagccctttgttgaggctcccgtgtgacgcgaggagccccagactcggcgcccgcggcgagcgggaaggaggcgtgtgcctgcggcgcggccccgaggcgtgtgcgcggccatgtgcgcttagcgcagcgcgctcttacctcagtaccccggccgcgaccctccgagcccctggagcccgggtaaagtgaacagagttatctgtgacattccatcaggcacctatgtaacgaaatcataccgtaataactcaccatggcgtatggagtgccaagaaagaacacagtgaaaaccattttgcggggcagttgttataatgtgctggaatgttgtgcacctcctgggcttgagtgatcctcccatctcagcctcctgagtagctgggaccacaggcacacaccactgtgcccgacaggaaccttgggatattgcattgcttgcaaagacctggtacacaaacctagccaatatcaagttgcctttcttggaagaaatttcatttggtggttctgtgcagctcacaaaatgtaccaccattaaagatggactgctcccttctgcagaatctatcaaactcgaaagggagtatgaagtgaagcgtctttgtaaactgaagtgtcaagaaaatacatctaaggaaattcagcttctcctgagggaaaggccagccggtttgagaagacctcttccatctaaatgacagtcagttcatgattgaatctgtactctgtgtcttgcatccaaagggcatgaaggtctctggacctttcactatgtatagttcagggcagatatttgaatgtgcccactggtggatgggccactgcccacagctgtgggttagtacccagttctgacagatcttctgagtccctgacatactcttgttccttgtgtcacaaacgacagcactgtaagtagatgaaaatgcatttggagt

SEQ ID NO: 23567 - DNA, 1447 bp, Homo sapiens
acggctttagaaattgatgctgtcttgctctgaacacgaacacctaaaatatcacacgtgggctttgagctcactgccttcacccactgcagtgtgagaacgctggcaacagggcttcggttccccagatgtcagcagccaggactgggtacatttctttaaatggcgcccgcaaacgaagtccagatcgcttggatgcagccccctacattggaaagcgtccttcccaggaaaggtctggcttacagccctctctggctggttggctggattccgagagcgcggcctgccccggcccggttaccagagagcggaccccgcggggcgcgtctcccgggcccggcgtcccctccctggcgggtggggagggccccacaaagccctttgttgaggctcccgtgtgacgcgaggagccccagactcggcgcccgcggcgagcgggaaggaggcgtgtgcctgcggcgcggccccgaggcgtgtgcgcggccatgtgcgcttagcgcagcgcgctcttacctcagtaccccggccgcgaccctccgagcccctggagcccgggtaaccaggccgccggcgccggctcgcggggacccgccaccctggaagccccgcgcacacagcgcattcctggcgagtcggaggcagggtggggcccaggtgtgggaaggagccgaggctgaggccgttcccttctccgcgggctctgtgggcggccgaggcccccacccgtcccgggaaccagttcctcccgggccctgcgcgtccgtccggggaagggtaaagtgaacagagttatctgtgacattccatcaggcacctatgtaacgaaatcataccgtaataactcaccatggcgtatggagtgccaagaaagaacacagtgaaaaccattttgcggggcagttgttataatgtacaggaaccttgggatattgcattgcttgcaaagacctggtacacaaacctagccaatatcaagttgcctttcttggaagaaatttcatttggtggttctgtgcagctcacaaaatgtaccaccattaaagatggactgctcccttctgcagaatctatcaaactcgaaagggagtatgaagtgaagcgtctttgtaaactgaagtgtcaagaaaatacatctaaggaaattcagcttctcctgagggaaaggccagccggtttgagaagacctcttccatctaaatgacacctgaagcgcggattgtagatgaagaaactcagcagcgccggcgggaactgcttctcctgggccgcccaggacccgctcccggccccggccgtcgctgcgctgcagccatcctggcccggcccccacctcaggaagcctcccacggcccgcccagagaccgagaaaatctcttaatttcagtggaactcagtttgtttctctttttaaacattgccagttataaatgtattttattttata

SEQ ID NO: 23568 - DNA, 546 bp, Homo sapiens
ggatgcaacagccagagaactttcctaaattctgaatagtaaagatcacccatagcttcaccatacaatttcagaaagatacactgtgtatgtaaataccatgaccatccagaaattttcttctggttcattgaagaactgtctgttcttctgtgtatgtaaagattttgcaggttttgatgggctaaaggtccttgtaaactgtacaatagcttcacacaatccgacatttctaatcttttcattttttctacctcatttggatgataaaataaaatcttattttccccctctcctttgcgcagcctgaagcgcggattgtagatgaagaaactcagcagcgccggcgggaactgcttctcctgggccgcccaggacccgctcccggccccggccgtcgctgcgctgcagccatcctggcccggcccccacctcaggaagcctcccacggcccgcccagagaccgagaaaatctcttaatttcagtggaactcagtttgtttctctttttaaacattgccagttataaatgtattttattttata

SEQ ID NO: 23569 - DNA, 1327 bp, Homo sapiens
acggctttagaaattgatgctgtcttgctctgaacacgaacacctaaaatatcacacgtgggctttgagctcactgccttcacccactgcagtgtgagaacgctggcaacagggcttcggttccccagatgtcagcagccaggactgggtacatttctttaaatggcgcccgcaaacgaagtccagatcgcttggatgcagccccctacattggaaagcgtccttcccaggaaaggtctggcttacagccctctctggctggttggctggattccgagagcgcggcctgccccggcccggttaccagagagcggaccccgcggggcgcgtctcccgggcccggcgtcccctccctggcgggtggggagggccccacaaagccctttgttgaggctcccgtgtgacgcgaggagccccagactcggcgcccgcggcgagcgggaaggaggcgtgtgcctgcggcgcggccccgaggcgtgtgcgcggccatgtgcgcttagcgcagcgcgctcttacctcagtaccccggccgcgaccctccgagcccctggagcccgggtaaccaggccgccggcgccggctcgcggggacccgccaccctggaagccccgcgcacacagcgcattcctggcgagtcggaggcagggtggggcccaggtaaagtgaacagagttatctgtgacattccatcaggcacctatgtaacgaaatcataccgtaataactcaccatggcgtatggagtgccaagaaagaacacagtgaaaaccattttgcggggcagttgttataatgtacaggaaccttgggatattgcattgcttgcaaagacctggtacacaaacctagccaatatcaagttgcctttcttggaagaaatttcatttggtggttctgtgcagctcacaaaatgtaccaccattaaagatggactgctcccttctgcagaatctatcaaactcgaaagggagtatgaagtgaagcgtctttgtaaactgaagtgtcaagaaaatacatctaaggaaattcagcttctcctgagggaaaggccagccggtttgagaagacctcttccatctaaatgacacctgaagcgcggattgtagatgaagaaactcagcagcgccggcgggaactgcttctcctgggccgcccaggacccgctcccggccccggccgtcgctgcgctgcagccatcctggcccggcccccacctcaggaagcctcccacggcccgcccagagaccgagaaaatctcttaatttcagtggaactcagtttgtttctctttttaaacattgccagttataaatgtattttattttata

SEQ ID NO: 23570 - DNA, 999 bp, Homo sapiens
cctttggtcgctcagcactgccacgatcagacacattttggcgcagcggtgttggagctggtttggcaggctcaggcaagggcagagagtgcgacaccgaaactttgtctcaggatgacgaaacttacctggcattttctccttattcggtggcaaaaaatgaaaaaatgagttcatggaaaaatgaaagagaacacggttttacacttggggttccagttcaatgaacacttattaaggactttctgacattcagaatttttttctattatttggctacaaaatattcacgtgagaggcattaattaggtgcgttgccatcatttcaggtaaagtgaacagagttatctgtgacattccatcaggcacctatgtaacgaaatcataccgtaataactcaccatggcgtatggagtgccaagaaagaacacagtgaaaaccattttgcggggcagttgttataatgtacaggaaccttgggatattgcattgcttgcaaagacctggtacacaaacctagccaatatcaagttgcctttcttggaagaaatttcatttggtggttctgtgcagctcacaaaatgtaccaccattaaagatggactgctcccttctgcagaatctatcaaactcgaaagggagtatgaagtgaagcgtctttgtaaactgaagtgtcaagaaaatacatctaaggaaattcagcttctcctgagggaaaggccagccggtttgagaagacctcttccatctaaatgacacctgaagcgcggattgtagatgaagaaactcagcagcgccggcgggaactgcttctcctgggccgcccaggacccgctcccggccccggccgtcgctgcgctgcagccatcctggcccggcccccacctcaggaagcctcccacggcccgcccagagaccgagaaaatctcttaatttcagtggaactcagtttgtttctctttttaaacattgccagttataaatgtattttattttata

SEQ ID NO: 23571 - DNA, 379 bp, Homo sapiens
tatgggacctttggaatgacaggaatggaagcctgagccctctccacccagcactgccctgtcactgccccgggacgtccacgtgggctctgggaatgctcctttgctgagacaggcttgggtagtacaagttcaagccctcctctgttgaaatgtgtgtgctctgtttagccaagaggtgtctgcatccgagctatgcagagcaaagtattattagagccggcatcagtgtgtctgtaactgaacccagctctccctagcaaccgttgccaacaacacatctaacagaaggatgcgatacctttttttgaaaaaaaaaagtttgtctcaaccaagtcataaacacagcaggcctgttgtgaaaagacaacacaaaatc

SEQ ID NO: 23572 - DNA, 349 bp, Homo sapiens
accgggtgccgacctggctgtctgcttctttaacagcatttttgagatattcattcacataccttataatttatccattgaaagtacacagtgcggagcactttgggaggcagaggctgttgaatcacttgaggccaggagtttgagaccagcctgggcatcatagtgtgaccccaactctacaaaaaaatttaaaaattattcaggcctggtagtgcaagtctgtagtcccagctcctcgggaggctgaggtaggtggattgtttgagcccaagagtttgaggctgctgcagtgagccattattgtgccactgcaccccagcctggctacagagcaagaccctgtctc

SEQ ID NO: 23573 - DNA, 1111 bp, Homo sapiens
ggggcgacggcggctgaggcctttcgcaatcgttcttagatctctgcagagctgtcgccacggcctgaggggcgacgtggggactgccgctcacggaatccgggagtcgctaggagagcggcgcagggaaaagcgagcttggtgcagctcttcttgagtagtcgagctacaaggcgcctgaagaccttctgggccaactcttctttaccagtttacagagagggaaactgaggcgggggcggtgctcgggcaggattagcccgcatccgtcggcgaggcttgcactggtggggattcgtgcgcaggtttcctgcctccgggcttgggctgtccgcgcctcgccacccaccccaggctcccgtcgctcctcgccggctggcgcccagctggggggtgcaccgggagaggtggcgcggctcacttcggcgcagtccccggccccagcctccacggtgaccggctaccctgtgacatcaggcgcccagcacagggcctggacgcgggtgcaggagagggagtcagggaacggggaggagcaggggtccccactgtgtgcctggtgcgacaaaaggcgagctgcagagaggtcgggaggagccggcaaacacaaggatgcccaccaggcgcggagggcctgggctggaggagcatttaggatgcagaatcgcgggaacctggcatggagagagaggccaaggacttttggcttgggccagggctgtttggagatgctttcaacaagtggaagaagattgggcacagaaaatgtagactgaatggaacactgaggcaggagcaggtactcctccccctccctcagcagcagccatctccccaagaaggggccaggatgggaggccaggagtacagtggctcagtgggggagctgaagtcctggggaaccagccaagccccacacaccctagaaatccaggaggcccagctaggtgattctgcccgcagccgcagggttcccatgccagtccactgggatcttgtgccatgtaattgagggggcgccagatctaaggatcagtgaactaatgtgtgccatgacccagtgtgagttgagatcaataaatgtctttgctttgctattattaaaaaaaaa

SEQ ID NO: 23574 - DNA, 284 bp, Homo sapiens
agactctaggcttagtaatctgcagcgccagctggccctcgaagttatagtgaccttgtctgaaactgccactccgatgttgaaaaaacatacaaatattattgcacaggcagttcctcatatattagcaatgatggttgatctacaagatgatgaggactgggtaaatgctgatgaaatggaagaagatgattttgacagcaatgcagttgctgcggagagtgcactagacagactggcttgtgggcttggtggaaaagttgttttaccaatgaccaaggagc

SEQ ID NO: 23575 - DNA, 442 bp, Homo sapiens
attggatggtctggaatgttttttttcaatttcatgggattttctacatagccaatcatgtcatctgcagaaaaagacagttttaattcttccttcccaatctttatacctttcactttcttttcttgtcttactgcattagctaggacttctagtgcgatgttgaatagaagtagtgagagggcacttcttacctttctcttgatcgtaggggtaaagcatctaatatcctaccattaagtatgataaccatatggtttttatagatgttctgtataaaattgagatagctcctccctatttctaggttgctgagaggtttttatcatgaatgagcattggattttgtcagatgcttctaattcttttttatatgattaatgatttttagtctttagactattttgtgatggagtacattaattgatttttgaatgttaaa

SEQ ID NO: 23576 - DNA, 556 bp, Homo sapiens
ttaaattgtagcatataatctcccagtgaaacacttgtgtttctttccattttttctgctctaaacataattatcttgaagattccaactgcttccgggcagctgtacttgccggtcctgaaatcatgggaattcacactgacttttcagtgctttaaaaactacctcatttcacattcagatgctaagggcaaagagtgtggcctggaggtggactcttaaaataaagctatcaaattgatttgaacttttgttatacataaattccttactgagggcataaaagtactgtgttgtcacacttcatttaccaatttgcagtatttttttgtgtccccagtaatactatgatccatttcaaggttaggtgatttacaaaaggtgatttctgagtaggcacaacaagccctattcataaagactaatatttaataattctaacttttataagaacatctgttctattgagagccatgacttattttaaattgtcttcctggttaaccttgccatggagaaagcttatgtgtaagtaaaaacttgaggcaacagaact

SEQ ID NO: 23577 - DNA, 551 bp, Homo sapiens
gggtttaaatgactcatctcctatctaggtttctttcattaagatgccgagactcttcttttcactaaatattatttccacccactcatggagcagagagccacgttccataaaagggctctctgatatacggtagtagtcacatgcttttagcaatgcatacctgccaagaatggacagatacctcagattaggctgtactgtcctgaatttttggtctctttcccaggtgtttcccaggaaagaaattcattatcaataaggtggaaaggacttctcagtattgagccccataatttgccttcgtagtgttggagggaacaaggggaaatgggagcagaaatgagaaatgggagaggagtttgggaagtaaggcggaaaggccagcacaggtagcattgctgacgagagacaaagcttggatgaggccactctgcctttcaccaccaaggcctgtaatagactggccaggctccgaaacgctggactcaacgtttaactgcctgctctggaggatttaggacaaacagggaaaaaccttttgaaatagt

SEQ ID NO: 23578 - DNA, 465 bp, Homo sapiens
ttcagatttcactttatttgtgaaaccttctcatctgtccgctagttaaaagaggcctttctttcattctcatggttttgtctattgtaaagtactattattattggtttatgtatctttcttcaacccactgtgattttcttgagggcaggatctatttcttattcatttactatatcctcaacccctagtaaagtgcttttgcacatcctaggcattaagtaactaaatgatgagtaggatttgttttgctttaaaaatttattatattttagggaagggaacaacacacaccagggcctgttggaaggttgggggcgaggggagggagagtatcaggacaaatagctaatgcatgcagggcttaaaacctagatgatgggttgataaatgcagcaaaccaccatggcacacgtatacctatgtaacaaacctgtacgttctgccattgtatcccagaactta

SEQ ID NO: 23579 - DNA, 307 bp, Homo sapiens
tcactgctttaatttataccacagaacgtctgattgttcagttttgcaaattagcaagtgaacaaaccaatttaaagaaataaagacaatgccacataaaacacagtcctcttatttatcttgatgaggcatggttccattttaatgatttctgttaatgttttattgtacagtggttatgcccccaagtgcattttataagactaatgaagtcttagtaatccgaggcgtcttctccaatatgctcttactatgtctttgctgagaacgcttgtggggagaccaccaccactgtgtgagcaaggaa

SEQ ID NO: 23580 - DNA, 291 bp, Homo sapiens
gggagagggggagggggcctgggccagggtgcccagcggctcggtctcccattcacccccttcagagggaaggtggctcttcctctccatctgacaggaagagcagttcccagaaagaggaactgtgcacaccactgagcccagcctcagtgcgtgtcccagcggggatggttaggcccaggagtatcagaaggtagtggggcctgagggtggaggcagcagggcacacggcactcgggagctttctgttcggtgctgtctgggccactggtctggccatgggtccccaag

SEQ ID NO: 23581 - DNA, 456 bp, Homo sapiens
tctttttttgagacagagtcttgttctgtcacccaggctcccagactgaaatgtagtggcaagatcatggctcaatgtagtctgaaactcctggcctcaagcaatcctcccacctaggcctcctaagtagttggggctacaggtgcacgcaaccacgcccagctgatttttttttttctttggtagagacaccgccttgctatgttgcccaggctggtcttgaactcctggcctcaggtgattttcctgcctcggcctcccaaagcactgagattataggcgtgggccactgcacccagcctctgctgctcatttttatctgagatttgtttctctgaacttttagaaggcagtatagttcagatgaggttttccaacctcacagagttctttcttctgtttttgtgtactgttcaaacaaatggcagcttaccttctgggatttcctggctgtat

SEQ ID NO: 23582 - DNA, 346 bp, Homo sapiens
aaagggactaactagtggactccatcagtaggccctggaattcaggattgttcacatcctcttggtgccaaggacctggctgaagaccagctcttctgatccagaggttttcagcaaacagcatttgaaacaaaagcacagctgctctgtttgacaccaaactgtggctccagattccagtagaagccaaatgctttttcttttaacagctgggtgcctgtaatcccagttacttgggaggctgaggcaggagaattgcttgaacccaggaggcggaggttgcagtgagccgagcttgcaccattgcactccagcctgggcaacaagagtgagactccatctcaaa

SEQ ID NO: 23583 - DNA, 495 bp, Homo sapiens
tgcttttctttcccatcttcaggcctttgcaatgtagactcacctctgccaaagatgctgttcaaccagatatacctgtaactgttcctttctcacccttccagtctcccctcaaatatcagtacctccaaccagccatcacagccatctgcgtgaagattccctcctccctctactccttcatcctgccatttgctctttttttcacatcatcccattgctgattttcacagcatttgtcatactctgcaatgttcttgtttctgtcttcccactagcatgttagctttattatctgcttcttcacacccagtccaaagcttggagtccagcatatcacatgtactgtgtatttaatgaattagtagttcaacagcaactgccattaagatcattcatttaaccaaccaccatttttcgaattccaggctcaccaatgtctgatacagtaagttccttttcaaacgtttaatttctgactcccttgttctttgt

SEQ ID NO: 23584 - DNA, 319 bp, Homo sapiens
tcaaaaaaacaaaaaacaaaaaacggagaaacaggtgaaaatctctatgattttgaattaggaaatggtttcttagaaataagcacaagaatcaaagaaaaaataagataaatcaaactttactaaaattaaaaacattgtaggttaaaggataccaacaagatagtgaaaagacaatccacagaatggaagactatatttgcaaaatatctacctgataagggcctaacatccagaatacgcaaacaactctttttttttttttttttttgagatggaatctcgctctgtctctcaggctggagtgcaatggcgcaat

SEQ ID NO: 23585 - DNA, 157 bp, Homo sapiens
acatgcaccataatctgtgattttaccaacttctcttatttcaaaattggctttggtattaaactgttttaataataataataagcagataattaacagctgagtggatagatgaatgggatttctattcacttactagggtagtttccccctgatc

SEQ ID NO: 23586 - DNA, 283 bp, Homo sapiens
agggaggaaaaagccagagaagacttgaggactgagaatacaggctaaggccaggcccacgcctggaagagaagaactttctctttgtctccttgcccactgcctgtccctgagcctgcgggactgggagggcagaggacacttctggggtttggcccagagaatttatttcttcttttcttgttttccgctacaccacgtggcttcagaccatgacatttctgttcaatgccgtcagtgccttggtttgaggagaatgtctgtgtacccagcttccatggcc

SEQ ID NO: 23587 - DNA, 366 bp, Homo sapiens
gaagttaagttgtaattgtttttaagtgattatgtacacttctgttttagattgctctctttcactaaaccttttagcatagtgttcattcaagtctcttgctcatcctcacttcaactctaacaaattgaattctcttctctaacttcgagcattctctgttagaaaacttcagtgatgatatgttgtgtttgtgcaacagagctttaaaattcacagcacataggtacaccgtctagtgtgaaccccacaaccactctgggagatagacaaaaaggtgttattcccatttagaggtagaaacactgagacccaggaaatgctaagttacttgcctatgggactctctcatatgacagatcttgg

SEQ ID NO: 23588 - DNA, 349 bp, Homo sapiens
ggactcagagcatagcctgcaaagagtctctctggggccagtcaggtaactgacatagcatgatgtgtagttcaaagaaaccagtttatttatgtggatcaattttagtttttgcaaatgcataaaagcatgagggcagcccatcaaaatgtctcctgccattgatttgcccactgagcagcctgagcacgtggtttaaattgcttctctaatctgtgacaaaaatagaagaccaatgaagtgcaccattggccagtatctggcagtgggcaatgtctgaattggcttccaggaaccagggagatcctgaagtgttgaaccaggtactggcatcttcccatatgtcctt

SEQ ID NO: 23589 - DNA, 214 bp, Homo sapiens
atctccacctggccccacccttgacacatggggattattacaattcaaggtgggatttgggtggggatacagccaaatcatatcatgagaaaaggcaagaggggtctcactgagttggcaaagaaagagaaaacactgagtaggaacactgaagctcttagcccctgagaacaaatcgcagacagcatggagaggaagggacaattgtttctaa

SEQ ID NO: 23590 - DNA, 241 bp, Homo sapiens
ggaacactcagaactcattggcccctattttatgaataattatataaagcttgagattttatgtctcaacccatgacagatttgaagtaaaggtaaagaaacatgttagaagaaataacagccagaccgttaaaataatggggaaggagacatttttgaaaaagtaaagctcagtctataaatctcaaaatgcgtcacattctggaactgtttagtgacaggtgacaactgtttttttatt

SEQ ID NO: 23591 - DNA, 446 bp, Homo sapiens
acgacaaagggactttaaaaaaaatctaagaatttaactttatcacatacagtggtagatgttttaccctcgttaattcttgaagaaacttattttttgattgcctttactccatgcgtttcagaagtttctgttgtaggcatttgaatagaaatggcatttagataaatttaaatgtaggcctaccaacaaccattgagtggcactatctttataacaacttaaaaagctgtacttagtgaaactaatattaatcactgtcaagttttgacaagtcttgtaaaaagggagaaaaaataattaggttaaaggtgttattgctacgatttctgcttaggatgaaaagtaaaattgtggctctctggaatttacttggaagcagatcttctggatagctgagatttccatataatggagtttactacagtttactacttgtggcctga

SEQ ID NO: 23592 - DNA, 449 bp, Homo sapiens
acctgagcctggaaagttgaggctgcagtgagctgagatcatgccactgcactccagcctgggtgacagagcaaggctctgtctcaaaaataaataaaaaagaagagaaaaaaagtactattataatccaacaacaacaacaacaaaacatagttttaaaatgggcaaaggtaggctgaatgtggtggctaacacttgtaatcctggcacttttagaggttgaagcgggaggatcacttgagcccaggaatttgagaccatcctggcaacatcacaaagccccatctctacaaaaaattagctggtcatggtgccgcatgcctataatcccagctacgtgggaggctgaggtgggagaatcacttgaggtcgggaggttgaggctgcagtgagctgtgatcatgccactgcactccagtctgtacaacacagtgagatcctgtctcaaa

SEQ ID NO: 23593 - DNA, 378 bp, Homo sapiens
aaaaaaaaaaaaaaagattttaaaagccattgtaatcaagacagtgaggtattggcaaaaagacagccatagatagatcagaattgagtccagatatagacccatacatatgtggccaactgatttttgacagagatgccaagacaattcaatggggaaaggaacgttttcaacaaatgatgctggaataactggatgtccatatgtagaaaaatgaacctcaaacattaccttgtaaagcacacaacagttaatttgagaggatcatgggcttcaacagaaatgttagaaagataaagcccctagagagagcataggataatgtatctgtttgacactgaggtgatctaagatttctcagaagcactaaccatagga

SEQ ID NO: 23594 - DNA, 882 bp, Homo sapiens
ctgatcctatattctcctagcacgggtaatgtctgatttctttgttacaggtaactaacatgttgatgttgccctttgctgtcagttcagctcctctaggaagcagatgctaagatggaattaggagtacaataaatttattgggggctaatggccatgacagaagggagaggaaacaggactgggcaatgaaagtcttcacacctccatgcagattagacacctgtgaaaggaaagaaagagaggcagaattgggcaaggggagcttcagaccatggtgtggatctgcataaatctctgcctatgcaatagggagttctggaacaaagagtccccattagaagagtcccatgctgggcagacagggccacacccgagcactcccagcttgtacggtattggctgggggctacccaggaagagatgggcctcagctcaaacacatggcatatgttgaagatgctgcagctagaggcaacagtgagttctctcttaaagggagatcttcgcagcacacctccacagctgccatgcgatccaaatctcttattccatgctggctttcactatagaatagtggccagagagtttgatacctgctttcccagcctccctgacaattggaatgactatgtgacacagttctggctagtggggcttctgagaagctaactggataaaaagacaaagccttatgcgaagaaagcacgcacacacatacgtgcaccggctatttgttttctaattttgaatgccgtcttgatacctggaggggcagccatcttgcaaccaagaggccataagcaaatgtgctgaaggatatagttccttgatgacattaatgagactgctctcttcctggtaaataaacaatatgttatt

SEQ ID NO: 23595 - DNA, 631 bp, Homo sapiens
attcgcggccgcgtcgacttttttttttttgtgagacggagtctcgttctgtcgtccaggctggagtgcagtggcgctatctcggctcattgcaggctccgccccccggggttcacgccattctcctgtctcagcctcctgagtagctgggactacaggcgcccaccacctcgcctggctaattttttgtatttttagtagagatggggtttcaccgtgttagccaggatggtctcgatctcctgacctcccaaagtgctgggattacaggcgtgagccaccgcgcccggcgccatattaaaatggcaatgaaagttgactttgccagacaccagtcaaagtagttggcctgagtttcattctttcccccacagcattacatattcattaaaccagtaagaactttcatgatatcccaggcaattacagtgcaacaagaaaacgaagtgacaatcctccttcatgctttatatgacaaccattatatgacaacctatgtctttcagtctacatgggtaattaattcatatgagttcagtattttattataatacttataaataagggcatcttaatggaagagtaaaacttcttcagtagtcgacgcggccgccgaatttagtagtagtag

SEQ ID NO: 23596 - DNA, 658 bp, Homo sapiens
  misc_feature (630)..(630): n is a, c, g, or t
tcccatcttttcccccttttacacttcactccaatcacactgacttgcttactgatgcttgaacaaaagtcaagcttcatcccacttctgggcctttgcacatgtgctccctccaactgaaaagctcttccaccagacctctgcgtgtcacttcactcaggcttctgcttaaatgtcttttggaaagtctccctgggctccctatgtacaattgtctctcaaccccggattcccttgtccccagcatgctctctgaccctttgttctgctgtaattttgttcacagcacctgggtgcatttttatctgtttatttagcttactgccccccaactattagaatcttttcttttcaactgtggttttatattcagtgaaatacagagatttcaaatgtccaattcaatgcattttgataactatatatacatatttttaaccataaccccaattaaaacagaaaatgttcatcaccccagaaaagtgattcacaaagcacatttattttttggacacagggtctcatatcattgcccaggctgcagtgcagtggcacaatcatggctcactgcagcctcaacctcccaggctcaaaggctgcagcgagcagtgattgtgtcactgcattctnccctgggcaccaatgtgagaccccgtct

SEQ ID NO: 23597 - DNA, 262 bp, Homo sapiens
tacccagactgagcttaatgttctatgtattaagaataaaaataattcaattataactcgaggagaacagattacctgcaacataacaaaacagtatagcatccaaactctcctctacaacattaaattcctgagtattatgaaataatatctaagaaattttgagcataaaaacaattataacacaggacttttgtaaaaaaataagttgtcatttattaacaaaggcaaaagaataacattcttagattccaaagccaca

SEQ ID NO: 23598 - DNA, 1028 bp, Homo sapiens
gaattgagggactataacaaaagatctagtatttgtgttatcacaaaagatggggagagactgaaaagtattgaaataaataatgtctgaaaagttaccagtttggcaaaaggcagaaagctatagattcaggagcctgagcaaatcccaaactggaaaaatccaaaggaatatagaccaaaccacataatattcaagcttctgaaaatgaaagataaagaaaaaccaaacatcaatctaagaaaagtgggaatggctatattaatatcagataagatagacttccaagcaaagaaagttctcagagacacagaggggcattatattaagataaagaaagcaacaaaaaagaaacgacatgctacctgtaggggaaaaacaagttgaatggaaatgggtttctcatgagaagtgatggaggccagaagtaagtgacagaacatttttcaagtgctggaagaaaacaactgtgtttccagaatcctacatccagaaaaatatcctttaggaataaaggaatcaagacattctcagatagaaggaaacgaagagaatttgttgccagcatacctaacctaaaagaatggctaggaaaagttctctaaatagagagaaatgataagagaaaaaatccaggaatatgtagaaggaacaaagcacatgtaaagcaaaaatatgggtaagtacaataaaatttccttctccttttgagttttctaagttatgtttgtccattgaaacaaaatttatcatgctgatgtggttgtaacagaatatagaggaagtatttaagacatactataaatgggaaagggtaaagagacataaagggaggtgagatttctacgtatcacttgaactagtaaaataataccctcagtcaattgtggtaagctatatttataaaatgtaatacctagagtaacaattaaaaagctatacaaagagatatactaaaaacactataaataaataaaagtagaattctaaaatatgttcaagtaatgtacaggaagacaggaaaaaga

SEQ ID NO: 23599 - DNA, 360 bp, Homo sapiens
agtatcgcttcctgttgagttgggcatgggctggcccacaggagcttttgagtgtagaatgccagattggcggtggctgtttcactgcctgctccattatttcaataaaaaagttgtctatggtaattgtgagggaagcgatcagggatttgctgcagacactgccatggtactgtgctgttctacctcccttccctgcattgaggaatgtgaacttagagtaattactctgacaggtgaacctgacttgtaacccagacaggcaaagtagagctctgactctcacagtgtaagagttctctgctttacaaaagggtcaccttaatatttaaccctgtgtgtgtgccttttagcatctgc

SEQ ID NO: 23600 - DNA, 223 bp, Homo sapiens
cccggcccagcccctccacccccctgcccccccgatgcgaccatgggctctggcagtgactaggtggccaccctcccgccgagcctcggctcctgccggcgggagcccccgaatgctgcacccagccacccagcagagcccgttcatggttgatctccacgagcaggtgcaccagggacctgtccctctgtcctacacggtcaccacagtgacgacccaaggc

SEQ ID NO: 23601 - DNA, 407 bp, Homo sapiens
cacactcctttccagtttcgagctgtactggaaattggagagttgtgaaaggatggtttttggataatcaaagttgaatatacttgctgggctgtgttatgaccgtctttgaagccacgaatcattaaaaataagtgaatagtttacattataatattcctaggaaacttcctttgataattgtaaagcaattaaaattgtcctgagataaggtgatttattgtttttcagaatgggccataaagatattaaagaacccattcaacatttgtcaaaacccataaaatgcacaacgcaatgaatgaaccctaatgtaaaccctagactttagttcattataatgtattaacgttggcccatcaattgggacaaatgtaccacatcaatacaagatattaataataggg

SEQ ID NO: 23602 - DNA, 852 bp, Homo sapiens
agagatgaagtttcgccatattgcccagactggtctcaaactcctgggctcaagcgatcttcctgccttggcctcccaaagtgctgggattacaggcgtgagccacgatgtctggcctactgttttttaatggttcatttaaattactgtgccttctacagttggtatttacaccatgcattggataaaatggggagatgtcttaaagtagtgtagggaagcctccgacaggaaaacctgggcctgggtggatcaggacttatacttacttttgccttaggctatcttcgtgaaatggaaggtttgtgtttttaagtgggtcagaaattggaactttaaaatgttggtttcagcaattttggtttatctgttctttactttcatctacaaataatttgaaacttttatctctctgttgtttgttcatcatcccatcaatccgtcggtccattgtgtagcatccactgcaacacacctttctcttagatttaattttttgttcactggagatttgagggctcatcaccaaatccagaggtccaggtttcccagtacactcacggatttctgggaagaaactgtttttaggattgccattaatgtttccaggcccttcccatttttgtgttggattaaaatggtgacaacatgaagcctgcagtcaatgtgaagggagttgggtgcctttcttagtgagataccttaaagggaacctttgaatatggctctctaaatagtgacagatctcttataaaatatgttcgcatatatagagttcaaaggtaagctagagacatgaagaaaggagcagtgatttatatttatcacttccttaaaatgattactaatatg

SEQ ID NO: 23603 - DNA, 434 bp, Homo sapiens
gtcaggagtttgagaccagcctgaccgacatggcaaaaccctgtctctactaaaaatacaaaattagccaggtgtgatggtggccatctgtaatcccagctacttgggaggctgaggcaggagaattgcttgaacatgccaggcggaggttgcagtgagccgagatcacaccattgcactccagcctgggcaacaagggtgaaatttcatctcaaaaaaaaaaatttcaggagggagtggagataaatgaatatatagttgattcttcacattttcttcaatgtgatagctcacagccatcatattgtttcctttcttgtaattatttgttgtcttccctctcctacatatgcgctctggccacaaatgattgcatgtatacagtgcaatatttactcttgttttatttgctgtgagcagacactcttagaagt

SEQ ID NO: 23604 - DNA, 462 bp, Homo sapiens
gggctccccagtggctgagcagttcagtagtaatttgtccccaaaattcacttcagtccttttctgggatgcagcttctatcctggggctggtcactcgctcttccattgtaagcattactactcttcgctccgaaccagtggaactggtagcaatgcattcataagtgcccctgtctgaagaggctaggtttcttatatacaaagtcccatttgaaaataagaacaacttggaattggtaaactgtaatggtttcacttcagtgccatcagagaggacccagtaaacgctgggctgaggagttccttttgcagtacagggcagttttaaactttcaccccaagtgcctacaatgacttgcctcctttgctctagaataacaggtggtgctgcaatgacttgtattttaaccagcagtgaatcctggccacctgggttgctggccacacatttgtaaaagcc

SEQ ID NO: 23605 - DNA, 1338 bp, Homo sapiens
acctctgttcctttctgtgacccccacgtggtaatattgaaaaaaccaaaacaaaactccagctaaggcattgctctgactttaggcagaacattcattagtggagcgtgagatgagattgtgtgactgttgatgggatcgacctactctggtcttgggcgatggaagttttccctaagtgcaaggccggttactctggtgaatcgtaattcatacctggacacttgagtgaactctgggcacccacttagaagtctagagaatttcctcttttatggaggatttgatgtcagaccgttttggggcttagttagatttgaatatattaggaacattaactttttaaataaatgtaatttcctgtctttttgatcaatggggggagggcagctgtgcctaatttaggattgatttattctaacctctcttactaaataaatgcttgtattcagagtctgtttggaatttaacccaatgcttagaactccttaaatatacagaaatatattttaggggtaattgattcatggaactctcctactttggagcacaattgtattataattgtccggaaactggccagataatgtagaacgcacaagttgttgagaagcccttttgtttcctgatagttacatgtaattccagcagtatttggaaataatttgctaagatgttagaatgtaacatttgaagacttgttagaaaaatcaataaaattatctttggctaatgggtagtacacatcttagtctgtttaatatgcctttccaaaaaaaactgtgtctgttgagaattggtgtatataactagatgactttaataattagtgcctgagtctagaattgagatgtttagtcgtaaaaaaaaaatattgttcgataaacagcgttgacttgtcttgtaccacttaagagtttgtgagtgctttaaataaaattagttgattaagtattttttttcctatgattgacatgcttagttttgcctttttattgaaatgtgtgaaatttgattttctggcatctaacaaattaggtggtaaatgaatgacaatggattttctattatttttcagtattgtgatcagtataagtatataagagaatttagtaaccttttagaagaataaagtgcccttcccaaatagtcctacagcttttggaaaagtgtaaattgtagtttgtagttctaaataaatagagaagagtcgcagccacgtgctagggccagctgacttcattgctgacaggtatgaagccaaatggcttatgtagttatggaatatgtacatgagctattaataaatattatccatgttgtttctttcaagtgctt

SEQ ID NO: 23606 - DNA, 2932 bp, Homo sapiens
aagagaccctccccaatcccggcctgccaccacctggctcgcgcgcagccccggcccagaatgccttaacctgcgccgattgctgccgccgaggtgcccctcccctgtagggaccccgacgccgccagccccttcctcctttcccgcaggttagcctggcaaggaagataaagacatttgcaaccaagatggtaatcactagtgaaaatgatgaagacagaggaggtcaagaaaaagaaagtaaagaggagagtgtcttggcaatgctggggattatcgggaccattctgaacctgattgtgatcatatttgtctacatatacaccaccctgtgaatggcccagagcgtcctcagaggcctcagaatggccaaagacggaagtcctgcgtgtcggcgcatcactgaccagaccctgcgagaacaagcaggcttgacccgcacataccacccaatcaaatgcaccttcaaactttacaaaaggtcacacaaatagaccgatcctgctgcagggagcagacactaaagcacaatgattccaacaaaactcattcacagcactaggaactcaacgtctttggcagggggcccagaagaatgcttggaagaccagcctctgacaccatcagtgagcggatgggtgcagaaattcattattccagatcgctgacagatatcacatatttgaaaagatgaatagggcggacatggctcagatgtgtgtctcccaggacaagtgtttcatcttcacttgacgagctatttagtggaaaaaccacaggcgcagccctttgacaggcatcccattcatcaaaagtgtctaactatttgatactggggagataacttatttttcttttttcattggcttgacatgtgtatctgttcatgtcaaggtttataaatatatatttttaataaatgtgctctattttttagcatgaaccaaatacttggagaggcactcccagatccatagagctttccttagttttatctgctttgtcccctcctcccccaactacagatgttctgttgtggagccattctagtccttttgtctcatcttgagtcttttaccttgcgcttttgttctctctctctcctctctctctgcctctttggtctgaaggacattttcccatactgtcagccatggttttgggtgcatgttttaagattgtccattgagtggctttttgttgttatctcggagatataaaatgattgtgggcatgcagaccttagatgcaccctatctttactgagaattatgcatgaataagggctgagtgatagatcagcttaaaattaaaaggactacctttgaggaagaagagcgtggctatatttgcagatgaacttttgaacagaatattcagcttcttaccggcagcgttattgtttcattcttgtgaccattcgtttatcagattttgattttagcggtcatgtaccgcgagagttgggaagaacaagggggaaagctcgggattaggtgcattactccttcctttgcaagatacctgggatcctcctcaaaagcgggtggggtataaatgacacaagaactcccccaggagatctcatggtgattcaggctgtgaggacagccctgtgacaggtgacttttcagggacatgaggaggggatttaatgattgccctaaaggacttctgtatttttaaagcccctggtttacacccacatgaagctatttcctctctggcagggatggttgcataaaaacaaattagctcccttctggctccctgaaatgggcccttgcctggctacagtggcatggccttaaagagagggttagtattccttctgccattgccagctgtattagtctgttttcacactgctgaaaaagacatccccaagactgggcaatttacaaagaaagaggtttattggacttacagttccacgtggctgaggaggcctcacaattacggtggaaggtgaaaggcacgtctcacatggtggcagacaagagaagtgaacatgtgcaaggagactcccatttttaaaacagatctcgtgagactttttcactatcatgcaaacagcatgggaaacctgcccccgtgattcagttacctcccaccgggtccctcccacaacacatgggtattcaagatgagatttgggtggggttacagccaaactctatcaccagccttgcccctgggcagaagcagcagcagtctgcctggctggattcaaatgattctgaggcttctatagtctatgcctgcagatctctccctcacccatgctatagtgtctgaaattccaccattagagagtcatttcttgggctctgttaaatggaccaggctcttttataaagaaaatgcccctgagcagctggctctggcattgatttatgatatcttctcttccctgccagaaggaaggaagctaaggtgcatgtagggcgtactgtgtgcccaggcactgtgccagatgctttggatacttggagtcattgaattcttgtagtaaccctgtgagagagggagtcttttctccacattgtagaagaaggaaaaagggctcagagaggtcaagaaatgtccctgagatcacatggcttctagtggagtcaagatccaaacccaatgtgtctgattccttagcccttgggggtccggaggctgctgaacaagaaaggaggtggagaggagagaaagctgcaggcataccaccgcacacccttctccctcccctgtaaaaacaaccctgggaactccctggacactagcagaatatcatacactaaggataagggatgagaggaggctggttagaaataaagcagtgtcagggggaaggagctactcagtaggctctgtgtgattctagaaagactgtatgaaaattctgaacactgaacagaataaacaataaaggtgcaatgga

SEQ ID NO: 23607 - DNA, 3005 bp, Homo sapiens
gacatgagcagcgcgcacggggtcccgcgcccggcggccagccctatccggcggcggccagcgggtcaacgctgcccgggagaatgaggcaggagccggcggcagcctcctttttttccttctcctcgccttcctgcggctccggcgctccgggtccgggccgggctgcggctctgctgcgtgccccgcgcgcccctcaaccgcctccggatgcgcttctcggttagcctggcaaggaagataaagacatttgcaaccaagatggtaatcactagtgaaaatgatgaagacagaggaggtcaagaaaaagaaagtaaagaggagagtgtcttggcaatgctggggattatcgggaccattctgaacctgattgtgatcatatttgtctacatatacaccaccctgtgaatggcccagagcgtcctcagaggcctcagaatggccaaagacggaagtcctgcgtgtcggcgcatcactgaccagaccctgcgagaacaagcaggcttgacccgcacataccacccaatcaaatgcaccttcaaactttacaaaaggtcacacaaatagaccgatcctgctgcagggagcagacactaaagcacaatgattccaacaaaactcattcacagcactaggaactcaacgtctttggcagggggcccagaagaatgcttggaagaccagcctctgacaccatcagtgagcggatgggtgcagaaattcattattccagatcgctgacagatatcacatatttgaaaagatgaatagggcggacatggctcagatgtgtgtctcccaggacaagtgtttcatcttcacttgacgagctatttagtggaaaaaccacaggcgcagccctttgacaggcatcccattcatcaaaagtgtctaactatttgatactggggagataacttatttttcttttttcattggcttgacatgtgtatctgttcatgtcaaggtttataaatatatatttttaataaatgtgctctattttttagcatgaaccaaatacttggagaggcactcccagatccatagagctttccttagttttatctgctttgtcccctcctcccccaactacagatgttctgttgtggagccattctagtccttttgtctcatcttgagtcttttaccttgcgcttttgttctctctctctcctctctctctgcctctttggtctgaaggacattttcccatactgtcagccatggttttgggtgcatgttttaagattgtccattgagtggctttttgttgttatctcggagatataaaatgattgtgggcatgcagaccttagatgcaccctatctttactgagaattatgcatgaataagggctgagtgatagatcagcttaaaattaaaaggactacctttgaggaagaagagcgtggctatatttgcagatgaacttttgaacagaatattcagcttcttaccggcagcgttattgtttcattcttgtgaccattcgtttatcagattttgattttagcggtcatgtaccgcgagagttgggaagaacaagggggaaagctcgggattaggtgcattactccttcctttgcaagatacctgggatcctcctcaaaagcgggtggggtataaatgacacaagaactcccccaggagatctcatggtgattcaggctgtgaggacagccctgtgacaggtgacttttcagggacatgaggaggggatttaatgattgccctaaaggacttctgtatttttaaagcccctggtttacacccacatgaagctatttcctctctggcagggatggttgcataaaaacaaattagctcccttctggctccctgaaatgggcccttgcctggctacagtggcatggccttaaagagagggttagtattccttctgccattgccagctgtattagtctgttttcacactgctgaaaaagacatccccaagactgggcaatttacaaagaaagaggtttattggacttacagttccacgtggctgaggaggcctcacaattacggtggaaggtgaaaggcacgtctcacatggtggcagacaagagaagtgaacatgtgcaaggagactcccatttttaaaacagatctcgtgagactttttcactatcatgcaaacagcatgggaaacctgcccccgtgattcagttacctcccaccgggtccctcccacaacacatgggtattcaagatgagatttgggtggggttacagccaaactctatcaccagccttgcccctgggcagaagcagcagcagtctgcctggctggattcaaatgattctgaggcttctatagtctatgcctgcagatctctccctcacccatgctatagtgtctgaaattccaccattagagagtcatttcttgggctctgttaaatggaccaggctcttttataaagaaaatgcccctgagcagctggctctggcattgatttatgatatcttctcttccctgccagaaggaaggaagctaaggtgcatgtagggcgtactgtgtgcccaggcactgtgccagatgctttggatacttggagtcattgaattcttgtagtaaccctgtgagagagggagtcttttctccacattgtagaagaaggaaaaagggctcagagaggtcaagaaatgtccctgagatcacatggcttctagtggagtcaagatccaaacccaatgtgtctgattccttagcccttgggggtccggaggctgctgaacaagaaaggaggtggagaggagagaaagctgcaggcataccaccgcacacccttctccctcccctgtaaaaacaaccctgggaactccctggacactagcagaatatcatacactaaggataagggatgagaggaggctggttagaaataaagcagtgtcagggggaaggagctactcagtaggctctgtgtgattctagaaagactgtatgaaaattctgaacactgaacagaataaacaataaaggtgcaatgga

SEQ ID NO: 23608 - DNA, 662 bp, Homo sapiens
gttggggctgtcctggagaatctaaggtatctagtcatcatatatatgaaattcaacttttccattgtttgataaatgttcctgatgactcatgtgtctttagcactagtttatctgtcaaatggtcactggtaagagaaagagcgctcgctgtgaagggatgggattcctgaatggggatctggatacacagctgggtttgtgtgttcatgcatgtgcacaagcacctgcagctcagaatctacaaccaacagctcttagagtcagtgtggccttggtatactttgttttgtatcctttaggggtgtgtgtctccaactttaacgtacaagtcaatcacctggggatcttcttaaaatgcagattccaattccagggtggggtctgagattttatatttctaattagcgcttactcaggtgacatctgtgctgctggccagaggctcacactttggcaaatctctagtactgcaaaattgccgtctgagaaacatgcctccagattagctaagaaaggaagcgctaaccacaggggacttggtccccaagacccaaaaatatagagaacctaatttcaaacaagcagaaaggaacttctctggaaagagacgactcagctttcttcatttgtaataaaccaaatctgtaaacacttaaaat

SEQ ID NO: 23609 - DNA, 737 bp, Homo sapiens
cagtgctatgaatctgtccaaataaacatgggaagtagtgaaacaatgacaccacatgaaaaatatatccttattcattaaatagaatccaaaaaattctctggaatttaattgtagcaatgacgtgaggactgtctggtctattaagagaggatagtgacttccctcttcagttagtccagcacggatgagtgtgatcttaagtggctctacaattccacatgcatcgtcctaaatctagatacatgaaaatggatcatttcctatcaacccctcactcacacccgtggactctagggcatttgtggtagagttttatggtaattacaaacataagcagcttgtcagaattcaaataatcaattttaatttctgtctcaatcactaaagattactgaccactatgatgaaattaaggagtgctttctctggagattgcaaacacaagggcagagaggaagttagaagcttctattttgtggtcagttttgaaaaatacagtcaaaagcagtagccataatcaacattatagagaaccttaaattcataaagatgccaatttagctattagtgggcagttccatataaaactggtagctataatgcgtacacatgtctttgttaaggggctttgttgtaggaatggaagatgagggtatagtgattattgtgttatgatcaatgctattatttaaatatgtctttaaaaaatatcctgtacactcttgatactggag

SEQ ID NO: 23610 - DNA, 362 bp, Homo sapiens
ggttttgatcaatcactccagaatactgacctcttttccctttcccatgatgtgagggagcttatgagagtgaggcttcaaaatgcatcttagccccccgcagccacagctttgcatttgccccagctgtctcctcagacccttccaaacaatctgatacatgaaagcaccacaagatttgagtgtaggtggtagaatcctgtaagaaccaaaaattctcgataccaaggtagaattgtacagttattgataccaaggggcttctggaatggtattcctctatttgcggctggaaacttacccactcctcacctagaggcctgctgtttgacagacacctcagacctttctgtctgagcagg

SEQ ID NO: 23611 - DNA, 330 bp, Homo sapiens
gccccaaatcctctgaagtgagaaggcagggaccgttagctgaaatgctgttgattttagtggctgtgagcacacataaggatacaggtcatttcccttataattaggtcccagatcacttagtccattagagttttaaatgataaaaaaaaaaaaacaccttgacctgcacctggaaagaaagtaccaacacagtccagagtatagtacaggaacaagaagcagcctcaagtcatcctatttgtatccatgtctttaaacattgccttattccacatactatttaggaaaacttaattctgactggagatcagacatctttaggaaggt

SEQ ID NO: 23612 - DNA, 3060 bp, Homo sapiens
agcatccaccgcgcggcccaggactgtcagggtagtgggcgttgcgtgaggcgggtaaatgttcgcggaagcggcaaagacgacacggccttgtgggatggcggagtttaaggagaagcctgaggccccgactgagcagctggatgtcgcgtgcggccaggaaaacttgccggtgggcgcgtggcccccgggggccgcgccggcgcccttccagtacactcctgatcatgtagttggacctggagcagacattgatcccactcaaataacctttcccggatgcatttgtgtcaaaactccctgcctccctggcacttgctcctgtctccgccatggagagaactatgatgataactcatgccttagagatataggatctggaggaaagtatgcagagcctgtttttgaatgcaatgtcctgtgccgatgcagtgaccactgcagaaacagagtggtccagaaaggtctacagttccacttccaagtgttcaagacgcataaaaaaggctggggacttcgtaccttggaatttataccgaaaggaaggtttgtctgtgaatatgctggtgaggttttaggattctctgaagttcagagaagaattcacttacaaacaaaatccgactccaattacattatagccatcagggaacatgtttataatgggcaggtaatggaaacatttgttgaccctacttatataggaaatattggaagattccttaatcattcttgtgagccaaaccttttgatgattcctgtccgaattgactcaatggtacctaagttggcactttttgcagccaaagatattgtgccagaagaagaactctcttatgattattcaggaagatatcttaatctaacagtcagtgaagacaaagaaaggctagatcatgggaaactaaggaaaccttgttactgtggtgccaaatcatgtactgctttcctgccttttgacagttctctgtactgccccgtagaaaagtcgaacatcagttgtggaaatgagaaggaacccagcatgtgtggctcagccccttctgtgttcccctcctgcaagcgattgacccttgagactatgaaaatgatgttagacaaaaagcaaattcgagcaattttcttattcgagttcaaaatgggtcgtaaagcagcagaaacaactcgcaacatcaacaatgcatttggcccaggaactgctaacgaacgtacagtgcagtggtggttcaagaagttttgcaaaggagatgagagccttgaagatgaggagcgtagtggccggccatcagaagttgacaacgaccagttgagagcaatcatcgaagctgatccccttacaactacacgagaagttgctgaagaactcaatgtcaaccattctacggtcgttcgacatttgaagcaaattggaaaggtgaaaaagctcgataagtgggtgcctcatgagctgactgaaaatcaaaaaaatcgtcgttttgaagtgtcatcttctcttattctacgcaaccacaacgaaccatttctcgatcggattgtgacgtgtgatgaaaagtggattttatatgacaaccggcgacgatcagctcagtggttggatcaagaagaagctccaaagcacttcccaaagccaatcttgcacccaaaaaaggtcatggtcactatttggtggtctgctgctggtctgatccactacagctttctgaatcccggtgaaaccattacatctgagaagtatgctcaggaaatcgatgagatgaaccaaaaactgcaacgcctgcagctggcattggtcaacagaaagggcccaattcttctccacgacaatgcccgaccgcatgttgcacaacccacacttcaaaagttgaatgaattgggctatgaagttttgcctcatccaccgtattcacctgacctcttgccaaccaactaccacgtctttaagcatctcaacaactttttgcagggaaaacgcttccacaaccagcaggatgcagaaaatgctttccaagagttcgtcgaatcccaaagcacggatttttacgctacaggaataaaccaacttatttctcgttggcaaaaatgtgttgattgtaatggttcctattttgattaataaaaatgcgttgagcctagtaaaaatgatttaaaattcacagtccaaaaccgcagttagttttgcaccaacccaatatcttcatagattgaaatataaattaaaattgcatttgaagtagattccacggactttattaagaatgtagaaatgtggcctggcatggtggcttacaactgtaatcccagcactttgggaggcccaggcgggcagatcacttgagtccaattgttcaggaccagcctgggcaacatagtgagaccctgactctaataaaataattttttaaaaaaagattaaaacatgtaccttgaaaagcattttggcccaagaataataacgatcacacttgaagaacaaagcttttctttaaaaaaattttcctttaattttcaaattactattcacaaaatagcagtggctgttagattttgttcttggccaaatggaaaattttgccctaattaaaatgtagtcactctccagtgtgttaccattgaacaaatcactgaacctttccaagtcaaagtttccttagttgggaagattgagttaacacatgcaaaggggttagagcaatgcctgagtatatagaaagtattcaataaatgtaaattattagtcttgagaactgtctgtaggatgtgacccaaagttctcccttctattcaggtgtaattaggatataatgtccttcaaatggcagacttaaagggggaaaaagtcactaagaggtgaccagaagggttagagctgagcaagagaggttcctgccctgagccctgcattttagagtgcctaaggttacatacatacacacacacacgagttaaagaagacatggataccataaccagacacatgagttaaagaagacatggataccataaccaaagacattactaggaaagaaaactaataccaatatcccttttgaatacagaggc

SEQ ID NO: 23613 - DNA, 1725 bp, Homo sapiens
agcatccaccgcgcggcccaggactgtcagggtagtgggcgttgcgtgaggcgggtaaatgttcgcggaagcggcaaagacgacacggccttgtgggatggcggagtttaaggagaagcctgaggccccgactgagcagctggatgtcgcgtgcggccaggaaaacttgccggtgggcgcgtggcccccgggggccgcgccggcgcccttccagtacactcctgatcatgtagttggacctggagcagacattgatcccactcaaataacctttcccggatgcatttgtgtcaaaactccctgcctccctggcacttgctcctgtctccgccatggagagaactatgatgataactcatgccttagagatataggatctggaggaaagtatgcagagcctgtttttgaatgcaatgtcctgtgccgatgcagtgaccactgcagaaacagagtggtccagaaaggtctacagttccacttccaagtgttcaagacgcataaaaaaggctggggacttcgtaccttggaatttataccgaaaggaaggtttgtctgtgaatatgctggtgaggttttaggattctctgaagttcagagaagaattcacttacaaacaaaatccgactccaattacattatagccatcagggaacatgtttataatgggcaggtaatggaaacatttgttgaccctacttatataggaaatattggaagattccttaatcattcttgtgagccaaaccttttgatgattcctgtccgaattgactcaatggtacctaagttggcactttttgcagccaaagatattgtgccagaagaagaactctcttatgattattcaggaagatatcttaatctaacagtcagtgaagacaaagaaaggctagatcatgggaaactaaggaaaccttgttactgtggtgccaaatcatgtactgctttcctgccttttgacagttctctgtactgccccgtagaaaagtcgaacatcagttgtggaaatgagaaggaacccagcatgtgtggctcagccccttctgtgttcccctcctgcaagcgattgacccttgagggtgagtctgttcagtgataagcagcttgcccctccctatagtggaagacagtggttggctagctttacctctgcctagttacataagtttaactcaggaatgtggcagagactgcaagttgtccatcagtatcctttcccctttctgtaatagaattctccatttaacaaaagtacatgactacccagaatactcactttcctagttagatttgtcttagtgactgttctagttaataggatataagcaaaaatgacaagtccttaaatggagatatcctgcccttcacctcctctttcttcctgctggctggaatgtatacatgatgactggaactggagcagtcatcctagaccccaggatgaccctgggaaaggaagccattgcatagaaaaatcaacaaggttaaaaggagtctaggtgtctggtactgtagaacatcctgtcagtcgtgatctgacacctttgtactttcaggtgagaaatagtctctcccttgcttaagtcactgttattgtaagttttctagcactaacatcgaacctaataatgatccaagaaacccttgtggctgcatacctaaaccctgcttgccaaccaattttaacagtaataaagctgactttttgatttcagtctgactcct

SEQ ID NO: 23614 - DNA, 1383 bp, Homo sapiens
agcatccaccgcgcggcccaggactgtcagggtagtgggcgttgcgtgaggcgggtaaatgttcgcggaagcggcaaagacgacacggccttgtgggatggcggagtttaaggagaagcctgaggccccgactgagcagctggatgtcgcgtgcggccaggaaaacttgccggtgggcgcgtggcccccgggggccgcgccggcgcccttccaggttctctgtactgccccgtagaaaagtcgaacatcagttgtggaaatgagaaggaacccagcatgtgtggctcagccccttctgtgttcccctcctgcaagcgattgacccttgagactatgaaaatgatgttagacaaaaagcaaattcgagcaattttcttattcgagttcaaaatgggtcgtaaagcagcagaaacaactcgcaacatcaacaatgcatttggcccaggaactgctaacgaacgtacagtgcagtggtggttcaagaagttttgcaaaggagatgagagccttgaagatgaggagcgtagtggccggccatcagaagttgacaacgaccagttgagagcaatcatcgaagctgatccccttacaactacacgagaagttgctgaagaactcaatgtcaaccattctacggtcgttcgacatttgaagcaaattggaaaggtgaaaaagctcgataagtgggtgcctcatgagctgactgaaaatcaaaaaaatcgtcgttttgaagtgtcatcttctcttattctacgcaaccacaacgaaccatttctcgatcggattgtgacgtgtgatgaaaagtggattttatatgacaaccggcgacgatcagctcagtggttggatcaagaagaagctccaaagcacttcccaaagccaatcttgcacccaaaaaaggtcatggtcactatttggtggtctgctgctggtctgatccactacagctttctgaatcccggtgaaaccattacatctgagaagtatgctcaggaaatcgatgagatgaaccaaaaactgcaacgcctgcagctggcattggtcaacagaaagggcccaattcttctccacgacaatgcccgaccgcatgttgcacaacccacacttcaaaagttgaatgaattgggctatgaagttttgcctcatccaccgtattcacctgacctcttgccaaccaactaccacgtctttaagcatctcaacaactttttgcagggaaaacgcttccacaaccagcaggatgcagaaaatgctttccaagagttcgtcgaatcccaaagcacggatttttacgctacaggaataaaccaacttatttctcgttggcaaaaatgtgttgattgtaatggttcctattttgattaataaaaatgcgttgagcct

SEQ ID NO: 23615 - DNA, 2368 bp, Homo sapiens
  misc_feature (349)..(349): n is a, c, g, or t
agcatccaccgcgcggcccaggactgtcagggtagtgggcgttgcgtgaggcgggtaaatgttcgcggaagcggcaaagacgacacggccttgtgggatggcggagtttaaggagaagcctgaggccccgactgagcagctggatgtcgcgtgcggccaggaaaacttgccggtgggcgcgtggcccccgggggccgcgccggcgcccttccaggttctctgtactgccccgtagaaaagtcgaacatcagttgtggaaatgagaaggaacccagcatgtgtggctcagccccttctgtgttcccctcctgcaagcgattgacccttgagtgactatgaaaatgagtgnatgatcaaaaacacgcatagactctcgaacgcaacagtattctcttaagtcttccgatgcttccaattagactggggggctcgttagacatggccagggcaagaaagaccagaactccggcacatcgagtcgaaccaatgcatttggcccaggaactgctaacgaacgtacagtgcagtggtggttcaagaagttttgcaaaggagatgagagccttgaagatgaggagcgtagtggccggccatcagaagttgacaacgaccagttgagagcaatcatcgaagctgatccccttacaactacacgagaagttgctgaagaactcaatgtcaaccattctacggtcgttcgacatttgaagcaaattggaaaggtgaaaaagctcgataagtgggtgcctcatgagctgactgaaaatcaaaaaaatcgtcgttttgaagtgtcatcttctcttattctacgcaaccacaacgaaccatttctcgatcggattgtgacgtgtgatgaaaagtggattttatatgacaaccggcgacgatcagctcagtggttggatcaagaagaagctccaaagcacttcccaaagccaatcttgcacccaaaaaaggtcatggtcactatttggtggtctgctgctggtctgatccactacagctttctgaatcccggtgaaaccattacatctgagaagtatgctcaggaaatcgatgagatgaaccaaaaactgcaacgcctgcagctggcattggtcaacagaaagggcccaattcttctccacgacaatgcccgaccgcatgttgcacaacccacacttcaaaagttgaatgaattgggctatgaagttttgcctcatccaccgtattcacctgacctcttgccaaccaactaccacgtctttaagcatctcaacaactttttgcagggaaaacgcttccacaaccagcaggatgcagaaaatgctttccaagagttcgtcgaatcccaaagcacggatttttacgctacaggaataaaccaacttatttctcgttggcaaaaatgtgttgattgtaatggttcctattttgattaataaaaatgcgttgagcctagtaaaaatgatttaaaattcacagtccaaaaccgcagttagttttgcaccaacccaatatcttcatagattgaaatataaattaaaattgcatttgaagtagattccacggactttattaagaatgtagaaatgtggcctggcatggtggcttacaactgtaatcccagcactttgggaggcccaggcgggcagatcacttgagtccaattgttcaggaccagcctgggcaacatagtgagaccctgactctaataaaataattttttaaaaaaagattaaaacatgtaccttgaaaagcattttggcccaagaataataacgatcacacttgaagaacaaagcttttctttaaaaaaattttcctttaattttcaaattactattcacaaaatagcagtggctgttagattttgttcttggccaaatggaaaattttgccctaattaaaatgtagtcactctccagtgtgttaccattgaacaaatcactgaacctttccaagtcaaagtttccttagttgggaagattgagttaacacatgcaaaggggttagagcaatgcctgagtatatagaaagtattcaataaatgtaaattattagtcttgagaactgtctgtaggatgtgacccaaagttctcccttctattcaggtgtaattaggatataatgtccttcaaatggcagacttaaagggggaaaaagtcactaagaggtgaccagaagggttagagctgagcaagagaggttcctgccctgagccctgcattttagagtgcctaaggttacatacatacacacacacacgagttaaagaagacatggataccataaccagacacatgagttaaagaagacatggataccataaccaaagacattactaggaaagaaaactaataccaatatcccttttgaatacagaggc

SEQ ID NO: 23616 - DNA, 2361 bp, Homo sapiens
gcctcccagtcgcgaccttttgtcttctcttacagcgcacccgttggtgcgcgggaataggtgtgcatgccccggcctgggcctttttctgttgacccacggcatcaccttagcaagggtgttgtccttttcagtccattccctgaagcgcagaaccggaggccttgtgagaacctggctttttgtccagtcctgtcctcagaactcaaggaggcatcacggggggagtcatttacctccctggtctcaggtgtctctcacaggttctctgtactgccccgtagaaaagtcgaacatcagttgtggaaatgagaaggaacccagcatgtgtggctcagccccttctgtgttcccctcctgcaagcgattgacccttgagactatgaaaatgatgttagacaaaaagcaaattcgagcaattttcttattcgagttcaaaatgggtcgtaaagcagcagaaacaactcgcaacatcaacaatgcatttggcccaggaactgctaacgaacgtacagtgcagtggtggttcaagaagttttgcaaaggagatgagagccttgaagatgaggagcgtagtggccggccatcagaagttgacaacgaccagttgagagcaatcatcgaagctgatccccttacaactacacgagaagttgctgaagaactcaatgtcaaccattctacggtcgttcgacatttgaagcaaattggaaaggtgaaaaagctcgataagtgggtgcctcatgagctgactgaaaatcaaaaaaatcgtcgttttgaagtgtcatcttctcttattctacgcaaccacaacgaaccatttctcgatcggattgtgacgtgtgatgaaaagtggattttatatgacaaccggcgacgatcagctcagtggttggatcaagaagaagctccaaagcacttcccaaagccaatcttgcacccaaaaaaggtcatggtcactatttggtggtctgctgctggtctgatccactacagctttctgaatcccggtgaaaccattacatctgagaagtatgctcaggaaatcgatgagatgaaccaaaaactgcaacgcctgcagctggcattggtcaacagaaagggcccaattcttctccacgacaatgcccgaccgcatgttgcacaacccacacttcaaaagttgaatgaattgggctatgaagttttgcctcatccaccgtattcacctgacctcttgccaaccaactaccacgtctttaagcatctcaacaactttttgcagggaaaacgcttccacaaccagcaggatgcagaaaatgctttccaagagttcgtcgaatcccaaagcacggatttttacgctacaggaataaaccaacttatttctcgttggcaaaaatgtgttgattgtaatggttcctattttgattaataaaaatgcgttgagcctagtaaaaatgatttaaaattcacagtccaaaaccgcagttagttttgcaccaacccaatatcttcatagattgaaatataaattaaaattgcatttgaagtagattccacggactttattaagaatgtagaaatgtggcctggcatggtggcttacaactgtaatcccagcactttgggaggcccaggcgggcagatcacttgagtccaattgttcaggaccagcctgggcaacatagtgagaccctgactctaataaaataattttttaaaaaaagattaaaacatgtaccttgaaaagcattttggcccaagaataataacgatcacacttgaagaacaaagcttttctttaaaaaaattttcctttaattttcaaattactattcacaaaatagcagtggctgttagattttgttcttggccaaatggaaaattttgccctaattaaaatgtagtcactctccagtgtgttaccattgaacaaatcactgaacctttccaagtcaaagtttccttagttgggaagattgagttaacacatgcaaaggggttagagcaatgcctgagtatatagaaagtattcaataaatgtaaattattagtcttgagaactgtctgtaggatgtgacccaaagttctcccttctattcaggtgtaattaggatataatgtccttcaaatggcagacttaaagggggaaaaagtcactaagaggtgaccagaagggttagagctgagcaagagaggttcctgccctgagccctgcattttagagtgcctaaggttacatacatacacacacacacgagttaaagaagacatggataccataaccagacacatgagttaaagaagacatggataccataaccaaagacattactaggaaagaaaactaataccaatatcccttttgaatacagaggc

SEQ ID NO: 23617 - DNA, 2131 bp, Homo sapiens
agcatccaccgcgcggcccaggactgtcagggtagtgggcgttgcgtgaggcgggtaaatgttcgcggaagcggcaaagacgacacggccttgtgggatggcggagtttaaggagaagcctgaggccccgactgagcagctggatgtcgcgtgcggccaggaaaacttgccggtgggcgcgtggcccccgggggccgcgccggcgcccttccagtacactcctgatcatgtagttggacctggagcagacattgatcccactcaaataacctttcccggatgcatttgtgtcaaaactccctgcctccctggcacttgctcctgtctccgccatggagagaactatgatgataactcatgccttagagatataggatctggaggaaagtatgcagagcctgtttttgaatgcaatgtcctgtgccgatgcagtgaccactgcagaaacagagtggtccagaaaggtctacagttccacttccaagtgttcaagacgcataaaaaaggctggggacttcgtaccttggaatttataccgaaaggaaggtttgtctgtgaatatgctggtgaggttttaggattctctgaagttcagagaagaattcacttacaaacaaaatccgactccaattacattatagccatcagggaacatgtttataatgggcaggtaatggaaacatttgttgaccctacttatataggaaatattggaagattccttaatcattcttgtgagccaaaccttttgatgattcctgtccgaattgactcaatggtacctaagttggcactttttgcagccaaagatattgtgccagaagaagaactctcttatgattattcaggaagatatcttaatctaacagtcagtgaagacaaagaaaggctagatcatgggaaactaaggaaaccttgttactgtggtgccaaatcatgtactgctttcctgccttttgacagttctctgtactgccccgtagaaaagtcgaacatcagttgtggaaatgagaaggaacccagcatgtgtggctcagccccttctgtgttcccctcctgcaagcgattgacccttgagactatgaaaatgatgttagacaaaaagcaaattcgagcaattttcttattcgagttcaaaatgggtcgtaaagcagcagaaacaactcgcaacatcaacaatgcatttggcccaggaactgctaacgaacgtacagtgcagtggtggttcaagaagttttgcaaaggagatgagagccttgaagatgaggagcgtagtggccggccatcagaagttgacaacgaccagttgagagcaatcatcgaagctgatccccttacaactacacgagaagttgctgaagaactcaatgtcaaccattctacggtcgttcgacatttgaagcaaattggaaaggtgaaaaagctcgataagtgggtgcctcatgagctgactgaaaatcaaaaaaatcgtcgttttgaagtgtcatcttctcttattctacgcaaccacaacgaaccatttctcgatcggattgtgacgtgtgatgaaaagtggattttatatgacaaccggcgacgatcagctcagtggttggatcaagaagaagctccaaagcacttcccaaagccaatcttgcacccaaaaaaggtcatggtcactatttggtggtctgctgctggtctgatccactacagctttctgaatcccggtgaaaccattacatctgagaagtatgctcaggaaatcgatgagatgaaccaaaaactgcaacgcctgcagctggcattggtcaacagaaagggcccaattcttctccacgacaatgcccgaccgcatgttgcacaacccacacttcaaaagttgaatgaattgggctatgaagttttgcctcatccaccgtattcacctgacctcttgccaaccaactaccacgtctttaagcatctcaacaactttttgcagggaaaacgcttccacaaccagcaggatgcagaaaatgctttccaagagttcgtcgaatcccaaagcacggatttttacgctacaggaataaaccaacttatttctcgttggcaaaaatgtgttgattgtaatggttcctattttgattaataaaaatgcgttgagcct

SEQ ID NO: 23618 - DNA, 1774 bp, Homo sapiens
gcctcccagtcgcgaccttttgtcttctcttacagcgcacccgttggtgcgcgggaataggtgtgcatgccccggcctgggcctttttctgttgacccacggcatcaccttagcaagggtgttgtccttttcagtccattccctgaagcgcagaaccggaggccttgtgagaacctggctttttgtccagtcctgtcctcagaactcaaggaggcatcacggggggagtcatttacctccctggtctcaggtgtctctcacagtacactcctgatcatgtagttggacctggagcagacattgatcccactcaaataacctttcccggatgcatttgtgtcaaaactccctgcctccctggcacttgctcctgtctccgccatggagagaactatgatgataactcatgccttagagatataggatctggaggaaagtatgcagagcctgtttttgaatgcaatgtcctgtgccgatgcagtgaccactgcagaaacagagtggtccagaaaggtctacagttccacttccaagtgttcaagacgcataaaaaaggctggggacttcgtaccttggaatttataccgaaaggaaggtttgtctgtgaatatgctggtgaggttttaggattctctgaagttcagagaagaattcacttacaaacaaaatccgactccaattacattatagccatcagggaacatgtttataatgggcaggtaatggaaacatttgttgaccctacttatataggaaatattggaagattccttaatcattcttgtgagccaaaccttttgatgattcctgtccgaattgactcaatggtacctaagttggcactttttgcagccaaagatattgtgccagaagaagaactctcttatgattattcaggaagatatcttaatctaacagtcagtgaagacaaagaaaggctagatcatgggaaactaaggaaaccttgttactgtggtgccaaatcatgtactgctttcctgccttttgacagttctctgtactgccccgtagaaaagtcgaacatcagttgtggaaatgagaaggaacccagcatgtgtggctcagccccttctgtgttcccctcctgcaagcgattgacccttgagggtgagtctgttcagtgataagcagcttgcccctccctatagtggaagacagtggttggctagctttacctctgcctagttacataagtttaactcaggaatgtggcagagactgcaagttgtccatcagtatcctttcccctttctgtaatagaattctccatttaacaaaagtacatgactacccagaatactcactttcctagttagatttgtcttagtgactgttctagttaataggatataagcaaaaatgacaagtccttaaatggagatatcctgcccttcacctcctctttcttcctgctggctggaatgtatacatgatgactggaactggagcagtcatcctagaccccaggatgaccctgggaaaggaagccattgcatagaaaaatcaacaaggttaaaaggagtctaggtgtctggtactgtagaacatcctgtcagtcgtgatctgacacctttgtactttcaggtgagaaatagtctctcccttgcttaagtcactgttattgtaagttttctagcactaacatcgaacctaataatgatccaagaaacccttgtggctgcatacctaaaccctgcttgccaaccaattttaacagtaataaagctgactttttgatttcagtctgactcct

SEQ ID NO: 23619 - DNA, 2196 bp, Homo sapiens
agcatccaccgcgcggcccaggactgtcagggtagtgggcgttgcgtgaggcgggtaaatgttcgcggaagcggcaaagacgacacggccttgtgggatggcggagtttaaggagaagcctgaggccccgactgagcagctggatgtcgcgtgcggccaggaaaacttgccggtgggcgcgtggcccccgggggccgcgccggcgcccttccagactatgaaaatgatgttagacaaaaagcaaattcgagcaattttcttattcgagttcaaaatgggtcgtaaagcagcagaaacaactcgcaacatcaacaatgcatttggcccaggaactgctaacgaacgtacagtgcagtggtggttcaagaagttttgcaaaggagatgagagccttgaagatgaggagcgtagtggccggccatcagaagttgacaacgaccagttgagagcaatcatcgaagctgatccccttacaactacacgagaagttgctgaagaactcaatgtcaaccattctacggtcgttcgacatttgaagcaaattggaaaggtgaaaaagctcgataagtgggtgcctcatgagctgactgaaaatcaaaaaaatcgtcgttttgaagtgtcatcttctcttattctacgcaaccacaacgaaccatttctcgatcggattgtgacgtgtgatgaaaagtggattttatatgacaaccggcgacgatcagctcagtggttggatcaagaagaagctccaaagcacttcccaaagccaatcttgcacccaaaaaaggtcatggtcactatttggtggtctgctgctggtctgatccactacagctttctgaatcccggtgaaaccattacatctgagaagtatgctcaggaaatcgatgagatgaaccaaaaactgcaacgcctgcagctggcattggtcaacagaaagggcccaattcttctccacgacaatgcccgaccgcatgttgcacaacccacacttcaaaagttgaatgaattgggctatgaagttttgcctcatccaccgtattcacctgacctcttgccaaccaactaccacgtctttaagcatctcaacaactttttgcagggaaaacgcttccacaaccagcaggatgcagaaaatgctttccaagagttcgtcgaatcccaaagcacggatttttacgctacaggaataaaccaacttatttctcgttggcaaaaatgtgttgattgtaatggttcctattttgattaataaaaatgcgttgagcctagtaaaaatgatttaaaattcacagtccaaaaccgcagttagttttgcaccaacccaatatcttcatagattgaaatataaattaaaattgcatttgaagtagattccacggactttattaagaatgtagaaatgtggcctggcatggtggcttacaactgtaatcccagcactttgggaggcccaggcgggcagatcacttgagtccaattgttcaggaccagcctgggcaacatagtgagaccctgactctaataaaataattttttaaaaaaagattaaaacatgtaccttgaaaagcattttggcccaagaataataacgatcacacttgaagaacaaagcttttctttaaaaaaattttcctttaattttcaaattactattcacaaaatagcagtggctgttagattttgttcttggccaaatggaaaattttgccctaattaaaatgtagtcactctccagtgtgttaccattgaacaaatcactgaacctttccaagtcaaagtttccttagttgggaagattgagttaacacatgcaaaggggttagagcaatgcctgagtatatagaaagtattcaataaatgtaaattattagtcttgagaactgtctgtaggatgtgacccaaagttctcccttctattcaggtgtaattaggatataatgtccttcaaatggcagacttaaagggggaaaaagtcactaagaggtgaccagaagggttagagctgagcaagagaggttcctgccctgagccctgcattttagagtgcctaaggttacatacatacacacacacacgagttaaagaagacatggataccataaccagacacatgagttaaagaagacatggataccataaccaaagacattactaggaaagaaaactaataccaatatcccttttgaatacagaggc

SEQ ID NO: 23620 - DNA, 414 bp, Homo sapiens
gtccctgggattcggcttgagggctaccgcagtctggcccggccggccctgactgatacgggctctgaggtttccaggtctgggcaggacaaggtccctggtgacggaagcaggtgagcctcctgcaggagagcaggctgaggttgtgggatctggagttttgctggggacgtgtttgcagcagagttgggatttgcaggggagggccgggctaagctttcactgctagagtcctctgcatgtacactgtgaagccatagtaatcccaccggctgacgtgtgtctgtactcaccctgtgcagggcccttctgaacgagtctcacctgtattaactttgggtccttggggcagtatcagggaggctctgtcctcgccccattttacccaccacggaattgaggcacagtgaagcc

SEQ ID NO: 23621 - DNA, 460 bp, Homo sapiens
gacggcagggggtgctcgtctctcaccactggagctgtcccctcttcaggcctctgagggagggcaggctgtcagctgtgggctgggggaggccgtgtgcctgctgcaatattgatgggaatgcagtccgcaggggctgctcacactggccgcctccgagctggcctcagaagaggtggtgaaatccatcatcttccccatgacagcacagcctgtatctgcccccaggggactcgtgcattccaagagcagcagcagcttggggagcaatgctggacaggagtgctgagacctgccctgtgggaggtgccccctcggtacctcctttgtgttgggtctgtggggcccgcccagctcgggctctgctcagggtgctagggaaggccagccctgaccctccctgggccttggggcccctctccacgcaatgagggatgcggtcttgaaggccaggggctgc

SEQ ID NO: 23622 - DNA, 448 bp, Homo sapiens
cattgcctaagtatgtgtctgctctttggattctcatttgaaccaattggaacatcttatttgttccctaattagagttatagatagaggtgttgattttatatttgcatgagagacacagtgccacctttttgtttgtttctttcagttatcctttaacagcttgaactccaaatttagcctgagtttgaatcccatttactgttgcgatttgggtcacggaattttattttttaacctaagcgtgtgttacttcctataaaaaggaatttatagtattattttctttgcatggttagtgtgaggattaaaagagatgttgtaagttacacacttctcatagtacctcgtataacataagaattctttttaaaaaactctttattagaagactgtgggcaactaattttgccttcctgagacttcatttcatattgttaaaaaaaaa

SEQ ID NO: 23623 - DNA, 732 bp, Homo sapiens
ctgaggcctgcagaccctccctaggatgatttttaaagtaatattcactcagtgtattcattagttcctccaaaagcccttttgcataaacagctcgtgcattcctgagaattcagtgcaaacagagggagtattatcaacccagttttacaggtgagcaagctgaagaggcagtgaatgttccatgagctgcaagcagtggctgcctggtctctgctccggggttctaaccctttcttgtcttttaagctaagggagctgtgagactgagtttagacaggctgggggtcaatatgctgggtatttatataagcacatactcttaagtttagatctgtgctacaaaccacgacctagaagtacacaacactgtcctgtggaggcagcctggaggggtggaaataataataataataacaacagctacaataattggatgcctcctccatgccccatactattctaagcatttttcagatcttaactcatttaatcttcactataaccctgtaagatggatgctattattacccccattttacagctgaggaaactaaagcacagagaggttgaataacatgccaagaacacacagccagtgaacagccgagcttggacagtgactccaagcttctgacccagtttacagctgaggaaacatctaatgtgtgacaaagctgctgtcaaacctcattaggatgagttcatgctcttaaagttacagaaaaaaaa

SEQ ID NO: 23624 - DNA, 731 bp, Homo sapiens
agtagacgctgcaccggtctccttttggtcccggtgtctgtgtcacacacggcgggtcctgccgaaatgcacttctaggaaagggaatgacctgcccgtgtgataatgcctcgtcagtgttcttgggcttttgtgagtctcccctaaatgcaagctgtcaaattattttctggtatttgttcactcctgttccaatagtgacagatgatatccgaacatagaaaatgacttggcttctaagtttgaaatctagacagttttattaaccaaaggaatttactaatcacgcgttaatcgtttcaattaagtaattttcccattctgacaagttctgttttataccaaaaaaaaggaaaaacacaaaaaaatcacaagcaatgtaatatctctgacaaataaacacctggcgtcctgacagtaaatttacaggttgtaggctgcggatggccagccagccaatggaatgaaatagctctgggggtgtgtactggtcctggctagccctgaatttgagcttcaggaaaaatatagtacgtgaagaaaggggtcagataatgtttggtagtcactgggttatcctgtggtttaaatcatttaatgtctgtagatttggcctctgtagtcagattgctttcttcgagcaaataagagcttttttccccccaatacattgcatcatacctctttagtaacataaaatggaaaggacaaaccacttttgtctactgtaa

SEQ ID NO: 23625 - DNA, 982 bp, Homo sapiens
aaaaaaacacaaagatcagaagccttcagatagagggtggtattctggtaaagaagaaagagataagggacgctaccttgcttttctggcacaggaagcacatgataaagcatgctcagatgagctggaacagatatagctacctggttcgtgtaaataagaataatcaaggccccagagtgtgtatgcttccaggtggaggagaaaggggaatctcccaaaatttaaaaacaaattggaagaataaccaggacagccaagtgaagcagccacagggacccaagcagtcgaggtctttaatgtgcctggagatgactctctgctattcatgaatcttgctattgcacaaaccctatcaagagctgctgcttcccttccagccagaaaagtggtaagcggagcaagtgccaagcagaacagaccttatcatctgggtaacagacttctcagtgttggtgctgtgtctgttagagccttagagcaagttaagcacttccttggtgtgggtaaagaataaaggggaaagaaactactttagagcctctttttctcccaactcatatttttgataggaaaaacagaaaacccatccagttcttcagaaattgctttctaggcattaatactactttactatctatactgtttagttattcctttctttacccacctaaactatccatctaatccaggattccctcactctttttttttagttactaatcattttatgaaaataatgtatttataagtattttcttaaggtttgtgaagagtatttgcattgtgtcttcattttaatgtgtttgcaatcgctccgctccaggaagaacggaaatgctgtcttgtgagcatgaagtgaacgggctgttttgctccagccacttttcttgtacaaccacatggatggattagatgtcctcaggtcttttccatcttcagtttctatgactgtggaataaatgttcagatagaaacttca

SEQ ID NO: 23626 - DNA, 595 bp, Homo sapiens
  misc_feature (591)..(591): n is a, c, g, or t
gttcggtggaaataagcattctgttatttttttcttagcacattttttgtcttctcttccattcagttatgttgaaagctacgtgttggatctgttttttagttatgacattagatcttcatctgagattatctaaactacgttggttttcttttgattacaatctctttttttttttaatctgctaacacaagctcatgtttatctagaaaatgcgctttctcctcaaagtcatgaatcagcatgaatttcctttgagttagttcaaatcatccagaaattaacaaatttcaaaaaagaaaaaatatactaaaatgtagtcaaagctttataagaatactttatgtgctatatctcagctagtcactgagtagctgtcataaacctatgacataaacctactgtcatataccgatgacagtagagtattgaaaaaccaggtgcaccaggttcttgttttcattcttgataggttctaagttcattaaaccagtctcgcagttactcagagaatcacaaaaccaagtgttcctcttattatcttgcttagctcattttgggtaaaatgcatcaaacggcagaatgaaaaanaaaa

SEQ ID NO: 23627 - DNA, 574 bp, Homo sapiens
ctcctccctatgctgtctcactctcccagtccactctgcactgcagagttctaatacaaatcacgctgtgtcacttgcctgcctaatgggctccttgatggtcaccaggagaaagccaaactctgctgcctggcacatctgccagcttgcagcctgatgccattctagcctcgcctcctgccatgtctcacttagttccagccaaatggaacttgtgtgattggttccacaccatggtgccttcacttatgctattactgatcccagaagcccaacctttcttctcatcctgttccttcaggaagccttccctgacaccaccagtctcctctggatgtccttcttcatgttccgtcaaactctttttttttgagacagagtctcgctctgttgcccaggctggggtgcagtggcgcgatctcggctcactgccatctctgcctcccgggttcaagcgattctcctgcctcagcctccaagtagctggaactacaggtgcacaccacgccaccacacccagctaatttttgtaattttagtagagacagggtttcaccatattggtcaggctggt

SEQ ID NO: 23628 - DNA, 448 bp, Homo sapiens
ccgtaatacaatactcaattttttattttactttaatttttttggtagagatgaggttttgctgtgttgcccaggctggtctcgaactcctgtccttggcctcccaaagtgctgggattacagatgtgagccaccgtgcccagcaagtcaaattcttataattcatgttagaatggagaagatagagataccttaggaagccaactgagagaaagtatcatgtggttaccagatttcatatataatctggacctttagtagctttatagacagttgaatccatttttctgatgagagagagagctttgtagtgatggaggtatggtgctacaggccaggttaccttctttgggctactgagatgcacaggaggccagtatagtacttggagggtttgctggtaagtatggaaagcctgttgaactatcctagtgcttaggctagggta

SEQ ID NO: 23629 - DNA, 265 bp, Homo sapiens
caaagttatcccagttttagcactaaaagtcctgtgtcccagggtacctcttagtcctggacaatccagaatagcctcaccctaaaacactataaataatcccctctttctcccaaatatttgacctctctcttcccaatgaattctttgtatgtaattgtgtcaagtctctcccattaaaacaaaacaacaaaaaaaacaaaaaccctccttcgcttccacaattctccatcaaccttggctctttctgccccctgacaagcaa

SEQ ID NO: 23630 - DNA, 262 bp, Homo sapiens
aacaaaactccatctgaaaaaaaaaaaagaaagtgaacaaggctttaaggtggagcacactagaaacatcttgctatttccacgtgtctctttgtcactacactccttaaatacacttaaatagctcatattaacaacagacacaaccaatgtgaaacctcttggggctttataagaagtttcctaaagttaatgctgtagattcctcatgatcatttcaaaactaatgtgatttctttagggtacctttaattacacttat

SEQ ID NO: 23631 - DNA, 288 bp, Homo sapiens
acagctctgtgaggagtcactgggcagccttgacatctgcctgcaatgcttccctctccacccctccctgggtgcacggccagtcagagaccttctggtggcctggcctctcaggagccatgtccagttgatctgcatccgataaaaaattggccctagactcctctaagcatcaaaaacattgtagtactactcctaccatccccactattgccaaccccagacaaccaacactgaactgtgacgctgaaattaaaataatcactttgtagatttgatgattgtaag

SEQ ID NO: 23632 - DNA, 353 bp, Homo sapiens
ggaaggctgaggcatgagaatttcttgaacccgggaggttgcagtgagcggagatcacaccactgtactgtggcctgggcaacagagcaagactccatctcaaaaaaaaataataataataataaatactagctttgggatagtggtcgtggttgcttctgagaaaggtagaaaagagatggaatgaggagagggaatacgaagggtatttcacctgtatctggaatattttgcttcgttaaaattttttgaagcaaatacggcacaatactaagatttgctaaagtcgagcagtgggtacacaggtgtttgttatattctgtgtaattttgtttgttttaaatgtgtcacaa

SEQ ID NO: 23633 - DNA, 414 bp, Homo sapiens
tggacacaggggctgccgttggaggaggttgtaatgtcattgtcctcctgtggaagttaactgtggagaattaactagagaccagcgctgagagagaattaattggataaaagttctatctaggacagtccttgagcgtaattttgtgaagcaaacacaagacaacaacaaaacgagtaaaacctaaacacacatccacacactcactgaaagattcagagattgcacagaacacaaagacttttctggtaataaaatctccctatcctaattttctagaaaaaaagctgttgaagccaccgcgcagttcttacaagacataacacaaatcttccacacaaaggcagaaatacagtatcaacctttgtgaggagtacagcaaataaatgatgtttctttagggtcctaggcaac

SEQ ID NO: 23634 - DNA, 374 bp, Homo sapiens
ccccttccccactccccgacccctctactcatgctcttgccatgtgatgtcctgctcctccttcaccttctgccatgattggaagcttcctgaggcctcaccaaaacagatgctgatgccatgctttctatacactctgcagaaccgtgtgccaattaaacttcttttattaattacccagcctcagatattcctttagagtaatgcaagaatggactaacacagcaggtgtgatcattggatgaggaaggctctcggaatcattccaggtgcctgctctagactcttggtgttgctcttctttccttcatgaccttgaactctctgactccagcagtcccctctgcacatgcctgaactgcttcagggcaccc

SEQ ID NO: 23635 - DNA, 1818 bp, Homo sapiens
atttgcaacaagtcctttgacttttggagccacagataaaagtcggtgcgctggtcctgcctcattaatccagggcttgcagtgctttgaagcccagtcgttgttggcctttgtgatgaaaatacctgtgaagatgagtggccggggaccaaaaggaagaattggaagcgcgatggttggatggaacaaaaagatgttagctcacccacagatctcatagtgattaaaatgaaagaacgttcaccccaaatccttatgatgtggtttaaaaataaagagttatagataagaccctattttcgaaaacaaagtgttaaatccccccacccccacccccgggccccgtgttaccttttgaaaggttgagcgaaagtgagaatgcaaggttttcctgaacgacgttgcttagaggtaacgcggggctgtgatgtctgttaatgggcatccttgcaaaagatgtcgtttgttgctagtgacgtttaaggtttgaacctgctgttcgtatctactgcattttatgtagtaacacatttaaaacaattaaattgtgcttaactgcaatgttcctaaaagccttatttttttgtatttcccaggtccctatgagaagtttaatgaaatattactggctaatgtggttttcccacctccattaaccatcatattcgtgactagttgctcaggctttttaaaaaacaaggaaactcaagagatctttactgttttatttttcaggaatgactttgtgcctctggtttaaatattagaaaacagaaaaataccagttggctttaaatgtttgctattcagttaaagactggatttgtttaaatgtaatacattgtaatcaaaggttaagtttttaaatctttgtgtttttaaaattgtgcttatgttttaaataataatacttgagttgtgtccattacaaatcagatacattcctcgagtgcaacacaggttctaacgcttataagacctctaggaaatttttttccttttatttatcaaatgaatataactgcgtttaaaagagggctgtaactgcaaggaacaacgattgagtgttcaagactgcctttattagctttacttacaagataatacattggttcacctttctatgcacaataaaagaagaattgggtctcaattttagaagttaagcttttttcagtacctcttaatgaaatatttttaggcttttgcatacttaatttgagagggacatctcccttatccggatagctgggtggattcttatccctgtgcagtagcaagtgctgactgggcaggaggtaaaaagagattagttttgtggacccaatgagggactccttttaaatgtaagttttcaatgatttgtataaggtacctactgcattacgtctaacacagttgtataattttaccagtaaaatctttatatgtttgaatagattaatggcgaggataaatagaggcattgtttttgctactttgcatatcattggccaatcaatgattgattgatttgtatatccttttacattaccgcttcttgctgtggtagtttctgtaccaaaaaaaaaaaaaaggtcacaaaaggatagttggttattttcagagcttatcttgtttttaaaaatatgttactgtcattgaaatatttttccaaaatcttaccagaattagagtgatttaatctttactagctggcgaccttatttctactagttgctatagtagactagaactcttgttttattgtcgttgagtaaaatactaaatagtagccagttttgacttactttggcttcaaagctgttgtaaacatta

SEQ ID NO: 23636 - DNA, 736 bp, Homo sapiens
tactaaattcgcggccgcgtcgaccattggttcacctttctatgcacaataaaagaagaattgggtctcaattttagaagttaagcttttttcagtacctcttaatgaaatatttttaggcttttgcatacttaatttgagagggacatctcccttatccggatagctgggtggattcttatccctgtgcagtagcaagtgctgactgggcaggaggtaaaaagagattagttttgtggacccaatgagggactccttttaaatgtaagttttcaatgatttgtataaggtacctactgcattacgtctaacacagttgtataattttaccagtaaaatctttatatgtttgaatagattaatggcgaggataaatagaggcattgtttttgctactttgcatatcattggccaatcaatgattgattgatttgtatatccttttacattaccgcttcttgctgtggtagtttctgtaccaaaaaaaaaaaaaaggtcacaaaaggatagttggttattttcagagcttatcttgtttttaaaaatatgttactgtcattgaaatatttttccaaaatcttaccagaattagagtgatttaatctttactagctggcgaccttatttctactagttgctatagtagactagaactcttgttttattgtcgttgagtaaaatactaaatagtagccagttttgacttactttggcttcaaagctgttgtaaacatta

SEQ ID NO: 23637 - DNA, 324 bp, Homo sapiens
tatatccttttacattaccgcttcttgctgtggtagtttctgtaccaaaaaaaaaaaaaaggtcacaaaaggatagttggttattttcagagcttatcttgtttttaaaaatatgttactgtcattgaaatatttttccaaaatcttaccagaattagaggcaaccacaaaataatttacaactgatttaatctttactagctggcgaccttatttctactagttgctatagtagactagaactcttgttttattgtcgttgagtaaaatactaaatagtagccagttttgacttactttggcttcaaagctgttgtaaacatt

SEQ ID NO: 23638 - DNA, 1761 bp, Homo sapiens
atttgcaacaagtcctttgacttttggagccacagataaaagtcggtgcgctggtcctgcctcattaatccagggcttgcagtgctttgaagcccagtcgttgttggcctttgtgatgaaaatacctgtgaagatgagtggccggggaccaaaaggaagaattggaagcgcgatggttggatggaacaaaaagatgttagctcacccacagatctcatagtgattaaaatgaaagaacgttcaccccaaatccttatgatgtggtttaaaaataaagagttatagataagaccctattttcgaaaacaaagtgttaaatccccccacccccacccccgggccccgtgttaccttttgaaaggttgagcgaaagtgagaatgcaaggttttcctgaacgacgttgcttagaggtaacgcggggctgtgatgtctgttaatgggcatccttgcaaaagatgtcgtttgttgctagtgacgtttaaggtttgaacctgctgttcgtatctactgcattttatgtagtaacacatttaaaacaattaaattgtgcttaactgcaatgttcctaaaagccttatttttttgtatttcccaggtccctatgagaagtttaatgaaatattactggctaatgtggttttcccacctccattaaccatcatattcgtgactagttgctcaggctttttaaaaaacaaggaaactcaagagatctttactgttttatttttcaggaatgactttgtgcctctggtttaaatattagaaaacagaaaaataccagttggctttaaatgtttgctattcagttaaagactggatttgtttaaatgtaatacattgtaatcaaaggttaagtttttaaatctttgtgtttttaaaattgtgcttatgttttaaataataatacttgagttgtgtccattacaaatcagatacattcctcgagtgcaacacaggttctaacgcttataagacctctaggaaatttttttccttttatttatcaaatgaatataactgcgtttaaaagagggctgtaactgcaaggaacaacgattgagtgttcaagactgcctttattagctttacttacaagataatacattggttcacctttctatgcacaataaatatttttaggcttttgcatacttaatttgagagggacatctcccttatccggatagctgggtggattcttatccctgtgcagtagcaagtgctgactgggcaggaggtaaaaagagattagttttgtggacccaatgagggactccttttaaatgtaagttttcaatgatttgtataaggtacctactgcattacgtctaacacagttgtataattttaccagtaaaatctttatatgtttgaatagattaatggcgaggataaatagaggcattgtttttgctactttgcatatcattggccaatcaatgattgattgatttgtatatccttttacattaccgcttcttgctgtggtagtttctgtaccaaaaaaaaaaaaaaggtcacaaaaggatagttggttattttcagagcttatcttgtttttaaaaatatgttactgtcattgaaatatttttccaaaatcttaccagaattagagtgatttaatctttactagctggcgaccttatttctactagttgctatagtagactagaactcttgttttattgtcgttgagtaaaatactaaatagtagccagttttgacttactttggcttcaaagctgttgtaaacatta

SEQ ID NO: 23639 - DNA, 319 bp, Homo sapiens
gagatggagtctcgctctgttgccaagactatctcaaaaaaagaaagaaagaaagaaaagaaaattatatgagattatcatacagaaatttaaaattatcagtacgaacagtttataaattatatgggacattgcttatgacaaaacattaagtaaaaaagggaagatgaaacacataaaaaatggaaagaaatgtctgaaaaattaatctctggggtgggatcatgagtgcctttctctatcgctgcttctttattctgaattatacttttccagttgttgacaaggaatacacagtggcgttattaatataaatgca

SEQ ID NO: 23640 - DNA, 509 bp, Homo sapiens
gcaagaactataggaggatgtgtagctgcaaaaatttctcatcaataactcaatcttcagaacgttatgacatacagaaaatcaaagatgctgtgtcttagcattgagcaatatgggtggtgctatgtctgtagtctggtcaaattcagtaactgtgttcaaaacaaaatttcctctggaatactattgagaaaatctggcatttgcaaaaagggcagagtttaaatatgagccagtctttccaatcaacaatacctcttttaagaaaaccaactaacagctgtttgcatgccgttgaatccttgtgagcagttaggccacagtctaggacagaaagatgacacggggaaggactgagggccatctgagaacaaaagttgttgctacttctcagaggcattgagacacactgcatgctgtagactgctttgtgtaactgttatcacatcttgcttgagatgtcattggcagaatgttcttaaaaataaattatagataaatagccatca

SEQ ID NO: 23641 - DNA, 434 bp, Homo sapiens
gtggagccaagtgaggggtggagtgaggtggcaggacccaacacaagttgggagaaggtgaatgatgtaacccaaggacaaataaagaaggtgcatgtcctgcctatttttcttcctagtaaagcagtatctccctatatagattactgctgagtctgaggtagacagggaatggtgttatattttatcttaaatcttaattccataaatagttatagtatctgaaaaaggttgtagtgacttttctgtgctaagagggatcctttaatgtagtgggctcagacaacgaaggttttttgttttgtttattttttaagaaacaggggtctcacttgtcacccaggctggagtacagtggtgtgatcatagctcactgtagcctcgaactctgaactcctgggctcaagtgatcctcctgcctcggcctcctgagt

SEQ ID NO: 23642 - DNA, 349 bp, Homo sapiens
tctcagaccccttcagtacatagcatcatcagtctcaatacccaagccaaatcttaggtggacgtcaaacaagttctagtggaggccaggtacatggctcatgcctgtaatcctagcactttgggaagctgaggtgggtgggtcatttgagcccaagagttggagaccagctgggcaacactgtgaccaaaaaacaccccaaaattagctgggtgtggtggtgtgcgcctgtagtcacagctattcatgaggctaaagtgggaggatcacttgagccggggaggttgaggctgcagtgagccctaactgtgccactgcactccagcctgtgcaacaaagaccctgtctc

SEQ ID NO: 23643 - DNA, 1194 bp, Homo sapiens
tcacatgtgcctgtcccagaggaattccttaactctcccttcctggaaccgaaatgcttccaaagacagagagctcctatatatatttctctgttttccccagaggaccgtgcatgaaaggcgcctttcctggcgcgtgtgtctctgaccctgtggatcttctggacaattcccggaatttcttgcagggcagcacttccccttaagtcgtctctttctcgtttggatagtcagtatttatatagtcactattctcttttggttagccatctaattttatactgctagtcaagctctactcccttccccctagagtttgaatttatttttcttcaaacgctacacaaacccaaataaactcaaccaaagcggactttacctaccttcctacctacctaccaagaaaatatcccacaaaggagagaacggagaagcttgcaatacaggaagaaaaaaaaagaattacagaatggaagggatgtgtgcgctaaaaatgcaggtacttaaaggaaattgggctgatttgtactggacaccgaatttgaggaatacaggatctcaacctttctttgactggattacttttttattccattttggtgtggacgcgtctgaaactgatagtgctgctgctacctaccataatgtgtttgttgcaagatccacaagaacgtggatgccaagaatccacaaaaaaaaaacagatgcaaccgttgatgaggccataagcagaaacagtaagtggttcccacgtttcctctgctttaactactgatgatgaaatgcaagtcataaggcaaatagaagggctgtactgatacagacaaaatgttattattatgggaagggataactcccttgtaaaaccttgaaatgtttttcttctttgagaaaaatctatcacctattttcaccctgctcttgatatagcaaatattgtaagttgtcttatggaggatgactcagggaagacggtgaatgggttcactcaatccagaaaaggaagaggaaaataaaaagacataacgaccaatctgtgaaaacgctcagtggcttaaaagacactattaagagatgaaactatttgattctttatttaactcctttccaaggaaatgtttttgaaaatccatacggtttacatattaaagaggatcaatctgataataggtgatttttttgaaaaaatgaaaa

SEQ ID NO: 23644 - DNA, 1144 bp, Homo sapiens
tgtctactattatagaacctcaagcatttctctaaagaaaactcttacacatcttggtgttgtggtttcatgtccaccctaatgagaaaagttcttccttagtagggtcatgtttcctgaggaacccctaccctagatttatcccatagtaggtcttataaataatatccacatactaaaattatttggcttctaatgttaagttttacactaatattgtaaaagtaactctacagtcaaaaattgtaatatttaaataagaataatctgccatccgagccattagcctttagcatctgtgttatattttaaaatgcctgcaaaaattgtctatgcgtaaacaagttgtttttagttatactgtggcttatttggttggcatgaaaattagattgctttgcatatctggggtagcataaccagttttatcagtggctagattatatcagatgacaaaaataacatgagacttcagaagtctgataaataaagtgatgatacctattagaagtgggtgcaatctatagccatcaaaatgtgatgcattcatattcaggcatggtcctttagcattcgagtgataggcacttttatttgagtctttgaatgaaagataggcttttaaagtggattaaaggatagcagtttttacttgataagttgggacccatggtaacagcaagcatcccacttataactggtgtccattcagggaaaaacagatgtaaccattatgtgactcaatacaaagaagaagattacactggtaaaaaatactaagtgaaaaaaagaaaaactagtaaaaaatactaagaggattacattagtgaagattcagggtgtgaaggtgtgaagtaaaaggagagaagattaacagaataggtttacctttatttgatctccttacagggatctatcttccatggtgactaattctcctattttggtgaaacttttcaggttgatggatttaaaagaatagtataaacccaaaattttccattttaaggtcatgattttattttttactctgtggttcttaaatacaatttacttcattttatataacacctgccaagaacaacctaataaaattaaacaagatctggtttaggtttaataaaattaaaatgtgtttaacaaa

SEQ ID NO: 23645 - DNA, 407 bp, Homo sapiens
gaaacaccgtctgccgcaatatgattgatgagcttcttgggtccatgatgaccacttgaacactgatcattgttttcagtctctgagctggtgtgtcaaacctttaaaaagtaatttactggccgagtgtggtgcctcacgcttgtaatcccagcagtttgagaggccgaggcaggcggatcatgaggtcaggagatcaagaccatcctggccaacatggtgaaatcctgtctctactaacacaaaaaaaattagtcgggcttggtggtgcacgcctgcagtcccagctactccagaggctgaggcaggggaattgcttgaacccagtcggcagaggttgcagtgagccgagatcgcgccactgccctccagcctggagacagagcaagactccgtctcaaaaaaaa

SEQ ID NO: 23646 - DNA, 660 bp, Homo sapiens
ttttaaggttaacataaaataatagacaagaatggccaagaaaactcaggaaaaaaatctcagagcaagtcttcctttacttggacctggagcaggcatcttttttgttcattgccccactcaagggccatgaaaaccagaaactgattaccaaaggaccctgaagggccaactcaacacactaaaacatctgggttattgttttaactatatcatctcttacagacactttgtattctagttaaacagcaatattctataaaaagccagcatcttccctacagggacttaatgcatgatgctgttttctgcgagcctcatcttgtgccgccaccctcttttctcttagtttagctacaatggccttctttcagtttcctctgtgctaactcaggaccttcatacctgctgtttcttctgtatgaactactcttctccaatctcagaaccattacaactgagattctctgcctgccattctctccagtaatctagccgccattctctccagtaatctatccacccttcaccttcagatcatgatcgctctacagaccaggtcaggtgtctctgttaaacactccactcgcaccgtactccttttcctatataccacttaatccagtttgaaattatatattgatttgtgctttcttcatt

SEQ ID NO: 23647 - DNA, 208 bp, Homo sapiens
aaagagtatgtaaaagcatggtacacactgcttttgaagattacgtgtgtctattctagatgtgtcttatttcttgcagatatattgcctacaaagattttgatatatatatatacagtagactatactatataattaatatttataccagatattaaatatataagcattctactagaactaaagttaagaatttgaaatagtctca

SEQ ID NO: 23648 - DNA, 3405 bp, Homo sapiens
gcggcggcgcggcgcccaggatgccccgcagccccgggacgcgcctcaaacccgccaagtacatcccggtggccacggccgccgcgctgctggtcggctccagcaccctcttcttcgtgttcacgtgcccgtggttgacacgagctgtgtccccagctgttcccgtctacaatggcatcatcttcctctttgtcctggccaacttcagcatggccactttcatggaccctggtgttttcccccgagcggatgaggatgaggacaaggaggacgacttccgggctccgctgtacaagaacgtggatgtgcgaggtatccaggtccgcatgaagtggtgtgccacgtgccacttctaccgcccgccgcgctgctcccactgcagcgtctgtgacaactgtgtagaggtgactgggaagttccgcgggggtgtgaaccctttcacccgaggctgctgtgggaatgtggagcacgtgctgtgtagccccctggcgccccggtacgtggtggagccaccccggctgccgctcgcggtgagtttgaagccgcctttccttaggcctgaactcctggaccgagctgcaccgctcaaggtcaagcttagtgacaacgggctgaaggctggcctgggccgtagcaagtccaagggcagcctggaccggctggatgagaagccactggacttggggccaccactgccccccaagatagaggctggcacgttcagcagtgacctgcagaccccgcgcccaggcagtgctgagagtgccctgtcggtgcagaggaccagccccccgacacctgccatgtacaagtttaggccggctttccccacgggtcccaaggtgcccttctgtggaccaggcgagcaggttccaggccctgattccctgaccctgggggacgacagcatccgtagcctggactttgtgtccgagccgagcctggacctccctgactatgggccagggggcctgcatgcagcctacccgccatccccaccgctcagcgcctctgatgccttctcgggcgctttgcgctccctgagcctcaaggcctcgagccggcggggcggggatcatgtggccctgcagcccctgcgctctgagggggggccccccacgccccaccgtagcatttttgccccccatgcactgcccaaccgcaacggcagcctgtcctatgacagcctgctcaatcctggctcgcctggtggccacgcctgccctgcccacccagcagttggcgtggccggataccactcaccctacctgcatcctggggcaacgggcgacccgccacggcccctaccccgcagcttcagccccgtgctgggcccccgcccccgggagccctcgcctgtgcgctacgacaacctgtccaggaccatcatggcatccatccaggagcgcaaggacagggaggagcgtgagcgcctgctgcgctcccaggccgactcactcttcggcgactcaggcgtctatgacgctcccagctcctacagcctgcagcaggccagtgtgctgtccgagggcccccgaggtcccgcgctgcgctatggctccagagacgaccttgtggctgggcccggcttcggtggcgcccgcaaccctgccctgcagacgtcactgtcctcgctgtccagctccgtgagccgtgcaccgcggacgtcgtcctcctccctgcaggctgatcaggccagcagcaatgccccggggccccggcccagcagtggctcacacaggtcacctgcacgccagggcctgccctccccgcccggcactccccactcaccatcctacgcgggccccaaagctgtcgccttcatccacacggacctcccagagccaccgccctcgctgaccgtgcagagggaccaccctcagctgaagactcccccaagtaagcttaatgggcagtccccgggcctggcccggctgggacctgccaccggccccccagggccctctgccagccctacacggcacacgctggttaagaaggtgtccggcgtgggtgggaccacctacgagatctcggtgtgaggactgactgccacacatccgccatggtgccacggggaccaggaccccgcagcgcaccccccctccccaccaacttctctgccccagggacccgaggccaccccagcctggtgtggacccatcggcgggagagagtgccacgcctccacagcttgccccaagcgctctgcctgcccgtccactcatctgcccatggggaagtcggctcactgggacaagggccactgggctggtctgtgtctgggcctgtcccatggctggggcagtgagggggcccagtcagcctctttggggcaccctctctcagccaggcttggcccactgccatcacccagcaccccagatcaccgccaggccagcccccaatggtccccttacggacaggtcccagagatggacagaggcacccagggcccccaccgtccttctgacacagcctgtgggctcccggaccgagtgtcccccgccaggctactcctaactaacgcgttgcctttcacggaccccgctggaagcttgtagcttggcaaggctgatgcttctgccctggcctgctctgggtggtggtggataggtggacagacggccagccagccagctgtggccgggggcccggctccatgtgtcccgtgtctgtgtgctgtgctgccgcgccgtgtctgatgtgtcagtgctccggccgccgctgtccctttcatcaaagccttaacctttgctttatgctcttgtgggaggcgacgggggggcaggcgggagcaggcacgggggtgatgctgccacagggggctggtgacacccagagccccctccccagccctcaggccctccctgccaaactggagaaccccaccccaaggcatgccacgtccgcagccccggcctggctgcggtgctcgcgccgtgggaaagcacactggggaggggtcagtgcttcccttggtgtcagggacctgagagtaagcacatgacagcgtctgcttgcgttgtgtctgttttatgtttttatatctacatctatatatctataattttattaaaaaaaagaaaaagaaaaccgaaatagtctctctctctgaccagcaccatgggggtgtggcaagaaccaagcgccttaacaaagagggtggcacaaagggacgcccagaagcaacggggtggcaccccttttcctaacaacagatgggtctggactgtgaacaaggccctgctaatgttccacattacgaaatctgtggaaaaacgctcttcccgagaccccggaacaaattgtttgaagggctccagggacggtctgaaagacttcgtctgttgccaagtaaatgctttaaaatcagggtacggaatgtcggaaaaggcgaaatcg

SEQ ID NO: 23649 - DNA, 3681 bp, Homo sapiens
gcggcggcgcggcgcccaggatgccccgcagccccgggacgcgcctcaaacccgccaagtacatcccggtggccacggccgccgcgctgctggtcggctccagcaccctcttcttcgtgttcacgtgcccgtggttgacacgagctgtgtccccagctgttcccgtctacaatggcatcatcttcctctttgtcctggccaacttcagcatggccactttcatggaccctggtgttttcccccgagcggatgaggatgaggacaaggaggacgacttccgggctccgctgtacaagaacgtggatgtgcgaggtatccaggtccgcatgaagtggtgtgccacgtgccacttctaccgcccgccgcgctgctcccactgcagcgtctgtgacaactgtgtagaggactttgaccaccactgcccctgggtcaacaactgcatcgggcgtcgaaactatcgctacttcttcctgttcctgctgtcactcagtgcacacatggtgggcgtcgtggccttcggcctggtctacgtgctgaaccacgctgaggggctgggagccgcgcacaccaccatcaccatggctgtcatgtgtgtggccggcctcttcttcatccctgtcattggcctcactggcttccatgtggtgctggtcactcgggggcgcaccaccaacgagcaggtgactgggaagttccgcgggggtgtgaaccctttcacccgaggctgctgtgggaatgtggagcacgtgctgtgtagccccctggcgccccggtacgtggtggagccaccccggctgccgctcgcggtgagtttgaagccgcctttccttaggcctgaactcctggaccgagctgcaccgctcaaggtcaagcttagtgacaacgggctgaaggctggcctgggccgtagcaagtccaagggcagcctggaccggctggatgagaagccactggacttggggccaccactgccccccaagatagaggctggcacgttcagcagtgacctgcagaccccgcgcccaggcagtgctgagagtgccctgtcggtgcagaggaccagccccccgacacctgccatgtacaagtttaggccggctttccccacgggtcccaaggtgcccttctgtggaccaggcgagcaggttccaggccctgattccctgaccctgggggacgacagcatccgtagcctggactttgtgtccgagccgagcctggacctccctgactatgggccagggggcctgcatgcagcctacccgccatccccaccgctcagcgcctctgatgccttctcgggcgctttgcgctccctgagcctcaaggcctcgagccggcggggcggggatcatgtggccctgcagcccctgcgctctgagggggggccccccacgccccaccgtagcatttttgccccccatgcactgcccaaccgcaacggcagcctgtcctatgacagcctgctcaatcctggctcgcctggtggccacgcctgccctgcccacccagcagttggcgtggccggataccactcaccctacctgcatcctggggcaacgggcgacccgccacggcccctaccccgcagcttcagccccgtgctgggcccccgcccccgggagccctcgcctgtgcgctacgacaacctgtccaggaccatcatggcatccatccaggagcgcaaggacagggaggagcgtgagcgcctgctgcgctcccaggccgactcactcttcggcgactcaggcgtctatgacgctcccagctcctacagcctgcagcaggccagtgtgctgtccgagggcccccgaggtcccgcgctgcgctatggctccagagacgaccttgtggctgggcccggcttcggtggcgcccgcaaccctgccctgcagacgtcactgtcctcgctgtccagctccgtgagccgtgcaccgcggacgtcgtcctcctccctgcaggctgatcaggccagcagcaatgccccggggccccggcccagcagtggctcacacaggtcacctgcacgccagggcctgccctccccgcccggcactccccactcaccatcctacgcgggccccaaagctgtcgccttcatccacacggacctcccagagccaccgccctcgctgaccgtgcagagggaccaccctcagctgaagactcccccaagtaagcttaatgggcagtccccgggcctggcccggctgggacctgccaccggccccccagggccctctgccagccctacacggcacacgctggttaagaaggtgtccggcgtgggtgggaccacctacgagatctcggtgtgaggactgactgccacacatccgccatggtgccacggggaccaggaccccgcagcgcaccccccctccccaccaacttctctgccccagggacccgaggccaccccagcctggtgtggacccatcggcgggagagagtgccacgcctccacagcttgccccaagcgctctgcctgcccgtccactcatctgcccatggggaagtcggctcactgggacaagggccactgggctggtctgtgtctgggcctgtcccatggctggggcagtgagggggcccagtcagcctctttggggcaccctctctcagccaggcttggcccactgccatcacccagcaccccagatcaccgccaggccagcccccaatggtccccttacggacaggtcccagagatggacagaggcacccagggcccccaccgtccttctgacacagcctgtgggctcccggaccgagtgtcccccgccaggctactcctaactaacgcgttgcctttcacggaccccgctggaagcttgtagcttggcaaggctgatgcttctgccctggcctgctctgggtggtggtggataggtggacagacggccagccagccagctgtggccgggggcccggctccatgtgtcccgtgtctgtgtgctgtgctgccgcgccgtgtctgatgtgtcagtgctccggccgccgctgtccctttcatcaaagccttaacctttgctttatgctcttgtgggaggcgacgggggggcaggcgggagcaggcacgggggtgatgctgccacagggggctggtgacacccagagccccctccccagccctcaggccctccctgccaaactggagaaccccaccccaaggcatgccacgtccgcagccccggcctggctgcggtgctcgcgccgtgggaaagcacactggggaggggtcagtgcttcccttggtgtcagggacctgagagtaagcacatgacagcgtctgcttgcgttgtgtctgttttatgtttttatatctacatctatatatctataattttattaaaaaaaagaaaaagaaaaccgaaatagtctctctctctgaccagcaccatgggggtgtggcaagaaccaagcgccttaacaaagagggtggcacaaagggacgcccagaagcaacggggtggcaccccttttcctaacaacagatgggtctggactgtgaacaaggccctgctaatgttccacattacgaaatctgtggaaaaacgctcttcccgagaccccggaacaaattgtttgaagggctccagggacggtctgaaagacttcgtctgttgccaagtaaatgctttaaaatcagggtacggaatgtcggaaaaggcgaaatcg

SEQ ID NO: 23650 - DNA, 3519 bp, Homo sapiens
gcggcggcgcggcgcccaggatgccccgcagccccgggacgcgcctcaaacccgccaagtacatcccggtggccacggccgccgcgctgctggtcggctccagcaccctcttcttcgtgttcacgtgcccgtggttgacacgagctgtgtccccagctgttcccgtctacaatggcatcatcttcctctttgtcctggccaacttcagcatggccactttcatggaccctggtgttttcccccgagcggatgaggatgaggacaaggaggacgacttccgggctccgctgtacaagaacgtggatgtgcgaggtatccaggtccgcatgaagtggtgtgccacgtgccacttctaccgcccgccgcgctgctcccactgcagcgtctgtgacaactgtgtagaggactttgaccaccactgcccctgggtcaacaactgcatcgggcgtcgaaactatcgctacttcttcctgttcctgctgtcactcagtgcacacatggtgggcgtcgtggccttcggcctggtctacgtgctgaaccacgctgaggggctgggagccgcgcacaccaccatcaccatggctgtcatgtgtgtggccggcctcttcttcatccctgtcattggcctcactggcttccatgtggtgctggtcactcgggggcgcaccaccaacgagcaggtgactgggaagttccgcgggggtgtgaaccctttcacccgaggctgctgtgggaatgtggagcacgtgctgtgtagccccctggcgccccggtacgtggtggagccaccccggctgccgctcgcggtgagtttgaagccgcctttccttaggcctgaactcctggaccgagctgcaccgctcaaggtcaagcttagtgacaacgggctgaaggctggcctgggccgtagcaagtccaagggcagcctggaccggctggatgagaagccactggacttggggccaccactgccccccaagatagaggctggcacgttcagcagtgacctgcagaccccgcgcccaggcagtgctgagagtgccctgtcggtgcagaggaccagccccccgacacctgccatgtacaagtttaggccggctttccccacgggtcccaaggtgcccttctgtggaccaggcgagcaggttccaggccctgattccctgaccctgggggacgacagcatccgtagcctggactttgtgtccgagccgagcctggacctccctgactatgggccagggggcctgcatgcagcctacccgccatccccaccgctcagcgcctctgatgccttctcgggcgctttgcgctccctgagcctcaaggcctcgagccggcggggcggggatcatgtggccctgcagcccctgcgctctgagggggggccccccacgccccaccgtagcatttttgccccccatgcactgcccaaccgcaacggcagcctgtcctatgacagcctgctcaatcctggctcgcctggtggccacgcctgccctgcccacccagcagttggcgtggccggataccactcaccctacctgcatcctggggcaacgggcgacccgccacggcccctaccccgcagcttcagccccgtgctgggcccccgcccccgggagccctcgcctgtgcgctacgacaacctgtccaggaccatcatggcatccatccaggagcgcaaggacagggaggagcgtgagcgcctgctgcgctcccaggccgactcactcttcggcgactcaggcgtctatgacgctcccagctcctacagcctgcagcaggccagtgtgctgtccgagggcccccgaggtcccgcgctgcgctatggctccagagacgaccttgtggctgggcccggcttcggtggcgcccgcaaccctgccctgcagacgtcactgtcctcgctgtccagctccgtgagccgtgcaccgcggacgtcgtcctcctccctgcaggctgatcaggccagcagcaatgccccggggccccggcccagcagtggctcacacaggtcacctgcacgccagggcctgccctccccgcccggcactccccactcaccaccagggccctctgccagccctacacggcacacgctggttaagaaggtgtccggcgtgggtgggaccacctacgagatctcggtgtgaggactgactgccacacatccgccatggtgccacggggaccaggaccccgcagcgcaccccccctccccaccaacttctctgccccagggacccgaggccaccccagcctggtgtggacccatcggcgggagagagtgccacgcctccacagcttgccccaagcgctctgcctgcccgtccactcatctgcccatggggaagtcggctcactgggacaagggccactgggctggtctgtgtctgggcctgtcccatggctggggcagtgagggggcccagtcagcctctttggggcaccctctctcagccaggcttggcccactgccatcacccagcaccccagatcaccgccaggccagcccccaatggtccccttacggacaggtcccagagatggacagaggcacccagggcccccaccgtccttctgacacagcctgtgggctcccggaccgagtgtcccccgccaggctactcctaactaacgcgttgcctttcacggaccccgctggaagcttgtagcttggcaaggctgatgcttctgccctggcctgctctgggtggtggtggataggtggacagacggccagccagccagctgtggccgggggcccggctccatgtgtcccgtgtctgtgtgctgtgctgccgcgccgtgtctgatgtgtcagtgctccggccgccgctgtccctttcatcaaagccttaacctttgctttatgctcttgtgggaggcgacgggggggcaggcgggagcaggcacgggggtgatgctgccacagggggctggtgacacccagagccccctccccagccctcaggccctccctgccaaactggagaaccccaccccaaggcatgccacgtccgcagccccggcctggctgcggtgctcgcgccgtgggaaagcacactggggaggggtcagtgcttcccttggtgtcagggacctgagagtaagcacatgacagcgtctgcttgcgttgtgtctgttttatgtttttatatctacatctatatatctataattttattaaaaaaaagaaaaagaaaaccgaaatagtctctctctctgaccagcaccatgggggtgtggcaagaaccaagcgccttaacaaagagggtggcacaaagggacgcccagaagcaacggggtggcaccccttttcctaacaacagatgggtctggactgtgaacaaggccctgctaatgttccacattacgaaatctgtggaaaaacgctcttcccgagaccccggaacaaattgtttgaagggctccagggacggtctgaaagacttcgtctgttgccaagtaaatgctttaaaatcagggtacggaatgtcggaaaaggcgaaatcg

SEQ ID NO: 23651 - DNA, 1392 bp, Homo sapiens
  misc_feature (1389)..(1390): n is a, c, g, or t
gcggcggcgcggcgcccaggatgccccgcagccccgggacgcgcctcaaacccgccaagtacatcccggtggccacggccgccgcgctgctggtcggctccagcaccctcttcttcgtgttcacgtgcccgtggttgacacgagctgtgtccccagctgttcccgtctacaatggcatcatcttcctctttgtcctggccaacttcagcatggccactttcatggaccctggtgttttcccccgagcggatgaggatgaggacaaggaggacgacttccgggctccgctgtacaagaacgtggatgtgcgaggtatccaggtccgcatgaagtggtgtgccacgtgccacttctaccgcccgccgcgctgctcccactgcagcgtctgtgacaactgtgtagaggactttgaccaccactgcccctgggtcaacaactgcatcgggcgtcgaaactatcgctacttcttcctgttcctgctgtcactcagtgcacacatggtgggcgtcgtggccttcggcctggtctacgtgctgaaccacgctgaggggctgggagccgcgcacaccaccatcaccatggctgtcatgtgtgtggccggcctcttcttcatccctgtcattggcctcactggcttccatgtggtgctggtcactcgggggcgcaccaccaacgagcaggtgactgggaagttccgcgggggtgtgaaccctttcacccgaggctgctgtgggaatgtggagcacgtgctgtgtagccccctggcgccccggtacgtggtggagccaccccggctgccgctcgcggtgagtttgaagccgcctttccttaggcctgaactcctggaccgagctgcaccgctcaaggtcaagcttagtgacaacgggctgaaggctggcctgggccgtagcaagtccaagggcagcctggaccggctggatgagaagccactggacttggggccaccactgccccccaagatagaggctggcacgttcagcagtgacctgcagaccccgcgcccaggcagtgctgagagtgccctgtcggtgcagaggaccagccccccgacacctgccatgtacaagtttaggccggctttccccacgggtcccaaggtgcccttctgtggaccaggcgagcaggtccaggcctgatcctgacctgggggacgacagatcgtagcctggattgtgtcgagcgggctggactcctgatatggcagggctgatgagctaccgcatccacgtcaggctgtgctctcgggtggcccgactagctaaccgggggattggcctcccgcttagggccccccaattgccctttccggcttttatgttcgctggccgccccggggaactcggggcggccagcccaaccaggcgcggnncg

SEQ ID NO: 23652 - DNA, 3484 bp, Homo sapiens
gcggcggcgcggcgcccaggatgccccgcagccccgggacgcgcctcaaacccgccaagtacatcccggtggccacggccgccgcgctgctggtcggctccagcaccctcttcttcgtgttcacgtgcccgtggttgacacgagctgtgtccccagctgttcccgtctacaatggcatcatcttcctctttgtcctggccaacttcagcatggccactttcatggaccctggtgttttcccccgagcggatgaggatgaggacaaggaggacgacttccgggctccgctgtacaagaacgtggatgtgcgaggtatccaggtccgcatgaagtggtgtgccacgtgccacttctaccgcccgccgcgctgctcccactgcagcgtctgtgacaactgtgtagaggactttgaccaccactgcccctgggtcaacaactgcatcgggcgtcgaaactatcgctacttcttcctgttcctgctgtcactcagtgcacacatggtgggcgtcgtggccttcggcctggtctacgtgctgaaccacgctgaggggctgggagccgcgcacaccaccatcaccatggctgtcatgtgtgtggccggcctcttcttcatccctgtcattggcctcactggcttccatgtggtgctggtcactcgggggcgcaccaccaacgagcaggtgactgggaagttccgcgggggtgtgaaccctttcacccgaggctgctgtgggaatgtggagcacgtgctgtgtagccccctggcgccccggtacgtggtggagccaccccggctgccgctcgcggtgagtttgaagccgcctttccttaggcctgaactcctggaccgagctgcaccgctcaaggtcaagcttagtgacaacgggctgaaggctggcctgggccgtagcaagtccaagggcagcctggaccggctggatgagaagccactggacttggggccaccactgccccccaagatagaggctggcacgttcagcagtgacctgcagaccccgcgcccaggcagtgctgagagtgccctgtcggtgcagaggaccagccccccgacacctgccatgtacaagtttaggccggctttccccacgggtcccaaggtgcccttctgtggaccaggcgagcaggttccaggccctgattccctgaccctgggggacgacagcatccgtagcctggactttgtgtccgagccgagcctggacctccctgactatgggccagggggcctgcatgcagcctacccgccatccccaccgctcagcgcctctgatgccttctcgggcgctttgcgctccctgagcctcaaggcctcgagccggcggggcggggatcatgtggccctgcagcccctgcgctctgagggggggccccccacgccccaccgtagcatttttgccccccatgcactgcccaaccgcaacggcagcctgtcctatgacagcctgctcaatcctggctcgcctggtggccacgcctgccctgcccacccagcagttggcgtggccggataccactcaccctacctgcatcctggggcaacgggcgacccgccacggcccctaccccgcagcttcagccccgtgctggggcccccgaggtcccgcgctgcgctatggctccagagacgaccttgtggctgggcccggcttcggtggcgcccgcaaccctgccctgcagacgtcactgtcctcgctgtccagctccgtgagccgtgcaccgcggacgtcgtcctcctccctgcaggctgatcaggccagcagcaatgccccggggccccggcccagcagtggctcacacaggtcacctgcacgccagggcctgccctccccgcccggcactccccactcaccatcctacgcgggccccaaagctgtcgccttcatccacacggacctcccagagccaccgccctcgctgaccgtgcagagggaccaccctcagctgaagactcccccaagtaagcttaatgggcagtccccgggcctggcccggctgggacctgccaccggccccccagggccctctgccagccctacacggcacacgctggttaagaaggtgtccggcgtgggtgggaccacctacgagatctcggtgtgaggactgactgccacacatccgccatggtgccacggggaccaggaccccgcagcgcaccccccctccccaccaacttctctgccccagggacccgaggccaccccagcctggtgtggacccatcggcgggagagagtgccacgcctccacagcttgccccaagcgctctgcctgcccgtccactcatctgcccatggggaagtcggctcactgggacaagggccactgggctggtctgtgtctgggcctgtcccatggctggggcagtgagggggcccagtcagcctctttggggcaccctctctcagccaggcttggcccactgccatcacccagcaccccagatcaccgccaggccagcccccaatggtccccttacggacaggtcccagagatggacagaggcacccagggcccccaccgtccttctgacacagcctgtgggctcccggaccgagtgtcccccgccaggctactcctaactaacgcgttgcctttcacggaccccgctggaagcttgtagcttggcaaggctgatgcttctgccctggcctgctctgggtggtggtggataggtggacagacggccagccagccagctgtggccgggggcccggctccatgtgtcccgtgtctgtgtgctgtgctgccgcgccgtgtctgatgtgtcagtgctccggccgccgctgtccctttcatcaaagccttaacctttgctttatgctcttgtgggaggcgacgggggggcaggcgggagcaggcacgggggtgatgctgccacagggggctggtgacacccagagccccctccccagccctcaggccctccctgccaaactggagaaccccaccccaaggcatgccacgtccgcagccccggcctggctgcggtgctcgcgccgtgggaaagcacactggggaggggtcagtgcttcccttggtgtcagggacctgagagtaagcacatgacagcgtctgcttgcgttgtgtctgttttatgtttttatatctacatctatatatctataattttattaaaaaaaagaaaaagaaaaccgaaatagtctctctctctgaccagcaccatgggggtgtggcaagaaccaagcgccttaacaaagagggtggcacaaagggacgcccagaagcaacggggtggcaccccttttcctaacaacagatgggtctggactgtgaacaaggccctgctaatgttccacattacgaaatctgtggaaaaacgctcttcccgagaccccggaacaaattgtttgaagggctccagggacggtctgaaagacttcgtctgttgccaagtaaatgctttaaaatcagggtacggaatgtcggaaaaggcgaaatcg

SEQ ID NO: 23653 - DNA, 2271 bp, Homo sapiens
ggttcagctttgtggagttggggcagatgcagccccagagggagagcccagcccagcccagcccaggccacttggccacaaaggggctgagggcacagcagtccagccctgagcgggtctcctctaccccacagggtgggacctgttcagctttgtggagttggggaggaggctgccactgggagtgatgagtggggagcccgagacctagaagtgggcagcattgcagccaggcagggatcgcagcccggggacaaagggctctcgcctcaagaaggtttaagtagcaaagatacagctgctgttggtcagcgctggtgggcaggagggcagcccctcgttttcctgagagagagcaggaatgaggccaggcagagtggctgggctcccagtgcagggcacggcaggggctccattcagtgcccacctggctgccccatgctctctgtggccagtgctggctaggagggacccagggactcgggagggtggtggcagttctgacaacatctgtctgtcctgtgacagcacagctgctccccaggcaggctctgcatccctcacctgctttccaggtgaaccctccaagcccagagggcagggactgcacggggccccacaacacggctgcactagtccacgtccgcgtcgtctctgtcttgctgctcctccgtcctctgtccccgtgttcgtgtgttcaccgtgtgcatgtgtgtatgtgcttgttttgatgcagggaccaccctcagctgaagactcccccaagtaagcttaatgggcagtccccgggcctggcccggctgggacctgccaccggccccccagggccctctgccagccctacacggcacacgctggttaagaaggtgtccggcgtgggtgggaccacctacgagatctcggtgtgaggactgactgccacacatccgccatggtgccacggggaccaggaccccgcagcgcaccccccctccccaccaacttctctgccccagggacccgaggccaccccagcctggtgtggacccatcggcgggagagagtgccacgcctccacagcttgccccaagcgctctgcctgcccgtccactcatctgcccatggggaagtcggctcactgggacaagggccactgggctggtctgtgtctgggcctgtcccatggctggggcagtgagggggcccagtcagcctctttggggcaccctctctcagccaggcttggcccactgccatcacccagcaccccagatcaccgccaggccagcccccaatggtccccttacggacaggtcccagagatggacagaggcacccagggcccccaccgtccttctgacacagcctgtgggctcccggaccgagtgtcccccgccaggctactcctaactaacgcgttgcctttcacggaccccgctggaagcttgtagcttggcaaggctgatgcttctgccctggcctgctctgggtggtggtggataggtggacagacggccagccagccagctgtggccgggggcccggctccatgtgtcccgtgtctgtgtgctgtgctgccgcgccgtgtctgatgtgtcagtgctccggccgccgctgtccctttcatcaaagccttaacctttgctttatgctcttgtgggaggcgacgggggggcaggcgggagcaggcacgggggtgatgctgccacagggggctggtgacacccagagccccctccccagccctcaggccctccctgccaaactggagaaccccaccccaaggcatgccacgtccgcagccccggcctggctgcggtgctcgcgccgtgggaaagcacactggggaggggtcagtgcttcccttggtgtcagggacctgagagtaagcacatgacagcgtctgcttgcgttgtgtctgttttatgtttttatatctacatctatatatctataattttattaaaaaaaagaaaaagaaaaccgaaatagtctctctctctgaccagcaccatgggggtgtggcaagaaccaagcgccttaacaaagagggtggcacaaagggacgcccagaagcaacggggtggcaccccttttcctaacaacagatgggtctggactgtgaacaaggccctgctaatgttccacattacgaaatctgtggaaaaacgctcttcccgagaccccggaacaaattgtttgaagggctccagggacggtctgaaagacttcgtctgttgccaagtaaatgctttaaaatcagggtacggaatgtcggaaaaggcgaaatcg

SEQ ID NO: 23654 - DNA, 1324 bp, Homo sapiens
aaaagaaaacaacataaaagaaaaagaaaaaaaaaatagctagtacagacccggttataggacgagcacccactgttgaccatcggcgggagagagtgccacgcctccacagcttgccccaagcgctctgcctgcccgtccactcatctgcccatggggaagtcggctcactgggacaagggccactgggctggtctgtgtctgggcctgtcccatggctggggcagtgagggggcccagtcagcctctttggggcaccctctctcagccaggcttggcccactgccatcacccagcaccccagatcaccgccaggccagcccccaatggtccccttacggacaggtcccagagatggacagaggcacccagggcccccaccgtccttctgacacagcctgtgggctcccggaccgagtgtcccccgccaggctactcctaactaacgcgttgcctttcacggaccccgctggaagcttgtagcttggcaaggctgatgcttctgccctggcctgctctgggtggtggtggataggtggacagacggccagccagccagctgtggccgggggcccggctccatgtgtcccgtgtctgtgtgctgtgctgccgcgccgtgtctgatgtgtcagtgctccggccgccgctgtccctttcatcaaagccttaacctttgctttatgctcttgtgggaggcgacgggggggcaggcgggagcaggcacgggggtgatgctgccacagggggctggtgacacccagagccccctccccagccctcaggccctccctgccaaactggagaaccccaccccaaggcatgccacgtccgcagccccggcctggctgcggtgctcgcgccgtgggaaagcacactggggaggggtcagtgcttcccttggtgtcagggacctgagagtaagcacatgacagcgtctgcttgcgttgtgtctgttttatgtttttatatctacatctatatatctataattttattaaaaaaaagaaaaagaaaaccgaaatagtctctctctctgaccagcaccatgggggtgtggcaagaaccaagcgccttaacaaagagggtggcacaaagggacgcccagaagcaacggggtggcaccccttttcctaacaacagatgggtctggactgtgaacaaggccctgctaatgttccacattacgaaatctgtggaaaaacgctcttcccgagaccccggaacaaattgtttgaagggctccagggacggtctgaaagacttcgtctgttgccaagtaaatgctttaaaatcagggtacggaatgtcggaaaaggcgaaatcg

SEQ ID NO: 23655 - DNA, 340 bp, Homo sapiens
gaaccagactcctttggataaatcactaattccacctgtaagaaagaaatgtacaagaagaacctaggaaacattgttttgtaccagatcagaaagattcaggaggcaccttagaagttaccactggccaaggctgagataactttagcatcagcaaggataatatctgcaagagattgaaactcatagtattgtatttaactctgtgagttaatgatggtagtggacagaattatagttacctttgggatacgcttttaaagaaattccaggtaataagagaaatgatagaattaggatatcaccattttacccccccaacaatttatggatctagaca

SEQ ID NO: 23656 - DNA, 362 bp, Homo sapiens
ggaacttgaatgccattcttcccactcccatttgccacgtcattgttgggtggaattttatcttttttctccctactgtccatactgatttaattttaccaaatgtagacaaatttctttgcccaccattggtttgcccaccattggttcttccatccattttttttctggggtgagttttgatcttagtgaagcctagtccagtttatggttcttactgtgtgatctgctgaccagagtatcagtatcgcctgagagcttgttggtgcaagttttcaggtcctaccccagacctactgaatcagcacctctgggggtgggacaccagtctttgttttctgctctcccagggattccagtgc

SEQ ID NO: 23657 - DNA, 420 bp, Homo sapiens
tgggagaggtgtgcttgtctgttgaagtcttccctaatgttatagcttctgatttcattgattcacattgaagcctggaataaacacagtatttcctttcagctaggtgtagaaacatggcaaagttctggcccattaaaagtgaagtgtggcaacttctttaaaagataagtggtgtgtatcttttgctgctatttattctttcctgcttcttgtggactccagtgtcaatgtgaaggctggcagcaaaacacctttcttggaccatgagctgatcttgggaatgtgaaccatgaatagtagaacaacacgatagaagaaacttgggttgctgaggatttctcagataaagtaatgttaccacagagctgccatatgattcctagactgttttcacttaaggaataaaatgtttaaata

SEQ ID NO: 23658 - DNA, 133 bp, Homo sapiens
gccaagagcactcctagcaattagatgtgcccttgtaatatcattaaccattaaagggaacgatgactccttggataaatggctgattccatgtcttgcatacaaaatatacaaaatgagacttgtgaagaag

SEQ ID NO: 23659 - DNA, 1490 bp, Homo sapiens
ctcccgagccccgagagctccgcgcacctgggcgccatccgccctggctccgctgcacgagctccacgcccgtaccccggcgtcacgctcagcccgcggtgctcgcacagcctgagactcatctcgcttcgaccccgccgccgccgccgcccggcatcctgagcacggagacagtctccagctgccgttcatgcttcctccccagccttccgcagcccaccagggaaggggcggtaggagtggccttttaccaaagggaccggcgatgctctgcaggctgtgctggctggtctcgtacagcttggctgtgctgttgctcggctgcctgctcttcctgaggaaggcggccaagcccgcaggagaccccacggcccaccagcctttctgggctcccccaacaccccgtcacagccggtgtccacccaaccacacagtgtctagcgcctctctgtccctgcctagccgtcaccgtctcttcttgacctatcgtcactgccgaaatttctctatcttgctggagccttcaggctgttccaaggataccttcttgctcctggccatcaagtcacagcctggtcacgtggagcgacgtgcggctatccgcagcacgtggggcagggtggggggatgggctaggggccggcagctgaagctggtgttcctcctaggggtggcaggatccgctcccccagcccagctgctggcctatgagagtagggagtttgatgacatcctccagtgggacttcactgaggacttcttcaacctgacgctcaaggagctgcacctgcagcgctgggtggtggctgcctgcccccaggcccatttcatgctaaagggagatgacgatgtctttgtccacgtccccaacgtgttagagttcctggatggctgggacccagcccaggacctcctggtgggagatgtcatccgccaagccctgcccaacaggaacactaaggtcaaatacttcatcccaccctcaatgtacagggccacccactacccaccctatgctggtgggggaggatatgtcatgtccagagccacagtgcggcgcctccaggctatcatggaagatgctgaactcttccccattgatgatgtctttgtgggtatgtgcctgaggaggctggggctgagccctatgcaccatgctggcttcaagacatttggaatccggcggcccctggaccccttagacccctgcctgtatagggggctcctgctggttcaccgcctcagccccctcgagatgtggaccatgtgggcactggtgacagatgaggggctcaagtgtgcagctggccccataccccagcgctgaagggtgggttgggcaacagcctgagagtggactcagtgttgattctctatcgtgatgcgaaattgatgcctgctgctctacagaaaatgccaacttggttttttaactcctctcaccctgttagctctgattaaaaacactgcaacccagctaacttgtccag

SEQ ID NO: 23660 - DNA, 631 bp, Homo sapiens
cagtctccagctgccgttcatgcttcctccccagccttccgcagcccaccagggaaggggcggtaggagtggccttttaccaaaggtcagattctttcaccgcctctgccagacccccttgtcccccacccccgcatagatctccagggggctcagaaaactctggccggtggctcacgcctgtagtcccaacgctttgggaggccaaggcgggaggatcgcttgaggccaggagttccagaccagcccaggcaacaaaagataccacatctctacaaaaaataaattagccgggccctgcacgcctgtagtcccagctactggggaggccgaggccggaggatcgcttgaacccaggagttccaggctgcagtgagctataattgtgccactgcactagagtctgggtgacagagacactgtctcaaaaaaaaccaacaaaacccttagctctttcactagccgggctggcctcttcctactgtaaacctgctgggcccccgtctcccttctttctcccctctctcctgccctggagctgcctgactctgcccacggcctgcagagaccccaggtcttcacgcaaggtgccattcctcactcagttcttgctcaaacgtccctccatcaa

SEQ ID NO: 23661 - DNA, 398 bp, Homo sapiens
tctgtctcaaaaataaaaatttaaaaaaaaaagaaaataattttcaatcatcttttgaagctccttgctttatagctgctcctttaacttcctttagccagatacactaccaccctcaagccagtgattcattcagtacaaattcccgggtgcccactatgtgcctggtaacctatgagggacaaaggatgatgaattttgcagagcatcacagaccaagggaccgagcaccgaggactgacagaatggtggtcacctcacacgctccatttccactttggcatcttatttccatcccacagatgaggcaggttttattataccactttccagcgtatcttatactttttctcagcctctctctgggccaatctcatttagcccctttgcaaattaaa

SEQ ID NO: 23662 - DNA, 440 bp, Homo sapiens
aagtaagtaaaattcatttgttaggtatggcagctcttggctgattacatctaaattggctttggttaccttaagcacacacacaaaaatatattagaacactattgagtaggtcccagaatcaatgggaggtctagagaacaaggcttgcaaatggatagggatcaaagctaggtatgagaaccatggccagaggaatggcactcatgctgtcccagcactactgccttcagcactggtgacaaaatgcattctaaattgcccccattgtatcagtcagagtcttaacaagaaataggtggcagactcaggaggatctaaagatctatttacaaagaagtgggtgtaggtgagccaccagggatagtgtggtaacctgctgctagtagtagtaaccaggtaaccaggccccagggacttagtggtcaccattcctaggc

SEQ ID NO: 23663 - DNA, 2303 bp, Homo sapiens
gaggcccagaggcaggctccccccttggtccagctggagcagccctttcagggagccccgccctcccaaaaagccgtgcaaatccagctacccccccagcaggcccaggcatcgggtccgcaagcggaggtgcccacactgccgctccagccttcctggcaggcaccgcctgcagtcttgcaggcccagcccggacccccggtagcagcggcaaattttcccctgggctccgctaaatcattgatgactccatcaggagaatgcagggcctcttctatagaccgcagggctcctctaaagagcgcaggacctcctcgaaggagcgcagggccccttcaaaagaccgcatgatctttgctgccaccttctgtgctcccaaggcagtgtcagctgcgcgagcacacctgccagctgcctggaaaaacctgcctgccacaccggagacctttgctccctcctcaagtgtcttcccagctacctcccagtttcagcctgcctctctgaatgcctttaaaggcccctctgctgcctcagagaccccaaagtcactgccatatgctctgcaggatccctttgcctgtgtagaggccctgcctgcagttccatgggtcccacagcccaatatgaatgcctcaaaggcatcgcaggcagtgcccaccttcctgatggctacagcagctgccccccaggcaactgccaccactcaagaggcctccaagacctccgtcgagccgccacgccgctccggcaaggccacccggaagaagaagcatctggaagcccaagaggacagccgtggccacacgctagcctttcatgactggcagggcccaaggccctgggagaatctaaatctgagtgactgggaggtccaaagccctatccaggtctcgggtgactgggagcacccaaacaccccccgtggcctgagtggttgggagggccctagcacctccaggatcctgagtggctgggaagggcccagcgcatcctgggccctgagtgcctgggagggcccgagcacctccagggccctgggtctctctgaaagcccagggagctctctgcccgtagttgtgtctgaggtcgcaagtgtctctccgggatccagtgccacccaggataattccaaggtggaggcacagcccttgtctcccttggatgagagggcaaatgcgttggtgcagttcctcttagtcaaggaccaagccaaggtgcctgtccagcgctcggagatggtgaaagtcatcctccgagagtataaagatgagtgcttagatatcatcaaccgtgccaacaataagctggagtgtgcctttggttatcaattgaaagaaattgataccaaaaaccacgcctatattatcatcaacaagctgggctaccatacagggaatttggtggcatcctatttagacaggcccaagtttggccttctgatggtggtcttgagcctcatctttatgaaaggcaactgtgtcagggaggatctgatctttaattttctgttcaagttagggttggatgtccgggagacaaacggtctctttggaaatactaagaagctcatcaccgaagtgtttgtcaggcagaagtacctagagtacaggcgaatcccttacactgagcccgcagagtatgagttcctctggggccctcgagcattcctggaaaccagcaagatgcttgtcctgaggtttttggccaagctccataagaaagatccacagagctggccattccattaccttgaagcgctcgcagagtgtgagtgggaagacacagatgaggatgaacctgacaccggtgacagtgcccacggccccaccagcaggccccctccccgctaataggtgtagcagagatctcgctcctgtgtttccctggccagaggccactgacagggtggggggacatttttgttcctggtgtttgtgttccagttccacgagtgtaagtttggattttcaacttggtttcgtatctgccaaagctttgtacattttttatgtggtgttgatttcaatcggctactgttctgttctgtattttggcatctgtgtttttaagtgagatctgtggttctctgttttgtgttataattgttatgttttggtatcagctttgtgctggctttgtgaaatgaattgagaagctatccatctcatttctggtatagttcatgtagcattgtaatcggttgttctttgaacgttcaaatgactcatcagtaaaaactgtctacagagaagtaaatatctatatctatatatataaatatactttcagcataaaaaaagtgt

SEQ ID NO: 23664 - DNA, 1967 bp, Homo sapiens
gaggcccagaggcaggctccccccttggtccagctggagcagccctttcagggagccccgccctcccaaaaagccgtgcaaatccagctacccccccagcaggcccaggcatcgggtccgcaagcggaggtgcccacactgccgctccagccttcctggcaggcaccgcctgcagtcttgcaggcccagcccggacccccggtagcagcggcaaattttcccctgggctccgctaaatcattgatgactccatcaggagaatgcagggcctcttctatagaccgcagggctcctctaaagagcgcaggacctcctcgaaggagcgcagggccccttcaaaagaccgcatgatctttgctgccaccttctgtgctcccaaggcagtgtcagctgcgcgagcacacctgccagctgcctggaaaaacctgcctgccacaccggagacctttgctccctcctcaagtgtcttcccagctacctcccagtttcagcctgcctctctgaatgcctttaaaggcccctctgctgcctcagagaccccaaagtcactgccatatgctctgcaggatccctttgcctgtgtagaggccctgcctgcagttccatgggtcccacagcccaatatgaatgcctcaaaggcatcgcaggcagtgcccaccttcctgatggctacagcagctgccccccaggcaactgccaccactcaagaggcctccaagacctccgtcgagccgccacgccgctccggcaaggccacccggaagaagaagcatctggaagcccaagaggacagccgtggccacacgctagcctttcatgactggcagggcccaaggccctgggagaatctaaatctgagtgactgggaggtccaaagccctatccaggtctcgggtgactgggagcacccaaacaccccccgtggcctgagtggttgggagggccctagcacctccaggatcctgagtggctgggaagggcccagcgcatcctgggccctgagtgcctgggagggcccgagcacctccagggccctgggtctctctgaaagcccagggagctctctgcccgtagttgtgtctgaggtcgcaagtgtctctccgggatccagtgccacccaggataattccaaggtggaggcacagcccttgtctcccttggatgagagggcaaatgcgttggtgcagttcctcttagtcaaggaccaagccaaggtgcctgtccagcgctcggagatggtgaaagtcatcctccgagagtataaagatgagtgcttagatatcatcaaccgtgccaacaataagctggagtgtgcctttggttatcaattgaaagaaattgataccaaaaaccacgcctatattatcatcaacaagctgggctaccatacagggaatttggtggcatcctatttagacaggcccaagtttggccttctgatggtggtcttgagcctcatctttatgaaaggcaactgtgtcagggaggatctgatctttaattttctgttcaagttagggttggatgtccgggagacaaacggtctctttggaaatactaagaagctcatcaccgaagtgtttgtcaggcagaagtacctagagtacaggcgaatcccttacactgagcccgcagagtatgagttcctctggggccctcgagcattcctggaaaccagcaagatgcttgtcctgaggtttttggccaagctccataagaaagatccacagagctggccattccattaccttgaagcgctcgcagagtgtgagtgggaagacacagatgagatatccgatacgctgatatgccgcggccaccaaaggcccctccggtaatgggttcagacttgtcgtgtatctgtcagcagcacgacagggggggaaaaatactaggaaataaaacataagtagtgaataagcagaatattgggtagccagcgctgacgtactatacttttttgttgt

SEQ ID NO: 23665 - DNA, 672 bp, Homo sapiens
tgagacagaccacatgtttcctatcttggaaaatggtaccacttccttgtgcaagcctacccctgttccctcacccctcgttcagtccaacagcaaatctgtccagtcttctaactgtatctcaggttcattagccccgcttcctcgtccctgctcgtcttctgccggaccagtccgccatcttgtgaccggactcgggaatagcgtcctacttcccggcggcctccactcttgacccaaatgcaatgtgcagccatggcaatcttttataaacagaaatccgatcaagttactcctctgccgaaatccctctggtcagtggtttaactgtcgaggtgctcctggcagcactctgccctccccacatcattgctggtggacttgtctcccctactagactgtgccctgtgagggtggagactttgtgcagggttgtatccccagcatctgatgcagtgattcaataaacatctgtccaattaataggaaagacagttccttttctcattcccctattgctggtcccctgccctcaagcaggatgttatgccccagagtggctgtgggtgcgaacattctgcccctctggctggtctggcactgatttccaccctgagctggtgttgcctctctccttcctcttggccaacctctcttccaccaatataagcc

SEQ ID NO: 23666 - DNA, 1804 bp, Homo sapiens
tgaaaacgtttctatagattttggatttccttctgatagctaaaatttgtttctgtataacagagtagtgccctataagccagttcagtgcacattaaatggctgttcttagaattatgaatctgaggcttatgcagtgaggctctagctctctggagtcagttggtcaagtgggattcctgaggactgagcaaacacacacagagcaggattttgtcctaagttttcttagggatcctatccaaaaacaccattacttgaatttcccagcttccttttacagggagacttccttgctatgtgtactcccacctcggtatgtcaaatcattttctcagaggaagtacagcataaaataataaccagcatttgtagagcacttcttgtgggccttcttgggcaaatagacattctcatggaatgctctaaaattgttaagttcttgcacttgctctcaagtcatttataatctaattgctggtcttcctggtatgaacaaagatgtttgcttgttaataaattcctaccacatacccagacttgtggtttatttctatctaactagggaaagcactaaagagttttccaataaggaagaatgatctgagtgtctacctgctttggaaaagatgtctgccatggataggaaatgattttgtatcccaaaatcctagtactaatttggagtgttgtaaaggtcagggcagcaaatgctagagagtgggattaatgaaaagttatagtgttctgcatgcctttgaataattaatttttactccatttttactcgcttgcaataaagtaggttaagtgctgtactttaaggaagtccatgtacaagccagtgccttaacaatggtcaaatggttgctcactaaccaatggaaataaatgactgttgtttccacaaaattgctttacagattctaaatgctatctctgggacactggattgtgtgctctttaagataaattccataatcaagggcctggccctgaatagattggagcccaaaaatctcactgaagcaaagagataataggccagtaaagagtgggagacaaacactcctggaataggaagccactactcacctttattttaaattgatatatagaaattaatattacaaaatgcacacatcttaagtgtgaagtttgatgttttgacagttgtatacgtctgtgtaataactaccaaaagaagacataatatgttacaattaacccagaaaattctcaagtacttttaaatcacccctgagcacctccccactccagtgatcacttcttgatttttatcactaaagatttgttgtacctgcttttggattacatataagtggaatcatataataatgtactcttttgcatctggcttctttcactgataatgctttaaagacacgcatactgtatgtattaggacattgttctttattgctgagtagtatttcattctataaatataccacaatttgtttattcattctcctattgaaggacctttaggttgtttccagtttggggcaattatgaataaggatgctatcgatattcttacacagccttttgtttttgttttttgtggatatacatcttcacttgtcttggataaataagagtagaaaattactgggtcatatggtaagtgcatgtttataagaaactgccctcttattctccaaagtggttttaccattttgtactcctatcagtgatgtatgagagttacagttgcttcacatgtctgtcaacatttacactgtcactgttttttatattagccattttagcatatatg

SEQ ID NO: 23667 - DNA, 1096 bp, Homo sapiens
cactcaatggacagctcttgtgacagggagttcatgcatcctgggacaacccactccagttttgatagtaccagctgataggaaattcttcttgatcttgagcaaaattctgttttctttgagacttccactcattcatcctaggtctattcccccaaggccaaaccatgcaagtaagatggcccttccaaaagatggccattcagaaacttgaaggcagtgatcatgcccctaggaatcctctagtctccagattgtagcctcagttctgtcaactcttctttgaatttcaagtcccttcatcattcaggacaagttgaacttgttctaagctagtccagtatcattttgtttacgaaacaaaattttagatagaacttccaaaaatgttttaagcgatacagggacttatttgaaaggataaaactcctttgcatatatgagctatatgatacgtttgttttataaaaagtcttattcctttataatcactttgaagtacagaattcaaaattaggatatttgggtgttgccctagaagagcttacaatttagtttatgttctttgcacaatgattcataataaaatgactctccttgaagaaatgttgttcttagcttatttctgtgaagaagccaaactccaataacaaccaaaaagttctaaacatctcacaaatcttccagttatttttcagtttaaatgttggtggacagataatatgttaaaactgcacatctgtaagtcatgcactgctcactgaccctctgaacttaactgcctcaggctcccgagtagctgggactaccggacatgcacacactcagctaaattagtttcagagaaccgggcttccacctgtggccagaggacgcacccggccctgcgatagccgactggcccccaaggcggaaaaagggaaccaccagccaaccactttacctgcaaaatacacagaaagctacagaacaaacacacggaccaacccggaacacgcgccgagcaaaacagggggcgggaccaccacgaggaacacaaacgcgcacgaacacacgtcaaaaaagaccaggcccaccgaagcacgcacgacaagat

SEQ ID NO: 23668 - DNA, 1194 bp, Homo sapiens
cactcaatggacagctcttgtgacagggagttcatgcatcctgggacaacccactccagttttgatagtaccagctgataggaaattcttcttgatcttgagcaaaattctgttttctttgagacttccactcattcatcctaggtctattcccccaaggccaaaccatgcaagtaagatggcccttccaaaagatggccattcagaaacttgaaggcagtgatcatgcccctaggaatcctctagtctccagattgtagcctcagttctgtcaactcttctttgaatttcaagtcccttcatcattcaggacaagttgaacttgttctaagctagtccagtatcattttgtttacggtcccataactgactggccatcatgagtatggtctaaccaggtggaatagtgtgaagtggacctagtaccttttcggtgctgacacctgcctcacatgaaacaaaattttagatagaacttccaaaaatgttttaagcgatacagggacttatttgaaaggataaaactcctttgcatatatgagctatatgatacgtttgttttataaaaagtcttattcctttataatcactttgaagtacagaattcaaaattaggatatttgggtgttgccctagaagagcttacaatttagtttatgttctttgcacaatgattcataataaaatgactctccttgaagaaatgttgttcttagcttatttctgtgaagaagccaaactccaataacaaccaaaaagttctaaacatctcacaaatcttccagttatttttcagtttaaatgttggtggacagataatatgttaaaactgcacatctgtaagtcatgcactgctcactgaccctctgaacttaactgcctcaggctcccgagtagctgggactaccggacatgcacacactcagctaaattagtttcagagaaccgggcttccacctgtggccagaggacgcacccggccctgcgatagccgactggcccccaaggcggaaaaagggaaccaccagccaaccactttacctgcaaaatacacagaaagctacagaacaaacacacggaccaacccggaacacgcgccgagcaaaacagggggcgggaccaccacgaggaacacaaacgcgcacgaacacacgtcaaaaaagaccaggcccaccgaagcacgcacgacaagat

SEQ ID NO: 23669 - DNA, 822 bp, Homo sapiens
actttgaagtacagaattcaaaattaggatatttgggtgttgccctagaagagcttacaatttagtttatgttctttgcacaatgattcataataaaatgactctccttgaagaaatgttgttcttagcttatttctgtgaagaagccaaactccaataacaaccaaaaagttctaaacatctcacaaatcttccagttatttttcagtttaaatgttggtggacagataatatgttaaaactgcacatctgtaagtcatgcactgctcactgaccctctgaacttaactgcctcaaaaaagggactgttggccaggcaccgtggctcatgcctgcaatctcagcactttgggagggtgaggcaggtgggtaacttcagcccagcagttcgacaccagcatgggccatacggtgaaaccccaactcaacaaaaaattagctgggcatggtagcgcccacctgtggtcccagctacttgggaagctgaggtagggggatcaattgagcctggagtaagctgattgtgccactgccctccagcctgggcagcagagcaaggccctgtcttggacggggtgggggcgctgtcaccctgctgcaggtaagactaataaacttttaattattattattgttgttttttttttttttttttagagacagggtctcactgtgttgcatcacccaggctgaagtgcagtggtgtgaccacagttctctgcagcctctaactcttgggttcaagtagtcctccagccctccagactttgtgtgtgtatgaaacagagtctcgctctgtcaccaggctggactacagtggtg

SEQ ID NO: 23670 - DNA, 508 bp, Homo sapiens
gagccaccgtgctgggattacgggcgtgagccactgtgctgggattacgggcgcgagccaccgtgctgggattacaggtgtgagccaccgtgctgggattatgggtgcgagccgccgtgctgggattacaggtgtgaaccactgctcctggcctttatttcagcattctgtttcagtgtttcacattggccacttagctagatccgtttgtcttctgcagtactgtgctgatccagagtatatgctaagacagaaagtgctttggaggtaaagtttaaaaaatacaagggcttcaaaatagtactagtaatttgatccattcacaaaaggacaaaggctggacagagacgtgaagaaatgaatcatttacgcaatgattggggtgttccaattatgtgtgattttgtgttttctgccgtttcattttgtattgctataatcattttgacaatgaatacaaatcaaatagcacccaaaattgtgaaggatacggaacctcattgatgag

SEQ ID NO: 23671 - DNA, 388 bp, Homo sapiens
cagaaaatggaaaaaaaataaaagaaagaaaaggcactcagattggaaaggagtgagtaaaactatctctatttgcagatgatatgatcttgtatatagaaaatcctggctgggcatggtggctcacacctgtaatccctgtactttgggaggctaaggtggacggattactcgaggtcaggagtttgtgaccagcctgaccaacatggtgaaaccctgtcactactaaaaatacaaaattagccgggcatagtggtgagcacctgtaatcccagttactcaggaggccgaggcagaagaatcacttgaacctgggaggcggaggttgcagtgagccaaaattgcaccactgcactgcagcctgggtgacagagtgagactccatcta

SEQ ID NO: 23672 - DNA, 435 bp, Homo sapiens
ctttattgaaacttaggttttatgtattgcatgtaaagtcatatgttcctatgtagatcattctaacttgatattttaaaatgcctcttgataataatagtcatatgttgaatttgaagttttgtgtttagaaaaattatagctttaggctggttgtggtggctcatgcctgtaatcccagcactttgggaggcggaggtggacagattgcttgagttcaggaattcgagactagcctggacaacatggcgagatcccatctctactaaaaatacaaaaaaatagctgggcattgtggtgcatacctgtggtcccagctactcaggaagctgagatgggaagattgcttcagctgggggtggaggttgcagtgagatgagattgtgccactgcactccagcctatgtgacagagtgagaccttgtctcaaaaaaa

SEQ ID NO: 23673 - DNA, 371 bp, Homo sapiens
ttctttttttcagagacagggttttgctctgttgcccaggctggagtgcagtgctgagatgatagttactgcagcctctaactcttgggctcaagcagtcctccccgctcagcctcctgggtaaccaggactgcaggcacatgccatcacgcctggctaattttaatttttttttgtagagacagaaaaatgagaagttattttgctcagactggtcttgaattcctggcctgaagcaatcctcccatctcaacctcccaagtagctaggactacagacacgtgccactgcgcctggccttccaaatacttttatatttaaaagggaattctagggccgggcacggtgacagaatgagactctgtctcaaa

SEQ ID NO: 23674 - DNA, 1194 bp, Homo sapiens
caaaagttaaatactgatggaatcaagtattttgtatgaagttctcatttgttatctctaacgctattttgtgttttgcatatagtattatagtatgtgtatatcactttttgtatagagtaagcaattgaataatttgttagtaaaaataataccacattgactgatactgctatagacatagcttgagttttatgtctcctttttgctcattttctaagacttaggagaaagaataaatctaaaatgaccattaaaacattctccatttcagcttgctgtgtaacttaggaagtataaaactatacttctctttatctgcatgtaagtttgctgttaaaatgtgaatttctaaatgtgtatttggaattatttccgtagtttatttctgcaaactatgtaaatttgttatatgtgtgagtatgtgtacatatgtatattttagagtaatataaaattaaagggaacaatcttgcatagctctttcaccagttttaaattattgatacgttatttttaaggactcttgacaaactaggggcaattttcttatagtggagacccagtgattatcagcagatgaggaaataggttaaaaattgctatatggcaatttgtatataaagtaataggatgtgagaaaaatactgaatcttaagaatgacatggaattctgtggcagaaacaaaagaaaaagttgatgtagtatataccttcaactgtgttttgagttgacttttttttttttctttaagctttgggtaaaaatgtatgaggagggagagggcccaatataaatatttacatcttcttacctttttggaaatggaagaagataaatcttgagtttttctgcctatattaatcaggaattgccctttgaaaaaagtgctaaataaatattttgattttttttttcaagggaagttaggtgaaagaaggaaaaacatcacaggaaagactgttaacattctgtttgttgtctgagaggtgaggaaccaaagggaggcaactaaagcgggaaaccatcttgctttttctaatcagttcttggaacagaaatgtggaagctacctttaggaacatggagaatttccaaaccaacaggcaaaggaaaactaacgcacaaaaatgacattctgaagatgcaggtttcagccaggcgcggtggctcaagcctgtaatcctagcact

SEQ ID NO: 23675 - DNA, 645 bp, Homo sapiens
caaaagttaaatactgatggaatcaagtattttgtatgaagttctcatttgttatctctaacgctattttgtgttttgcatatagtattatagtatgtgtatatcactttttgtatagagtaagcaattgaataatttgttagtaaaaataataccacattgactgatactgctatagacatagcttgagttttatgtctcctttttgctcattttctaagacttaggagaaagaataaatctaaaatgaccattaaaacattctccatttcagcttgctgtgtaacttaggaagtataaaactatacttctctttatctgcatgtaagtttgctgttaaaatgtgaatttctaaatgtgtatttggaattatttccgtagtttatttctgcaaactatgtaaatttgttatatgtgtgagtatgtgtacatatgtatattttagagtaatataaaattaaagggaacaatcttgcatagctctttcaccagttttaaattattgatacgttatttttaaggactcttgacaaactaggggcaattttcttatagtggagacccagtgattatcagcagatgaggaaataggttaaaaattgctatatggcaatttgtatataaagtaataggatgtgagaaaaa

SEQ ID NO: 23676 - DNA, 685 bp, Homo sapiens
caaaagttaaatactgatggaatcaagtattttgtatgaagttctcatttgttatctctaacgctattttgtgttttgcatatagtattatagtatgtgtatatcactttttgtatagagtaagcaattgaataatttgttagtaaaaataataccacattgactgatactgctatagacatagcttgagttttatgtctcctttttgctcattttctaagacttaggagaaagaataaatctaaaatgaccattaaaacattctccatttcagcttgctgtgtaacttaggaagtataaaactatacttctctttatctgcatgtaagtttgctgttaaaatgtgaatttctaaatgtgtatttggaattatttccgtagtttatttctgcaaactatgtaaatttgttatatgtgtgagtatgtgtacatatgtatattttagagtatatctgagggaaaaataaatgaaaattttctttatgtacttatgtatgtgtgatgcatgttcaaagtcttatcgaccataactctgtgcacttggttatcggacattttgggagtttttttctctgggaaaaatcgatagtgttttcttcaatgctgctgctgtgtgaagccatactttttcagggttcttcccctaatcggctcttaggtttccctgctctgtttcatttatttc

SEQ ID NO: 23677 - DNA, 1327 bp, Homo sapiens
tggaagttgctggagctcggtacaggtccacccagctgaagtgggttctttttcccactaccactggggcaagggagtgagcctaggtatggtcacctcagcagccacagtcttaaaagcaagtcgctagattttttgaaagtcccaagagaagtggtggtcttcccttctgtcatcccagtatatatagttatacatgtaaatatctaaataccccatgtaatgggaaggctatgtacagggcagccttcccaaacgctgtgagggcacagagctgctgtggctgctccaccagggtgtgctggtggctcagctttggggttggactcccacgttcacctccccctcctggtccaggcagaggcaccagaacccatcctgccttttctccagtgtgagcatttcagggagccaccatcagccttgggttcatgagaggaagaaacccccaaagaccaatgcctggagcccacttctccagcgacaccttccctcgccagagcaggctcctaggagtgcatggcaggggtgccgggtccctgtgcacgggtttgctttctgaacattgcccatcaacaccgccttcagggagtcccagagtaacctactacctcccccatcgctcctctgcccccctcaccctgtgggcaccaacacctcccgcacacagatgaaaaccatctacagagcccttcccgggtccctcgacccaagtggtgtagccgttaccaatgtttacaaccaggggccgcccctccttagatgtgtttactcgcattcacaggccacctgttggtttgagtttcatgtgtctccttccctggcctaggttgacttgagcacacaactcgatctttcttcccctccatcaaggcagtgtgtgaggactgtgtgggaatgacatttcttgtacatacttagcacagcacctagagtatgaacttgtactattgttctgtaaagagggtgaaatagagcttattgtaaagtgtcgggagaagtatagtattgtatttgtaacaatatcgttctttgtatacacaaaactcaatgatctatatataaatataaataaatatataaataaaatatatctacacgtgagcctggaatgtggacaccgcacacccactgaatgtacttccttgacagtctggtcactggtccctccctccctccctcctccgtcccgtggccacagtcatccagtttggggttgtgatgtatttactgtgctatctatcttcctttatttaactgaacgctaatgtctgtataagagttgctgcaacaataaacaagaacttcacctcttggcctggccaag

SEQ ID NO: 23678 - DNA, 1251 bp, Homo sapiens
tggaagttgctggagctcggtacaggtccacccagctgaagtgggttctttttcccactaccactggggcaagggagtgagcctaggtatggtcacctcagcagccacagtcttaaaagcaagtcgctagattttttgaaagtcccaagagaagtggtggtcttcccttctgtcatcccagtatatatagttatacatgtaaatatctaaataccccatggtgtgctggtggctcagctttggggttggactcccacgttcacctccccctcctggtccaggcagaggcaccagaacccatcctgccttttctccagtgtgagcatttcagggagccaccatcagccttgggttcatgagaggaagaaacccccaaagaccaatgcctggagcccacttctccagcgacaccttccctcgccagagcaggctcctaggagtgcatggcaggggtgccgggtccctgtgcacgggtttgctttctgaacattgcccatcaacaccgccttcagggagtcccagagtaacctactacctcccccatcgctcctctgcccccctcaccctgtgggcaccaacacctcccgcacacagatgaaaaccatctacagagcccttcccgggtccctcgacccaagtggtgtagccgttaccaatgtttacaaccaggggccgcccctccttagatgtgtttactcgcattcacaggccacctgttggtttgagtttcatgtgtctccttccctggcctaggttgacttgagcacacaactcgatctttcttcccctccatcaaggcagtgtgtgaggactgtgtgggaatgacatttcttgtacatacttagcacagcacctagagtatgaacttgtactattgttctgtaaagagggtgaaatagagcttattgtaaagtgtcgggagaagtatagtattgtatttgtaacaatatcgttctttgtatacacaaaactcaatgatctatatataaatataaataaatatataaataaaatatatctacacgtgagcctggaatgtggacaccgcacacccactgaatgtacttccttgacagtctggtcactggtccctccctccctccctcctccgtcccgtggccacagtcatccagtttggggttgtgatgtatttactgtgctatctatcttcctttatttaactgaacgctaatgtctgtataagagttgctgcaacaataaacaagaacttcacctcttggcctggccaag

SEQ ID NO: 23679 - DNA, 421 bp, Homo sapiens
gaacttttattagttcatttttgcttgtttgtttgtttatctaaacagtgttacatttttatcaggttaaaatagtgggtactgagacagtatttgcaagtccatgtgggaatctcaagtcaaaatacataaaatggatacaaaaaaaatagaaagcaagaaactaaactgtatcaacagagaaaatcaccttcactagaaggaagacaggaaggaaagaagaccacaaaacaaccagaaaacaaatgagaaaatggaaggagtaagtccttacttatcaataataacattgaatgtaaatggaataaaccatccaatcaaaacacagagtggctgaatggaggaaaaagcaagatctattgaccgttgcctgcaagaaacacacttcacctatagagacacacatagactgaatgtaaaa

SEQ ID NO: 23680 - DNA, 475 bp, Homo sapiens
tgaaatgtattttttgcatgcttgcaaatatatatatgtattacagatacatatgtgtatttgcaccttgcaactggtgctgagatctgtccttttaggtaagtgtatttgtcttttcccctagagagctctttattgtgtcacctttatttaaactgattttccaaagttgtagtagaatctcagcattgaacagtccattacaacagtgtctgatccagccagtcatgtttcctatgagttcaggagtaactaaaccctacagctgctgaaagattgcatctgaaagaagattctgtgttaattcactcaacaattttttattgagtggctgtatgggccagatgctatcttgtgtgccgagatacagcagtgtacaaaatagacacaggccttggattagatggtctgaaatctaattatattactcttcactcttgcaaattttctgttccgtgtgtgcacactaacccat

SEQ ID NO: 23681 - DNA, 1251 bp, Homo sapiens
cagcggcgggttgcggaacttgacgtggtagtcggtccaccaggcgatgccggagcggtcgagcggcacctcgacgtagggcccgccgggctggcgctggtgccaaagcgagaaggagtcgttgaagaggctgttggcgatggcgccgcagggcgcgatgggcaggccggccgcgctgcgctggtagggggcgcactcgttgacagggtggcgcagcgcgctggggagtccgctcagctgcgcgtcgtcgcgggacacgccgtagcgccggttgttctggtagaagttggtcagctcgtagtagaggtacactgggccctggaagagctcgggcagcgagaagtaccaggcgcacgagcaggggggcggcagcgcccggccctggccagccgcggcgcacaccgagcagttgccggtgcccgggtcgcctgtatagtcgtactccagctccttgatgccgttggaggagtagtagaggcccaggcccaggccgatgaaggccaggcccgcgcagaagaagagcggcagcgcgatgctggccgacagcagcggctgccaggcggggaggcgctgctgagtgaaggcggtgttgtcgggctggtgggcgccccgggccgtggcgctccaggtcatggcggccgcgcggggaccgacgcgcgggctgaccgagtgggggccccgccgcggggcgcctccctctccgcgccgcgcaagcccggggactgctcgcgggtcgggtttcccgccagctcaggtgggtttttgcccgggcccctcctctgcctccgtcacagcggtgaatccctctgggtctgcagcaacctcaattcttgcctcctcagaagaaagaatttgaccaaggggcataaagcagaaagatagtgcaaggttttcaactctactttcatctcccatgagacctttttttgagacaagcaaagcctctcagttcagcttatatatttttgaatacaccctcccaacctaaaatcaaactagagctctgcaattagaacatagctacagaagttaacaaactgtattgttatttgatataagaaaatgtgatcataaacctatgcattattataaaacctattttaaaataaacatttcaaaggacaaataacatttttcatcagtttgaatactgtctcaccttttgggaagtaattccattgcaaagatcctttccccatatgtaagtttttctttctcttataatccaaagcctgtgagtgtatgtccaaa

SEQ ID NO: 23682 - DNA, 1131 bp, Homo sapiens
cagcggcgggttgcggaacttgacgtggtagtcggtccaccaggcgatgccggagcggtcgagcggcacctcgacgtagggcccgccgggctggcgctggtgccaaagcgagaaggagtcgttgaagaggctgttggcgatggcgccgcagggcgcgatgggcaggccggccgcgctgcgctggtagggggcgcactcgttgacagggtggcgcagcgcgctggggagtccgctcagctgcgcgtcgtcgcgggacacgccgtagcgccggttgttctggtagaagttggtcagctcgtagtagaggtacactgggccctggaagagctcgggcagcgagaagtaccaggcgcacgagcaggggggcggcagcgcccggccctggccagccgcggcgcacaccgagcagttgccggtgcccgggtcgcctgtatagtcgtactccagctccttgatgccgttggaggagtagtagaggcccaggcccaggccgatgaaggccaggcccgcgcagaagaagagcggcagcgcgatgctggccgacagcagcggctgccaggcggggaggcgctgctgagtgaaggcggtgttgtcgggctggtgggcgccccgggccgtggcgctccaggtcatggcggccgcgcggggaccgacgcgcgggctgaccgagtgggggccccgccgcggggcgcctccctctccgcgccgcgcaagcccggggactgctcgcgggtcgggtttcccgccagctcaggtgggtttttgcccgggcccctcctctgcctccgtcacaggtgagtttagttccaggccctacgagcagtgcccacaccctcccagttccgcctccgcccaggtgcgctgcacccccgcgggtcaccgggagccgcacctcgcccgccccttccgaggtgagcaggtgggtgttttttacctcacctggtagactcagtctcgcgtttcctctcagtccaggtcatcggactccacctcctctcctaggtgagtggcggccccgggctgcctctgagtggctcctacctggctcaggtaccaccttctcttccgccttccaagtgactagagttcctgggccagtctcccgaaatcaaaaggcgctccggcctccag

SEQ ID NO: 23683 - DNA, 418 bp, Homo sapiens
ctgggtgcgcgccggctccggctgcagttcccgggtccctcggccaccgaagccaccctgccctggtgaaagggctcccgcaccgcccggtgctccccatctgcctggcgttgtgcgcagagctggaaagcatggctgttataaatgaattctgattttggggagcagatgccaacttagagcctcgtaccaatctctctgtctttaaaagatgaggtgacttggtgattttcctggaaaattataggtgcccagctaagacctgaatgccatcaccctccccagggctctgcagttttctcgtggtgaacccttgatggatttgttgttgcttgagaaatggcgatgatcgaattggggtttggaagacagaattttcatccattaaagaggaagagttcattgctgttgaaactca

SEQ ID NO: 23684 - DNA, 1633 bp, Homo sapiens
ctgggtgcgcgccggctccggctgcagttcccgggtccctcggccaccgaagccaccctgccctggtgaaagggctcccgcaccgcccggtgctccccatctgcctggcgttgtgcgcagagctggaaagcatggctgttgtgcccagctaagacctgaatgccatcaccctccccagggctctgcagttttctcgtggtgaacccttgatggatttgttgttgcttgagaaatggcgatgatcgaattggggtttggaagacagaattttcatccattaaagaggaagagttcattgctgttgaaactcatagctgttgtctttgctgtgcttctattttgtgaatttttaatctattacttagcgatctttcagtgtaattggcctgaagtgaaaaccacagcctctgatggtgaacagaccacacgtgagcctgtgctcaaagccatgtttttggctgacacccatttgcttggggaattcctaggccactggctggacaaattacgaagggaatggcagatggagagagcgttccagacagctctgtggttgctgcagccggaagtcgtcttcatcctgggggatatctttgatgaagggaagtggagcacccctgaggcctgggcggatgatgtggagcggtttcagaaaatgttcagacacccaagtcatgtacagctgaaggtagttgctggaaaccatgacattggcttccattatgagatgaacacatacaaagtagaacgctttgagaaagtgttcagctctgaaagactgttttcttggaaaggcattaactttgtgatggtcaacagcgtggcgctgaacggggatggctgtggcatctgctctgaaacagaagcagagctcattgaagtttctcacagactgaactgctcccgagagctgctgtggtggctccagccgcgcctggttctcagtggccacacgcacagcgcctgcgaggtgcaccacgggggccgagtccccgagctcagcgtcccatctttcagttggaggaacagaaacaaccccagtttcatcatgggtagcatcacgcccacagactacaccctctccaagtgctacctcccacgtgaggatgtggttttgatcatctactgtggagtggtgggcttccttgtggtcctcacactcactcactttgggcttctagcctcaccttttctttctggtttgaacttgctcggaaagcgtaagacaagatgaagagcaggcgccattataaatatcaaagcccaagaaatggaactttgggcagagatcatgttagaatcaagtggatgatgagaccaattacaggccgtctctctgcacagcacagaaattctcaatcactgaaatgagtaactgcaaaataaatagttgattgtactgttctcatgctataaaagtggacaggtactctacaacaaatctgttttctcatttttatcaaatatatgtatcatcaaaggttgcatctgtacagtatgtaaatgctattaatgtcgtcactcacatgcacgacagtccttgttcccccaggaagggcctggtggccccagcacacacttgggattatgtgtatacataaataaatattgggctgtttccctcttcctgtga

SEQ ID NO: 23685 - DNA, 513 bp, Homo sapiens
ctgggtgcgcgccggctccggctgcagttcccgggtccctcggccaccgaagccaccctgccctggtgaaagggctcccgcaccgcccggtgctccccatctgcctggcgttgtgcgcagagctggaaagcatggctgttataaatgaattctgattttggggagcagatgccaacttagagcctcgtaccaatctctctgtctttaaaagatgaggtgacttggtgattttcctggaaaattatagaatattaatgaaactttatcatcttggtgagaaaagcattctaatagctttattctgacatacggaggtatggagagcttgaaggagtcagagaggtgcccagctaagacctgaatgccatcaccctccccagggctctgcagttttctcgtggtgaacccttgatggatttgttgttgcttgagaaatggcgatgatcgaattggggtttggaagacagaattttcatccattaaagaggaagagttcattgctgttgaaactca

SEQ ID NO: 23686 - DNA, 4616 bp, Homo sapiens
ctgggtgcgcgccggctccggctgcagttcccgggtccctcggccaccgaagccaccctgccctggtgaaagggctcccgcaccgcccggtgctccccatctgcctggcgttgtgcgcagagctggaaagcatggctgttataaatgaattctgattttggggagcagatgccaacttagagcctcgtaccaatctctctgtctttaaaagatgagaagcactgaggtggacactgcgggttgtgaggttcaggaggggtaagtggctggcacaaggtcacagagcagcgctgccatttggctactttccaattcagcatagctgccctctctgctggtggtattcacagcatgcaagataaaatactcaccaaggaacaagtggctaactcctcacagagctctcacggtttcctctttcctgacaaaaaggtgcccagctaagacctgaatgccatcaccctccccagggctctgcagttttctcgtggtgaacccttgatggatttgttgttgcttgagaaatggcgatgatcgaattggggtttggaagacagaattttcatccattaaagaggaagagttcattgctgttgaaactcatagctgttgtctttgctgtgcttctattttgtgaatttttaatctattacttagcgatctttcagtgtaattggcctgaagtgaaaaccacagcctctgatggtgaacagaccacacgtgagcctgtgctcaaagccatgtttttggctgacacccatttgcttggggaattcctaggccactggctggacaaattacgaagggaatggcagatggagagagcgttccagacagctctgtggttgctgcagccggaagtcgtcttcatcctgggggatatctttgatgaagggaagtggagcacccctgaggcctgggcggatgatgtggagcggtttcagaaaatgttcagacacccaagtcatgtacagctgaaggtagttgctggaaaccatgacattggcttccattatgagatgaacacatacaaagtagaacgctttgagaaagtgttcagctctgaaagactgttttcttggaaaggcattaactttgtgatggtcaacagcgtggcgctgaacggggatggctgtggcatctgctctgaaacagaagcagagctcattgaagtttctcacagactgaactgctcccgagaggtaggagagcatctgaatgccacaggtgccttctgtcccgtgttgctccgcttcggttgctcactcagccccctagcgcttcttgccctttgatgagggtcaggtgtgcggattaatggcctgacttgtacccagcaggcacgtggctccagccggtgtggacctgggcctctgctgcccacgtctgcccctgtcctcctgcaggtgagctgggggaggaaagggctcatggcagacagcaggcagcctgtggtttcacgatagccgcctgaactcctctctccaccccggacagcattatcctctgtatcggagaagtgatgctaactgttctggggaagacgctgctcctgcagaggaaagggacatcccatttaaggagaactatgacgtgctttcacgggaggcatcacaaaaggtttgccagggtgtcgtgatgctaattcatgtcacagtgtgactctcatcaccttgcatgtcaacaagcagagtgcccaggctagagcaggtgtttgctgaaacgttcatgacttagttatcacctggggggacaggggtggaggcctggctttcacagtatctcagattttcatttaatcgctttttttttttccagtaaacctacttctgtttcctaccctcaagtcagtaatagtctcagctattctttgtattcagagtttttcaccaacttaaatgtatttagaaatgtgaatggaactgaaaagtcaattttttagggacttaattaaaattaaaatgcattttcttatatagatttatataatacatattacattatacataatatataaatataagaaatatttataagataaatgtataaaatatttataaagataaaataccgtaaaaagtatataaaatctgggatgagaacaaagggctgaccttacctttgatttagtgtaaataaaccaaaggatttttaaggaaaaaaataaaccagtccttcaaaataaggatttagtatgtaatttaaggaaagaagcgatggccagcggccgtcctgctgagcggtgagagcctggttgaggatgagctaacagcctgctttgctgtcttctcggccactgtcagctgctgtggtggctccagccgcgcctggttctcagtggccacacgcacagcgcctgcgaggtgcaccacgggggccgagtccccgagctcagcgtcccatctttcagttggaggaacagaaacaaccccagtttcatcatgggaacagatgcttagttgagcatcaaggggcaggaagacacctttccctccttgttcctcgctgaccgatgaccctggaactccacggtgcctctctgaatctctgttatggatcccccactatatttgatgggaacccagtgagccaggggccagttttgacagggtagcatcacgcccacagactacaccctctccaagtgctacctcccacgtgaggatgtggttttgatcatctactgtggagtggtgggcttccttgtggtcctcacactcactcactttgggcttctagcctcaccttttctttctggtttgaacttgctcggaaagcgtaagacaagatgaagagcaggcgccattataaatatcaaagcccaagaaatggaactttgggcagagatcatgttagaatcaagtggatgatgagaccaattacaggccgtctctctgcacagcacagaaattctcaatcactgaaatgagtaactgcaaaataaatagttgattgtactgttctcatgctataaaagtggacaggtactctacaacaaatctgttttctcatttttatcaaatatatgtatcatcaaaggttgcatctgtacagtatgtaaatgctattaatgtcgtcactcacatgcacgacagtccttgttcccccaggaagggcctggtggccccagcacacacttgggattatgtgtatacataaataaatattgggctgtttccctcttcctgtgaagtggttctcaaattcctatgtactgtaaagctgtacccttaaaagtacagatgtggccgggcacagtggctcacacctgtaatcccagcactttgggaggctgaggcgggtggatcacttgaggtcaggagttcaagaccagcctggccaacatggtgaaacctcgtctccgctagaaatacaaaaattagccaagcatggtagcaagtgcctataataccagctgaggctgaggcaggagaatcccttgagcccgggaggcggaggttgcagtgagccaagatcatgccactgcactccagcctgggcaacagagtgagactccgtctcaaaaaatatatttaaaaaaaaaaaagtacagatgtgatgtgcagaacatattgttttcgtagatttttatacttgatcaattaatggaatcagatttttagataagtgtaattttctctataggagaccacgttgctacatctgttaatgcctgtcagtgatcaaaagaaacttaaaaagtggaatgggatatggcttttggtacctgaaaataaatgctttaataattgtaagccagataaaagttattctttttgttttttttcttaacagtctggctgttgtttgaattaaactcttaaacaggatgtttagttagagggtaattgttgagtaatgatgcatacaacagcatacttccctttcttgctgggggtgcagcttttcagttttcttgttttactttgacagtgcaaggggaactgaaaataatttccattgtattatttatcttagttcagctgagggctttatgagacagtggatggggaggcagtaagacggtgatgagataaaatgtgtgtgttgcactgactgtctataaagttatcctttcttcatgaaaaagtagcatttaaatctggatgagtttataaaggattacaaaatgctgatttatagagtaaactttaaaatattaaagactaaagactaaaagaagagtaataatgaagtaatgtaggctgtcacttctctagatttgtattgttgaaaatttaactttggacatctttatagattattattttagacctacaaaaactaccctcaactctgtggctacagctagaatatgaagcatcattgctacaccagttcttactttctagatattgttggtgtgtcataatgtttgaggctgtatttgtaagtcttgcaagtgtgagaaagagccgtatcttttgactttatacttcagattaaggttttgtaatgtttcttcttcaaaaggcaagtgaagctgtcatcctcattctcctaggccagacacaaacattgacacgtcaaggtttttttttttttttttttttggcctgagtctcactttgatgtccaggctggagtgcgatggcacgacctcggctcactgcaat

SEQ ID NO: 23687 - DNA, 4523 bp, Homo sapiens
ctgggtgcgcgccggctccggctgcagttcccgggtccctcggccaccgaagccaccctgccctggtgaaagggctcccgcaccgcccggtgctccccatctgcctggcgttgtgcgcagagctggaaagcatggctgttataaatgaattctgattttggggagcagatgccaacttagagcctcgtaccaatctctctgtctttaaaagatgaggtgacttggtgattttcctggaaaattatagaggctctccagcagagaacccaggcccttcaccatactggtgcatggttcctgccacttgtgcagtccattccgaagtttcttacagatgaggtgcccagctaagacctgaatgccatcaccctccccagggctctgcagttttctcgtggtgaacccttgatggatttgttgttgcttgagaaatggcgatgatcgaattggggtttggaagacagaattttcatccattaaagaggaagagttcattgctgttgaaactcatagctgttgtctttgctgtgcttctattttgtgaatttttaatctattacttagcgatctttcagtgtaattggcctgaagtgaaaaccacagcctctgatggtgaacagaccacacgtgagcctgtgctcaaagccatgtttttggctgacacccatttgcttggggaattcctaggccactggctggacaaattacgaagggaatggcagatggagagagcgttccagacagctctgtggttgctgcagccggaagtcgtcttcatcctgggggatatctttgatgaagggaagtggagcacccctgaggcctgggcggatgatgtggagcggtttcagaaaatgttcagacacccaagtcatgtacagctgaaggtagttgctggaaaccatgacattggcttccattatgagatgaacacatacaaagtagaacgctttgagaaagtgttcagctctgaaagactgttttcttggaaaggcattaactttgtgatggtcaacagcgtggcgctgaacggggatggctgtggcatctgctctgaaacagaagcagagctcattgaagtttctcacagactgaactgctcccgagaggtaggagagcatctgaatgccacaggtgccttctgtcccgtgttgctccgcttcggttgctcactcagccccctagcgcttcttgccctttgatgagggtcaggtgtgcggattaatggcctgacttgtacccagcaggcacgtggctccagccggtgtggacctgggcctctgctgcccacgtctgcccctgtcctcctgcaggtgagctgggggaggaaagggctcatggcagacagcaggcagcctgtggtttcacgatagccgcctgaactcctctctccaccccggacagcattatcctctgtatcggagaagtgatgctaactgttctggggaagacgctgctcctgcagaggaaagggacatcccatttaaggagaactatgacgtgctttcacgggaggcatcacaaaaggtttgccagggtgtcgtgatgctaattcatgtcacagtgtgactctcatcaccttgcatgtcaacaagcagagtgcccaggctagagcaggtgtttgctgaaacgttcatgacttagttatcacctggggggacaggggtggaggcctggctttcacagtatctcagattttcatttaatcgctttttttttttccagtaaacctacttctgtttcctaccctcaagtcagtaatagtctcagctattctttgtattcagagtttttcaccaacttaaatgtatttagaaatgtgaatggaactgaaaagtcaattttttagggacttaattaaaattaaaatgcattttcttatatagatttatataatacatattacattatacataatatataaatataagaaatatttataagataaatgtataaaatatttataaagataaaataccgtaaaaagtatataaaatctgggatgagaacaaagggctgaccttacctttgatttagtgtaaataaaccaaaggatttttaaggaaaaaaataaaccagtccttcaaaataaggatttagtatgtaatttaaggaaagaagcgatggccagcggccgtcctgctgagcggtgagagcctggttgaggatgagctaacagcctgctttgctgtcttctcggccactgtcagctgctgtggtggctccagccgcgcctggttctcagtggccacacgcacagcgcctgcgaggtgcaccacgggggccgagtccccgagctcagcgtcccatctttcagttggaggaacagaaacaaccccagtttcatcatgggaacagatgcttagttgagcatcaaggggcaggaagacacctttccctccttgttcctcgctgaccgatgaccctggaactccacggtgcctctctgaatctctgttatggatcccccactatatttgatgggaacccagtgagccaggggccagttttgacagggtagcatcacgcccacagactacaccctctccaagtgctacctcccacgtgaggatgtggttttgatcatctactgtggagtggtgggcttccttgtggtcctcacactcactcactttgggcttctagcctcaccttttctttctggtttgaacttgctcggaaagcgtaagacaagatgaagagcaggcgccattataaatatcaaagcccaagaaatggaactttgggcagagatcatgttagaatcaagtggatgatgagaccaattacaggccgtctctctgcacagcacagaaattctcaatcactgaaatgagtaactgcaaaataaatagttgattgtactgttctcatgctataaaagtggacaggtactctacaacaaatctgttttctcatttttatcaaatatatgtatcatcaaaggttgcatctgtacagtatgtaaatgctattaatgtcgtcactcacatgcacgacagtccttgttcccccaggaagggcctggtggccccagcacacacttgggattatgtgtatacataaataaatattgggctgtttccctcttcctgtgaagtggttctcaaattcctatgtactgtaaagctgtacccttaaaagtacagatgtggccgggcacagtggctcacacctgtaatcccagcactttgggaggctgaggcgggtggatcacttgaggtcaggagttcaagaccagcctggccaacatggtgaaacctcgtctccgctagaaatacaaaaattagccaagcatggtagcaagtgcctataataccagctgaggctgaggcaggagaatcccttgagcccgggaggcggaggttgcagtgagccaagatcatgccactgcactccagcctgggcaacagagtgagactccgtctcaaaaaatatatttaaaaaaaaaaaagtacagatgtgatgtgcagaacatattgttttcgtagatttttatacttgatcaattaatggaatcagatttttagataagtgtaattttctctataggagaccacgttgctacatctgttaatgcctgtcagtgatcaaaagaaacttaaaaagtggaatgggatatggcttttggtacctgaaaataaatgctttaataattgtaagccagataaaagttattctttttgttttttttcttaacagtctggctgttgtttgaattaaactcttaaacaggatgtttagttagagggtaattgttgagtaatgatgcatacaacagcatacttccctttcttgctgggggtgcagcttttcagttttcttgttttactttgacagtgcaaggggaactgaaaataatttccattgtattatttatcttagttcagctgagggctttatgagacagtggatggggaggcagtaagacggtgatgagataaaatgtgtgtgttgcactgactgtctataaagttatcctttcttcatgaaaaagtagcatttaaatctggatgagtttataaaggattacaaaatgctgatttatagagtaaactttaaaatattaaagactaaagactaaaagaagagtaataatgaagtaatgtaggctgtcacttctctagatttgtattgttgaaaatttaactttggacatctttatagattattattttagacctacaaaaactaccctcaactctgtggctacagctagaatatgaagcatcattgctacaccagttcttactttctagatattgttggtgtgtcataatgtttgaggctgtatttgtaagtcttgcaagtgtgagaaagagccgtatcttttgactttatacttcagattaaggttttgtaatgtttcttcttcaaaaggcaagtgaagctgtcatcctcattctcctaggccagacacaaacattgacacgtcaaggtttttttttttttttttttttggcctgagtctcactttgatgtccaggctggagtgcgatggcacgacctcggctcactgcaat

SEQ ID NO: 23688 - DNA, 4324 bp, Homo sapiens
ctgggtgcgcgccggctccggctgcagttcccgggtccctcggccaccgaagccaccctgccctggtgaaagggctcccgcaccgcccggtgctccccatctgcctggcgttgtgcgcagagctggaaagcatggctgttgtgcccagctaagacctgaatgccatcaccctccccagggctctgcagttttctcgtggtgaacccttgatggatttgttgttgcttgagaaatggcgatgatcgaattggggtttggaagacagaattttcatccattaaagaggaagagttcattgctgttgaaactcatagctgttgtctttgctgtgcttctattttgtgaatttttaatctattacttagcgatctttcagtgtaattggcctgaagtgaaaaccacagcctctgatggtgaacagaccacacgtgagcctgtgctcaaagccatgtttttggctgacacccatttgcttggggaattcctaggccactggctggacaaattacgaagggaatggcagatggagagagcgttccagacagctctgtggttgctgcagccggaagtcgtcttcatcctgggggatatctttgatgaagggaagtggagcacccctgaggcctgggcggatgatgtggagcggtttcagaaaatgttcagacacccaagtcatgtacagctgaaggtagttgctggaaaccatgacattggcttccattatgagatgaacacatacaaagtagaacgctttgagaaagtgttcagctctgaaagactgttttcttggaaaggcattaactttgtgatggtcaacagcgtggcgctgaacggggatggctgtggcatctgctctgaaacagaagcagagctcattgaagtttctcacagactgaactgctcccgagaggtaggagagcatctgaatgccacaggtgccttctgtcccgtgttgctccgcttcggttgctcactcagccccctagcgcttcttgccctttgatgagggtcaggtgtgcggattaatggcctgacttgtacccagcaggcacgtggctccagccggtgtggacctgggcctctgctgcccacgtctgcccctgtcctcctgcaggtgagctgggggaggaaagggctcatggcagacagcaggcagcctgtggtttcacgatagccgcctgaactcctctctccaccccggacagcattatcctctgtatcggagaagtgatgctaactgttctggggaagacgctgctcctgcagaggaaagggacatcccatttaaggagaactatgacgtgctttcacgggaggcatcacaaaaggtttgccagggtgtcgtgatgctaattcatgtcacagtgtgactctcatcaccttgcatgtcaacaagcagagtgcccaggctagagcaggtgtttgctgaaacgttcatgacttagttatcacctggggggacaggggtggaggcctggctttcacagtatctcagattttcatttaatcgctttttttttttccagtaaacctacttctgtttcctaccctcaagtcagtaatagtctcagctattctttgtattcagagtttttcaccaacttaaatgtatttagaaatgtgaatggaactgaaaagtcaattttttagggacttaattaaaattaaaatgcattttcttatatagatttatataatacatattacattatacataatatataaatataagaaatatttataagataaatgtataaaatatttataaagataaaataccgtaaaaagtatataaaatctgggatgagaacaaagggctgaccttacctttgatttagtgtaaataaaccaaaggatttttaaggaaaaaaataaaccagtccttcaaaataaggatttagtatgtaatttaaggaaagaagcgatggccagcggccgtcctgctgagcggtgagagcctggttgaggatgagctaacagcctgctttgctgtcttctcggccactgtcagctgctgtggtggctccagccgcgcctggttctcagtggccacacgcacagcgcctgcgaggtgcaccacgggggccgagtccccgagctcagcgtcccatctttcagttggaggaacagaaacaaccccagtttcatcatgggaacagatgcttagttgagcatcaaggggcaggaagacacctttccctccttgttcctcgctgaccgatgaccctggaactccacggtgcctctctgaatctctgttatggatcccccactatatttgatgggaacccagtgagccaggggccagttttgacagggtagcatcacgcccacagactacaccctctccaagtgctacctcccacgtgaggatgtggttttgatcatctactgtggagtggtgggcttccttgtggtcctcacactcactcactttgggcttctagcctcaccttttctttctggtttgaacttgctcggaaagcgtaagacaagatgaagagcaggcgccattataaatatcaaagcccaagaaatggaactttgggcagagatcatgttagaatcaagtggatgatgagaccaattacaggccgtctctctgcacagcacagaaattctcaatcactgaaatgagtaactgcaaaataaatagttgattgtactgttctcatgctataaaagtggacaggtactctacaacaaatctgttttctcatttttatcaaatatatgtatcatcaaaggttgcatctgtacagtatgtaaatgctattaatgtcgtcactcacatgcacgacagtccttgttcccccaggaagggcctggtggccccagcacacacttgggattatgtgtatacataaataaatattgggctgtttccctcttcctgtgaagtggttctcaaattcctatgtactgtaaagctgtacccttaaaagtacagatgtggccgggcacagtggctcacacctgtaatcccagcactttgggaggctgaggcgggtggatcacttgaggtcaggagttcaagaccagcctggccaacatggtgaaacctcgtctccgctagaaatacaaaaattagccaagcatggtagcaagtgcctataataccagctgaggctgaggcaggagaatcccttgagcccgggaggcggaggttgcagtgagccaagatcatgccactgcactccagcctgggcaacagagtgagactccgtctcaaaaaatatatttaaaaaaaaaaaagtacagatgtgatgtgcagaacatattgttttcgtagatttttatacttgatcaattaatggaatcagatttttagataagtgtaattttctctataggagaccacgttgctacatctgttaatgcctgtcagtgatcaaaagaaacttaaaaagtggaatgggatatggcttttggtacctgaaaataaatgctttaataattgtaagccagataaaagttattctttttgttttttttcttaacagtctggctgttgtttgaattaaactcttaaacaggatgtttagttagagggtaattgttgagtaatgatgcatacaacagcatacttccctttcttgctgggggtgcagcttttcagttttcttgttttactttgacagtgcaaggggaactgaaaataatttccattgtattatttatcttagttcagctgagggctttatgagacagtggatggggaggcagtaagacggtgatgagataaaatgtgtgtgttgcactgactgtctataaagttatcctttcttcatgaaaaagtagcatttaaatctggatgagtttataaaggattacaaaatgctgatttatagagtaaactttaaaatattaaagactaaagactaaaagaagagtaataatgaagtaatgtaggctgtcacttctctagatttgtattgttgaaaatttaactttggacatctttatagattattattttagacctacaaaaactaccctcaactctgtggctacagctagaatatgaagcatcattgctacaccagttcttactttctagatattgttggtgtgtcataatgtttgaggctgtatttgtaagtcttgcaagtgtgagaaagagccgtatcttttgactttatacttcagattaaggttttgtaatgtttcttcttcaaaaggcaagtgaagctgtcatcctcattctcctaggccagacacaaacattgacacgtcaaggtttttttttttttttttttttggcctgagtctcactttgatgtccaggctggagtgcgatggcacgacctcggctcactgcaat

SEQ ID NO: 23689 - DNA, 5063 bp, Homo sapiens
ctgggtgcgcgccggctccggctgcagttcccgggtccctcggccaccgaagccaccctgccctggtgaaagggctcccgcaccgcccggtgctccccatctgcctggcgttgtgcgcagagctggaaagcatggctgttataaatgaattctgattttggggagcagatgccaacttagagcctcgtaccaatctctctgtctttaaaagatgaggtgacttggtgattttcctggaaaattataggtgcccagctaagacctgaatgccatcaccctccccagggctctgcagttttctcgtggtgaacccttgatggatttgttgttgcttgagaaatggcgatgatcgaattggggtttggaagacagaattttcatccattaaagaggaagagttcattgctgttgaaactcatagctgttgtctttgctgtgcttctattttgtgaatttttaatctattacttagcgatctttcagtgtaattggcctgaagtgaaaaccacagcctctgatggtgaacagaccacacgtgagcctgtgctcaaagccatgtttttggctgacacccatttgcttggggaattcctaggccactggctggacaaattacgaagggaatggcagatggagagagcgttccagacagctctgtggttgctgcagccggaagtcgtcttcatcctgggggatatctttgatgaagggaagtggagcacccctgaggcctgggcggatgatgtggagcggtttcagaaaatgttcagacacccaagtcatgtacagctgaaggtagttgctggaaaccatgacattggcttccattatgagatgaacacatacaaagtagaacgctttgagaaagtgttcagctctgaaagactgttttcttggaaaggcattaactttgtgatggtcaacagcgtggcgctgaacggggatggctgtggcatctgctctgaaacagaagcagagctcattgaagtttctcacagactgaactgctcccgagaggtaggagagcatctgaatgccacaggtgccttctgtcccgtgttgctccgcttcggttgctcactcagccccctagcgcttcttgccctttgatgagggtcaggtgtgcggattaatggcctgacttgtacccagcaggcacgtggctccagccggtgtggacctgggcctctgctgcccacgtctgcccctgtcctcctgcaggtgagctgggggaggaaagggctcatggcagacagcaggcagcctgtggtttcacgatagccgcctgaactcctctctccaccccggacagcattatcctctgtatcggagaagtgatgctaactgttctggggaagacgctgctcctgcagaggaaagggacatcccatttaaggagaactatgacgtgctttcacgggaggcatcacaaaaggtttgccagggtgtcgtgatgctaattcatgtcacagtgtgactctcatcaccttgcatgtcaacaagcagagtgcccaggctagagcaggtgtttgctgaaacgttcatgacttagttatcacctggggggacaggggtggaggcctggctttcacagtatctcagattttcatttaatcgctttttttttttccagtaaacctacttctgtttcctaccctcaagtcagtaatagtctcagctattctttgtattcagagtttttcaccaacttaaatgtatttagaaatgtgaatggaactgaaaagtcaattttttagggacttaattaaaattaaaatgcattttcttatatagatttatataatacatattacattatacataatatataaatataagaaatatttataagataaatgtataaaatatttataaagataaaataccgtaaaaagtatataaaatctgggatgagaacaaagggctgaccttacctttgatttagtgtaaataaaccaaaggatttttaaggaaaaaaataaaccagtccttcaaaataaggatttagtatgtaatttaaggaaagaagcgatggccagcggccgtcctgctgagcggtgagagcctggttgaggatgagctaacagcctgctttgctgtcttctcggccactgtcagctgctgtggtggctccagccgcgcctggttctcagtggccacacgcacagcgcctgcgaggtgcaccacgggggccgagtccccgagctcagcgtcccatctttcagttggaggaacagaaacaaccccagtttcatcatggtaacgtgaaagtttatttttgtctgaaagctttcataagtatttaaatcaacacagtaatcaactatttaattgctgcaatcggtcaaaatttacaaaagccacacacaaatttctctccttctacacgtagctccatacactgccccttgccaaacacccttccgggaaccaatcagcatgacattcctgggcagttaatgtgagaagcgagggcagggcaccgtccaggtggactttatccttcagggagggccgtatcctctcctcttacactctgtgtgtgtttaattttctaaagaaacaaccatttattcattagctatactcagccatcttctcttattttctaaacatgcccatttgacctggcagagaacgctgcagcttttgcaggttgataaaagatgtttcacttaatgaccactgggcgttttaactcctttcagccatgggctcctgcatccagctcatgatgctggtacgacaggttcttttacttcataaaaaggtggaggaaaccctaacattttcaaattcaaagtaaatgaaaacatttgccactgttgttccacataaaagtatctgcaaagaaaagcccatggagacgacctggacacatgtatttctagggaacagatgcttagttgagcatcaaggggcaggaagacacctttccctccttgttcctcgctgaccgatgaccctggaactccacggtgcctctctgaatctctgttatggatcccccactatatttgatgggaacccagtgagccaggggccagttttgacagggtagcatcacgcccacagactacaccctctccaagtgctacctcccacgtgaggatgtggttttgatcatctactgtggagtggtgggcttccttgtggtcctcacactcactcactttgggcttctagcctcaccttttctttctggtttgaacttgctcggaaagcgtaagacaagatgaagagcaggcgccattataaatatcaaagcccaagaaatggaactttgggcagagatcatgttagaatcaagtggatgatgagaccaattacaggccgtctctctgcacagcacagaaattctcaatcactgaaatgagtaactgcaaaataaatagttgattgtactgttctcatgctataaaagtggacaggtactctacaacaaatctgttttctcatttttatcaaatatatgtatcatcaaaggttgcatctgtacagtatgtaaatgctattaatgtcgtcactcacatgcacgacagtccttgttcccccaggaagggcctggtggccccagcacacacttgggattatgtgtatacataaataaatattgggctgtttccctcttcctgtgaagtggttctcaaattcctatgtactgtaaagctgtacccttaaaagtacagatgtggccgggcacagtggctcacacctgtaatcccagcactttgggaggctgaggcgggtggatcacttgaggtcaggagttcaagaccagcctggccaacatggtgaaacctcgtctccgctagaaatacaaaaattagccaagcatggtagcaagtgcctataataccagctgaggctgaggcaggagaatcccttgagcccgggaggcggaggttgcagtgagccaagatcatgccactgcactccagcctgggcaacagagtgagactccgtctcaaaaaatatatttaaaaaaaaaaaagtacagatgtgatgtgcagaacatattgttttcgtagatttttatacttgatcaattaatggaatcagatttttagataagtgtaattttctctataggagaccacgttgctacatctgttaatgcctgtcagtgatcaaaagaaacttaaaaagtggaatgggatatggcttttggtacctgaaaataaatgctttaataattgtaagccagataaaagttattctttttgttttttttcttaacagtctggctgttgtttgaattaaactcttaaacaggatgtttagttagagggtaattgttgagtaatgatgcatacaacagcatacttccctttcttgctgggggtgcagcttttcagttttcttgttttactttgacagtgcaaggggaactgaaaataatttccattgtattatttatcttagttcagctgagggctttatgagacagtggatggggaggcagtaagacggtgatgagataaaatgtgtgtgttgcactgactgtctataaagttatcctttcttcatgaaaaagtagcatttaaatctggatgagtttataaaggattacaaaatgctgatttatagagtaaactttaaaatattaaagactaaagactaaaagaagagtaataatgaagtaatgtaggctgtcacttctctagatttgtattgttgaaaatttaactttggacatctttatagattattattttagacctacaaaaactaccctcaactctgtggctacagctagaatatgaagcatcattgctacaccagttcttactttctagatattgttggtgtgtcataatgtttgaggctgtatttgtaagtcttgcaagtgtgagaaagagccgtatcttttgactttatacttcagattaaggttttgtaatgtttcttcttcaaaaggcaagtgaagctgtcatcctcattctcctaggccagacacaaacattgacacgtcaaggtttttttttttttttttttttggcctgagtctcactttgatgtccaggctggagtgcgatggcacgacctcggctcactgcaat

SEQ ID NO: 23690 - DNA, 3354 bp, Homo sapiens
ctgggtgcgcgccggctccggctgcagttcccgggtccctcggccaccgaagccaccctgccctggtgaaagggctcccgcaccgcccggtgctccccatctgcctggcgttgtgcgcagagctggaaagcatggctgttataaatgaattctgattttggggagcagatgccaacttagagcctcgtaccaatctctctgtctttaaaagatgaggtgacttggtgattttcctggaaaattataggtgcccagctaagacctgaatgccatcaccctccccagggctctgcagttttctcgtggtgaacccttgatggatttgttgttgcttgagaaatggcgatgatcgaattggggtttggaagacagaattttcatccattaaagaggaagagttcattgctgttgaaactcatagctgttgtctttgctgtgcttctattttgtgaatttttaatctattacttagcgatctttcagtgtaattggcctgaagtgaaaaccacagcctctgatggtgaacagaccacacgtgagcctgtgctcaaagccatgtttttggctgacacccatttgcttggggaattcctaggccactggctggacaaattacgaagggaatggcagatggagagagcgttccagacagctctgtggttgctgcagccggaagtcgtcttcatcctgggggatatctttgatgaagggaagtggagcacccctgaggcctgggcggatgatgtggagcggtttcagaaaatgttcagacacccaagtcatgtacagctgaaggtagttgctggaaaccatgacattggcttccattatgagatgaacacatacaaagtagaacgctttgagaaagtgttcagctctgaaagactgttttcttggaaaggcattaactttgtgatggtcaacagcgtggcgctgaacggggatggctgtggcatctgctctgaaacagaagcagagctcattgaagtttctcacagactgaactgctcccgagaggcacgtggctccagccggtgtggacctgggcctctgctgcccacgtctgcccctgtcctcctgcagcattatcctctgtatcggagaagtgatgctaactgttctggggaagacgctgctcctgcagaggaaagggacatcccatttaaggagaactatgacgtgctttcacgggaggcatcacaaaagctgctgtggtggctccagccgcgcctggttctcagtggccacacgcacagcgcctgcgaggtgcaccacgggggccgagtccccgagctcagcgtcccatctttcagttggaggaacagaaacaaccccagtttcatcatgggtagcatcacgcccacagactacaccctctccaagtgctacctcccacgtgaggatgtggttttgatcatctactgtggagtggtgggcttccttgtggtcctcacactcactcactttgggcttctagcctcaccttttctttctggtttgaacttgctcggaaagcgtaagacaagatgaagagcaggcgccattataaatatcaaagcccaagaaatggaactttgggcagagatcatgttagaatcaagtggatgatgagaccaattacaggccgtctctctgcacagcacagaaattctcaatcactgaaatgagtaactgcaaaataaatagttgattgtactgttctcatgctataaaagtggacaggtactctacaacaaatctgttttctcatttttatcaaatatatgtatcatcaaaggttgcatctgtacagtatgtaaatgctattaatgtcgtcactcacatgcacgacagtccttgttcccccaggaagggcctggtggccccagcacacacttgggattatgtgtatacataaataaatattgggctgtttccctcttcctgtgaagtggttctcaaattcctatgtactgtaaagctgtacccttaaaagtacagatgtggccgggcacagtggctcacacctgtaatcccagcactttgggaggctgaggcgggtggatcacttgaggtcaggagttcaagaccagcctggccaacatggtgaaacctcgtctccgctagaaatacaaaaattagccaagcatggtagcaagtgcctataataccagctgaggctgaggcaggagaatcccttgagcccgggaggcggaggttgcagtgagccaagatcatgccactgcactccagcctgggcaacagagtgagactccgtctcaaaaaatatatttaaaaaaaaaaaagtacagatgtgatgtgcagaacatattgttttcgtagatttttatacttgatcaattaatggaatcagatttttagataagtgtaattttctctataggagaccacgttgctacatctgttaatgcctgtcagtgatcaaaagaaacttaaaaagtggaatgggatatggcttttggtacctgaaaataaatgctttaataattgtaagccagataaaagttattctttttgttttttttcttaacagtctggctgttgtttgaattaaactcttaaacaggatgtttagttagagggtaattgttgagtaatgatgcatacaacagcatacttccctttcttgctgggggtgcagcttttcagttttcttgttttactttgacagtgcaaggggaactgaaaataatttccattgtattatttatcttagttcagctgagggctttatgagacagtggatggggaggcagtaagacggtgatgagataaaatgtgtgtgttgcactgactgtctataaagttatcctttcttcatgaaaaagtagcatttaaatctggatgagtttataaaggattacaaaatgctgatttatagagtaaactttaaaatattaaagactaaagactaaaagaagagtaataatgaagtaatgtaggctgtcacttctctagatttgtattgttgaaaatttaactttggacatctttatagattattattttagacctacaaaaactaccctcaactctgtggctacagctagaatatgaagcatcattgctacaccagttcttactttctagatattgttggtgtgtcataatgtttgaggctgtatttgtaagtcttgcaagtgtgagaaagagccgtatcttttgactttatacttcagattaaggttttgtaatgtttcttcttcaaaaggcaagtgaagctgtcatcctcattctcctaggccagacacaaacattgacacgtcaaggtttttttttttttttttttttggcctgagtctcactttgatgtccaggctggagtgcgatggcacgacctcggctcactgcaat

SEQ ID NO: 23691 - DNA, 3519 bp, Homo sapiens
ctgggtgcgcgccggctccggctgcagttcccgggtccctcggccaccgaagccaccctgccctggtgaaagggctcccgcaccgcccggtgctccccatctgcctggcgttgtgcgcagagctggaaagcatggctgttataaatgaattctgattttggggagcagatgccaacttagagcctcgtaccaatctctctgtctttaaaagatgaggtgacttggtgattttcctggaaaattataggtgcccagctaagacctgaatgccatcaccctccccagggctctgcagttttctcgtggtgaacccttgatggatttgttgttgcttgagaaatggcgatgatcgaattggggtttggaagacagaattttcatccattaaagaggaagagttcattgctgttgaaactcatagctgttgtctttgctgtgcttctattttgtgaatttttaatctattacttagcgatctttcagtgtaattggcctgaagtgaaaaccacagcctctgatggtgaacagaccacacgtgagcctgtgctcaaagccatgtttttggctgacacccatttgcttggggaattcctaggccactggctggacaaattacgaagggaatggcagatggagagagcgttccagacagctctgtggttgctgcagccggaagtcgtcttcatcctgggggatatctttgatgaagggaagtggagcacccctgaggcctgggcggatgatgtggagcggtttcagaaaatgttcagacacccaagtcatgtacagctgaaggtagttgctggaaaccatgacattggcttccattatgagatgaacacatacaaagtagaacgctttgagaaagtgttcagctctgaaagactgttttcttggaaaggcattaactttgtgatggtcaacagcgtggcgctgaacggggatggctgtggcatctgctctgaaacagaagcagagctcattgaagtttctcacagactgaactgctcccgagaggcacgtggctccagccggtgtggacctgggcctctgctgcccacgtctgcccctgtcctcctgcagcattatcctctgtatcggagaagtgatgctaactgttctggggaagacgctgctcctgcagaggaaagggacatcccatttaaggagaactatgacgtgctttcacgggaggcatcacaaaagctgctgtggtggctccagccgcgcctggttctcagtggccacacgcacagcgcctgcgaggtgcaccacgggggccgagtccccgagctcagcgtcccatctttcagttggaggaacagaaacaaccccagtttcatcatgggaacagatgcttagttgagcatcaaggggcaggaagacacctttccctccttgttcctcgctgaccgatgaccctggaactccacggtgcctctctgaatctctgttatggatcccccactatatttgatgggaacccagtgagccaggggccagttttgacagggtagcatcacgcccacagactacaccctctccaagtgctacctcccacgtgaggatgtggttttgatcatctactgtggagtggtgggcttccttgtggtcctcacactcactcactttgggcttctagcctcaccttttctttctggtttgaacttgctcggaaagcgtaagacaagatgaagagcaggcgccattataaatatcaaagcccaagaaatggaactttgggcagagatcatgttagaatcaagtggatgatgagaccaattacaggccgtctctctgcacagcacagaaattctcaatcactgaaatgagtaactgcaaaataaatagttgattgtactgttctcatgctataaaagtggacaggtactctacaacaaatctgttttctcatttttatcaaatatatgtatcatcaaaggttgcatctgtacagtatgtaaatgctattaatgtcgtcactcacatgcacgacagtccttgttcccccaggaagggcctggtggccccagcacacacttgggattatgtgtatacataaataaatattgggctgtttccctcttcctgtgaagtggttctcaaattcctatgtactgtaaagctgtacccttaaaagtacagatgtggccgggcacagtggctcacacctgtaatcccagcactttgggaggctgaggcgggtggatcacttgaggtcaggagttcaagaccagcctggccaacatggtgaaacctcgtctccgctagaaatacaaaaattagccaagcatggtagcaagtgcctataataccagctgaggctgaggcaggagaatcccttgagcccgggaggcggaggttgcagtgagccaagatcatgccactgcactccagcctgggcaacagagtgagactccgtctcaaaaaatatatttaaaaaaaaaaaagtacagatgtgatgtgcagaacatattgttttcgtagatttttatacttgatcaattaatggaatcagatttttagataagtgtaattttctctataggagaccacgttgctacatctgttaatgcctgtcagtgatcaaaagaaacttaaaaagtggaatgggatatggcttttggtacctgaaaataaatgctttaataattgtaagccagataaaagttattctttttgttttttttcttaacagtctggctgttgtttgaattaaactcttaaacaggatgtttagttagagggtaattgttgagtaatgatgcatacaacagcatacttccctttcttgctgggggtgcagcttttcagttttcttgttttactttgacagtgcaaggggaactgaaaataatttccattgtattatttatcttagttcagctgagggctttatgagacagtggatggggaggcagtaagacggtgatgagataaaatgtgtgtgttgcactgactgtctataaagttatcctttcttcatgaaaaagtagcatttaaatctggatgagtttataaaggattacaaaatgctgatttatagagtaaactttaaaatattaaagactaaagactaaaagaagagtaataatgaagtaatgtaggctgtcacttctctagatttgtattgttgaaaatttaactttggacatctttatagattattattttagacctacaaaaactaccctcaactctgtggctacagctagaatatgaagcatcattgctacaccagttcttactttctagatattgttggtgtgtcataatgtttgaggctgtatttgtaagtcttgcaagtgtgagaaagagccgtatcttttgactttatacttcagattaaggttttgtaatgtttcttcttcaaaaggcaagtgaagctgtcatcctcattctcctaggccagacacaaacattgacacgtcaaggtttttttttttttttttttttggcctgagtctcactttgatgtccaggctggagtgcgatggcacgacctcggctcactgcaat

SEQ ID NO: 23692 - DNA, 3377 bp, Homo sapiens
cagtgattctttttccctcaggcctgggcggatgatgtggagcggtttcagaaaatgttcagacacccaagtcatgtacagctgaaggtagttgctggaaaccatgacattggcttccattatgagatgaacacatacaaagtagaacgctttgagaaagtgttcagctctgaaagactgttttcttggaaaggcattaactttgtgatggtcaacagcgtggcgctgaacggggatggctgtggcatctgctctgaaacagaagcagagctcattgaagtttctcacagactgaactgctcccgagagcattatcctctgtatcggagaagtgatgctaactgttctggggaagacgctgctcctgcagaggaaagggacatcccatttaaggagaactatgacgtgctttcacgggaggcatcacaaaagctgctgtggtggctccagccgcgcctggttctcagtggccacacgcacagcgcctgcgaggtgcaccacgggggccgagtccccgagctcagcgtcccatctttcagttggaggaacagaaacaaccccagtttcatcatggtaacgtgaaagtttatttttgtctgaaagctttcataagtatttaaatcaacacagtaatcaactatttaattgctgcaatcggtcaaaatttacaaaagccacacacaaatttctctccttctacacgtagctccatacactgccccttgccaaacacccttccgggaaccaatcagcatgacattcctgggcagttaatgtgagaagcgagggcagggcaccgtccaggtggactttatccttcagggagggccgtatcctctcctcttacactctgtgtgtgtttaattttctaaagaaacaaccatttattcattagctatactcagccatcttctcttattttctaaacatgcccatttgacctggcagagaacgctgcagcttttgcaggttgataaaagatgtttcacttaatgaccactgggcgttttaactcctttcagccatgggctcctgcatccagctcatgatgctggtacgacaggttcttttacttcataaaaaggtggaggaaaccctaacattttcaaattcaaagtaaatgaaaacatttgccactgttgttccacataaaagtatctgcaaagaaaagcccatggagacgacctggacacatgtatttctagggaacagatgcttagttgagcatcaaggggcaggaagacacctttccctccttgttcctcgctgaccgatgaccctggaactccacggtgcctctctgaatctctgttatggatcccccactatatttgatgggaacccagtgagccaggggccagttttgacagggtagcatcacgcccacagactacaccctctccaagtgctacctcccacgtgaggatgtggttttgatcatctactgtggagtggtgggcttccttgtggtcctcacactcactcactttgggcttctagcctcaccttttctttctggtttgaacttgctcggaaagcgtaagacaagatgaagagcaggcgccattataaatatcaaagcccaagaaatggaactttgggcagagatcatgttagaatcaagtggatgatgagaccaattacaggccgtctctctgcacagcacagaaattctcaatcactgaaatgagtaactgcaaaataaatagttgattgtactgttctcatgctataaaagtggacaggtactctacaacaaatctgttttctcatttttatcaaatatatgtatcatcaaaggttgcatctgtacagtatgtaaatgctattaatgtcgtcactcacatgcacgacagtccttgttcccccaggaagggcctggtggccccagcacacacttgggattatgtgtatacataaataaatattgggctgtttccctcttcctgtgaagtggttctcaaattcctatgtactgtaaagctgtacccttaaaagtacagatgtggccgggcacagtggctcacacctgtaatcccagcactttgggaggctgaggcgggtggatcacttgaggtcaggagttcaagaccagcctggccaacatggtgaaacctcgtctccgctagaaatacaaaaattagccaagcatggtagcaagtgcctataataccagctgaggctgaggcaggagaatcccttgagcccgggaggcggaggttgcagtgagccaagatcatgccactgcactccagcctgggcaacagagtgagactccgtctcaaaaaatatatttaaaaaaaaaaaagtacagatgtgatgtgcagaacatattgttttcgtagatttttatacttgatcaattaatggaatcagatttttagataagtgtaattttctctataggagaccacgttgctacatctgttaatgcctgtcagtgatcaaaagaaacttaaaaagtggaatgggatatggcttttggtacctgaaaataaatgctttaataattgtaagccagataaaagttattctttttgttttttttcttaacagtctggctgttgtttgaattaaactcttaaacaggatgtttagttagagggtaattgttgagtaatgatgcatacaacagcatacttccctttcttgctgggggtgcagcttttcagttttcttgttttactttgacagtgcaaggggaactgaaaataatttccattgtattatttatcttagttcagctgagggctttatgagacagtggatggggaggcagtaagacggtgatgagataaaatgtgtgtgttgcactgactgtctataaagttatcctttcttcatgaaaaagtagcatttaaatctggatgagtttataaaggattacaaaatgctgatttatagagtaaactttaaaatattaaagactaaagactaaaagaagagtaataatgaagtaatgtaggctgtcacttctctagatttgtattgttgaaaatttaactttggacatctttatagattattattttagacctacaaaaactaccctcaactctgtggctacagctagaatatgaagcatcattgctacaccagttcttactttctagatattgttggtgtgtcataatgtttgaggctgtatttgtaagtcttgcaagtgtgagaaagagccgtatcttttgactttatacttcagattaaggttttgtaatgtttcttcttcaaaaggcaagtgaagctgtcatcctcattctcctaggccagacacaaacattgacacgtcaaggtttttttttttttttttttttggcctgagtctcactttgatgtccaggctggagtgcgatggcacgacctcggctcactgcaat

SEQ ID NO: 23693 - DNA, 2207 bp, Homo sapiens
gagctcggtaccccatcaaccctaaatttattatgggaacagatgcttagttgagcatcaaggggcaggaagacacctttccctccttgttcctcgctgaccgatgaccctggaactccacggtgcctctctgaatctctgttatggatcccccactatatttgatgggaacccagtgagccaggggccagttttgacagggtagcatcacgcccacagactacaccctctccaagtgctacctcccacgtgaggatgtggttttgatcatctactgtggagtggtgggcttccttgtggtcctcacactcactcactttgggcttctagcctcaccttttctttctggtttgaacttgctcggaaagcgtaagacaagatgaagagcaggcgccattataaatatcaaagcccaagaaatggaactttgggcagagatcatgttagaatcaagtggatgatgagaccaattacaggccgtctctctgcacagcacagaaattctcaatcactgaaatgagtaactgcaaaataaatagttgattgtactgttctcatgctataaaagtggacaggtactctacaacaaatctgttttctcatttttatcaaatatatgtatcatcaaaggttgcatctgtacagtatgtaaatgctattaatgtcgtcactcacatgcacgacagtccttgttcccccaggaagggcctggtggccccagcacacacttgggattatgtgtatacataaataaatattgggctgtttccctcttcctgtgaagtggttctcaaattcctatgtactgtaaagctgtacccttaaaagtacagatgtggccgggcacagtggctcacacctgtaatcccagcactttgggaggctgaggcgggtggatcacttgaggtcaggagttcaagaccagcctggccaacatggtgaaacctcgtctccgctagaaatacaaaaattagccaagcatggtagcaagtgcctataataccagctgaggctgaggcaggagaatcccttgagcccgggaggcggaggttgcagtgagccaagatcatgccactgcactccagcctgggcaacagagtgagactccgtctcaaaaaatatatttaaaaaaaaaaaagtacagatgtgatgtgcagaacatattgttttcgtagatttttatacttgatcaattaatggaatcagatttttagataagtgtaattttctctataggagaccacgttgctacatctgttaatgcctgtcagtgatcaaaagaaacttaaaaagtggaatgggatatggcttttggtacctgaaaataaatgctttaataattgtaagccagataaaagttattctttttgttttttttcttaacagtctggctgttgtttgaattaaactcttaaacaggatgtttagttagagggtaattgttgagtaatgatgcatacaacagcatacttccctttcttgctgggggtgcagcttttcagttttcttgttttactttgacagtgcaaggggaactgaaaataatttccattgtattatttatcttagttcagctgagggctttatgagacagtggatggggaggcagtaagacggtgatgagataaaatgtgtgtgttgcactgactgtctataaagttatcctttcttcatgaaaaagtagcatttaaatctggatgagtttataaaggattacaaaatgctgatttatagagtaaactttaaaatattaaagactaaagactaaaagaagagtaataatgaagtaatgtaggctgtcacttctctagatttgtattgttgaaaatttaactttggacatctttatagattattattttagacctacaaaaactaccctcaactctgtggctacagctagaatatgaagcatcattgctacaccagttcttactttctagatattgttggtgtgtcataatgtttgaggctgtatttgtaagtcttgcaagtgtgagaaagagccgtatcttttgactttatacttcagattaaggttttgtaatgtttcttcttcaaaaggcaagtgaagctgtcatcctcattctcctaggccagacacaaacattgacacgtcaaggtttttttttttttttttttttggcctgagtctcactttgatgtccaggctggagtgcgatggcacgacctcggctcactgcaat

SEQ ID NO: 23694 - DNA, 729 bp, Homo sapiens
ctgggtgcgcgccggctccggctgcagttcccgggtccctcggccaccgaagccaccctgccctggtgaaagggctcccgcaccgcccggtgctccccatctgcctggcgttgtgcgcagagctggaaagcatggctgttataaatgaattctgattttggggagcagatgccaacttagagcctcgtaccaatctctctgtctttaaaagatgaggtgacttggtgattttcctggaaaattatagaagcactgaggtggacactgcgggttgtgaggttcaggaggggtaagtggctggcacaaggtcacagagcagcgctgccatttggctactttccaattcagcatagctgccctctctgctggtggtattcacagcatgcaagataaaatactcaccaaggaacaagtggctaactcctcacagagctctcacggtttcctctttcctgacaaaaagaatattaatgaaactttatcatcttggtgagaaaagcattctaatagctttattctgacatacggaggtatggagagcttgaaggagtcagagaggtgcccagctaagacctgaatgccatcaccctccccagggctctgcagttttctcgtggtgaacccttgatggatttgttgttgcttgagaaatggcgatgatcgaattggggtttggaagacagaattttcatccattaaagaggaagagttcattgctgttgaaactca

SEQ ID NO: 23695 - DNA, 421 bp, Homo sapiens
agtttcagctatggttttgggtttagcttttaggattttaggagattctaggccttttgaaagaaaaatgagatagtaagatcgaatggctgcctttgacatatttgatttaatcacaacaaaggaaattgcctggcgttaaggaacctgttatttatccctcagaggctctccagcagagaacccaggcccttcaccatactggtgcatggttcctgccacttgtgcagtccattccgaagtttcttacagatgaggtgggtgactgcaaacaggcactgctgcttctcctctatgtcagagtaagcacaggcagcacagggtggctgcacatcctgagttgtctgggacagtcctggtttacaccattgccctgttttaatttttattagtgatatttttcactcaaagctgtccccag

SEQ ID NO: 23696 - DNA, 514 bp, Homo sapiens
ggtttgcatactggaagactcctcagcctgccccagaaggtcagcattccttccctctcaactagttctgtacagctggaggaaacataaggtgttagaaagtttcagctatggttttgggtttagcttttaggattttaggagattctaggccttttgaaagaaaaatgagatagtaagatcgaatggctgcctttgacatatttgatttaatcacaacaaaggaaattgcctggcgttaaggaacctgttatttatccctcagaggctctccagcagagaacccaggcccttcaccatactggtgcatggttcctgccacttgtgcagtccattccgaagtttcttacagatgaggtgggtgactgcaaacaggcactgctgcttctcctctatgtcagagtaagcacaggcagcacagggtggctgcacatcctgagttgtctgggacagtcctggtttacaccattgccctgttttaatttttattagtgatatttttcactcaaagctg

SEQ ID NO: 23697 - DNA, 4431 bp, Homo sapiens
ctgggtgcgcgccggctccggctgcagttcccgggtccctcggccaccgaagccaccctgccctggtgaaagggctcccgcaccgcccggtgctccccatctgcctggcgttgtgcgcagagctggaaagcatggctgttataaatgaattctgattttggggagcagatgccaacttagagcctcgtaccaatctctctgtctttaaaagatgaggtgacttggtgattttcctggaaaattataggtgcccagctaagacctgaatgccatcaccctccccagggctctgcagttttctcgtggtgaacccttgatggatttgttgttgcttgagaaatggcgatgatcgaattggggtttggaagacagaattttcatccattaaagaggaagagttcattgctgttgaaactcatagctgttgtctttgctgtgcttctattttgtgaatttttaatctattacttagcgatctttcagtgtaattggcctgaagtgaaaaccacagcctctgatggtgaacagaccacacgtgagcctgtgctcaaagccatgtttttggctgacacccatttgcttggggaattcctaggccactggctggacaaattacgaagggaatggcagatggagagagcgttccagacagctctgtggttgctgcagccggaagtcgtcttcatcctgggggatatctttgatgaagggaagtggagcacccctgaggcctgggcggatgatgtggagcggtttcagaaaatgttcagacacccaagtcatgtacagctgaaggtagttgctggaaaccatgacattggcttccattatgagatgaacacatacaaagtagaacgctttgagaaagtgttcagctctgaaagactgttttcttggaaaggcattaactttgtgatggtcaacagcgtggcgctgaacggggatggctgtggcatctgctctgaaacagaagcagagctcattgaagtttctcacagactgaactgctcccgagaggtaggagagcatctgaatgccacaggtgccttctgtcccgtgttgctccgcttcggttgctcactcagccccctagcgcttcttgccctttgatgagggtcaggtgtgcggattaatggcctgacttgtacccagcaggcacgtggctccagccggtgtggacctgggcctctgctgcccacgtctgcccctgtcctcctgcaggtgagctgggggaggaaagggctcatggcagacagcaggcagcctgtggtttcacgatagccgcctgaactcctctctccaccccggacagcattatcctctgtatcggagaagtgatgctaactgttctggggaagacgctgctcctgcagaggaaagggacatcccatttaaggagaactatgacgtgctttcacgggaggcatcacaaaaggtttgccagggtgtcgtgatgctaattcatgtcacagtgtgactctcatcaccttgcatgtcaacaagcagagtgcccaggctagagcaggtgtttgctgaaacgttcatgacttagttatcacctggggggacaggggtggaggcctggctttcacagtatctcagattttcatttaatcgctttttttttttccagtaaacctacttctgtttcctaccctcaagtcagtaatagtctcagctattctttgtattcagagtttttcaccaacttaaatgtatttagaaatgtgaatggaactgaaaagtcaattttttagggacttaattaaaattaaaatgcattttcttatatagatttatataatacatattacattatacataatatataaatataagaaatatttataagataaatgtataaaatatttataaagataaaataccgtaaaaagtatataaaatctgggatgagaacaaagggctgaccttacctttgatttagtgtaaataaaccaaaggatttttaaggaaaaaaataaaccagtccttcaaaataaggatttagtatgtaatttaaggaaagaagcgatggccagcggccgtcctgctgagcggtgagagcctggttgaggatgagctaacagcctgctttgctgtcttctcggccactgtcagctgctgtggtggctccagccgcgcctggttctcagtggccacacgcacagcgcctgcgaggtgcaccacgggggccgagtccccgagctcagcgtcccatctttcagttggaggaacagaaacaaccccagtttcatcatgggaacagatgcttagttgagcatcaaggggcaggaagacacctttccctccttgttcctcgctgaccgatgaccctggaactccacggtgcctctctgaatctctgttatggatcccccactatatttgatgggaacccagtgagccaggggccagttttgacagggtagcatcacgcccacagactacaccctctccaagtgctacctcccacgtgaggatgtggttttgatcatctactgtggagtggtgggcttccttgtggtcctcacactcactcactttgggcttctagcctcaccttttctttctggtttgaacttgctcggaaagcgtaagacaagatgaagagcaggcgccattataaatatcaaagcccaagaaatggaactttgggcagagatcatgttagaatcaagtggatgatgagaccaattacaggccgtctctctgcacagcacagaaattctcaatcactgaaatgagtaactgcaaaataaatagttgattgtactgttctcatgctataaaagtggacaggtactctacaacaaatctgttttctcatttttatcaaatatatgtatcatcaaaggttgcatctgtacagtatgtaaatgctattaatgtcgtcactcacatgcacgacagtccttgttcccccaggaagggcctggtggccccagcacacacttgggattatgtgtatacataaataaatattgggctgtttccctcttcctgtgaagtggttctcaaattcctatgtactgtaaagctgtacccttaaaagtacagatgtggccgggcacagtggctcacacctgtaatcccagcactttgggaggctgaggcgggtggatcacttgaggtcaggagttcaagaccagcctggccaacatggtgaaacctcgtctccgctagaaatacaaaaattagccaagcatggtagcaagtgcctataataccagctgaggctgaggcaggagaatcccttgagcccgggaggcggaggttgcagtgagccaagatcatgccactgcactccagcctgggcaacagagtgagactccgtctcaaaaaatatatttaaaaaaaaaaaagtacagatgtgatgtgcagaacatattgttttcgtagatttttatacttgatcaattaatggaatcagatttttagataagtgtaattttctctataggagaccacgttgctacatctgttaatgcctgtcagtgatcaaaagaaacttaaaaagtggaatgggatatggcttttggtacctgaaaataaatgctttaataattgtaagccagataaaagttattctttttgttttttttcttaacagtctggctgttgtttgaattaaactcttaaacaggatgtttagttagagggtaattgttgagtaatgatgcatacaacagcatacttccctttcttgctgggggtgcagcttttcagttttcttgttttactttgacagtgcaaggggaactgaaaataatttccattgtattatttatcttagttcagctgagggctttatgagacagtggatggggaggcagtaagacggtgatgagataaaatgtgtgtgttgcactgactgtctataaagttatcctttcttcatgaaaaagtagcatttaaatctggatgagtttataaaggattacaaaatgctgatttatagagtaaactttaaaatattaaagactaaagactaaaagaagagtaataatgaagtaatgtaggctgtcacttctctagatttgtattgttgaaaatttaactttggacatctttatagattattattttagacctacaaaaactaccctcaactctgtggctacagctagaatatgaagcatcattgctacaccagttcttactttctagatattgttggtgtgtcataatgtttgaggctgtatttgtaagtcttgcaagtgtgagaaagagccgtatcttttgactttatacttcagattaaggttttgtaatgtttcttcttcaaaaggcaagtgaagctgtcatcctcattctcctaggccagacacaaacattgacacgtcaaggtttttttttttttttttttttggcctgagtctcactttgatgtccaggctggagtgcgatggcacgacctcggctcactgcaat

SEQ ID NO: 23698 - DNA, 4660 bp, Homo sapiens
ctgggtgcgcgccggctccggctgcagttcccgggtccctcggccaccgaagccaccctgccctggtgaaagggctcccgcaccgcccggtgctccccatctgcctggcgttgtgcgcagagctggaaagcatggctgttataaatgaattctgattttggggagcagatgccaacttagagcctcgtaccaatctctctgtctttaaaagatgaggtgacttggtgattttcctggaaaattatagaagcactgaggtggacactgcgggttgtgaggttcaggagggaggctctccagcagagaacccaggcccttcaccatactggtgcatggttcctgccacttgtgcagtccattccgaagtttcttacagatgagaatattaatgaaactttatcatcttggtgagaaaagcattctaatagctttattctgacatacggaggtatggagagcttgaaggagtcagagaggtgcccagctaagacctgaatgccatcaccctccccagggctctgcagttttctcgtggtgaacccttgatggatttgttgttgcttgagaaatggcgatgatcgaattggggtttggaagacagaattttcatccattaaagaggaagagttcattgctgttgaaactcatagctgttgtctttgctgtgcttctattttgtgaatttttaatctattacttagcgatctttcagtgtaattggcctgaagtgaaaaccacagcctctgatggtgaacagaccacacgtgagcctgtgctcaaagccatgtttttggctgacacccatttgcttggggaattcctaggccactggctggacaaattacgaagggaatggcagatggagagagcgttccagacagctctgtggttgctgcagccggaagtcgtcttcatcctgggggatatctttgatgaagggaagtggagcacccctgaggcctgggcggatgatgtggagcggtttcagaaaatgttcagacacccaagtcatgtacagctgaaggtagttgctggaaaccatgacattggcttccattatgagatgaacacatacaaagtagaacgctttgagaaagtgttcagctctgaaagactgttttcttggaaaggcattaactttgtgatggtcaacagcgtggcgctgaacggggatggctgtggcatctgctctgaaacagaagcagagctcattgaagtttctcacagactgaactgctcccgagaggtaggagagcatctgaatgccacaggtgccttctgtcccgtgttgctccgcttcggttgctcactcagccccctagcgcttcttgccctttgatgagggtcaggtgtgcggattaatggcctgacttgtacccagcaggcacgtggctccagccggtgtggacctgggcctctgctgcccacgtctgcccctgtcctcctgcaggtgagctgggggaggaaagggctcatggcagacagcaggcagcctgtggtttcacgatagccgcctgaactcctctctccaccccggacagcattatcctctgtatcggagaagtgatgctaactgttctggggaagacgctgctcctgcagaggaaagggacatcccatttaaggagaactatgacgtgctttcacgggaggcatcacaaaaggtttgccagggtgtcgtgatgctaattcatgtcacagtgtgactctcatcaccttgcatgtcaacaagcagagtgcccaggctagagcaggtgtttgctgaaacgttcatgacttagttatcacctggggggacaggggtggaggcctggctttcacagtatctcagattttcatttaatcgctttttttttttccagtaaacctacttctgtttcctaccctcaagtcagtaatagtctcagctattctttgtattcagagtttttcaccaacttaaatgtatttagaaatgtgaatggaactgaaaagtcaattttttagggacttaattaaaattaaaatgcattttcttatatagatttatataatacatattacattatacataatatataaatataagaaatatttataagataaatgtataaaatatttataaagataaaataccgtaaaaagtatataaaatctgggatgagaacaaagggctgaccttacctttgatttagtgtaaataaaccaaaggatttttaaggaaaaaaataaaccagtccttcaaaataaggatttagtatgtaatttaaggaaagaagcgatggccagcggccgtcctgctgagcggtgagagcctggttgaggatgagctaacagcctgctttgctgtcttctcggccactgtcagctgctgtggtggctccagccgcgcctggttctcagtggccacacgcacagcgcctgcgaggtgcaccacgggggccgagtccccgagctcagcgtcccatctttcagttggaggaacagaaacaaccccagtttcatcatgggaacagatgcttagttgagcatcaaggggcaggaagacacctttccctccttgttcctcgctgaccgatgaccctggaactccacggtgcctctctgaatctctgttatggatcccccactatatttgatgggaacccagtgagccaggggccagttttgacagggtagcatcacgcccacagactacaccctctccaagtgctacctcccacgtgaggatgtggttttgatcatctactgtggagtggtgggcttccttgtggtcctcacactcactcactttgggcttctagcctcaccttttctttctggtttgaacttgctcggaaagcgtaagacaagatgaagagcaggcgccattataaatatcaaagcccaagaaatggaactttgggcagagatcatgttagaatcaagtggatgatgagaccaattacaggccgtctctctgcacagcacagaaattctcaatcactgaaatgagtaactgcaaaataaatagttgattgtactgttctcatgctataaaagtggacaggtactctacaacaaatctgttttctcatttttatcaaatatatgtatcatcaaaggttgcatctgtacagtatgtaaatgctattaatgtcgtcactcacatgcacgacagtccttgttcccccaggaagggcctggtggccccagcacacacttgggattatgtgtatacataaataaatattgggctgtttccctcttcctgtgaagtggttctcaaattcctatgtactgtaaagctgtacccttaaaagtacagatgtggccgggcacagtggctcacacctgtaatcccagcactttgggaggctgaggcgggtggatcacttgaggtcaggagttcaagaccagcctggccaacatggtgaaacctcgtctccgctagaaatacaaaaattagccaagcatggtagcaagtgcctataataccagctgaggctgaggcaggagaatcccttgagcccgggaggcggaggttgcagtgagccaagatcatgccactgcactccagcctgggcaacagagtgagactccgtctcaaaaaatatatttaaaaaaaaaaaagtacagatgtgatgtgcagaacatattgttttcgtagatttttatacttgatcaattaatggaatcagatttttagataagtgtaattttctctataggagaccacgttgctacatctgttaatgcctgtcagtgatcaaaagaaacttaaaaagtggaatgggatatggcttttggtacctgaaaataaatgctttaataattgtaagccagataaaagttattctttttgttttttttcttaacagtctggctgttgtttgaattaaactcttaaacaggatgtttagttagagggtaattgttgagtaatgatgcatacaacagcatacttccctttcttgctgggggtgcagcttttcagttttcttgttttactttgacagtgcaaggggaactgaaaataatttccattgtattatttatcttagttcagctgagggctttatgagacagtggatggggaggcagtaagacggtgatgagataaaatgtgtgtgttgcactgactgtctataaagttatcctttcttcatgaaaaagtagcatttaaatctggatgagtttataaaggattacaaaatgctgatttatagagtaaactttaaaatattaaagactaaagactaaaagaagagtaataatgaagtaatgtaggctgtcacttctctagatttgtattgttgaaaatttaactttggacatctttatagattattattttagacctacaaaaactaccctcaactctgtggctacagctagaatatgaagcatcattgctacaccagttcttactttctagatattgttggtgtgtcataatgtttgaggctgtatttgtaagtcttgcaagtgtgagaaagagccgtatcttttgactttatacttcagattaaggttttgtaatgtttcttcttcaaaaggcaagtgaagctgtcatcctcattctcctaggccagacacaaacattgacacgtcaaggtttttttttttttttttttttggcctgagtctcactttgatgtccaggctggagtgcgatggcacgacctcggctcactgcaat

SEQ ID NO: 23699 - DNA, 3006 bp, Homo sapiens
ctgggtgcgcgccggctccggctgcagttcccgggtccctcggccaccgaagccaccctgccctggtgaaagggctcccgcaccgcccggtgctccccatctgcctggcgttgtgcgcagagctggaaagcatggctgttataaatgaattctgattttggggagcagatgccaacttagagcctcgtaccaatctctctgtctttaaaagatgaggtgacttggtgattttcctggaaaattataggtgcccagctaagacctgaatgccatcaccctccccagggctctgcagttttctcgtggtgaacccttgatggatttgttgttgcttgagaaatggcgatgatcgaattggggtttggaagacagaattttcatccattaaagaggaagagttcattgctgttgaaactcatagctgttgtctttgctgtgcttctattttgtgaatttttaatctattacttagcgatctttcagtgtaattggcctgaagtgaaaaccacagcctctgatggtgaacagaccacacgtgagcctgtgctcaaagccatgtttttggctgacacccatttgcttggggaattcctaggccactggctggacaaattacgaagggaatggcagatggagagagcgttccagacagctctgtggttgctgcagccggaagtcgtcttcatcctgggggatatctttgatgaagggaagtggagcacccctgaggcctgggcggatgatgtggagcggtttcagaaaatgttcagacacccaagtcatgtacagctgaaggtagttgctggaaaccatgacattggcttccattatgagatgaacacatacaaagtagaacgctttgagaaagtgttcagctctgaaagactgttttcttggaaaggcattaactttgtgatggtcaacagcgtggcgctgaacggggatggctgtggcatctgctctgaaacagaagcagagctcattgaagtttctcacagactgaactgctcccgagaggtaggagagcatctgaatgccacaggtgccttctgtcccgtgttgctccgcttcggttgctcactcagccccctagcgcttcttgccctttgatgagggtcaggtgtgcggattaatggcctgacttgtacccagcaggcacgtggctccagccggtgtggacctgggcctctgctgcccacgtctgcccctgtcctcctgcaggtgagctgggggaggaaagggctcatggcagacagcaggcagcctgtggtttcacgatagccgcctgaactcctctctccaccccggacagcattatcctctgtatcggagaagtgatgctaactgttctggggaagacgctgctcctgcagaggaaagggacatcccatttaaggagaactatgacgtgctttcacgggaggcatcacaaaaggtttgccagggtgtcgtgatgctaattcatgtcacagtgtgactctcatcaccttgcatgtcaacaagcagagtgcccaggctagagcaggtgtttgctgaaacgttcatgacttagttatcacctggggggacaggggtggaggcctggctttcacagtatctcagattttcatttaatcgctttttttttttccagtaaacctacttctgtttcctaccctcaagtcagtaatagtctcagctattctttgtattcagagtttttcaccaacttaaatgtatttagaaatgtgaatggaactgaaaagtcaattttttagggacttaattaaaattaaaatgcattttcttatatagatttatataatacatattacattatacataatatataaatataagaaatatttataagataaatgtataaaatatttataaagataaaataccgtaaaaagtatataaaatctgggatgagaacaaagggctgaccttacctttgatttagtgtaaataaaccaaaggatttttaaggaaaaaaataaaccagtccttcaaaataaggatttagtatgtaatttaaggaaagaagcgatggccagcggccgtcctgctgagcggtgagagcctggttgaggatgagctaacagcctgctttgctgtcttctcggccactgtcagctgctgtggtggctccagccgcgcctggttctcagtggccacacgcacagcgcctgcgaggtgcaccacgggggccgagtccccgagctcagcgtcccatctttcagttggaggaacagaaacaaccccagtttcatcatgggaacagatgcttagttgagcatcaaggggcaggaagacacctttccctccttgttcctcgctgaccgatgaccctggaactccacggtgcctctctgaatctctgttatggatcccccactatatttgatgggaacccagtgagccaggggccagttttgacagggtagcatcacgcccacagactacaccctctccaagtgctacctcccacgtgaggatgtggttttgatcatctactgtggagtggtgggcttccttgtggtcctcacactcactcactttgggcttctagcctcaccttttctttctggtttgaacttgctcggaaagcgtaagacaagatgaagagcaggcgccattataaatatcaaagcccaagaaatggaactttgggcagagatcatgttagaatcaagtggatgatgagaccaattacaggccgtctctctgcacagcacagaaattctcaatcactgaaatgagtaactgcaaaataaatagttgattgtactgttctcatgctataaaagtggacaggtactctacaacaaatctgttttctcatttttatcaaatatatgtatcatcaaaggttgcatctgtacagtatgtaaatgctattaatgtcgtcactcacatgcacgacagtccttgttcccccaggaagggcctggtggccccagcacacacttgggattatgtgtatacataaataaatattgggctgtttccctcttcctgtga

SEQ ID NO: 23700 - DNA, 5314 bp, Homo sapiens
ctgggtgcgcgccggctccggctgcagttcccgggtccctcggccaccgaagccaccctgccctggtgaaagggctcccgcaccgcccggtgctccccatctgcctggcgttgtgcgcagagctggaaagcatggctgttataaatgaattctgattttggggagcagatgccaacttagagcctcgtaccaatctctctgtctttaaaagatgaggtgacttggtgattttcctggaaaattataggtgcccagctaagacctgaatgccatcaccctccccagggctctgcagttttctcgtggtgaacccttgatggatttgttgttgcttgagaaatggcgatgatcgaattggggtttggaagacagaattttcatccattaaagaggaagagttcattgctgttgaaactcatagctgttgtctttgctgtgcttctattttgtgaatttttaatctattacttagcgatctttcagtgtaattggcctgaagtgaaaaccacagcctctgatggtgaacagaccacacgtgagcctgtgctcaaagccatgtttttggctgacacccatttgcttggggaattcctaggccactggctggacaaattacgaagggaatggcagatggagagagcgttccagacagctctgtggttgctgcagccggaagtcgtcttcatcctgggggatatctttgatgaagggaagtggagcacccctgaggcctgggcggatgatgtggagcggtttcagaaaatgttcagacacccaagtcatgtacagctgaaggtagttgctggaaaccatgacattggcttccattatgagatgaacacatacaaagtagaacgctttgagaaagtgttcagctctgaaagactgttttcttggaaaggcattaactttgtgatggtcaacagcgtggcgctgaacggggatggctgtggcatctgctctgaaacagaagcagagctcattgaagtttctcacagactgaactgctcccgagaggtaggagagcatctgaatgccacaggtgccttctgtcccgtgttgctccgcttcggttgctcactcagccccctagcgcttcttgccctttgatgagggtcaggtgtgcggattaatggcctgacttgtacccagcaggcacgtggctccagccggtgtggacctgggcctctgctgcccacgtctgcccctgtcctcctgcaggtgagctgggggaggaaagggctcatggcagacagcaggcagcctgtggtttcacgatagccgcctgaactcctctctccaccccggacagcattatcctctgtatcggagaagtgatgctaactgttctggggaagacgctgctcctgcagaggaaagggacatcccatttaaggagaactatgacgtgctttcacgggaggcatcacaaaaggtttgccagggtgtcgtgatgctaattcatgtcacagtgtgactctcatcaccttgcatgtcaacaagcagagtgcccaggctagagcaggtgtttgctgaaacgttcatgacttagttatcacctggggggacaggggtggaggcctggctttcacagtatctcagattttcatttaatcgctttttttttttccagtaaacctacttctgtttcctaccctcaagtcagtaatagtctcagctattctttgtattcagagtttttcaccaacttaaatgtatttagaaatgtgaatggaactgaaaagtcaattttttagggacttaattaaaattaaaatgcattttcttatatagatttatataatacatattacattatacataatatataaatataagaaatatttataagataaatgtataaaatatttataaagataaaataccgtaaaaagtatataaaatctgggatgagaacaaagggctgaccttacctttgatttagtgtaaataaaccaaaggatttttaaggaaaaaaataaaccagtccttcaaaataaggatttagtatgtaatttaaggaaagaagcgatggccagcggccgtcctgctgagcggtgagagcctggttgaggatgagctaacagcctgctttgctgtcttctcggccactgtcagctgctgtggtggctccagccgcgcctggttctcagtggccacacgcacagcgcctgcgaggtgcaccacgggggccgagtccccgagctcagcgtcccatctttcagttggaggaacagaaacaaccccagtttcatcatggtaacgtgaaagtttatttttgtctgaaagctttcataagtatttaaatcaacacagtaatcaactatttaattgctgcaatcggtcaaaatttacaaaagccacacacaaatttctctccttctacacgtagctccatacactgccccttgccaaacacccttccgggaaccaatcagcatgacattcctgggcagttaatgtgagaagcgagggcagggcaccgtccaggtggactttatccttcagggagggccgtatcctctcctcttacactctgtgtgtgtttaattttctaaagaaacaaccatttattcattagctatactcagccatcttctcttattttctaaacatgcccatttgacctggcagagaacgctgcagcttttgcaggttgataaaagatgtttcacttaatgaccactgggcgttttaactcctttcagccatgggctcctgcatccagctcatgatgctggtacgacaggttcttttacttcataaaaaggtggaggaaaccctaacattttcaaattcaaagtaaatgaaaacatttgccactgttgttccacataaaagtatctgcaaagaaaagcccatggagacgacctggacacatgtatttctagggaacagatgcttagttgagcatcaaggggcaggaagacacctttccctccttgttcctcgctgaccgatgaccctggaactccacggtgcctctctgaatctctgttatggatcccccactatatttgatgggaacccagtgagccaggggccagttttgacaggtcagtgtcccagacattttccactcaggcacacttgggccttacttgtctctcctgctggagcctgggctggtcgggggtgagctgtgcagggagaaggctgggcccccttggtctcaggtgaggagggcccgttccctgcctcacctgagggggacctgagaaggcagtcttccctctgctgtttctaagactgcggtgttcaacgtgtgcctggtgctctcagcataactttcccttctcctttccagggtagcatcacgcccacagactacaccctctccaagtgctacctcccacgtgaggatgtggttttgatcatctactgtggagtggtgggcttccttgtggtcctcacactcactcactttgggcttctagcctcaccttttctttctggtttgaacttgctcggaaagcgtaagacaagatgaagagcaggcgccattataaatatcaaagcccaagaaatggaactttgggcagagatcatgttagaatcaagtggatgatgagaccaattacaggccgtctctctgcacagcacagaaattctcaatcactgaaatgagtaactgcaaaataaatagttgattgtactgttctcatgctataaaagtggacaggtactctacaacaaatctgttttctcatttttatcaaatatatgtatcatcaaaggttgcatctgtacagtatgtaaatgctattaatgtcgtcactcacatgcacgacagtccttgttcccccaggaagggcctggtggccccagcacacacttgggattatgtgtatacataaataaatattgggctgtttccctcttcctgtgaagtggttctcaaattcctatgtactgtaaagctgtacccttaaaagtacagatgtggccgggcacagtggctcacacctgtaatcccagcactttgggaggctgaggcgggtggatcacttgaggtcaggagttcaagaccagcctggccaacatggtgaaacctcgtctccgctagaaatacaaaaattagccaagcatggtagcaagtgcctataataccagctgaggctgaggcaggagaatcccttgagcccgggaggcggaggttgcagtgagccaagatcatgccactgcactccagcctgggcaacagagtgagactccgtctcaaaaaatatatttaaaaaaaaaaaagtacagatgtgatgtgcagaacatattgttttcgtagatttttatacttgatcaattaatggaatcagatttttagataagtgtaattttctctataggagaccacgttgctacatctgttaatgcctgtcagtgatcaaaagaaacttaaaaagtggaatgggatatggcttttggtacctgaaaataaatgctttaataattgtaagccagataaaagttattctttttgttttttttcttaacagtctggctgttgtttgaattaaactcttaaacaggatgtttagttagagggtaattgttgagtaatgatgcatacaacagcatacttccctttcttgctgggggtgcagcttttcagttttcttgttttactttgacagtgcaaggggaactgaaaataatttccattgtattatttatcttagttcagctgagggctttatgagacagtggatggggaggcagtaagacggtgatgagataaaatgtgtgtgttgcactgactgtctataaagttatcctttcttcatgaaaaagtagcatttaaatctggatgagtttataaaggattacaaaatgctgatttatagagtaaactttaaaatattaaagactaaagactaaaagaagagtaataatgaagtaatgtaggctgtcacttctctagatttgtattgttgaaaatttaactttggacatctttatagattattattttagacctacaaaaactaccctcaactctgtggctacagctagaatatgaagcatcattgctacaccagttcttactttctagatattgttggtgtgtcataatgtttgaggctgtatttgtaagtcttgcaagtgtgagaaagagccgtatcttttgactttatacttcagattaaggttttgtaatgtttcttcttcaaaaggcaagtgaagctgtcatcctcattctcctaggccagacacaaacattgacacgtcaaggtttttttttttttttttttttggcctgagtctcactttgatgtccaggctggagtgcgatggcacgacctcggctcactgcaat

SEQ ID NO: 23701 - DNA, 4698 bp, Homo sapiens
ggggcctgttcctgcacaccacagtgtctggggtgtgtggaagggatggccggactcttctctgatacttaattccccacctttaatcagatatggactctttggcccttcaagccagggatgggaatgcaagagtggggctctggaagaaggagagtggaaccatttagtttgctgtttaaatggtgcataatacagaagtagcctccacctaggaaagagactgatgccttactttttcctattggcatcaagggaatggcagatggagagagcgttccagacagctctgtggttgctgcagccggaagtcgtcttcatcctgggggatatctttgatgaagggaagtggagcacccctgaggcctgggcggatgatgtggagcggtttcagaaaatgttcagacacccaagtcatgtacagctgaaggtagttgctggaaaccatgacattggcttccattatgagatgaacacatacaaagtagaacgctttgagaaagtgttcagctctgaaagactgttttcttggaaaggcattaactttgtgatggtcaacagcgtggcgctgaacggggatggctgtggcatctgctctgaaacagaagcagagctcattgaagtttctcacagactgaactgctcccgagaggtaggagagcatctgaatgccacaggtgccttctgtcccgtgttgctccgcttcggttgctcactcagccccctagcgcttcttgccctttgatgagggtcaggtgtgcggattaatggcctgacttgtacccagcaggcacgtggctccagccggtgtggacctgggcctctgctgcccacgtctgcccctgtcctcctgcaggtgagctgggggaggaaagggctcatggcagacagcaggcagcctgtggtttcacgatagccgcctgaactcctctctccaccccggacagcattatcctctgtatcggagaagtgatgctaactgttctggggaagacgctgctcctgcagaggaaagggacatcccatttaaggagaactatgacgtgctttcacgggaggcatcacaaaaggtttgccagggtgtcgtgatgctaattcatgtcacagtgtgactctcatcaccttgcatgtcaacaagcagagtgcccaggctagagcaggtgtttgctgaaacgttcatgacttagttatcacctggggggacaggggtggaggcctggctttcacagtatctcagattttcatttaatcgctttttttttttccagtaaacctacttctgtttcctaccctcaagtcagtaatagtctcagctattctttgtattcagagtttttcaccaacttaaatgtatttagaaatgtgaatggaactgaaaagtcaattttttagggacttaattaaaattaaaatgcattttcttatatagatttatataatacatattacattatacataatatataaatataagaaatatttataagataaatgtataaaatatttataaagataaaataccgtaaaaagtatataaaatctgggatgagaacaaagggctgaccttacctttgatttagtgtaaataaaccaaaggatttttaaggaaaaaaataaaccagtccttcaaaataaggatttagtatgtaatttaaggaaagaagcgatggccagcggccgtcctgctgagcggtgagagcctggttgaggatgagctaacagcctgctttgctgtcttctcggccactgtcagctgctgtggtggctccagccgcgcctggttctcagtggccacacgcacagcgcctgcgaggtgcaccacgggggccgagtccccgagctcagcgtcccatctttcagttggaggaacagaaacaaccccagtttcatcatggtaacgtgaaagtttatttttgtctgaaagctttcataagtatttaaatcaacacagtaatcaactatttaattgctgcaatcggtcaaaatttacaaaagccacacacaaatttctctccttctacacgtagctccatacactgccccttgccaaacacccttccgggaaccaatcagcatgacattcctgggcagttaatgtgagaagcgagggcagggcaccgtccaggtggactttatccttcagggagggccgtatcctctcctcttacactctgtgtgtgtttaattttctaaagaaacaaccatttattcattagctatactcagccatcttctcttattttctaaacatgcccatttgacctggcagagaacgctgcagcttttgcaggttgataaaagatgtttcacttaatgaccactgggcgttttaactcctttcagccatgggctcctgcatccagctcatgatgctggtacgacaggttcttttacttcataaaaaggtggaggaaaccctaacattttcaaattcaaagtaaatgaaaacatttgccactgttgttccacataaaagtatctgcaaagaaaagcccatggagacgacctggacacatgtatttctagggaacagatgcttagttgagcatcaaggggcaggaagacacctttccctccttgttcctcgctgaccgatgaccctggaactccacggtgcctctctgaatctctgttatggatcccccactatatttgatgggaacccagtgagccaggggccagttttgacagggtagcatcacgcccacagactacaccctctccaagtgctacctcccacgtgaggatgtggttttgatcatctactgtggagtggtgggcttccttgtggtcctcacactcactcactttgggcttctagcctcaccttttctttctggtttgaacttgctcggaaagcgtaagacaagatgaagagcaggcgccattataaatatcaaagcccaagaaatggaactttgggcagagatcatgttagaatcaagtggatgatgagaccaattacaggccgtctctctgcacagcacagaaattctcaatcactgaaatgagtaactgcaaaataaatagttgattgtactgttctcatgctataaaagtggacaggtactctacaacaaatctgttttctcatttttatcaaatatatgtatcatcaaaggttgcatctgtacagtatgtaaatgctattaatgtcgtcactcacatgcacgacagtccttgttcccccaggaagggcctggtggccccagcacacacttgggattatgtgtatacataaataaatattgggctgtttccctcttcctgtgaagtggttctcaaattcctatgtactgtaaagctgtacccttaaaagtacagatgtggccgggcacagtggctcacacctgtaatcccagcactttgggaggctgaggcgggtggatcacttgaggtcaggagttcaagaccagcctggccaacatggtgaaacctcgtctccgctagaaatacaaaaattagccaagcatggtagcaagtgcctataataccagctgaggctgaggcaggagaatcccttgagcccgggaggcggaggttgcagtgagccaagatcatgccactgcactccagcctgggcaacagagtgagactccgtctcaaaaaatatatttaaaaaaaaaaaagtacagatgtgatgtgcagaacatattgttttcgtagatttttatacttgatcaattaatggaatcagatttttagataagtgtaattttctctataggagaccacgttgctacatctgttaatgcctgtcagtgatcaaaagaaacttaaaaagtggaatgggatatggcttttggtacctgaaaataaatgctttaataattgtaagccagataaaagttattctttttgttttttttcttaacagtctggctgttgtttgaattaaactcttaaacaggatgtttagttagagggtaattgttgagtaatgatgcatacaacagcatacttccctttcttgctgggggtgcagcttttcagttttcttgttttactttgacagtgcaaggggaactgaaaataatttccattgtattatttatcttagttcagctgagggctttatgagacagtggatggggaggcagtaagacggtgatgagataaaatgtgtgtgttgcactgactgtctataaagttatcctttcttcatgaaaaagtagcatttaaatctggatgagtttataaaggattacaaaatgctgatttatagagtaaactttaaaatattaaagactaaagactaaaagaagagtaataatgaagtaatgtaggctgtcacttctctagatttgtattgttgaaaatttaactttggacatctttatagattattattttagacctacaaaaactaccctcaactctgtggctacagctagaatatgaagcatcattgctacaccagttcttactttctagatattgttggtgtgtcataatgtttgaggctgtatttgtaagtcttgcaagtgtgagaaagagccgtatcttttgactttatacttcagattaaggttttgtaatgtttcttcttcaaaaggcaagtgaagctgtcatcctcattctcctaggccagacacaaacattgacacgtcaaggtttttttttttttttttttttggcctgagtctcactttgatgtccaggctggagtgcgatggcacgacctcggctcactgcaat

SEQ ID NO: 23702 - DNA, 754 bp, Homo sapiens
ctgggtgcgcgccggctccggctgcagttcccgggtccctcggccaccgaagccaccctgccctggtgaaagggctcccgcaccgcccggtgctccccatctgcctggcgttgtgcgcagagctggaaagcatggctgttataaatgaattctgattttggggagcagatgccaacttagagcctcgtaccaatctctctgtctttaaaagatgaggtgacttggtgattttcctggaaaattatagaggctctccagcagagaacccaggcccttcaccatactggtgcatggttcctgccacttgtgcagtccattccgaagtttcttacagatgaggtgcccagctaagacctgaatgccatcaccctccccagggctctgcagttttctcgtggtgaacccttgatggatttgttgttgcttgagaaatggcgatgatcgaattggggtttggaagacagaattttcatccattaaagaggaagagttcattgctgttgaaactcatagctgttgtctttgctgtgcttctattttgtgaatttttaatctattacttagcgatctttcagtgtaattggcctgaagtgaaaaccacagcctctgatggtgaacagaccacacgtgagcctgtgctcaaagccatgtttttggctgacacccatttgcttggggaattcctaggccactggctggacaaattacgaagagatggagttttgctgtgttgcccatgctggttttgaactcc

SEQ ID NO: 23703 - DNA, 504 bp, Homo sapiens
ctcaactgttcctatatgctattctgagtctaattgcaagctcttttttccttagcacaactcagcaagaaaaggatctaatagaagattcctctgttcagaaggatggtctcaatcagacaactataccagtttctcctccaagtactacaaagccatcgagggcaagtactgcttcaccatgtaataataacataaatgcagctacagctgtggctctacaggtaacttgaagattttagtttatgttaaaaaaaatacaatagattagatttttttttttttttcacgtaacactttgttagaacagagtcatttggaagtagcccaagttggggctgactatcagaaagaagcttaaggagtgttagggtcactgcaaagagatggaaagttttaggctgaggtgggagaattgcttgaacccaggaggcagaggctgcagtgagctgagatcgcaccactgcacttcagcctggacgacagcaagaccccatttcaaaa

SEQ ID NO: 23704 - DNA, 4814 bp, Homo sapiens
tctgatgttgttaaaggtgtctacaaagaaaaggataatgaagagttgacaattagttgcccagtgcctgcagatgagcagacagaatgcacttctgcccagcaactcaatatgagtaccagttctccatgtgctgctgagcttactgcattaagcacaactcagcaagaaaaggatctaatagaagattcctctgttcagaaggatggtctcaatcagacaactataccagtttctcctccaagtactacaaagccatcgagggcaagtactgcttcaccatgtaataataacataaatgcagctacagctgtggctctacaggaaccccgaaagttaagttatgctgaagtgtgccagaagccccctaaagagccatcttcagttcttgtgcagccactacgggaacttcgctccaatgtggtgtctcccaccaaaaatgaagacaatggagctcctgagaactccgttgagaaaccacatgagaagccagaagcaagggctagtaaggattattctggcttccgaggcaatataatccccaggggagcagcaggaaaaatcagggaacagagacgccagtttagccatagggctatacctcagggagtgactcgacgtaatggcaaagagcaatatgtgccacccagatcaccaaagtaaaaaacaacaaaactattcaaaaacttcactctcttcccattaaacttgaactgtggctatattgaactgttttggaggggagggggtagccaggaaggaaacaagagaaagtacgtccatttcattatggattttggagttgtgagtgataggatcccaaaattcatctctaatgtggtttttaaatgctggaggattccaatcaatataaatatatatatatatatacacacacatatataaaaagtataatttttctatttttgtttttggttttaatttgcagagatttgctgccaggaatcaattttgagggttcagatttagcttggaagaaaaaaaagaaacatacatccttcagtataggagatgagggaatgagagaaaatattttttgaagaagcatttctgtaaaattagaaattactttttttaatctatttaaagtttggcttgaagaatgccatctctgactatatggccttgtattgcaaagcagatcagtggctggggtgcctgttgtgggtgtgagtgtgtacaagagcgattgaagccaaatctgttgtcatgttagtaaatgatttgaaaactgaatgtaatacttgagtagatttttttttctagtttgaaatttagtctgtctttttgaccttactaatatttcatttaacaagttgtaaaactctgattgtacttagagatgtgactaccaatcagtttgatactcaaggaaagggggttattcaagaaattgaaaatttcatcttggacctcagtgcatcggtcaaatggatttcagaggtttaaacttccctgtgattccccctgaatacccccaaaatgagaaacaaaattttttttcttactccatttgttactctctgttctttgactgcccacccacagaaaagcaaaataaccaactacctactcaattgtgtgtttgtaattgctttgagcagtctagtcaaatcatataaattgttctaaatttcagaattgaacattgaagtattaactcttctgttcacacatttagaattttagctcccaagatggtagggcagactgaccgtacagtaatttatttgtcgttagtgttaaagattaagcatagtaactgactcttaagtgttaaataatgtagaagtaaaaaaatttttttaaaggcttaatttgggaggggggacttatttctgtttacagtgtattaccttccttccctcctcttctccccccacacccaacaaaatacagtttggaattcactgaaacagtaccagcaagtcatgagattttttagtaaagatgagaaagatggttgaagaaaattagtgcataatttctcagtgaataaagttgtagctctcatatactaaatagacaagtttacatgctgttatttagaaaatgactaaaatattaaaaaccgtgttgtgttaatctgttttaagtcataccatgttcagagttctatgtaaggtgggttttatttttcttttaagggatagtttgtaatagtaagaactgtcccatatgttagtaaattacatatgtacaaattgaaactgtaaattgtgaacactggaaagcaccattgtgacatagagtaaacatcttagtaatatattaaagtgaatgtaaatggtggttaaaattacattactgtgaaattcatcttccaactctaagttaagctttggagatacatgttagtggttaactgttaagagctttgaaaacactgcacatatctgtacaagccagaattactatttctttgacttattattagcttggcagttgcttttgatttgattgttttatgacatggtatactactatatttactcagtttgaaactattcatttctacacactatttttaaaaattgcctactaggtgaaacataacaataaaactacctgtgctgaaatttgggggaagtttaggtcctttaaaaaaacatattaatcattgactacatctatgataaaagtgcttattttggtttactaagataatgcagttggtggaaatgataaacgttttaagtgttaacatcctttgaatgcgttggatttcagagaataaacattttgtaaaaatcacttggtaaggattataaacttaattactgcacttaaaatgaaacattactttttttaaacaatgtgtcacaaatgtaggtctgtattacttgtatgcttgtgtgacttactgttagtccagctctaaaaatttaaaggttgtaattgaaatacaagaaaagagccttcttttagaagaaagcaagtatatttttgcttttacttcaaatgttatttaaagtagaaatttaatttgtagatataacctttaaaaattttctcattaagacaatgtttttaatttaatttgcctcattacatctaatagttcccatttgatggcatgtatagggaagagtgagagagtgtgtgtgtgtgtatgtgtgtgtaatatttatatatattcacagtatgtatttagcatttattttattacagcagatttaaagtttgtatctaaataatgcctatgagttgtgtgaagctcttggctttttttccaacgttactttgtaactaatgagggtggatgttcattgtagtttatttatttggttctttagatggaggaatttaaaaaatcaaatttttctcttcacctttatgacttgacatttccttgatctgttggaggctaaaagtaggtataaatgatattgaatgttgggtatagtgatactctgccatagttcttactgcatgaagagaacaagagtcacacaagttcaccactttgcacttcatagagaaggtacatagagacattgcaaaacctgtctccatttgctatcctgataattaaggttttcataatacctagggcctgtctctgagtaattttaattttgccaaatacactgacatttaaaatagtgatccatctaaatttttttcagctgggttttgaggaatataagagctttcaatgataaaggtttgttgtagttgtcttatgtgctgaatttgcagatgatcagatgctgtgcagaattctgatttatttttgtttcctaaaattaagatagcttgaatattatttcacattcctttttcttttttaaataaacaggtttgctttggaaaggcttaatgatggaatgttagcatcttcactagggtaaagaagaacaaaaagaatgttgctggaacgtaaaatagtatttaaaagttaatgaacacttctctagttttcttagttatggccttaataattagtctcttggcttaaatgtccactggttttactttgacacagttgaacaacactggggttaagtctctggtatttaggctggcaatatatatattaaccatattttaaaagtaccaattttgtttttacagaaaagataaaactcaaaagagaacagtgtattccttctgaggggcttttataaattattaactataatatatgatggattttttcctaattttttatatttccttacaattttggtggccattaatttaactttaggcttttgggcatatgctagtctgagcttccgaaaagatacatatatgtttcccttttcattagctgaatgaggatattttaagaagttgaaagagaatttattttcaagttgtgagtaaatcctcctttgaaattcacctgattattagataacttaaagtttatttttaaaagctgacaactttttatgaatcttcgagttgacagttcctaaaagcgtaactcagatattaatgggctgtgtattaaatggttttattttcagttttgcagcacagaacactgttgaaatatccatatcaacttgatttttttaacctaattcaggtgtcctttgcatctcttaaatgttgggggtgggggtcagagccagttatccggcttctgttttgtcgattgcttagatttgttcctgttgtcaaaactgttacccccaaaattggtgtgacacatgctcatgcataaaatgttaaaatgagtacatccttgtatttgtatttgttttcaacatcgccaaggtgctatgggaaattaacaaaattagaaaaaaaataaaattattaaaaagcaaaaaaaaaat

SEQ ID NO: 23705 - DNA, 1190 bp, Homo sapiens
aaggtgttcagaggatcccctcggatgcaagtgtcgaggaatataagagctttcaatgataaaggtttgttgtagttgtcttatgtgctgaatttgcagatgatcagatgctgtgcagaattctgatttatttttgtttcctaaaattaagatagcttgaatattatttcacattcctttttcttttttaaataaacaggtttgctttggaaaggcttaatgatggaatgttagcatcttcactagggtaaagaagaacaaaaagaatgttgctggaacgtaaaatagtatttaaaagttaatgaacacttctctagttttcttagttatggccttaataattagtctcttggcttaaatgtccactggttttactttgacacagttgaacaacactggggttaagtctctggtatttaggctggcaatatatatattaaccatattttaaaagtaccaattttgtttttacagaaaagataaaactcaaaagagaacagtgtattccttctgaggggcttttataaattattaactataatatatgatggattttttcctaattttttatatttccttacaattttggtggccattaatttaactttaggcttttgggcatatgctagtctgagcttccgaaaagatacatatatgtttcccttttcattagctgaatgaggatattttaagaagttgaaagagaatttattttcaagttgtgagtaaatcctcctttgaaattcacctgattattagataacttaaagtttatttttaaaagctgacaactttttatgaatcttcgagttgacagttcctaaaagcgtaactcagatattaatgggctgtgtattaaatggttttattttcagttttgcagcacagaacactgttgaaatatccatatcaacttgatttttttaacctaattcaggtgtcctttgcatctcttaaatgttgggggtgggggtcagagccagttatccggcttctgttttgtcgattgcttagatttgttcctgttgtcaaaactgttacccccaaaattggtgtgacacatgctcatgcataaaatgttaaaatgagtacatccttgtatttgtatttgttttcaacatcgccaaggtgctatgggaaattaacaaaattagaaaaaaaataaaattattaaaaagcaaaaaaaaaat

SEQ ID NO: 23706 - DNA, 2774 bp, Homo sapiens
tctgatgttgttaaaggtgtctacaaagaaaaggataatgaagagttgacaattagttgcccagtgcctgcagatgagcagacagaatgcacttctgcccagcaactcaatatgagtaccagttctccatgtgctgctgagcttactgcattaagcacaactcagcaagaaaaggatctaatagaagattcctctgttcagaaggatggtctcaatcagacaactataccagtttctcctccaagtactacaaagccatcgagggcaagtactgcttcaccatgtaataataacataaatgcagctacagctgtggctctacaggaaccccgaaagttaagttatgctgaagtgtgccagaagccccctaaagagccatcttcagttcttgtgcagccactacgggaacttcgctccaatgtggtgtctcccaccaaaaatgaagacaatggagctcctgagaactccgttgagaaaccacatgagaagccagaagcaagggctagtaaggattattctggcttccgaggcaatataatccccaggggagcagcaggaaaaatcagggaacagagacgccagtttagccatagggctatacctcagggagtgactcgacgtaatggcaaagagcaatatgtgccacccagatcaccaaagtaaaaaacaacaaaactattcaaaaacttcactctcttcccattaaacttgaactgtggctatattgaactgttttggaggggagggggtagccaggaaggaaacaagagaaagtacgtccatttcattatggattttggagttgtgagtgataggatcccaaaattcatctctaatgtggtttttaaatgctggaggattccaatcaatataaatatatatatatatatacacacacatatataaaaagtataatttttctatttttgtttttggttttaatttgcagagatttgctgccaggaatcaattttgagggttcagatttagcttggaagaaaaaaaagaaacatacatccttcagtataggagatgagggaatgagagaaaatattttttgaagaagcatttctgtaaaattagaaattactttttttaatctatttaaagtttggcttgaagaatgccatctctgactatatggccttgtattgcaaagcagatcagtggctggggtgcctgttgtgggtgtgagtgtgtacaagagcgattgaagccaaatctgttgtcatgttagtaaatgatttgaaaactgaatgtaatacttgagtagatttttttttctagtttgaaatttagtctgtctttttgaccttactaatatttcatttaacaagttgtaaaactctgattgtacttagagatgtgactaccaatcagtttgatactcaaggaaagggggttattcaagaaattgaaaatttcatcttggacctcagtgcatcggtcaaatggatttcagaggtttaaacttccctgtgattccccctgaatacccccaaaatgagaaacaaaattttttttcttactccatttgttactctctgttctttgactgcccacccacagaaaagcaaaataaccaactacctactcaattgtgtgtttgtaattgctttgagcagtctagtcaaatcatataaattgttctaaatttcagaattgaacattgaagtattaactcttctgttcacacatttagaattttagctcccaagatggtagggcagactgaccgtacagtaatttatttgtcgttagtgttaaagattaagcatagtaactgactcttaagtgttaaataatgtagaagtaaaaaaatttttttaaaggcttaatttgggaggggggacttatttctgtttacagtgtattaccttccttccctcctcttctccccccacacccaacaaaatacagtttggaattcactgaaacagtaccagcaagtcatgagattttttagtaaagatgagaaagatggttgaagaaaattagtgcataatttctcagtgaataaagttgtagctctcatatactaaatagacaagtttacatgctgttatttagaaaatgactaaaatattaaaaaccgtgttgtgttaatctgttttaagtcataccatgttcagagttctatgtaaggtgggttttatttttcttttaagggatagtttgtaatagtaagaactgtcccatatgttagtaaattacatatgtacaaattgaaactgtaaattgtgaacactggaaagcaccattgtgacatagagtaaacatcttagtaatatattaaagtgaatgtaaatggtggttaaaattacattactgtgaaattcatcttccaactctaagttaagctttggagatacatgttagtggttaactgttaagagctttgaaaacactgcacatatctgtacaagccagaattactatttctttgacttattattagcttggcagttgcttttgatttgattgttttatgacatggtatactactatatttactcagtttgaaactattcatttctacacactatttttaaaaattgcctactaggtgaaacataacaataaaactacctgtgctgaaatttgggggaagtttaggtcctttaaaaaaacatattaatcattgactacatctatgataaaagtgcttattttggtttactaagataatgcagttggtggaaatgataaacgttttaagtgttaacatcctttgaatgcgttggatttcagagaataaacattttgtaaaaatc

SEQ ID NO: 23707 - DNA, 1084 bp, Homo sapiens
gtgagcgttcagaggtcccctcggatgcaaggtcctaaaattaagatagcttgaatattatttcacattcctttttcttttttaaataaacaggtttgctttggaaaggcttaatgatggaatgttagcatcttcactagggtaaagaagaacaaaaagaatgttgctggaacgtaaaatagtatttaaaagttaatgaacacttctctagttttcttagttatggccttaataattagtctcttggcttaaatgtccactggttttactttgacacagttgaacaacactggggttaagtctctggtatttaggctggcaatatatatattaaccatattttaaaagtaccaattttgtttttacagaaaagataaaactcaaaagagaacagtgtattccttctgaggggcttttataaattattaactataatatatgatggattttttcctaattttttatatttccttacaattttggtggccattaatttaactttaggcttttgggcatatgctagtctgagcttccgaaaagatacatatatgtttcccttttcattagctgaatgaggatattttaagaagttgaaagagaatttattttcaagttgtgagtaaatcctcctttgaaattcacctgattattagataacttaaagtttatttttaaaagctgacaactttttatgaatcttcgagttgacagttcctaaaagcgtaactcagatattaatgggctgtgtattaaatggttttattttcagttttgcagcacagaacactgttgaaatatccatatcaacttgatttttttaacctaattcaggtgtcctttgcatctcttaaatgttgggggtgggggtcagagccagttatccggcttctgttttgtcgattgcttagatttgttcctgttgtcaaaactgttacccccaaaattggtgtgacacatgctcatgcataaaatgttaaaatgagtacatccttgtatttgtatttgttttcaacatcgccaaggtgctatgggaaattaacaaaattagaaaaaaaataaaattattaaaaagcaaaaaaaaaat

SEQ ID NO: 23708 - DNA, 1040 bp, Homo sapiens
actagttctagatcgcgagcggccgtccatttcttttttaaataaacaggtttgctttggaaaggcttaatgatggaatgttagcatcttcactagggtaaagaagaacaaaaagaatgttgctggaacgtaaaatagtatttaaaagttaatgaacacttctctagttttcttagttatggccttaataattagtctcttggcttaaatgtccactggttttactttgacacagttgaacaacactggggttaagtctctggtatttaggctggcaatatatatattaaccatattttaaaagtaccaattttgtttttacagaaaagataaaactcaaaagagaacagtgtattccttctgaggggcttttataaattattaactataatatatgatggattttttcctaattttttatatttccttacaattttggtggccattaatttaactttaggcttttgggcatatgctagtctgagcttccgaaaagatacatatatgtttcccttttcattagctgaatgaggatattttaagaagttgaaagagaatttattttcaagttgtgagtaaatcctcctttgaaattcacctgattattagataacttaaagtttatttttaaaagctgacaactttttatgaatcttcgagttgacagttcctaaaagcgtaactcagatattaatgggctgtgtattaaatggttttattttcagttttgcagcacagaacactgttgaaatatccatatcaacttgatttttttaacctaattcaggtgtcctttgcatctcttaaatgttgggggtgggggtcagagccagttatccggcttctgttttgtcgattgcttagatttgttcctgttgtcaaaactgttacccccaaaattggtgtgacacatgctcatgcataaaatgttaaaatgagtacatccttgtatttgtatttgttttcaacatcgccaaggtgctatgggaaattaacaaaattagaaaaaaaataaaattattaaaaagcaaaaaaaaaat

SEQ ID NO: 23709 - DNA, 439 bp, Homo sapiens
ttgaaaaatctttttactttaaggataatgaagagttgacaattagttgcccagtgcctgcagatgagcagacagaatgcacttctgcccagcaactcaatatgagtaccagttctccatgtgctgctgagcttactgcattaagcacaactcagcaagaaaaggatctaatagaagattcctctgttcagaaggatggtctcaatcagacaactataccagtttctcctccaagtactacaaagccatcgagggcaagtactgcttcaccatgtaataataacataaatgcagctacagctgtggctctacaggcatttaggtcgctcccatcattataaacaacgctgacatgaacatccttcagttaaattccttacgtgaaattattgtataataaataaagattgtaccagtgtactctaagcagtatatatga
